United States Patent Application Publication US 2019/0365929 A1 - sequence listing, part 2

SEQ ID NO: 6910 - DNA, 20 bp, Artificial Sequence
  Description of Artificial Sequence: Synthetic oligonucleotide
  Target: COL7A1; (+) strand; PAM type: NNGRRT; PAM sequence: GAGGGT
ggaacccagcaccgatcgcg

SEQ ID NO: 6911 - DNA, 20 bp, Artificial Sequence
  Description of Artificial Sequence: Synthetic oligonucleotide
  Target: COL7A1; (+) strand; PAM type: NNGRRT; PAM sequence: GGGAGT
caccgatcgcggagggttcg

SEQ ID NO: 6912 - DNA, 20 bp, Artificial Sequence
  Description of Artificial Sequence: Synthetic oligonucleotide
  Target: COL7A1; (+) strand; PAM type: NNGRRT; PAM sequence: CAGAAT
gcggagggttcggggagtcc

SEQ ID NO: 6913 - DNA, 20 bp, Artificial Sequence
  Description of Artificial Sequence: Synthetic oligonucleotide
  Target: COL7A1; (+) strand; PAM type: NNGRRT; PAM sequence: AGGAAT
cggggagtcccagaattagg

SEQ ID NO: 6914 - DNA, 20 bp, Artificial Sequence
  Description of Artificial Sequence: Synthetic oligonucleotide
  Target: COL7A1; (+) strand; PAM type: NNGRRT; PAM sequence: TGGAGT
gaggaatccgcggggcgtcg

SEQ ID NO: 6915 - DNA, 20 bp, Artificial Sequence
  Description of Artificial Sequence: Synthetic oligonucleotide
  Target: COL7A1; (+) strand; PAM type: NNGRRT; PAM sequence: CTGGGT
gcggggcgtcgtggagttgg

SEQ ID NO: 6916 - DNA, 20 bp, Artificial Sequence
  Description of Artificial Sequence: Synthetic oligonucleotide
  Target: COL7A1; (+) strand; PAM type: NNGRRT; PAM sequence: GGGGGT
agttggctgggttgtgggcg

SEQ ID NO: 6917 - DNA, 20 bp, Artificial Sequence
  Description of Artificial Sequence: Synthetic oligonucleotide
  Target: COL7A1; (+) strand; PAM type: NNGRRT; PAM sequence: GGGGAT
ggttgtgggcggggggtgtt

SEQ ID NO: 6918 - DNA, 20 bp, Artificial Sequence
  Description of Artificial Sequence: Synthetic oligonucleotide
  Target: COL7A1; (+) strand; PAM type: NNGRRT; PAM sequence: CCGAGT
gggggtgttggggatgaagg

SEQ ID NO: 6919 - DNA, 20 bp, Artificial Sequence
  Description of Artificial Sequence: Synthetic oligonucleotide
  Target: COL7A1; (+) strand; PAM type: NNGRRT; PAM sequence: GAGGGT
gatgaaggccgagtggagcg

SEQ ID NO: 6920 - DNA, 20 bp, Artificial Sequence
  Description of Artificial Sequence: Synthetic oligonucleotide
  Target: COL7A1; (+) strand; PAM type: NNGRRT; PAM sequence: CCGGGT
gcacggtgcagtgccccggg

SEQ ID NO: 6921 - DNA, 20 bp, Artificial Sequence
  Description of Artificial Sequence: Synthetic oligonucleotide
  Target: COL7A1; (+) strand; PAM type: NNGRRT; PAM sequence: CAGGAT
cgcactcggggcgcctctgc

SEQ ID NO: 6922 - DNA, 20 bp, Artificial Sequence
  Description of Artificial Sequence: Synthetic oligonucleotide
  Target: COL7A1; (+) strand; PAM type: NNGRRT; PAM sequence: CCGAGT
gagcccagcgcccctccagc

SEQ ID NO: 6923 - DNA, 20 bp, Artificial Sequence
  Description of Artificial Sequence: Synthetic oligonucleotide
  Target: COL7A1; (+) strand; PAM type: NNGRRT; PAM sequence: GGGAAT
cccgaccccccgtggcttct

SEQ ID NO: 6924 - DNA, 20 bp, Artificial Sequence
  Description of Artificial Sequence: Synthetic oligonucleotide
  Target: COL7A1; (+) strand; PAM type: NNGRRT; PAM sequence: GGGAGT
tctgcatgggcagatgctga

SEQ ID NO: 6925 - DNA, 20 bp, Artificial Sequence
  Description of Artificial Sequence: Synthetic oligonucleotide
  Target: COL7A1; (+) strand; PAM type: NNGRRT; PAM sequence: AGGAGT
caatcacagtgaccaggctg

SEQ ID NO: 6926 - DNA, 20 bp, Artificial Sequence
  Description of Artificial Sequence: Synthetic oligonucleotide
  Target: COL7A1; (+) strand; PAM type: NNGRRT; PAM sequence: GGGGGT
cacaaggcagcagcgccgtg

SEQ ID NO: 6927 - DNA, 20 bp, Artificial Sequence
  Description of Artificial Sequence: Synthetic oligonucleotide
  Target: COL7A1; (+) strand; PAM type: NNGRRT; PAM sequence: GGGGAT
tggggggtggggctgcagtt

SEQ ID NO: 6928 - DNA, 20 bp, Artificial Sequence
  Description of Artificial Sequence: Synthetic oligonucleotide
  Target: COL7A1; (+) strand; PAM type: NNGRRT; PAM sequence: GGGGGT
tgactcacccccaatccagt

SEQ ID NO: 6929 - DNA, 20 bp, Artificial Sequence
  Description of Artificial Sequence: Synthetic oligonucleotide
  Target: COL7A1; (+) strand; PAM type: NNGRRT; PAM sequence: ATGGGT
cccagacaagccctcaggcc

SEQ ID NO: 6930 - DNA, 20 bp, Artificial Sequence
  Description of Artificial Sequence: Synthetic oligonucleotide
  Target: COL7A1; (+) strand; PAM type: NNGRRT; PAM sequence: CCGGAT
gtgggcctcctgggccccac

SEQ ID NO: 6931 - DNA, 20 bp, Artificial Sequence
  Description of Artificial Sequence: Synthetic oligonucleotide
  Target: COL7A1; (+) strand; PAM type: NNGRRT; PAM sequence: ATGAGT
caggcaagaagccctggcaa

SEQ ID NO: 6932 - DNA, 20 bp, Artificial Sequence
  Description of Artificial Sequence: Synthetic oligonucleotide
  Target: COL7A1; (+) strand; PAM type: NNGRRT; PAM sequence: CTGGAT
gaaaccaaggtccccttggc

SEQ ID NO: 6933 - DNA, 20 bp, Artificial Sequence
  Description of Artificial Sequence: Synthetic oligonucleotide
  Target: COL7A1; (+) strand; PAM type: NNGRRT; PAM sequence: GGGGAT
taactcaccccctctttgta

SEQ ID NO: 6934 - DNA, 20 bp, Artificial Sequence
  Description of Artificial Sequence: Synthetic oligonucleotide
  Target: COL7A1; (+) strand; PAM type: NNGRRT; PAM sequence: AGGAAT
acagtgacagctcatctctc

SEQ ID NO: 6935 - DNA, 20 bp, Artificial Sequence
  Description of Artificial Sequence: Synthetic oligonucleotide
  Target: COL7A1; (+) strand; PAM type: NNGRRT; PAM sequence: ATGGGT
tatgcatatctctccattag

SEQ ID NO: 6936 - DNA, 20 bp, Artificial Sequence
  Description of Artificial Sequence: Synthetic oligonucleotide
  Target: COL7A1; (+) strand; PAM type: NNGRRT; PAM sequence: CTGGGT
taagaagggcaggcccccat

SEQ ID NO: 6937 - DNA, 20 bp, Artificial Sequence
  Description of Artificial Sequence: Synthetic oligonucleotide
  Target: COL7A1; (+) strand; PAM type: NNGRRT; PAM sequence: CTGAAT
ccctttttttcctgctaatc

SEQ ID NO: 6938 - DNA, 20 bp, Artificial Sequence
  Description of Artificial Sequence: Synthetic oligonucleotide
  Target: COL7A1; (+) strand; PAM type: NNGRRT; PAM sequence: TGGGAT
cccggccccacagcctcccc

SEQ ID NO: 6939 - DNA, 20 bp, Artificial Sequence
  Description of Artificial Sequence: Synthetic oligonucleotide
  Target: COL7A1; (+) strand; PAM type: NNGRRT; PAM sequence: CAGGGT
ctatgaccttattccaaggt

SEQ ID NO: 6940 - DNA, 20 bp, Artificial Sequence
  Description of Artificial Sequence: Synthetic oligonucleotide
  Target: COL7A1; (+) strand; PAM type: NNGRRT; PAM sequence: GAGGGT
gagacaggaggcccagctgg

SEQ ID NO: 6941 - DNA, 20 bp, Artificial Sequence
  Description of Artificial Sequence: Synthetic oligonucleotide
  Target: COL7A1; (+) strand; PAM type: NNGRRT; PAM sequence: GTGGGT
caggaggcccagctgggagg

SEQ ID NO: 6942 - DNA, 20 bp, Artificial Sequence
  Description of Artificial Sequence: Synthetic oligonucleotide
  Target: COL7A1; (+) strand; PAM type: NNGRRT; PAM sequence: CAGAAT
ggtgctcaggcaaacctcat

SEQ ID NO: 6943 - DNA, 20 bp, Artificial Sequence
  Description of Artificial Sequence: Synthetic oligonucleotide
  Target: COL7A1; (+) strand; PAM type: NNGRRT; PAM sequence: GAGGGT
gaaaggacaggctgctgtga

SEQ ID NO: 6944 - DNA, 20 bp, Artificial Sequence
  Description of Artificial Sequence: Synthetic oligonucleotide
  Target: COL7A1; (+) strand; PAM type: NNGRRT; PAM sequence: AAGGGT
tgctgtgagagggtctctca

SEQ ID NO: 6945 - DNA, 20 bp, Artificial Sequence
  Description of Artificial Sequence: Synthetic oligonucleotide
  Target: COL7A1; (+) strand; PAM type: NNGRRT; PAM sequence: AGGAGT
ggagaggctgttgagaaggt

SEQ ID NO: 6946 - DNA, 20 bp, Artificial Sequence
  Description of Artificial Sequence: Synthetic oligonucleotide
  Target: COL7A1; (+) strand; PAM type: NNGRRT; PAM sequence: TGGAAT
tgagaaggtaggagtaaggt

SEQ ID NO: 6947 - DNA, 20 bp, Artificial Sequence
  Description of Artificial Sequence: Synthetic oligonucleotide
  Target: COL7A1; (+) strand; PAM type: NNGRRT; PAM sequence: AGGAGT
cttctatgagactcacgagc

SEQ ID NO: 6948 - DNA, 20 bp, Artificial Sequence
  Description of Artificial Sequence: Synthetic oligonucleotide
  Target: COL7A1; (+) strand; PAM type: NNGRRT; PAM sequence: GGGAAT
ccgcgtctcccagccctgct

SEQ ID NO: 6949 - DNA, 20 bp, Artificial Sequence
  Description of Artificial Sequence: Synthetic oligonucleotide
  Target: COL7A1; (+) strand; PAM type: NNGRRT; PAM sequence: GAGAGT
ctgatacagaaatatggcct

SEQ ID NO: 6950 - DNA, 20 bp, Artificial Sequence
  Description of Artificial Sequence: Synthetic oligonucleotide
  Target: COL7A1; (+) strand; PAM type: NNGRRT; PAM sequence: CTGAAT
atggcctgagagtccccatg

SEQ ID NO: 6951 - DNA, 20 bp, Artificial Sequence
  Description of Artificial Sequence: Synthetic oligonucleotide
  Target: COL7A1; (+) strand; PAM type: NNGRRT; PAM sequence: CAGGGT
acacctccccagcatggctc

SEQ ID NO: 6952 - DNA, 20 bp, Artificial Sequence
  Description of Artificial Sequence: Synthetic oligonucleotide
  Target: COL7A1; (+) strand; PAM type: NNGRRT; PAM sequence: CAGAGT
catggctccagggtaaagac

SEQ ID NO: 6953 - DNA, 20 bp, Artificial Sequence
  Description of Artificial Sequence: Synthetic oligonucleotide
  Target: COL7A1; (+) strand; PAM type: NNGRRT; PAM sequence: CTGGGT
cttggcacttgttcccctgc

SEQ ID NO: 6954 - DNA, 20 bp, Artificial Sequence
  Description of Artificial Sequence: Synthetic oligonucleotide
  Target: COL7A1; (+) strand; PAM type: NNGRRT; PAM sequence: CAGGGT
gttgcacctccatgagcacc

SEQ ID NO: 6955 - DNA, 20 bp, Artificial Sequence
  Description of Artificial Sequence: Synthetic oligonucleotide
  Target: COL7A1; (+) strand; PAM type: NNGRRT; PAM sequence: CAGGGT
gcacccagggttgggcctgt

SEQ ID NO: 6956 - DNA, 20 bp, Artificial Sequence
  Description of Artificial Sequence: Synthetic oligonucleotide
  Target: COL7A1; (+) strand; PAM type: NNGRRT; PAM sequence: TAGAAT
ctctccagccgttcacaaag

SEQ ID NO: 6957 - DNA, 20 bp, Artificial Sequence
  Description of Artificial Sequence: Synthetic oligonucleotide
  Target: COL7A1; (+) strand; PAM type: NNGRRT; PAM sequence: CCGAAT
aaggtgcttaacaaatgtct

SEQ ID NO: 6958 - DNA, 20 bp, Artificial Sequence
  Description of Artificial Sequence: Synthetic oligonucleotide
  Target: COL7A1; (+) strand; PAM type: NNGRRT; PAM sequence: CAGGGT
gtgagggaaaggcagtgggg

SEQ ID NO: 6959 - DNA, 20 bp, Artificial Sequence
  Description of Artificial Sequence: Synthetic oligonucleotide
  Target: COL7A1; (+) strand; PAM type: NNGRRT; PAM sequence: AAGGGT
gggcagggtgatagtgatac

SEQ ID NO: 6960 - DNA, 20 bp, Artificial Sequence
  Description of Artificial Sequence: Synthetic oligonucleotide
  Target: COL7A1; (+) strand; PAM type: NNGRRT; PAM sequence: TGGGAT
cctcgctttcaacttccccc

SEQ ID NO: 6961 - DNA, 20 bp, Artificial Sequence
  Description of Artificial Sequence: Synthetic oligonucleotide
  Target: COL7A1; (+) strand; PAM type: NNGRRT; PAM sequence: GGGGGT
acctgactgtggaagcactg

SEQ ID NO: 6962 - DNA, 20 bp, Artificial Sequence
  Description of Artificial Sequence: Synthetic oligonucleotide
  Target: COL7A1; (+) strand; PAM type: NNGRRT; PAM sequence: GGGGAT
ctgcctcaggaaaatgggga

SEQ ID NO: 6963 - DNA, 20 bp, Artificial Sequence
  Description of Artificial Sequence: Synthetic oligonucleotide
  Target: COL7A1; (+) strand; PAM type: NNGRRT; PAM sequence: CTGAGT
ctcagggctattcttggagc

SEQ ID NO: 6964 - DNA, 20 bp, Artificial Sequence
  Description of Artificial Sequence: Synthetic oligonucleotide
  Target: COL7A1; (+) strand; PAM type: NNGRRT; PAM sequence: AAGGAT
agcctgagtcagcggaggca

SEQ ID NO: 6965 - DNA, 20 bp, Artificial Sequence
  Description of Artificial Sequence: Synthetic oligonucleotide
  Target: COL7A1; (+) strand; PAM type: NNGRRT; PAM sequence: CAGAAT
gccccaggctatcctcctcc

SEQ ID NO: 6966 - DNA, 20 bp, Artificial Sequence
  Description of Artificial Sequence: Synthetic oligonucleotide
  Target: COL7A1; (+) strand; PAM type: NNGRRT; PAM sequence: CAGAGT
gctatcctcctcccagaatg

SEQ ID NO: 6967 - DNA, 20 bp, Artificial Sequence
  Description of Artificial Sequence: Synthetic oligonucleotide
  Target: COL7A1; (+) strand; PAM type: NNGRRT; PAM sequence: GGGGGT
tggtccaccagggaccacca

SEQ ID NO: 6968 - DNA, 20 bp, Artificial Sequence
  Description of Artificial Sequence: Synthetic oligonucleotide
  Target: COL7A1; (+) strand; PAM type: NNGRRT; PAM sequence: AGGGGT
ttggcacaaggtccacagtg

SEQ ID NO: 6969 - DNA, 20 bp, Artificial Sequence
  Description of Artificial Sequence: Synthetic oligonucleotide
  Target: COL7A1; (+) strand; PAM type: NNGRRT; PAM sequence: AGGGAT
ggtttcccacctgagcctgc

SEQ ID NO: 6970 - DNA, 20 bp, Artificial Sequence
  Description of Artificial Sequence: Synthetic oligonucleotide
  Target: COL7A1; (+) strand; PAM type: NNGRRT; PAM sequence: CTGGGT
gactcctacaggggcaaagg

SEQ ID NO: 6971 - DNA, 20 bp, Artificial Sequence
  Description of Artificial Sequence: Synthetic oligonucleotide
  Target: COL7A1; (+) strand; PAM type: NNGRRT; PAM sequence: CTGAGT
tgaggaactcccctaagtgg

SEQ ID NO: 6972 - DNA, 20 bp, Artificial Sequence
  Description of Artificial Sequence: Synthetic oligonucleotide
  Target: COL7A1; (+) strand; PAM type: NNGRRT; PAM sequence: GAGGAT
atcagcctgtgggaaggcag

SEQ ID NO: 6973 - DNA, 20 bp, Artificial Sequence
  Description of Artificial Sequence: Synthetic oligonucleotide
  Target: COL7A1; (+) strand; PAM type: NNGRRT; PAM sequence: AGGGAT
ctccatgccaatgccaaaag

SEQ ID NO: 6974 - DNA, 20 bp, Artificial Sequence
  Description of Artificial Sequence: Synthetic oligonucleotide
  Target: COL7A1; (+) strand; PAM type: NNGRRT; PAM sequence: GAGGAT
ggatgacacacttctcagca

SEQ ID NO: 6975 - DNA, 20 bp, Artificial Sequence
  Description of Artificial Sequence: Synthetic oligonucleotide
  Target: COL7A1; (+) strand; PAM type: NNGRRT; PAM sequence: ACGGAT
cgcagccagaacatgccgct

SEQ ID NO: 6976 - DNA, 20 bp, Artificial Sequence
  Description of Artificial Sequence: Synthetic oligonucleotide
  Target: COL7A1; (+) strand; PAM type: NNGRRT; PAM sequence: GGGGAT
agctgctcaatggggcctgt

SEQ ID NO: 6977 - DNA, 20 bp, Artificial Sequence
  Description of Artificial Sequence: Synthetic oligonucleotide
  Target: COL7A1; (+) strand; PAM type: NNGRRT; PAM sequence: TAGGGT
ctcaatggggcctgtgggga

SEQ ID NO: 6978 - DNA, 20 bp, Artificial Sequence
  Description of Artificial Sequence: Synthetic oligonucleotide
  Target: COL7A1; (+) strand; PAM type: NNGRRT; PAM sequence: CAGGGT
gtggggatagggtggagcgt

SEQ ID NO: 6979 - DNA, 20 bp, Artificial Sequence
  Description of Artificial Sequence: Synthetic oligonucleotide
  Target: COL7A1; (+) strand; PAM type: NNGRRT; PAM sequence: TGGGGT
gatagggtggagcgtcaggg

SEQ ID NO: 6980 - DNA, 20 bp, Artificial Sequence
  Description of Artificial Sequence: Synthetic oligonucleotide
  Target: COL7A1; (+) strand; PAM type: NNGRRT; PAM sequence: TTGAGT
agagcagcacaagacaggct

SEQ ID NO: 6981 - DNA, 20 bp, Artificial Sequence
  Description of Artificial Sequence: Synthetic oligonucleotide
  Target: COL7A1; (+) strand; PAM type: NNGRRT; PAM sequence: AGGGGT
agaggagagaacattccccc

SEQ ID NO: 6982 - DNA, 20 bp, Artificial Sequence
  Description of Artificial Sequence: Synthetic oligonucleotide
  Target: COL7A1; (+) strand; PAM type: NNGRRT; PAM sequence: ACGGGT
atggaggtgcccgttacctg

SEQ ID NO: 6983 - DNA, 20 bp, Artificial Sequence
  Description of Artificial Sequence: Synthetic oligonucleotide
  Target: COL7A1; (+) strand; PAM type: NNGRRT; PAM sequence: CAGGGT
tgcccgttacctgacgggtg

SEQ ID NO: 6984 - DNA, 20 bp, Artificial Sequence
  Description of Artificial Sequence: Synthetic oligonucleotide
  Target: COL7A1; (+) strand; PAM type: NNGRRT; PAM sequence: CAGGGT
acactggcatccacctcctg

SEQ ID NO: 6985 - DNA, 20 bp, Artificial Sequence
  Description of Artificial Sequence: Synthetic oligonucleotide
  Target: COL7A1; (+) strand; PAM type: NNGRRT; PAM sequence: AGGGAT
cccaaaagaggaaaggcaga

SEQ ID NO: 6986 - DNA, 20 bp, Artificial Sequence
  Description of Artificial Sequence: Synthetic oligonucleotide
  Target: COL7A1; (+) strand; PAM type: NNGRRT; PAM sequence: AGGGAT
tgacagctgcctaggacacc

SEQ ID NO: 6987 - DNA, 20 bp, Artificial Sequence
  Description of Artificial Sequence: Synthetic oligonucleotide
  Target: COL7A1; (+) strand; PAM type: NNGRRT; PAM sequence: AGGGGT
aagactccagaacctctccc

SEQ ID NO: 6988 - DNA, 20 bp, Artificial Sequence
  Description of Artificial Sequence: Synthetic oligonucleotide
  Target: COL7A1; (+) strand; PAM type: NNGRRT; PAM sequence: GGGGAT
cggctttcccattcagccag

SEQ ID NO: 6989 - DNA, 20 bp, Artificial Sequence
  Description of Artificial Sequence: Synthetic oligonucleotide
  Target: COL7A1; (+) strand; PAM type: NNGRRT; PAM sequence: AGGAGT
cgtccgatgtcctcacacac

SEQ ID NO: 6990 - DNA, 20 bp, Artificial Sequence
  Description of Artificial Sequence: Synthetic oligonucleotide
  Target: COL7A1; (+) strand; PAM type: NNGRRT; PAM sequence: AAGGGT
cacacaggagtagtgccttt

SEQ ID NO: 6991 - DNA, 20 bp, Artificial Sequence
  Description of Artificial Sequence: Synthetic oligonucleotide
  Target: COL7A1; (-) strand; PAM type: NNNNGHTT; PAM sequence: CTCAGTTT
ccttctccctcttcctgacc

SEQ ID NO: 6992 - DNA, 20 bp, Artificial Sequence
  Description of Artificial Sequence: Synthetic oligonucleotide
  Target: COL7A1; (-) strand; PAM type: NNNNGHTT; PAM sequence: ACTCGCTT
gagtccatgctgcactgtgg

SEQ ID NO: 6993 - DNA, 20 bp, Artificial Sequence
  Description of Artificial Sequence: Synthetic oligonucleotide
  Target: COL7A1; (-) strand; PAM type: NNNNGHTT; PAM sequence: GTGCGATT
cacacatgtgaaggtggact

SEQ ID NO: 6994 - DNA, 20 bp, Artificial Sequence
  Description of Artificial Sequence: Synthetic oligonucleotide
  Target: COL7A1; (-) strand; PAM type: NNNNGHTT; PAM sequence: CAGAGATT
gaggaaaaagccatgagggc

SEQ ID NO: 6995 - DNA, 20 bp, Artificial Sequence
  Description of Artificial Sequence: Synthetic oligonucleotide
  Target: COL7A1; (-) strand; PAM type: NNNNGHTT; PAM sequence: CATGGCTT
gctttgagaactggccacca

SEQ ID NO: 6996 - DNA, 20 bp, Artificial Sequence
  Description of Artificial Sequence: Synthetic oligonucleotide
  Target: COL7A1; (-) strand; PAM type: NNNNGHTT; PAM sequence: TTGAGCTT
atacagggactgggaagagt

SEQ ID NO: 6997 - DNA, 20 bp, Artificial Sequence
  Description of Artificial Sequence: Synthetic oligonucleotide
  Target: COL7A1; (-) strand; PAM type: NNNNGHTT; PAM sequence: AAGAGTTT
cagtagatacagggactggg

SEQ ID NO: 6998 - DNA, 20 bp, Artificial Sequence
  Description of Artificial Sequence: Synthetic oligonucleotide
  Target: COL7A1; (-) strand; PAM type: NNNNGHTT; PAM sequence: GATGGTTT
tgtgtgtgtgtgtgtggtgg

SEQ ID NO: 6999 - DNA, 20 bp, Artificial Sequence
  Description of Artificial Sequence: Synthetic oligonucleotide
  Target: COL7A1; (-) strand; PAM type: NNNNGHTT; PAM sequence: CCATGATT
gagttcaaggctgcagtgag

SEQ ID NO: 7000 - DNA, 20 bp, Artificial Sequence
  Description of Artificial Sequence: Synthetic oligonucleotide
  Target: COL7A1; (-) strand; PAM type: NNNNGHTT; PAM sequence: GATCGCTT
ttgggaggttgaggcgggag

SEQ ID NO: 7001 - DNA, 20 bp, Artificial Sequence
  Description of Artificial Sequence: Synthetic oligonucleotide
  Target: COL7A1; (-) strand; PAM type: NNNNGHTT; PAM sequence: CAGGGCTT
gtggctaatggctataaacc

SEQ ID NO: 7002 - DNA, 20 bp, Artificial Sequence
  Description of Artificial Sequence: Synthetic oligonucleotide
  Target: COL7A1; (-) strand; PAM type: NNNNGHTT; PAM sequence: GGTGGTTT
tgggtctttatgctgcaaag

SEQ ID NO: 7003 - DNA, 20 bp, Artificial Sequence
  Description of Artificial Sequence: Synthetic oligonucleotide
  Target: COL7A1; (-) strand; PAM type: NNNNGHTT; PAM sequence: GGCTGCTT
agtgcagatcagggttccca

SEQ ID NO: 7004 - DNA, 20 bp, Artificial Sequence
  Description of Artificial Sequence: Synthetic oligonucleotide
  Target: COL7A1; (-) strand; PAM type: NNNNGHTT; PAM sequence: CTCAGTTT
ctctgaacacctgctgtgta

SEQ ID NO: 7005 - DNA, 20 bp, Artificial Sequence
  Description of Artificial Sequence: Synthetic oligonucleotide
  Target: COL7A1; (-) strand; PAM type: NNNNGHTT; PAM sequence: CTGAGCTT
ctgtgtgccctgtgccagtc

SEQ ID NO: 7006 - DNA, 20 bp, Artificial Sequence
  Description of Artificial Sequence: Synthetic oligonucleotide
  Target: COL7A1; (-) strand; PAM type: NNNNGHTT; PAM sequence: TGTGGCTT
ttaggatgggtttcacatga

SEQ ID NO: 7007 - DNA, 20 bp, Artificial Sequence
  Description of Artificial Sequence: Synthetic oligonucleotide
  Target: COL7A1; (-) strand; PAM type: NNNNGHTT; PAM sequence: ATGGGTTT
agtctagaggctcatttagg

SEQ ID NO: 7008 - DNA, 20 bp, Artificial Sequence
  Description of Artificial Sequence: Synthetic oligonucleotide
  Target: COL7A1; (-) strand; PAM type: NNNNGHTT; PAM sequence: ACCAGTTT
aggtttcctcttggggtcac

SEQ ID NO: 7009 - DNA, 20 bp, Artificial Sequence
  Description of Artificial Sequence: Synthetic oligonucleotide
  Target: COL7A1; (-) strand; PAM type: NNNNGHTT; PAM sequence: CCAGGTTT
ctccaagggatcatgtttgt

SEQ ID NO: 7010 - DNA, 20 bp, Artificial Sequence
  Description of Artificial Sequence: Synthetic oligonucleotide
  Target: COL7A1; (-) strand; PAM type: NNNNGHTT; PAM sequence: TCATGTTT
ctttgctggcctccaaggga

SEQ ID NO: 7011 - DNA, 20 bp, Artificial Sequence
  Description of Artificial Sequence: Synthetic oligonucleotide
  Target: COL7A1; (-) strand; PAM type: NNNNGHTT; PAM sequence: CCTGGTTT
gagagtgttggggggtctct

SEQ ID NO: 7012 - DNA, 20 bp, Artificial Sequence
  Description of Artificial Sequence: Synthetic oligonucleotide
  Target: COL7A1; (-) strand; PAM type: NNNNGHTT; PAM sequence: GCCAGTTT
tgcagggggcagtggccctg

SEQ ID NO: 7013 - DNA, 20 bp, Artificial Sequence
  Description of Artificial Sequence: Synthetic oligonucleotide
  Target: COL7A1; (-) strand; PAM type: NNNNGHTT; PAM sequence: AGTCGCTT
ggggctgcaggagccgcagg

SEQ ID NO: 7014 - DNA, 20 bp, Artificial Sequence
  Description of Artificial Sequence: Synthetic oligonucleotide
  Target: COL7A1; (-) strand; PAM type: NNNNGHTT; PAM sequence: ACGGGCTT
tgactttccaggcagtgtgg

SEQ ID NO: 7015 - DNA, 20 bp, Artificial Sequence
  Description of Artificial Sequence: Synthetic oligonucleotide
  Target: COL7A1; (-) strand; PAM type: NNNNGHTT; PAM sequence: GCCTGATT
gtttggaaggactaggtttt

SEQ ID NO: 7016 - DNA, 20 bp, Artificial Sequence
  Description of Artificial Sequence: Synthetic oligonucleotide
  Target: COL7A1; (-) strand; PAM type: NNNNGHTT; PAM sequence: CTAGGTTT
ggtcccttggtttggaagga

SEQ ID NO: 7017 - DNA, 20 bp, Artificial Sequence
  Description of Artificial Sequence: Synthetic oligonucleotide
  Target: COL7A1; (-) strand; PAM type: NNNNGHTT; PAM sequence: CTTGGTTT
ccggttaactgacctggtcc

SEQ ID NO: 7018 - DNA, 20 bp, Artificial Sequence
  Description of Artificial Sequence: Synthetic oligonucleotide
  Target: COL7A1; (-) strand; PAM type: NNNNGHTT; PAM sequence: CCTGGCTT
cacatggtgggtgagtcata

SEQ ID NO: 7019 - DNA, 20 bp, Artificial Sequence
  Description of Artificial Sequence: Synthetic oligonucleotide
  Target: COL7A1; (-) strand; PAM type: NNNNGHTT; PAM sequence: CTCGGTTT
aggtgttcacctttccgagc

SEQ ID NO: 7020 - DNA, 20 bp, Artificial Sequence
  Description of Artificial Sequence: Synthetic oligonucleotide
  Target: COL7A1; (-) strand; PAM type: NNNNGHTT; PAM sequence: GGGTGCTT
gtgaggggtctgagaggagt

SEQ ID NO: 7021 - DNA, 20 bp, Artificial Sequence
  Description of Artificial Sequence: Synthetic oligonucleotide
  Target: COL7A1; (-) strand; PAM type: NNNNGHTT; PAM sequence: ACTTGCTT
agaaatgctggctgagggtc

SEQ ID NO: 7022 - DNA, 20 bp, Artificial Sequence
  Description of Artificial Sequence: Synthetic oligonucleotide
  Target: COL7A1; (-) strand; PAM type: NNNNGHTT; PAM sequence: GACAGCTT
acagacctaatatatgtccg

SEQ ID NO: 7023 - DNA, 20 bp, Artificial Sequence
  Description of Artificial Sequence: Synthetic oligonucleotide
  Target: COL7A1; (-) strand; PAM type: NNNNGHTT; PAM sequence: TCTTGCTT
tctttgtttctttttttctg

SEQ ID NO: 7024 - DNA, 20 bp, Artificial Sequence
  Description of Artificial Sequence: Synthetic oligonucleotide
  Target: COL7A1; (-) strand; PAM type: NNNNGHTT; PAM sequence: CTTTGTTT
gtccctctgtctctggattt

SEQ ID NO: 7025 - DNA, 20 bp, Artificial Sequence
  Description of Artificial Sequence: Synthetic oligonucleotide
  Target: COL7A1; (-) strand; PAM type: NNNNGHTT; PAM sequence: TCTGGATT
tctcttgctgtccctctgtc

SEQ ID NO: 7026 - DNA, 20 bp, Artificial Sequence
  Description of Artificial Sequence: Synthetic oligonucleotide
  Target: COL7A1; (-) strand; PAM type: NNNNGHTT; PAM sequence: GATGGTTT
atcatgctgtctgtctctgg

SEQ ID NO: 7027 - DNA, 20 bp, Artificial Sequence
  Description of Artificial Sequence: Synthetic oligonucleotide
  Target: COL7A1; (-) strand; PAM type: NNNNGHTT; PAM sequence: CTGTGTTT
cgcctgccctcctgtggact

SEQ ID NO: 7028 - DNA, 20 bp, Artificial Sequence
  Description of Artificial Sequence: Synthetic oligonucleotide
  Target: COL7A1; (-) strand; PAM type: NNNNGHTT; PAM sequence: TTCTGTTT
ctgagatccgattcctgccc

SEQ ID NO: 7029 - DNA, 20 bp, Artificial Sequence
  Description of Artificial Sequence: Synthetic oligonucleotide
  Target: COL7A1; (-) strand; PAM type: NNNNGHTT; PAM sequence: ATCCGATT
gctgcttttctgcctctgag

SEQ ID NO: 7030 - DNA, 20 bp, Artificial Sequence
  Description of Artificial Sequence: Synthetic oligonucleotide
  Target: COL7A1; (-) strand; PAM type: NNNNGHTT; PAM sequence: GGCTGCTT
caggggactctgggatctct

SEQ ID NO: 7031 - DNA, 20 bp, Artificial Sequence
  Description of Artificial Sequence: Synthetic oligonucleotide
  Target: COL7A1; (-) strand; PAM type: NNNNGHTT; PAM sequence: GAGGGCTT
atgtggggtttggctttatg

SEQ ID NO: 7032 - DNA, 20 bp, Artificial Sequence
  Description of Artificial Sequence: Synthetic oligonucleotide
  Target: COL7A1; (-) strand; PAM type: NNNNGHTT; PAM sequence: TTTGGCTT
gaggttgagtggatgtgggg

SEQ ID NO: 7033 - DNA, 20 bp, Artificial Sequence
  Description of Artificial Sequence: Synthetic oligonucleotide
  Target: COL7A1; (-) strand; PAM type: NNNNGHTT; PAM sequence: TGGGGTTT
tcttggaggttgagtggatg

SEQ ID NO: 7034 - DNA, 20 bp, Artificial Sequence
  Description of Artificial Sequence: Synthetic oligonucleotide
  Target: COL7A1; (-) strand; PAM type: NNNNGHTT; PAM sequence: TTGTGATT
gcccagtcctggtcactgtc

SEQ ID NO: 7035 - DNA, 20 bp, Artificial Sequence
  Description of Artificial Sequence: Synthetic oligonucleotide
  Target: COL7A1; (-) strand; PAM type: NNNNGHTT; PAM sequence: GAAGGTTT
agatggggggtttcaagggg

SEQ ID NO: 7036 - DNA, 20 bp, Artificial Sequence
  Description of Artificial Sequence: Synthetic oligonucleotide
  Target: COL7A1; (-) strand; PAM type: NNNNGHTT; PAM sequence: GGGGGTTT
tgtgactgtttgggaagatg

SEQ ID NO: 7037 - DNA, 20 bp, Artificial Sequence
  Description of Artificial Sequence: Synthetic oligonucleotide
  Target: COL7A1; (-) strand; PAM type: NNNNGHTT; PAM sequence: GACTGTTT
ttttaaaaggctcctgttgt

SEQ ID NO: 7038 - DNA, 20 bp, Artificial Sequence
  Description of Artificial Sequence: Synthetic oligonucleotide
  Target: COL7A1; (-) strand; PAM type: NNNNGHTT; PAM sequence: TGCTGTTT
attctggggggcattaaagc

SEQ ID NO: 7039 - DNA, 20 bp, Artificial Sequence
  Description of Artificial Sequence: Synthetic oligonucleotide
  Target: COL7A1; (-) strand; PAM type: NNNNGHTT; PAM sequence: TGCTGATT
ccaagcctgtgatgacatgg

SEQ ID NO: 7040 - DNA, 20 bp, Artificial Sequence
  Description of Artificial Sequence: Synthetic oligonucleotide
  Target: COL7A1; (-) strand; PAM type: NNNNGHTT; PAM sequence: AGAGGCTT
ctgtccctccccttggtgct

SEQ ID NO: 7041 - DNA, 20 bp, Artificial Sequence
  Description of Artificial Sequence: Synthetic oligonucleotide
  Target: COL7A1; (-) strand; PAM type: NNNNGHTT; PAM sequence: CTGAGATT
actgaggcccagataatgag

SEQ ID NO: 7042 - DNA, 20 bp, Artificial Sequence
  Description of Artificial Sequence: Synthetic oligonucleotide
  Target: COL7A1; (-) strand; PAM type: NNNNGHTT; PAM sequence: GACCGTTT
gggaaggtcagatggctgac

SEQ ID NO: 7043 - DNA, 20 bp, Artificial Sequence
  Description of Artificial Sequence: Synthetic oligonucleotide
  Target: COL7A1; (-) strand; PAM type: NNNNGHTT; PAM sequence: AACCGTTT
gtggctgtggagggaatgcc

SEQ ID NO: 7044 - DNA, 20 bp, Artificial Sequence
  Description of Artificial Sequence: Synthetic oligonucleotide
  Target: COL7A1; (-) strand; PAM type: NNNNGHTT; PAM sequence: CTCTGATT
ccccctgacctttcaaccct

SEQ ID NO: 7045 - DNA, 20 bp, Artificial Sequence
  Description of Artificial Sequence: Synthetic oligonucleotide
  Target: COL7A1; (-) strand; PAM type: NNNNGHTT; PAM sequence: AGTAGTTT
catcgcatctggatcacgtg

SEQ ID NO: 7046 - DNA, 20 bp, Artificial Sequence
  Description of Artificial Sequence: Synthetic oligonucleotide
  Target: COL7A1; (-) strand; PAM type: NNNNGHTT; PAM sequence: GCCTGCTT
cctgcctgtttctgtgtctg

SEQ ID NO: 7047 - DNA, 20 bp, Artificial Sequence
  Description of Artificial Sequence: Synthetic oligonucleotide
  Target: COL7A1; (-) strand; PAM type: NNNNGHTT; PAM sequence: GCCTGTTT
cgtctctgtctgcaccacct

SEQ ID NO: 7048 - DNA, 20 bp, Artificial Sequence
  Description of Artificial Sequence: Synthetic oligonucleotide
  Target: COL7A1; (-) strand; PAM type: NNNNGHTT; PAM sequence: TCCAGCTT
ccatgcagtgctctcagatg

SEQ ID NO: 7049 - DNA, 20 bp, Artificial Sequence
  Description of Artificial Sequence: Synthetic oligonucleotide
  Target: COL7A1; (-) strand; PAM type: NNNNGHTT; PAM sequence: TGAGGATT
gagggagacacacaggcaga

SEQ ID NO: 7050 - DNA, 20 bp, Artificial Sequence
  Description of Artificial Sequence: Synthetic oligonucleotide
  Target: COL7A1; (-) strand; PAM type: NNNNGHTT; PAM sequence: CGGGGCTT
gctcccaggaggatgacatc

SEQ ID NO: 7051 - DNA, 20 bp, Artificial Sequence
  Description of Artificial Sequence: Synthetic oligonucleotide
  Target: COL7A1; (-) strand; PAM type: NNNNGHTT; PAM sequence: CAAGGCTT
gagcaggtgagtagggattc

SEQ ID NO: 7052 - DNA, 20 bp, Artificial Sequence
  Description of Artificial Sequence: Synthetic oligonucleotide
  Target: COL7A1; (-) strand; PAM type: NNNNGHTT; PAM sequence: TAGGGATT
gagagaggggagcaggtgag

SEQ ID NO: 7053 - DNA, 20 bp, Artificial Sequence
  Description of Artificial Sequence: Synthetic oligonucleotide
  Target: COL7A1; (-) strand; PAM type: NNNNGHTT; PAM sequence: GGGGGCTT
cccagggaaccccaggaatt

SEQ ID NO: 7054 - DNA, 20 bp, Artificial Sequence
  Description of Artificial Sequence: Synthetic oligonucleotide
  Target: COL7A1; (-) strand; PAM type: NNNNGHTT; PAM sequence: CTCTGATT
agagggtccatctctggggc

SEQ ID NO: 7055 - DNA, 20 bp, Artificial Sequence
  Description of Artificial Sequence: Synthetic oligonucleotide
  Target: COL7A1; (-) strand; PAM type: NNNNGHTT; PAM sequence: CGAGGCTT
tcttctgttcccagggtgac

SEQ ID NO: 7056 - DNA, 20 bp, Artificial Sequence
  Description of Artificial Sequence: Synthetic oligonucleotide
  Target: COL7A1; (-) strand; PAM type: NNNNGHTT; PAM sequence: TCATGCTT
aggtcagggcagaaggtctc

SEQ ID NO: 7057 - DNA, 20 bp, Artificial Sequence
  Description of Artificial Sequence: Synthetic oligonucleotide
  Target: COL7A1; (-) strand; PAM type: NNNNGHTT; PAM sequence: GAAGGTTT
tcacaggtgcttgggttaca

SEQ ID NO: 7058 - DNA, 20 bp, Artificial Sequence
  Description of Artificial Sequence: Synthetic oligonucleotide
  Target: COL7A1; (-) strand; PAM type: NNNNGHTT; PAM sequence: AGGTGCTT
atcacatctggttggctcac

SEQ ID NO: 7059 - DNA, 20 bp, Artificial Sequence
  Description of Artificial Sequence: Synthetic oligonucleotide
  Target: COL7A1; (-) strand; PAM type: NNNNGHTT; PAM sequence: ATCTGCTT
tgtctgggaatcacttcttc

SEQ ID NO: 7060 - DNA, 20 bp, Artificial Sequence
  Description of Artificial Sequence: Synthetic oligonucleotide
  Target: COL7A1; (-) strand; PAM type: NNNNGHTT; PAM sequence: GTTAGTTT
agctgaggcctgtttggaga

SEQ ID NO: 7061 - DNA, 20 bp, Artificial Sequence
  Description of Artificial Sequence: Synthetic oligonucleotide
  Target: COL7A1; (-) strand; PAM type: NNNNGHTT; PAM sequence: GCCTGTTT
cagaggttggagtagctgag

SEQ ID NO: 7062 - DNA, 20 bp, Artificial Sequence
  Description of Artificial Sequence: Synthetic oligonucleotide
  Target: COL7A1; (-) strand; PAM type: NNNNGHTT; PAM sequence: ATTGGTTT
caaggtaggaaagaaacaag

SEQ ID NO: 7063 - DNA, 20 bp, Artificial Sequence
  Description of Artificial Sequence: Synthetic oligonucleotide
  Target: COL7A1; (-) strand; PAM type: NNNNGHTT; PAM sequence: ACAAGATT
ggcctcaaggtaggaaagaa

SEQ ID NO: 7064 - DNA, 20 bp, Artificial Sequence
  Description of Artificial Sequence: Synthetic oligonucleotide
  Target: COL7A1; (-) strand; PAM type: NNNNGHTT; PAM sequence: GTTGGCTT
tccgaggagaaaaaggagat

SEQ ID NO: 7065 - DNA, 20 bp, Artificial Sequence
  Description of Artificial Sequence: Synthetic oligonucleotide
  Target: COL7A1; (-) strand; PAM type: NNNNGHTT; PAM sequence: GGGCGATT
tgttccctacccactatcca

SEQ ID NO: 7066 - DNA, 20 bp, Artificial Sequence
  Description of Artificial Sequence: Synthetic oligonucleotide
  Target: COL7A1; (-) strand; PAM type: NNNNGHTT; PAM sequence: GGTAGCTT
catggtggtcccaccagtgt

SEQ ID NO: 7067 - DNA, 20 bp, Artificial Sequence
  Description of Artificial Sequence: Synthetic oligonucleotide
  Target: COL7A1; (-) strand; PAM type: NNNNGHTT; PAM sequence: CTGTGTTT
ccactgaagggctcccccat

SEQ ID NO: 7068 - DNA, 20 bp, Artificial Sequence
  Description of Artificial Sequence: Synthetic oligonucleotide
  Target: COL7A1; (-) strand; PAM type: NNNNGHTT; PAM sequence: AGGTGCTT
ccttgggtgtccccatctga

SEQ ID NO: 7069 - DNA, 20 bp, Artificial Sequence
  Description of Artificial Sequence: Synthetic oligonucleotide
  Target: COL7A1; (-) strand; PAM type: NNNNGHTT; PAM sequence: TGGGGTTT
gaggacaggaggaggctttc

SEQ ID NO: 7070 - DNA, 20 bp, Artificial Sequence
  Description of Artificial Sequence: Synthetic oligonucleotide
  Target: COL7A1; (-) strand; PAM type: NNNNGHTT; PAM sequence: GGAGGCTT
ggcaggaggggaggacagga

SEQ ID NO: 7071 - DNA, 20 bp, Artificial Sequence
  Description of Artificial Sequence: Synthetic oligonucleotide
  Target: COL7A1; (-) strand; PAM type: NNNNGHTT; PAM sequence: CGGGGCTT
cccagggtgaacgagggcct

SEQ ID NO: 7072 - DNA, 20 bp, Artificial Sequence
  Description of Artificial Sequence: Synthetic oligonucleotide
  Target: COL7A1; (-) strand; PAM type: NNNNGHTT; PAM sequence: CTCTGATT
ggccagggtgctcccgactc

SEQ ID NO: 7073 - DNA, 20 bp, Artificial Sequence
  Description of Artificial Sequence: Synthetic oligonucleotide
  Target: COL7A1; (-) strand; PAM type: NNNNGHTT; PAM sequence: CCCAGTTT
gaattcaggtgcggggcctc

SEQ ID NO: 7074 - DNA, 20 bp, Artificial Sequence
  Description of Artificial Sequence: Synthetic oligonucleotide
  Target: COL7A1; (-) strand; PAM type: NNNNGHTT; PAM sequence: CACTGTTT
tgtcccctttgtctggtccc

SEQ ID NO: 7075 - DNA, 20 bp, Artificial Sequence
  Description of Artificial Sequence: Synthetic oligonucleotide
  Target: COL7A1; (-) strand; PAM type: NNNNGHTT; PAM sequence: CTCTGATT
cccttcatcccagctcttgc

SEQ ID NO: 7076 - DNA, 20 bp, Artificial Sequence
  Description of Artificial Sequence: Synthetic oligonucleotide
  Target: COL7A1; (-) strand; PAM type: NNNNGHTT; PAM sequence: CACTGATT
tcccatgaccctgcgtcccc

SEQ ID NO: 7077 - DNA, 20 bp, Artificial Sequence
  Description of Artificial Sequence: Synthetic oligonucleotide
  Target: COL7A1; (-) strand; PAM type: NNNNGHTT; PAM sequence: AGGCGCTT
acactgtggggtgttggggg

SEQ ID NO: 7078 - DNA, 20 bp, Artificial Sequence
  Description of Artificial Sequence: Synthetic oligonucleotide
  Target: COL7A1; (-) strand; PAM type: NNNNGHTT; PAM sequence: ATTTGATT
ggtgccctaaagccccacgt

SEQ ID NO: 7079 - DNA, 20 bp, Artificial Sequence
  Description of Artificial Sequence: Synthetic oligonucleotide
  Target: COL7A1; (-) strand; PAM type: NNNNGHTT; PAM sequence: TGCTGTTT
cattgaccattccctccctt

SEQ ID NO: 7080 - DNA, 20 bp, Artificial Sequence
  Description of Artificial Sequence: Synthetic oligonucleotide
  Target: COL7A1; (-) strand; PAM type: NNNNGHTT; PAM sequence: CTGAGCTT
ggtcctggtcgtgagactcc

SEQ ID NO: 7081 - DNA, 20 bp, Artificial Sequence
  Description of Artificial Sequence: Synthetic oligonucleotide
  Target: COL7A1; (-) strand; PAM type: NNNNGHTT; PAM sequence: AAAGGTTT
agaaaggggctccaggaccc

SEQ ID NO: 7082 - DNA, 20 bp, Artificial Sequence
  Description of Artificial Sequence: Synthetic oligonucleotide
  Target: COL7A1; (-) strand; PAM type: NNNNGHTT; PAM sequence: CTGGGTTT
accctctcaaatgctgtttg

SEQ ID NO: 7083 - DNA, 20 bp, Artificial Sequence
  Description of Artificial Sequence: Synthetic oligonucleotide
  Target: COL7A1; (-) strand; PAM type: NNNNGHTT; PAM sequence: TGCTGTTT
catgttcctaccctctcaaa

SEQ ID NO: 7084 - DNA, 20 bp, Artificial Sequence
  Description of Artificial Sequence: Synthetic oligonucleotide
  Target: COL7A1; (-) strand; PAM type: NNNNGHTT; PAM sequence: CTGTGTTT
ttgtgaacctctccttggtc

SEQ ID NO: 7085 - DNA, 20 bp, Artificial Sequence
  Description of Artificial Sequence: Synthetic oligonucleotide
  Target: COL7A1; (-) strand; PAM type: NNNNGHTT; PAM sequence: GTCTGTTT
cttctgtgtgcccatccttg

SEQ ID NO: 7086 - DNA, 20 bp, Artificial Sequence
  Description of Artificial Sequence: Synthetic oligonucleotide
  Target: COL7A1; (-) strand; PAM type: NNNNGHTT; PAM sequence: CTTGGCTT
ctgagctctgggggccctgt

SEQ ID NO: 7087 - DNA, 20 bp, Artificial Sequence
  Description of Artificial Sequence: Synthetic oligonucleotide
  Target: COL7A1; (-) strand; PAM type: NNNNGHTT; PAM sequence: GTCGGCTT
atcacagggagccacacact

SEQ ID NO: 7088 - DNA, 20 bp, Artificial Sequence
  Description of Artificial Sequence: Synthetic oligonucleotide
  Target: COL7A1; (-) strand; PAM type: NNNNGHTT; PAM sequence: CTCAGCTT
gtttacccaccctcatgacc

SEQ ID NO: 7089 - DNA, 20 bp, Artificial Sequence
  Description of Artificial Sequence: Synthetic oligonucleotide
  Target: COL7A1; (-) strand; PAM type: NNNNGHTT; PAM sequence: CATAGTTT
ctaacttctgaccttcgacc

SEQ ID NO: 7090 - DNA, 20 bp, Artificial Sequence
  Description of Artificial Sequence: Synthetic oligonucleotide
  Target: COL7A1; (-) strand; PAM type: NNNNGHTT; PAM sequence: GCCTGTTT
ctcctctgcctcacccacaa

SEQ ID NO: 7091 - DNA, 20 bp, Artificial Sequence
  Description of Artificial Sequence: Synthetic oligonucleotide
  Target: COL7A1; (-) strand; PAM type: NNNNGHTT; PAM sequence: CCAGGTTT
gtcagggtccacaggggtct

SEQ ID NO: 7092 - DNA, 20 bp, Artificial Sequence
  Description of Artificial Sequence: Synthetic oligonucleotide
  Target: COL7A1; (-) strand; PAM type: NNNNGHTT; PAM sequence: CCGTGTTT
ctgtggcccctgtagggaca

SEQ ID NO: 7093 - DNA, 20 bp, Artificial Sequence
  Description of Artificial Sequence: Synthetic oligonucleotide
  Target: COL7A1; (-) strand; PAM type: NNNNGHTT; PAM sequence: GGTTGTTT
ctctgctcatgcagtctctg

SEQ ID NO: 7094 - DNA, 20 bp, Artificial Sequence
  Description of Artificial Sequence: Synthetic oligonucleotide
  Target: COL7A1; (-) strand; PAM type: NNNNGHTT; PAM sequence: CTCAGTTT
gccccagtgaccagtactgc

SEQ ID NO: 7095 - DNA, 20 bp, Artificial Sequence
  Description of Artificial Sequence: Synthetic oligonucleotide
  Target: COL7A1; (-) strand; PAM type: NNNNGHTT; PAM sequence: CCCAGATT
gggaacaggcccaagtgagg

SEQ ID NO: 7096 - DNA, 20 bp, Artificial Sequence
  Description of Artificial Sequence: Synthetic oligonucleotide
  Target: COL7A1; (-) strand; PAM type: NNNNGHTT; PAM sequence: GCCTGCTT
ctgtgtgcctctctgtgtgt

SEQ ID NO: 7097 - DNA, 20 bp, Artificial Sequence
  Description of Artificial Sequence: Synthetic oligonucleotide
  Target: COL7A1; (-) strand; PAM type: NNNNGHTT; PAM sequence: GTGTGTTT
gtgtgtgcatgtctgtgtgt

SEQ ID NO: 7098 - DNA, 20 bp, Artificial Sequence
  Description of Artificial Sequence: Synthetic oligonucleotide
  Target: COL7A1; (-) strand; PAM type: NNNNGHTT; PAM sequence: TTGTGTTT
gacatctctcccctgtgacc

SEQ ID NO: 7099 - DNA, 20 bp, Artificial Sequence
  Description of Artificial Sequence: Synthetic oligonucleotide
  Target: COL7A1; (-) strand; PAM type: NNNNGHTT; PAM sequence: CTTAGCTT
ctagtgaccaggaagccacc

SEQ ID NO: 7100 - DNA, 20 bp, Artificial Sequence
  Description of Artificial Sequence: Synthetic oligonucleotide
  Target: COL7A1; (-) strand; PAM type: NNNNGHTT; PAM sequence: TCTTGTTT
ctggggctgccaccccattt

SEQ ID NO: 7101 - DNA, 20 bp, Artificial Sequence
  Description of Artificial Sequence: Synthetic oligonucleotide
  Target: COL7A1; (-) strand; PAM type: NNNNGHTT; PAM sequence: ATGGGCTT
tggagaacaggtgggctgcg

SEQ ID NO: 7102 - DNA, 20 bp, Artificial Sequence
  Description of Artificial Sequence: Synthetic oligonucleotide
  Target: COL7A1; (-) strand; PAM type: NNNNGHTT; PAM sequence: ATGGGCTT
tgggaggggtgggacccccc

SEQ ID NO: 7103 - DNA, 20 bp, Artificial Sequence
  Description of Artificial Sequence: Synthetic oligonucleotide
  Target: COL7A1; (-) strand; PAM type: NNNNGHTT; PAM sequence: ATCGGCTT
ttccactcctgcagggcccc

SEQ ID NO: 7104 - DNA, 20 bp, Artificial Sequence
  Description of Artificial Sequence: Synthetic oligonucleotide
  Target: COL7A1; (-) strand; PAM type: NNNNGHTT; PAM sequence: GGTAGCTT
agacctgggatgagagctct

SEQ ID NO: 7105 - DNA, 20 bp, Artificial Sequence
  Description of Artificial Sequence: Synthetic oligonucleotide
  Target: COL7A1; (-) strand; PAM type: NNNNGHTT; PAM sequence: GGTTGTTT
aaactgctggcatcaaggtg

SEQ ID NO: 7106 - DNA, 20 bp, Artificial Sequence
  Description of Artificial Sequence: Synthetic oligonucleotide
  Target: COL7A1; (-) strand; PAM type: NNNNGHTT; PAM sequence: AGGAGCTT
ggccgtgcggggcagaaggc

SEQ ID NO: 7107 - DNA, 20 bp, Artificial Sequence
  Description of Artificial Sequence: Synthetic oligonucleotide
  Target: COL7A1; (-) strand; PAM type: NNNNGHTT; PAM sequence: AGGTGCTT
gcctagggaaaagggtgtga

SEQ ID NO: 7108 - DNA, 20 bp, Artificial Sequence
  Description of Artificial Sequence: Synthetic oligonucleotide
  Target: COL7A1; (-) strand; PAM type: NNNNGHTT; PAM sequence: CTCTGTTT
ggcttgggatgtccccttga

SEQ ID NO: 7109 - DNA, 20 bp, Artificial Sequence
  Description of Artificial Sequence: Synthetic oligonucleotide
  Target: COL7A1; (-) strand; PAM type: NNNNGHTT; PAM sequence: CCAGGCTT
cctggaagtgtgccggtgag

SEQ ID NO: 7110 - DNA, 20 bp, Artificial Sequence
  Description of Artificial Sequence: Synthetic oligonucleotide
  Target: COL7A1; (-) strand; PAM type: NNNNGHTT; PAM sequence: AGCAGTTT
acacccataggctggttcct

SEQ ID NO: 7111 - DNA, 20 bp, Artificial Sequence
  Description of Artificial Sequence: Synthetic oligonucleotide
  Target: COL7A1; (-) strand; PAM type: NNNNGHTT; PAM sequence: TCTTGTTT
ccatttccccacctggtcat

SEQ ID NO: 7112 - DNA, 20 bp, Artificial Sequence
  Description of Artificial Sequence: Synthetic oligonucleotide
  Target: COL7A1; (-) strand; PAM type: NNNNGHTT; PAM sequence: CAGGGTTT
ctttgtgttctgccgtatct

SEQ ID NO: 7113 - DNA, 20 bp, Artificial Sequence
  Description of Artificial Sequence: Synthetic oligonucleotide
  Target: COL7A1; (-) strand; PAM type: NNNNGHTT; PAM sequence: TGATGTTT
cttcagagcattagaagcca

SEQ ID NO: 7114 - DNA, 20 bp, Artificial Sequence
  Description of Artificial Sequence: Synthetic oligonucleotide
  Target: COL7A1; (-) strand; PAM type: NNNNGHTT; PAM sequence: TGGAGTTT
tctgggagagaagtgagtat

SEQ ID NO: 7115 - DNA, 20 bp, Artificial Sequence
  Description of Artificial Sequence: Synthetic oligonucleotide
  Target: COL7A1; (-) strand; PAM type: NNNNGHTT; PAM sequence: AGGAGATT
tgtcttccttagggagagaa

SEQ ID NO: 7116 - DNA, 20 bp, Artificial Sequence
  Description of Artificial Sequence: Synthetic oligonucleotide
  Target: COL7A1; (-) strand; PAM type: NNNNGHTT; PAM sequence: CTCTGCTT
ccacctggggtctctctggt

SEQ ID NO: 7117 - DNA, 20 bp, Artificial Sequence
  Description of Artificial Sequence: Synthetic oligonucleotide
  Target: COL7A1; (-) strand; PAM type: NNNNGHTT; PAM sequence: GAATGTTT
tcttgcagccagacaccagt

SEQ ID NO: 7118 - DNA, 20 bp, Artificial Sequence
  Description of Artificial Sequence: Synthetic oligonucleotide
  Target: COL7A1; (-) strand; PAM type: NNNNGHTT; PAM sequence: ACACGCTT
atgactttatatggtcaccc

SEQ ID NO: 7119 - DNA, 20 bp, Artificial Sequence
  Description of Artificial Sequence: Synthetic oligonucleotide
  Target: COL7A1; (-) strand; PAM type: NNNNGHTT; PAM sequence: CTGGGATT
cgcctcggcctcctaaagtg

SEQ ID NO: 7120 - DNA, 20 bp, Artificial Sequence
  Description of Artificial Sequence: Synthetic oligonucleotide
  Target: COL7A1; (-) strand; PAM type: NNNNGHTT; PAM sequence: TGGGGTTT
ttttgtatttttagtagaga

SEQ ID NO: 7121 - DNA, 20 bp, Artificial Sequence
  Description of Artificial Sequence: Synthetic oligonucleotide
  Target: COL7A1; (-) strand; PAM type: NNNNGHTT; PAM sequence: CTGGGATT
tgcctcaacctcccgagtaa

SEQ ID NO: 7122 - DNA, 20 bp, Artificial Sequence
  Description of Artificial Sequence: Synthetic oligonucleotide
  Target: COL7A1; (-) strand; PAM type: NNNNGHTT; PAM sequence: AAGTGATT
aaccttcgactctcgggttc

SEQ ID NO: 7123 - DNA, 20 bp, Artificial Sequence
  Description of Artificial Sequence: Synthetic oligonucleotide
  Target: COL7A1; (-) strand; PAM type: NNNNGHTT; PAM sequence: TGGAGTTT
tagtttttttttttttgaga

SEQ ID NO: 7124 - DNA, 20 bp, Artificial Sequence
  Description of Artificial Sequence: Synthetic oligonucleotide
  Target: COL7A1; (-) strand; PAM type: NNNNGHTT; PAM sequence: CATAGTTT
catacagatgcatccagaaa

SEQ ID NO: 7125 - DNA, 20 bp, Artificial Sequence
  Description of Artificial Sequence: Synthetic oligonucleotide
  Target: COL7A1; (-) strand; PAM type: NNNNGHTT; PAM sequence: CCTGGATT
tccctggcccctctggtccc

SEQ ID NO: 7126 - DNA, 20 bp, Artificial Sequence
  Description of Artificial Sequence: Synthetic oligonucleotide
  Target: COL7A1; (-) strand; PAM type: NNNNGHTT; PAM sequence: AGGGGCTT
tcttaacaaagactttttcc

SEQ ID NO: 7127 - DNA, 20 bp, Artificial Sequence
  Description of Artificial Sequence: Synthetic oligonucleotide
  Target: COL7A1; (-) strand; PAM type: NNNNGHTT; PAM sequence: ACAGGTTT
agggtctcagtccctggcac

SEQ ID NO: 7128 - DNA, 20 bp, Artificial Sequence
  Description of Artificial Sequence: Synthetic oligonucleotide
  Target: COL7A1; (-) strand; PAM type: NNNNGHTT; PAM sequence: GGGGGTTT
gagaaaaggtgagagggtgt

SEQ ID NO: 7129 - DNA, 20 bp, Artificial Sequence
  Description of Artificial Sequence: Synthetic oligonucleotide
  Target: COL7A1; (-) strand; PAM type: NNNNGHTT; PAM sequence: AAGGGTTT
cccctatcctcagggcattg

SEQ ID NO: 7130 - DNA, 20 bp, Artificial Sequence
  Description of Artificial Sequence: Synthetic oligonucleotide
  Target: COL7A1; (-) strand; PAM type: NNNNGHTT; PAM sequence: CTCTGATT
tgcaggcatgggagggcctg

SEQ ID NO: 7131 - DNA, 20 bp, Artificial Sequence
  Description of Artificial Sequence: Synthetic oligonucleotide
  Target: COL7A1; (-) strand; PAM type: NNNNGHTT; PAM sequence: GTGTGATT
agcccctggggaaagggtga

SEQ ID NO: 7132 - DNA, 20 bp, Artificial Sequence
  Description of Artificial Sequence: Synthetic oligonucleotide
  Target: COL7A1; (-) strand; PAM type: NNNNGHTT; PAM sequence: GCAAGCTT
ggcttcaaggctgttcctca

SEQ ID NO: 7133 - DNA, 20 bp, Artificial Sequence
  Description of Artificial Sequence: Synthetic oligonucleotide
  Target: COL7A1; (-) strand; PAM type: NNNNGHTT; PAM sequence: CTTGGCTT
aggttctaccttgggcatgg

SEQ ID NO: 7134 - DNA, 20 bp, Artificial Sequence
  Description of Artificial Sequence: Synthetic oligonucleotide
  Target: COL7A1; (-) strand; PAM type: NNNNGHTT; PAM sequence: CATGGCTT
ccagcaggttctaccttggg

SEQ ID NO: 7135 - DNA, 20 bp, Artificial Sequence
  Description of Artificial Sequence: Synthetic oligonucleotide
  Target: COL7A1; (-) strand; PAM type: NNNNGHTT; PAM sequence: GGGTGCTT
cctgctgggggctggcattg

SEQ ID NO: 7136 - DNA, 20 bp, Artificial Sequence
  Description of Artificial Sequence: Synthetic oligonucleotide
  Target: COL7A1; (-) strand; PAM type: NNNNGHTT; PAM sequence: TGGTGCTT
aacattcccatgagtcctca

SEQ ID NO: 7137 - DNA, 20 bp, Artificial Sequence
  Description of Artificial Sequence: Synthetic oligonucleotide
  Target: COL7A1; (-) strand; PAM type: NNNNGHTT; PAM sequence: TGTGGATT
ggggtgatgggaacctctga

SEQ ID NO: 7138 - DNA, 20 bp, Artificial Sequence
  Description of Artificial Sequence: Synthetic oligonucleotide
  Target: COL7A1; (-) strand; PAM type: NNNNGHTT; PAM sequence: CCGGGTTT
ctctctatcaccagggtgac

SEQ ID NO: 7139 - DNA, 20 bp, Artificial Sequence
  Description of Artificial Sequence: Synthetic oligonucleotide
  Target: COL7A1; (-) strand; PAM type: NNNNGHTT; PAM sequence: TGTGGTTT
ccggtgagactccttcccac

SEQ ID NO: 7140 - DNA, 20 bp, Artificial Sequence
  Description of Artificial Sequence: Synthetic oligonucleotide
  Target: COL7A1; (-) strand; PAM type: NNNNGHTT; PAM sequence: TCATGTTT
cttggaaccagggctgactc

SEQ ID NO: 7141 - DNA, 20 bp, Artificial Sequence
  Description of Artificial Sequence: Synthetic oligonucleotide
  Target: COL7A1; (-) strand; PAM type: NNNNGHTT; PAM sequence: GCTTGCTT
gtcccctccccttgagaact

SEQ ID NO: 7142 - DNA, 20 bp, Artificial Sequence
  Description of Artificial Sequence: Synthetic oligonucleotide
  Target: COL7A1; (-) strand; PAM type: NNNNGHTT; PAM sequence: AACTGCTT
tggggtcccctccccttgag

SEQ ID NO: 7143 - DNA, 20 bp, Artificial Sequence
  Description of Artificial Sequence: Synthetic oligonucleotide
  Target: COL7A1; (-) strand; PAM type: NNNNGHTT; PAM sequence: CAAGGCTT
cccgttaccctgggcaacct

SEQ ID NO: 7144 - DNA, 20 bp, Artificial Sequence
  Description of Artificial Sequence: Synthetic oligonucleotide
  Target: COL7A1; (-) strand; PAM type: NNNNGHTT; PAM sequence: CCCGGCTT
ccttccatccacagggccca

SEQ ID NO: 7145 - DNA, 20 bp, Artificial Sequence
  Description of Artificial Sequence: Synthetic oligonucleotide
  Target: COL7A1; (-) strand; PAM type: NNNNGHTT; PAM sequence: AAGTGTTT
gggaacgggtaagtgaagcg

SEQ ID NO: 7146 - DNA, 20 bp, Artificial Sequence
  Description of Artificial Sequence: Synthetic oligonucleotide
  Target: COL7A1; (-) strand; PAM type: NNNNGHTT; PAM sequence: GGAGGTTT
aagcctggtatggggcaagg

SEQ ID NO: 7147 - DNA, 20 bp, Artificial Sequence
  Description of Artificial Sequence: Synthetic oligonucleotide
  Target: COL7A1; (-) strand; PAM type: NNNNGHTT; PAM sequence: GTTTGTTT
ggccaagctgtatctgtcct

SEQ ID NO: 7148 - DNA, 20 bp, Artificial Sequence
  Description of Artificial Sequence: Synthetic oligonucleotide
  Target: COL7A1; (-) strand; PAM type: NNNNGHTT; PAM sequence: TCCTGTTT
gcagggccaagctgtatctg

SEQ ID NO: 7149 - DNA, 20 bp, Artificial Sequence
  Description of Artificial Sequence: Synthetic oligonucleotide
  Target: COL7A1; (-) strand; PAM type: NNNNGHTT; PAM sequence: CTGTGATT
cctatagaacactatctggg

SEQ ID NO: 7150 - DNA, 20 bp, Artificial Sequence
  Description of Artificial Sequence: Synthetic oligonucleotide
  Target: COL7A1; (-) strand; PAM type: NNNNGHTT; PAM sequence: CTGGGATT
gggatgtggcagatgggaca

SEQ ID NO: 7151 - DNA, 20 bp, Artificial Sequence
  Description of Artificial Sequence: Synthetic oligonucleotide
  Target: COL7A1; (-) strand; PAM type: NNNNGHTT; PAM sequence: CCTTGATT
ctctgaccctgctgaactga

SEQ ID NO: 7152 - DNA, 20 bp, Artificial Sequence
  Description of Artificial Sequence: Synthetic oligonucleotide
  Target: COL7A1; (-) strand; PAM type: NNNNGHTT; PAM sequence: CCTGGCTT
ctaaccctcagccccaggga

SEQ ID NO: 7153 - DNA, 20 bp, Artificial Sequence
  Description of Artificial Sequence: Synthetic oligonucleotide
  Target: COL7A1; (-) strand; PAM type: NNNNGHTT; PAM sequence: CGGGGCTT
ccctctctcttcagggtgac

SEQ ID NO: 7154 - DNA, 20 bp, Artificial Sequence
  Description of Artificial Sequence: Synthetic oligonucleotide
  Target: COL7A1; (-) strand; PAM type: NNNNGHTT; PAM sequence: TGGGGTTT
ggagtttgggaccccttgtc

SEQ ID NO: 7155 - DNA, 20 bp, Artificial Sequence
  Description of Artificial Sequence: Synthetic oligonucleotide
  Target: COL7A1; (-) strand; PAM type: NNNNGHTT; PAM sequence: TGGAGTTT
gtggttttggagggggtggt

SEQ ID NO: 7156 - DNA, 20 bp, Artificial Sequence
  Description of Artificial Sequence: Synthetic oligonucleotide
  Target: COL7A1; (-) strand; PAM type: NNNNGHTT; PAM sequence: CGTGGTTT
gttccctccaggtcagaggt

SEQ ID NO: 7157 - DNA, 20 bp, Artificial Sequence
  Description of Artificial Sequence: Synthetic oligonucleotide
  Target: COL7A1; (-) strand; PAM type: NNNNGHTT; PAM sequence: GGGGGATT
ccccaaagtgagtaccagtt

SEQ ID NO: 7158 - DNA, 20 bp, Artificial Sequence
  Description of Artificial Sequence: Synthetic oligonucleotide
  Target: COL7A1; (-) strand; PAM type: NNNNGHTT; PAM sequence: CAGGGATT
gagcaggtgagtggaggggc

SEQ ID NO: 7159 - DNA, 20 bp, Artificial Sequence
  Description of Artificial Sequence: Synthetic oligonucleotide
  Target: COL7A1; (-) strand; PAM type: NNNNGHTT; PAM sequence: GTGTGTTT
tcccttcggtcttcccaccc

SEQ ID NO: 7160 - DNA, 20 bp, Artificial Sequence
  Description of Artificial Sequence: Synthetic oligonucleotide
  Target: COL7A1; (-) strand; PAM type: NNNNGHTT; PAM sequence: CTGGGCTT
cctggggcagtggttgggtg

SEQ ID NO: 7161 - DNA, 20 bp, Artificial Sequence
  Description of Artificial Sequence: Synthetic oligonucleotide
  Target: COL7A1; (-) strand; PAM type: NNNNGHTT; PAM sequence: GTCTGATT
tgtgctaggggtggcttgga

SEQ ID NO: 7162 - DNA, 20 bp, Artificial Sequence
  Description of Artificial Sequence: Synthetic oligonucleotide
  Target: COL7A1; (-) strand; PAM type: NNNNGHTT; PAM sequence: GGTGGCTT
gagggacaggttgtgctagg

SEQ ID NO: 7163 - DNA, 20 bp, Artificial Sequence
  Description of Artificial Sequence: Synthetic oligonucleotide
  Target: COL7A1; (-) strand; PAM type: NNNNGHTT; PAM sequence: ATCTGTTT
cccagggtcatggggtcgtc

SEQ ID NO: 7164 - DNA, 20 bp, Artificial Sequence
  Description of Artificial Sequence: Synthetic oligonucleotide
  Target: COL7A1; (-) strand; PAM type: NNNNGHTT; PAM sequence: CTTTGATT
ttactctggcccttgtgacc

SEQ ID NO: 7165 - DNA, 20 bp, Artificial Sequence
  Description of Artificial Sequence: Synthetic oligonucleotide
  Target: COL7A1; (-) strand; PAM type: NNNNGHTT; PAM sequence: CAGGGCTT
cccaggaccccgtggccccc

SEQ ID NO: 7166 - DNA, 20 bp, Artificial Sequence
  Description of Artificial Sequence: Synthetic oligonucleotide
  Target: COL7A1; (-) strand; PAM type: NNNNGHTT; PAM sequence: CTGGGCTT
agtcatcggaggtgaaggac

SEQ ID NO: 7167 - DNA, 20 bp, Artificial Sequence
  Description of Artificial Sequence: Synthetic oligonucleotide
  Target: COL7A1; (-) strand; PAM type: NNNNGHTT; PAM sequence: AGGGGCTT
aggaatagctggacatgtct

SEQ ID NO: 7168 - DNA, 20 bp, Artificial Sequence
  Description of Artificial Sequence: Synthetic oligonucleotide
  Target: COL7A1; (-) strand; PAM type: NNNNGHTT; PAM sequence: CTCTGTTT
agcccaagcaccaccctctg

SEQ ID NO: 7169 - DNA, 20 bp, Artificial Sequence
  Description of Artificial Sequence: Synthetic oligonucleotide
  Target: COL7A1; (-) strand; PAM type: NNNNGHTT; PAM sequence: CAGGGCTT
tcctgacctcttcacctcct

SEQ ID NO: 7170 - DNA, 20 bp, Artificial Sequence
  Description of Artificial Sequence: Synthetic oligonucleotide
  Target: COL7A1; (-) strand; PAM type: NNNNGHTT; PAM sequence: CGGGGTTT
ggcactcctcaaagctgtct

SEQ ID NO: 7171 - DNA, 20 bp, Artificial Sequence
  Description of Artificial Sequence: Synthetic oligonucleotide
  Target: COL7A1; (-) strand; PAM type: NNNNGHTT; PAM sequence: CGAGGTTT
agggtgagtgtggagaccat

SEQ ID NO: 7172 - DNA, 20 bp, Artificial Sequence
  Description of Artificial Sequence: Synthetic oligonucleotide
  Target: COL7A1; (-) strand; PAM type: NNNNGHTT; PAM sequence: ACTGGCTT
acatctgtccctgcaccctg

SEQ ID NO: 7173 - DNA, 20 bp, Artificial Sequence
  Description of Artificial Sequence: Synthetic oligonucleotide
  Target: COL7A1; (-) strand; PAM type: NNNNGHTT; PAM sequence: CACTGATT
gaggttggcagcacaggtct

SEQ ID NO: 7174 - DNA, 20 bp, Artificial Sequence
  Description of Artificial Sequence: Synthetic oligonucleotide
  Target: COL7A1; (-) strand; PAM type: NNNNGHTT; PAM sequence: TCAGGTTT
tgtcaggcatccttcactac

SEQ ID NO: 7175 - DNA, 20 bp, Artificial Sequence
  Description of Artificial Sequence: Synthetic oligonucleotide
  Target: COL7A1; (-) strand; PAM type: NNNNGHTT; PAM sequence: CGTCGCTT
gagcggacccagagcagctg

SEQ ID NO: 7176 - DNA, 20 bp, Artificial Sequence
  Description of Artificial Sequence: Synthetic oligonucleotide
  Target: COL7A1; (-) strand; PAM type: NNNNGHTT; PAM sequence: TAGGGCTT
gcagccactggaccccacct

SEQ ID NO: 7177 - DNA, 20 bp, Artificial Sequence
  Description of Artificial Sequence: Synthetic oligonucleotide
  Target: COL7A1; (-) strand; PAM type: NNNNGHTT; PAM sequence: CCAGGCTT
ttcagccccatccgtgaggc

SEQ ID NO: 7178 - DNA, 20 bp, Artificial Sequence
  Description of Artificial Sequence: Synthetic oligonucleotide
  Target: COL7A1; (-) strand; PAM type: NNNNGHTT; PAM sequence: GGGAGCTT
gactcctggggctatccact

SEQ ID NO: 7179 - DNA, 20 bp, Artificial Sequence
  Description of Artificial Sequence: Synthetic oligonucleotide
  Target: COL7A1; (-) strand; PAM type: NNNNGHTT; PAM sequence: CTGTGTTT
tctgtcatcctcctcaggct

SEQ ID NO: 7180 - DNA, 20 bp, Artificial Sequence
  Description of Artificial Sequence: Synthetic oligonucleotide
  Target: COL7A1; (-) strand; PAM type: NNNNGHTT; PAM sequence: ATGTGTTT
gtttggtcacacacaccctg

SEQ ID NO: 7181 - DNA, 20 bp, Artificial Sequence
  Description of Artificial Sequence: Synthetic oligonucleotide
  Target: COL7A1; (-) strand; PAM type: NNNNGHTT; PAM sequence: TAGGGTTT
actgctgactccctaataga

SEQ ID NO: 7182 - DNA, 20 bp, Artificial Sequence
  Description of Artificial Sequence: Synthetic oligonucleotide
  Target: COL7A1; (-) strand; PAM type: NNNNGHTT; PAM sequence: GCCAGATT
tcaggtttggccctggggca

SEQ ID NO: 7183 - DNA, 20 bp, Artificial Sequence
  Description of Artificial Sequence: Synthetic oligonucleotide
  Target: COL7A1; (-) strand; PAM type: NNNNGHTT; PAM sequence: TCAGGTTT
cctcttgggccacaggcagt

SEQ ID NO: 7184 - DNA, 20 bp, Artificial Sequence
  Description of Artificial Sequence: Synthetic oligonucleotide
  Target: COL7A1; (-) strand; PAM type: NNNNGHTT; PAM sequence: GCCCGCTT
aaggtgtgtctgggtgggct

SEQ ID NO: 7185 - DNA, 20 bp, Artificial Sequence
  Description of Artificial Sequence: Synthetic oligonucleotide
  Target: COL7A1; (-) strand; PAM type: NNNNGHTT; PAM sequence: GACAGCTT
ggcagttggggctctgtgga

SEQ ID NO: 7186 - DNA, 20 bp, Artificial Sequence
  Description of Artificial Sequence: Synthetic oligonucleotide
  Target: COL7A1; (-) strand; PAM type: NNNNGHTT; PAM sequence: CCAGGATT
tggccagggtgagggggagg

SEQ ID NO: 7187 - DNA, 20 bp, Artificial Sequence
  Description of Artificial Sequence: Synthetic oligonucleotide
  Target: COL7A1; (-) strand; PAM type: NNNNGHTT; PAM sequence: TGATGCTT
gaccccagcatgacctccca

SEQ ID NO: 7188 - DNA, 20 bp, Artificial Sequence
  Description of Artificial Sequence: Synthetic oligonucleotide
  Target: COL7A1; (-) strand; PAM type: NNNNGHTT; PAM sequence: CAGGGCTT
gggagccggtgcccagagcg

SEQ ID NO: 7189 - DNA, 20 bp, Artificial Sequence
  Description of Artificial Sequence: Synthetic oligonucleotide
  Target: COL7A1; (-) strand; PAM type: NNNNGHTT; PAM sequence: GGACGCTT
tgaggctccgccagccctgg

SEQ ID NO: 7190 - DNA, 20 bp, Artificial Sequence
  Description of Artificial Sequence: Synthetic oligonucleotide
  Target: COL7A1; (-) strand; PAM type: NNNNGHTT; PAM sequence: CTGAGCTT
gggcagagcctccctgattc

SEQ ID NO: 7191 - DNA, 20 bp, Artificial Sequence
  Description of Artificial Sequence: Synthetic oligonucleotide
  Target: COL7A1; (-) strand; PAM type: NNNNGHTT; PAM sequence: CCCTGATT
gggccatgggggcagagcct

SEQ ID NO: 7192 - DNA, 20 bp, Artificial Sequence
  Description of Artificial Sequence: Synthetic oligonucleotide
  Target: COL7A1; (-) strand; PAM type: NNNNGHTT; PAM sequence: CTGGGATT
gtgcgtgtgccagggtgggc

SEQ ID NO: 7193 - DNA, 20 bp, Artificial Sequence
  Description of Artificial Sequence: Synthetic oligonucleotide
  Target: COL7A1; (-) strand; PAM type: NNNNGHTT; PAM sequence: CCAGGATT
gctctggattggagaaagga

SEQ ID NO: 7194 - DNA, 20 bp, Artificial Sequence
  Description of Artificial Sequence: Synthetic oligonucleotide
  Target: COL7A1; (-) strand; PAM type: NNNNGHTT; PAM sequence: TCTGGATT
ttggggatccgggcttgtgc

SEQ ID NO: 7195 - DNA, 20 bp, Artificial Sequence
  Description of Artificial Sequence: Synthetic oligonucleotide
  Target: COL7A1; (-) strand; PAM type: NNNNGHTT; PAM sequence: CCGGGCTT
ggtgtggatggtttggggat

SEQ ID NO: 7196 - DNA, 20 bp, Artificial Sequence
  Description of Artificial Sequence: Synthetic oligonucleotide
  Target: COL7A1; (-) strand; PAM type: NNNNGHTT; PAM sequence: GATGGTTT
agcttcggatgggtggtgtg

SEQ ID NO: 7197 - DNA, 20 bp, Artificial Sequence
  Description of Artificial Sequence: Synthetic oligonucleotide
  Target: COL7A1; (-) strand; PAM type: NNNNGHTT; PAM sequence: GAGAGCTT
cgtaggcagagcatgcgctg

SEQ ID NO: 7198 - DNA, 20 bp, Artificial Sequence
  Description of Artificial Sequence: Synthetic oligonucleotide
  Target: COL7A1; (-) strand; PAM type: NNNNGHTT; PAM sequence: CACAGCTT
tgggtaggggtcactggagc

SEQ ID NO: 7199 - DNA, 20 bp, Artificial Sequence
  Description of Artificial Sequence: Synthetic oligonucleotide
  Target: COL7A1; (-) strand; PAM type: NNNNGHTT; PAM sequence: CAATGCTT
gtgtcgaggctgcagatcct

SEQ ID NO: 7200 - DNA, 20 bp, Artificial Sequence
  Description of Artificial Sequence: Synthetic oligonucleotide
  Target: COL7A1; (-) strand; PAM type: NNNNGHTT; PAM sequence: CACTGATT
gtccacactgacccacccca

SEQ ID NO: 7201 - DNA, 20 bp, Artificial Sequence
  Description of Artificial Sequence: Synthetic oligonucleotide
  Target: COL7A1; (-) strand; PAM type: NNNNGHTT; PAM sequence: TCCTGATT
taccctgccctgctgtgtgt

SEQ ID NO: 7202 - DNA, 20 bp, Artificial Sequence
  Description of Artificial Sequence: Synthetic oligonucleotide
  Target: COL7A1; (-) strand; PAM type: NNNNGHTT; PAM sequence: GTTGGTTT
ccaggcccagagaaatccca

SEQ ID NO: 7203 - DNA, 20 bp, Artificial Sequence
  Description of Artificial Sequence: Synthetic oligonucleotide
  Target: COL7A1; (-) strand; PAM type: NNNNGHTT; PAM sequence: CAGAGTTT
ccaggtggggctctggggca

SEQ ID NO: 7204 - DNA, 20 bp, Artificial Sequence
  Description of Artificial Sequence: Synthetic oligonucleotide
  Target: COL7A1; (-) strand; PAM type: NNNNGHTT; PAM sequence: GGGGGTTT
gtcagggtggaatgggggct

SEQ ID NO: 7205 - DNA, 20 bp, Artificial Sequence
  Description of Artificial Sequence: Synthetic oligonucleotide
  Target: COL7A1; (-) strand; PAM type: NNNNGHTT; PAM sequence: TGGGGTTT
actcagcccacggtggggac

SEQ ID NO: 7206 - DNA, 20 bp, Artificial Sequence
  Description of Artificial Sequence: Synthetic oligonucleotide
  Target: COL7A1; (-) strand; PAM type: NNNNGHTT; PAM sequence: CAGGGTTT
gttcctggcgccacaggata

SEQ ID NO: 7207 - DNA, 20 bp, Artificial Sequence
  Description of Artificial Sequence: Synthetic oligonucleotide
  Target: COL7A1; (-) strand; PAM type: NNNNGHTT; PAM sequence: CACTGCTT
tctcctccatcagacctgct

SEQ ID NO: 7208 - DNA, 20 bp, Artificial Sequence
  Description of Artificial Sequence: Synthetic oligonucleotide
  Target: COL7A1; (-) strand; PAM type: NNNNGHTT; PAM sequence: CTGAGATT
ttgctggacccaaatctcct

SEQ ID NO: 7209 - DNA, 20 bp, Artificial Sequence
  Description of Artificial Sequence: Synthetic oligonucleotide
  Target: COL7A1; (-) strand; PAM type: NNNNGHTT; PAM sequence: CTCCGCTT
ccctccccgtattcagattc

SEQ ID NO: 7210 - DNA, 20 bp, Artificial Sequence
  Description of Artificial Sequence: Synthetic oligonucleotide
  Target: COL7A1; (-) strand; PAM type: NNNNGHTT; PAM sequence: TTCAGATT
ccccttaagccctccccgta

SEQ ID NO: 7211 - DNA, 20 bp, Artificial Sequence
  Description of Artificial Sequence: Synthetic oligonucleotide
  Target: COL7A1; (-) strand; PAM type: NNNNGHTT; PAM sequence: TTCAGTTT
ctcagagacgctgcttcctc

SEQ ID NO: 7212 - DNA, 20 bp, Artificial Sequence
  Description of Artificial Sequence: Synthetic oligonucleotide
  Target: COL7A1; (-) strand; PAM type: NNNNGHTT; PAM sequence: CGCTGCTT
actccctcctccctcagaga

SEQ ID NO: 7213 - DNA, 20 bp, Artificial Sequence
  Description of Artificial Sequence: Synthetic oligonucleotide
  Target: COL7A1; (-) strand; PAM type: NNNNGHTT; PAM sequence: CCTTGCTT
ccatgccttcccttgcagac

SEQ ID NO: 7214 - DNA, 20 bp, Artificial Sequence
  Description of Artificial Sequence: Synthetic oligonucleotide
  Target: COL7A1; (-) strand; PAM type: NNNNGHTT; PAM sequence: TTCGGATT
cgtccctggagccagtggat

SEQ ID NO: 7215 - DNA, 20 bp, Artificial Sequence
  Description of Artificial Sequence: Synthetic oligonucleotide
  Target: COL7A1; (-) strand; PAM type: NNNNGHTT; PAM sequence: AGTGGATT
ggggacccgtccctggagcc

SEQ ID NO: 7216 - DNA, 20 bp, Artificial Sequence
  Description of Artificial Sequence: Synthetic oligonucleotide
  Target: COL7A1; (-) strand; PAM type: NNNNGHTT; PAM sequence: GGAGGCTT
ccgccggggtgagtactgca

SEQ ID NO: 7217 - DNA, 20 bp, Artificial Sequence
  Description of Artificial Sequence: Synthetic oligonucleotide
  Target: COL7A1; (-) strand; PAM type: NNNNGHTT; PAM sequence: CTGGGCTT
cgacttggatgacgttcagg

SEQ ID NO: 7218 - DNA, 20 bp, Artificial Sequence
  Description of Artificial Sequence: Synthetic oligonucleotide
  Target: COL7A1; (-) strand; PAM type: NNNNGHTT; PAM sequence: TGGTGCTT
cttaggggttgagcggaccc

SEQ ID NO: 7219 - DNA, 20 bp, Artificial Sequence
  Description of Artificial Sequence: Synthetic oligonucleotide
  Target: COL7A1; (-) strand; PAM type: NNNNGHTT; PAM sequence: CACGGCTT
tccctgccccacaccccatc

SEQ ID NO: 7220 - DNA, 20 bp, Artificial Sequence
  Description of Artificial Sequence: Synthetic oligonucleotide
  Target: COL7A1; (-) strand; PAM type: NNNNGHTT; PAM sequence: ATCTGCTT
tcctccctgtctcgttatcc

SEQ ID NO: 7221 - DNA, 20 bp, Artificial Sequence
  Description of Artificial Sequence: Synthetic oligonucleotide
  Target: COL7A1; (-) strand; PAM type: NNNNGHTT; PAM sequence: GCAGGCTT
tggtctgaccctgttatctt

SEQ ID NO: 7222 - DNA, 20 bp, Artificial Sequence
  Description of Artificial Sequence: Synthetic oligonucleotide
  Target: COL7A1; (-) strand; PAM type: NNNNGHTT; PAM sequence: AGACGCTT
acatcccatgtgccctgggc

SEQ ID NO: 7223 - DNA, 20 bp, Artificial Sequence
  Description of Artificial Sequence: Synthetic oligonucleotide
  Target: COL7A1; (-) strand; PAM type: NNNNGHTT; PAM sequence: CTGTGATT
actgaccgagtaccaagtga

SEQ ID NO: 7224 - DNA, 20 bp, Artificial Sequence
  Description of Artificial Sequence: Synthetic oligonucleotide
  Target: COL7A1; (-) strand; PAM type: NNNNGHTT; PAM sequence: TGCTGATT
ccccaatccccacttggcag

SEQ ID NO: 7225 - DNA, 20 bp, Artificial Sequence
  Description of Artificial Sequence: Synthetic oligonucleotide
  Target: COL7A1; (-) strand; PAM type: NNNNGHTT; PAM sequence: CCTCGTTT
atcttgaggacactactgcc

SEQ ID NO: 7226 - DNA, 20 bp, Artificial Sequence
  Description of Artificial Sequence: Synthetic oligonucleotide
  Target: COL7A1; (-) strand; PAM type: NNNNGHTT; PAM sequence: CCGTGATT
aaatgaagtgtccaggggaa

SEQ ID NO: 7227 - DNA, 20 bp, Artificial Sequence
  Description of Artificial Sequence: Synthetic oligonucleotide
  Target: COL7A1; (-) strand; PAM type: NNNNGHTT; PAM sequence: GTGAGCTT
tgatgtgatccgcgccatcc

SEQ ID NO: 7228 - DNA, 20 bp, Artificial Sequence
  Description of Artificial Sequence: Synthetic oligonucleotide
  Target: COL7A1; (-) strand; PAM type: NNNNGHTT; PAM sequence: GGGAGTTT
ggtgcacaaaggagcccctg

SEQ ID NO: 7229 - DNA, 20 bp, Artificial Sequence
  Description of Artificial Sequence: Synthetic oligonucleotide
  Target: COL7A1; (-) strand; PAM type: NNNNGHTT; PAM sequence: GTTGGATT
aggagggggcccccacgcct

SEQ ID NO: 7230 - DNA, 20 bp, Artificial Sequence
  Description of Artificial Sequence: Synthetic oligonucleotide
  Target: COL7A1; (-) strand; PAM type: NNNNGHTT; PAM sequence: CTGTGTTT
gaaggtgcaagacagtgagg

SEQ ID NO: 7231 - DNA, 20 bp, Artificial Sequence
  Description of Artificial Sequence: Synthetic oligonucleotide
  Target: COL7A1; (-) strand; PAM type: NNNNGHTT; PAM sequence: TAAGGATT
acctcctttggagacagagg

SEQ ID NO: 7232 - DNA, 20 bp, Artificial Sequence
  Description of Artificial Sequence: Synthetic oligonucleotide
  Target: COL7A1; (-) strand; PAM type: NNNNGHTT; PAM sequence: ACAAGTTT
caggccaggtctttgcagaa

SEQ ID NO: 7233 - DNA, 20 bp, Artificial Sequence
  Description of Artificial Sequence: Synthetic oligonucleotide
  Target: COL7A1; (-) strand; PAM type: NNNNGHTT; PAM sequence: GTGCGCTT
gagcagccagtgcacagggt

SEQ ID NO: 7234 - DNA, 20 bp, Artificial Sequence
  Description of Artificial Sequence: Synthetic oligonucleotide
  Target: COL7A1; (-) strand; PAM type: NNNNGHTT; PAM sequence: CGCAGCTT
gcagcaatttccgcgaggtc

SEQ ID NO: 7235 - DNA, 20 bp, Artificial Sequence
  Description of Artificial Sequence: Synthetic oligonucleotide
  Target: COL7A1; (-) strand; PAM type: NNNNGHTT; PAM sequence: CCTGGTTT
caggctcaggccgattcggc

SEQ ID NO: 7236 - DNA, 20 bp, Artificial Sequence
  Description of Artificial Sequence: Synthetic oligonucleotide
  Target: COL7A1; (-) strand; PAM type: NNNNGHTT; PAM sequence: GGCCGATT
ctccaaggccctcaggctca

SEQ ID NO: 7237 - DNA, 20 bp, Artificial Sequence
  Description of Artificial Sequence: Synthetic oligonucleotide
  Target: COL7A1; (-) strand; PAM type: NNNNGHTT; PAM sequence: CGCGGATT
cagccaactccacgacgccc

SEQ ID NO: 7238 - DNA, 20 bp, Artificial Sequence
  Description of Artificial Sequence: Synthetic oligonucleotide
  Target: COL7A1; (-) strand; PAM type: NNNNGHTT; PAM sequence: TGCGGCTT
tttactgcctaggatgacgc

SEQ ID NO: 7239 - DNA, 20 bp, Artificial Sequence
  Description of Artificial Sequence: Synthetic oligonucleotide
  Target: COL7A1; (-) strand; PAM type: NNNNGHTT; PAM sequence: GACGGCTT
cagaggcgggggtcctagct

SEQ ID NO: 7240 - DNA, 20 bp, Artificial Sequence
  Description of Artificial Sequence: Synthetic oligonucleotide
  Target: COL7A1; (-) strand; PAM type: NNNNGHTT; PAM sequence: TATCGTTT
gtttatagttaagtgcgtca

SEQ ID NO: 7241 - DNA, 20 bp, Artificial Sequence
  Description of Artificial Sequence: Synthetic oligonucleotide
  Target: COL7A1; (-) strand; PAM type: NNNNGHTT; PAM sequence: GGGGGTTT
ccagaagccacggggggtcg

SEQ ID NO: 7242 - DNA, 20 bp, Artificial Sequence
  Description of Artificial Sequence: Synthetic oligonucleotide
  Target: COL7A1; (-) strand; PAM type: NNNNGHTT; PAM sequence: CTGTGATT
tccactcctcagcctggtca

SEQ ID NO: 7243 - DNA, 20 bp, Artificial Sequence
  Description of Artificial Sequence: Synthetic oligonucleotide
  Target: COL7A1; (-) strand; PAM type: NNNNGHTT; PAM sequence: ACTGGATT
gggcttgtctgggcaccccc

SEQ ID NO: 7244 - DNA, 20 bp, Artificial Sequence
  Description of Artificial Sequence: Synthetic oligonucleotide
  Target: COL7A1; (-) strand; PAM type: NNNNGHTT; PAM sequence: GAGGGCTT
gccggcgggacccatggcct

SEQ ID NO: 7245 - DNA, 20 bp, Artificial Sequence
  Description of Artificial Sequence: Synthetic oligonucleotide
  Target: COL7A1; (-) strand; PAM type: NNNNGHTT; PAM sequence: CAGGGCTT
gcccagagtcactcatttgc

SEQ ID NO: 7246 - DNA, 20 bp, Artificial Sequence
  Description of Artificial Sequence: Synthetic oligonucleotide
  Target: COL7A1; (-) strand; PAM type: NNNNGHTT; PAM sequence: CTTGGTTT
tggatccaggccaaggggac

SEQ ID NO: 7247 - DNA, 20 bp, Artificial Sequence
  Description of Artificial Sequence: Synthetic oligonucleotide
  Target: COL7A1; (-) strand; PAM type: NNNNGHTT; PAM sequence: TCCGGCTT
gacacaggttctctcctcct

SEQ ID NO: 7248 - DNA, 20 bp, Artificial Sequence
  Description of Artificial Sequence: Synthetic oligonucleotide
  Target: COL7A1; (-) strand; PAM type: NNNNGHTT; PAM sequence: GCTGGATT
gccccctccctgcaggcaca

SEQ ID NO: 7249 - DNA, 20 bp, Artificial Sequence
  Description of Artificial Sequence: Synthetic oligonucleotide
  Target: COL7A1; (-) strand; PAM type: NNNNGHTT; PAM sequence: GCTCGATT
cctggcctggggcatggagg

SEQ ID NO: 7250 - DNA, 20 bp, Artificial Sequence
  Description of Artificial Sequence: Synthetic oligonucleotide
  Target: COL7A1; (-) strand; PAM type: NNNNGHTT; PAM sequence: TCAGGATT
tctgggctgcccagagttat

SEQ ID NO: 7251 - DNA, 20 bp, Artificial Sequence
  Description of Artificial Sequence: Synthetic oligonucleotide
  Target: COL7A1; (-) strand; PAM type: NNNNGHTT; PAM sequence: ATGTGCTT
agcagccttggtgagtatag

SEQ ID NO: 7252 - DNA, 20 bp, Artificial Sequence
  Description of Artificial Sequence: Synthetic oligonucleotide
  Target: COL7A1; (-) strand; PAM type: NNNNGHTT; PAM sequence: GATAGTTT
gtcatagcactatgccccag

SEQ ID NO: 7253 - DNA, 20 bp, Artificial Sequence
  Description of Artificial Sequence: Synthetic oligonucleotide
  Target: COL7A1; (-) strand; PAM type: NNNNGHTT; PAM sequence: TGAGGTTT
tggaggcacctcaattctga

SEQ ID NO: 7254 - DNA, 20 bp, Artificial Sequence
  Description of Artificial Sequence: Synthetic oligonucleotide
  Target: COL7A1; (-) strand; PAM type: NNNNGHTT; PAM sequence: TGGGGCTT
tcctcccaggaggccagagc

SEQ ID NO: 7255 - DNA, 20 bp, Artificial Sequence
  Description of Artificial Sequence: Synthetic oligonucleotide
  Target: COL7A1; (-) strand; PAM type: NNNNGHTT; PAM sequence: GAAAGCTT
cagggaaggaaatgttcagg

SEQ ID NO: 7256 - DNA, 20 bp, Artificial Sequence
  Description of Artificial Sequence: Synthetic oligonucleotide
  Target: COL7A1; (-) strand; PAM type: NNNNGHTT; PAM sequence: AGGAGTTT
taatcttccatagtccagtg

SEQ ID NO: 7257 - DNA, 20 bp, Artificial Sequence
  Description of Artificial Sequence: Synthetic oligonucleotide
  Target: COL7A1; (-) strand; PAM type: NNNNGHTT; PAM sequence: TTGAGATT
gagaagtgacttggtcagag

SEQ ID NO: 7258 - DNA, 20 bp, Artificial Sequence
  Description of Artificial Sequence: Synthetic oligonucleotide
  Target: COL7A1; (-) strand; PAM type: NNNNGHTT; PAM sequence: GAGAGCTT
gctacaggtgtgctggacac

SEQ ID NO: 7259 - DNA, 20 bp, Artificial Sequence
  Description of Artificial Sequence: Synthetic oligonucleotide
  Target: COL7A1; (-) strand; PAM type: NNNNGHTT; PAM sequence: TGGGGCTT
aagtttgagctcctggagga

SEQ ID NO: 7260 - DNA, 20 bp, Artificial Sequence
  Description of Artificial Sequence: Synthetic oligonucleotide
  Target: COL7A1; (-) strand; PAM type: NNNNGHTT; PAM sequence: TCAAGTTT
aacaagtgccaagtctgttg

SEQ ID NO: 7261 - DNA, 20 bp, Artificial Sequence
  Description of Artificial Sequence: Synthetic oligonucleotide
  Target: COL7A1; (-) strand; PAM type: NNNNGHTT; PAM sequence: CGTAGCTT
ttcagaagtccccccagcat

SEQ ID NO: 7262 - DNA, 20 bp, Artificial Sequence
  Description of Artificial Sequence: Synthetic oligonucleotide
  Target: COL7A1; (-) strand; PAM type: NNNNGHTT; PAM sequence: CAGTGCTT
gctgctcctcctgcaccccc

SEQ ID NO: 7263 - DNA, 20 bp, Artificial Sequence
  Description of Artificial Sequence: Synthetic oligonucleotide
  Target: COL7A1; (-) strand; PAM type: NNNNGHTT; PAM sequence: TTTGGTTT
cctggggcatagtgttctca

SEQ ID NO: 7264 - DNA, 20 bp, Artificial Sequence
  Description of Artificial Sequence: Synthetic oligonucleotide
  Target: COL7A1; (-) strand; PAM type: NNNNGHTT; PAM sequence: GTGTGTTT
tctccaaggatgcctcttgt

SEQ ID NO: 7265 - DNA, 20 bp, Artificial Sequence
  Description of Artificial Sequence: Synthetic oligonucleotide
  Target: COL7A1; (-) strand; PAM type: NNNNGHTT; PAM sequence: CCAAGATT
agttcctcagccagctggtc

SEQ ID NO: 7266 - DNA, 20 bp, Artificial Sequence
  Description of Artificial Sequence: Synthetic oligonucleotide
  Target: COL7A1; (-) strand; PAM type: NNNNGHTT; PAM sequence: AGATGTTT
gcctacagggagctgagccc

SEQ ID NO: 7267 - DNA, 20 bp, Artificial Sequence
  Description of Artificial Sequence: Synthetic oligonucleotide
  Target: COL7A1; (-) strand; PAM type: NNNNGHTT; PAM sequence: CGGGGTTT
tgtaagcaagagggcagggc

SEQ ID NO: 7268 - DNA, 20 bp, Artificial Sequence
  Description of Artificial Sequence: Synthetic oligonucleotide
  Target: COL7A1; (-) strand; PAM type: NNNNGHTT; PAM sequence: CTGCGCTT
tccgtagcggcatgttctgg

SEQ ID NO: 7269 - DNA, 20 bp, Artificial Sequence
  Description of Artificial Sequence: Synthetic oligonucleotide
  Target: COL7A1; (-) strand; PAM type: NNNNGHTT; PAM sequence: TGGGGCTT
acgggcacctccatgtgggg

SEQ ID NO: 7270 - DNA, 20 bp, Artificial Sequence
  Description of Artificial Sequence: Synthetic oligonucleotide
  Target: COL7A1; (-) strand; PAM type: NNNNGHTT; PAM sequence: CTCAGCTT
cctctgctcccgcactgctg

SEQ ID NO: 7271 - DNA, 20 bp, Artificial Sequence
  Description of Artificial Sequence: Synthetic oligonucleotide
  Target: COL7A1; (-) strand; PAM type: NNNNGHTT; PAM sequence: CTTTGTTT
agtggcctagggggtctgct

SEQ ID NO: 7272 - DNA, 20 bp, Artificial Sequence
  Description of Artificial Sequence: Synthetic oligonucleotide
  Target: COL7A1; (-) strand; PAM type: NNNNGHTT; PAM sequence: GCCGGATT
ccccctggctgaatgggaaa

SEQ ID NO: 7273 - DNA, 20 bp, Artificial Sequence
  Description of Artificial Sequence: Synthetic oligonucleotide
  Target: COL7A1; (-) strand; PAM type: NNNNGHTT; PAM sequence: CCAGGATT
ttgtttgtgtacctgtgggt

SEQ ID NO: 7274 - DNA, 20 bp, Artificial Sequence
  Description of Artificial Sequence: Synthetic oligonucleotide
  Target: COL7A1; (-) strand; PAM type: NNNNGHTT; PAM sequence: GATTGTTT
cttgtcaacctgaggctgga

SEQ ID NO: 7275 - DNA, 20 bp, Artificial Sequence
  Description of Artificial Sequence: Synthetic oligonucleotide
  Target: COL7A1; (-) strand; PAM type: NNNNGHTT; PAM sequence: TGGAGATT
ggtccttgtcaacctgaggc

SEQ ID NO: 7276 - DNA, 20 bp, Artificial Sequence
  Description of Artificial Sequence: Synthetic oligonucleotide
  Target: COL7A1; (+) strand; PAM type: NNNNGHTT; PAM sequence: CCCTGTTT
ctccatctcccctcccatgg

SEQ ID NO: 7277 - DNA, 20 bp, Artificial Sequence
  Description of Artificial Sequence: Synthetic oligonucleotide
  Target: COL7A1; (+) strand; PAM type: NNNNGHTT; PAM sequence: CATGGCTT
ccggtagaatctctggccct

SEQ ID NO: 7278 - DNA, 20 bp, Artificial Sequence
  Description of Artificial Sequence: Synthetic oligonucleotide
  Target: COL7A1; (+) strand; PAM type: NNNNGHTT; PAM sequence: CTGGGTTT
cgcctcaacctcccaaagcc

SEQ ID NO: 7279 - DNA, 20 bp, Artificial Sequence
  Description of Artificial Sequence: Synthetic oligonucleotide
  Target: COL7A1; (+) strand; PAM type: NNNNGHTT; PAM sequence: AGGGGTTT
cctttgcagcataaagaccc

SEQ ID NO: 7280 - DNA, 20 bp, Artificial Sequence
  Description of Artificial Sequence: Synthetic oligonucleotide
  Target: COL7A1; (+) strand; PAM type: NNNNGHTT; PAM sequence: AGGAGTTT
tgctgtccactgggaggttc

SEQ ID NO: 7281 - DNA, 20 bp, Artificial Sequence
  Description of Artificial Sequence: Synthetic oligonucleotide
  Target: COL7A1; (+) strand; PAM type: NNNNGHTT; PAM sequence: TCCAGCTT
gttcaggagtttccaggaat

SEQ ID NO: 7282 - DNA, 20 bp, Artificial Sequence
  Description of Artificial Sequence: Synthetic oligonucleotide
  Target: COL7A1; (+) strand; PAM type: NNNNGHTT; PAM sequence: AAAGGATT
ttcctctggccatttccagc

SEQ ID NO: 7283 - DNA, 20 bp, Artificial Sequence
  Description of Artificial Sequence: Synthetic oligonucleotide
  Target: COL7A1; (+) strand; PAM type: NNNNGHTT; PAM sequence: AGGTGCTT
cctgccacagggcgtacagt

SEQ ID NO: 7284 - DNA, 20 bp, Artificial Sequence
  Description of Artificial Sequence: Synthetic oligonucleotide
  Target: COL7A1; (+) strand; PAM type: NNNNGHTT; PAM sequence: TAGGGATT
cagggcgtacagtaggtgct

SEQ ID NO: 7285 - DNA, 20 bp, Artificial Sequence
  Description of Artificial Sequence: Synthetic oligonucleotide
  Target: COL7A1; (+) strand; PAM type: NNNNGHTT; PAM sequence: GCTGGTTT
acagcagacaccctagaagt

SEQ ID NO: 7286 - DNA, 20 bp, Artificial Sequence
  Description of Artificial Sequence: Synthetic oligonucleotide
  Target: COL7A1; (+) strand; PAM type: NNNNGHTT; PAM sequence: GACAGTTT
ccccctctcccttgcagggc

SEQ ID NO: 7287 - DNA, 20 bp, Artificial Sequence
  Description of Artificial Sequence: Synthetic oligonucleotide
  Target: COL7A1; (+) strand; PAM type: NNNNGHTT; PAM sequence: GGCTGCTT
ctgtaggcccgcccccacag

SEQ ID NO: 7288 - DNA, 20 bp, Artificial Sequence
  Description of Artificial Sequence: Synthetic oligonucleotide
  Target: COL7A1; (+) strand; PAM type: NNNNGHTT; PAM sequence: CTGGGATT
cgcggcctgggtgcacacca

SEQ ID NO: 7289 - DNA, 20 bp, Artificial Sequence
  Description of Artificial Sequence: Synthetic oligonucleotide
  Target: COL7A1; (+) strand; PAM type: NNNNGHTT; PAM sequence: AGTCGCTT
tctcgcacatcccatccttc

SEQ ID NO: 7290 - DNA, 20 bp, Artificial Sequence
  Description of Artificial Sequence: Synthetic oligonucleotide
  Target: COL7A1; (+) strand; PAM type: NNNNGHTT; PAM sequence: TTGTGTTT
catcccatccttcagtcgct

SEQ ID NO: 7291 - DNA, 20 bp, Artificial Sequence
  Description of Artificial Sequence: Synthetic oligonucleotide
  Target: COL7A1; (+) strand; PAM type: NNNNGHTT; PAM sequence: ACAGGCTT
ctgctacatacacaatgctc

SEQ ID NO: 7292 - DNA, 20 bp, Artificial Sequence
  Description of Artificial Sequence: Synthetic oligonucleotide
  Target: COL7A1; (+) strand; PAM type: NNNNGHTT; PAM sequence: AGTCGCTT
gcttgctggtcccatccttc

SEQ ID NO: 7293 - DNA, 20 bp, Artificial Sequence
  Description of Artificial Sequence: Synthetic oligonucleotide
  Target: COL7A1; (+) strand; PAM type: NNNNGHTT; PAM sequence: TTGTGTTT
ggtcccatccttcagtcgct

SEQ ID NO: 7294 - DNA, 20 bp, Artificial Sequence
  Description of Artificial Sequence: Synthetic oligonucleotide
  Target: COL7A1; (+) strand; PAM type: NNNNGHTT; PAM sequence: ACAGGCTT
ctgctatatacacaatgctc

SEQ ID NO: 7295 - DNA, 20 bp, Artificial Sequence
  Description of Artificial Sequence: Synthetic oligonucleotide
  Target: COL7A1; (+) strand; PAM type: NNNNGHTT; PAM sequence: TGTCGCTT
aatgctcacaggcttgctgg

SEQ ID NO: 7296 - DNA, 20 bp, Artificial Sequence
  Description of Artificial Sequence: Synthetic oligonucleotide
  Target: COL7A1; (+) strand; PAM type: NNNNGHTT; PAM sequence: CTTTGCTT
tcacaggcttgctggtgtcg

SEQ ID NO: 7297 - DNA, 20 bp, Artificial Sequence
  Description of Artificial Sequence: Synthetic oligonucleotide
  Target: COL7A1; (+) strand; PAM type: NNNNGHTT; PAM sequence: CAGAGTTT
agtccgtgcgtgaagtggga

SEQ ID NO: 7298 - DNA, 20 bp, Artificial Sequence
  Description of Artificial Sequence: Synthetic oligonucleotide
  Target: COL7A1; (+) strand; PAM type: NNNNGHTT; PAM sequence: TCTTGCTT
agggcctggccaggagttgt

SEQ ID NO: 7299 - DNA, 20 bp, Artificial Sequence
  Description of Artificial Sequence: Synthetic oligonucleotide
  Target: COL7A1; (+) strand; PAM type: NNNNGHTT; PAM sequence: GCAGGTTT
aggagttgttcttgcttcat

SEQ ID NO: 7300 - DNA, 20 bp, Artificial Sequence
  Description of Artificial Sequence: Synthetic oligonucleotide
  Target: COL7A1; (+) strand; PAM type: NNNNGHTT; PAM sequence: ACAGGCTT
aagacaaggctgccatggtc

SEQ ID NO: 7301 - DNA, 20 bp, Artificial Sequence
  Description of Artificial Sequence: Synthetic oligonucleotide
  Target: COL7A1; (+) strand; PAM type: NNNNGHTT; PAM sequence: CCGGGCTT
tgctccctggcagccctggc

SEQ ID NO: 7302 - DNA, 20 bp, Artificial Sequence
  Description of Artificial Sequence: Synthetic oligonucleotide
  Target: COL7A1; (+) strand; PAM type: NNNNGHTT; PAM sequence: GAAAGATT
gacagacagcatgatggaaa

SEQ ID NO: 7303 - DNA, 20 bp, Artificial Sequence
  Description of Artificial Sequence: Synthetic oligonucleotide
  Target: COL7A1; (+) strand; PAM type: NNNNGHTT; PAM sequence: GAGAGCTT
gggcaggcggttctcagcag

SEQ ID NO: 7304 - DNA, 20 bp, Artificial Sequence
  Description of Artificial Sequence: Synthetic oligonucleotide
  Target: COL7A1; (+) strand; PAM type: NNNNGHTT; PAM sequence: AGCTGCTT
aacccagtcctaccgccacc

SEQ ID NO: 7305 - DNA, 20 bp, Artificial Sequence
  Description of Artificial Sequence: Synthetic oligonucleotide
  Target: COL7A1; (+) strand; PAM type: NNNNGHTT; PAM sequence: CCCCGCTT
tcctgtggtctgaccctcta

SEQ ID NO: 7306 - DNA, 20 bp, Artificial Sequence
  Description of Artificial Sequence: Synthetic oligonucleotide
  Target: COL7A1; (+) strand; PAM type: NNNNGHTT; PAM sequence: ACATGCTT
cccctggggtgggagctggt

SEQ ID NO: 7307 - DNA, 20 bp, Artificial Sequence
  Description of Artificial Sequence: Synthetic oligonucleotide
  Target: COL7A1; (+) strand; PAM type: NNNNGHTT; PAM sequence: AGCAGCTT
caacaggagccttttaaaac

SEQ ID NO: 7308 - DNA, 20 bp, Artificial Sequence
  Description of Artificial Sequence: Synthetic oligonucleotide
  Target: COL7A1; (+) strand; PAM type: NNNNGHTT; PAM sequence: ACAGGCTT
agaatcagcaccatgtcatc

SEQ ID NO: 7309 - DNA, 20 bp, Artificial Sequence
  Description of Artificial Sequence: Synthetic oligonucleotide
  Target: COL7A1; (+) strand; PAM type: NNNNGHTT; PAM sequence: GGGGGTTT
agggtggcaggagccacaat

SEQ ID NO: 7310 - DNA, 20 bp, Artificial Sequence
  Description of Artificial Sequence: Synthetic oligonucleotide
  Target: COL7A1; (+) strand; PAM type: NNNNGHTT; PAM sequence: CAGGGTTT
ggccaatggggtcaagtcag

SEQ ID NO: 7311 - DNA, 20 bp, Artificial Sequence
  Description of Artificial Sequence: Synthetic oligonucleotide
  Target: COL7A1; (+) strand; PAM type: NNNNGHTT; PAM sequence: AGGAGCTT
ttctcaccatcactatccca

SEQ ID NO: 7312 - DNA, 20 bp, Artificial Sequence
  Description of Artificial Sequence: Synthetic oligonucleotide
  Target: COL7A1; (+) strand; PAM type: NNNNGHTT; PAM sequence: CACTGATT
ccccggggcaaggtgggcag

SEQ ID NO: 7313 - DNA, 20 bp, Artificial Sequence
  Description of Artificial Sequence: Synthetic oligonucleotide
  Target: COL7A1; (+) strand; PAM type: NNNNGHTT; PAM sequence: ACGTGCTT
gtgccctgcatgcagaccct

SEQ ID NO: 7314 - DNA, 20 bp, Artificial Sequence
  Description of Artificial Sequence: Synthetic oligonucleotide
  Target: COL7A1; (+) strand; PAM type: NNNNGHTT; PAM sequence: GACAGCTT
tgcagacagagacgggaaga

SEQ ID NO: 7315 - DNA, 20 bp, Artificial Sequence
  Description of Artificial Sequence: Synthetic oligonucleotide
  Target: COL7A1; (+) strand; PAM type: NNNNGHTT; PAM sequence: GACTGCTT
atccatccccccatcttctt

SEQ ID NO: 7316 - DNA, 20 bp, Artificial Sequence
  Description of Artificial Sequence: Synthetic oligonucleotide
  Target: COL7A1; (+) strand; PAM type: NNNNGHTT; PAM sequence: TGCAGCTT
aggcccacactcaccgtcag

SEQ ID NO: 7317 - DNA, 20 bp, Artificial Sequence
  Description of Artificial Sequence: Synthetic oligonucleotide
  Target: COL7A1; (+) strand; PAM type: NNNNGHTT; PAM sequence: CACAGCTT
gagtcaggcaggttgggggc

SEQ ID NO: 7318 - DNA, 20 bp, Artificial Sequence
  Description of Artificial Sequence: Synthetic oligonucleotide
  Target: COL7A1; (+) strand; PAM type: NNNNGHTT; PAM sequence: CATGGCTT
tcccctcaattcaccatgac

SEQ ID NO: 7319 - DNA, 20 bp, Artificial Sequence
  Description of Artificial Sequence: Synthetic oligonucleotide
  Target: COL7A1; (+) strand; PAM type: NNNNGHTT; PAM sequence: CCATGCTT
gcacatgccccctccacctc

SEQ ID NO: 7320 - DNA, 20 bp, Artificial Sequence
  Description of Artificial Sequence: Synthetic oligonucleotide
  Target: COL7A1; (+) strand; PAM type: NNNNGHTT; PAM sequence: ATGAGCTT
tacacccccatgacccgacc

SEQ ID NO: 7321 - DNA, 20 bp, Artificial Sequence
  Description of Artificial Sequence: Synthetic oligonucleotide
  Target: COL7A1; (+) strand; PAM type: NNNNGHTT; PAM sequence: ACCAGCTT
agcccggggcggcctggggg

SEQ ID NO: 7322 - DNA, 20 bp, Artificial Sequence
  Description of Artificial Sequence: Synthetic oligonucleotide
  Target: COL7A1; (+) strand; PAM type: NNNNGHTT; PAM sequence: AAGTGATT
agggagaaaagcagatgaag

SEQ ID NO: 7323 - DNA, 20 bp, Artificial Sequence
  Description of Artificial Sequence: Synthetic oligonucleotide
  Target: COL7A1; (+) strand; PAM type: NNNNGHTT; PAM sequence: TCTTGTTT
cctgaccagaaaaaaaccaa

SEQ ID NO: 7324 - DNA, 20 bp, Artificial Sequence
  Description of Artificial Sequence: Synthetic oligonucleotide
  Target: COL7A1; (+) strand; PAM type: NNNNGHTT; PAM sequence: TGGGGCTT
cctctggaggccagagccac

SEQ ID NO: 7325 - DNA, 20 bp, Artificial Sequence
  Description of Artificial Sequence: Synthetic oligonucleotide
  Target: COL7A1; (+) strand; PAM type: NNNNGHTT; PAM sequence: GAGGGATT
ccctgtgggagtgaccagga

SEQ ID NO: 7326 - DNA, 20 bp, Artificial Sequence
  Description of Artificial Sequence: Synthetic oligonucleotide
  Target: COL7A1; (+) strand; PAM type: NNNNGHTT; PAM sequence: GGGGGCTT
agtcaggaccagatcaggct

SEQ ID NO: 7327 - DNA, 20 bp, Artificial Sequence
  Description of Artificial Sequence: Synthetic oligonucleotide
  Target: COL7A1; (+) strand; PAM type: NNNNGHTT; PAM sequence: GTTGGTTT
gaggccctcgttcaccctgg

SEQ ID NO: 7328 - DNA, 20 bp, Artificial Sequence
  Description of Artificial Sequence: Synthetic oligonucleotide
  Target: COL7A1; (+) strand; PAM type: NNNNGHTT; PAM sequence: GGGAGTTT
ctgaaggtccctcaccctct

SEQ ID NO: 7329 - DNA, 20 bp, Artificial Sequence
  Description of Artificial Sequence: Synthetic oligonucleotide
  Target: COL7A1; (+) strand; PAM type: NNNNGHTT; PAM sequence: TGGGGCTT
aggacaggaaatcaaatacg

SEQ ID NO: 7330 - DNA, 20 bp, Artificial Sequence
  Description of Artificial Sequence: Synthetic oligonucleotide
  Target: COL7A1; (+) strand; PAM type: NNNNGHTT; PAM sequence: CTGGGATT
tccaggtggccccaggggtc

SEQ ID NO: 7331 - DNA, 20 bp, Artificial Sequence
  Description of Artificial Sequence: Synthetic oligonucleotide
  Target: COL7A1; (+) strand; PAM type: NNNNGHTT; PAM sequence: CATGGATT
agggccccctcctcacccac

SEQ ID NO: 7332 - DNA, 20 bp, Artificial Sequence
  Description of Artificial Sequence: Synthetic oligonucleotide
  Target: COL7A1; (+) strand; PAM type: NNNNGHTT; PAM sequence: GGAGGATT
gcagccaggggcaggggaaa

SEQ ID NO: 7333 - DNA, 20 bp, Artificial Sequence
  Description of Artificial Sequence: Synthetic oligonucleotide
  Target: COL7A1; (+) strand; PAM type: NNNNGHTT; PAM sequence: GCCAGCTT
tctccgggctcccctgcacg

SEQ ID NO: 7334 - DNA, 20 bp, Artificial Sequence
  Description of Artificial Sequence: Synthetic oligonucleotide
  Target: COL7A1; (+) strand; PAM type: NNNNGHTT; PAM sequence: CAGAGCTT
tccggagggaggcatggggc

SEQ ID NO: 7335 - DNA, 20 bp, Artificial Sequence
  Description of Artificial Sequence: Synthetic oligonucleotide
  Target: COL7A1; (+) strand; PAM type: NNNNGHTT; PAM sequence: GTGGGATT
ctggtaagggggagaggtca

SEQ ID NO: 7336 - DNA, 20 bp, Artificial Sequence
  Description of Artificial Sequence: Synthetic oligonucleotide
  Target: COL7A1; (+) strand; PAM type: NNNNGHTT; PAM sequence: GTGAGTTT
acagcctgtggggaatgcta

SEQ ID NO: 7337 - DNA, 20 bp, Artificial Sequence
  Description of Artificial Sequence: Synthetic oligonucleotide
  Target: COL7A1; (+) strand; PAM type: NNNNGHTT; PAM sequence: ACAGGCTT
cacccccatggcatttggaa

SEQ ID NO: 7338 - DNA, 20 bp, Artificial Sequence
  Description of Artificial Sequence: Synthetic oligonucleotide
  Target: COL7A1; (+) strand; PAM type: NNNNGHTT; PAM sequence: CCCGGCTT
caccatctcgacctggggct

SEQ ID NO: 7339 - DNA, 20 bp, Artificial Sequence
  Description of Artificial Sequence: Synthetic oligonucleotide
  Target: COL7A1; (+) strand; PAM type: NNNNGHTT; PAM sequence: CACAGCTT
cacactaccccaggcatgga

SEQ ID NO: 7340 - DNA, 20 bp, Artificial Sequence
  Description of Artificial Sequence: Synthetic oligonucleotide
  Target: COL7A1; (+) strand; PAM type: NNNNGHTT; PAM sequence: CAGGGATT
caagggcagggaacagggct

SEQ ID NO: 7341 - DNA, 20 bp, Artificial Sequence
  Description of Artificial Sequence: Synthetic oligonucleotide
  Target: COL7A1; (+) strand; PAM type: NNNNGHTT; PAM sequence: GGGGGCTT
tgggcctgttcccaacctct

SEQ ID NO: 7342 - DNA, 20 bp, Artificial Sequence
  Description of Artificial Sequence: Synthetic oligonucleotide
  Target: COL7A1; (+) strand; PAM type: NNNNGHTT; PAM sequence: AGGTGCTT
agggtccggagcctggggcc

SEQ ID NO: 7343 - DNA, 20 bp, Artificial Sequence
  Description of Artificial Sequence: Synthetic oligonucleotide
  Target: COL7A1; (+) strand; PAM type: NNNNGHTT; PAM sequence: ACCGGCTT
aggtgcttcagccaccactc

SEQ ID NO: 7344 - DNA, 20 bp, Artificial Sequence
  Description of Artificial Sequence: Synthetic oligonucleotide
  Target: COL7A1; (+) strand; PAM type: NNNNGHTT; PAM sequence: ATAGGTTT
cctggtagaccctgcagaga

SEQ ID NO: 7345 - DNA, 20 bp, Artificial Sequence
  Description of Artificial Sequence: Synthetic oligonucleotide
  Target: COL7A1; (+) strand; PAM type: NNNNGHTT; PAM sequence: CTTAGTTT
gcagagaataggtttaaggc

SEQ ID NO: 7346 - DNA, 20 bp, Artificial Sequence
  Description of Artificial Sequence: Synthetic oligonucleotide
  Target: COL7A1; (+) strand; PAM type: NNNNGHTT; PAM sequence: AGCTGATT
catggcagagggtggccccg

SEQ ID NO: 7347 - DNA, 20 bp, Artificial Sequence
  Description of Artificial Sequence: Synthetic oligonucleotide
  Target: COL7A1; (+) strand; PAM type: NNNNGHTT; PAM sequence: GGTGGCTT
tttctggggaccaagctaag

SEQ ID NO: 7348 - DNA, 20 bp, Artificial Sequence
  Description of Artificial Sequence: Synthetic oligonucleotide
  Target: COL7A1; (+) strand; PAM type: NNNNGHTT; PAM sequence: CCAGGCTT
tgcctgggagcccgggaata

SEQ ID NO: 7349 - DNA, 20 bp, Artificial Sequence
  Description of Artificial Sequence: Synthetic oligonucleotide
  Target: COL7A1; (+) strand; PAM type: NNNNGHTT; PAM sequence: AGCAGTTT
aaacaacccaccttgatgcc

SEQ ID NO: 7350 - DNA, 20 bp, Artificial Sequence
  Description of Artificial Sequence: Synthetic oligonucleotide
  Target: COL7A1; (+) strand; PAM type: NNNNGHTT; PAM sequence: CATGGCTT
acaaaggggtcacaaaggcc

SEQ ID NO: 7351 - DNA, 20 bp, Artificial Sequence
  Description of Artificial Sequence: Synthetic oligonucleotide
  Target: COL7A1; (+) strand; PAM type: NNNNGHTT; PAM sequence: CATGGCTT
agggttgcccattgaaacat

SEQ ID NO: 7352 - DNA, 20 bp, Artificial Sequence
  Description of Artificial Sequence: Synthetic oligonucleotide
  Target: COL7A1; (+) strand; PAM type: NNNNGHTT; PAM sequence: GGATGCTT
tctctccctaaggaagacaa

SEQ ID NO: 7353 - DNA, 20 bp, Artificial Sequence
  Description of Artificial Sequence: Synthetic oligonucleotide
  Target: COL7A1; (+) strand; PAM type: NNNNGHTT; PAM sequence: GCTAGATT
tggctgcaagacactacctt

SEQ ID NO: 7354 - DNA, 20 bp, Artificial Sequence
  Description of Artificial Sequence: Synthetic oligonucleotide
  Target: COL7A1; (+) strand; PAM type: NNNNGHTT; PAM sequence: GTCTGTTT
ccatgggtctgtgtgtcctg

SEQ ID NO: 7355 - DNA, 20 bp, Artificial Sequence
  Description of Artificial Sequence: Synthetic oligonucleotide
  Target: COL7A1; (+) strand; PAM type: NNNNGHTT; PAM sequence: ATGGGCTT
gcccatgtctgcatatgggc

SEQ ID NO: 7356 - DNA, 20 bp, Artificial Sequence
  Description of Artificial Sequence: Synthetic oligonucleotide
  Target: COL7A1; (+) strand; PAM type: NNNNGHTT; PAM sequence: ATGGGCTT
tatacatgtctccaaagagc

SEQ ID NO: 7357 - DNA, 20 bp, Artificial Sequence
  Description of Artificial Sequence: Synthetic oligonucleotide
  Target: COL7A1; (+) strand; PAM type: NNNNGHTT; PAM sequence: GTGTGTTT
ccaaatgtggctacacacca

SEQ ID NO: 7358 - DNA, 20 bp, Artificial Sequence
  Description of Artificial Sequence: Synthetic oligonucleotide
  Target: COL7A1; (+) strand; PAM type: NNNNGHTT; PAM sequence: CTATGTTT
gcctgtgtgtgcatatagaa

SEQ ID NO: 7359 - DNA, 20 bp, Artificial Sequence
  Description of Artificial Sequence: Synthetic oligonucleotide
  Target: COL7A1; (+) strand; PAM type: NNNNGHTT; PAM sequence: GTCAGTTT
aggcgggcggatcacctgag

SEQ ID NO: 7360 - DNA, 20 bp, Artificial Sequence
  Description of Artificial Sequence: Synthetic oligonucleotide
  Target: COL7A1; (+) strand; PAM type: NNNNGHTT; PAM sequence: CTGAGATT
gagtcgaaggttgcagtgag

SEQ ID NO: 7361 - DNA, 20 bp, Artificial Sequence
  Description of Artificial Sequence: Synthetic oligonucleotide
  Target: COL7A1; (+) strand; PAM type: NNNNGHTT; PAM sequence: CTATGTTT
ccatctcaaaaaaaaaaaaa

SEQ ID NO: 7362 - DNA, 20 bp, Artificial Sequence
  Description of Artificial Sequence: Synthetic oligonucleotide
  Target: COL7A1; (+) strand; PAM type: NNNNGHTT; PAM sequence: TGGCGTTT
tcttggctgtgtaggtgtgc

SEQ ID NO: 7363 - DNA, 20 bp, Artificial Sequence
  Description of Artificial Sequence: Synthetic oligonucleotide
  Target: COL7A1; (+) strand; PAM type: NNNNGHTT; PAM sequence: GCAGGTTT
aggtgtgctggcgtttcttg

SEQ ID NO: 7364 - DNA, 20 bp, Artificial Sequence
  Description of Artificial Sequence: Synthetic oligonucleotide
  Target: COL7A1; (+) strand; PAM type: NNNNGHTT; PAM sequence: TCACGTTT
cgcagctgccctggacacac

SEQ ID NO: 7365 - DNA, 20 bp, Artificial Sequence
  Description of Artificial Sequence: Synthetic oligonucleotide
  Target: COL7A1; (+) strand; PAM type: NNNNGHTT; PAM sequence: CCAGGTTT
tcacgttttttccattcagg

SEQ ID NO: 7366 - DNA, 20 bp, Artificial Sequence
  Description of Artificial Sequence: Synthetic oligonucleotide
  Target: COL7A1; (+) strand; PAM type: NNNNGHTT; PAM sequence: CCTGGCTT
ggccaggtttgccatcctcg

SEQ ID NO: 7367 - DNA, 20 bp, Artificial Sequence
  Description of Artificial Sequence: Synthetic oligonucleotide
  Target: COL7A1; (+) strand; PAM type: NNNNGHTT; PAM sequence: TTAAGATT
gcccctggaaaaagtctttg

SEQ ID NO: 7368 - DNA, 20 bp, Artificial Sequence
  Description of Artificial Sequence: Synthetic oligonucleotide
  Target: COL7A1; (+) strand; PAM type: NNNNGHTT; PAM sequence: GGGGGATT
aaggcaaagaaggtcagaaa

SEQ ID NO: 7369 - DNA, 20 bp, Artificial Sequence
  Description of Artificial Sequence: Synthetic oligonucleotide
  Target: COL7A1; (+) strand; PAM type: NNNNGHTT; PAM sequence: TGGAGCTT
tgtgactatgatgatctggt

SEQ ID NO: 7370 - DNA, 20 bp, Artificial Sequence
  Description of Artificial Sequence: Synthetic oligonucleotide
  Target: COL7A1; (+) strand; PAM type: NNNNGHTT; PAM sequence: CCCAGCTT
cttacgtctctccctgggtc

SEQ ID NO: 7371 - DNA, 20 bp, Artificial Sequence
  Description of Artificial Sequence: Synthetic oligonucleotide
  Target: COL7A1; (+) strand; PAM type: NNNNGHTT; PAM sequence: CCTGGTTT
gcccagagggcccagcggct

SEQ ID NO: 7372 - DNA, 20 bp, Artificial Sequence
  Description of Artificial Sequence: Synthetic oligonucleotide
  Target: COL7A1; (+) strand; PAM type: NNNNGHTT; PAM sequence: ATAAGCTT
aggctctccctgtggcagag

SEQ ID NO: 7373 - DNA, 20 bp, Artificial Sequence
  Description of Artificial Sequence: Synthetic oligonucleotide
  Target: COL7A1; (+) strand; PAM type: NNNNGHTT; PAM sequence: GGAGGTTT
gaggggctccagggatccgc

SEQ ID NO: 7374 - DNA, 20 bp, Artificial Sequence
  Description of Artificial Sequence: Synthetic oligonucleotide
  Target: COL7A1; (+) strand; PAM type: NNNNGHTT; PAM sequence: AAATGATT
ctgggggaccctgggaaagg

SEQ ID NO: 7375 - DNA, 20 bp, Artificial Sequence
  Description of Artificial Sequence: Synthetic oligonucleotide
  Target: COL7A1; (+) strand; PAM type: NNNNGHTT; PAM sequence: TCTGGTTT
ctcaggtcccaggccatggc

SEQ ID NO: 7376 - DNA, 20 bp, Artificial Sequence
  Description of Artificial Sequence: Synthetic oligonucleotide
  Target: COL7A1; (+) strand; PAM type: NNNNGHTT; PAM sequence: CCATGCTT
cagcaggcatgggtggccat

SEQ ID NO: 7377 - DNA, 20 bp, Artificial Sequence
  Description of Artificial Sequence: Synthetic oligonucleotide
  Target: COL7A1; (+) strand; PAM type: NNNNGHTT; PAM sequence: AGCAGTTT
cagggccactcaaggtaggc

SEQ ID NO: 7378 - DNA, 20 bp, Artificial Sequence
  Description of Artificial Sequence: Synthetic oligonucleotide
  Target: COL7A1; (+) strand; PAM type: NNNNGHTT; PAM sequence: GAGAGCTT
caaggtaggcagcagtttgg

SEQ ID NO: 7379 - DNA, 20 bp, Artificial Sequence
  Description of Artificial Sequence: Synthetic oligonucleotide
  Target: COL7A1; (+) strand; PAM type: NNNNGHTT; PAM sequence: TGAAGATT
tgtgcaggggtcaaaggaag

SEQ ID NO: 7380 - DNA, 20 bp, Artificial Sequence
  Description of Artificial Sequence: Synthetic oligonucleotide
  Target: COL7A1; (+) strand; PAM type: NNNNGHTT; PAM sequence: GAGGGTTT
tcaaaggaagtgaagattgg

SEQ ID NO: 7381 - DNA, 20 bp, Artificial Sequence
  Description of Artificial Sequence: Synthetic oligonucleotide
  Target: COL7A1; (+) strand; PAM type: NNNNGHTT; PAM sequence: GCCTGCTT
ctcacccgaaggccacgctc

SEQ ID NO: 7382 - DNA, 20 bp, Artificial Sequence
  Description of Artificial Sequence: Synthetic oligonucleotide
  Target: COL7A1; (+) strand; PAM type: NNNNGHTT; PAM sequence: CATTGATT
tgtcacactccccattccca

SEQ ID NO: 7383 - DNA, 20 bp, Artificial Sequence
  Description of Artificial Sequence: Synthetic oligonucleotide
  Target: COL7A1; (+) strand; PAM type: NNNNGHTT; PAM sequence: CTTCGCTT
caccaactgccccctaaaca

SEQ ID NO: 7384 - DNA, 20 bp, Artificial Sequence
  Description of Artificial Sequence: Synthetic oligonucleotide
  Target: COL7A1; (+) strand; PAM type: NNNNGHTT; PAM sequence: CCAGGCTT
aaacctccccttgccccata

SEQ ID NO: 7385 - DNA, 20 bp, Artificial Sequence
  Description of Artificial Sequence: Synthetic oligonucleotide
  Target: COL7A1; (+) strand; PAM type: NNNNGHTT; PAM sequence: TACAGCTT
ctgaaaacaaacaggacaga

SEQ ID NO: 7386 - DNA, 20 bp, Artificial Sequence
  Description of Artificial Sequence: Synthetic oligonucleotide
  Target: COL7A1; (+) strand; PAM type: NNNNGHTT; PAM sequence: GGAAGATT
gggggctggagaggggtcag

SEQ ID NO: 7387 - DNA, 20 bp, Artificial Sequence
  Description of Artificial Sequence: Synthetic oligonucleotide
  Target: COL7A1; (+) strand; PAM type: NNNNGHTT; PAM sequence: TTGGGATT
tggagaggggtcagggaaga

SEQ ID NO: 7388 - DNA, 20 bp, Artificial Sequence
  Description of Artificial Sequence: Synthetic oligonucleotide
  Target: COL7A1; (+) strand; PAM type: NNNNGHTT; PAM sequence: GTGGGTTT
tggtatgagcattgcagcca

SEQ ID NO: 7389 - DNA, 20 bp, Artificial Sequence
  Description of Artificial Sequence: Synthetic oligonucleotide
  Target: COL7A1; (+) strand; PAM type: NNNNGHTT; PAM sequence: CGGGGCTT
gagagagagagggttggtgg

SEQ ID NO: 7390 - DNA, 20 bp, Artificial Sequence
  Description of Artificial Sequence: Synthetic oligonucleotide
  Target: COL7A1; (+) strand; PAM type: NNNNGHTT; PAM sequence: CAGAGATT
aagggatgaatttgggggtt

SEQ ID NO: 7391 - DNA, 20 bp, Artificial Sequence
  Description of Artificial Sequence: Synthetic oligonucleotide
  Target: COL7A1; (+) strand; PAM type: NNNNGHTT; PAM sequence: TTGGGTTT
gaatttgggggttcagagat

SEQ ID NO: 7392 - DNA, 20 bp, Artificial Sequence
  Description of Artificial Sequence: Synthetic oligonucleotide
  Target: COL7A1; (+) strand; PAM type: NNNNGHTT; PAM sequence: TGATGATT
catgaggatggagcagtggt

SEQ ID NO: 7393 - DNA, 20 bp, Artificial Sequence
  Description of Artificial Sequence: Synthetic oligonucleotide
  Target: COL7A1; (+) strand; PAM type: NNNNGHTT; PAM sequence: CAGGGCTT
gccaacggggccttggggtc

SEQ ID NO: 7394 - DNA, 20 bp, Artificial Sequence
  Description of Artificial Sequence: Synthetic oligonucleotide
  Target: COL7A1; (+) strand; PAM type: NNNNGHTT; PAM sequence: ATTGGATT
gatgagggtcatggggtcca

SEQ ID NO: 7395 - DNA, 20 bp, Artificial Sequence
  Description of Artificial Sequence: Synthetic oligonucleotide
  Target: COL7A1; (+) strand; PAM type: NNNNGHTT; PAM sequence: CAAGGATT
catggggtccaattggattt

SEQ ID NO: 7396 - DNA, 20 bp, Artificial Sequence
  Description of Artificial Sequence: Synthetic oligonucleotide
  Target: COL7A1; (+) strand; PAM type: NNNNGHTT; PAM sequence: GCAGGATT
gtaaggacagagagcagtgg

SEQ ID NO: 7397 - DNA, 20 bp, Artificial Sequence
  Description of Artificial Sequence: Synthetic oligonucleotide
  Target: COL7A1; (+) strand; PAM type: NNNNGHTT; PAM sequence: TGGTGCTT
ggacgaaacagagcagaggg

SEQ ID NO: 7398 - DNA, 20 bp, Artificial Sequence
  Description of Artificial Sequence: Synthetic oligonucleotide
  Target: COL7A1; (+) strand; PAM type: NNNNGHTT; PAM sequence: CAAGGCTT
gcccaccctgacctgcagga

SEQ ID NO: 7399 - DNA, 20 bp, Artificial Sequence
  Description of Artificial Sequence: Synthetic oligonucleotide
  Target: COL7A1; (+) strand; PAM type: NNNNGHTT; PAM sequence: CCAGGATT
ggccaggggctccaggggtc

SEQ ID NO: 7400 - DNA, 20 bp, Artificial Sequence
  Description of Artificial Sequence: Synthetic oligonucleotide
  Target: COL7A1; (+) strand; PAM type: NNNNGHTT; PAM sequence: CCTGGTTT
agggaccctcccccaaggcc

SEQ ID NO: 7401 - DNA, 20 bp, Artificial Sequence
  Description of Artificial Sequence: Synthetic oligonucleotide
  Target: COL7A1; (+) strand; PAM type: NNNNGHTT; PAM sequence: CAGAGCTT
gaggcagagaaatggcccct

SEQ ID NO: 7402 - DNA, 20 bp, Artificial Sequence
  Description of Artificial Sequence: Synthetic oligonucleotide
  Target: COL7A1; (+) strand; PAM type: NNNNGHTT; PAM sequence: GAGGGCTT
acaagggcagcgacaaggca

SEQ ID NO: 7403 - DNA, 20 bp, Artificial Sequence
  Description of Artificial Sequence: Synthetic oligonucleotide
  Target: COL7A1; (+) strand; PAM type: NNNNGHTT; PAM sequence: GGTGGTTT
gtgtcccccaaagtctctgt

SEQ ID NO: 7404 - DNA, 20 bp, Artificial Sequence
  Description of Artificial Sequence: Synthetic oligonucleotide
  Target: COL7A1; (+) strand; PAM type: NNNNGHTT; PAM sequence: CTGGGCTT
tggtggtttataacctccag

SEQ ID NO: 7405 - DNA, 20 bp, Artificial Sequence
  Description of Artificial Sequence: Synthetic oligonucleotide
  Target: COL7A1; (+) strand; PAM type: NNNNGHTT; PAM sequence: CGATGATT
gctgggcttctaggaattcc

SEQ ID NO: 7406 - DNA, 20 bp, Artificial Sequence
  Description of Artificial Sequence: Synthetic oligonucleotide
  Target: COL7A1; (+) strand; PAM type: NNNNGHTT; PAM sequence: CTCTGCTT
ggaattcccgatgattctaa

SEQ ID NO: 7407 - DNA, 20 bp, Artificial Sequence
  Description of Artificial Sequence: Synthetic oligonucleotide
  Target: COL7A1; (+) strand; PAM type: NNNNGHTT; PAM sequence: GACAGCTT
ctctcttgtaaaaaccccga

SEQ ID NO: 7408 - DNA, 20 bp, Artificial Sequence
  Description of Artificial Sequence: Synthetic oligonucleotide
  Target: COL7A1; (+) strand; PAM type: NNNNGHTT; PAM sequence: CCAGGCTT
cagaccactgactgcctggt

SEQ ID NO: 7409 - DNA, 20 bp, Artificial Sequence
  Description of Artificial Sequence: Synthetic oligonucleotide
  Target: COL7A1; (+) strand; PAM type: NNNNGHTT; PAM sequence: GGGAGCTT
ctctagccctgtcacccgct

SEQ ID NO: 7410 - DNA, 20 bp, Artificial Sequence
  Description of Artificial Sequence: Synthetic oligonucleotide
  Target: COL7A1; (+) strand; PAM type: NNNNGHTT; PAM sequence: ACTTGATT
gcacttctgcaggagacaga

SEQ ID NO: 7411 - DNA, 20 bp, Artificial Sequence
  Description of Artificial Sequence: Synthetic oligonucleotide
  Target: COL7A1; (+) strand; PAM type: NNNNGHTT; PAM sequence: CAATGCTT
ggtgtccaccacacgtagtt

SEQ ID NO: 7412 - DNA, 20 bp, Artificial Sequence
  Description of Artificial Sequence: Synthetic oligonucleotide
  Target: COL7A1; (+) strand; PAM type: NNNNGHTT; PAM sequence: TCCGGTTT
gagagatctgagatcctggg

SEQ ID NO: 7413 - DNA, 20 bp, Artificial Sequence
  Description of Artificial Sequence: Synthetic oligonucleotide
  Target: COL7A1; (+) strand; PAM type: NNNNGHTT; PAM sequence: GCAGGCTT
gaggagcacgccaaggtgag

SEQ ID NO: 7414 - DNA, 20 bp, Artificial Sequence
  Description of Artificial Sequence: Synthetic oligonucleotide
  Target: COL7A1; (+) strand; PAM type: NNNNGHTT; PAM sequence: CATTGATT
ctcattgatcccacccactt

SEQ ID NO: 7415 - DNA, 20 bp, Artificial Sequence
  Description of Artificial Sequence: Synthetic oligonucleotide
  Target: COL7A1; (+) strand; PAM type: NNNNGHTT; PAM sequence: CTGTGTTT
accccggatctctgcagagt

SEQ ID NO: 7416 - DNA, 20 bp, Artificial Sequence
  Description of Artificial Sequence: Synthetic oligonucleotide
  Target: COL7A1; (+) strand; PAM type: NNNNGHTT; PAM sequence: CTGGGATT
gtggcctccccagaaaccaa

SEQ ID NO: 7417 - DNA, 20 bp, Artificial Sequence
  Description of Artificial Sequence: Synthetic oligonucleotide
  Target: COL7A1; (+) strand; PAM type: NNNNGHTT; PAM sequence: GGAGGTTT
cagtggaggagtggggaggt

SEQ ID NO: 7418 - DNA, 20 bp, Artificial Sequence
  Description of Artificial Sequence: Synthetic oligonucleotide
  Target: COL7A1; (+) strand; PAM type: NNNNGHTT; PAM sequence: AGGAGATT
ggagaaagtgtaaatctcag

SEQ ID NO: 7419 - DNA, 20 bp, Artificial Sequence
  Description of Artificial Sequence: Synthetic oligonucleotide
  Target: COL7A1; (+) strand; PAM type: NNNNGHTT; PAM sequence: GAGGGCTT
cggaggaatctgaatacggg

SEQ ID NO: 7420 - DNA, 20 bp, Artificial Sequence
  Description of Artificial Sequence: Synthetic oligonucleotide
  Target: COL7A1; (+) strand; PAM type: NNNNGHTT; PAM sequence: GTGGGATT
cgtctctgagggaggaggga

SEQ ID NO: 7421 - DNA, 20 bp, Artificial Sequence
  Description of Artificial Sequence: Synthetic oligonucleotide
  Target: COL7A1; (+) strand; PAM type: NNNNGHTT; PAM sequence: TGGAGTTT
cgcagccctggaacagcaag

SEQ ID NO: 7422 - DNA, 20 bp, Artificial Sequence
  Description of Artificial Sequence: Synthetic oligonucleotide
  Target: COL7A1; (+) strand; PAM type: NNNNGHTT; PAM sequence: AGGTGATT
cactagggtaacagaaagac

SEQ ID NO: 7423 - DNA, 20 bp, Artificial Sequence
  Description of Artificial Sequence: Synthetic oligonucleotide
  Target: COL7A1; (+) strand; PAM type: NNNNGHTT; PAM sequence: TTGAGCTT
ggtaacagaaagacaggtga

SEQ ID NO: 7424 - DNA, 20 bp, Artificial Sequence
  Description of Artificial Sequence: Synthetic oligonucleotide
  Target: COL7A1; (+) strand; PAM type: NNNNGHTT; PAM sequence: AGGAGATT
ggatggggtgtggggcaggg

SEQ ID NO: 7425 - DNA, 20 bp, Artificial Sequence
  Description of Artificial Sequence: Synthetic oligonucleotide
  Target: COL7A1; (+) strand; PAM type: NNNNGHTT; PAM sequence: GGTGGCTT
acccgctgcccgggcagctc

SEQ ID NO: 7426 - DNA, 20 bp, Artificial Sequence
  Description of Artificial Sequence: Synthetic oligonucleotide
  Target: COL7A1; (+) strand; PAM type: NNNNGHTT; PAM sequence: CAGGGATT
cagctgggggagagtcccac

SEQ ID NO: 7427 - DNA, 20 bp, Artificial Sequence
  Description of Artificial Sequence: Synthetic oligonucleotide
  Target: COL7A1; (+) strand; PAM type: NNNNGHTT; PAM sequence: CAAGGATT
gccgctgtccactgtactct

SEQ ID NO: 7428 - DNA, 20 bp, Artificial Sequence
  Description of Artificial Sequence: Synthetic oligonucleotide
  Target: COL7A1; (+) strand; PAM type: NNNNGHTT; PAM sequence: GGCTGCTT
ccactgtactctcaaggatt

SEQ ID NO: 7429 - DNA, 20 bp, Artificial Sequence
  Description of Artificial Sequence: Synthetic oligonucleotide
  Target: COL7A1; (+) strand; PAM type: NNNNGHTT; PAM sequence: GGAGGATT
cgggatcaggggatcaggca

SEQ ID NO: 7430 - DNA, 20 bp, Artificial Sequence
  Description of Artificial Sequence: Synthetic oligonucleotide
  Target: COL7A1; (+) strand; PAM type: NNNNGHTT; PAM sequence: TGGGGATT
atggaatcagcactgccaag

SEQ ID NO: 7431 - DNA, 20 bp, Artificial Sequence
  Description of Artificial Sequence: Synthetic oligonucleotide
  Target: COL7A1; (+) strand; PAM type: NNNNGHTT; PAM sequence: ACTCGCTT
cactggtgggctgtgaggca

SEQ ID NO: 7432 - DNA, 20 bp, Artificial Sequence
  Description of Artificial Sequence: Synthetic oligonucleotide
  Target: COL7A1; (+) strand; PAM type: NNNNGHTT; PAM sequence: AATAGCTT
ctcggtccttacccacagca

SEQ ID NO: 7433 - DNA, 20 bp, Artificial Sequence
  Description of Artificial Sequence: Synthetic oligonucleotide
  Target: COL7A1; (+) strand; PAM type: NNNNGHTT; PAM sequence: TGCTGCTT
acagtctgtggggaacaaga

SEQ ID NO: 7434 - DNA, 20 bp, Artificial Sequence
  Description of Artificial Sequence: Synthetic oligonucleotide
  Target: COL7A1; (+) strand; PAM type: NNNNGHTT; PAM sequence: ACTTGTTT
gggtctctaggttccccaaa

SEQ ID NO: 7435 - DNA, 20 bp, Artificial Sequence
  Description of Artificial Sequence: Synthetic oligonucleotide
  Target: COL7A1; (+) strand; PAM type: NNNNGHTT; PAM sequence: TGGGGTTT
gtttctgcaaagacctggcc

SEQ ID NO: 7436 - DNA, 20 bp, Artificial Sequence
  Description of Artificial Sequence: Synthetic oligonucleotide
  Target: COL7A1; (+) strand; PAM type: NNNNGHTT; PAM sequence: CGTGGATT
ggtcagcctctaggggccgg

SEQ ID NO: 7437 - DNA, 20 bp, Artificial Sequence
  Description of Artificial Sequence: Synthetic oligonucleotide
  Target: COL7A1; (+) strand; PAM type: NNNNGHTT; PAM sequence: GGCGGTTT
tgggtaggaacaggatagga

SEQ ID NO: 7438 - DNA, 20 bp, Artificial Sequence
  Description of Artificial Sequence: Synthetic oligonucleotide
  Target: COL7A1; (+) strand; PAM type: NNNNGHTT; PAM sequence: CGTGGCTT
ctataaaccccccgaccccc

SEQ ID NO: 7439 - DNA, 20 bp, Artificial Sequence
  Description of Artificial Sequence: Synthetic oligonucleotide
  Target: COL7A1; (+) strand; PAM type: NNNNGHTT; PAM sequence: GGCTGCTT
catctaaggtcacaggtctt

SEQ ID NO: 7440 - DNA, 20 bp, Artificial Sequence
  Description of Artificial Sequence: Synthetic oligonucleotide
  Target: COL7A1; (+) strand; PAM type: NNNNGHTT; PAM sequence: CTGTGATT
atgggtcccgccggccactc

SEQ ID NO: 7441 - DNA, 20 bp, Artificial Sequence
  Description of Artificial Sequence: Synthetic oligonucleotide
  Target: COL7A1; (+) strand; PAM type: NNNNGHTT; PAM sequence: TCATGCTT
gaaggaggagagaacctgtg

SEQ ID NO: 7442 - DNA, 20 bp, Artificial Sequence
  Description of Artificial Sequence: Synthetic oligonucleotide
  Target: COL7A1; (+) strand; PAM type: NNNNGHTT; PAM sequence: TGTAGCTT
ctcactgccctcatggtacc

SEQ ID NO: 7443 - DNA, 20 bp, Artificial Sequence
  Description of Artificial Sequence: Synthetic oligonucleotide
  Target: COL7A1; (+) strand; PAM type: NNNNGHTT; PAM sequence: TCCAGCTT
ccctcatggtacctgtagct

SEQ ID NO: 7444 - DNA, 20 bp, Artificial Sequence
  Description of Artificial Sequence: Synthetic oligonucleotide
  Target: COL7A1; (+) strand; PAM type: NNNNGHTT; PAM sequence: CCCAGCTT
aggctgacttcacaccctcc

SEQ ID NO: 7445 - DNA, 20 bp, Artificial Sequence
  Description of Artificial Sequence: Synthetic oligonucleotide
  Target: COL7A1; (+) strand; PAM type: NNNNGHTT; PAM sequence: CTTCGCTT
gacttcacaccctcccccag

SEQ ID NO: 7446 - DNA, 20 bp, Artificial Sequence
  Description of Artificial Sequence: Synthetic oligonucleotide
  Target: COL7A1; (+) strand; PAM type: NNNNGHTT; PAM sequence: GCCTGCTT
cagtgaagaccatccatgct

SEQ ID NO: 7447 - DNA, 20 bp, Artificial Sequence
  Description of Artificial Sequence: Synthetic oligonucleotide
  Target: COL7A1; (+) strand; PAM type: NNNNGHTT; PAM sequence: TGGAGCTT
ggttggaatgactccacgtc

SEQ ID NO: 7448 - DNA, 20 bp, Artificial Sequence
  Description of Artificial Sequence: Synthetic oligonucleotide
  Target: COL7A1; (+) strand; PAM type: NNNNGHTT; PAM sequence: CCAAGCTT
agagcacatccttctccctc

SEQ ID NO: 7449 - DNA, 20 bp, Artificial Sequence
  Description of Artificial Sequence: Synthetic oligonucleotide
  Target: COL7A1; (+) strand; PAM type: NNNNGHTT; PAM sequence: ATCTGTTT
ctcagtcactacctcacccc

SEQ ID NO: 7450 - DNA, 20 bp, Artificial Sequence
  Description of Artificial Sequence: Synthetic oligonucleotide
  Target: COL7A1; (+) strand; PAM type: NNNNGHTT; PAM sequence: GGAAGATT
caaactcctcactggactat

SEQ ID NO: 7451 - DNA, 20 bp, Artificial Sequence
  Description of Artificial Sequence: Synthetic oligonucleotide
  Target: COL7A1; (+) strand; PAM type: NNNNGHTT; PAM sequence: CCTGGCTT
ccagggtaaagaccagagtc

SEQ ID NO: 7452 - DNA, 20 bp, Artificial Sequence
  Description of Artificial Sequence: Synthetic oligonucleotide
  Target: COL7A1; (+) strand; PAM type: NNNNGHTT; PAM sequence: CTGGGCTT
tgtagcctctaagggccagg

SEQ ID NO: 7453 - DNA, 20 bp, Artificial Sequence
  Description of Artificial Sequence: Synthetic oligonucleotide
  Target: COL7A1; (+) strand; PAM type: NNNNGHTT; PAM sequence: AGGTGCTT
ccccagtcccgggccgtaga

SEQ ID NO: 7454 - DNA, 20 bp, Artificial Sequence
  Description of Artificial Sequence: Synthetic oligonucleotide
  Target: COL7A1; (+) strand; PAM type: NNNNGHTT; PAM sequence: CCCTGCTT
taaaagaccttgtcccagca

SEQ ID NO: 7455 - DNA, 20 bp, Artificial Sequence
  Description of Artificial Sequence: Synthetic oligonucleotide
  Target: COL7A1; (+) strand; PAM type: NNNNGHTT; PAM sequence: CCTCGCTT
cctcaaaggaaaattgggcc

SEQ ID NO: 7456 - DNA, 20 bp, Artificial Sequence
  Description of Artificial Sequence: Synthetic oligonucleotide
  Target: COL7A1; (+) strand; PAM type: NNNNGHTT; PAM sequence: AGGGGATT
gctgcctcaggaaaatgggg

SEQ ID NO: 7457 - DNA, 20 bp, Artificial Sequence
  Description of Artificial Sequence: Synthetic oligonucleotide
  Target: COL7A1; (+) strand; PAM type: NNNNGHTT; PAM sequence: AAAGGATT
gagcctgagtcagcggaggc

SEQ ID NO: 7458 - DNA, 20 bp, Artificial Sequence
  Description of Artificial Sequence: Synthetic oligonucleotide
  Target: COL7A1; (+) strand; PAM type: NNNNGHTT; PAM sequence: CCCTGCTT
gcggaggcaaaggattcctg

SEQ ID NO: 7459 - DNA, 20 bp, Artificial Sequence
  Description of Artificial Sequence: Synthetic oligonucleotide
  Target: COL7A1; (+) strand; PAM type: NNNNGHTT; PAM sequence: AGGGGTTT
ttggcacaaggtccacagtg

SEQ ID NO: 7460 - DNA, 20 bp, Artificial Sequence
  Description of Artificial Sequence: Synthetic oligonucleotide
  Target: COL7A1; (+) strand; PAM type: NNNNGHTT; PAM sequence: CAGGGATT
gggtttcccacctgagcctg

SEQ ID NO: 7461 - DNA, 20 bp, Artificial Sequence
  Description of Artificial Sequence: Synthetic oligonucleotide
  Target: COL7A1; (+) strand; PAM type: NNNNGHTT; PAM sequence: CTGGGTTT
gactcctacaggggcaaagg

SEQ ID NO: 7462 - DNA, 20 bp, Artificial Sequence
  Description of Artificial Sequence: Synthetic oligonucleotide
  Target: COL7A1; (+) strand; PAM type: NNNNGHTT; PAM sequence: CCACGCTT
tccggcctcagctgcaaccc

SEQ ID NO: 7463 - DNA, 20 bp, Artificial Sequence
  Description of Artificial Sequence: Synthetic oligonucleotide
  Target: COL7A1; (+) strand; PAM type: NNNNGHTT; PAM sequence: AGAGGATT
gggatgacacacttctcagc

SEQ ID NO: 7464 - DNA, 20 bp, Artificial Sequence
  Description of Artificial Sequence: Synthetic oligonucleotide
  Target: COL7A1; (+) strand; PAM type: NNNNGHTT; PAM sequence: CTGTGTTT
aggttagaggagccgaagtg

SEQ ID NO: 7465 - DNA, 20 bp, Artificial Sequence
  Description of Artificial Sequence: Synthetic oligonucleotide
  Target: COL7A1; (+) strand; PAM type: NNNNGHTT; PAM sequence: TCTTGCTT
cacaaaccccggccctgccc

SEQ ID NO: 7466 - DNA, 20 bp, Artificial Sequence
  Description of Artificial Sequence: Synthetic oligonucleotide
  Target: COL7A1; (+) strand; PAM type: NNNNGHTT; PAM sequence: ATAGGCTT
ggccctgccctcttgcttac

SEQ ID NO: 7467 - DNA, 20 bp, Artificial Sequence
  Description of Artificial Sequence: Synthetic oligonucleotide
  Target: COL7A1; (+) strand; PAM type: NNNNGHTT; PAM sequence: ACAGGCTT
gctgcccagagcagcacaag

SEQ ID NO: 7468 - DNA, 20 bp, Artificial Sequence
  Description of Artificial Sequence: Synthetic oligonucleotide
  Target: COL7A1; (+) strand; PAM type: NNNNGHTT; PAM sequence: ACAGGTTT
gcagtcaaggaactgctggg

SEQ ID NO: 7469 - DNA, 20 bp, Artificial Sequence
  Description of Artificial Sequence: Synthetic oligonucleotide
  Target: COL7A1; (+) strand; PAM type: NNNNGHTT; PAM sequence: AGCTGCTT
gcagccaggggactggggag

SEQ ID NO: 7470 - DNA, 20 bp, Artificial Sequence
  Description of Artificial Sequence: Synthetic oligonucleotide
  Target: COL7A1; (+) strand; PAM type: NNNNGHTT; PAM sequence: TCCGGCTT
aggggtccatgttaccgcaa

SEQ ID NO: 7471 - DNA, 20 bp, Artificial Sequence
  Description of Artificial Sequence: Synthetic oligonucleotide
  Target: COL7A1; (-) strand; PAM type: NRG; PAM sequence: CAG
ccctggccccctgcccaggc

SEQ ID NO: 7472 - DNA, 20 bp, Artificial Sequence
  Description of Artificial Sequence: Synthetic oligonucleotide
  Target: COL7A1; (-) strand; PAM type: NRG; PAM sequence: AGG
atagccctggccccctgccc

SEQ ID NO: 7473 - DNA, 20 bp, Artificial Sequence
  Description of Artificial Sequence: Synthetic oligonucleotide
  Target: COL7A1; (-) strand; PAM type: NRG; PAM sequence: CAG
gatagccctggccccctgcc

SEQ ID NO: 7474 - DNA, 20 bp, Artificial Sequence
  Description of Artificial Sequence: Synthetic oligonucleotide
  Target: COL7A1; (-) strand; PAM type: NRG; PAM sequence: TGG
tgccttcccagagatagccc

SEQ ID NO: 7475 - DNA, 20 bp, Artificial Sequence
  Description of Artificial Sequence: Synthetic oligonucleotide
  Target: COL7A1; (-) strand; PAM type: NRG; PAM sequence: TAG
tgaggatgccttcccagaga

SEQ ID NO: 7476 - DNA, 20 bp, Artificial Sequence
  Description of Artificial Sequence: Synthetic oligonucleotide
  Target: COL7A1; (-) strand; PAM type: NRG; PAM sequence: GAG
ggtgtgaggatgccttccca

SEQ ID NO: 7477 - DNA, 20 bp, Artificial Sequence
  Description of Artificial Sequence: Synthetic oligonucleotide
  Target: COL7A1; (-) strand; PAM type: NRG; PAM sequence: CAG
tgggtgtgaggatgccttcc

SEQ ID NO: 7478 - DNA, 20 bp, Artificial Sequence
  Description of Artificial Sequence: Synthetic oligonucleotide
  Target: COL7A1; (-) strand; PAM type: NRG; PAM sequence: AGG
gctcatcctgtctgggtgtg

SEQ ID NO: 7479 - DNA, 20 bp, Artificial Sequence
  Description of Artificial Sequence: Synthetic oligonucleotide
  Target: COL7A1; (-) strand; PAM type: NRG; PAM sequence: GAG
ggctcatcctgtctgggtgt

SEQ ID NO: 7480 - DNA, 20 bp, Artificial Sequence
  Description of Artificial Sequence: Synthetic oligonucleotide
  Target: COL7A1; (-) strand; PAM type: NRG; PAM sequence: GGG
gaaccaggctcatcctgtct

SEQ ID NO: 7481 - DNA, 20 bp, Artificial Sequence
  Description of Artificial Sequence: Synthetic oligonucleotide
  Target: COL7A1; (-) strand; PAM type: NRG; PAM sequence: TGG
ggaaccaggctcatcctgtc

SEQ ID NO: 7482 - DNA, 20 bp, Artificial Sequence
  Description of Artificial Sequence: Synthetic oligonucleotide
  Target: COL7A1; (-) strand; PAM type: NRG; PAM sequence: AGG
tgttgcatttcctgggaacc

SEQ ID NO: 7483 - DNA, 20 bp, Artificial Sequence
  Description of Artificial Sequence: Synthetic oligonucleotide
  Target: COL7A1; (-) strand; PAM type: NRG; PAM sequence: CAG
ctgttgcatttcctgggaac

SEQ ID NO: 7484 - DNA, 20 bp, Artificial Sequence
  Description of Artificial Sequence: Synthetic oligonucleotide
  Target: COL7A1; (-) strand; PAM type: NRG; PAM sequence: GGG
gcagagctgttgcatttcct

SEQ ID NO: 7485 - DNA, 20 bp, Artificial Sequence
  Description of Artificial Sequence: Synthetic oligonucleotide
  Target: COL7A1; (-) strand; PAM type: NRG; PAM sequence: TGG
tgcagagctgttgcatttcc

SEQ ID NO: 7486 - DNA, 20 bp, Artificial Sequence
  Description of Artificial Sequence: Synthetic oligonucleotide
  Target: COL7A1; (-) strand; PAM type: NRG; PAM sequence: GAG
ggggaagagaggaaggtgca

SEQ ID NO: 7487 - DNA, 20 bp, Artificial Sequence
  Description of Artificial Sequence: Synthetic oligonucleotide
  Target: COL7A1; (-) strand; PAM type: NRG; PAM sequence: CAG
ctggggaagagaggaaggtg

SEQ ID NO: 7488 - DNA, 20 bp, Artificial Sequence
  Description of Artificial Sequence: Synthetic oligonucleotide
  Target: COL7A1; (-) strand; PAM type: NRG; PAM sequence: AGG
actttctggggaagagagga

SEQ ID NO: 7489 - DNA, 20 bp, Artificial Sequence
  Description of Artificial Sequence: Synthetic oligonucleotide
  Target: COL7A1; (-) strand; PAM type: NRG; PAM sequence: AAG
gactttctggggaagagagg

SEQ ID NO: 7490 - DNA, 20 bp, Artificial Sequence
  Description of Artificial Sequence: Synthetic oligonucleotide
  Target: COL7A1; (-) strand; PAM type: NRG; PAM sequence: AGG
gtagactttctggggaagag

SEQ ID NO: 7491 - DNA, 20 bp, Artificial Sequence
  Description of Artificial Sequence: Synthetic oligonucleotide
  Target: COL7A1; (-) strand; PAM type: NRG; PAM sequence: GAG
ggtagactttctggggaaga

SEQ ID NO: 7492 - DNA, 20 bp, Artificial Sequence
  Description of Artificial Sequence: Synthetic oligonucleotide
  Target: COL7A1; (-) strand; PAM type: NRG; PAM sequence: GAG
cgggtagactttctggggaa

SEQ ID NO: 7493 - DNA, 20 bp, Artificial Sequence
  Description of Artificial Sequence: Synthetic oligonucleotide
  Target: COL7A1; (-) strand; PAM type: NRG; PAM sequence: AAG
cacgggtagactttctgggg

SEQ ID NO: 7494 - DNA, 20 bp, Artificial Sequence
  Description of Artificial Sequence: Synthetic oligonucleotide
  Target: COL7A1; (-) strand; PAM type: NRG; PAM sequence: GGG
agccacgggtagactttctg

SEQ ID NO: 7495 - DNA, 20 bp, Artificial Sequence
  Description of Artificial Sequence: Synthetic oligonucleotide
  Target: COL7A1; (-) strand; PAM type: NRG; PAM sequence: GGG
cagccacgggtagactttct

SEQ ID NO: 7496 - DNA, 20 bp, Artificial Sequence
  Description of Artificial Sequence: Synthetic oligonucleotide
  Target: COL7A1; (-) strand; PAM type: NRG; PAM sequence: TGG
tcagccacgggtagactttc

SEQ ID NO: 7497 - DNA, 20 bp, Artificial Sequence
  Description of Artificial Sequence: Synthetic oligonucleotide
  Target: COL7A1; (-) strand; PAM type: NRG; PAM sequence: TAG
gtgcctgggtcagccacggg

SEQ ID NO: 7498 - DNA, 20 bp, Artificial Sequence
  Description of Artificial Sequence: Synthetic oligonucleotide
  Target: COL7A1; (-) strand; PAM type: NRG; PAM sequence: GGG
agggtgcctgggtcagccac

SEQ ID NO: 7499 - DNA, 20 bp, Artificial Sequence
  Description of Artificial Sequence: Synthetic oligonucleotide
  Target: COL7A1; (-) strand; PAM type: NRG; PAM sequence: CGG
gagggtgcctgggtcagcca

SEQ ID NO: 7500 - DNA, 20 bp, Artificial Sequence
  Description of Artificial Sequence: Synthetic oligonucleotide
  Target: COL7A1; (-) strand; PAM type: NRG; PAM sequence: CAG
ttgaaggagggtgcctgggt

SEQ ID NO: 7501 - DNA, 20 bp, Artificial Sequence
  Description of Artificial Sequence: Synthetic oligonucleotide
  Target: COL7A1; (-) strand; PAM type: NRG; PAM sequence: GGG
ggccttgaaggagggtgcct

SEQ ID NO: 7502 - DNA, 20 bp, Artificial Sequence
  Description of Artificial Sequence: Synthetic oligonucleotide
  Target: COL7A1; (-) strand; PAM type: NRG; PAM sequence: TGG
gggccttgaaggagggtgcc

SEQ ID NO: 7503 - DNA, 20 bp, Artificial Sequence
  Description of Artificial Sequence: Synthetic oligonucleotide
  Target: COL7A1; (-) strand; PAM type: NRG; PAM sequence: GGG
ggacatagggccttgaagga

SEQ ID NO: 7504 - DNA, 20 bp, Artificial Sequence
  Description of Artificial Sequence: Synthetic oligonucleotide
  Target: COL7A1; (-) strand; PAM type: NRG; PAM sequence: AGG
tggacatagggccttgaagg

SEQ ID NO: 7505 - DNA, 20 bp, Artificial Sequence
  Description of Artificial Sequence: Synthetic oligonucleotide
  Target: COL7A1; (-) strand; PAM type: NRG; PAM sequence: GAG
ctggacatagggccttgaag

SEQ ID NO: 7506 - DNA, 20 bp, Artificial Sequence
  Description of Artificial Sequence: Synthetic oligonucleotide
  Target: COL7A1; (-) strand; PAM type: NRG; PAM sequence: AGG
agctggacatagggccttga

SEQ ID NO: 7507 - DNA, 20 bp, Artificial Sequence
  Description of Artificial Sequence: Synthetic oligonucleotide
  Target: COL7A1; (-) strand; PAM type: NRG; PAM sequence: AAG
cagctggacatagggccttg

SEQ ID NO: 7508 - DNA, 20 bp, Artificial Sequence
  Description of Artificial Sequence: Synthetic oligonucleotide
  Target: COL7A1; (-) strand; PAM type: NRG; PAM sequence: GGG
tggccttccagctggacata

SEQ ID NO: 7509 - DNA, 20 bp, Artificial Sequence
  Description of Artificial Sequence: Synthetic oligonucleotide
  Target: COL7A1; (-) strand; PAM type: NRG; PAM sequence: AGG
gtggccttccagctggacat

SEQ ID NO: 7510 - DNA, 20 bp, Artificial Sequence
  Description of Artificial Sequence: Synthetic oligonucleotide
  Target: COL7A1; (-) strand; PAM type: NRG; PAM sequence: TAG
tgtggccttccagctggaca

SEQ ID NO: 7511 - DNA, 20 bp, Artificial Sequence
  Description of Artificial Sequence: Synthetic oligonucleotide
  Target: COL7A1; (-) strand; PAM type: NRG; PAM sequence: TGG
ttgacctgtggccttccagc

SEQ ID NO: 7512 - DNA, 20 bp, Artificial Sequence
  Description of Artificial Sequence: Synthetic oligonucleotide
  Target: COL7A1; (-) strand; PAM type: NRG; PAM sequence: CAG
gatgttgacctgtggccttc

SEQ ID NO: 7513 - DNA, 20 bp, Artificial Sequence
  Description of Artificial Sequence: Synthetic oligonucleotide
  Target: COL7A1; (-) strand; PAM type: NRG; PAM sequence: TGG
catctcctgatgttgacctg

SEQ ID NO: 7514 - DNA, 20 bp, Artificial Sequence
  Description of Artificial Sequence: Synthetic oligonucleotide
  Target: COL7A1; (-) strand; PAM type: NRG; PAM sequence: AGG
tggccttggggaggaacccc

SEQ ID NO: 7515 - DNA, 20 bp, Artificial Sequence
  Description of Artificial Sequence: Synthetic oligonucleotide
  Target: COL7A1; (-) strand; PAM type: NRG; PAM sequence: CAG
gtggccttggggaggaaccc

SEQ ID NO: 7516 - DNA, 20 bp, Artificial Sequence
  Description of Artificial Sequence: Synthetic oligonucleotide
  Target: COL7A1; (-) strand; PAM type: NRG; PAM sequence: AGG
tgtggacggtggccttgggg

SEQ ID NO: 7517 - DNA, 20 bp, Artificial Sequence
  Description of Artificial Sequence: Synthetic oligonucleotide
  Target: COL7A1; (-) strand; PAM type: NRG; PAM sequence: GAG
atgtggacggtggccttggg

SEQ ID NO: 7518 - DNA, 20 bp, Artificial Sequence
  Description of Artificial Sequence: Synthetic oligonucleotide
  Target: COL7A1; (-) strand; PAM type: NRG; PAM sequence: GGG
agatgtggacggtggccttg

SEQ ID NO: 7519 - DNA, 20 bp, Artificial Sequence
  Description of Artificial Sequence: Synthetic oligonucleotide
  Target: COL7A1; (-) strand; PAM type: NRG; PAM sequence: GGG
cagatgtggacggtggcctt

SEQ ID NO: 7520 - DNA, 20 bp, Artificial Sequence
  Description of Artificial Sequence: Synthetic oligonucleotide
  Target: COL7A1; (-) strand; PAM type: NRG; PAM sequence: TGG
gcagatgtggacggtggcct

SEQ ID NO: 7521 - DNA, 20 bp, Artificial Sequence
  Description of Artificial Sequence: Synthetic oligonucleotide
  Target: COL7A1; (-) strand; PAM type: NRG; PAM sequence: TGG
ctcagagcagatgtggacgg

SEQ ID NO: 7522 - DNA, 20 bp, Artificial Sequence
  Description of Artificial Sequence: Synthetic oligonucleotide
  Target: COL7A1; (-) strand; PAM type: NRG; PAM sequence: CGG
atcctcagagcagatgtgga

SEQ ID NO: 7523 - DNA, 20 bp, Artificial Sequence
  Description of Artificial Sequence: Synthetic oligonucleotide
  Target: COL7A1; (-) strand; PAM type: NRG; PAM sequence: TGG
gaatatcctcagagcagatg

SEQ ID NO: 7524 - DNA, 20 bp, Artificial Sequence
  Description of Artificial Sequence: Synthetic oligonucleotide
  Target: COL7A1; (-) strand; PAM type: NRG; PAM sequence: CAG
gatggagaatatcctcagag

SEQ ID NO: 7525 - DNA, 20 bp, Artificial Sequence
  Description of Artificial Sequence: Synthetic oligonucleotide
  Target: COL7A1; (-) strand; PAM type: NRG; PAM sequence: GAG
ggagatggagaatatcctca

SEQ ID NO: 7526 - DNA, 20 bp, Artificial Sequence
  Description of Artificial Sequence: Synthetic oligonucleotide
  Target: COL7A1; (-) strand; PAM type: NRG; PAM sequence: CAG
ggggagatggagaatatcct

SEQ ID NO: 7527 - DNA, 20 bp, Artificial Sequence
  Description of Artificial Sequence: Synthetic oligonucleotide
  Target: COL7A1; (-) strand; PAM type: NRG; PAM sequence: GAG
gggccatgggaggggagatg

SEQ ID NO: 7528 - DNA, 20 bp, Artificial Sequence
  Description of Artificial Sequence: Synthetic oligonucleotide
  Target: COL7A1; (-) strand; PAM type: NRG; PAM sequence: TGG
cagggccatgggaggggaga

SEQ ID NO: 7529 - DNA, 20 bp, Artificial Sequence
  Description of Artificial Sequence: Synthetic oligonucleotide
  Target: COL7A1; (-) strand; PAM type: NRG; PAM sequence: GAG
caaacagggccatgggaggg

SEQ ID NO: 7530 - DNA, 20 bp, Artificial Sequence
  Description of Artificial Sequence: Synthetic oligonucleotide
  Target: COL7A1; (-) strand; PAM type: NRG; PAM sequence: GGG
gacaaacagggccatgggag

SEQ ID NO: 7531 - DNA, 20 bp, Artificial Sequence
  Description of Artificial Sequence: Synthetic oligonucleotide
  Target: COL7A1; (-) strand; PAM type: NRG; PAM sequence: GGG
tgacaaacagggccatggga

SEQ ID NO: 7532 - DNA, 20 bp, Artificial Sequence
  Description of Artificial Sequence: Synthetic oligonucleotide
  Target: COL7A1; (-) strand; PAM type: NRG; PAM sequence: AGG
ctgacaaacagggccatggg

SEQ ID NO: 7533 - DNA, 20 bp, Artificial Sequence
  Description of Artificial Sequence: Synthetic oligonucleotide
  Target: COL7A1; (-) strand; PAM type: NRG; PAM sequence: GAG
cctgacaaacagggccatgg

SEQ ID NO: 7534 - DNA, 20 bp, Artificial Sequence
  Description of Artificial Sequence: Synthetic oligonucleotide
  Target: COL7A1; (-) strand; PAM type: NRG; PAM sequence: GGG
cacctgacaaacagggccat

SEQ ID NO: 7535 - DNA, 20 bp, Artificial Sequence
  Description of Artificial Sequence: Synthetic oligonucleotide
  Target: COL7A1; (-) strand; PAM type: NRG; PAM sequence: TGG
ccacctgacaaacagggcca

SEQ ID NO: 7536 - DNA, 20 bp, Artificial Sequence
  Description of Artificial Sequence: Synthetic oligonucleotide
  Target: COL7A1; (-) strand; PAM type: NRG; PAM sequence: GGG
agtttcccacctgacaaaca

SEQ ID NO: 7537 - DNA, 20 bp, Artificial Sequence
  Description of Artificial Sequence: Synthetic oligonucleotide
  Target: COL7A1; (-) strand; PAM type: NRG; PAM sequence: AGG
cagtttcccacctgacaaac

SEQ ID NO: 7538 - DNA, 20 bp, Artificial Sequence
  Description of Artificial Sequence: Synthetic oligonucleotide
  Target: COL7A1; (-) strand; PAM type: NRG; PAM sequence: CAG
tcagtttcccacctgacaaa

SEQ ID NO: 7539 - DNA, 20 bp, Artificial Sequence
  Description of Artificial Sequence: Synthetic oligonucleotide
  Target: COL7A1; (-) strand; PAM type: NRG; PAM sequence: CAG
ttctccctcttcctgaccct

SEQ ID NO: 7540 - DNA, 20 bp, Artificial Sequence
  Description of Artificial Sequence: Synthetic oligonucleotide
  Target: COL7A1; (-) strand; PAM type: NRG; PAM sequence: TGG
gtggactcgctttgtgatct

SEQ ID NO: 7541 - DNA, 20 bp, Artificial Sequence
  Description of Artificial Sequence: Synthetic oligonucleotide
  Target: COL7A1; (-) strand; PAM type: NRG; PAM sequence: TGG
gctgagtccatgctgcactg

SEQ ID NO: 7542 - DNA, 20 bp, Artificial Sequence
  Description of Artificial Sequence: Synthetic oligonucleotide
  Target: COL7A1; (-) strand; PAM type: NRG; PAM sequence: GAG
ggaaggctgggagttgagct

SEQ ID NO: 7543 - DNA, 20 bp, Artificial Sequence
  Description of Artificial Sequence: Synthetic oligonucleotide
  Target: COL7A1; (-) strand; PAM type: NRG; PAM sequence: GAG
ggtctggaaggctgggagtt

SEQ ID NO: 7544 - DNA, 20 bp, Artificial Sequence
  Description of Artificial Sequence: Synthetic oligonucleotide
  Target: COL7A1; (-) strand; PAM type: NRG; PAM sequence: GAG
ggcaaggtctggaaggctgg

SEQ ID NO: 7545 - DNA, 20 bp, Artificial Sequence
  Description of Artificial Sequence: Synthetic oligonucleotide
  Target: COL7A1; (-) strand; PAM type: NRG; PAM sequence: GGG
caggcaaggtctggaaggct

SEQ ID NO: 7546 - DNA, 20 bp, Artificial Sequence
  Description of Artificial Sequence: Synthetic oligonucleotide
  Target: COL7A1; (-) strand; PAM type: NRG; PAM sequence: TGG
gcaggcaaggtctggaaggc

SEQ ID NO: 7547 - DNA, 20 bp, Artificial Sequence
  Description of Artificial Sequence: Synthetic oligonucleotide
  Target: COL7A1; (-) strand; PAM type: NRG; PAM sequence: AGG
tgtggcaggcaaggtctgga

SEQ ID NO: 7548 - DNA, 20 bp, Artificial Sequence
  Description of Artificial Sequence: Synthetic oligonucleotide
  Target: COL7A1; (-) strand; PAM type: NRG; PAM sequence: AAG
gtgtggcaggcaaggtctgg

SEQ ID NO: 7549 - DNA, 20 bp, Artificial Sequence
  Description of Artificial Sequence: Synthetic oligonucleotide
  Target: COL7A1; (-) strand; PAM type: NRG; PAM sequence: TGG
gtagtgtggcaggcaaggtc

SEQ ID NO: 7550 - DNA, 20 bp, Artificial Sequence
  Description of Artificial Sequence: Synthetic oligonucleotide
  Target: COL7A1; (-) strand; PAM type: NRG; PAM sequence: AGG
ccactgtagtgtggcaggca

SEQ ID NO: 7551 - DNA, 20 bp, Artificial Sequence
  Description of Artificial Sequence: Synthetic oligonucleotide
  Target: COL7A1; (-) strand; PAM type: NRG; PAM sequence: AAG
tccactgtagtgtggcaggc

SEQ ID NO: 7552 - DNA, 20 bp, Artificial Sequence
  Description of Artificial Sequence: Synthetic oligonucleotide
  Target: COL7A1; (-) strand; PAM type: NRG; PAM sequence: AGG
cgattccactgtagtgtggc

SEQ ID NO: 7553 - DNA, 20 bp, Artificial Sequence
  Description of Artificial Sequence: Synthetic oligonucleotide
  Target: COL7A1; (-) strand; PAM type: NRG; PAM sequence: CAG
gcgattccactgtagtgtgg

SEQ ID NO: 7554 - DNA, 20 bp, Artificial Sequence
  Description of Artificial Sequence: Synthetic oligonucleotide
  Target: COL7A1; (-) strand; PAM type: NRG; PAM sequence: TGG
tgtgcgattccactgtagtg

SEQ ID NO: 7555 - DNA, 20 bp, Artificial Sequence
  Description of Artificial Sequence: Synthetic oligonucleotide
  Target: COL7A1; (-) strand; PAM type: NRG; PAM sequence: TAG
tggactgtgcgattccactg

SEQ ID NO: 7556 - DNA, 20 bp, Artificial Sequence
  Description of Artificial Sequence: Synthetic oligonucleotide
  Target: COL7A1; (-) strand; PAM type: NRG; PAM sequence: TGG
tgggagcacacatgtgaagg

SEQ ID NO: 7557 - DNA, 20 bp, Artificial Sequence
  Description of Artificial Sequence: Synthetic oligonucleotide
  Target: COL7A1; (-) strand; PAM type: NRG; PAM sequence: AGG
gagtgggagcacacatgtga

SEQ ID NO: 7558 - DNA, 20 bp, Artificial Sequence
  Description of Artificial Sequence: Synthetic oligonucleotide
  Target: COL7A1; (-) strand; PAM type: NRG; PAM sequence: AAG
ggagtgggagcacacatgtg

SEQ ID NO: 7559 - DNA, 20 bp, Artificial Sequence
  Description of Artificial Sequence: Synthetic oligonucleotide
  Target: COL7A1; (-) strand; PAM type: NRG; PAM sequence: GAG
gagaggacacaggggagtgg

SEQ ID NO: 7560 - DNA, 20 bp, Artificial Sequence
  Description of Artificial Sequence: Synthetic oligonucleotide
  Target: COL7A1; (-) strand; PAM type: NRG; PAM sequence: GGG
tggagaggacacaggggagt

SEQ ID NO: 7561 - DNA, 20 bp, Artificial Sequence
  Description of Artificial Sequence: Synthetic oligonucleotide
  Target: COL7A1; (-) strand; PAM type: NRG; PAM sequence: TGG
atggagaggacacaggggag

SEQ ID NO: 7562 - DNA, 20 bp, Artificial Sequence
  Description of Artificial Sequence: Synthetic oligonucleotide
  Target: COL7A1; (-) strand; PAM type: NRG; PAM sequence: GAG
tccatggagaggacacaggg

SEQ ID NO: 7563 - DNA, 20 bp, Artificial Sequence
  Description of Artificial Sequence: Synthetic oligonucleotide
  Target: COL7A1; (-) strand; PAM type: NRG; PAM sequence: GGG
tctccatggagaggacacag

SEQ ID NO: 7564 - DNA, 20 bp, Artificial Sequence
  Description of Artificial Sequence: Synthetic oligonucleotide
  Target: COL7A1; (-) strand; PAM type: NRG; PAM sequence: GGG
atctccatggagaggacaca

SEQ ID NO: 7565 - DNA, 20 bp, Artificial Sequence
  Description of Artificial Sequence: Synthetic oligonucleotide
  Target: COL7A1; (-) strand; PAM type: NRG; PAM sequence: AGG
catctccatggagaggacac

SEQ ID NO: 7566 - DNA, 20 bp, Artificial Sequence
  Description of Artificial Sequence: Synthetic oligonucleotide
  Target: COL7A1; (-) strand; PAM type: NRG; PAM sequence: CAG
gcatctccatggagaggaca

SEQ ID NO: 7567 - DNA, 20 bp, Artificial Sequence
  Description of Artificial Sequence: Synthetic oligonucleotide
  Target: COL7A1; (-) strand; PAM type: NRG; PAM sequence: AGG
gggacagcatctccatggag

SEQ ID NO: 7568 - DNA, 20 bp, Artificial Sequence
  Description of Artificial Sequence: Synthetic oligonucleotide
  Target: COL7A1; (-) strand; PAM type: NRG; PAM sequence: GAG
tgggacagcatctccatgga

SEQ ID NO: 7569 - DNA, 20 bp, Artificial Sequence
  Description of Artificial Sequence: Synthetic oligonucleotide
  Target: COL7A1; (-) strand; PAM type: NRG; PAM sequence: GAG
gctgggacagcatctccatg

SEQ ID NO: 7570 - DNA, 20 bp, Artificial Sequence
  Description of Artificial Sequence: Synthetic oligonucleotide
  Target: COL7A1; (-) strand; PAM type: NRG; PAM sequence: TGG
acgctgggacagcatctcca

SEQ ID NO: 7571 - DNA, 20 bp, Artificial Sequence
  Description of Artificial Sequence: Synthetic oligonucleotide
  Target: COL7A1; (-) strand; PAM type: NRG; PAM sequence: CAG
tgagagagcagacgctggga

SEQ ID NO: 7572 - DNA, 20 bp, Artificial Sequence
  Description of Artificial Sequence: Synthetic oligonucleotide
  Target: COL7A1; (-) strand; PAM type: NRG; PAM sequence: GGG
atgctgagagagcagacgct

SEQ ID NO: 7573 - DNA, 20 bp, Artificial Sequence
  Description of Artificial Sequence: Synthetic oligonucleotide
  Target: COL7A1; (-) strand; PAM type: NRG; PAM sequence: TGG
gatgctgagagagcagacgc

SEQ ID NO: 7574 - DNA, 20 bp, Artificial Sequence
  Description of Artificial Sequence: Synthetic oligonucleotide
  Target: COL7A1; (-) strand; PAM type: NRG; PAM sequence: CAG
atccgctgatgctgagagag

SEQ ID NO: 7575 - DNA, 20 bp, Artificial Sequence
  Description of Artificial Sequence: Synthetic oligonucleotide
  Target: COL7A1; (-) strand; PAM type: NRG; PAM sequence: GAG
ggcatccgctgatgctgaga

SEQ ID NO: 7576 - DNA, 20 bp, Artificial Sequence
  Description of Artificial Sequence: Synthetic oligonucleotide
  Target: COL7A1; (-) strand; PAM type: NRG; PAM sequence: GAG
cgggcatccgctgatgctga

SEQ ID NO: 7577 - DNA, 20 bp, Artificial Sequence
  Description of Artificial Sequence: Synthetic oligonucleotide
  Target: COL7A1; (-) strand; PAM type: NRG; PAM sequence: GAG
accgggcatccgctgatgct

SEQ ID NO: 7578 - DNA, 20 bp, Artificial Sequence
  Description of Artificial Sequence: Synthetic oligonucleotide
  Target: COL7A1; (-) strand; PAM type: NRG; PAM sequence: GGG
tgagggccagagattctacc

SEQ ID NO: 7579 - DNA, 20 bp, Artificial Sequence
  Description of Artificial Sequence: Synthetic oligonucleotide
  Target: COL7A1; (-) strand; PAM type: NRG; PAM sequence: CGG
atgagggccagagattctac

SEQ ID NO: 7580 - DNA, 20 bp, Artificial Sequence
  Description of Artificial Sequence: Synthetic oligonucleotide
  Target: COL7A1; (-) strand; PAM type: NRG; PAM sequence: GAG
ggaaaaagccatgagggcca

SEQ ID NO: 7581 - DNA, 20 bp, Artificial Sequence
  Description of Artificial Sequence: Synthetic oligonucleotide
  Target: COL7A1; (-) strand; PAM type: NRG; PAM sequence: CAG
gaggaaaaagccatgagggc

SEQ ID NO: 7582 - DNA, 20 bp, Artificial Sequence
  Description of Artificial Sequence: Synthetic oligonucleotide
  Target: COL7A1; (-) strand; PAM type: NRG; PAM sequence: GGG
tgaggaggaaaaagccatga

SEQ ID NO: 7583 - DNA, 20 bp, Artificial Sequence
  Description of Artificial Sequence: Synthetic oligonucleotide
  Target: COL7A1; (-) strand; PAM type: NRG; PAM sequence: AGG
ctgaggaggaaaaagccatg

SEQ ID NO: 7584 - DNA, 20 bp, Artificial Sequence
  Description of Artificial Sequence: Synthetic oligonucleotide
  Target: COL7A1; (-) strand; PAM type: NRG; PAM sequence: GAG
actgaggaggaaaaagccat

SEQ ID NO: 7585 - DNA, 20 bp, Artificial Sequence
  Description of Artificial Sequence: Synthetic oligonucleotide
  Target: COL7A1; (-) strand; PAM type: NRG; PAM sequence: AAG
cggatatactgaggaggaaa

SEQ ID NO: 7586 - DNA, 20 bp, Artificial Sequence
  Description of Artificial Sequence: Synthetic oligonucleotide
  Target: COL7A1; (-) strand; PAM type: NRG; PAM sequence: AGG
cactttcggatatactgagg

SEQ ID NO: 7587 - DNA, 20 bp, Artificial Sequence
  Description of Artificial Sequence: Synthetic oligonucleotide
  Target: COL7A1; (-) strand; PAM type: NRG; PAM sequence: GAG
tcactttcggatatactgag

SEQ ID NO: 7588 - DNA, 20 bp, Artificial Sequence
  Description of Artificial Sequence: Synthetic oligonucleotide
  Target: COL7A1; (-) strand; PAM type: NRG; PAM sequence: AGG
gctcactttcggatatactg

SEQ ID NO: 7589 - DNA, 20 bp, Artificial Sequence
  Description of Artificial Sequence: Synthetic oligonucleotide
  Target: COL7A1; (-) strand; PAM type: NRG; PAM sequence: GAG
ggctcactttcggatatact

SEQ ID NO: 7590 - DNA, 20 bp, Artificial Sequence
  Description of Artificial Sequence: Synthetic oligonucleotide
  Target: COL7A1; (-) strand; PAM type: NRG; PAM sequence: CGG
cagaacagctggctcacttt

SEQ ID NO: 7591 - DNA, 20 bp, Artificial Sequence
  Description of Artificial Sequence: Synthetic oligonucleotide
  Target: COL7A1; (-) strand; PAM type: NRG; PAM sequence: TGG
cacgcctgggacagaacagc

SEQ ID NO: 7592 - DNA, 20 bp, Artificial Sequence
  Description of Artificial Sequence: Synthetic oligonucleotide
  Target: COL7A1; (-) strand; PAM type: NRG; PAM sequence: CAG
ttcccacgcctgggacagaa

SEQ ID NO: 7593 - DNA, 20 bp, Artificial Sequence
  Description of Artificial Sequence: Synthetic oligonucleotide
  Target: COL7A1; (-) strand; PAM type: NRG; PAM sequence: CAG
catacttcccacgcctggga

SEQ ID NO: 7594 - DNA, 20 bp, Artificial Sequence
  Description of Artificial Sequence: Synthetic oligonucleotide
  Target: COL7A1; (-) strand; PAM type: NRG; PAM sequence: GGG
ccagcatacttcccacgcct

SEQ ID NO: 7595 - DNA, 20 bp, Artificial Sequence
  Description of Artificial Sequence: Synthetic oligonucleotide
  Target: COL7A1; (-) strand; PAM type: NRG; PAM sequence: TGG
cccagcatacttcccacgcc

SEQ ID NO: 7596 - DNA, 20 bp, Artificial Sequence
  Description of Artificial Sequence: Synthetic oligonucleotide
  Target: COL7A1; (-) strand; PAM type: NRG; PAM sequence: CAG
acacgtgtgtacagacatcc

SEQ ID NO: 7597 - DNA, 20 bp, Artificial Sequence
  Description of Artificial Sequence: Synthetic oligonucleotide
  Target: COL7A1; (-) strand; PAM type: NRG; PAM sequence: CAG
aacatgttcacacgtgtgta

SEQ ID NO: 7598 - DNA, 20 bp, Artificial Sequence
  Description of Artificial Sequence: Synthetic oligonucleotide
  Target: COL7A1; (-) strand; PAM type: NRG; PAM sequence: CAG
catggtgggcagaggctgag

SEQ ID NO: 7599 - DNA, 20 bp, Artificial Sequence
  Description of Artificial Sequence: Synthetic oligonucleotide
  Target: COL7A1; (-) strand; PAM type: NRG; PAM sequence: GAG
gttcatggtgggcagaggct

SEQ ID NO: 7600 - DNA, 20 bp, Artificial Sequence
  Description of Artificial Sequence: Synthetic oligonucleotide
  Target: COL7A1; (-) strand; PAM type: NRG; PAM sequence: AGG
gccaggttcatggtgggcag

SEQ ID NO: 7601 - DNA, 20 bp, Artificial Sequence
  Description of Artificial Sequence: Synthetic oligonucleotide
  Target: COL7A1; (-) strand; PAM type: NRG; PAM sequence: GAG
agccaggttcatggtgggca

SEQ ID NO: 7602 - DNA, 20 bp, Artificial Sequence
  Description of Artificial Sequence: Synthetic oligonucleotide
  Target: COL7A1; (-) strand; PAM type: NRG; PAM sequence: CAG
ccagccaggttcatggtggg

SEQ ID NO: 7603 - DNA, 20 bp, Artificial Sequence
  Description of Artificial Sequence: Synthetic oligonucleotide
  Target: COL7A1; (-) strand; PAM type: NRG; PAM sequence: GGG
aggccagccaggttcatggt

SEQ ID NO: 7604 - DNA, 20 bp, Artificial Sequence
  Description of Artificial Sequence: Synthetic oligonucleotide
  Target: COL7A1; (-) strand; PAM type: NRG; PAM sequence: TGG
caggccagccaggttcatgg

SEQ ID NO: 7605 - DNA, 20 bp, Artificial Sequence
  Description of Artificial Sequence: Synthetic oligonucleotide
  Target: COL7A1; (-) strand; PAM type: NRG; PAM sequence: TGG
ggtcaggccagccaggttca

SEQ ID NO: 7606 - DNA, 20 bp, Artificial Sequence
  Description of Artificial Sequence: Synthetic oligonucleotide
  Target: COL7A1; (-) strand; PAM type: NRG; PAM sequence: AGG
caaccagggtcaggccagcc

SEQ ID NO: 7607 - DNA, 20 bp, Artificial Sequence
  Description of Artificial Sequence: Synthetic oligonucleotide
  Target: COL7A1; (-) strand; PAM type: NRG; PAM sequence: CAG
ccaaccagggtcaggccagc

SEQ ID NO: 7608 - DNA, 20 bp, Artificial Sequence
  Description of Artificial Sequence: Synthetic oligonucleotide
  Target: COL7A1; (-) strand; PAM type: NRG; PAM sequence: CAG
ggagccaaccagggtcaggc

SEQ ID NO: 7609 - DNA, 20 bp, Artificial Sequence
  Description of Artificial Sequence: Synthetic oligonucleotide
  Target: COL7A1; (-) strand; PAM type: NRG; PAM sequence: AGG
cctgggagccaaccagggtc

SEQ ID NO: 7610 - DNA, 20 bp, Artificial Sequence
  Description of Artificial Sequence: Synthetic oligonucleotide
  Target: COL7A1; (-) strand; PAM type: NRG; PAM sequence: CAG
ccctgggagccaaccagggt

SEQ ID NO: 7611 - DNA, 20 bp, Artificial Sequence
  Description of Artificial Sequence: Synthetic oligonucleotide
  Target: COL7A1; (-) strand; PAM type: NRG; PAM sequence: GGG
ggcaccctgggagccaacca

SEQ ID NO: 7612 - DNA, 20 bp, Artificial Sequence
  Description of Artificial Sequence: Synthetic oligonucleotide
  Target: COL7A1; (-) strand; PAM type: NRG; PAM sequence: AGG
gggcaccctgggagccaacc

SEQ ID NO: 7613 - DNA, 20 bp, Artificial Sequence
  Description of Artificial Sequence: Synthetic oligonucleotide
  Target: COL7A1; (-) strand; PAM type: NRG; PAM sequence: CAG
agggcaccctgggagccaac

SEQ ID NO: 7614 - DNA, 20 bp, Artificial Sequence
  Description of Artificial Sequence: Synthetic oligonucleotide
  Target: COL7A1; (-) strand; PAM type: NRG; PAM sequence: GAG
cagtgcagagggcaccctgg

SEQ ID NO: 7615 - DNA, 20 bp, Artificial Sequence
  Description of Artificial Sequence: Synthetic oligonucleotide
  Target: COL7A1; (-) strand; PAM type: NRG; PAM sequence: GGG
gtcagtgcagagggcaccct

SEQ ID NO: 7616 - DNA, 20 bp, Artificial Sequence
  Description of Artificial Sequence: Synthetic oligonucleotide
  Target: COL7A1; (-) strand; PAM type: NRG; PAM sequence: TGG
ggtcagtgcagagggcaccc

SEQ ID NO: 7617 - DNA, 20 bp, Artificial Sequence
  Description of Artificial Sequence: Synthetic oligonucleotide
  Target: COL7A1; (-) strand; PAM type: NRG; PAM sequence: GGG
agtccagtggtcagtgcaga

SEQ ID NO: 7618 - DNA, 20 bp, Artificial Sequence
  Description of Artificial Sequence: Synthetic oligonucleotide
  Target: COL7A1; (-) strand; PAM type: NRG; PAM sequence: AGG
aagtccagtggtcagtgcag

SEQ ID NO: 7619 - DNA, 20 bp, Artificial Sequence
  Description of Artificial Sequence: Synthetic oligonucleotide
  Target: COL7A1; (-) strand; PAM type: NRG; PAM sequence: GAG
gaagtccagtggtcagtgca

SEQ ID NO: 7620 - DNA, 20 bp, Artificial Sequence
  Description of Artificial Sequence: Synthetic oligonucleotide
  Target: COL7A1; (-) strand; PAM type: NRG; PAM sequence: CAG
aggaagtccagtggtcagtg

SEQ ID NO: 7621 - DNA, 20 bp, Artificial Sequence
  Description of Artificial Sequence: Synthetic oligonucleotide
  Target: COL7A1; (-) strand; PAM type: NRG; PAM sequence: CAG
ctgggaggaagtccagtggt

SEQ ID NO: 7622 - DNA, 20 bp, Artificial Sequence
  Description of Artificial Sequence: Synthetic oligonucleotide
  Target: COL7A1; (-) strand; PAM type: NRG; PAM sequence: TGG
gacactgggaggaagtccag

SEQ ID NO: 7623 - DNA, 20 bp, Artificial Sequence
  Description of Artificial Sequence: Synthetic oligonucleotide
  Target: COL7A1; (-) strand; PAM type: NRG; PAM sequence: CAG
tgggacactgggaggaagtc

SEQ ID NO: 7624 - DNA, 20 bp, Artificial Sequence
  Description of Artificial Sequence: Synthetic oligonucleotide
  Target: COL7A1; (-) strand; PAM type: NRG; PAM sequence: AAG
taggctgggacactgggagg

SEQ ID NO: 7625 - DNA, 20 bp, Artificial Sequence
  Description of Artificial Sequence: Synthetic oligonucleotide
  Target: COL7A1; (-) strand; PAM type: NRG; PAM sequence: AGG
ttctaggctgggacactggg

SEQ ID NO: 7626 - DNA, 20 bp, Artificial Sequence
  Description of Artificial Sequence: Synthetic oligonucleotide
  Target: COL7A1; (-) strand; PAM type: NRG; PAM sequence: GAG
cttctaggctgggacactgg

SEQ ID NO: 7627 - DNA, 20 bp, Artificial Sequence
  Description of Artificial Sequence: Synthetic oligonucleotide
  Target: COL7A1; (-) strand; PAM type: NRG; PAM sequence: GGG
ggcttctaggctgggacact

SEQ ID NO: 7628 - DNA, 20 bp, Artificial Sequence
  Description of Artificial Sequence: Synthetic oligonucleotide
  Target: COL7A1; (-) strand; PAM type: NRG; PAM sequence: TGG
tggcttctaggctgggacac

SEQ ID NO: 7629 - DNA, 20 bp, Artificial Sequence
  Description of Artificial Sequence: Synthetic oligonucleotide
  Target: COL7A1; (-) strand; PAM type: NRG; PAM sequence: GGG
caccacatggcttctaggct

SEQ ID NO: 7630 - DNA, 20 bp, Artificial Sequence
  Description of Artificial Sequence: Synthetic oligonucleotide
  Target: COL7A1; (-) strand; PAM type: NRG; PAM sequence: TGG
ccaccacatggcttctaggc

SEQ ID NO: 7631 - DNA, 20 bp, Artificial Sequence
  Description of Artificial Sequence: Synthetic oligonucleotide
  Target: COL7A1; (-) strand; PAM type: NRG; PAM sequence: AGG
ctggccaccacatggcttct

SEQ ID NO: 7632 - DNA, 20 bp, Artificial Sequence
  Description of Artificial Sequence: Synthetic oligonucleotide
  Target: COL7A1; (-) strand; PAM type: NRG; PAM sequence: TAG
actggccaccacatggcttc

SEQ ID NO: 7633 - DNA, 20 bp, Artificial Sequence
  Description of Artificial Sequence: Synthetic oligonucleotide
  Target: COL7A1; (-) strand; PAM type: NRG; PAM sequence: TGG
tttgagaactggccaccaca

SEQ ID NO: 7634 - DNA, 20 bp, Artificial Sequence
  Description of Artificial Sequence: Synthetic oligonucleotide
  Target: COL7A1; (-) strand; PAM type: NRG; PAM sequence: TGG
agagtttgagctttgagaac

SEQ ID NO: 7635 - DNA, 20 bp, Artificial Sequence
  Description of Artificial Sequence: Synthetic oligonucleotide
  Target: COL7A1; (-) strand; PAM type: NRG; PAM sequence: GAG
ctgggaagagtttgagcttt

SEQ ID NO: 7636 - DNA, 20 bp, Artificial Sequence
  Description of Artificial Sequence: Synthetic oligonucleotide
  Target: COL7A1; (-) strand; PAM type: NRG; PAM sequence: GAG
acagggactgggaagagttt

SEQ ID NO: 7637 - DNA, 20 bp, Artificial Sequence
  Description of Artificial Sequence: Synthetic oligonucleotide
  Target: COL7A1; (-) strand; PAM type: NRG; PAM sequence: GAG
gtagatacagggactgggaa

SEQ ID NO: 7638 - DNA, 20 bp, Artificial Sequence
  Description of Artificial Sequence: Synthetic oligonucleotide
  Target: COL7A1; (-) strand; PAM type: NRG; PAM sequence: AAG
cagtagatacagggactggg

SEQ ID NO: 7639 - DNA, 20 bp, Artificial Sequence
  Description of Artificial Sequence: Synthetic oligonucleotide
  Target: COL7A1; (-) strand; PAM type: NRG; PAM sequence: GGG
ggccagtagatacagggact

SEQ ID NO: 7640 - DNA, 20 bp, Artificial Sequence
  Description of Artificial Sequence: Synthetic oligonucleotide
  Target: COL7A1; (-) strand; PAM type: NRG; PAM sequence: TGG
tggccagtagatacagggac

SEQ ID NO: 7641 - DNA, 20 bp, Artificial Sequence
  Description of Artificial Sequence: Synthetic oligonucleotide
  Target: COL7A1; (-) strand; PAM type: NRG; PAM sequence: GGG
aggactggccagtagataca

SEQ ID NO: 7642 - DNA, 20 bp, Artificial Sequence
  Description of Artificial Sequence: Synthetic oligonucleotide
  Target: COL7A1; (-) strand; PAM type: NRG; PAM sequence: AGG
caggactggccagtagatac

SEQ ID NO: 7643 - DNA, 20 bp, Artificial Sequence
  Description of Artificial Sequence: Synthetic oligonucleotide
  Target: COL7A1; (-) strand; PAM type: NRG; PAM sequence: CAG
tcaggactggccagtagata

SEQ ID NO: 7644 - DNA, 20 bp, Artificial Sequence
  Description of Artificial Sequence: Synthetic oligonucleotide
  Target: COL7A1; (-) strand; PAM type: NRG; PAM sequence: TAG
gttctgtcaggactggccag

SEQ ID NO: 7645 - DNA, 20 bp, Artificial Sequence
  Description of Artificial Sequence: Synthetic oligonucleotide
  Target: COL7A1; (-) strand; PAM type: NRG; PAM sequence: CAG
gcagttctgtcaggactggc

SEQ ID NO: 7646 - DNA, 20 bp, Artificial Sequence
  Description of Artificial Sequence: Synthetic oligonucleotide
  Target: COL7A1; (-) strand; PAM type: NRG; PAM sequence: TGG
tttggcagttctgtcaggac

SEQ ID NO: 7647 - DNA, 20 bp, Artificial Sequence
  Description of Artificial Sequence: Synthetic oligonucleotide
  Target: COL7A1; (-) strand; PAM type: NRG; PAM sequence: AGG
gatggtttggcagttctgtc

SEQ ID NO: 7648 - DNA, 20 bp, Artificial Sequence
  Description of Artificial Sequence: Synthetic oligonucleotide
  Target: COL7A1; (-) strand; PAM type: NRG; PAM sequence: CAG
ggatggtttggcagttctgt

SEQ ID NO: 7649 - DNA, 20 bp, Artificial Sequence
  Description of Artificial Sequence: Synthetic oligonucleotide
  Target: COL7A1; (-) strand; PAM type: NRG; PAM sequence: CAG
tgtgtggtgggatggtttgg

SEQ ID NO: 7650 - DNA, 20 bp, Artificial Sequence
  Description of Artificial Sequence: Synthetic oligonucleotide
  Target: COL7A1; (-) strand; PAM type: NRG; PAM sequence: TGG
gtgtgtgtggtgggatggtt

SEQ ID NO: 7651 - DNA, 20 bp, Artificial Sequence
  Description of Artificial Sequence: Synthetic oligonucleotide
  Target: COL7A1; (-) strand; PAM type: NRG; PAM sequence: TGG
tgtgtgtgtgtgtggtggga

SEQ ID NO: 7652 - DNA, 20 bp, Artificial Sequence
  Description of Artificial Sequence: Synthetic oligonucleotide
  Target: COL7A1; (-) strand; PAM type: NRG; PAM sequence: GGG
tgtgtgtgtgtgtgtgtggt

SEQ ID NO: 7653 - DNA, 20 bp, Artificial Sequence
  Description of Artificial Sequence: Synthetic oligonucleotide
  Target: COL7A1; (-) strand; PAM type: NRG; PAM sequence: TGG
gtgtgtgtgtgtgtgtgtgg

SEQ ID NO: 7654 - DNA, 20 bp, Artificial Sequence
  Description of Artificial Sequence: Synthetic oligonucleotide
  Target: COL7A1; (-) strand; PAM type: NRG; PAM sequence: TGG
tgtgtgtgtgtgtgtgtgtg

SEQ ID NO: 7655 - DNA, 20 bp, Artificial Sequence
  Description of Artificial Sequence: Synthetic oligonucleotide
  Target: COL7A1; (-) strand; PAM type: NRG; PAM sequence: GAG
ccaggctgggtaacaggagc

SEQ ID NO: 7656 - DNA, 20 bp, Artificial Sequence
  Description of Artificial Sequence: Synthetic oligonucleotide
  Target: COL7A1; (-) strand; PAM type: NRG; PAM sequence: GAG
tgctccaggctgggtaacag

SEQ ID NO: 7657 - DNA, 20 bp, Artificial Sequence
  Description of Artificial Sequence: Synthetic oligonucleotide
  Target: COL7A1; (-) strand; PAM type: NRG; PAM sequence: AGG
tgtgctccaggctgggtaac

SEQ ID NO: 7658 - DNA, 20 bp, Artificial Sequence
  Description of Artificial Sequence: Synthetic oligonucleotide
  Target: COL7A1; (-) strand; PAM type: NRG; PAM sequence: CAG
atgtgctccaggctgggtaa

SEQ ID NO: 7659 - DNA, 20 bp, Artificial Sequence
  Description of Artificial Sequence: Synthetic oligonucleotide
  Target: COL7A1; (-) strand; PAM type: NRG; PAM sequence: GGG
tgcactatgtgctccaggct

SEQ ID NO: 7660 - DNA, 20 bp, Artificial Sequence
  Description of Artificial Sequence: Synthetic oligonucleotide
  Target: COL7A1; (-) strand; PAM type: NRG; PAM sequence: TGG
ttgcactatgtgctccaggc

SEQ ID NO: 7661 - DNA, 20 bp, Artificial Sequence
  Description of Artificial Sequence: Synthetic oligonucleotide
  Target: COL7A1; (-) strand; PAM type: NRG; PAM sequence: AGG
atgattgcactatgtgctcc

SEQ ID NO: 7662 - DNA, 20 bp, Artificial Sequence
  Description of Artificial Sequence: Synthetic oligonucleotide
  Target: COL7A1; (-) strand; PAM type: NRG; PAM sequence: CAG
catgattgcactatgtgctc

SEQ ID NO: 7663 - DNA, 20 bp, Artificial Sequence
  Description of Artificial Sequence: Synthetic oligonucleotide
  Target: COL7A1; (-) strand; PAM type: NRG; PAM sequence: GAG
caggagttcaaggctgcagt

SEQ ID NO: 7664 - DNA, 20 bp, Artificial Sequence
  Description of Artificial Sequence: Synthetic oligonucleotide
  Target: COL7A1; (-) strand; PAM type: NRG; PAM sequence: CAG
aggccaggagttcaaggctg

SEQ ID NO: 7665 - DNA, 20 bp, Artificial Sequence
  Description of Artificial Sequence: Synthetic oligonucleotide
  Target: COL7A1; (-) strand; PAM type: NRG; PAM sequence: AGG
cgcttgaggccaggagttca

SEQ ID NO: 7666 - DNA, 20 bp, Artificial Sequence
  Description of Artificial Sequence: Synthetic oligonucleotide
  Target: COL7A1; (-) strand; PAM type: NRG; PAM sequence: AAG
tcgcttgaggccaggagttc

SEQ ID NO: 7667 - DNA, 20 bp, Artificial Sequence
  Description of Artificial Sequence: Synthetic oligonucleotide
  Target: COL7A1; (-) strand; PAM type: NRG; PAM sequence: GAG
ggaggatcgcttgaggccag

SEQ ID NO: 7668 - DNA, 20 bp, Artificial Sequence
  Description of Artificial Sequence: Synthetic oligonucleotide
  Target: COL7A1; (-) strand; PAM type: NRG; PAM sequence: AGG
cgggaggatcgcttgaggcc

SEQ ID NO: 7669 - DNA, 20 bp, Artificial Sequence
  Description of Artificial Sequence: Synthetic oligonucleotide
  Target: COL7A1; (-) strand; PAM type: NRG; PAM sequence: CAG
gcgggaggatcgcttgaggc

SEQ ID NO: 7670 - DNA, 20 bp, Artificial Sequence
  Description of Artificial Sequence: Synthetic oligonucleotide
  Target: COL7A1; (-) strand; PAM type: NRG; PAM sequence: AGG
tgaggcgggaggatcgcttg

SEQ ID NO: 7671 - DNA, 20 bp, Artificial Sequence
  Description of Artificial Sequence: Synthetic oligonucleotide
  Target: COL7A1; (-) strand; PAM type: NRG; PAM sequence: GAG
ttgaggcgggaggatcgctt

SEQ ID NO: 7672 - DNA, 20 bp, Artificial Sequence
  Description of Artificial Sequence: Synthetic oligonucleotide
  Target: COL7A1; (-) strand; PAM type: NRG; PAM sequence: AGG
ctttgggaggttgaggcggg

SEQ ID NO: 7673 - DNA, 20 bp, Artificial Sequence
  Description of Artificial Sequence: Synthetic oligonucleotide
  Target: COL7A1; (-) strand; PAM type: NRG; PAM sequence: GAG
gctttgggaggttgaggcgg

SEQ ID NO: 7674 - DNA, 20 bp, Artificial Sequence
  Description of Artificial Sequence: Synthetic oligonucleotide
  Target: COL7A1; (-) strand; PAM type: NRG; PAM sequence: GGG
gggctttgggaggttgaggc

SEQ ID NO: 7675 - DNA, 20 bp, Artificial Sequence
  Description of Artificial Sequence: Synthetic oligonucleotide
  Target: COL7A1; (-) strand; PAM type: NRG; PAM sequence: CGG
agggctttgggaggttgagg

SEQ ID NO: 7676 - DNA, 20 bp, Artificial Sequence
  Description of Artificial Sequence: Synthetic oligonucleotide
  Target: COL7A1; (-) strand; PAM type: NRG; PAM sequence: AGG
cccagggctttgggaggttg

SEQ ID NO: 7677 - DNA, 20 bp, Artificial Sequence
  Description of Artificial Sequence: Synthetic oligonucleotide
  Target: COL7A1; (-) strand; PAM type: NRG; PAM sequence: GAG
acccagggctttgggaggtt

SEQ ID NO: 7678 - DNA, 20 bp, Artificial Sequence
  Description of Artificial Sequence: Synthetic oligonucleotide
  Target: COL7A1; (-) strand; PAM type: NRG; PAM sequence: AGG
tataaacccagggctttggg

SEQ ID NO: 7679 - DNA, 20 bp, Artificial Sequence
  Description of Artificial Sequence: Synthetic oligonucleotide
  Target: COL7A1; (-) strand; PAM type: NRG; PAM sequence: GAG
ctataaacccagggctttgg

SEQ ID NO: 7680 - DNA, 20 bp, Artificial Sequence
  Description of Artificial Sequence: Synthetic oligonucleotide
  Target: COL7A1; (-) strand; PAM type: NRG; PAM sequence: GGG
ggctataaacccagggcttt

SEQ ID NO: 7681 - DNA, 20 bp, Artificial Sequence
  Description of Artificial Sequence: Synthetic oligonucleotide
  Target: COL7A1; (-) strand; PAM type: NRG; PAM sequence: TGG
tggctataaacccagggctt

SEQ ID NO: 7682 - DNA, 20 bp, Artificial Sequence
  Description of Artificial Sequence: Synthetic oligonucleotide
  Target: COL7A1; (-) strand; PAM type: NRG; PAM sequence: GGG
ggctaatggctataaaccca

SEQ ID NO: 7683 - DNA, 20 bp, Artificial Sequence
  Description of Artificial Sequence: Synthetic oligonucleotide
  Target: COL7A1; (-) strand; PAM type: NRG; PAM sequence: AGG
tggctaatggctataaaccc

SEQ ID NO: 7684 - DNA, 20 bp, Artificial Sequence
  Description of Artificial Sequence: Synthetic oligonucleotide
  Target: COL7A1; (-) strand; PAM type: NRG; PAM sequence: CAG
gtggctaatggctataaacc

SEQ ID NO: 7685 - DNA, 20 bp, Artificial Sequence
  Description of Artificial Sequence: Synthetic oligonucleotide
  Target: COL7A1; (-) strand; PAM type: NRG; PAM sequence: TGG
gggccagatgtggtggctaa

SEQ ID NO: 7686 - DNA, 20 bp, Artificial Sequence
  Description of Artificial Sequence: Synthetic oligonucleotide
  Target: COL7A1; (-) strand; PAM type: NRG; PAM sequence: TGG
ggtttgtgggccagatgtgg

SEQ ID NO: 7687 - DNA, 20 bp, Artificial Sequence
  Description of Artificial Sequence: Synthetic oligonucleotide
  Target: COL7A1; (-) strand; PAM type: NRG; PAM sequence: TGG
ggtggtttgtgggccagatg

SEQ ID NO: 7688 - DNA, 20 bp, Artificial Sequence
  Description of Artificial Sequence: Synthetic oligonucleotide
  Target: COL7A1; (-) strand; PAM type: NRG; PAM sequence: CAG
gcaaagggtggtttgtgggc

SEQ ID NO: 7689 - DNA, 20 bp, Artificial Sequence
  Description of Artificial Sequence: Synthetic oligonucleotide
  Target: COL7A1; (-) strand; PAM type: NRG; PAM sequence: GGG
tgctgcaaagggtggtttgt

SEQ ID NO: 7690 - DNA, 20 bp, Artificial Sequence
  Description of Artificial Sequence: Synthetic oligonucleotide
  Target: COL7A1; (-) strand; PAM type: NRG; PAM sequence: TGG
atgctgcaaagggtggtttg

SEQ ID NO: 7691 - DNA, 20 bp, Artificial Sequence
  Description of Artificial Sequence: Synthetic oligonucleotide
  Target: COL7A1; (-) strand; PAM type: NRG; PAM sequence: TGG
ggtctttatgctgcaaaggg

SEQ ID NO: 7692 - DNA, 20 bp, Artificial Sequence
  Description of Artificial Sequence: Synthetic oligonucleotide
  Target: COL7A1; (-) strand; PAM type: NRG; PAM sequence: GGG
ctgggtctttatgctgcaaa

SEQ ID NO: 7693 - DNA, 20 bp, Artificial Sequence
  Description of Artificial Sequence: Synthetic oligonucleotide
  Target: COL7A1; (-) strand; PAM type: NRG; PAM sequence: AGG
cctgggtctttatgctgcaa

SEQ ID NO: 7694 - DNA, 20 bp, Artificial Sequence
  Description of Artificial Sequence: Synthetic oligonucleotide
  Target: COL7A1; (-) strand; PAM type: NRG; PAM sequence: AAG
ccctgggtctttatgctgca

SEQ ID NO: 7695 - DNA, 20 bp, Artificial Sequence
  Description of Artificial Sequence: Synthetic oligonucleotide
  Target: COL7A1; (-) strand; PAM type: NRG; PAM sequence: GGG
tggcatgcactgaaacccct

SEQ ID NO: 7696 - DNA, 20 bp, Artificial Sequence
  Description of Artificial Sequence: Synthetic oligonucleotide
  Target: COL7A1; (-) strand; PAM type: NRG; PAM sequence: TGG
gtggcatgcactgaaacccc

SEQ ID NO: 7697 - DNA, 20 bp, Artificial Sequence
  Description of Artificial Sequence: Synthetic oligonucleotide
  Target: COL7A1; (-) strand; PAM type: NRG; PAM sequence: TGG
catcagtgtgtgggcctgtg

SEQ ID NO: 7698 - DNA, 20 bp, Artificial Sequence
  Description of Artificial Sequence: Synthetic oligonucleotide
  Target: COL7A1; (-) strand; PAM type: NRG; PAM sequence: GGG
ctctgtgtgcatcagtgtgt

SEQ ID NO: 7699 - DNA, 20 bp, Artificial Sequence
  Description of Artificial Sequence: Synthetic oligonucleotide
  Target: COL7A1; (-) strand; PAM type: NRG; PAM sequence: TGG
tctctgtgtgcatcagtgtg

SEQ ID NO: 7700 - DNA, 20 bp, Artificial Sequence
  Description of Artificial Sequence: Synthetic oligonucleotide
  Target: COL7A1; (-) strand; PAM type: NRG; PAM sequence: CAG
gccagtgtctctgtgtgcat

SEQ ID NO: 7701 - DNA, 20 bp, Artificial Sequence
  Description of Artificial Sequence: Synthetic oligonucleotide
  Target: COL7A1; (-) strand; PAM type: NRG; PAM sequence: CAG
gtgtgcatgtgcagctgtgc

SEQ ID NO: 7702 - DNA, 20 bp, Artificial Sequence
  Description of Artificial Sequence: Synthetic oligonucleotide
  Target: COL7A1; (-) strand; PAM type: NRG; PAM sequence: CAG
tgcgtctgtgtgtgcatgtg

SEQ ID NO: 7703 - DNA, 20 bp, Artificial Sequence
  Description of Artificial Sequence: Synthetic oligonucleotide
  Target: COL7A1; (-) strand; PAM type: NRG; PAM sequence: GAG
tgctggggtgcaggacttgt

SEQ ID NO: 7704 - DNA, 20 bp, Artificial Sequence
  Description of Artificial Sequence: Synthetic oligonucleotide
  Target: COL7A1; (-) strand; PAM type: NRG; PAM sequence: AGG
ctctgcacatgctggggtgc

SEQ ID NO: 7705 - DNA, 20 bp, Artificial Sequence
  Description of Artificial Sequence: Synthetic oligonucleotide
  Target: COL7A1; (-) strand; PAM type: NRG; PAM sequence: CAG
tctctgcacatgctggggtg

SEQ ID NO: 7706 - DNA, 20 bp, Artificial Sequence
  Description of Artificial Sequence: Synthetic oligonucleotide
  Target: COL7A1; (-) strand; PAM type: NRG; PAM sequence: GGG
gcctgtctctgcacatgctg

SEQ ID NO: 7707 - DNA, 20 bp, Artificial Sequence
  Description of Artificial Sequence: Synthetic oligonucleotide
  Target: COL7A1; (-) strand; PAM type: NRG; PAM sequence: GGG
tgcctgtctctgcacatgct

SEQ ID NO: 7708 - DNA, 20 bp, Artificial Sequence
  Description of Artificial Sequence: Synthetic oligonucleotide
  Target: COL7A1; (-) strand; PAM type: NRG; PAM sequence: TGG
ctgcctgtctctgcacatgc

SEQ ID NO: 7709 - DNA, 20 bp, Artificial Sequence
  Description of Artificial Sequence: Synthetic oligonucleotide
  Target: COL7A1; (-) strand; PAM type: NRG; PAM sequence: CAG
gagagcagcaggccccactg

SEQ ID NO: 7710 - DNA, 20 bp, Artificial Sequence
  Description of Artificial Sequence: Synthetic oligonucleotide
  Target: COL7A1; (-) strand; PAM type: NRG; PAM sequence: AGG
gggaggcagcagagagcagc

SEQ ID NO: 7711 - DNA, 20 bp, Artificial Sequence
  Description of Artificial Sequence: Synthetic oligonucleotide
  Target: COL7A1; (-) strand; PAM type: NRG; PAM sequence: CAG
agggaggcagcagagagcag

SEQ ID NO: 7712 - DNA, 20 bp, Artificial Sequence
  Description of Artificial Sequence: Synthetic oligonucleotide
  Target: COL7A1; (-) strand; PAM type: NRG; PAM sequence: CAG
ggaagggaggcagcagagag

SEQ ID NO: 7713 - DNA, 20 bp, Artificial Sequence
  Description of Artificial Sequence: Synthetic oligonucleotide
  Target: COL7A1; (-) strand; PAM type: NRG; PAM sequence: GAG
gtgggaagggaggcagcaga

SEQ ID NO: 7714 - DNA, 20 bp, Artificial Sequence
  Description of Artificial Sequence: Synthetic oligonucleotide
  Target: COL7A1; (-) strand; PAM type: NRG; PAM sequence: GAG
atgtgggaagggaggcagca

SEQ ID NO: 7715 - DNA, 20 bp, Artificial Sequence
  Description of Artificial Sequence: Synthetic oligonucleotide
  Target: COL7A1; (-) strand; PAM type: NRG; PAM sequence: CAG
atatgtgggaagggaggcag

SEQ ID NO: 7716 - DNA, 20 bp, Artificial Sequence
  Description of Artificial Sequence: Synthetic oligonucleotide
  Target: COL7A1; (-) strand; PAM type: NRG; PAM sequence: CAG
gatatatgtgggaagggagg

SEQ ID NO: 7717 - DNA, 20 bp, Artificial Sequence
  Description of Artificial Sequence: Synthetic oligonucleotide
  Target: COL7A1; (-) strand; PAM type: NRG; PAM sequence: AGG
agagatatatgtgggaaggg

SEQ ID NO: 7718 - DNA, 20 bp, Artificial Sequence
  Description of Artificial Sequence: Synthetic oligonucleotide
  Target: COL7A1; (-) strand; PAM type: NRG; PAM sequence: GAG
gagagatatatgtgggaagg

SEQ ID NO: 7719 - DNA, 20 bp, Artificial Sequence
  Description of Artificial Sequence: Synthetic oligonucleotide
  Target: COL7A1; (-) strand; PAM type: NRG; PAM sequence: GGG
tggagagatatatgtgggaa

SEQ ID NO: 7720 - DNA, 20 bp, Artificial Sequence
  Description of Artificial Sequence: Synthetic oligonucleotide
  Target: COL7A1; (-) strand; PAM type: NRG; PAM sequence: AGG
gtggagagatatatgtggga

SEQ ID NO: 7721 - DNA, 20 bp, Artificial Sequence
  Description of Artificial Sequence: Synthetic oligonucleotide
  Target: COL7A1; (-) strand; PAM type: NRG; PAM sequence: AAG
ggtggagagatatatgtggg

SEQ ID NO: 7722 - DNA, 20 bp, Artificial Sequence
  Description of Artificial Sequence: Synthetic oligonucleotide
  Target: COL7A1; (-) strand; PAM type: NRG; PAM sequence: GGG
gggggtggagagatatatgt

SEQ ID NO: 7723 - DNA, 20 bp, Artificial Sequence
  Description of Artificial Sequence: Synthetic oligonucleotide
  Target: COL7A1; (-) strand; PAM type: NRG; PAM sequence: TGG
tgggggtggagagatatatg

SEQ ID NO: 7724 - DNA, 20 bp, Artificial Sequence
  Description of Artificial Sequence: Synthetic oligonucleotide
  Target: COL7A1; (-) strand; PAM type: NRG; PAM sequence: GAG
acagcagggctgggggtgga

SEQ ID NO: 7725 - DNA, 20 bp, Artificial Sequence
  Description of Artificial Sequence: Synthetic oligonucleotide
  Target: COL7A1; (-) strand; PAM type: NRG; PAM sequence: GAG
ggacagcagggctgggggtg

SEQ ID NO: 7726 - DNA, 20 bp, Artificial Sequence
  Description of Artificial Sequence: Synthetic oligonucleotide
  Target: COL7A1; (-) strand; PAM type: NRG; PAM sequence: TGG
gtggacagcagggctggggg

SEQ ID NO: 7727 - DNA, 20 bp, Artificial Sequence
  Description of Artificial Sequence: Synthetic oligonucleotide
  Target: COL7A1; (-) strand; PAM type: NRG; PAM sequence: GGG
ccagtggacagcagggctgg

SEQ ID NO: 7728 - DNA, 20 bp, Artificial Sequence
  Description of Artificial Sequence: Synthetic oligonucleotide
  Target: COL7A1; (-) strand; PAM type: NRG; PAM sequence: GGG
cccagtggacagcagggctg

SEQ ID NO: 7729 - DNA, 20 bp, Artificial Sequence
  Description of Artificial Sequence: Synthetic oligonucleotide
  Target: COL7A1; (-) strand; PAM type: NRG; PAM sequence: GGG
tcccagtggacagcagggct

SEQ ID NO: 7730 - DNA, 20 bp, Artificial Sequence
  Description of Artificial Sequence: Synthetic oligonucleotide
  Target: COL7A1; (-) strand; PAM type: NRG; PAM sequence: TGG
ctcccagtggacagcagggc

SEQ ID NO: 7731 - DNA, 20 bp, Artificial Sequence
  Description of Artificial Sequence: Synthetic oligonucleotide
  Target: COL7A1; (-) strand; PAM type: NRG; PAM sequence: GGG
gaacctcccagtggacagca

SEQ ID NO: 7732 - DNA, 20 bp, Artificial Sequence
  Description of Artificial Sequence: Synthetic oligonucleotide
  Target: COL7A1; (-) strand; PAM type: NRG; PAM sequence: AGG
tgaacctcccagtggacagc

SEQ ID NO: 7733 - DNA, 20 bp, Artificial Sequence
  Description of Artificial Sequence: Synthetic oligonucleotide
  Target: COL7A1; (-) strand; PAM type: NRG; PAM sequence: CAG
ctgaacctcccagtggacag

SEQ ID NO: 7734 - DNA, 20 bp, Artificial Sequence
  Description of Artificial Sequence: Synthetic oligonucleotide
  Target: COL7A1; (-) strand; PAM type: NRG; PAM sequence: CAG
ctcctgaacctcccagtgga

SEQ ID NO: 7735 - DNA, 20 bp, Artificial Sequence
  Description of Artificial Sequence: Synthetic oligonucleotide
  Target: COL7A1; (-) strand; PAM type: NRG; PAM sequence: TGG
gaaactcctgaacctcccag

SEQ ID NO: 7736 - DNA, 20 bp, Artificial Sequence
  Description of Artificial Sequence: Synthetic oligonucleotide
  Target: COL7A1; (-) strand; PAM type: NRG; PAM sequence: CAG
ctggaaactcctgaacctcc

SEQ ID NO: 7737 - DNA, 20 bp, Artificial Sequence
  Description of Artificial Sequence: Synthetic oligonucleotide
  Target: COL7A1; (-) strand; PAM type: NRG; PAM sequence: TGG
ccagaggaagctggaattcc

SEQ ID NO: 7738 - DNA, 20 bp, Artificial Sequence
  Description of Artificial Sequence: Synthetic oligonucleotide
  Target: COL7A1; (-) strand; PAM type: NRG; PAM sequence: TGG
tggaaatggccagaggaagc

SEQ ID NO: 7739 - DNA, 20 bp, Artificial Sequence
  Description of Artificial Sequence: Synthetic oligonucleotide
  Target: COL7A1; (-) strand; PAM type: NRG; PAM sequence: AAG
ttgctggaaatggccagagg

SEQ ID NO: 7740 - DNA, 20 bp, Artificial Sequence
  Description of Artificial Sequence: Synthetic oligonucleotide
  Target: COL7A1; (-) strand; PAM type: NRG; PAM sequence: AGG
cctttgctggaaatggccag

SEQ ID NO: 7741 - DNA, 20 bp, Artificial Sequence
  Description of Artificial Sequence: Synthetic oligonucleotide
  Target: COL7A1; (-) strand; PAM type: NRG; PAM sequence: GAG
tcctttgctggaaatggcca

SEQ ID NO: 7742 - DNA, 20 bp, Artificial Sequence
  Description of Artificial Sequence: Synthetic oligonucleotide
  Target: COL7A1; (-) strand; PAM type: NRG; PAM sequence: CAG
aatcctttgctggaaatggc

SEQ ID NO: 7743 - DNA, 20 bp, Artificial Sequence
  Description of Artificial Sequence: Synthetic oligonucleotide
  Target: COL7A1; (-) strand; PAM type: NRG; PAM sequence: TGG
ggacaatcctttgctggaaa

SEQ ID NO: 7744 - DNA, 20 bp, Artificial Sequence
  Description of Artificial Sequence: Synthetic oligonucleotide
  Target: COL7A1; (-) strand; PAM type: NRG; PAM sequence: TGG
cacaggggacaatcctttgc

SEQ ID NO: 7745 - DNA, 20 bp, Artificial Sequence
  Description of Artificial Sequence: Synthetic oligonucleotide
  Target: COL7A1; (-) strand; PAM type: NRG; PAM sequence: GGG
ctgggcccagggagacacag

SEQ ID NO: 7746 - DNA, 20 bp, Artificial Sequence
  Description of Artificial Sequence: Synthetic oligonucleotide
  Target: COL7A1; (-) strand; PAM type: NRG; PAM sequence: GGG
cctgggcccagggagacaca

SEQ ID NO: 7747 - DNA, 20 bp, Artificial Sequence
  Description of Artificial Sequence: Synthetic oligonucleotide
  Target: COL7A1; (-) strand; PAM type: NRG; PAM sequence: AGG
ccctgggcccagggagacac

SEQ ID NO: 7748 - DNA, 20 bp, Artificial Sequence
  Description of Artificial Sequence: Synthetic oligonucleotide
  Target: COL7A1; (-) strand; PAM type: NRG; PAM sequence: CAG
gccctgggcccagggagaca

SEQ ID NO: 7749 - DNA, 20 bp, Artificial Sequence
  Description of Artificial Sequence: Synthetic oligonucleotide
  Target: COL7A1; (-) strand; PAM type: NRG; PAM sequence: GAG
ttgtgagccctgggcccagg

SEQ ID NO: 7750 - DNA, 20 bp, Artificial Sequence
  Description of Artificial Sequence: Synthetic oligonucleotide
  Target: COL7A1; (-) strand; PAM type: NRG; PAM sequence: GGG
ccttgtgagccctgggccca

SEQ ID NO: 7751 - DNA, 20 bp, Artificial Sequence
  Description of Artificial Sequence: Synthetic oligonucleotide
  Target: COL7A1; (-) strand; PAM type: NRG; PAM sequence: AGG
tccttgtgagccctgggccc

SEQ ID NO: 7752 - DNA, 20 bp, Artificial Sequence
  Description of Artificial Sequence: Synthetic oligonucleotide
  Target: COL7A1; (-) strand; PAM type: NRG; PAM sequence: CAG
ctccttgtgagccctgggcc

SEQ ID NO: 7753 - DNA, 20 bp, Artificial Sequence
  Description of Artificial Sequence: Synthetic oligonucleotide
  Target: COL7A1; (-) strand; PAM type: NRG; PAM sequence: GGG
tcacactccttgtgagccct

SEQ ID NO: 7754 - DNA, 20 bp, Artificial Sequence
  Description of Artificial Sequence: Synthetic oligonucleotide
  Target: COL7A1; (-) strand; PAM type: NRG; PAM sequence: TGG
ttcacactccttgtgagccc

SEQ ID NO: 7755 - DNA, 20 bp, Artificial Sequence
  Description of Artificial Sequence: Synthetic oligonucleotide
  Target: COL7A1; (-) strand; PAM type: NRG; PAM sequence: GAG
cagaacttcacactccttgt

SEQ ID NO: 7756 - DNA, 20 bp, Artificial Sequence
  Description of Artificial Sequence: Synthetic oligonucleotide
  Target: COL7A1; (-) strand; PAM type: NRG; PAM sequence: CAG
atggttctataacctgaagt

SEQ ID NO: 7757 - DNA, 20 bp, Artificial Sequence
  Description of Artificial Sequence: Synthetic oligonucleotide
  Target: COL7A1; (-) strand; PAM type: NRG; PAM sequence: AAG
tgacatggttctataacctg

SEQ ID NO: 7758 - DNA, 20 bp, Artificial Sequence
  Description of Artificial Sequence: Synthetic oligonucleotide
  Target: COL7A1; (-) strand; PAM type: NRG; PAM sequence: TGG
tcccaggctgcttggtgaca

SEQ ID NO: 7759 - DNA, 20 bp, Artificial Sequence
  Description of Artificial Sequence: Synthetic oligonucleotide
  Target: COL7A1; (-) strand; PAM type: NRG; PAM sequence: TGG
atcagggttcccaggctgct

SEQ ID NO: 7760 - DNA, 20 bp, Artificial Sequence
  Description of Artificial Sequence: Synthetic oligonucleotide
  Target: COL7A1; (-) strand; PAM type: NRG; PAM sequence: AGG
aagtgcagatcagggttccc

SEQ ID NO: 7761 - DNA, 20 bp, Artificial Sequence
  Description of Artificial Sequence: Synthetic oligonucleotide
  Target: COL7A1; (-) strand; PAM type: NRG; PAM sequence: CAG
gaagtgcagatcagggttcc

SEQ ID NO: 7762 - DNA, 20 bp, Artificial Sequence
  Description of Artificial Sequence: Synthetic oligonucleotide
  Target: COL7A1; (-) strand; PAM type: NRG; PAM sequence: GGG
gaaggaggaagtgcagatca

SEQ ID NO: 7763 - DNA, 20 bp, Artificial Sequence
  Description of Artificial Sequence: Synthetic oligonucleotide
  Target: COL7A1; (-) strand; PAM type: NRG; PAM sequence: AGG
ggaaggaggaagtgcagatc

SEQ ID NO: 7764 - DNA, 20 bp, Artificial Sequence
  Description of Artificial Sequence: Synthetic oligonucleotide
  Target: COL7A1; (-) strand; PAM type: NRG; PAM sequence: CAG
tggaaggaggaagtgcagat

SEQ ID NO: 7765 - DNA, 20 bp, Artificial Sequence
  Description of Artificial Sequence: Synthetic oligonucleotide
  Target: COL7A1; (-) strand; PAM type: NRG; PAM sequence: CAG
caggctggaaggaggaagtg

SEQ ID NO: 7766 - DNA, 20 bp, Artificial Sequence
  Description of Artificial Sequence: Synthetic oligonucleotide
  Target: COL7A1; (-) strand; PAM type: NRG; PAM sequence: AAG
tgtggcaggctggaaggagg

SEQ ID NO: 7767 - DNA, 20 bp, Artificial Sequence
  Description of Artificial Sequence: Synthetic oligonucleotide
  Target: COL7A1; (-) strand; PAM type: NRG; PAM sequence: AGG
ccctgtggcaggctggaagg

SEQ ID NO: 7768 - DNA, 20 bp, Artificial Sequence
  Description of Artificial Sequence: Synthetic oligonucleotide
  Target: COL7A1; (-) strand; PAM type: NRG; PAM sequence: GAG
gccctgtggcaggctggaag

SEQ ID NO: 7769 - DNA, 20 bp, Artificial Sequence
  Description of Artificial Sequence: Synthetic oligonucleotide
  Target: COL7A1; (-) strand; PAM type: NRG; PAM sequence: AGG
acgccctgtggcaggctgga

SEQ ID NO: 7770 - DNA, 20 bp, Artificial Sequence
  Description of Artificial Sequence: Synthetic oligonucleotide
  Target: COL7A1; (-) strand; PAM type: NRG; PAM sequence: AAG
tacgccctgtggcaggctgg

SEQ ID NO: 7771 - DNA, 20 bp, Artificial Sequence
  Description of Artificial Sequence: Synthetic oligonucleotide
  Target: COL7A1; (-) strand; PAM type: NRG; PAM sequence: TGG
ctgtacgccctgtggcaggc

SEQ ID NO: 7772 - DNA, 20 bp, Artificial Sequence
  Description of Artificial Sequence: Synthetic oligonucleotide
  Target: COL7A1; (-) strand; PAM type: NRG; PAM sequence: AGG
cctactgtacgccctgtggc

SEQ ID NO: 7773 - DNA, 20 bp, Artificial Sequence
  Description of Artificial Sequence: Synthetic oligonucleotide
  Target: COL7A1; (-) strand; PAM type: NRG; PAM sequence: CAG
acctactgtacgccctgtgg

SEQ ID NO: 7774 - DNA, 20 bp, Artificial Sequence
  Description of Artificial Sequence: Synthetic oligonucleotide
  Target: COL7A1; (-) strand; PAM type: NRG; PAM sequence: TGG
agcacctactgtacgccctg

SEQ ID NO: 7775 - DNA, 20 bp, Artificial Sequence
  Description of Artificial Sequence: Synthetic oligonucleotide
  Target: COL7A1; (-) strand; PAM type: NRG; PAM sequence: AAG
cttgctggtcctgaatccct

SEQ ID NO: 7776 - DNA, 20 bp, Artificial Sequence
  Description of Artificial Sequence: Synthetic oligonucleotide
  Target: COL7A1; (-) strand; PAM type: NRG; PAM sequence: TGG
ccctttctgtgtgcccttgc

SEQ ID NO: 7777 - DNA, 20 bp, Artificial Sequence
  Description of Artificial Sequence: Synthetic oligonucleotide
  Target: COL7A1; (-) strand; PAM type: NRG; PAM sequence: TGG
cacctgctgtgtactcagtt

SEQ ID NO: 7778 - DNA, 20 bp, Artificial Sequence
  Description of Artificial Sequence: Synthetic oligonucleotide
  Target: COL7A1; (-) strand; PAM type: NRG; PAM sequence: CAG
ctgaacacctgctgtgtact

SEQ ID NO: 7779 - DNA, 20 bp, Artificial Sequence
  Description of Artificial Sequence: Synthetic oligonucleotide
  Target: COL7A1; (-) strand; PAM type: NRG; PAM sequence: GAG
gtgtgccctgtgccagtcct

SEQ ID NO: 7780 - DNA, 20 bp, Artificial Sequence
  Description of Artificial Sequence: Synthetic oligonucleotide
  Target: COL7A1; (-) strand; PAM type: NRG; PAM sequence: CAG
gtctgctgtgtgccctgtgc

SEQ ID NO: 7781 - DNA, 20 bp, Artificial Sequence
  Description of Artificial Sequence: Synthetic oligonucleotide
  Target: COL7A1; (-) strand; PAM type: NRG; PAM sequence: GGG
cccttaaaccagcacttcta

SEQ ID NO: 7782 - DNA, 20 bp, Artificial Sequence
  Description of Artificial Sequence: Synthetic oligonucleotide
  Target: COL7A1; (-) strand; PAM type: NRG; PAM sequence: AGG
gcccttaaaccagcacttct

SEQ ID NO: 7783 - DNA, 20 bp, Artificial Sequence
  Description of Artificial Sequence: Synthetic oligonucleotide
  Target: COL7A1; (-) strand; PAM type: NRG; PAM sequence: TAG
agcccttaaaccagcacttc

SEQ ID NO: 7784 - DNA, 20 bp, Artificial Sequence
  Description of Artificial Sequence: Synthetic oligonucleotide
  Target: COL7A1; (-) strand; PAM type: NRG; PAM sequence: CAG
tgtggctttagcccttaaac

SEQ ID NO: 7785 - DNA, 20 bp, Artificial Sequence
  Description of Artificial Sequence: Synthetic oligonucleotide
  Target: COL7A1; (-) strand; PAM type: NRG; PAM sequence: TAG
ggtttcacatgatgtggctt

SEQ ID NO: 7786 - DNA, 20 bp, Artificial Sequence
  Description of Artificial Sequence: Synthetic oligonucleotide
  Target: COL7A1; (-) strand; PAM type: NRG; PAM sequence: TGG
aggatgggtttcacatgatg

SEQ ID NO: 7787 - DNA, 20 bp, Artificial Sequence
  Description of Artificial Sequence: Synthetic oligonucleotide
  Target: COL7A1; (-) strand; PAM type: NRG; PAM sequence: GGG
tctagaggctcatttaggat

SEQ ID NO: 7788 - DNA, 20 bp, Artificial Sequence
  Description of Artificial Sequence: Synthetic oligonucleotide
  Target: COL7A1; (-) strand; PAM type: NRG; PAM sequence: TGG
gtctagaggctcatttagga

SEQ ID NO: 7789 - DNA, 20 bp, Artificial Sequence
  Description of Artificial Sequence: Synthetic oligonucleotide
  Target: COL7A1; (-) strand; PAM type: NRG; PAM sequence: AGG
ggaagtctagaggctcattt

SEQ ID NO: 7790 - DNA, 20 bp, Artificial Sequence
  Description of Artificial Sequence: Synthetic oligonucleotide
  Target: COL7A1; (-) strand; PAM type: NRG; PAM sequence: TAG
gggaagtctagaggctcatt

SEQ ID NO: 7791 - DNA, 20 bp, Artificial Sequence
  Description of Artificial Sequence: Synthetic oligonucleotide
  Target: COL7A1; (-) strand; PAM type: NRG; PAM sequence: AGG
accagtttggggaagtctag

SEQ ID NO: 7792 - DNA, 20 bp, Artificial Sequence
  Description of Artificial Sequence: Synthetic oligonucleotide
  Target: COL7A1; (-) strand; PAM type: NRG; PAM sequence: GAG
caccagtttggggaagtcta

SEQ ID NO: 7793 - DNA, 20 bp, Artificial Sequence
  Description of Artificial Sequence: Synthetic oligonucleotide
  Target: COL7A1; (-) strand; PAM type: NRG; PAM sequence: TAG
cacaccagtttggggaagtc

SEQ ID NO: 7794 - DNA, 20 bp, Artificial Sequence
  Description of Artificial Sequence: Synthetic oligonucleotide
  Target: COL7A1; (-) strand; PAM type: NRG; PAM sequence: AAG
ggggtcacaccagtttgggg

SEQ ID NO: 7795 - DNA, 20 bp, Artificial Sequence
  Description of Artificial Sequence: Synthetic oligonucleotide
  Target: COL7A1; (-) strand; PAM type: NRG; PAM sequence: GGG
cttggggtcacaccagtttg

SEQ ID NO: 7796 - DNA, 20 bp, Artificial Sequence
  Description of Artificial Sequence: Synthetic oligonucleotide
  Target: COL7A1; (-) strand; PAM type: NRG; PAM sequence: GGG
tcttggggtcacaccagttt

SEQ ID NO: 7797 - DNA, 20 bp, Artificial Sequence
  Description of Artificial Sequence: Synthetic oligonucleotide
  Target: COL7A1; (-) strand; PAM type: NRG; PAM sequence: TGG
ctcttggggtcacaccagtt

SEQ ID NO: 7798 - DNA, 20 bp, Artificial Sequence
  Description of Artificial Sequence: Synthetic oligonucleotide
  Target: COL7A1; (-) strand; PAM type: NRG; PAM sequence: CAG
gtttcctcttggggtcacac

SEQ ID NO: 7799 - DNA, 20 bp, Artificial Sequence
  Description of Artificial Sequence: Synthetic oligonucleotide
  Target: COL7A1; (-) strand; PAM type: NRG; PAM sequence: GGG
tttgtccaggtttcctcttg

SEQ ID NO: 7800 - DNA, 20 bp, Artificial Sequence
  Description of Artificial Sequence: Synthetic oligonucleotide
  Target: COL7A1; (-) strand; PAM type: NRG; PAM sequence: GGG
gtttgtccaggtttcctctt

SEQ ID NO: 7801 - DNA, 20 bp, Artificial Sequence
  Description of Artificial Sequence: Synthetic oligonucleotide
  Target: COL7A1; (-) strand; PAM type: NRG; PAM sequence: TGG
tgtttgtccaggtttcctct

SEQ ID NO: 7802 - DNA, 20 bp, Artificial Sequence
  Description of Artificial Sequence: Synthetic oligonucleotide
  Target: COL7A1; (-) strand; PAM type: NRG; PAM sequence: AGG
ccaagggatcatgtttgtcc

SEQ ID NO: 7803 - DNA, 20 bp, Artificial Sequence
  Description of Artificial Sequence: Synthetic oligonucleotide
  Target: COL7A1; (-) strand; PAM type: NRG; PAM sequence: CAG
tccaagggatcatgtttgtc

SEQ ID NO: 7804 - DNA, 20 bp, Artificial Sequence
  Description of Artificial Sequence: Synthetic oligonucleotide
  Target: COL7A1; (-) strand; PAM type: NRG; PAM sequence: GGG
tgctctttgctggcctccaa

SEQ ID NO: 7805 - DNA, 20 bp, Artificial Sequence
  Description of Artificial Sequence: Synthetic oligonucleotide
  Target: COL7A1; (-) strand; PAM type: NRG; PAM sequence: AGG
ctgctctttgctggcctcca

SEQ ID NO: 7806 - DNA, 20 bp, Artificial Sequence
  Description of Artificial Sequence: Synthetic oligonucleotide
  Target: COL7A1; (-) strand; PAM type: NRG; PAM sequence: AAG
tctgctctttgctggcctcc

SEQ ID NO: 7807 - DNA, 20 bp, Artificial Sequence
  Description of Artificial Sequence: Synthetic oligonucleotide
  Target: COL7A1; (-) strand; PAM type: NRG; PAM sequence: TGG
cctcctgctctgctctttgc

SEQ ID NO: 7808 - DNA, 20 bp, Artificial Sequence
  Description of Artificial Sequence: Synthetic oligonucleotide
  Target: COL7A1; (-) strand; PAM type: NRG; PAM sequence: AGG
accgccagctggcgctgccc

SEQ ID NO: 7809 - DNA, 20 bp, Artificial Sequence
  Description of Artificial Sequence: Synthetic oligonucleotide
  Target: COL7A1; (-) strand; PAM type: NRG; PAM sequence: CAG
gaccgccagctggcgctgcc

SEQ ID NO: 7810 - DNA, 20 bp, Artificial Sequence
  Description of Artificial Sequence: Synthetic oligonucleotide
  Target: COL7A1; (-) strand; PAM type: NRG; PAM sequence: TGG
cagggggagggaccgccagc

SEQ ID NO: 7811 - DNA, 20 bp, Artificial Sequence
  Description of Artificial Sequence: Synthetic oligonucleotide
  Target: COL7A1; (-) strand; PAM type: NRG; PAM sequence: CAG
agcccagggggagggaccgc

SEQ ID NO: 7812 - DNA, 20 bp, Artificial Sequence
  Description of Artificial Sequence: Synthetic oligonucleotide
  Target: COL7A1; (-) strand; PAM type: NRG; PAM sequence: GGG
cttcctccagcccaggggga

SEQ ID NO: 7813 - DNA, 20 bp, Artificial Sequence
  Description of Artificial Sequence: Synthetic oligonucleotide
  Target: COL7A1; (-) strand; PAM type: NRG; PAM sequence: AGG
tcttcctccagcccaggggg

SEQ ID NO: 7814 - DNA, 20 bp, Artificial Sequence
  Description of Artificial Sequence: Synthetic oligonucleotide
  Target: COL7A1; (-) strand; PAM type: NRG; PAM sequence: GAG
gtcttcctccagcccagggg

SEQ ID NO: 7815 - DNA, 20 bp, Artificial Sequence
  Description of Artificial Sequence: Synthetic oligonucleotide
  Target: COL7A1; (-) strand; PAM type: NRG; PAM sequence: GGG
gtgtcttcctccagcccagg

SEQ ID NO: 7816 - DNA, 20 bp, Artificial Sequence
  Description of Artificial Sequence: Synthetic oligonucleotide
  Target: COL7A1; (-) strand; PAM type: NRG; PAM sequence: GGG
agtgtcttcctccagcccag

SEQ ID NO: 7817 - DNA, 20 bp, Artificial Sequence
  Description of Artificial Sequence: Synthetic oligonucleotide
  Target: COL7A1; (-) strand; PAM type: NRG; PAM sequence: GGG
tagtgtcttcctccagccca

SEQ ID NO: 7818 - DNA, 20 bp, Artificial Sequence
  Description of Artificial Sequence: Synthetic oligonucleotide
  Target: COL7A1; (-) strand; PAM type: NRG; PAM sequence: AGG
atagtgtcttcctccagccc

SEQ ID NO: 7819 - DNA, 20 bp, Artificial Sequence
  Description of Artificial Sequence: Synthetic oligonucleotide
  Target: COL7A1; (-) strand; PAM type: NRG; PAM sequence: CAG
aatagtgtcttcctccagcc

SEQ ID NO: 7820 - DNA, 20 bp, Artificial Sequence
  Description of Artificial Sequence: Synthetic oligonucleotide
  Target: COL7A1; (-) strand; PAM type: NRG; PAM sequence: CAG
ctataaatagtgtcttcctc

SEQ ID NO: 7821 - DNA, 20 bp, Artificial Sequence
  Description of Artificial Sequence: Synthetic oligonucleotide
  Target: COL7A1; (-) strand; PAM type: NRG; PAM sequence: TAG
ggccaagggggaactataaa

SEQ ID NO: 7822 - DNA, 20 bp, Artificial Sequence
  Description of Artificial Sequence: Synthetic oligonucleotide
  Target: COL7A1; (-) strand; PAM type: NRG; PAM sequence: GGG
gagagggggctgggccaagg

SEQ ID NO: 7823 - DNA, 20 bp, Artificial Sequence
  Description of Artificial Sequence: Synthetic oligonucleotide
  Target: COL7A1; (-) strand; PAM type: NRG; PAM sequence: GGG
ggagagggggctgggccaag

SEQ ID NO: 7824 - DNA, 20 bp, Artificial Sequence
  Description of Artificial Sequence: Synthetic oligonucleotide
  Target: COL7A1; (-) strand; PAM type: NRG; PAM sequence: GGG
gggagagggggctgggccaa

SEQ ID NO: 7825 - DNA, 20 bp, Artificial Sequence
  Description of Artificial Sequence: Synthetic oligonucleotide
  Target: COL7A1; (-) strand; PAM type: NRG; PAM sequence: AGG
agggagagggggctgggcca

SEQ ID NO: 7826 - DNA, 20 bp, Artificial Sequence
  Description of Artificial Sequence: Synthetic oligonucleotide
  Target: COL7A1; (-) strand; PAM type: NRG; PAM sequence: AAG
aagggagagggggctgggcc

SEQ ID NO: 7827 - DNA, 20 bp, Artificial Sequence
  Description of Artificial Sequence: Synthetic oligonucleotide
  Target: COL7A1; (-) strand; PAM type: NRG; PAM sequence: GGG
cctgcaagggagagggggct

SEQ ID NO: 7828 - DNA, 20 bp, Artificial Sequence
  Description of Artificial Sequence: Synthetic oligonucleotide
  Target: COL7A1; (-) strand; PAM type: NRG; PAM sequence: TGG
ccctgcaagggagagggggc

SEQ ID NO: 7829 - DNA, 20 bp, Artificial Sequence
  Description of Artificial Sequence: Synthetic oligonucleotide
  Target: COL7A1; (-) strand; PAM type: NRG; PAM sequence: GGG
gtcgccctgcaagggagagg

SEQ ID NO: 7830 - DNA, 20 bp, Artificial Sequence
  Description of Artificial Sequence: Synthetic oligonucleotide
  Target: COL7A1; (-) strand; PAM type: NRG; PAM sequence: GGG
tgtcgccctgcaagggagag

SEQ ID NO: 7831 - DNA, 20 bp, Artificial Sequence
  Description of Artificial Sequence: Synthetic oligonucleotide
  Target: COL7A1; (-) strand; PAM type: NRG; PAM sequence: GGG
ctgtcgccctgcaagggaga

SEQ ID NO: 7832 - DNA, 20 bp, Artificial Sequence
  Description of Artificial Sequence: Synthetic oligonucleotide
  Target: COL7A1; (-) strand; PAM type: NRG; PAM sequence: AGG
actgtcgccctgcaagggag

SEQ ID NO: 7833 - DNA, 20 bp, Artificial Sequence
  Description of Artificial Sequence: Synthetic oligonucleotide
  Target: COL7A1; (-) strand; PAM type: NRG; PAM sequence: GAG
aactgtcgccctgcaaggga

SEQ ID NO: 7834 - DNA, 20 bp, Artificial Sequence
  Description of Artificial Sequence: Synthetic oligonucleotide
  Target: COL7A1; (-) strand; PAM type: NRG; PAM sequence: GAG
aaaactgtcgccctgcaagg

SEQ ID NO: 7835 - DNA, 20 bp, Artificial Sequence
  Description of Artificial Sequence: Synthetic oligonucleotide
  Target: COL7A1; (-) strand; PAM type: NRG; PAM sequence: GGG
ggaaaactgtcgccctgcaa

SEQ ID NO: 7836 - DNA, 20 bp, Artificial Sequence
  Description of Artificial Sequence: Synthetic oligonucleotide
  Target: COL7A1; (-) strand; PAM type: NRG; PAM sequence: AGG
gggaaaactgtcgccctgca

SEQ ID NO: 7837 - DNA, 20 bp, Artificial Sequence
  Description of Artificial Sequence: Synthetic oligonucleotide
  Target: COL7A1; (-) strand; PAM type: NRG; PAM sequence: AAG
ggggaaaactgtcgccctgc

SEQ ID NO: 7838 - DNA, 20 bp, Artificial Sequence
  Description of Artificial Sequence: Synthetic oligonucleotide
  Target: COL7A1; (-) strand; PAM type: NRG; PAM sequence: GGG
tgtcagtggcccgaaggagg

SEQ ID NO: 7839 - DNA, 20 bp, Artificial Sequence
  Description of Artificial Sequence: Synthetic oligonucleotide
  Target: COL7A1; (-) strand; PAM type: NRG; PAM sequence: GGG
ctgtcagtggcccgaaggag

SEQ ID NO: 7840 - DNA, 20 bp, Artificial Sequence
  Description of Artificial Sequence: Synthetic oligonucleotide
  Target: COL7A1; (-) strand; PAM type: NRG; PAM sequence: GGG
tctgtcagtggcccgaagga

SEQ ID NO: 7841 - DNA, 20 bp, Artificial Sequence
  Description of Artificial Sequence: Synthetic oligonucleotide
  Target: COL7A1; (-) strand; PAM type: NRG; PAM sequence: AGG
atctgtcagtggcccgaagg

SEQ ID NO: 7842 - DNA, 20 bp, Artificial Sequence
  Description of Artificial Sequence: Synthetic oligonucleotide
  Target: COL7A1; (-) strand; PAM type: NRG; PAM sequence: GAG
catctgtcagtggcccgaag

SEQ ID NO: 7843 - DNA, 20 bp, Artificial Sequence
  Description of Artificial Sequence: Synthetic oligonucleotide
  Target: COL7A1; (-) strand; PAM type: NRG; PAM sequence: AGG
ttcatctgtcagtggcccga

SEQ ID NO: 7844 - DNA, 20 bp, Artificial Sequence
  Description of Artificial Sequence: Synthetic oligonucleotide
  Target: COL7A1; (-) strand; PAM type: NRG; PAM sequence: AAG
attcatctgtcagtggcccg

SEQ ID NO: 7845 - DNA, 20 bp, Artificial Sequence
  Description of Artificial Sequence: Synthetic oligonucleotide
  Target: COL7A1; (-) strand; PAM type: NRG; PAM sequence: TGG
gagggccattcatctgtcag

SEQ ID NO: 7846 - DNA, 20 bp, Artificial Sequence
  Description of Artificial Sequence: Synthetic oligonucleotide
  Target: COL7A1; (-) strand; PAM type: NRG; PAM sequence: CAG
tctgagggccattcatctgt

SEQ ID NO: 7847 - DNA, 20 bp, Artificial Sequence
  Description of Artificial Sequence: Synthetic oligonucleotide
  Target: COL7A1; (-) strand; PAM type: NRG; PAM sequence: GGG
ctggtttaggggtgctctga

SEQ ID NO: 7848 - DNA, 20 bp, Artificial Sequence
  Description of Artificial Sequence: Synthetic oligonucleotide
  Target: COL7A1; (-) strand; PAM type: NRG; PAM sequence: AGG
cctggtttaggggtgctctg

SEQ ID NO: 7849 - DNA, 20 bp, Artificial Sequence
  Description of Artificial Sequence: Synthetic oligonucleotide
  Target: COL7A1; (-) strand; PAM type: NRG; PAM sequence: GAG
tcctggtttaggggtgctct

SEQ ID NO: 7850 - DNA, 20 bp, Artificial Sequence
  Description of Artificial Sequence: Synthetic oligonucleotide
  Target: COL7A1; (-) strand; PAM type: NRG; PAM sequence: GGG
gggggtctctcctggtttag

SEQ ID NO: 7851 - DNA, 20 bp, Artificial Sequence
  Description of Artificial Sequence: Synthetic oligonucleotide
  Target: COL7A1; (-) strand; PAM type: NRG; PAM sequence: GGG
ggggggtctctcctggttta

SEQ ID NO: 7852 - DNA, 20 bp, Artificial Sequence
  Description of Artificial Sequence: Synthetic oligonucleotide
  Target: COL7A1; (-) strand; PAM type: NRG; PAM sequence: AGG
tggggggtctctcctggttt

SEQ ID NO: 7853 - DNA, 20 bp, Artificial Sequence
  Description of Artificial Sequence: Synthetic oligonucleotide
  Target: COL7A1; (-) strand; PAM type: NRG; PAM sequence: TAG
ttggggggtctctcctggtt

SEQ ID NO: 7854 - DNA, 20 bp, Artificial Sequence
  Description of Artificial Sequence: Synthetic oligonucleotide
  Target: COL7A1; (-) strand; PAM type: NRG; PAM sequence: TGG
gagtgttggggggtctctcc

SEQ ID NO: 7855 - DNA, 20 bp, Artificial Sequence
  Description of Artificial Sequence: Synthetic oligonucleotide
  Target: COL7A1; (-) strand; PAM type: NRG; PAM sequence: GGG
aggggtgcgagagtgttggg

SEQ ID NO: 7856 - DNA, 20 bp, Artificial Sequence
  Description of Artificial Sequence: Synthetic oligonucleotide
  Target: COL7A1; (-) strand; PAM type: NRG; PAM sequence: GGG
gaggggtgcgagagtgttgg

SEQ ID NO: 7857 - DNA, 20 bp, Artificial Sequence
  Description of Artificial Sequence: Synthetic oligonucleotide
  Target: COL7A1; (-) strand; PAM type: NRG; PAM sequence: GGG
ggaggggtgcgagagtgttg

SEQ ID NO: 7858 - DNA, 20 bp, Artificial Sequence
  Description of Artificial Sequence: Synthetic oligonucleotide
  Target: COL7A1; (-) strand; PAM type: NRG; PAM sequence: GGG
tggaggggtgcgagagtgtt

SEQ ID NO: 7859 - DNA, 20 bp, Artificial Sequence
  Description of Artificial Sequence: Synthetic oligonucleotide
  Target: COL7A1; (-) strand; PAM type: NRG; PAM sequence: TGG
ctggaggggtgcgagagtgt

SEQ ID NO: 7860 - DNA, 20 bp, Artificial Sequence
  Description of Artificial Sequence: Synthetic oligonucleotide
  Target: COL7A1; (-) strand; PAM type: NRG; PAM sequence: GAG
gtggtgctggaggggtgcga

SEQ ID NO: 7861 - DNA, 20 bp, Artificial Sequence
  Description of Artificial Sequence: Synthetic oligonucleotide
  Target: COL7A1; (-) strand; PAM type: NRG; PAM sequence: GAG
gggtggtgctggaggggtgc

SEQ ID NO: 7862 - DNA, 20 bp, Artificial Sequence
  Description of Artificial Sequence: Synthetic oligonucleotide
  Target: COL7A1; (-) strand; PAM type: NRG; PAM sequence: GGG
aagtcagggtggtgctggag

SEQ ID NO: 7863 - DNA, 20 bp, Artificial Sequence
  Description of Artificial Sequence: Synthetic oligonucleotide
  Target: COL7A1; (-) strand; PAM type: NRG; PAM sequence: GGG
gaagtcagggtggtgctgga

SEQ ID NO: 7864 - DNA, 20 bp, Artificial Sequence
  Description of Artificial Sequence: Synthetic oligonucleotide
  Target: COL7A1; (-) strand; PAM type: NRG; PAM sequence: AGG
tgaagtcagggtggtgctgg

SEQ ID NO: 7865 - DNA, 20 bp, Artificial Sequence
  Description of Artificial Sequence: Synthetic oligonucleotide
  Target: COL7A1; (-) strand; PAM type: NRG; PAM sequence: GAG
atgaagtcagggtggtgctg

SEQ ID NO: 7866 - DNA, 20 bp, Artificial Sequence
  Description of Artificial Sequence: Synthetic oligonucleotide
  Target: COL7A1; (-) strand; PAM type: NRG; PAM sequence: TGG
ggatgaagtcagggtggtgc

SEQ ID NO: 7867 - DNA, 20 bp, Artificial Sequence
  Description of Artificial Sequence: Synthetic oligonucleotide
  Target: COL7A1; (-) strand; PAM type: NRG; PAM sequence: TGG
agacctggatgaagtcaggg

SEQ ID NO: 7868 - DNA, 20 bp, Artificial Sequence
  Description of Artificial Sequence: Synthetic oligonucleotide
  Target: COL7A1; (-) strand; PAM type: NRG; PAM sequence: GGG
gaaagacctggatgaagtca

SEQ ID NO: 7869 - DNA, 20 bp, Artificial Sequence
  Description of Artificial Sequence: Synthetic oligonucleotide
  Target: COL7A1; (-) strand; PAM type: NRG; PAM sequence: AGG
ggaaagacctggatgaagtc

SEQ ID NO: 7870 - DNA, 20 bp, Artificial Sequence
  Description of Artificial Sequence: Synthetic oligonucleotide
  Target: COL7A1; (-) strand; PAM type: NRG; PAM sequence: CAG
gggaaagacctggatgaagt

SEQ ID NO: 7871 - DNA, 20 bp, Artificial Sequence
  Description of Artificial Sequence: Synthetic oligonucleotide
  Target: COL7A1; (-) strand; PAM type: NRG; PAM sequence: AAG
gttagggaaagacctggatg

SEQ ID NO: 7872 - DNA, 20 bp, Artificial Sequence
  Description of Artificial Sequence: Synthetic oligonucleotide
  Target: COL7A1; (-) strand; PAM type: NRG; PAM sequence: TGG
tggagggttagggaaagacc

SEQ ID NO: 7873 - DNA, 20 bp, Artificial Sequence
  Description of Artificial Sequence: Synthetic oligonucleotide
  Target: COL7A1; (-) strand; PAM type: NRG; PAM sequence: AAG
ggagggtggagggttaggga

SEQ ID NO: 7874 - DNA, 20 bp, Artificial Sequence
  Description of Artificial Sequence: Synthetic oligonucleotide
  Target: COL7A1; (-) strand; PAM type: NRG; PAM sequence: GGG
gtggggagggtggagggtta

SEQ ID NO: 7875 - DNA, 20 bp, Artificial Sequence
  Description of Artificial Sequence: Synthetic oligonucleotide
  Target: COL7A1; (-) strand; PAM type: NRG; PAM sequence: AGG
cgtggggagggtggagggtt

SEQ ID NO: 7876 - DNA, 20 bp, Artificial Sequence
  Description of Artificial Sequence: Synthetic oligonucleotide
  Target: COL7A1; (-) strand; PAM type: NRG; PAM sequence: TAG
gcgtggggagggtggagggt

SEQ ID NO: 7877 - DNA, 20 bp, Artificial Sequence
  Description of Artificial Sequence: Synthetic oligonucleotide
  Target: COL7A1; (-) strand; PAM type: NRG; PAM sequence: GGG
gacagcgtggggagggtgga

SEQ ID NO: 7878 - DNA, 20 bp, Artificial Sequence
  Description of Artificial Sequence: Synthetic oligonucleotide
  Target: COL7A1; (-) strand; PAM type: NRG; PAM sequence: AGG
ggacagcgtggggagggtgg

SEQ ID NO: 7879 - DNA, 20 bp, Artificial Sequence
  Description of Artificial Sequence: Synthetic oligonucleotide
  Target: COL7A1; (-) strand; PAM type: NRG; PAM sequence: GAG
gggacagcgtggggagggtg

SEQ ID NO: 7880 - DNA, 20 bp, Artificial Sequence
  Description of Artificial Sequence: Synthetic oligonucleotide
  Target: COL7A1; (-) strand; PAM type: NRG; PAM sequence: TGG
acgggacagcgtggggaggg

SEQ ID NO: 7881 - DNA, 20 bp, Artificial Sequence
  Description of Artificial Sequence: Synthetic oligonucleotide
  Target: COL7A1; (-) strand; PAM type: NRG; PAM sequence: GGG
ggcacgggacagcgtgggga

SEQ ID NO: 7882 - DNA, 20 bp, Artificial Sequence
  Description of Artificial Sequence: Synthetic oligonucleotide
  Target: COL7A1; (-) strand; PAM type: NRG; PAM sequence: AGG
aggcacgggacagcgtgggg

SEQ ID NO: 7883 - DNA, 20 bp, Artificial Sequence
  Description of Artificial Sequence: Synthetic oligonucleotide
  Target: COL7A1; (-) strand; PAM type: NRG; PAM sequence: GAG
taggcacgggacagcgtggg

SEQ ID NO: 7884 - DNA, 20 bp, Artificial Sequence
  Description of Artificial Sequence: Synthetic oligonucleotide
  Target: COL7A1; (-) strand; PAM type: NRG; PAM sequence: GGG
ggtaggcacgggacagcgtg

SEQ ID NO: 7885 - DNA, 20 bp, Artificial Sequence
  Description of Artificial Sequence: Synthetic oligonucleotide
  Target: COL7A1; (-) strand; PAM type: NRG; PAM sequence: GGG
gggtaggcacgggacagcgt

SEQ ID NO: 7886 - DNA, 20 bp, Artificial Sequence
  Description of Artificial Sequence: Synthetic oligonucleotide
  Target: COL7A1; (-) strand; PAM type: NRG; PAM sequence: TGG
ggggtaggcacgggacagcg

SEQ ID NO: 7887 - DNA, 20 bp, Artificial Sequence
  Description of Artificial Sequence: Synthetic oligonucleotide
  Target: COL7A1; (-) strand; PAM type: NRG; PAM sequence: CAG
caggcggggtaggcacggga

SEQ ID NO: 7888 - DNA, 20 bp, Artificial Sequence
  Description of Artificial Sequence: Synthetic oligonucleotide
  Target: COL7A1; (-) strand; PAM type: NRG; PAM sequence: GGG
gcagcaggcggggtaggcac

SEQ ID NO: 7889 - DNA, 20 bp, Artificial Sequence
  Description of Artificial Sequence: Synthetic oligonucleotide
  Target: COL7A1; (-) strand; PAM type: NRG; PAM sequence: CGG
agcagcaggcggggtaggca

SEQ ID NO: 7890 - DNA, 20 bp, Artificial Sequence
  Description of Artificial Sequence: Synthetic oligonucleotide
  Target: COL7A1; (-) strand; PAM type: NRG; PAM sequence: AGG
cggggagcagcaggcggggt

SEQ ID NO: 7891 - DNA, 20 bp, Artificial Sequence
  Description of Artificial Sequence: Synthetic oligonucleotide
  Target: COL7A1; (-) strand; PAM type: NRG; PAM sequence: TAG
ccggggagcagcaggcgggg

SEQ ID NO: 7892 - DNA, 20 bp, Artificial Sequence
  Description of Artificial Sequence: Synthetic oligonucleotide
  Target: COL7A1; (-) strand; PAM type: NRG; PAM sequence: GGG
gggccggggagcagcaggcg

SEQ ID NO: 7893 - DNA, 20 bp, Artificial Sequence
  Description of Artificial Sequence: Synthetic oligonucleotide
  Target: COL7A1; (-) strand; PAM type: NRG; PAM sequence: GGG
ggggccggggagcagcaggc

SEQ ID NO: 7894 - DNA, 20 bp, Artificial Sequence
  Description of Artificial Sequence: Synthetic oligonucleotide
  Target: COL7A1; (-) strand; PAM type: NRG; PAM sequence: CGG
tggggccggggagcagcagg

SEQ ID NO: 7895 - DNA, 20 bp, Artificial Sequence
  Description of Artificial Sequence: Synthetic oligonucleotide
  Target: COL7A1; (-) strand; PAM type: NRG; PAM sequence: AGG
acctggggccggggagcagc

SEQ ID NO: 7896 - DNA, 20 bp, Artificial Sequence
  Description of Artificial Sequence: Synthetic oligonucleotide
  Target: COL7A1; (-) strand; PAM type: NRG; PAM sequence: CAG
gacctggggccggggagcag

SEQ ID NO: 7897 - DNA, 20 bp, Artificial Sequence
  Description of Artificial Sequence: Synthetic oligonucleotide
  Target: COL7A1; (-) strand; PAM type: NRG; PAM sequence: CAG
accgacctggggccggggag

SEQ ID NO: 7898 - DNA, 20 bp, Artificial Sequence
  Description of Artificial Sequence: Synthetic oligonucleotide
  Target: COL7A1; (-) strand; PAM type: NRG; PAM sequence: GAG
ctgaccgacctggggccggg

SEQ ID NO: 7899 - DNA, 20 bp, Artificial Sequence
  Description of Artificial Sequence: Synthetic oligonucleotide
  Target: COL7A1; (-) strand; PAM type: NRG; PAM sequence: GGG
ccctgaccgacctggggccg

SEQ ID NO: 7900 - DNA, 20 bp, Artificial Sequence
  Description of Artificial Sequence: Synthetic oligonucleotide
  Target: COL7A1; (-) strand; PAM type: NRG; PAM sequence: GGG
tccctgaccgacctggggcc

SEQ ID NO: 7901 - DNA, 20 bp, Artificial Sequence
  Description of Artificial Sequence: Synthetic oligonucleotide
  Target: COL7A1; (-) strand; PAM type: NRG; PAM sequence: CGG
ctccctgaccgacctggggc

SEQ ID NO: 7902 - DNA, 20 bp, Artificial Sequence
  Description of Artificial Sequence: Synthetic oligonucleotide
  Target: COL7A1; (-) strand; PAM type: NRG; PAM sequence: GGG
gcagctccctgaccgacctg

SEQ ID NO: 7903 - DNA, 20 bp, Artificial Sequence
  Description of Artificial Sequence: Synthetic oligonucleotide
  Target: COL7A1; (-) strand; PAM type: NRG; PAM sequence: GGG
ggcagctccctgaccgacct

SEQ ID NO: 7904 - DNA, 20 bp, Artificial Sequence
  Description of Artificial Sequence: Synthetic oligonucleotide
  Target: COL7A1; (-) strand; PAM type: NRG; PAM sequence: TGG
aggcagctccctgaccgacc

SEQ ID NO: 7905 - DNA, 20 bp, Artificial Sequence
  Description of Artificial Sequence: Synthetic oligonucleotide
  Target: COL7A1; (-) strand; PAM type: NRG; PAM sequence: CAG
gacagaggctcgttaggagg

SEQ ID NO: 7906 - DNA, 20 bp, Artificial Sequence
  Description of Artificial Sequence: Synthetic oligonucleotide
  Target: COL7A1; (-) strand; PAM type: NRG; PAM sequence: AGG
atggacagaggctcgttagg

SEQ ID NO: 7907 - DNA, 20 bp, Artificial Sequence
  Description of Artificial Sequence: Synthetic oligonucleotide
  Target: COL7A1; (-) strand; PAM type: NRG; PAM sequence: GAG
gatggacagaggctcgttag

SEQ ID NO: 7908 - DNA, 20 bp, Artificial Sequence
  Description of Artificial Sequence: Synthetic oligonucleotide
  Target: COL7A1; (-) strand; PAM type: NRG; PAM sequence: AGG
aggatggacagaggctcgtt

SEQ ID NO: 7909 - DNA, 20 bp, Artificial Sequence
  Description of Artificial Sequence: Synthetic oligonucleotide
  Target: COL7A1; (-) strand; PAM type: NRG; PAM sequence: TAG
caggatggacagaggctcgt

SEQ ID NO: 7910 - DNA, 20 bp, Artificial Sequence
  Description of Artificial Sequence: Synthetic oligonucleotide
  Target: COL7A1; (-) strand; PAM type: NRG; PAM sequence: AGG
tttggttgcaggatggacag

SEQ ID NO: 7911 - DNA, 20 bp, Artificial Sequence
  Description of Artificial Sequence: Synthetic oligonucleotide
  Target: COL7A1; (-) strand; PAM type: NRG; PAM sequence: GAG
gtttggttgcaggatggaca

SEQ ID NO: 7912 - DNA, 20 bp, Artificial Sequence
  Description of Artificial Sequence: Synthetic oligonucleotide
  Target: COL7A1; (-) strand; PAM type: NRG; PAM sequence: CAG
cagtttggttgcaggatgga

SEQ ID NO: 7913 - DNA, 20 bp, Artificial Sequence
  Description of Artificial Sequence: Synthetic oligonucleotide
  Target: COL7A1; (-) strand; PAM type: NRG; PAM sequence: TGG
tggccagtttggttgcagga

SEQ ID NO: 7914 - DNA, 20 bp, Artificial Sequence
  Description of Artificial Sequence: Synthetic oligonucleotide
  Target: COL7A1; (-) strand; PAM type: NRG; PAM sequence: AGG
gccctggccagtttggttgc

SEQ ID NO: 7915 - DNA, 20 bp, Artificial Sequence
  Description of Artificial Sequence: Synthetic oligonucleotide
  Target: COL7A1; (-) strand; PAM type: NRG; PAM sequence: CAG
ggccctggccagtttggttg

SEQ ID NO: 7916 - DNA, 20 bp, Artificial Sequence
  Description of Artificial Sequence: Synthetic oligonucleotide
  Target: COL7A1; (-) strand; PAM type: NRG; PAM sequence: TGG
ggcagtggccctggccagtt

SEQ ID NO: 7917 - DNA, 20 bp, Artificial Sequence
  Description of Artificial Sequence: Synthetic oligonucleotide
  Target: COL7A1; (-) strand; PAM type: NRG; PAM sequence: CAG
cagggggcagtggccctggc

SEQ ID NO: 7918 - DNA, 20 bp, Artificial Sequence
  Description of Artificial Sequence: Synthetic oligonucleotide
  Target: COL7A1; (-) strand; PAM type: NRG; PAM sequence: TGG
gctgcagggggcagtggccc

SEQ ID NO: 7919 - DNA, 20 bp, Artificial Sequence
  Description of Artificial Sequence: Synthetic oligonucleotide
  Target: COL7A1; (-) strand; PAM type: NRG; PAM sequence: TGG
tctggagctgcagggggcag

SEQ ID NO: 7920 - DNA, 20 bp, Artificial Sequence
  Description of Artificial Sequence: Synthetic oligonucleotide
  Target: COL7A1; (-) strand; PAM type: NRG; PAM sequence: CAG
cactctggagctgcaggggg

SEQ ID NO: 7921 - DNA, 20 bp, Artificial Sequence
  Description of Artificial Sequence: Synthetic oligonucleotide
  Target: COL7A1; (-) strand; PAM type: NRG; PAM sequence: GGG
ccccactctggagctgcagg

SEQ ID NO: 7922 - DNA, 20 bp, Artificial Sequence
  Description of Artificial Sequence: Synthetic oligonucleotide
  Target: COL7A1; (-) strand; PAM type: NRG; PAM sequence: GGG
accccactctggagctgcag

SEQ ID NO: 7923 - DNA, 20 bp, Artificial Sequence
  Description of Artificial Sequence: Synthetic oligonucleotide
  Target: COL7A1; (-) strand; PAM type: NRG; PAM sequence: GGG
taccccactctggagctgca

SEQ ID NO: 7924 - DNA, 20 bp, Artificial Sequence
  Description of Artificial Sequence: Synthetic oligonucleotide
  Target: COL7A1; (-) strand; PAM type: NRG; PAM sequence: AGG
ttaccccactctggagctgc

SEQ ID NO: 7925 - DNA, 20 bp, Artificial Sequence
  Description of Artificial Sequence: Synthetic oligonucleotide
  Target: COL7A1; (-) strand; PAM type: NRG; PAM sequence: CAG
gttaccccactctggagctg

SEQ ID NO: 7926 - DNA, 20 bp, Artificial Sequence
  Description of Artificial Sequence: Synthetic oligonucleotide
  Target: COL7A1; (-) strand; PAM type: NRG; PAM sequence: GAG
ggcggggttaccccactctg

SEQ ID NO: 7927 - DNA, 20 bp, Artificial Sequence
  Description of Artificial Sequence: Synthetic oligonucleotide
  Target: COL7A1; (-) strand; PAM type: NRG; PAM sequence: TGG
taggcggggttaccccactc

SEQ ID NO: 7928 - DNA, 20 bp, Artificial Sequence
  Description of Artificial Sequence: Synthetic oligonucleotide
  Target: COL7A1; (-) strand; PAM type: NRG; PAM sequence: GGG
tctcttcagagtgctaggcg

SEQ ID NO: 7929 - DNA, 20 bp, Artificial Sequence
  Description of Artificial Sequence: Synthetic oligonucleotide
  Target: COL7A1; (-) strand; PAM type: NRG; PAM sequence: GGG
ctctcttcagagtgctaggc

SEQ ID NO: 7930 - DNA, 20 bp, Artificial Sequence
  Description of Artificial Sequence: Synthetic oligonucleotide
  Target: COL7A1; (-) strand; PAM type: NRG; PAM sequence: CGG
tctctcttcagagtgctagg

SEQ ID NO: 7931 - DNA, 20 bp, Artificial Sequence
  Description of Artificial Sequence: Synthetic oligonucleotide
  Target: COL7A1; (-) strand; PAM type: NRG; PAM sequence: AGG
ttctctctcttcagagtgct

SEQ ID NO: 7932 - DNA, 20 bp, Artificial Sequence
  Description of Artificial Sequence: Synthetic oligonucleotide
  Target: COL7A1; (-) strand; PAM type: NRG; PAM sequence: TAG
cttctctctcttcagagtgc

SEQ ID NO: 7933 - DNA, 20 bp, Artificial Sequence
  Description of Artificial Sequence: Synthetic oligonucleotide
  Target: COL7A1; (-) strand; PAM type: NRG; PAM sequence: GAG
gagtcgcttctctctcttca

SEQ ID NO: 7934 - DNA, 20 bp, Artificial Sequence
  Description of Artificial Sequence: Synthetic oligonucleotide
  Target: COL7A1; (-) strand; PAM type: NRG; PAM sequence: CAG
aggagtcgcttctctctctt

SEQ ID NO: 7935 - DNA, 20 bp, Artificial Sequence
  Description of Artificial Sequence: Synthetic oligonucleotide
  Target: COL7A1; (-) strand; PAM type: NRG; PAM sequence: GAG
cggggctgcaggagccgcag

SEQ ID NO: 7936 - DNA, 20 bp, Artificial Sequence
  Description of Artificial Sequence: Synthetic oligonucleotide
  Target: COL7A1; (-) strand; PAM type: NRG; PAM sequence: AGG
ggcggggctgcaggagccgc

SEQ ID NO: 7937 - DNA, 20 bp, Artificial Sequence
  Description of Artificial Sequence: Synthetic oligonucleotide
  Target: COL7A1; (-) strand; PAM type: NRG; PAM sequence: CAG
aggcggggctgcaggagccg

SEQ ID NO: 7938 - DNA, 20 bp, Artificial Sequence
  Description of Artificial Sequence: Synthetic oligonucleotide
  Target: COL7A1; (-) strand; PAM type: NRG; PAM sequence: GAG
ctggggaggcggggctgcag

SEQ ID NO: 7939 - DNA, 20 bp, Artificial Sequence
  Description of Artificial Sequence: Synthetic oligonucleotide
  Target: COL7A1; (-) strand; PAM type: NRG; PAM sequence: AGG
ggctggggaggcggggctgc

SEQ ID NO: 7940 - DNA, 20 bp, Artificial Sequence
  Description of Artificial Sequence: Synthetic oligonucleotide
  Target: COL7A1; (-) strand; PAM type: NRG; PAM sequence: CAG
gggctggggaggcggggctg

SEQ ID NO: 7941 - DNA, 20 bp, Artificial Sequence
  Description of Artificial Sequence: Synthetic oligonucleotide
  Target: COL7A1; (-) strand; PAM type: NRG; PAM sequence: GGG
tacagtgggctggggaggcg

SEQ ID NO: 7942 - DNA, 20 bp, Artificial Sequence
  Description of Artificial Sequence: Synthetic oligonucleotide
  Target: COL7A1; (-) strand; PAM type: NRG; PAM sequence: GGG
ctacagtgggctggggaggc

SEQ ID NO: 7943 - DNA, 20 bp, Artificial Sequence
  Description of Artificial Sequence: Synthetic oligonucleotide
  Target: COL7A1; (-) strand; PAM type: NRG; PAM sequence: CGG
cctacagtgggctggggagg

SEQ ID NO: 7944 - DNA, 20 bp, Artificial Sequence
  Description of Artificial Sequence: Synthetic oligonucleotide
  Target: COL7A1; (-) strand; PAM type: NRG; PAM sequence: AGG
gggcctacagtgggctgggg

SEQ ID NO: 7945 - DNA, 20 bp, Artificial Sequence
  Description of Artificial Sequence: Synthetic oligonucleotide
  Target: COL7A1; (-) strand; PAM type: NRG; PAM sequence: GAG
cgggcctacagtgggctggg

SEQ ID NO: 7946 - DNA, 20 bp, Artificial Sequence
  Description of Artificial Sequence: Synthetic oligonucleotide
  Target: COL7A1; (-) strand; PAM type: NRG; PAM sequence: GGG
ggcgggcctacagtgggctg

SEQ ID NO: 7947 - DNA, 20 bp, Artificial Sequence
  Description of Artificial Sequence: Synthetic oligonucleotide
  Target: COL7A1; (-) strand; PAM type: NRG; PAM sequence: GGG
gggcgggcctacagtgggct

SEQ ID NO: 7948 - DNA, 20 bp, Artificial Sequence
  Description of Artificial Sequence: Synthetic oligonucleotide
  Target: COL7A1; (-) strand; PAM type: NRG; PAM sequence: TGG
ggggcgggcctacagtgggc

SEQ ID NO: 7949 - DNA, 20 bp, Artificial Sequence
  Description of Artificial Sequence: Synthetic oligonucleotide
  Target: COL7A1; (-) strand; PAM type: NRG; PAM sequence: GGG
tgtgggggcgggcctacagt

SEQ ID NO: 7950 - DNA, 20 bp, Artificial Sequence
  Description of Artificial Sequence: Synthetic oligonucleotide
  Target: COL7A1; (-) strand; PAM type: NRG; PAM sequence: TGG
ctgtgggggcgggcctacag

SEQ ID NO: 7951 - DNA, 20 bp, Artificial Sequence
  Description of Artificial Sequence: Synthetic oligonucleotide
  Target: COL7A1; (-) strand; PAM type: NRG; PAM sequence: CAG
gccctgtgggggcgggccta

SEQ ID NO: 7952 - DNA, 20 bp, Artificial Sequence
  Description of Artificial Sequence: Synthetic oligonucleotide
  Target: COL7A1; (-) strand; PAM type: NRG; PAM sequence: GGG
gtaagcagccctgtgggggc

SEQ ID NO: 7953 - DNA, 20 bp, Artificial Sequence
  Description of Artificial Sequence: Synthetic oligonucleotide
  Target: COL7A1; (-) strand; PAM type: NRG; PAM sequence: CGG
tgtaagcagccctgtggggg

SEQ ID NO: 7954 - DNA, 20 bp, Artificial Sequence
  Description of Artificial Sequence: Synthetic oligonucleotide
  Target: COL7A1; (-) strand; PAM type: NRG; PAM sequence: GGG
agttgtaagcagccctgtgg

SEQ ID NO: 7955 - DNA, 20 bp, Artificial Sequence
  Description of Artificial Sequence: Synthetic oligonucleotide
  Target: COL7A1; (-) strand; PAM type: NRG; PAM sequence: GGG
cagttgtaagcagccctgtg

SEQ ID NO: 7956 - DNA, 20 bp, Artificial Sequence
  Description of Artificial Sequence: Synthetic oligonucleotide
  Target: COL7A1; (-) strand; PAM type: NRG; PAM sequence: GGG
acagttgtaagcagccctgt

SEQ ID NO: 7957 - DNA, 20 bp, Artificial Sequence
  Description of Artificial Sequence: Synthetic oligonucleotide
  Target: COL7A1; (-) strand; PAM type: NRG; PAM sequence: TGG
cacagttgtaagcagccctg

SEQ ID NO: 7958 - DNA, 20 bp, Artificial Sequence
  Description of Artificial Sequence: Synthetic oligonucleotide
  Target: COL7A1; (-) strand; PAM type: NRG; PAM sequence: CAG
gctgccctcacagttgtaag

SEQ ID NO: 7959 - DNA, 20 bp, Artificial Sequence
  Description of Artificial Sequence: Synthetic oligonucleotide
  Target: COL7A1; (-) strand; PAM type: NRG; PAM sequence: AAG
ggcgctgccctcacagttgt

SEQ ID NO: 7960 - DNA, 20 bp, Artificial Sequence
  Description of Artificial Sequence: Synthetic oligonucleotide
  Target: COL7A1; (-) strand; PAM type: NRG; PAM sequence: CAG
gggcactggcgctgccctca

SEQ ID NO: 7961 - DNA, 20 bp, Artificial Sequence
  Description of Artificial Sequence: Synthetic oligonucleotide
  Target: COL7A1; (-) strand; PAM type: NRG; PAM sequence: TGG
gctgactggagtgggggcac

SEQ ID NO: 7962 - DNA, 20 bp, Artificial Sequence
  Description of Artificial Sequence: Synthetic oligonucleotide
  Target: COL7A1; (-) strand; PAM type: NRG; PAM sequence: GGG
tggccggctgactggagtgg

SEQ ID NO: 7963 - DNA, 20 bp, Artificial Sequence
  Description of Artificial Sequence: Synthetic oligonucleotide
  Target: COL7A1; (-) strand; PAM type: NRG; PAM sequence: GGG
gtggccggctgactggagtg

SEQ ID NO: 7964 - DNA, 20 bp, Artificial Sequence
  Description of Artificial Sequence: Synthetic oligonucleotide
  Target: COL7A1; (-) strand; PAM type: NRG; PAM sequence: GGG
cgtggccggctgactggagt

SEQ ID NO: 7965 - DNA, 20 bp, Artificial Sequence
  Description of Artificial Sequence: Synthetic oligonucleotide
  Target: COL7A1; (-) strand; PAM type: NRG; PAM sequence: TGG
gcgtggccggctgactggag

SEQ ID NO: 7966 - DNA, 20 bp, Artificial Sequence
  Description of Artificial Sequence: Synthetic oligonucleotide
  Target: COL7A1; (-) strand; PAM type: NRG; PAM sequence: GAG
acagcgtggccggctgactg

SEQ ID NO: 7967 - DNA, 20 bp, Artificial Sequence
  Description of Artificial Sequence: Synthetic oligonucleotide
  Target: COL7A1; (-) strand; PAM type: NRG; PAM sequence: TGG
ccacagcgtggccggctgac

SEQ ID NO: 7968 - DNA, 20 bp, Artificial Sequence
  Description of Artificial Sequence: Synthetic oligonucleotide
  Target: COL7A1; (-) strand; PAM type: NRG; PAM sequence: CGG
tgtactggccacagcgtggc

SEQ ID NO: 7969 - DNA, 20 bp, Artificial Sequence
  Description of Artificial Sequence: Synthetic oligonucleotide
  Target: COL7A1; (-) strand; PAM type: NRG; PAM sequence: TGG
agactgtactggccacagcg

SEQ ID NO: 7970 - DNA, 20 bp, Artificial Sequence
  Description of Artificial Sequence: Synthetic oligonucleotide
  Target: COL7A1; (-) strand; PAM type: NRG; PAM sequence: CAG
gagggagactgtactggcca

SEQ ID NO: 7971 - DNA, 20 bp, Artificial Sequence
  Description of Artificial Sequence: Synthetic oligonucleotide
  Target: COL7A1; (-) strand; PAM type: NRG; PAM sequence: TGG
gcgggagagggagactgtac

SEQ ID NO: 7972 - DNA, 20 bp, Artificial Sequence
  Description of Artificial Sequence: Synthetic oligonucleotide
  Target: COL7A1; (-) strand; PAM type: NRG; PAM sequence: GAG
ggcagctctggcgggagagg

SEQ ID NO: 7973 - DNA, 20 bp, Artificial Sequence
  Description of Artificial Sequence: Synthetic oligonucleotide
  Target: COL7A1; (-) strand; PAM type: NRG; PAM sequence: GGG
tgggcagctctggcgggaga

SEQ ID NO: 7974 - DNA, 20 bp, Artificial Sequence
  Description of Artificial Sequence: Synthetic oligonucleotide
  Target: COL7A1; (-) strand; PAM type: NRG; PAM sequence: AGG
atgggcagctctggcgggag

SEQ ID NO: 7975 - DNA, 20 bp, Artificial Sequence
  Description of Artificial Sequence: Synthetic oligonucleotide
  Target: COL7A1; (-) strand; PAM type: NRG; PAM sequence: GAG
catgggcagctctggcggga

SEQ ID NO: 7976 - DNA, 20 bp, Artificial Sequence
  Description of Artificial Sequence: Synthetic oligonucleotide
  Target: COL7A1; (-) strand; PAM type: NRG; PAM sequence: GAG
ggcatgggcagctctggcgg

SEQ ID NO: 7977 - DNA, 20 bp, Artificial Sequence
  Description of Artificial Sequence: Synthetic oligonucleotide
  Target: COL7A1; (-) strand; PAM type: NRG; PAM sequence: GGG
gtggcatgggcagctctggc

SEQ ID NO: 7978 - DNA, 20 bp, Artificial Sequence
  Description of Artificial Sequence: Synthetic oligonucleotide
  Target: COL7A1; (-) strand; PAM type: NRG; PAM sequence: CGG
ggtggcatgggcagctctgg

SEQ ID NO: 7979 - DNA, 20 bp, Artificial Sequence
  Description of Artificial Sequence: Synthetic oligonucleotide
  Target: COL7A1; (-) strand; PAM type: NRG; PAM sequence: TGG
ctgggtggcatgggcagctc

SEQ ID NO: 7980 - DNA, 20 bp, Artificial Sequence
  Description of Artificial Sequence: Synthetic oligonucleotide
  Target: COL7A1; (-) strand; PAM type: NRG; PAM sequence: CAG
cagacgctgggtggcatggg

SEQ ID NO: 7981 - DNA, 20 bp, Artificial Sequence
  Description of Artificial Sequence: Synthetic oligonucleotide
  Target: COL7A1; (-) strand; PAM type: NRG; PAM sequence: GGG
aggcagacgctgggtggcat

SEQ ID NO: 7982 - DNA, 20 bp, Artificial Sequence
  Description of Artificial Sequence: Synthetic oligonucleotide
  Target: COL7A1; (-) strand; PAM type: NRG; PAM sequence: TGG
aaggcagacgctgggtggca

SEQ ID NO: 7983 - DNA, 20 bp, Artificial Sequence
  Description of Artificial Sequence: Synthetic oligonucleotide
  Target: COL7A1; (-) strand; PAM type: NRG; PAM sequence: TGG
acatgaaggcagacgctggg

SEQ ID NO: 7984 - DNA, 20 bp, Artificial Sequence
  Description of Artificial Sequence: Synthetic oligonucleotide
  Target: COL7A1; (-) strand; PAM type: NRG; PAM sequence: GGG
tggacatgaaggcagacgct

SEQ ID NO: 7985 - DNA, 20 bp, Artificial Sequence
  Description of Artificial Sequence: Synthetic oligonucleotide
  Target: COL7A1; (-) strand; PAM type: NRG; PAM sequence: TGG
gtggacatgaaggcagacgc

SEQ ID NO: 7986 - DNA, 20 bp, Artificial Sequence
  Description of Artificial Sequence: Synthetic oligonucleotide
  Target: COL7A1; (-) strand; PAM type: NRG; PAM sequence: CAG
actctaggtggacatgaagg

SEQ ID NO: 7987 - DNA, 20 bp, Artificial Sequence
  Description of Artificial Sequence: Synthetic oligonucleotide
  Target: COL7A1; (-) strand; PAM type: NRG; PAM sequence: AGG
acaactctaggtggacatga

SEQ ID NO: 7988 - DNA, 20 bp, Artificial Sequence
  Description of Artificial Sequence: Synthetic oligonucleotide
  Target: COL7A1; (-) strand; PAM type: NRG; PAM sequence: AAG
gacaactctaggtggacatg

SEQ ID NO: 7989 - DNA, 20 bp, Artificial Sequence
  Description of Artificial Sequence: Synthetic oligonucleotide
  Target: COL7A1; (-) strand; PAM type: NRG; PAM sequence: TGG
gctgtgcagacaactctagg

SEQ ID NO: 7990 - DNA, 20 bp, Artificial Sequence
  Description of Artificial Sequence: Synthetic oligonucleotide
  Target: COL7A1; (-) strand; PAM type: NRG; PAM sequence: AGG
tgggctgtgcagacaactct

SEQ ID NO: 7991 - DNA, 20 bp, Artificial Sequence
  Description of Artificial Sequence: Synthetic oligonucleotide
  Target: COL7A1; (-) strand; PAM type: NRG; PAM sequence: TAG
ctgggctgtgcagacaactc

SEQ ID NO: 7992 - DNA, 20 bp, Artificial Sequence
  Description of Artificial Sequence: Synthetic oligonucleotide
  Target: COL7A1; (-) strand; PAM type: NRG; PAM sequence: CAG
ggcaggcactctgggctgtg

SEQ ID NO: 7993 - DNA, 20 bp, Artificial Sequence
  Description of Artificial Sequence: Synthetic oligonucleotide
  Target: COL7A1; (-) strand; PAM type: NRG; PAM sequence: GGG
gcagagggggcaggcactct

SEQ ID NO: 7994 - DNA, 20 bp, Artificial Sequence
  Description of Artificial Sequence: Synthetic oligonucleotide
  Target: COL7A1; (-) strand; PAM type: NRG; PAM sequence: TGG
cgcagagggggcaggcactc

SEQ ID NO: 7995 - DNA, 20 bp, Artificial Sequence
  Description of Artificial Sequence: Synthetic oligonucleotide
  Target: COL7A1; (-) strand; PAM type: NRG; PAM sequence: AGG
ggcttgcccgcagagggggc

SEQ ID NO: 7996 - DNA, 20 bp, Artificial Sequence
  Description of Artificial Sequence: Synthetic oligonucleotide
  Target: COL7A1; (-) strand; PAM type: NRG; PAM sequence: CAG
gggcttgcccgcagaggggg

SEQ ID NO: 7997 - DNA, 20 bp, Artificial Sequence
  Description of Artificial Sequence: Synthetic oligonucleotide
  Target: COL7A1; (-) strand; PAM type: NRG; PAM sequence: GGG
gacgggcttgcccgcagagg

SEQ ID NO: 7998 - DNA, 20 bp, Artificial Sequence
  Description of Artificial Sequence: Synthetic oligonucleotide
  Target: COL7A1; (-) strand; PAM type: NRG; PAM sequence: GGG
ggacgggcttgcccgcagag

SEQ ID NO: 7999 - DNA, 20 bp, Artificial Sequence
  Description of Artificial Sequence: Synthetic oligonucleotide
  Target: COL7A1; (-) strand; PAM type: NRG; PAM sequence: GGG
tggacgggcttgcccgcaga

SEQ ID NO: 8000 - DNA, 20 bp, Artificial Sequence
  Description of Artificial Sequence: Synthetic oligonucleotide
  Target: COL7A1; (-) strand; PAM type: NRG; PAM sequence: AGG
gtggacgggcttgcccgcag

SEQ ID NO: 8001 - DNA, 20 bp, Artificial Sequence
  Description of Artificial Sequence: Synthetic oligonucleotide
  Target: COL7A1; (-) strand; PAM type: NRG; PAM sequence: GAG
tgtggacgggcttgcccgca

SEQ ID NO: 8002 - DNA, 20 bp, Artificial Sequence
  Description of Artificial Sequence: Synthetic oligonucleotide
  Target: COL7A1; (-) strand; PAM type: NRG; PAM sequence: CAG
agtgtggacgggcttgcccg

SEQ ID NO: 8003 - DNA, 20 bp, Artificial Sequence
  Description of Artificial Sequence: Synthetic oligonucleotide
  Target: COL7A1; (-) strand; PAM type: NRG; PAM sequence: GGG
actttccaggcagtgtggac

SEQ ID NO: 8004 - DNA, 20 bp, Artificial Sequence
  Description of Artificial Sequence: Synthetic oligonucleotide
  Target: COL7A1; (-) strand; PAM type: NRG; PAM sequence: CGG
gactttccaggcagtgtgga

SEQ ID NO: 8005 - DNA, 20 bp, Artificial Sequence
  Description of Artificial Sequence: Synthetic oligonucleotide
  Target: COL7A1; (-) strand; PAM type: NRG; PAM sequence: TGG
aactgactttccaggcagtg

SEQ ID NO: 8006 - DNA, 20 bp, Artificial Sequence
  Description of Artificial Sequence: Synthetic oligonucleotide
  Target: COL7A1; (-) strand; PAM type: NRG; PAM sequence: CAG
gacagaactgactttccagg

SEQ ID NO: 8007 - DNA, 20 bp, Artificial Sequence
  Description of Artificial Sequence: Synthetic oligonucleotide
  Target: COL7A1; (-) strand; PAM type: NRG; PAM sequence: AGG
agagacagaactgactttcc

SEQ ID NO: 8008 - DNA, 20 bp, Artificial Sequence
  Description of Artificial Sequence: Synthetic oligonucleotide
  Target: COL7A1; (-) strand; PAM type: NRG; PAM sequence: CAG
cagagacagaactgactttc

SEQ ID NO: 8009 - DNA, 20 bp, Artificial Sequence
  Description of Artificial Sequence: Synthetic oligonucleotide
  Target: COL7A1; (-) strand; PAM type: NRG; PAM sequence: CAG
ctccattgctgggccagaga

SEQ ID NO: 8010 - DNA, 20 bp, Artificial Sequence
  Description of Artificial Sequence: Synthetic oligonucleotide
  Target: COL7A1; (-) strand; PAM type: NRG; PAM sequence: GAG
ccaactccattgctgggcca

SEQ ID NO: 8011 - DNA, 20 bp, Artificial Sequence
  Description of Artificial Sequence: Synthetic oligonucleotide
  Target: COL7A1; (-) strand; PAM type: NRG; PAM sequence: CAG
gcccaactccattgctgggc

SEQ ID NO: 8012 - DNA, 20 bp, Artificial Sequence
  Description of Artificial Sequence: Synthetic oligonucleotide
  Target: COL7A1; (-) strand; PAM type: NRG; PAM sequence: GGG
cacagcccaactccattgct

SEQ ID NO: 8013 - DNA, 20 bp, Artificial Sequence
  Description of Artificial Sequence: Synthetic oligonucleotide
  Target: COL7A1; (-) strand; PAM type: NRG; PAM sequence: TGG
tcacagcccaactccattgc

SEQ ID NO: 8014 - DNA, 20 bp, Artificial Sequence
  Description of Artificial Sequence: Synthetic oligonucleotide
  Target: COL7A1; (-) strand; PAM type: NRG; PAM sequence: CAG
ctaggttttgcctgatttca

SEQ ID NO: 8015 - DNA, 20 bp, Artificial Sequence
  Description of Artificial Sequence: Synthetic oligonucleotide
  Target: COL7A1; (-) strand; PAM type: NRG; PAM sequence: AGG
tcccttggtttggaaggact

SEQ ID NO: 8016 - DNA, 20 bp, Artificial Sequence
  Description of Artificial Sequence: Synthetic oligonucleotide
  Target: COL7A1; (-) strand; PAM type: NRG; PAM sequence: TAG
gtcccttggtttggaaggac

SEQ ID NO: 8017 - DNA, 20 bp, Artificial Sequence
  Description of Artificial Sequence: Synthetic oligonucleotide
  Target: COL7A1; (-) strand; PAM type: NRG; PAM sequence: AGG
acctggtcccttggtttgga

SEQ ID NO: 8018 - DNA, 20 bp, Artificial Sequence
  Description of Artificial Sequence: Synthetic oligonucleotide
  Target: COL7A1; (-) strand; PAM type: NRG; PAM sequence: AAG
gacctggtcccttggtttgg

SEQ ID NO: 8019 - DNA, 20 bp, Artificial Sequence
  Description of Artificial Sequence: Synthetic oligonucleotide
  Target: COL7A1; (-) strand; PAM type: NRG; PAM sequence: TGG
actgacctggtcccttggtt

SEQ ID NO: 8020 - DNA, 20 bp, Artificial Sequence
  Description of Artificial Sequence: Synthetic oligonucleotide
  Target: COL7A1; (-) strand; PAM type: NRG; PAM sequence: TGG
ggttaactgacctggtccct

SEQ ID NO: 8021 - DNA, 20 bp, Artificial Sequence
  Description of Artificial Sequence: Synthetic oligonucleotide
  Target: COL7A1; (-) strand; PAM type: NRG; PAM sequence: TGG
agctccccggttaactgacc

SEQ ID NO: 8022 - DNA, 20 bp, Artificial Sequence
  Description of Artificial Sequence: Synthetic oligonucleotide
  Target: COL7A1; (-) strand; PAM type: NRG; PAM sequence: CGG
tgccttcctccctagctccc

SEQ ID NO: 8023 - DNA, 20 bp, Artificial Sequence
  Description of Artificial Sequence: Synthetic oligonucleotide
  Target: COL7A1; (-) strand; PAM type: NRG; PAM sequence: TAG
ggcttctctgccttcctccc

SEQ ID NO: 8024 - DNA, 20 bp, Artificial Sequence
  Description of Artificial Sequence: Synthetic oligonucleotide
  Target: COL7A1; (-) strand; PAM type: NRG; PAM sequence: TGG
catggtgggtgagtcatacc

SEQ ID NO: 8025 - DNA, 20 bp, Artificial Sequence
  Description of Artificial Sequence: Synthetic oligonucleotide
  Target: COL7A1; (-) strand; PAM type: NRG; PAM sequence: GAG
ggccgcgacacatggtgggt

SEQ ID NO: 8026 - DNA, 20 bp, Artificial Sequence
  Description of Artificial Sequence: Synthetic oligonucleotide
  Target: COL7A1; (-) strand; PAM type: NRG; PAM sequence: GGG
cccaggccgcgacacatggt

SEQ ID NO: 8027 - DNA, 20 bp, Artificial Sequence
  Description of Artificial Sequence: Synthetic oligonucleotide
  Target: COL7A1; (-) strand; PAM type: NRG; PAM sequence: TGG
acccaggccgcgacacatgg

SEQ ID NO: 8028 - DNA, 20 bp, Artificial Sequence
  Description of Artificial Sequence: Synthetic oligonucleotide
  Target: COL7A1; (-) strand; PAM type: NRG; PAM sequence: TGG
tgcacccaggccgcgacaca

SEQ ID NO: 8029 - DNA, 20 bp, Artificial Sequence
  Description of Artificial Sequence: Synthetic oligonucleotide
  Target: COL7A1; (-) strand; PAM type: NRG; PAM sequence: AGG
aatcccagtggtgtgcaccc

SEQ ID NO: 8030 - DNA, 20 bp, Artificial Sequence
  Description of Artificial Sequence: Synthetic oligonucleotide
  Target: COL7A1; (-) strand; PAM type: NRG; PAM sequence: CAG
gaatcccagtggtgtgcacc

SEQ ID NO: 8031 - DNA, 20 bp, Artificial Sequence
  Description of Artificial Sequence: Synthetic oligonucleotide
  Target: COL7A1; (-) strand; PAM type: NRG; PAM sequence: TGG
gggatgtgcgagaatcccag

SEQ ID NO: 8032 - DNA, 20 bp, Artificial Sequence
  Description of Artificial Sequence: Synthetic oligonucleotide
  Target: COL7A1; (-) strand; PAM type: NRG; PAM sequence: CAG
gatgggatgtgcgagaatcc

SEQ ID NO: 8033 - DNA, 20 bp, Artificial Sequence
  Description of Artificial Sequence: Synthetic oligonucleotide
  Target: COL7A1; (-) strand; PAM type: NRG; PAM sequence: GAG
gactgaaggatgggatgtgc

SEQ ID NO: 8034 - DNA, 20 bp, Artificial Sequence
  Description of Artificial Sequence: Synthetic oligonucleotide
  Target: COL7A1; (-) strand; PAM type: NRG; PAM sequence: GGG
acacaaagcgactgaaggat

SEQ ID NO: 8035 - DNA, 20 bp, Artificial Sequence
  Description of Artificial Sequence: Synthetic oligonucleotide
  Target: COL7A1; (-) strand; PAM type: NRG; PAM sequence: TGG
aacacaaagcgactgaagga

SEQ ID NO: 8036 - DNA, 20 bp, Artificial Sequence
  Description of Artificial Sequence: Synthetic oligonucleotide
  Target: COL7A1; (-) strand; PAM type: NRG; PAM sequence: AGG
aataaacacaaagcgactga

SEQ ID NO: 8037 - DNA, 20 bp, Artificial Sequence
  Description of Artificial Sequence: Synthetic oligonucleotide
  Target: COL7A1; (-) strand; PAM type: NRG; PAM sequence: AAG
caataaacacaaagcgactg

SEQ ID NO: 8038 - DNA, 20 bp, Artificial Sequence
  Description of Artificial Sequence: Synthetic oligonucleotide
  Target: COL7A1; (-) strand; PAM type: NRG; PAM sequence: AAG
ggaggtgctcaataaacaca

SEQ ID NO: 8039 - DNA, 20 bp, Artificial Sequence
  Description of Artificial Sequence: Synthetic oligonucleotide
  Target: COL7A1; (-) strand; PAM type: NRG; PAM sequence: AGG
catggaggtcctgcagcagg

SEQ ID NO: 8040 - DNA, 20 bp, Artificial Sequence
  Description of Artificial Sequence: Synthetic oligonucleotide
  Target: COL7A1; (-) strand; PAM type: NRG; PAM sequence: GAG
acatggaggtcctgcagcag

SEQ ID NO: 8041 - DNA, 20 bp, Artificial Sequence
  Description of Artificial Sequence: Synthetic oligonucleotide
  Target: COL7A1; (-) strand; PAM type: NRG; PAM sequence: AGG
agacatggaggtcctgcagc

SEQ ID NO: 8042 - DNA, 20 bp, Artificial Sequence
  Description of Artificial Sequence: Synthetic oligonucleotide
  Target: COL7A1; (-) strand; PAM type: NRG; PAM sequence: CAG
cagacatggaggtcctgcag

SEQ ID NO: 8043 - DNA, 20 bp, Artificial Sequence
  Description of Artificial Sequence: Synthetic oligonucleotide
  Target: COL7A1; (-) strand; PAM type: NRG; PAM sequence: CAG
tagcagacatggaggtcctg

SEQ ID NO: 8044 - DNA, 20 bp, Artificial Sequence
  Description of Artificial Sequence: Synthetic oligonucleotide
  Target: COL7A1; (-) strand; PAM type: NRG; PAM sequence: AGG
tgtgtatgtagcagacatgg

SEQ ID NO: 8045 - DNA, 20 bp, Artificial Sequence
  Description of Artificial Sequence: Synthetic oligonucleotide
  Target: COL7A1; (-) strand; PAM type: NRG; PAM sequence: GAG
ttgtgtatgtagcagacatg

SEQ ID NO: 8046 - DNA, 20 bp, Artificial Sequence
  Description of Artificial Sequence: Synthetic oligonucleotide
  Target: COL7A1; (-) strand; PAM type: NRG; PAM sequence: TGG
cattgtgtatgtagcagaca

SEQ ID NO: 8047 - DNA, 20 bp, Artificial Sequence
  Description of Artificial Sequence: Synthetic oligonucleotide
  Target: COL7A1; (-) strand; PAM type: NRG; PAM sequence: CAG
tgtgagcattgtgtatgtag

SEQ ID NO: 8048 - DNA, 20 bp, Artificial Sequence
  Description of Artificial Sequence: Synthetic oligonucleotide
  Target: COL7A1; (-) strand; PAM type: NRG; PAM sequence: TAG
gcctgtgagcattgtgtatg

SEQ ID NO: 8049 - DNA, 20 bp, Artificial Sequence
  Description of Artificial Sequence: Synthetic oligonucleotide
  Target: COL7A1; (-) strand; PAM type: NRG; PAM sequence: GAG
gatgggaccagcaagcctgt

SEQ ID NO: 8050 - DNA, 20 bp, Artificial Sequence
  Description of Artificial Sequence: Synthetic oligonucleotide
  Target: COL7A1; (-) strand; PAM type: NRG; PAM sequence: AAG
gactgaaggatgggaccagc

SEQ ID NO: 8051 - DNA, 20 bp, Artificial Sequence
  Description of Artificial Sequence: Synthetic oligonucleotide
  Target: COL7A1; (-) strand; PAM type: NRG; PAM sequence: CAG
aagcgactgaaggatgggac

SEQ ID NO: 8052 - DNA, 20 bp, Artificial Sequence
  Description of Artificial Sequence: Synthetic oligonucleotide
  Target: COL7A1; (-) strand; PAM type: NRG; PAM sequence: GGG
acacaaagcgactgaaggat

SEQ ID NO: 8053 - DNA, 20 bp, Artificial Sequence
  Description of Artificial Sequence: Synthetic oligonucleotide
  Target: COL7A1; (-) strand; PAM type: NRG; PAM sequence: TGG
aacacaaagcgactgaagga

SEQ ID NO: 8054 - DNA, 20 bp, Artificial Sequence
  Description of Artificial Sequence: Synthetic oligonucleotide
  Target: COL7A1; (-) strand; PAM type: NRG; PAM sequence: AGG
aataaacacaaagcgactga

SEQ ID NO: 8055 - DNA, 20 bp, Artificial Sequence
  Description of Artificial Sequence: Synthetic oligonucleotide
  Target: COL7A1; (-) strand; PAM type: NRG; PAM sequence: AAG
caataaacacaaagcgactg

SEQ ID NO: 8056 - DNA, 20 bp, Artificial Sequence
  Description of Artificial Sequence: Synthetic oligonucleotide
  Target: COL7A1; (-) strand; PAM type: NRG; PAM sequence: AAG
ggaggtgctcaataaacaca

SEQ ID NO: 8057 - DNA, 20 bp, Artificial Sequence
  Description of Artificial Sequence: Synthetic oligonucleotide
  Target: COL7A1; (-) strand; PAM type: NRG; PAM sequence: AGG
catggaggtcctgcagcagg

SEQ ID NO: 8058 - DNA, 20 bp, Artificial Sequence
  Description of Artificial Sequence: Synthetic oligonucleotide
  Target: COL7A1; (-) strand; PAM type: NRG; PAM sequence: GAG
acatggaggtcctgcagcag

SEQ ID NO: 8059 - DNA, 20 bp, Artificial Sequence
  Description of Artificial Sequence: Synthetic oligonucleotide
  Target: COL7A1; (-) strand; PAM type: NRG; PAM sequence: AGG
agacatggaggtcctgcagc

SEQ ID NO: 8060 - DNA, 20 bp, Artificial Sequence
  Description of Artificial Sequence: Synthetic oligonucleotide
  Target: COL7A1; (-) strand; PAM type: NRG; PAM sequence: CAG
cagacatggaggtcctgcag

SEQ ID NO: 8061 - DNA, 20 bp, Artificial Sequence
  Description of Artificial Sequence: Synthetic oligonucleotide
  Target: COL7A1; (-) strand; PAM type: NRG; PAM sequence: CAG
tagcagacatggaggtcctg

SEQ ID NO: 8062 - DNA, 20 bp, Artificial Sequence
  Description of Artificial Sequence: Synthetic oligonucleotide
  Target: COL7A1; (-) strand; PAM type: NRG; PAM sequence: AGG
tgtgtatatagcagacatgg

SEQ ID NO: 8063 - DNA, 20 bp, Artificial Sequence
  Description of Artificial Sequence: Synthetic oligonucleotide
  Target: COL7A1; (-) strand; PAM type: NRG; PAM sequence: GAG
ttgtgtatatagcagacatg

SEQ ID NO: 8064 - DNA, 20 bp, Artificial Sequence
  Description of Artificial Sequence: Synthetic oligonucleotide
  Target: COL7A1; (-) strand; PAM type: NRG; PAM sequence: TGG
cattgtgtatatagcagaca

SEQ ID NO: 8065 - DNA, 20 bp, Artificial Sequence
  Description of Artificial Sequence: Synthetic oligonucleotide
  Target: COL7A1; (-) strand; PAM type: NRG; PAM sequence: CAG
tgtgagcattgtgtatatag

SEQ ID NO: 8066 - DNA, 20 bp, Artificial Sequence
  Description of Artificial Sequence: Synthetic oligonucleotide
  Target: COL7A1; (-) strand; PAM type: NRG; PAM sequence: TAG
gcctgtgagcattgtgtata

SEQ ID NO: 8067 - DNA, 20 bp, Artificial Sequence
  Description of Artificial Sequence: Synthetic oligonucleotide
  Target: COL7A1; (-) strand; PAM type: NRG; PAM sequence: GAG
agcgacaccagcaagcctgt

SEQ ID NO: 8068 - DNA, 20 bp, Artificial Sequence
  Description of Artificial Sequence: Synthetic oligonucleotide
  Target: COL7A1; (-) strand; PAM type: NRG; PAM sequence: AAG
taaagcaaagcgacaccagc

SEQ ID NO: 8069 - DNA, 20 bp, Artificial Sequence
  Description of Artificial Sequence: Synthetic oligonucleotide
  Target: COL7A1; (-) strand; PAM type: NRG; PAM sequence: CAG
tctgtaaagcaaagcgacac

SEQ ID NO: 8070 - DNA, 20 bp, Artificial Sequence
  Description of Artificial Sequence: Synthetic oligonucleotide
  Target: COL7A1; (-) strand; PAM type: NRG; PAM sequence: AAG
gtttccttatctgtaaagca

SEQ ID NO: 8071 - DNA, 20 bp, Artificial Sequence
  Description of Artificial Sequence: Synthetic oligonucleotide
  Target: COL7A1; (-) strand; PAM type: NRG; PAM sequence: AAG
cctcggtttccttatctgta

SEQ ID NO: 8072 - DNA, 20 bp, Artificial Sequence
  Description of Artificial Sequence: Synthetic oligonucleotide
  Target: COL7A1; (-) strand; PAM type: NRG; PAM sequence: CGG
gtgttcacctttccgagcct

SEQ ID NO: 8073 - DNA, 20 bp, Artificial Sequence
  Description of Artificial Sequence: Synthetic oligonucleotide
  Target: COL7A1; (-) strand; PAM type: NRG; PAM sequence: GAG
gcaaaggtgttcacctttcc

SEQ ID NO: 8074 - DNA, 20 bp, Artificial Sequence
  Description of Artificial Sequence: Synthetic oligonucleotide
  Target: COL7A1; (-) strand; PAM type: NRG; PAM sequence: AGG
gcacggactgtcctgggcaa

SEQ ID NO: 8075 - DNA, 20 bp, Artificial Sequence
  Description of Artificial Sequence: Synthetic oligonucleotide
  Target: COL7A1; (-) strand; PAM type: NRG; PAM sequence: AAG
cgcacggactgtcctgggca

SEQ ID NO: 8076 - DNA, 20 bp, Artificial Sequence
  Description of Artificial Sequence: Synthetic oligonucleotide
  Target: COL7A1; (-) strand; PAM type: NRG; PAM sequence: GGG
cttcacgcacggactgtcct

SEQ ID NO: 8077 - DNA, 20 bp, Artificial Sequence
  Description of Artificial Sequence: Synthetic oligonucleotide
  Target: COL7A1; (-) strand; PAM type: NRG; PAM sequence: TGG
acttcacgcacggactgtcc

SEQ ID NO: 8078 - DNA, 20 bp, Artificial Sequence
  Description of Artificial Sequence: Synthetic oligonucleotide
  Target: COL7A1; (-) strand; PAM type: NRG; PAM sequence: CGG
actctgtcccacttcacgca

SEQ ID NO: 8079 - DNA, 20 bp, Artificial Sequence
  Description of Artificial Sequence: Synthetic oligonucleotide
  Target: COL7A1; (-) strand; PAM type: NRG; PAM sequence: GAG
agacagggctcaggctgccg

SEQ ID NO: 8080 - DNA, 20 bp, Artificial Sequence
  Description of Artificial Sequence: Synthetic oligonucleotide
  Target: COL7A1; (-) strand; PAM type: NRG; PAM sequence: CGG
ggagacagggctcaggctgc

SEQ ID NO: 8081 - DNA, 20 bp, Artificial Sequence
  Description of Artificial Sequence: Synthetic oligonucleotide
  Target: COL7A1; (-) strand; PAM type: NRG; PAM sequence: AGG
gctcacaggagacagggctc

SEQ ID NO: 8082 - DNA, 20 bp, Artificial Sequence
  Description of Artificial Sequence: Synthetic oligonucleotide
  Target: COL7A1; (-) strand; PAM type: NRG; PAM sequence: CAG
ggctcacaggagacagggct

SEQ ID NO: 8083 - DNA, 20 bp, Artificial Sequence
  Description of Artificial Sequence: Synthetic oligonucleotide
  Target: COL7A1; (-) strand; PAM type: NRG; PAM sequence: GGG
tgcagggctcacaggagaca

SEQ ID NO: 8084 - DNA, 20 bp, Artificial Sequence
  Description of Artificial Sequence: Synthetic oligonucleotide
  Target: COL7A1; (-) strand; PAM type: NRG; PAM sequence: AGG
atgcagggctcacaggagac

SEQ ID NO: 8085 - DNA, 20 bp, Artificial Sequence
  Description of Artificial Sequence: Synthetic oligonucleotide
  Target: COL7A1; (-) strand; PAM type: NRG; PAM sequence: CAG
catgcagggctcacaggaga

SEQ ID NO: 8086 - DNA, 20 bp, Artificial Sequence
  Description of Artificial Sequence: Synthetic oligonucleotide
  Target: COL7A1; (-) strand; PAM type: NRG; PAM sequence: GAG
gggacatgcagggctcacag

SEQ ID NO: 8087 - DNA, 20 bp, Artificial Sequence
  Description of Artificial Sequence: Synthetic oligonucleotide
  Target: COL7A1; (-) strand; PAM type: NRG; PAM sequence: AGG
cagggacatgcagggctcac

SEQ ID NO: 8088 - DNA, 20 bp, Artificial Sequence
  Description of Artificial Sequence: Synthetic oligonucleotide
  Target: COL7A1; (-) strand; PAM type: NRG; PAM sequence: CAG
ccagggacatgcagggctca

SEQ ID NO: 8089 - DNA, 20 bp, Artificial Sequence
  Description of Artificial Sequence: Synthetic oligonucleotide
  Target: COL7A1; (-) strand; PAM type: NRG; PAM sequence: GGG
cctcgacccagggacatgca

SEQ ID NO: 8090 - DNA, 20 bp, Artificial Sequence
  Description of Artificial Sequence: Synthetic oligonucleotide
  Target: COL7A1; (-) strand; PAM type: NRG; PAM sequence: AGG
gcctcgacccagggacatgc

SEQ ID NO: 8091 - DNA, 20 bp, Artificial Sequence
  Description of Artificial Sequence: Synthetic oligonucleotide
  Target: COL7A1; (-) strand; PAM type: NRG; PAM sequence: CAG
agcctcgacccagggacatg

SEQ ID NO: 8092 - DNA, 20 bp, Artificial Sequence
  Description of Artificial Sequence: Synthetic oligonucleotide
  Target: COL7A1; (-) strand; PAM type: NRG; PAM sequence: GGG
gcatccccagcctcgaccca

SEQ ID NO: 8093 - DNA, 20 bp, Artificial Sequence
  Description of Artificial Sequence: Synthetic oligonucleotide
  Target: COL7A1; (-) strand; PAM type: NRG; PAM sequence: AGG
tgcatccccagcctcgaccc

SEQ ID NO: 8094 - DNA, 20 bp, Artificial Sequence
  Description of Artificial Sequence: Synthetic oligonucleotide
  Target: COL7A1; (-) strand; PAM type: NRG; PAM sequence: CAG
ctgcatccccagcctcgacc

SEQ ID NO: 8095 - DNA, 20 bp, Artificial Sequence
  Description of Artificial Sequence: Synthetic oligonucleotide
  Target: COL7A1; (-) strand; PAM type: NRG; PAM sequence: CAG
cccacgtacccctgcatccc

SEQ ID NO: 8096 - DNA, 20 bp, Artificial Sequence
  Description of Artificial Sequence: Synthetic oligonucleotide
  Target: COL7A1; (-) strand; PAM type: NRG; PAM sequence: AGG
agcaagaacaactcctggcc

SEQ ID NO: 8097 - DNA, 20 bp, Artificial Sequence
  Description of Artificial Sequence: Synthetic oligonucleotide
  Target: COL7A1; (-) strand; PAM type: NRG; PAM sequence: CAG
aagcaagaacaactcctggc

SEQ ID NO: 8098 - DNA, 20 bp, Artificial Sequence
  Description of Artificial Sequence: Synthetic oligonucleotide
  Target: COL7A1; (-) strand; PAM type: NRG; PAM sequence: TGG
catgaagcaagaacaactcc

SEQ ID NO: 8099 - DNA, 20 bp, Artificial Sequence
  Description of Artificial Sequence: Synthetic oligonucleotide
  Target: COL7A1; (-) strand; PAM type: NRG; PAM sequence: AAG
cccccaaacctgcatgaagc

SEQ ID NO: 8100 - DNA, 20 bp, Artificial Sequence
  Description of Artificial Sequence: Synthetic oligonucleotide
  Target: COL7A1; (-) strand; PAM type: NRG; PAM sequence: AAG
ttgtcccccaaacctgcatg

SEQ ID NO: 8101 - DNA, 20 bp, Artificial Sequence
  Description of Artificial Sequence: Synthetic oligonucleotide
  Target: COL7A1; (-) strand; PAM type: NRG; PAM sequence: GGG
gtgaggggtctgagaggagt

SEQ ID NO: 8102 - DNA, 20 bp, Artificial Sequence
  Description of Artificial Sequence: Synthetic oligonucleotide
  Target: COL7A1; (-) strand; PAM type: NRG; PAM sequence: TGG
cgtgaggggtctgagaggag

SEQ ID NO: 8103 - DNA, 20 bp, Artificial Sequence
  Description of Artificial Sequence: Synthetic oligonucleotide
  Target: COL7A1; (-) strand; PAM type: NRG; PAM sequence: GAG
gtacgtgaggggtctgagag

SEQ ID NO: 8104 - DNA, 20 bp, Artificial Sequence
  Description of Artificial Sequence: Synthetic oligonucleotide
  Target: COL7A1; (-) strand; PAM type: NRG; PAM sequence: AGG
gggtacgtgaggggtctgag

SEQ ID NO: 8105 - DNA, 20 bp, Artificial Sequence
  Description of Artificial Sequence: Synthetic oligonucleotide
  Target: COL7A1; (-) strand; PAM type: NRG; PAM sequence: GAG
agggtacgtgaggggtctga

SEQ ID NO: 8106 - DNA, 20 bp, Artificial Sequence
  Description of Artificial Sequence: Synthetic oligonucleotide
  Target: COL7A1; (-) strand; PAM type: NRG; PAM sequence: GAG
taagggtacgtgaggggtct

SEQ ID NO: 8107 - DNA, 20 bp, Artificial Sequence
  Description of Artificial Sequence: Synthetic oligonucleotide
  Target: COL7A1; (-) strand; PAM type: NRG; PAM sequence: GGG
gcagggtaagggtacgtgag

SEQ ID NO: 8108 - DNA, 20 bp, Artificial Sequence
  Description of Artificial Sequence: Synthetic oligonucleotide
  Target: COL7A1; (-) strand; PAM type: NRG; PAM sequence: GGG
agcagggtaagggtacgtga

SEQ ID NO: 8109 - DNA, 20 bp, Artificial Sequence
  Description of Artificial Sequence: Synthetic oligonucleotide
  Target: COL7A1; (-) strand; PAM type: NRG; PAM sequence: AGG
gagcagggtaagggtacgtg

SEQ ID NO: 8110 - DNA, 20 bp, Artificial Sequence
  Description of Artificial Sequence: Synthetic oligonucleotide
  Target: COL7A1; (-) strand; PAM type: NRG; PAM sequence: GAG
tgagcagggtaagggtacgt

SEQ ID NO: 8111 - DNA, 20 bp, Artificial Sequence
  Description of Artificial Sequence: Synthetic oligonucleotide
  Target: COL7A1; (-) strand; PAM type: NRG; PAM sequence: GGG
agtgtgtgtgagcagggtaa

SEQ ID NO: 8112 - DNA, 20 bp, Artificial Sequence
  Description of Artificial Sequence: Synthetic oligonucleotide
  Target: COL7A1; (-) strand; PAM type: NRG; PAM sequence: AGG
gagtgtgtgtgagcagggta

SEQ ID NO: 8113 - DNA, 20 bp, Artificial Sequence
  Description of Artificial Sequence: Synthetic oligonucleotide
  Target: COL7A1; (-) strand; PAM type: NRG; PAM sequence: AAG
tgagtgtgtgtgagcagggt

SEQ ID NO: 8114 - DNA, 20 bp, Artificial Sequence
  Description of Artificial Sequence: Synthetic oligonucleotide
  Target: COL7A1; (-) strand; PAM type: NRG; PAM sequence: GGG
gctgtgagtgtgtgtgagca

SEQ ID NO: 8115 - DNA, 20 bp, Artificial Sequence
  Description of Artificial Sequence: Synthetic oligonucleotide
  Target: COL7A1; (-) strand; PAM type: NRG; PAM sequence: AGG
agctgtgagtgtgtgtgagc

SEQ ID NO: 8116 - DNA, 20 bp, Artificial Sequence
  Description of Artificial Sequence: Synthetic oligonucleotide
  Target: COL7A1; (-) strand; PAM type: NRG; PAM sequence: CAG
cagctgtgagtgtgtgtgag

SEQ ID NO: 8117 - DNA, 20 bp, Artificial Sequence
  Description of Artificial Sequence: Synthetic oligonucleotide
  Target: COL7A1; (-) strand; PAM type: NRG; PAM sequence: GAG
tgacagctgtgagtgtgtgt

SEQ ID NO: 8118 - DNA, 20 bp, Artificial Sequence
  Description of Artificial Sequence: Synthetic oligonucleotide
  Target: COL7A1; (-) strand; PAM type: NRG; PAM sequence: GAG
gctgagtctctgacagctgt

SEQ ID NO: 8119 - DNA, 20 bp, Artificial Sequence
  Description of Artificial Sequence: Synthetic oligonucleotide
  Target: COL7A1; (-) strand; PAM type: NRG; PAM sequence: CAG
gtgtgtggctgagtctctga

SEQ ID NO: 8120 - DNA, 20 bp, Artificial Sequence
  Description of Artificial Sequence: Synthetic oligonucleotide
  Target: COL7A1; (-) strand; PAM type: NRG; PAM sequence: GAG
gcatatgtgcgtgtgtggct

SEQ ID NO: 8121 - DNA, 20 bp, Artificial Sequence
  Description of Artificial Sequence: Synthetic oligonucleotide
  Target: COL7A1; (-) strand; PAM type: NRG; PAM sequence: TGG
tgggcgcatatgtgcgtgtg

SEQ ID NO: 8122 - DNA, 20 bp, Artificial Sequence
  Description of Artificial Sequence: Synthetic oligonucleotide
  Target: COL7A1; (-) strand; PAM type: NRG; PAM sequence: GGG
ccatggcagccttgtcttat

SEQ ID NO: 8123 - DNA, 20 bp, Artificial Sequence
  Description of Artificial Sequence: Synthetic oligonucleotide
  Target: COL7A1; (-) strand; PAM type: NRG; PAM sequence: TGG
accatggcagccttgtctta

SEQ ID NO: 8124 - DNA, 20 bp, Artificial Sequence
  Description of Artificial Sequence: Synthetic oligonucleotide
  Target: COL7A1; (-) strand; PAM type: NRG; PAM sequence: CAG
caggaagcctgtgaccatgg

SEQ ID NO: 8125 - DNA, 20 bp, Artificial Sequence
  Description of Artificial Sequence: Synthetic oligonucleotide
  Target: COL7A1; (-) strand; PAM type: NRG; PAM sequence: TGG
acacaggaagcctgtgacca

SEQ ID NO: 8126 - DNA, 20 bp, Artificial Sequence
  Description of Artificial Sequence: Synthetic oligonucleotide
  Target: COL7A1; (-) strand; PAM type: NRG; PAM sequence: AAG
cacaaaggcccgaacacagg

SEQ ID NO: 8127 - DNA, 20 bp, Artificial Sequence
  Description of Artificial Sequence: Synthetic oligonucleotide
  Target: COL7A1; (-) strand; PAM type: NRG; PAM sequence: AGG
aggcacaaaggcccgaacac

SEQ ID NO: 8128 - DNA, 20 bp, Artificial Sequence
  Description of Artificial Sequence: Synthetic oligonucleotide
  Target: COL7A1; (-) strand; PAM type: NRG; PAM sequence: CAG
caggcacaaaggcccgaaca

SEQ ID NO: 8129 - DNA, 20 bp, Artificial Sequence
  Description of Artificial Sequence: Synthetic oligonucleotide
  Target: COL7A1; (-) strand; PAM type: NRG; PAM sequence: AGG
aggggtgtctccaggcacaa

SEQ ID NO: 8130 - DNA, 20 bp, Artificial Sequence
  Description of Artificial Sequence: Synthetic oligonucleotide
  Target: COL7A1; (-) strand; PAM type: NRG; PAM sequence: AAG
gaggggtgtctccaggcaca

SEQ ID NO: 8131 - DNA, 20 bp, Artificial Sequence
  Description of Artificial Sequence: Synthetic oligonucleotide
  Target: COL7A1; (-) strand; PAM type: NRG; PAM sequence: AGG
gggctgtgaggggtgtctcc

SEQ ID NO: 8132 - DNA, 20 bp, Artificial Sequence
  Description of Artificial Sequence: Synthetic oligonucleotide
  Target: COL7A1; (-) strand; PAM type: NRG; PAM sequence: CAG
ggggctgtgaggggtgtctc

SEQ ID NO: 8133 - DNA, 20 bp, Artificial Sequence
  Description of Artificial Sequence: Synthetic oligonucleotide
  Target: COL7A1; (-) strand; PAM type: NRG; PAM sequence: GGG
cagatggacggggctgtgag

SEQ ID NO: 8134 - DNA, 20 bp, Artificial Sequence
  Description of Artificial Sequence: Synthetic oligonucleotide
  Target: COL7A1; (-) strand; PAM type: NRG; PAM sequence: GGG
ccagatggacggggctgtga

SEQ ID NO: 8135 - DNA, 20 bp, Artificial Sequence
  Description of Artificial Sequence: Synthetic oligonucleotide
  Target: COL7A1; (-) strand; PAM type: NRG; PAM sequence: AGG
cccagatggacggggctgtg

SEQ ID NO: 8136 - DNA, 20 bp, Artificial Sequence
  Description of Artificial Sequence: Synthetic oligonucleotide
  Target: COL7A1; (-) strand; PAM type: NRG; PAM sequence: GAG
ccccagatggacggggctgt

SEQ ID NO: 8137 - DNA, 20 bp, Artificial Sequence
  Description of Artificial Sequence: Synthetic oligonucleotide
  Target: COL7A1; (-) strand; PAM type: NRG; PAM sequence: GGG
gcacctgccccagatggacg

SEQ ID NO: 8138 - DNA, 20 bp, Artificial Sequence
  Description of Artificial Sequence: Synthetic oligonucleotide
  Target: COL7A1; (-) strand; PAM type: NRG; PAM sequence: GGG
agcacctgccccagatggac

SEQ ID NO: 8139 - DNA, 20 bp, Artificial Sequence
  Description of Artificial Sequence: Synthetic oligonucleotide
  Target: COL7A1; (-) strand; PAM type: NRG; PAM sequence: CGG
cagcacctgccccagatgga

SEQ ID NO: 8140 - DNA, 20 bp, Artificial Sequence
  Description of Artificial Sequence: Synthetic oligonucleotide
  Target: COL7A1; (-) strand; PAM type: NRG; PAM sequence: TGG
gaggcagcacctgccccaga

SEQ ID NO: 8141 - DNA, 20 bp, Artificial Sequence
  Description of Artificial Sequence: Synthetic oligonucleotide
  Target: COL7A1; (-) strand; PAM type: NRG; PAM sequence: CAG
ccatgaggcagcacctgccc

SEQ ID NO: 8142 - DNA, 20 bp, Artificial Sequence
  Description of Artificial Sequence: Synthetic oligonucleotide
  Target: COL7A1; (-) strand; PAM type: NRG; PAM sequence: CAG
ttgctctgtgccccatgagg

SEQ ID NO: 8143 - DNA, 20 bp, Artificial Sequence
  Description of Artificial Sequence: Synthetic oligonucleotide
  Target: COL7A1; (-) strand; PAM type: NRG; PAM sequence: AGG
tgcttgctctgtgccccatg

SEQ ID NO: 8144 - DNA, 20 bp, Artificial Sequence
  Description of Artificial Sequence: Synthetic oligonucleotide
  Target: COL7A1; (-) strand; PAM type: NRG; PAM sequence: GAG
ttgcttgctctgtgccccat

SEQ ID NO: 8145 - DNA, 20 bp, Artificial Sequence
  Description of Artificial Sequence: Synthetic oligonucleotide
  Target: COL7A1; (-) strand; PAM type: NRG; PAM sequence: GGG
cacagagaaatgctggctga

SEQ ID NO: 8146 - DNA, 20 bp, Artificial Sequence
  Description of Artificial Sequence: Synthetic oligonucleotide
  Target: COL7A1; (-) strand; PAM type: NRG; PAM sequence: AGG
acacagagaaatgctggctg

SEQ ID NO: 8147 - DNA, 20 bp, Artificial Sequence
  Description of Artificial Sequence: Synthetic oligonucleotide
  Target: COL7A1; (-) strand; PAM type: NRG; PAM sequence: GAG
cacacagagaaatgctggct

SEQ ID NO: 8148 - DNA, 20 bp, Artificial Sequence
  Description of Artificial Sequence: Synthetic oligonucleotide
  Target: COL7A1; (-) strand; PAM type: NRG; PAM sequence: TGG
gccaccacacagagaaatgc

SEQ ID NO: 8149 - DNA, 20 bp, Artificial Sequence
  Description of Artificial Sequence: Synthetic oligonucleotide
  Target: COL7A1; (-) strand; PAM type: NRG; PAM sequence: GAG
atcccataggccaccacaca

SEQ ID NO: 8150 - DNA, 20 bp, Artificial Sequence
  Description of Artificial Sequence: Synthetic oligonucleotide
  Target: COL7A1; (-) strand; PAM type: NRG; PAM sequence: CAG
tcatcccataggccaccaca

SEQ ID NO: 8151 - DNA, 20 bp, Artificial Sequence
  Description of Artificial Sequence: Synthetic oligonucleotide
  Target: COL7A1; (-) strand; PAM type: NRG; PAM sequence: AGG
ccacaggtctgtcatcccat

SEQ ID NO: 8152 - DNA, 20 bp, Artificial Sequence
  Description of Artificial Sequence: Synthetic oligonucleotide
  Target: COL7A1; (-) strand; PAM type: NRG; PAM sequence: TAG
cccacaggtctgtcatccca

SEQ ID NO: 8153 - DNA, 20 bp, Artificial Sequence
  Description of Artificial Sequence: Synthetic oligonucleotide
  Target: COL7A1; (-) strand; PAM type: NRG; PAM sequence: AGG
ccagtccctctgaggcccac

SEQ ID NO: 8154 - DNA, 20 bp, Artificial Sequence
  Description of Artificial Sequence: Synthetic oligonucleotide
  Target: COL7A1; (-) strand; PAM type: NRG; PAM sequence: CAG
accagtccctctgaggccca

SEQ ID NO: 8155 - DNA, 20 bp, Artificial Sequence
  Description of Artificial Sequence: Synthetic oligonucleotide
  Target: COL7A1; (-) strand; PAM type: NRG; PAM sequence: AGG
gcctccgaccagtccctctg

SEQ ID NO: 8156 - DNA, 20 bp, Artificial Sequence
  Description of Artificial Sequence: Synthetic oligonucleotide
  Target: COL7A1; (-) strand; PAM type: NRG; PAM sequence: GAG
tgcctccgaccagtccctct

SEQ ID NO: 8157 - DNA, 20 bp, Artificial Sequence
  Description of Artificial Sequence: Synthetic oligonucleotide
  Target: COL7A1; (-) strand; PAM type: NRG; PAM sequence: CAG
agctcaacactgcctccgac

SEQ ID NO: 8158 - DNA, 20 bp, Artificial Sequence
  Description of Artificial Sequence: Synthetic oligonucleotide
  Target: COL7A1; (-) strand; PAM type: NRG; PAM sequence: GAG
tttcaggagcctcaacacga

SEQ ID NO: 8159 - DNA, 20 bp, Artificial Sequence
  Description of Artificial Sequence: Synthetic oligonucleotide
  Target: COL7A1; (-) strand; PAM type: NRG; PAM sequence: GAG
actttcaggagcctcaacac

SEQ ID NO: 8160 - DNA, 20 bp, Artificial Sequence
  Description of Artificial Sequence: Synthetic oligonucleotide
  Target: COL7A1; (-) strand; PAM type: NRG; PAM sequence: GAG
catcatcatgttactttcag

SEQ ID NO: 8161 - DNA, 20 bp, Artificial Sequence
  Description of Artificial Sequence: Synthetic oligonucleotide
  Target: COL7A1; (-) strand; PAM type: NRG; PAM sequence: AGG
gtcatcatcatgttactttc

SEQ ID NO: 8162 - DNA, 20 bp, Artificial Sequence
  Description of Artificial Sequence: Synthetic oligonucleotide
  Target: COL7A1; (-) strand; PAM type: NRG; PAM sequence: CAG
agtcatcatcatgttacttt

SEQ ID NO: 8163 - DNA, 20 bp, Artificial Sequence
  Description of Artificial Sequence: Synthetic oligonucleotide
  Target: COL7A1; (-) strand; PAM type: NRG; PAM sequence: CAG
cacctggacaccgccacatg

SEQ ID NO: 8164 - DNA, 20 bp, Artificial Sequence
  Description of Artificial Sequence: Synthetic oligonucleotide
  Target: COL7A1; (-) strand; PAM type: NRG; PAM sequence: TGG
ccccatagtcacagaacacc

SEQ ID NO: 8165 - DNA, 20 bp, Artificial Sequence
  Description of Artificial Sequence: Synthetic oligonucleotide
  Target: COL7A1; (-) strand; PAM type: NRG; PAM sequence: CAG
gtctgggtgccccatagtca

SEQ ID NO: 8166 - DNA, 20 bp, Artificial Sequence
  Description of Artificial Sequence: Synthetic oligonucleotide
  Target: COL7A1; (-) strand; PAM type: NRG; PAM sequence: TAG
tgctatgtctgggtgcccca

SEQ ID NO: 8167 - DNA, 20 bp, Artificial Sequence
  Description of Artificial Sequence: Synthetic oligonucleotide
  Target: COL7A1; (-) strand; PAM type: NRG; PAM sequence: GGG
tggcgagtcttgctatgtct

SEQ ID NO: 8168 - DNA, 20 bp, Artificial Sequence
  Description of Artificial Sequence: Synthetic oligonucleotide
  Target: COL7A1; (-) strand; PAM type: NRG; PAM sequence: TGG
gtggcgagtcttgctatgtc

SEQ ID NO: 8169 - DNA, 20 bp, Artificial Sequence
  Description of Artificial Sequence: Synthetic oligonucleotide
  Target: COL7A1; (-) strand; PAM type: NRG; PAM sequence: GAG
cgtaaggtcactgctgtggc

SEQ ID NO: 8170 - DNA, 20 bp, Artificial Sequence
  Description of Artificial Sequence: Synthetic oligonucleotide
  Target: COL7A1; (-) strand; PAM type: NRG; PAM sequence: TGG
gccacgtaaggtcactgctg

SEQ ID NO: 8171 - DNA, 20 bp, Artificial Sequence
  Description of Artificial Sequence: Synthetic oligonucleotide
  Target: COL7A1; (-) strand; PAM type: NRG; PAM sequence: AGG
agcttggatgctgccacgta

SEQ ID NO: 8172 - DNA, 20 bp, Artificial Sequence
  Description of Artificial Sequence: Synthetic oligonucleotide
  Target: COL7A1; (-) strand; PAM type: NRG; PAM sequence: AAG
cagcttggatgctgccacgt

SEQ ID NO: 8173 - DNA, 20 bp, Artificial Sequence
  Description of Artificial Sequence: Synthetic oligonucleotide
  Target: COL7A1; (-) strand; PAM type: NRG; PAM sequence: TGG
taatatatgtccggacagct

SEQ ID NO: 8174 - DNA, 20 bp, Artificial Sequence
  Description of Artificial Sequence: Synthetic oligonucleotide
  Target: COL7A1; (-) strand; PAM type: NRG; PAM sequence: CAG
agacctaatatatgtccgga

SEQ ID NO: 8175 - DNA, 20 bp, Artificial Sequence
  Description of Artificial Sequence: Synthetic oligonucleotide
  Target: COL7A1; (-) strand; PAM type: NRG; PAM sequence: CGG
ccacagacctaatatatgtc

SEQ ID NO: 8176 - DNA, 20 bp, Artificial Sequence
  Description of Artificial Sequence: Synthetic oligonucleotide
  Target: COL7A1; (-) strand; PAM type: NRG; PAM sequence: CAG
tgccatgcctgtgtgcccca

SEQ ID NO: 8177 - DNA, 20 bp, Artificial Sequence
  Description of Artificial Sequence: Synthetic oligonucleotide
  Target: COL7A1; (-) strand; PAM type: NRG; PAM sequence: GAG
agttgggtcactgccacatg

SEQ ID NO: 8178 - DNA, 20 bp, Artificial Sequence
  Description of Artificial Sequence: Synthetic oligonucleotide
  Target: COL7A1; (-) strand; PAM type: NRG; PAM sequence: TGG
taagttgggtcactgccaca

SEQ ID NO: 8179 - DNA, 20 bp, Artificial Sequence
  Description of Artificial Sequence: Synthetic oligonucleotide
  Target: COL7A1; (-) strand; PAM type: NRG; PAM sequence: GGG
acattggacattgctaagtt

SEQ ID NO: 8180 - DNA, 20 bp, Artificial Sequence
  Description of Artificial Sequence: Synthetic oligonucleotide
  Target: COL7A1; (-) strand; PAM type: NRG; PAM sequence: TGG
gacattggacattgctaagt

SEQ ID NO: 8181 - DNA, 20 bp, Artificial Sequence
  Description of Artificial Sequence: Synthetic oligonucleotide
  Target: COL7A1; (-) strand; PAM type: NRG; PAM sequence: AAG
cctggacattggacattgct

SEQ ID NO: 8182 - DNA, 20 bp, Artificial Sequence
  Description of Artificial Sequence: Synthetic oligonucleotide
  Target: COL7A1; (-) strand; PAM type: NRG; PAM sequence: TGG
tgtctggacagcctggacat

SEQ ID NO: 8183 - DNA, 20 bp, Artificial Sequence
  Description of Artificial Sequence: Synthetic oligonucleotide
  Target: COL7A1; (-) strand; PAM type: NRG; PAM sequence: TGG
cacagtgtgtctggacagcc

SEQ ID NO: 8184 - DNA, 20 bp, Artificial Sequence
  Description of Artificial Sequence: Synthetic oligonucleotide
  Target: COL7A1; (-) strand; PAM type: NRG; PAM sequence: CAG
agagtcacagtgtgtctgga

SEQ ID NO: 8185 - DNA, 20 bp, Artificial Sequence
  Description of Artificial Sequence: Synthetic oligonucleotide
  Target: COL7A1; (-) strand; PAM type: NRG; PAM sequence: TGG
ccacagagtcacagtgtgtc

SEQ ID NO: 8186 - DNA, 20 bp, Artificial Sequence
  Description of Artificial Sequence: Synthetic oligonucleotide
  Target: COL7A1; (-) strand; PAM type: NRG; PAM sequence: CAG
ctgagtgccccacagagtca

SEQ ID NO: 8187 - DNA, 20 bp, Artificial Sequence
  Description of Artificial Sequence: Synthetic oligonucleotide
  Target: COL7A1; (-) strand; PAM type: NRG; PAM sequence: GAG
tcagatctgagtgccccaca

SEQ ID NO: 8188 - DNA, 20 bp, Artificial Sequence
  Description of Artificial Sequence: Synthetic oligonucleotide
  Target: COL7A1; (-) strand; PAM type: NRG; PAM sequence: CAG
tatcagatctgagtgcccca

SEQ ID NO: 8189 - DNA, 20 bp, Artificial Sequence
  Description of Artificial Sequence: Synthetic oligonucleotide
  Target: COL7A1; (-) strand; PAM type: NRG; PAM sequence: GAG
atgcaggtcatatcagatct

SEQ ID NO: 8190 - DNA, 20 bp, Artificial Sequence
  Description of Artificial Sequence: Synthetic oligonucleotide
  Target: COL7A1; (-) strand; PAM type: NRG; PAM sequence: CAG
cactgtcatgcaggtcatat

SEQ ID NO: 8191 - DNA, 20 bp, Artificial Sequence
  Description of Artificial Sequence: Synthetic oligonucleotide
  Target: COL7A1; (-) strand; PAM type: NRG; PAM sequence: AGG
acatggagccactgtcatgc

SEQ ID NO: 8192 - DNA, 20 bp, Artificial Sequence
  Description of Artificial Sequence: Synthetic oligonucleotide
  Target: COL7A1; (-) strand; PAM type: NRG; PAM sequence: CAG
cacatggagccactgtcatg

SEQ ID NO: 8193 - DNA, 20 bp, Artificial Sequence
  Description of Artificial Sequence: Synthetic oligonucleotide
  Target: COL7A1; (-) strand; PAM type: NRG; PAM sequence: GAG
tgtctggacactgccacatg

SEQ ID NO: 8194 - DNA, 20 bp, Artificial Sequence
  Description of Artificial Sequence: Synthetic oligonucleotide
  Target: COL7A1; (-) strand; PAM type: NRG; PAM sequence: TGG
agtgtctggacactgccaca

SEQ ID NO: 8195 - DNA, 20 bp, Artificial Sequence
  Description of Artificial Sequence: Synthetic oligonucleotide
  Target: COL7A1; (-) strand; PAM type: NRG; PAM sequence: TGG
acatctgggcatacagtgtc

SEQ ID NO: 8196 - DNA, 20 bp, Artificial Sequence
  Description of Artificial Sequence: Synthetic oligonucleotide
  Target: COL7A1; (-) strand; PAM type: NRG; PAM sequence: CAG
cgctgccacatctgggcata

SEQ ID NO: 8197 - DNA, 20 bp, Artificial Sequence
  Description of Artificial Sequence: Synthetic oligonucleotide
  Target: COL7A1; (-) strand; PAM type: NRG; PAM sequence: GGG
gtctggacgctgccacatct

SEQ ID NO: 8198 - DNA, 20 bp, Artificial Sequence
  Description of Artificial Sequence: Synthetic oligonucleotide
  Target: COL7A1; (-) strand; PAM type: NRG; PAM sequence: TGG
tgtctggacgctgccacatc

SEQ ID NO: 8199 - DNA, 20 bp, Artificial Sequence
  Description of Artificial Sequence: Synthetic oligonucleotide
  Target: COL7A1; (-) strand; PAM type: NRG; PAM sequence: TGG
acatctgggcatacagtgtc

SEQ ID NO: 8200 - DNA, 20 bp, Artificial Sequence
  Description of Artificial Sequence: Synthetic oligonucleotide
  Target: COL7A1; (-) strand; PAM type: NRG; PAM sequence: CAG
tgctgccacatctgggcata

SEQ ID NO: 8201 - DNA, 20 bp, Artificial Sequence
  Description of Artificial Sequence: Synthetic oligonucleotide
  Target: COL7A1; (-) strand; PAM type: NRG; PAM sequence: GGG
ggacggatgctgccacatct

SEQ ID NO: 8202 - DNA, 20 bp, Artificial Sequence
  Description of Artificial Sequence: Synthetic oligonucleotide
  Target: COL7A1; (-) strand; PAM type: NRG; PAM sequence: TGG
tggacggatgctgccacatc

SEQ ID NO: 8203 - DNA, 20 bp, Artificial Sequence
  Description of Artificial Sequence: Synthetic oligonucleotide
  Target: COL7A1; (-) strand; PAM type: NRG; PAM sequence: CGG
agggcagccacacagctgga

SEQ ID NO: 8204 - DNA, 20 bp, Artificial Sequence
  Description of Artificial Sequence: Synthetic oligonucleotide
  Target: COL7A1; (-) strand; PAM type: NRG; PAM sequence: TGG
ctggagggcagccacacagc

SEQ ID NO: 8205 - DNA, 20 bp, Artificial Sequence
  Description of Artificial Sequence: Synthetic oligonucleotide
  Target: COL7A1; (-) strand; PAM type: NRG; PAM sequence: CAG
agacctggagggcagccaca

SEQ ID NO: 8206 - DNA, 20 bp, Artificial Sequence
  Description of Artificial Sequence: Synthetic oligonucleotide
  Target: COL7A1; (-) strand; PAM type: NRG; PAM sequence: CAG
ggatgggaagacctggaggg

SEQ ID NO: 8207 - DNA, 20 bp, Artificial Sequence
  Description of Artificial Sequence: Synthetic oligonucleotide
  Target: COL7A1; (-) strand; PAM type: NRG; PAM sequence: GGG
cctggatgggaagacctgga

SEQ ID NO: 8208 - DNA, 20 bp, Artificial Sequence
  Description of Artificial Sequence: Synthetic oligonucleotide
  Target: COL7A1; (-) strand; PAM type: NRG; PAM sequence: AGG
ccctggatgggaagacctgg

SEQ ID NO: 8209 - DNA, 20 bp, Artificial Sequence
  Description of Artificial Sequence: Synthetic oligonucleotide
  Target: COL7A1; (-) strand; PAM type: NRG; PAM sequence: GAG
accctggatgggaagacctg

SEQ ID NO: 8210 - DNA, 20 bp, Artificial Sequence
  Description of Artificial Sequence: Synthetic oligonucleotide
  Target: COL7A1; (-) strand; PAM type: NRG; PAM sequence: TGG
ccaccctggatgggaagacc

SEQ ID NO: 8211 - DNA, 20 bp, Artificial Sequence
  Description of Artificial Sequence: Synthetic oligonucleotide
  Target: COL7A1; (-) strand; PAM type: NRG; PAM sequence: AAG
atagggccaccctggatggg

SEQ ID NO: 8212 - DNA, 20 bp, Artificial Sequence
  Description of Artificial Sequence: Synthetic oligonucleotide
  Target: COL7A1; (-) strand; PAM type: NRG; PAM sequence: GGG
gtgatagggccaccctggat

SEQ ID NO: 8213 - DNA, 20 bp, Artificial Sequence
  Description of Artificial Sequence: Synthetic oligonucleotide
  Target: COL7A1; (-) strand; PAM type: NRG; PAM sequence: TGG
agtgatagggccaccctgga

SEQ ID NO: 8214 - DNA, 20 bp, Artificial Sequence
  Description of Artificial Sequence: Synthetic oligonucleotide
  Target: COL7A1; (-) strand; PAM type: NRG; PAM sequence: TGG
tcacagtgatagggccaccc

SEQ ID NO: 8215 - DNA, 20 bp, Artificial Sequence
  Description of Artificial Sequence: Synthetic oligonucleotide
  Target: COL7A1; (-) strand; PAM type: NRG; PAM sequence: GGG
gagagggggtcacagtgata

SEQ ID NO: 8216 - DNA, 20 bp, Artificial Sequence
  Description of Artificial Sequence: Synthetic oligonucleotide
  Target: COL7A1; (-) strand; PAM type: NRG; PAM sequence: AGG
agagagggggtcacagtgat

SEQ ID NO: 8217 - DNA, 20 bp, Artificial Sequence
  Description of Artificial Sequence: Synthetic oligonucleotide
  Target: COL7A1; (-) strand; PAM type: NRG; PAM sequence: TAG
gagagagggggtcacagtga

SEQ ID NO: 8218 - DNA, 20 bp, Artificial Sequence
  Description of Artificial Sequence: Synthetic oligonucleotide
  Target: COL7A1; (-) strand; PAM type: NRG; PAM sequence: CAG
gagcctgagagagggggtca

SEQ ID NO: 8219 - DNA, 20 bp, Artificial Sequence
  Description of Artificial Sequence: Synthetic oligonucleotide
  Target: COL7A1; (-) strand; PAM type: NRG; PAM sequence: GGG
actgctgagcctgagagagg

SEQ ID NO: 8220 - DNA, 20 bp, Artificial Sequence
  Description of Artificial Sequence: Synthetic oligonucleotide
  Target: COL7A1; (-) strand; PAM type: NRG; PAM sequence: GGG
cactgctgagcctgagagag

SEQ ID NO: 8221 - DNA, 20 bp, Artificial Sequence
  Description of Artificial Sequence: Synthetic oligonucleotide
  Target: COL7A1; (-) strand; PAM type: NRG; PAM sequence: GGG
ccactgctgagcctgagaga

SEQ ID NO: 8222 - DNA, 20 bp, Artificial Sequence
  Description of Artificial Sequence: Synthetic oligonucleotide
  Target: COL7A1; (-) strand; PAM type: NRG; PAM sequence: AGG
gccactgctgagcctgagag

SEQ ID NO: 8223 - DNA, 20 bp, Artificial Sequence
  Description of Artificial Sequence: Synthetic oligonucleotide
  Target: COL7A1; (-) strand; PAM type: NRG; PAM sequence: GAG
ggccactgctgagcctgaga

SEQ ID NO: 8224 - DNA, 20 bp, Artificial Sequence
  Description of Artificial Sequence: Synthetic oligonucleotide
  Target: COL7A1; (-) strand; PAM type: NRG; PAM sequence: GAG
tcggccactgctgagcctga

SEQ ID NO: 8225 - DNA, 20 bp, Artificial Sequence
  Description of Artificial Sequence: Synthetic oligonucleotide
  Target: COL7A1; (-) strand; PAM type: NRG; PAM sequence: GAG
tgtcggccactgctgagcct

SEQ ID NO: 8226 - DNA, 20 bp, Artificial Sequence
  Description of Artificial Sequence: Synthetic oligonucleotide
  Target: COL7A1; (-) strand; PAM type: NRG; PAM sequence: GAG
ggcccgtgtcggccactgct

SEQ ID NO: 8227 - DNA, 20 bp, Artificial Sequence
  Description of Artificial Sequence: Synthetic oligonucleotide
  Target: COL7A1; (-) strand; PAM type: NRG; PAM sequence: CGG
gcccgcatcctggcccgtgt

SEQ ID NO: 8228 - DNA, 20 bp, Artificial Sequence
  Description of Artificial Sequence: Synthetic oligonucleotide
  Target: COL7A1; (-) strand; PAM type: NRG; PAM sequence: TGG
caccaccaacgcccgcatcc

SEQ ID NO: 8229 - DNA, 20 bp, Artificial Sequence
  Description of Artificial Sequence: Synthetic oligonucleotide
  Target: COL7A1; (-) strand; PAM type: NRG; PAM sequence: AGG
ggccagggctgccagggagc

SEQ ID NO: 8230 - DNA, 20 bp, Artificial Sequence
  Description of Artificial Sequence: Synthetic oligonucleotide
  Target: COL7A1; (-) strand; PAM type: NRG; PAM sequence: CAG
gggccagggctgccagggag

SEQ ID NO: 8231 - DNA, 20 bp, Artificial Sequence
  Description of Artificial Sequence: Synthetic oligonucleotide
  Target: COL7A1; (-) strand; PAM type: NRG; PAM sequence: GAG
cccgggccagggctgccagg

SEQ ID NO: 8232 - DNA, 20 bp, Artificial Sequence
  Description of Artificial Sequence: Synthetic oligonucleotide
  Target: COL7A1; (-) strand; PAM type: NRG; PAM sequence: GGG
agcccgggccagggctgcca

SEQ ID NO: 8233 - DNA, 20 bp, Artificial Sequence
  Description of Artificial Sequence: Synthetic oligonucleotide
  Target: COL7A1; (-) strand; PAM type: NRG; PAM sequence: AGG
aagcccgggccagggctgcc

SEQ ID NO: 8234 - DNA, 20 bp, Artificial Sequence
  Description of Artificial Sequence: Synthetic oligonucleotide
  Target: COL7A1; (-) strand; PAM type: NRG; PAM sequence: CAG
caagcccgggccagggctgc

SEQ ID NO: 8235 - DNA, 20 bp, Artificial Sequence
  Description of Artificial Sequence: Synthetic oligonucleotide
  Target: COL7A1; (-) strand; PAM type: NRG; PAM sequence: GGG
actggagcaagcccgggcca

SEQ ID NO: 8236 - DNA, 20 bp, Artificial Sequence
  Description of Artificial Sequence: Synthetic oligonucleotide
  Target: COL7A1; (-) strand; PAM type: NRG; PAM sequence: AGG
tactggagcaagcccgggcc

SEQ ID NO: 8237 - DNA, 20 bp, Artificial Sequence
  Description of Artificial Sequence: Synthetic oligonucleotide
  Target: COL7A1; (-) strand; PAM type: NRG; PAM sequence: CAG
ttactggagcaagcccgggc

SEQ ID NO: 8238 - DNA, 20 bp, Artificial Sequence
  Description of Artificial Sequence: Synthetic oligonucleotide
  Target: COL7A1; (-) strand; PAM type: NRG; PAM sequence: GGG
gatcttactggagcaagccc

SEQ ID NO: 8239 - DNA, 20 bp, Artificial Sequence
  Description of Artificial Sequence: Synthetic oligonucleotide
  Target: COL7A1; (-) strand; PAM type: NRG; PAM sequence: CGG
agatcttactggagcaagcc

SEQ ID NO: 8240 - DNA, 20 bp, Artificial Sequence
  Description of Artificial Sequence: Synthetic oligonucleotide
  Target: COL7A1; (-) strand; PAM type: NRG; PAM sequence: AAG
cttgcagatcttactggagc

SEQ ID NO: 8241 - DNA, 20 bp, Artificial Sequence
  Description of Artificial Sequence: Synthetic oligonucleotide
  Target: COL7A1; (-) strand; PAM type: NRG; PAM sequence: GAG
gcctcttgcagatcttactg

SEQ ID NO: 8242 - DNA, 20 bp, Artificial Sequence
  Description of Artificial Sequence: Synthetic oligonucleotide
  Target: COL7A1; (-) strand; PAM type: NRG; PAM sequence: TGG
cggcctcttgcagatcttac

SEQ ID NO: 8243 - DNA, 20 bp, Artificial Sequence
  Description of Artificial Sequence: Synthetic oligonucleotide
  Target: COL7A1; (-) strand; PAM type: NRG; PAM sequence: CAG
atgtccccatcggcctcttg

SEQ ID NO: 8244 - DNA, 20 bp, Artificial Sequence
  Description of Artificial Sequence: Synthetic oligonucleotide
  Target: COL7A1; (-) strand; PAM type: NRG; PAM sequence: CGG
ctatcgctggatgtccccat

SEQ ID NO: 8245 - DNA, 20 bp, Artificial Sequence
  Description of Artificial Sequence: Synthetic oligonucleotide
  Target: COL7A1; (-) strand; PAM type: NRG; PAM sequence: TGG
ctcgcgcattgtcctatcgc

SEQ ID NO: 8246 - DNA, 20 bp, Artificial Sequence
  Description of Artificial Sequence: Synthetic oligonucleotide
  Target: COL7A1; (-) strand; PAM type: NRG; PAM sequence: TGG
tgcagccccacccgccaccc

SEQ ID NO: 8247 - DNA, 20 bp, Artificial Sequence
  Description of Artificial Sequence: Synthetic oligonucleotide
  Target: COL7A1; (-) strand; PAM type: NRG; PAM sequence: CAG
tgggctgcccagagccactg

SEQ ID NO: 8248 - DNA, 20 bp, Artificial Sequence
  Description of Artificial Sequence: Synthetic oligonucleotide
  Target: COL7A1; (-) strand; PAM type: NRG; PAM sequence: GAG
acatggccgtgggctgccca

SEQ ID NO: 8249 - DNA, 20 bp, Artificial Sequence
  Description of Artificial Sequence: Synthetic oligonucleotide
  Target: COL7A1; (-) strand; PAM type: NRG; PAM sequence: CAG
ccacatggccgtgggctgcc

SEQ ID NO: 8250 - DNA, 20 bp, Artificial Sequence
  Description of Artificial Sequence: Synthetic oligonucleotide
  Target: COL7A1; (-) strand; PAM type: NRG; PAM sequence: GGG
agctgctcccacatggccgt

SEQ ID NO: 8251 - DNA, 20 bp, Artificial Sequence
  Description of Artificial Sequence: Synthetic oligonucleotide
  Target: COL7A1; (-) strand; PAM type: NRG; PAM sequence: TGG
cagctgctcccacatggccg

SEQ ID NO: 8252 - DNA, 20 bp, Artificial Sequence
  Description of Artificial Sequence: Synthetic oligonucleotide
  Target: COL7A1; (-) strand; PAM type: NRG; PAM sequence: TGG
gcccctcagctgctcccaca

SEQ ID NO: 8253 - DNA, 20 bp, Artificial Sequence
  Description of Artificial Sequence: Synthetic oligonucleotide
  Target: COL7A1; (-) strand; PAM type: NRG; PAM sequence: CAG
tgcggcctcagagagcccct

SEQ ID NO: 8254 - DNA, 20 bp, Artificial Sequence
  Description of Artificial Sequence: Synthetic oligonucleotide
  Target: COL7A1; (-) strand; PAM type: NRG; PAM sequence: GAG
ccccgacctgcggcctcaga

SEQ ID NO: 8255 - DNA, 20 bp, Artificial Sequence
  Description of Artificial Sequence: Synthetic oligonucleotide
  Target: COL7A1; (-) strand; PAM type: NRG; PAM sequence: GAG
ctccccgacctgcggcctca

SEQ ID NO: 8256 - DNA, 20 bp, Artificial Sequence
  Description of Artificial Sequence: Synthetic oligonucleotide
  Target: COL7A1; (-) strand; PAM type: NRG; PAM sequence: CAG
cactccccgacctgcggcct

SEQ ID NO: 8257 - DNA, 20 bp, Artificial Sequence
  Description of Artificial Sequence: Synthetic oligonucleotide
  Target: COL7A1; (-) strand; PAM type: NRG; PAM sequence: CGG
ccagaccactccccgacctg

SEQ ID NO: 8258 - DNA, 20 bp, Artificial Sequence
  Description of Artificial Sequence: Synthetic oligonucleotide
  Target: COL7A1; (-) strand; PAM type: NRG; PAM sequence: CAG
tccgccctcagaattctccc

SEQ ID NO: 8259 - DNA, 20 bp, Artificial Sequence
  Description of Artificial Sequence: Synthetic oligonucleotide
  Target: COL7A1; (-) strand; PAM type: NRG; PAM sequence: CAG
caaccttccagctccgccct

SEQ ID NO: 8260 - DNA, 20 bp, Artificial Sequence
  Description of Artificial Sequence: Synthetic oligonucleotide
  Target: COL7A1; (-) strand; PAM type: NRG; PAM sequence: CAG
tgacccctatcccaaccttc

SEQ ID NO: 8261 - DNA, 20 bp, Artificial Sequence
  Description of Artificial Sequence: Synthetic oligonucleotide
  Target: COL7A1; (-) strand; PAM type: NRG; PAM sequence: CAG
gggcagagtcctggttgtcc

SEQ ID NO: 8262 - DNA, 20 bp, Artificial Sequence
  Description of Artificial Sequence: Synthetic oligonucleotide
  Target: COL7A1; (-) strand; PAM type: NRG; PAM sequence: TGG
cctgatgttgggcagagtcc

SEQ ID NO: 8263 - DNA, 20 bp, Artificial Sequence
  Description of Artificial Sequence: Synthetic oligonucleotide
  Target: COL7A1; (-) strand; PAM type: NRG; PAM sequence: GAG
gatggtcctgatgttgggca

SEQ ID NO: 8264 - DNA, 20 bp, Artificial Sequence
  Description of Artificial Sequence: Synthetic oligonucleotide
  Target: COL7A1; (-) strand; PAM type: NRG; PAM sequence: CAG
ctgatggtcctgatgttggg

SEQ ID NO: 8265 - DNA, 20 bp, Artificial Sequence
  Description of Artificial Sequence: Synthetic oligonucleotide
  Target: COL7A1; (-) strand; PAM type: NRG; PAM sequence: GGG
ttgctgatggtcctgatgtt

SEQ ID NO: 8266 - DNA, 20 bp, Artificial Sequence
  Description of Artificial Sequence: Synthetic oligonucleotide
  Target: COL7A1; (-) strand; PAM type: NRG; PAM sequence: TGG
gttgctgatggtcctgatgt

SEQ ID NO: 8267 - DNA, 20 bp, Artificial Sequence
  Description of Artificial Sequence: Synthetic oligonucleotide
  Target: COL7A1; (-) strand; PAM type: NRG; PAM sequence: TGG
gtgtgctctgctgttgctga

SEQ ID NO: 8268 - DNA, 20 bp, Artificial Sequence
  Description of Artificial Sequence: Synthetic oligonucleotide
  Target: COL7A1; (-) strand; PAM type: NRG; PAM sequence: AGG
agcctgacctcacgatgacc

SEQ ID NO: 8269 - DNA, 20 bp, Artificial Sequence
  Description of Artificial Sequence: Synthetic oligonucleotide
  Target: COL7A1; (-) strand; PAM type: NRG; PAM sequence: CAG
cagcctgacctcacgatgac

SEQ ID NO: 8270 - DNA, 20 bp, Artificial Sequence
  Description of Artificial Sequence: Synthetic oligonucleotide
  Target: COL7A1; (-) strand; PAM type: NRG; PAM sequence: CAG
ctgagcccattttctccttg

SEQ ID NO: 8271 - DNA, 20 bp, Artificial Sequence
  Description of Artificial Sequence: Synthetic oligonucleotide
  Target: COL7A1; (-) strand; PAM type: NRG; PAM sequence: GAG
ttgaccagagcccctgccct

SEQ ID NO: 8272 - DNA, 20 bp, Artificial Sequence
  Description of Artificial Sequence: Synthetic oligonucleotide
  Target: COL7A1; (-) strand; PAM type: NRG; PAM sequence: GAG
ccatggaccccagttgacca

SEQ ID NO: 8273 - DNA, 20 bp, Artificial Sequence
  Description of Artificial Sequence: Synthetic oligonucleotide
  Target: COL7A1; (-) strand; PAM type: NRG; PAM sequence: CAG
gtccatggaccccagttgac

SEQ ID NO: 8274 - DNA, 20 bp, Artificial Sequence
  Description of Artificial Sequence: Synthetic oligonucleotide
  Target: COL7A1; (-) strand; PAM type: NRG; PAM sequence: CAG
ctgtctctgtccatggaccc

SEQ ID NO: 8275 - DNA, 20 bp, Artificial Sequence
  Description of Artificial Sequence: Synthetic oligonucleotide
  Target: COL7A1; (-) strand; PAM type: NRG; PAM sequence: TGG
ttgccatctgtctctgtcca

SEQ ID NO: 8276 - DNA, 20 bp, Artificial Sequence
  Description of Artificial Sequence: Synthetic oligonucleotide
  Target: COL7A1; (-) strand; PAM type: NRG; PAM sequence: CGG
ggcctctctaacccctttct

SEQ ID NO: 8277 - DNA, 20 bp, Artificial Sequence
  Description of Artificial Sequence: Synthetic oligonucleotide
  Target: COL7A1; (-) strand; PAM type: NRG; PAM sequence: TGG
tctctgtctctggcctggcc

SEQ ID NO: 8278 - DNA, 20 bp, Artificial Sequence
  Description of Artificial Sequence: Synthetic oligonucleotide
  Target: COL7A1; (-) strand; PAM type: NRG; PAM sequence: TGG
ccccttctctgtctctggcc

SEQ ID NO: 8279 - DNA, 20 bp, Artificial Sequence
  Description of Artificial Sequence: Synthetic oligonucleotide
  Target: COL7A1; (-) strand; PAM type: NRG; PAM sequence: TGG
tgtctccccttctctgtctc

SEQ ID NO: 8280 - DNA, 20 bp, Artificial Sequence
  Description of Artificial Sequence: Synthetic oligonucleotide
  Target: COL7A1; (-) strand; PAM type: NRG; PAM sequence: TGG
tctgcctctttgtctcattc

SEQ ID NO: 8281 - DNA, 20 bp, Artificial Sequence
  Description of Artificial Sequence: Synthetic oligonucleotide
  Target: COL7A1; (-) strand; PAM type: NRG; PAM sequence: TGG
tcttgctgtccctctgtctc

SEQ ID NO: 8282 - DNA, 20 bp, Artificial Sequence
  Description of Artificial Sequence: Synthetic oligonucleotide
  Target: COL7A1; (-) strand; PAM type: NRG; PAM sequence: TAG
ttctgtctgtctttttcttc

SEQ ID NO: 8283 - DNA, 20 bp, Artificial Sequence
  Description of Artificial Sequence: Synthetic oligonucleotide
  Target: COL7A1; (-) strand; PAM type: NRG; PAM sequence: TGG
catgctgtctgtctctggga

SEQ ID NO: 8284 - DNA, 20 bp, Artificial Sequence
  Description of Artificial Sequence: Synthetic oligonucleotide
  Target: COL7A1; (-) strand; PAM type: NRG; PAM sequence: GGG
ccatcatgctgtctgtctct

SEQ ID NO: 8285 - DNA, 20 bp, Artificial Sequence
  Description of Artificial Sequence: Synthetic oligonucleotide
  Target: COL7A1; (-) strand; PAM type: NRG; PAM sequence: TGG
tccatcatgctgtctgtctc

SEQ ID NO: 8286 - DNA, 20 bp, Artificial Sequence
  Description of Artificial Sequence: Synthetic oligonucleotide
  Target: COL7A1; (-) strand; PAM type: NRG; PAM sequence: TGG
gagaaccgcctgccctcctg

SEQ ID NO: 8287 - DNA, 20 bp, Artificial Sequence
  Description of Artificial Sequence: Synthetic oligonucleotide
  Target: COL7A1; (-) strand; PAM type: NRG; PAM sequence: GAG
cagctgcaagctctcctgct

SEQ ID NO: 8288 - DNA, 20 bp, Artificial Sequence
  Description of Artificial Sequence: Synthetic oligonucleotide
  Target: COL7A1; (-) strand; PAM type: NRG; PAM sequence: AAG
ctgtttcctggatcagctgc

SEQ ID NO: 8289 - DNA, 20 bp, Artificial Sequence
  Description of Artificial Sequence: Synthetic oligonucleotide
  Target: COL7A1; (-) strand; PAM type: NRG; PAM sequence: CAG
tgcccttctgtttcctggat

SEQ ID NO: 8290 - DNA, 20 bp, Artificial Sequence
  Description of Artificial Sequence: Synthetic oligonucleotide
  Target: COL7A1; (-) strand; PAM type: NRG; PAM sequence: TGG
attcctgcccttctgtttcc

SEQ ID NO: 8291 - DNA, 20 bp, Artificial Sequence
  Description of Artificial Sequence: Synthetic oligonucleotide
  Target: COL7A1; (-) strand; PAM type: NRG; PAM sequence: GAG
ctggctgcttttctgcctct

SEQ ID NO: 8292 - DNA, 20 bp, Artificial Sequence
  Description of Artificial Sequence: Synthetic oligonucleotide
  Target: COL7A1; (-) strand; PAM type: NRG; PAM sequence: TGG
ccaggggactctgggatctc

SEQ ID NO: 8293 - DNA, 20 bp, Artificial Sequence
  Description of Artificial Sequence: Synthetic oligonucleotide
  Target: COL7A1; (-) strand; PAM type: NRG; PAM sequence: GGG
gcttggacccaggggactct

SEQ ID NO: 8294 - DNA, 20 bp, Artificial Sequence
  Description of Artificial Sequence: Synthetic oligonucleotide
  Target: COL7A1; (-) strand; PAM type: NRG; PAM sequence: TGG
ggcttggacccaggggactc

SEQ ID NO: 8295 - DNA, 20 bp, Artificial Sequence
  Description of Artificial Sequence: Synthetic oligonucleotide
  Target: COL7A1; (-) strand; PAM type: NRG; PAM sequence: GGG
tatggagggcttggacccag

SEQ ID NO: 8296 - DNA, 20 bp, Artificial Sequence
  Description of Artificial Sequence: Synthetic oligonucleotide
  Target: COL7A1; (-) strand; PAM type: NRG; PAM sequence: GGG
ttatggagggcttggaccca

SEQ ID NO: 8297 - DNA, 20 bp, Artificial Sequence
  Description of Artificial Sequence: Synthetic oligonucleotide
  Target: COL7A1; (-) strand; PAM type: NRG; PAM sequence: AGG
tttatggagggcttggaccc

SEQ ID NO: 8298 - DNA, 20 bp, Artificial Sequence
  Description of Artificial Sequence: Synthetic oligonucleotide
  Target: COL7A1; (-) strand; PAM type: NRG; PAM sequence: CAG
ctttatggagggcttggacc

SEQ ID NO: 8299 - DNA, 20 bp, Artificial Sequence
  Description of Artificial Sequence: Synthetic oligonucleotide
  Target: COL7A1; (-) strand; PAM type: NRG; PAM sequence: TGG
gtttggctttatggagggct

SEQ ID NO: 8300 - DNA, 20 bp, Artificial Sequence
  Description of Artificial Sequence: Synthetic oligonucleotide
  Target: COL7A1; (-) strand; PAM type: NRG; PAM sequence: GGG
gtggggtttggctttatgga

SEQ ID NO: 8301 - DNA, 20 bp, Artificial Sequence
  Description of Artificial Sequence: Synthetic oligonucleotide
  Target: COL7A1; (-) strand; PAM type: NRG; PAM sequence: AGG
tgtggggtttggctttatgg

SEQ ID NO: 8302 - DNA, 20 bp, Artificial Sequence
  Description of Artificial Sequence: Synthetic oligonucleotide
  Target: COL7A1; (-) strand; PAM type: NRG; PAM sequence: GAG
atgtggggtttggctttatg

SEQ ID NO: 8303 - DNA, 20 bp, Artificial Sequence
  Description of Artificial Sequence: Synthetic oligonucleotide
  Target: COL7A1; (-) strand; PAM type: NRG; PAM sequence: TGG
ggatgtggggtttggcttta

SEQ ID NO: 8304 - DNA, 20 bp, Artificial Sequence
  Description of Artificial Sequence: Synthetic oligonucleotide
  Target: COL7A1; (-) strand; PAM type: NRG; PAM sequence: TGG
ggttgagtggatgtggggtt

SEQ ID NO: 8305 - DNA, 20 bp, Artificial Sequence
  Description of Artificial Sequence: Synthetic oligonucleotide
  Target: COL7A1; (-) strand; PAM type: NRG; PAM sequence: GGG
ttggaggttgagtggatgtg

SEQ ID NO: 8306 - DNA, 20 bp, Artificial Sequence
  Description of Artificial Sequence: Synthetic oligonucleotide
  Target: COL7A1; (-) strand; PAM type: NRG; PAM sequence: GGG
cttggaggttgagtggatgt

SEQ ID NO: 8307 - DNA, 20 bp, Artificial Sequence
  Description of Artificial Sequence: Synthetic oligonucleotide
  Target: COL7A1; (-) strand; PAM type: NRG; PAM sequence: TGG
tcttggaggttgagtggatg

SEQ ID NO: 8308 - DNA, 20 bp, Artificial Sequence
  Description of Artificial Sequence: Synthetic oligonucleotide
  Target: COL7A1; (-) strand; PAM type: NRG; PAM sequence: TGG
gaagggtcttggaggttgag

SEQ ID NO: 8309 - DNA, 20 bp, Artificial Sequence
  Description of Artificial Sequence: Synthetic oligonucleotide
  Target: COL7A1; (-) strand; PAM type: NRG; PAM sequence: GAG
tgggaagggtcttggaggtt

SEQ ID NO: 8310 - DNA, 20 bp, Artificial Sequence
  Description of Artificial Sequence: Synthetic oligonucleotide
  Target: COL7A1; (-) strand; PAM type: NRG; PAM sequence: AGG
cgggatgggaagggtcttgg

SEQ ID NO: 8311 - DNA, 20 bp, Artificial Sequence
  Description of Artificial Sequence: Synthetic oligonucleotide
  Target: COL7A1; (-) strand; PAM type: NRG; PAM sequence: GAG
tcgggatgggaagggtcttg

SEQ ID NO: 8312 - DNA, 20 bp, Artificial Sequence
  Description of Artificial Sequence: Synthetic oligonucleotide
  Target: COL7A1; (-) strand; PAM type: NRG; PAM sequence: TGG
ggtcgggatgggaagggtct

SEQ ID NO: 8313 - DNA, 20 bp, Artificial Sequence
  Description of Artificial Sequence: Synthetic oligonucleotide
  Target: COL7A1; (-) strand; PAM type: NRG; PAM sequence: GGG
gggttgggtcgggatgggaa

SEQ ID NO: 8314 - DNA, 20 bp, Artificial Sequence
  Description of Artificial Sequence: Synthetic oligonucleotide
  Target: COL7A1; (-) strand; PAM type: NRG; PAM sequence: AGG
tgggttgggtcgggatggga

SEQ ID NO: 8315 - DNA, 20 bp, Artificial Sequence
  Description of Artificial Sequence: Synthetic oligonucleotide
  Target: COL7A1; (-) strand; PAM type: NRG; PAM sequence: AAG
ctgggttgggtcgggatggg

SEQ ID NO: 8316 - DNA, 20 bp, Artificial Sequence
  Description of Artificial Sequence: Synthetic oligonucleotide
  Target: COL7A1; (-) strand; PAM type: NRG; PAM sequence: GGG
ggactgggttgggtcgggat

SEQ ID NO: 8317 - DNA, 20 bp, Artificial Sequence
  Description of Artificial Sequence: Synthetic oligonucleotide
  Target: COL7A1; (-) strand; PAM type: NRG; PAM sequence: TGG
aggactgggttgggtcggga

SEQ ID NO: 8318 - DNA, 20 bp, Artificial Sequence
  Description of Artificial Sequence: Synthetic oligonucleotide
  Target: COL7A1; (-) strand; PAM type: NRG; PAM sequence: GGG
cggtaggactgggttgggtc

SEQ ID NO: 8319 - DNA, 20 bp, Artificial Sequence
  Description of Artificial Sequence: Synthetic oligonucleotide
  Target: COL7A1; (-) strand; PAM type: NRG; PAM sequence: CGG
gcggtaggactgggttgggt

SEQ ID NO: 8320 - DNA, 20 bp, Artificial Sequence
  Description of Artificial Sequence: Synthetic oligonucleotide
  Target: COL7A1; (-) strand; PAM type: NRG; PAM sequence: GGG
ggtggcggtaggactgggtt

SEQ ID NO: 8321 - DNA, 20 bp, Artificial Sequence
  Description of Artificial Sequence: Synthetic oligonucleotide
  Target: COL7A1; (-) strand; PAM type: NRG; PAM sequence: TGG
tggtggcggtaggactgggt

SEQ ID NO: 8322 - DNA, 20 bp, Artificial Sequence
  Description of Artificial Sequence: Synthetic oligonucleotide
  Target: COL7A1; (-) strand; PAM type: NRG; PAM sequence: GGG
cagctggtggcggtaggact

SEQ ID NO: 8323 - DNA, 20 bp, Artificial Sequence
  Description of Artificial Sequence: Synthetic oligonucleotide
  Target: COL7A1; (-) strand; PAM type: NRG; PAM sequence: TGG
gcagctggtggcggtaggac

SEQ ID NO: 8324 - DNA, 20 bp, Artificial Sequence
  Description of Artificial Sequence: Synthetic oligonucleotide
  Target: COL7A1; (-) strand; PAM type: NRG; PAM sequence: AGG
cagaagcagctggtggcggt

SEQ ID NO: 8325 - DNA, 20 bp, Artificial Sequence
  Description of Artificial Sequence: Synthetic oligonucleotide
  Target: COL7A1; (-) strand; PAM type: NRG; PAM sequence: TAG
ccagaagcagctggtggcgg

SEQ ID NO: 8326 - DNA, 20 bp, Artificial Sequence
  Description of Artificial Sequence: Synthetic oligonucleotide
  Target: COL7A1; (-) strand; PAM type: NRG; PAM sequence: CGG
accccagaagcagctggtgg

SEQ ID NO: 8327 - DNA, 20 bp, Artificial Sequence
  Description of Artificial Sequence: Synthetic oligonucleotide
  Target: COL7A1; (-) strand; PAM type: NRG; PAM sequence: TGG
cttaccccagaagcagctgg

SEQ ID NO: 8328 - DNA, 20 bp, Artificial Sequence
  Description of Artificial Sequence: Synthetic oligonucleotide
  Target: COL7A1; (-) strand; PAM type: NRG; PAM sequence: TGG
tgccttaccccagaagcagc

SEQ ID NO: 8329 - DNA, 20 bp, Artificial Sequence
  Description of Artificial Sequence: Synthetic oligonucleotide
  Target: COL7A1; (-) strand; PAM type: NRG; PAM sequence: CAG
aggctgccttaccccagaag

SEQ ID NO: 8330 - DNA, 20 bp, Artificial Sequence
  Description of Artificial Sequence: Synthetic oligonucleotide
  Target: COL7A1; (-) strand; PAM type: NRG; PAM sequence: AAG
agcaggctgccttaccccag

SEQ ID NO: 8331 - DNA, 20 bp, Artificial Sequence
  Description of Artificial Sequence: Synthetic oligonucleotide
  Target: COL7A1; (-) strand; PAM type: NRG; PAM sequence: CAG
cacagcaggctgccttaccc

SEQ ID NO: 8332 - DNA, 20 bp, Artificial Sequence
  Description of Artificial Sequence: Synthetic oligonucleotide
  Target: COL7A1; (-) strand; PAM type: NRG; PAM sequence: AGG
cagccccaggcagccacagc

SEQ ID NO: 8333 - DNA, 20 bp, Artificial Sequence
  Description of Artificial Sequence: Synthetic oligonucleotide
  Target: COL7A1; (-) strand; PAM type: NRG; PAM sequence: CAG
ccagccccaggcagccacag

SEQ ID NO: 8334 - DNA, 20 bp, Artificial Sequence
  Description of Artificial Sequence: Synthetic oligonucleotide
  Target: COL7A1; (-) strand; PAM type: NRG; PAM sequence: CAG
gccccagccccaggcagcca

SEQ ID NO: 8335 - DNA, 20 bp, Artificial Sequence
  Description of Artificial Sequence: Synthetic oligonucleotide
  Target: COL7A1; (-) strand; PAM type: NRG; PAM sequence: CAG
tgcctggccccagccccagg

SEQ ID NO: 8336 - DNA, 20 bp, Artificial Sequence
  Description of Artificial Sequence: Synthetic oligonucleotide
  Target: COL7A1; (-) strand; PAM type: NRG; PAM sequence: AGG
tagtgcctggccccagcccc

SEQ ID NO: 8337 - DNA, 20 bp, Artificial Sequence
  Description of Artificial Sequence: Synthetic oligonucleotide
  Target: COL7A1; (-) strand; PAM type: NRG; PAM sequence: CAG
gtagtgcctggccccagccc

SEQ ID NO: 8338 - DNA, 20 bp, Artificial Sequence
  Description of Artificial Sequence: Synthetic oligonucleotide
  Target: COL7A1; (-) strand; PAM type: NRG; PAM sequence: CAG
aggacagtagtgcctggccc

SEQ ID NO: 8339 - DNA, 20 bp, Artificial Sequence
  Description of Artificial Sequence: Synthetic oligonucleotide
  Target: COL7A1; (-) strand; PAM type: NRG; PAM sequence: TGG
gaccacaggacagtagtgcc

SEQ ID NO: 8340 - DNA, 20 bp, Artificial Sequence
  Description of Artificial Sequence: Synthetic oligonucleotide
  Target: COL7A1; (-) strand; PAM type: NRG; PAM sequence: TAG
agggtcagaccacaggacag

SEQ ID NO: 8341 - DNA, 20 bp, Artificial Sequence
  Description of Artificial Sequence: Synthetic oligonucleotide
  Target: COL7A1; (-) strand; PAM type: NRG; PAM sequence: CAG
tagagggtcagaccacagga

SEQ ID NO: 8342 - DNA, 20 bp, Artificial Sequence
  Description of Artificial Sequence: Synthetic oligonucleotide
  Target: COL7A1; (-) strand; PAM type: NRG; PAM sequence: AGG
ggggtagagggtcagaccac

SEQ ID NO: 8343 - DNA, 20 bp, Artificial Sequence
  Description of Artificial Sequence: Synthetic oligonucleotide
  Target: COL7A1; (-) strand; PAM type: NRG; PAM sequence: CAG
cggggtagagggtcagacca

SEQ ID NO: 8344 - DNA, 20 bp, Artificial Sequence
  Description of Artificial Sequence: Synthetic oligonucleotide
  Target: COL7A1; (-) strand; PAM type: NRG; PAM sequence: CAG
cctgaagcggggtagagggt

SEQ ID NO: 8345 - DNA, 20 bp, Artificial Sequence
  Description of Artificial Sequence: Synthetic oligonucleotide
  Target: COL7A1; (-) strand; PAM type: NRG; PAM sequence: GGG
gggccctgaagcggggtaga

SEQ ID NO: 8346 - DNA, 20 bp, Artificial Sequence
  Description of Artificial Sequence: Synthetic oligonucleotide
  Target: COL7A1; (-) strand; PAM type: NRG; PAM sequence: AGG
tgggccctgaagcggggtag

SEQ ID NO: 8347 - DNA, 20 bp, Artificial Sequence
  Description of Artificial Sequence: Synthetic oligonucleotide
  Target: COL7A1; (-) strand; PAM type: NRG; PAM sequence: GAG
atgggccctgaagcggggta

SEQ ID NO: 8348 - DNA, 20 bp, Artificial Sequence
  Description of Artificial Sequence: Synthetic oligonucleotide
  Target: COL7A1; (-) strand; PAM type: NRG; PAM sequence: TAG
aaatgggccctgaagcgggg

SEQ ID NO: 8349 - DNA, 20 bp, Artificial Sequence
  Description of Artificial Sequence: Synthetic oligonucleotide
  Target: COL7A1; (-) strand; PAM type: NRG; PAM sequence: GGG
gataaatgggccctgaagcg

SEQ ID NO: 8350 - DNA, 20 bp, Artificial Sequence
  Description of Artificial Sequence: Synthetic oligonucleotide
  Target: COL7A1; (-) strand; PAM type: NRG; PAM sequence: GGG
agataaatgggccctgaagc

SEQ ID NO: 8351 - DNA, 20 bp, Artificial Sequence
  Description of Artificial Sequence: Synthetic oligonucleotide
  Target: COL7A1; (-) strand; PAM type: NRG; PAM sequence: CGG
gagataaatgggccctgaag

SEQ ID NO: 8352 - DNA, 20 bp, Artificial Sequence
  Description of Artificial Sequence: Synthetic oligonucleotide
  Target: COL7A1; (-) strand; PAM type: NRG; PAM sequence: AAG
agggagataaatgggccctg

SEQ ID NO: 8353 - DNA, 20 bp, Artificial Sequence
  Description of Artificial Sequence: Synthetic oligonucleotide
  Target: COL7A1; (-) strand; PAM type: NRG; PAM sequence: GGG
gggggctgagggagataaat

SEQ ID NO: 8354 - DNA, 20 bp, Artificial Sequence
  Description of Artificial Sequence: Synthetic oligonucleotide
  Target: COL7A1; (-) strand; PAM type: NRG; PAM sequence: TGG
agggggctgagggagataaa

SEQ ID NO: 8355 - DNA, 20 bp, Artificial Sequence
  Description of Artificial Sequence: Synthetic oligonucleotide
  Target: COL7A1; (-) strand; PAM type: NRG; PAM sequence: GAG
cccaccccagggggctgagg

SEQ ID NO: 8356 - DNA, 20 bp, Artificial Sequence
  Description of Artificial Sequence: Synthetic oligonucleotide
  Target: COL7A1; (-) strand; PAM type: NRG; PAM sequence: GGG
ctcccaccccagggggctga

SEQ ID NO: 8357 - DNA, 20 bp, Artificial Sequence
  Description of Artificial Sequence: Synthetic oligonucleotide
  Target: COL7A1; (-) strand; PAM type: NRG; PAM sequence: AGG
gctcccaccccagggggctg

SEQ ID NO: 8358 - DNA, 20 bp, Artificial Sequence
  Description of Artificial Sequence: Synthetic oligonucleotide
  Target: COL7A1; (-) strand; PAM type: NRG; PAM sequence: GAG
agctcccaccccagggggct

SEQ ID NO: 8359 - DNA, 20 bp, Artificial Sequence
  Description of Artificial Sequence: Synthetic oligonucleotide
  Target: COL7A1; (-) strand; PAM type: NRG; PAM sequence: GGG
gtaccagctcccaccccagg

SEQ ID NO: 8360 - DNA, 20 bp, Artificial Sequence
  Description of Artificial Sequence: Synthetic oligonucleotide
  Target: COL7A1; (-) strand; PAM type: NRG; PAM sequence: GGG
tgtaccagctcccaccccag

SEQ ID NO: 8361 - DNA, 20 bp, Artificial Sequence
  Description of Artificial Sequence: Synthetic oligonucleotide
  Target: COL7A1; (-) strand; PAM type: NRG; PAM sequence: GGG
atgtaccagctcccacccca

SEQ ID NO: 8362 - DNA, 20 bp, Artificial Sequence
  Description of Artificial Sequence: Synthetic oligonucleotide
  Target: COL7A1; (-) strand; PAM type: NRG; PAM sequence: AGG
catgtaccagctcccacccc

SEQ ID NO: 8363 - DNA, 20 bp, Artificial Sequence
  Description of Artificial Sequence: Synthetic oligonucleotide
  Target: COL7A1; (-) strand; PAM type: NRG; PAM sequence: CAG
gcatgtaccagctcccaccc

SEQ ID NO: 8364 - DNA, 20 bp, Artificial Sequence
  Description of Artificial Sequence: Synthetic oligonucleotide
  Target: COL7A1; (-) strand; PAM type: NRG; PAM sequence: CAG
tcatgccaggaagcatgtac

SEQ ID NO: 8365 - DNA, 20 bp, Artificial Sequence
  Description of Artificial Sequence: Synthetic oligonucleotide
  Target: COL7A1; (-) strand; PAM type: NRG; PAM sequence: AAG
gggggctgcctcatgccagg

SEQ ID NO: 8366 - DNA, 20 bp, Artificial Sequence
  Description of Artificial Sequence: Synthetic oligonucleotide
  Target: COL7A1; (-) strand; PAM type: NRG; PAM sequence: AGG
gtggggggctgcctcatgcc

SEQ ID NO: 8367 - DNA, 20 bp, Artificial Sequence
  Description of Artificial Sequence: Synthetic oligonucleotide
  Target: COL7A1; (-) strand; PAM type: NRG; PAM sequence: CAG
ggtggggggctgcctcatgc

SEQ ID NO: 8368 - DNA, 20 bp, Artificial Sequence
  Description of Artificial Sequence: Synthetic oligonucleotide
  Target: COL7A1; (-) strand; PAM type: NRG; PAM sequence: GGG
agggatgagtcataggtggg

SEQ ID NO: 8369 - DNA, 20 bp, Artificial Sequence
  Description of Artificial Sequence: Synthetic oligonucleotide
  Target: COL7A1; (-) strand; PAM type: NRG; PAM sequence: GGG
gagggatgagtcataggtgg

SEQ ID NO: 8370 - DNA, 20 bp, Artificial Sequence
  Description of Artificial Sequence: Synthetic oligonucleotide
  Target: COL7A1; (-) strand; PAM type: NRG; PAM sequence: GGG
ggagggatgagtcataggtg

SEQ ID NO: 8371 - DNA, 20 bp, Artificial Sequence
  Description of Artificial Sequence: Synthetic oligonucleotide
  Target: COL7A1; (-) strand; PAM type: NRG; PAM sequence: GGG
gggagggatgagtcataggt

SEQ ID NO: 8372 - DNA, 20 bp, Artificial Sequence
  Description of Artificial Sequence: Synthetic oligonucleotide
  Target: COL7A1; (-) strand; PAM type: NRG; PAM sequence: TGG
cgggagggatgagtcatagg

SEQ ID NO: 8373 - DNA, 20 bp, Artificial Sequence
  Description of Artificial Sequence: Synthetic oligonucleotide
  Target: COL7A1; (-) strand; PAM type: NRG; PAM sequence: AGG
ccccgggagggatgagtcat

SEQ ID NO: 8374 - DNA, 20 bp, Artificial Sequence
  Description of Artificial Sequence: Synthetic oligonucleotide
  Target: COL7A1; (-) strand; PAM type: NRG; PAM sequence: TAG
cccccgggagggatgagtca

SEQ ID NO: 8375 - DNA, 20 bp, Artificial Sequence
  Description of Artificial Sequence: Synthetic oligonucleotide
  Target: COL7A1; (-) strand; PAM type: NRG; PAM sequence: GAG
aggacacccccgggagggat

SEQ ID NO: 8376 - DNA, 20 bp, Artificial Sequence
  Description of Artificial Sequence: Synthetic oligonucleotide
  Target: COL7A1; (-) strand; PAM type: NRG; PAM sequence: GGG
ggctaaggacacccccggga

SEQ ID NO: 8377 - DNA, 20 bp, Artificial Sequence
  Description of Artificial Sequence: Synthetic oligonucleotide
  Target: COL7A1; (-) strand; PAM type: NRG; PAM sequence: AGG
gggctaaggacacccccggg

SEQ ID NO: 8378 - DNA, 20 bp, Artificial Sequence
  Description of Artificial Sequence: Synthetic oligonucleotide
  Target: COL7A1; (-) strand; PAM type: NRG; PAM sequence: GAG
ggggctaaggacacccccgg

SEQ ID NO: 8379 - DNA, 20 bp, Artificial Sequence
  Description of Artificial Sequence: Synthetic oligonucleotide
  Target: COL7A1; (-) strand; PAM type: NRG; PAM sequence: GGG
tgggggctaaggacaccccc

SEQ ID NO: 8380 - DNA, 20 bp, Artificial Sequence
  Description of Artificial Sequence: Synthetic oligonucleotide
  Target: COL7A1; (-) strand; PAM type: NRG; PAM sequence: CGG
gtgggggctaaggacacccc

SEQ ID NO: 8381 - DNA, 20 bp, Artificial Sequence
  Description of Artificial Sequence: Synthetic oligonucleotide
  Target: COL7A1; (-) strand; PAM type: NRG; PAM sequence: AGG
agtagatagggtgggggcta

SEQ ID NO: 8382 - DNA, 20 bp, Artificial Sequence
  Description of Artificial Sequence: Synthetic oligonucleotide
  Target: COL7A1; (-) strand; PAM type: NRG; PAM sequence: AAG
gagtagatagggtgggggct

SEQ ID NO: 8383 - DNA, 20 bp, Artificial Sequence
  Description of Artificial Sequence: Synthetic oligonucleotide
  Target: COL7A1; (-) strand; PAM type: NRG; PAM sequence: GGG
gaaaagagtagatagggtgg

SEQ ID NO: 8384 - DNA, 20 bp, Artificial Sequence
  Description of Artificial Sequence: Synthetic oligonucleotide
  Target: COL7A1; (-) strand; PAM type: NRG; PAM sequence: GGG
ggaaaagagtagatagggtg

SEQ ID NO: 8385 - DNA, 20 bp, Artificial Sequence
  Description of Artificial Sequence: Synthetic oligonucleotide
  Target: COL7A1; (-) strand; PAM type: NRG; PAM sequence: GGG
cggaaaagagtagatagggt

SEQ ID NO: 8386 - DNA, 20 bp, Artificial Sequence
  Description of Artificial Sequence: Synthetic oligonucleotide
  Target: COL7A1; (-) strand; PAM type: NRG; PAM sequence: TGG
ccggaaaagagtagataggg

SEQ ID NO: 8387 - DNA, 20 bp, Artificial Sequence
  Description of Artificial Sequence: Synthetic oligonucleotide
  Target: COL7A1; (-) strand; PAM type: NRG; PAM sequence: GGG
tccccggaaaagagtagata

SEQ ID NO: 8388 - DNA, 20 bp, Artificial Sequence
  Description of Artificial Sequence: Synthetic oligonucleotide
  Target: COL7A1; (-) strand; PAM type: NRG; PAM sequence: AGG
gtccccggaaaagagtagat

SEQ ID NO: 8389 - DNA, 20 bp, Artificial Sequence
  Description of Artificial Sequence: Synthetic oligonucleotide
  Target: COL7A1; (-) strand; PAM type: NRG; PAM sequence: TAG
tgtccccggaaaagagtaga

SEQ ID NO: 8390 - DNA, 20 bp, Artificial Sequence
  Description of Artificial Sequence: Synthetic oligonucleotide
  Target: COL7A1; (-) strand; PAM type: NRG; PAM sequence: TAG
aacttgtccccggaaaagag

SEQ ID NO: 8391 - DNA, 20 bp, Artificial Sequence
  Description of Artificial Sequence: Synthetic oligonucleotide
  Target: COL7A1; (-) strand; PAM type: NRG; PAM sequence: GAG
cccaacttgtccccggaaaa

SEQ ID NO: 8392 - DNA, 20 bp, Artificial Sequence
  Description of Artificial Sequence: Synthetic oligonucleotide
  Target: COL7A1; (-) strand; PAM type: NRG; PAM sequence: AAG
tccccaacttgtccccggaa

SEQ ID NO: 8393 - DNA, 20 bp, Artificial Sequence
  Description of Artificial Sequence: Synthetic oligonucleotide
  Target: COL7A1; (-) strand; PAM type: NRG; PAM sequence: CGG
ctcagtccccaacttgtccc

SEQ ID NO: 8394 - DNA, 20 bp, Artificial Sequence
  Description of Artificial Sequence: Synthetic oligonucleotide
  Target: COL7A1; (-) strand; PAM type: NRG; PAM sequence: CAG
ggtcactgtcttgtgattct

SEQ ID NO: 8395 - DNA, 20 bp, Artificial Sequence
  Description of Artificial Sequence: Synthetic oligonucleotide
  Target: COL7A1; (-) strand; PAM type: NRG; PAM sequence: TGG
agagtccctctgcccagtcc

SEQ ID NO: 8396 - DNA, 20 bp, Artificial Sequence
  Description of Artificial Sequence: Synthetic oligonucleotide
  Target: COL7A1; (-) strand; PAM type: NRG; PAM sequence: CAG
gggtacagagtccctctgcc

SEQ ID NO: 8397 - DNA, 20 bp, Artificial Sequence
  Description of Artificial Sequence: Synthetic oligonucleotide
  Target: COL7A1; (-) strand; PAM type: NRG; PAM sequence: GAG
tattattctgcatgggtaca

SEQ ID NO: 8398 - DNA, 20 bp, Artificial Sequence
  Description of Artificial Sequence: Synthetic oligonucleotide
  Target: COL7A1; (-) strand; PAM type: NRG; PAM sequence: CAG
ggtattattctgcatgggta

SEQ ID NO: 8399 - DNA, 20 bp, Artificial Sequence
  Description of Artificial Sequence: Synthetic oligonucleotide
  Target: COL7A1; (-) strand; PAM type: NRG; PAM sequence: GGG
gggttggtattattctgcat

SEQ ID NO: 8400 - DNA, 20 bp, Artificial Sequence
  Description of Artificial Sequence: Synthetic oligonucleotide
  Target: COL7A1; (-) strand; PAM type: NRG; PAM sequence: TGG
ggggttggtattattctgca

SEQ ID NO: 8401 - DNA, 20 bp, Artificial Sequence
  Description of Artificial Sequence: Synthetic oligonucleotide
  Target: COL7A1; (-) strand; PAM type: NRG; PAM sequence: TGG
gaaggttttccttggggggt

SEQ ID NO: 8402 - DNA, 20 bp, Artificial Sequence
  Description of Artificial Sequence: Synthetic oligonucleotide
  Target: COL7A1; (-) strand; PAM type: NRG; PAM sequence: GGG
gggggaaggttttccttggg

SEQ ID NO: 8403 - DNA, 20 bp, Artificial Sequence
  Description of Artificial Sequence: Synthetic oligonucleotide
  Target: COL7A1; (-) strand; PAM type: NRG; PAM sequence: GGG
agggggaaggttttccttgg

SEQ ID NO: 8404 - DNA, 20 bp, Artificial Sequence
  Description of Artificial Sequence: Synthetic oligonucleotide
  Target: COL7A1; (-) strand; PAM type: NRG; PAM sequence: GGG
aagggggaaggttttccttg

SEQ ID NO: 8405 - DNA, 20 bp, Artificial Sequence
  Description of Artificial Sequence: Synthetic oligonucleotide
  Target: COL7A1; (-) strand; PAM type: NRG; PAM sequence: GGG
caagggggaaggttttcctt

SEQ ID NO: 8406 - DNA, 20 bp, Artificial Sequence
  Description of Artificial Sequence: Synthetic oligonucleotide
  Target: COL7A1; (-) strand; PAM type: NRG; PAM sequence: TGG
tcaagggggaaggttttcct

SEQ ID NO: 8407 - DNA, 20 bp, Artificial Sequence
  Description of Artificial Sequence: Synthetic oligonucleotide
  Target: COL7A1; (-) strand; PAM type: NRG; PAM sequence: AGG
atggggggtttcaaggggga

SEQ ID NO: 8408 - DNA, 20 bp, Artificial Sequence
  Description of Artificial Sequence: Synthetic oligonucleotide
  Target: COL7A1; (-) strand; PAM type: NRG; PAM sequence: AAG
gatggggggtttcaaggggg

SEQ ID NO: 8409 - DNA, 20 bp, Artificial Sequence
  Description of Artificial Sequence: Synthetic oligonucleotide
  Target: COL7A1; (-) strand; PAM type: NRG; PAM sequence: GGG
gaagatggggggtttcaagg

SEQ ID NO: 8410 - DNA, 20 bp, Artificial Sequence
  Description of Artificial Sequence: Synthetic oligonucleotide
  Target: COL7A1; (-) strand; PAM type: NRG; PAM sequence: GGG
ggaagatggggggtttcaag

SEQ ID NO: 8411 - DNA, 20 bp, Artificial Sequence
  Description of Artificial Sequence: Synthetic oligonucleotide
  Target: COL7A1; (-) strand; PAM type: NRG; PAM sequence: GGG
gggaagatggggggtttcaa

SEQ ID NO: 8412 - DNA, 20 bp, Artificial Sequence
  Description of Artificial Sequence: Synthetic oligonucleotide
  Target: COL7A1; (-) strand; PAM type: NRG; PAM sequence: AGG
tgggaagatggggggtttca

SEQ ID NO: 8413 - DNA, 20 bp, Artificial Sequence
  Description of Artificial Sequence: Synthetic oligonucleotide
  Target: COL7A1; (-) strand; PAM type: NRG; PAM sequence: AAG
ttgggaagatggggggtttc

SEQ ID NO: 8414 - DNA, 20 bp, Artificial Sequence
  Description of Artificial Sequence: Synthetic oligonucleotide
  Target: COL7A1; (-) strand; PAM type: NRG; PAM sequence: GGG
tgactgtttgggaagatggg

SEQ ID NO: 8415 - DNA, 20 bp, Artificial Sequence
  Description of Artificial Sequence: Synthetic oligonucleotide
  Target: COL7A1; (-) strand; PAM type: NRG; PAM sequence: GGG
gtgactgtttgggaagatgg

SEQ ID NO: 8416 - DNA, 20 bp, Artificial Sequence
  Description of Artificial Sequence: Synthetic oligonucleotide
  Target: COL7A1; (-) strand; PAM type: NRG; PAM sequence: GGG
tgtgactgtttgggaagatg

SEQ ID NO: 8417 - DNA, 20 bp, Artificial Sequence
  Description of Artificial Sequence: Synthetic oligonucleotide
  Target: COL7A1; (-) strand; PAM type: NRG; PAM sequence: GGG
ttgtgactgtttgggaagat

SEQ ID NO: 8418 - DNA, 20 bp, Artificial Sequence
  Description of Artificial Sequence: Synthetic oligonucleotide
  Target: COL7A1; (-) strand; PAM type: NRG; PAM sequence: TGG
gttgtgactgtttgggaaga

SEQ ID NO: 8419 - DNA, 20 bp, Artificial Sequence
  Description of Artificial Sequence: Synthetic oligonucleotide
  Target: COL7A1; (-) strand; PAM type: NRG; PAM sequence: AAG
tcctgttgtgactgtttggg

SEQ ID NO: 8420 - DNA, 20 bp, Artificial Sequence
  Description of Artificial Sequence: Synthetic oligonucleotide
  Target: COL7A1; (-) strand; PAM type: NRG; PAM sequence: GGG
ggctcctgttgtgactgttt

SEQ ID NO: 8421 - DNA, 20 bp, Artificial Sequence
  Description of Artificial Sequence: Synthetic oligonucleotide
  Target: COL7A1; (-) strand; PAM type: NRG; PAM sequence: TGG
aggctcctgttgtgactgtt

SEQ ID NO: 8422 - DNA, 20 bp, Artificial Sequence
  Description of Artificial Sequence: Synthetic oligonucleotide
  Target: COL7A1; (-) strand; PAM type: NRG; PAM sequence: AGG
attaaagctgctgttttaaa

SEQ ID NO: 8423 - DNA, 20 bp, Artificial Sequence
  Description of Artificial Sequence: Synthetic oligonucleotide
  Target: COL7A1; (-) strand; PAM type: NRG; PAM sequence: AAG
cattaaagctgctgttttaa

SEQ ID NO: 8424 - DNA, 20 bp, Artificial Sequence
  Description of Artificial Sequence: Synthetic oligonucleotide
  Target: COL7A1; (-) strand; PAM type: NRG; PAM sequence: AAG
gctgattctggggggcatta

SEQ ID NO: 8425 - DNA, 20 bp, Artificial Sequence
  Description of Artificial Sequence: Synthetic oligonucleotide
  Target: COL7A1; (-) strand; PAM type: NRG; PAM sequence: GGG
gacatggtgctgattctggg

SEQ ID NO: 8426 - DNA, 20 bp, Artificial Sequence
  Description of Artificial Sequence: Synthetic oligonucleotide
  Target: COL7A1; (-) strand; PAM type: NRG; PAM sequence: GGG
tgacatggtgctgattctgg

SEQ ID NO: 8427 - DNA, 20 bp, Artificial Sequence
  Description of Artificial Sequence: Synthetic oligonucleotide
  Target: COL7A1; (-) strand; PAM type: NRG; PAM sequence: GGG
atgacatggtgctgattctg

SEQ ID NO: 8428 - DNA, 20 bp, Artificial Sequence
  Description of Artificial Sequence: Synthetic oligonucleotide
  Target: COL7A1; (-) strand; PAM type: NRG; PAM sequence: GGG
gatgacatggtgctgattct

SEQ ID NO: 8429 - DNA, 20 bp, Artificial Sequence
  Description of Artificial Sequence: Synthetic oligonucleotide
  Target: COL7A1; (-) strand; PAM type: NRG; PAM sequence: TGG
tgatgacatggtgctgattc

SEQ ID NO: 8430 - DNA, 20 bp, Artificial Sequence
  Description of Artificial Sequence: Synthetic oligonucleotide
  Target: COL7A1; (-) strand; PAM type: NRG; PAM sequence: TGG
gacccaagcctgtgatgaca

SEQ ID NO: 8431 - DNA, 20 bp, Artificial Sequence
  Description of Artificial Sequence: Synthetic oligonucleotide
  Target: COL7A1; (-) strand; PAM type: NRG; PAM sequence: AAG
tctgacccgccccttgaccc

SEQ ID NO: 8432 - DNA, 20 bp, Artificial Sequence
  Description of Artificial Sequence: Synthetic oligonucleotide
  Target: COL7A1; (-) strand; PAM type: NRG; PAM sequence: TGG
gggcagtgagcggatgtgac

SEQ ID NO: 8433 - DNA, 20 bp, Artificial Sequence
  Description of Artificial Sequence: Synthetic oligonucleotide
  Target: COL7A1; (-) strand; PAM type: NRG; PAM sequence: CGG
gggtggctgtgggcagtgag

SEQ ID NO: 8434 - DNA, 20 bp, Artificial Sequence
  Description of Artificial Sequence: Synthetic oligonucleotide
  Target: COL7A1; (-) strand; PAM type: NRG; PAM sequence: GAG
ggggggtggctgtgggcagt

SEQ ID NO: 8435 - DNA, 20 bp, Artificial Sequence
  Description of Artificial Sequence: Synthetic oligonucleotide
  Target: COL7A1; (-) strand; PAM type: NRG; PAM sequence: CAG
tgtgggggggtggctgtggg

SEQ ID NO: 8436 - DNA, 20 bp, Artificial Sequence
  Description of Artificial Sequence: Synthetic oligonucleotide
  Target: COL7A1; (-) strand; PAM type: NRG; PAM sequence: GGG
cactgtgggggggtggctgt

SEQ ID NO: 8437 - DNA, 20 bp, Artificial Sequence
  Description of Artificial Sequence: Synthetic oligonucleotide
  Target: COL7A1; (-) strand; PAM type: NRG; PAM sequence: TGG
tcactgtgggggggtggctg

SEQ ID NO: 8438 - DNA, 20 bp, Artificial Sequence
  Description of Artificial Sequence: Synthetic oligonucleotide
  Target: COL7A1; (-) strand; PAM type: NRG; PAM sequence: TGG
gatgactcactgtggggggg

SEQ ID NO: 8439 - DNA, 20 bp, Artificial Sequence
  Description of Artificial Sequence: Synthetic oligonucleotide
  Target: COL7A1; (-) strand; PAM type: NRG; PAM sequence: GGG
gcagatgactcactgtgggg

SEQ ID NO: 8440 - DNA, 20 bp, Artificial Sequence
  Description of Artificial Sequence: Synthetic oligonucleotide
  Target: COL7A1; (-) strand; PAM type: NRG; PAM sequence: GGG
ggcagatgactcactgtggg

SEQ ID NO: 8441 - DNA, 20 bp, Artificial Sequence
  Description of Artificial Sequence: Synthetic oligonucleotide
  Target: COL7A1; (-) strand; PAM type: NRG; PAM sequence: GGG
tggcagatgactcactgtgg

SEQ ID NO: 8442 - DNA, 20 bp, Artificial Sequence
  Description of Artificial Sequence: Synthetic oligonucleotide
  Target: COL7A1; (-) strand; PAM type: NRG; PAM sequence: GGG
ctggcagatgactcactgtg

SEQ ID NO: 8443 - DNA, 20 bp, Artificial Sequence
  Description of Artificial Sequence: Synthetic oligonucleotide
  Target: COL7A1; (-) strand; PAM type: NRG; PAM sequence: GGG
cctggcagatgactcactgt

SEQ ID NO: 8444 - DNA, 20 bp, Artificial Sequence
  Description of Artificial Sequence: Synthetic oligonucleotide
  Target: COL7A1; (-) strand; PAM type: NRG; PAM sequence: TGG
ccctggcagatgactcactg

SEQ ID NO: 8445 - DNA, 20 bp, Artificial Sequence
  Description of Artificial Sequence: Synthetic oligonucleotide
  Target: COL7A1; (-) strand; PAM type: NRG; PAM sequence: CAG
tgtggctcctgccaccctgg

SEQ ID NO: 8446 - DNA, 20 bp, Artificial Sequence
  Description of Artificial Sequence: Synthetic oligonucleotide
  Target: COL7A1; (-) strand; PAM type: NRG; PAM sequence: TGG
cattgtggctcctgccaccc

SEQ ID NO: 8447 - DNA, 20 bp, Artificial Sequence
  Description of Artificial Sequence: Synthetic oligonucleotide
  Target: COL7A1; (-) strand; PAM type: NRG; PAM sequence: TGG
ctgtggacaaacccccattg

SEQ ID NO: 8448 - DNA, 20 bp, Artificial Sequence
  Description of Artificial Sequence: Synthetic oligonucleotide
  Target: COL7A1; (-) strand; PAM type: NRG; PAM sequence: TGG
gggtctagccttcccccctg

SEQ ID NO: 8449 - DNA, 20 bp, Artificial Sequence
  Description of Artificial Sequence: Synthetic oligonucleotide
  Target: COL7A1; (-) strand; PAM type: NRG; PAM sequence: TAG
gtgacttggtcccgtgggtc

SEQ ID NO: 8450 - DNA, 20 bp, Artificial Sequence
  Description of Artificial Sequence: Synthetic oligonucleotide
  Target: COL7A1; (-) strand; PAM type: NRG; PAM sequence: GGG
tttcagtgacttggtcccgt

SEQ ID NO: 8451 - DNA, 20 bp, Artificial Sequence
  Description of Artificial Sequence: Synthetic oligonucleotide
  Target: COL7A1; (-) strand; PAM type: NRG; PAM sequence: TGG
atttcagtgacttggtcccg

SEQ ID NO: 8452 - DNA, 20 bp, Artificial Sequence
  Description of Artificial Sequence: Synthetic oligonucleotide
  Target: COL7A1; (-) strand; PAM type: NRG; PAM sequence: TGG
cgtccgttatttcagtgact

SEQ ID NO: 8453 - DNA, 20 bp, Artificial Sequence
  Description of Artificial Sequence: Synthetic oligonucleotide
  Target: COL7A1; (-) strand; PAM type: NRG; PAM sequence: CAG
cgtgtgcacgtccgttattt

SEQ ID NO: 8454 - DNA, 20 bp, Artificial Sequence
  Description of Artificial Sequence: Synthetic oligonucleotide
  Target: COL7A1; (-) strand; PAM type: NRG; PAM sequence: GAG
ctagaggcttgtgtgcacgt

SEQ ID NO: 8455 - DNA, 20 bp, Artificial Sequence
  Description of Artificial Sequence: Synthetic oligonucleotide
  Target: COL7A1; (-) strand; PAM type: NRG; PAM sequence: AGG
gtccctccccttggtgctag

SEQ ID NO: 8456 - DNA, 20 bp, Artificial Sequence
  Description of Artificial Sequence: Synthetic oligonucleotide
  Target: COL7A1; (-) strand; PAM type: NRG; PAM sequence: GAG
tgtccctccccttggtgcta

SEQ ID NO: 8457 - DNA, 20 bp, Artificial Sequence
  Description of Artificial Sequence: Synthetic oligonucleotide
  Target: COL7A1; (-) strand; PAM type: NRG; PAM sequence: TAG
actgtccctccccttggtgc

SEQ ID NO: 8458 - DNA, 20 bp, Artificial Sequence
  Description of Artificial Sequence: Synthetic oligonucleotide
  Target: COL7A1; (-) strand; PAM type: NRG; PAM sequence: TGG
aaccccactgtccctcccct

SEQ ID NO: 8459 - DNA, 20 bp, Artificial Sequence
  Description of Artificial Sequence: Synthetic oligonucleotide
  Target: COL7A1; (-) strand; PAM type: NRG; PAM sequence: CAG
tggaggagtcggggtctcag

SEQ ID NO: 8460 - DNA, 20 bp, Artificial Sequence
  Description of Artificial Sequence: Synthetic oligonucleotide
  Target: COL7A1; (-) strand; PAM type: NRG; PAM sequence: CAG
ccctggaggagtcggggtct

SEQ ID NO: 8461 - DNA, 20 bp, Artificial Sequence
  Description of Artificial Sequence: Synthetic oligonucleotide
  Target: COL7A1; (-) strand; PAM type: NRG; PAM sequence: GGG
agcatcccctggaggagtcg

SEQ ID NO: 8462 - DNA, 20 bp, Artificial Sequence
  Description of Artificial Sequence: Synthetic oligonucleotide
  Target: COL7A1; (-) strand; PAM type: NRG; PAM sequence: GGG
cagcatcccctggaggagtc

SEQ ID NO: 8463 - DNA, 20 bp, Artificial Sequence
  Description of Artificial Sequence: Synthetic oligonucleotide
  Target: COL7A1; (-) strand; PAM type: NRG; PAM sequence: CGG
tcagcatcccctggaggagt

SEQ ID NO: 8464 - DNA, 20 bp, Artificial Sequence
  Description of Artificial Sequence: Synthetic oligonucleotide
  Target: COL7A1; (-) strand; PAM type: NRG; PAM sequence: GAG
agattcagcatcccctggag

SEQ ID NO: 8465 - DNA, 20 bp, Artificial Sequence
  Description of Artificial Sequence: Synthetic oligonucleotide
  Target: COL7A1; (-) strand; PAM type: NRG; PAM sequence: AGG
tgagattcagcatcccctgg

SEQ ID NO: 8466 - DNA, 20 bp, Artificial Sequence
  Description of Artificial Sequence: Synthetic oligonucleotide
  Target: COL7A1; (-) strand; PAM type: NRG; PAM sequence: GAG
ctgagattcagcatcccctg

SEQ ID NO: 8467 - DNA, 20 bp, Artificial Sequence
  Description of Artificial Sequence: Synthetic oligonucleotide
  Target: COL7A1; (-) strand; PAM type: NRG; PAM sequence: TGG
agctgagattcagcatcccc

SEQ ID NO: 8468 - DNA, 20 bp, Artificial Sequence
  Description of Artificial Sequence: Synthetic oligonucleotide
  Target: COL7A1; (-) strand; PAM type: NRG; PAM sequence: CAG
ccagataatgagctgagatt

SEQ ID NO: 8469 - DNA, 20 bp, Artificial Sequence
  Description of Artificial Sequence: Synthetic oligonucleotide
  Target: COL7A1; (-) strand; PAM type: NRG; PAM sequence: GAG
tgaggcccagataatgagct

SEQ ID NO: 8470 - DNA, 20 bp, Artificial Sequence
  Description of Artificial Sequence: Synthetic oligonucleotide
  Target: COL7A1; (-) strand; PAM type: NRG; PAM sequence: GAG
aggactgaggcccagataat

SEQ ID NO: 8471 - DNA, 20 bp, Artificial Sequence
  Description of Artificial Sequence: Synthetic oligonucleotide
  Target: COL7A1; (-) strand; PAM type: NRG; PAM sequence: CAG
tactgcccaggactgaggcc

SEQ ID NO: 8472 - DNA, 20 bp, Artificial Sequence
  Description of Artificial Sequence: Synthetic oligonucleotide
  Target: COL7A1; (-) strand; PAM type: NRG; PAM sequence: AGG
ccaggtactgcccaggactg

SEQ ID NO: 8473 - DNA, 20 bp, Artificial Sequence
  Description of Artificial Sequence: Synthetic oligonucleotide
  Target: COL7A1; (-) strand; PAM type: NRG; PAM sequence: GAG
accaggtactgcccaggact

SEQ ID NO: 8474 - DNA, 20 bp, Artificial Sequence
  Description of Artificial Sequence: Synthetic oligonucleotide
  Target: COL7A1; (-) strand; PAM type: NRG; PAM sequence: AGG
gtcctcaccaggtactgccc

SEQ ID NO: 8475 - DNA, 20 bp, Artificial Sequence
  Description of Artificial Sequence: Synthetic oligonucleotide
  Target: COL7A1; (-) strand; PAM type: NRG; PAM sequence: CAG
tgtcctcaccaggtactgcc

SEQ ID NO: 8476 - DNA, 20 bp, Artificial Sequence
  Description of Artificial Sequence: Synthetic oligonucleotide
  Target: COL7A1; (-) strand; PAM type: NRG; PAM sequence: AGG
gtttccaacctgtcctcacc

SEQ ID NO: 8477 - DNA, 20 bp, Artificial Sequence
  Description of Artificial Sequence: Synthetic oligonucleotide
  Target: COL7A1; (-) strand; PAM type: NRG; PAM sequence: CAG
cgtttccaacctgtcctcac

SEQ ID NO: 8478 - DNA, 20 bp, Artificial Sequence
  Description of Artificial Sequence: Synthetic oligonucleotide
  Target: COL7A1; (-) strand; PAM type: NRG; PAM sequence: TGG
cgtctccggggaaggtcaga

SEQ ID NO: 8479 - DNA, 20 bp, Artificial Sequence
  Description of Artificial Sequence: Synthetic oligonucleotide
  Target: COL7A1; (-) strand; PAM type: NRG; PAM sequence: CAG
tgagcgtctccggggaaggt

SEQ ID NO: 8480 - DNA, 20 bp, Artificial Sequence
  Description of Artificial Sequence: Synthetic oligonucleotide
  Target: COL7A1; (-) strand; PAM type: NRG; PAM sequence: AGG
tgcctgagcgtctccgggga

SEQ ID NO: 8481 - DNA, 20 bp, Artificial Sequence
  Description of Artificial Sequence: Synthetic oligonucleotide
  Target: COL7A1; (-) strand; PAM type: NRG; PAM sequence: AAG
ctgcctgagcgtctccgggg

SEQ ID NO: 8482 - DNA, 20 bp, Artificial Sequence
  Description of Artificial Sequence: Synthetic oligonucleotide
  Target: COL7A1; (-) strand; PAM type: NRG; PAM sequence: GGG
cctctgcctgagcgtctccg

SEQ ID NO: 8483 - DNA, 20 bp, Artificial Sequence
  Description of Artificial Sequence: Synthetic oligonucleotide
  Target: COL7A1; (-) strand; PAM type: NRG; PAM sequence: GGG
gcctctgcctgagcgtctcc

SEQ ID NO: 8484 - DNA, 20 bp, Artificial Sequence
  Description of Artificial Sequence: Synthetic oligonucleotide
  Target: COL7A1; (-) strand; PAM type: NRG; PAM sequence: CGG
tgcctctgcctgagcgtctc

SEQ ID NO: 8485 - DNA, 20 bp, Artificial Sequence
  Description of Artificial Sequence: Synthetic oligonucleotide
  Target: COL7A1; (-) strand; PAM type: NRG; PAM sequence: GAG
ccttggcggtgcctctgcct

SEQ ID NO: 8486 - DNA, 20 bp, Artificial Sequence
  Description of Artificial Sequence: Synthetic oligonucleotide
  Target: COL7A1; (-) strand; PAM type: NRG; PAM sequence: CGG
cctccgctccctccccttgg

SEQ ID NO: 8487 - DNA, 20 bp, Artificial Sequence
  Description of Artificial Sequence: Synthetic oligonucleotide
  Target: COL7A1; (-) strand; PAM type: NRG; PAM sequence: TGG
tagcctccgctccctcccct

SEQ ID NO: 8488 - DNA, 20 bp, Artificial Sequence
  Description of Artificial Sequence: Synthetic oligonucleotide
  Target: COL7A1; (-) strand; PAM type: NRG; PAM sequence: TAG
agagcccccacttcctgttg

SEQ ID NO: 8489 - DNA, 20 bp, Artificial Sequence
  Description of Artificial Sequence: Synthetic oligonucleotide
  Target: COL7A1; (-) strand; PAM type: NRG; PAM sequence: GAG
tatggacccctctgaggtca

SEQ ID NO: 8490 - DNA, 20 bp, Artificial Sequence
  Description of Artificial Sequence: Synthetic oligonucleotide
  Target: COL7A1; (-) strand; PAM type: NRG; PAM sequence: CAG
agtatggacccctctgaggt

SEQ ID NO: 8491 - DNA, 20 bp, Artificial Sequence
  Description of Artificial Sequence: Synthetic oligonucleotide
  Target: COL7A1; (-) strand; PAM type: NRG; PAM sequence: AGG
cctaagtatggacccctctg

SEQ ID NO: 8492 - DNA, 20 bp, Artificial Sequence
  Description of Artificial Sequence: Synthetic oligonucleotide
  Target: COL7A1; (-) strand; PAM type: NRG; PAM sequence: GAG
acctaagtatggacccctct

SEQ ID NO: 8493 - DNA, 20 bp, Artificial Sequence
  Description of Artificial Sequence: Synthetic oligonucleotide
  Target: COL7A1; (-) strand; PAM type: NRG; PAM sequence: TGG
ctcctttaaagacctaagta

SEQ ID NO: 8494 - DNA, 20 bp, Artificial Sequence
  Description of Artificial Sequence: Synthetic oligonucleotide
  Target: COL7A1; (-) strand; PAM type: NRG; PAM sequence: AAG
gttccctcctttaaagacct

SEQ ID NO: 8495 - DNA, 20 bp, Artificial Sequence
  Description of Artificial Sequence: Synthetic oligonucleotide
  Target: COL7A1; (-) strand; PAM type: NRG; PAM sequence: AAG
cttccatgttccctccttta

SEQ ID NO: 8496 - DNA, 20 bp, Artificial Sequence
  Description of Artificial Sequence: Synthetic oligonucleotide
  Target: COL7A1; (-) strand; PAM type: NRG; PAM sequence: GGG
cagccgtggagcccccagta

SEQ ID NO: 8497 - DNA, 20 bp, Artificial Sequence
  Description of Artificial Sequence: Synthetic oligonucleotide
  Target: COL7A1; (-) strand; PAM type: NRG; PAM sequence: AGG
ccagccgtggagcccccagt

SEQ ID NO: 8498 - DNA, 20 bp, Artificial Sequence
  Description of Artificial Sequence: Synthetic oligonucleotide
  Target: COL7A1; (-) strand; PAM type: NRG; PAM sequence: TAG
cccagccgtggagcccccag

SEQ ID NO: 8499 - DNA, 20 bp, Artificial Sequence
  Description of Artificial Sequence: Synthetic oligonucleotide
  Target: COL7A1; (-) strand; PAM type: NRG; PAM sequence: CAG
agccccagccgtggagcccc

SEQ ID NO: 8500 - DNA, 20 bp, Artificial Sequence
  Description of Artificial Sequence: Synthetic oligonucleotide
  Target: COL7A1; (-) strand; PAM type: NRG; PAM sequence: GAG
aatatagagccccagccgtg

SEQ ID NO: 8501 - DNA, 20 bp, Artificial Sequence
  Description of Artificial Sequence: Synthetic oligonucleotide
  Target: COL7A1; (-) strand; PAM type: NRG; PAM sequence: TGG
tgaatatagagccccagccg

SEQ ID NO: 8502 - DNA, 20 bp, Artificial Sequence
  Description of Artificial Sequence: Synthetic oligonucleotide
  Target: COL7A1; (-) strand; PAM type: NRG; PAM sequence: CAG
aagagctgaatatagagccc

SEQ ID NO: 8503 - DNA, 20 bp, Artificial Sequence
  Description of Artificial Sequence: Synthetic oligonucleotide
  Target: COL7A1; (-) strand; PAM type: NRG; PAM sequence: GAG
agaccaaagagctgaatata

SEQ ID NO: 8504 - DNA, 20 bp, Artificial Sequence
  Description of Artificial Sequence: Synthetic oligonucleotide
  Target: COL7A1; (-) strand; PAM type: NRG; PAM sequence: TAG
ccagaccaaagagctgaata

SEQ ID NO: 8505 - DNA, 20 bp, Artificial Sequence
  Description of Artificial Sequence: Synthetic oligonucleotide
  Target: COL7A1; (-) strand; PAM type: NRG; PAM sequence: GAG
gggcagacgcccagaccaaa

SEQ ID NO: 8506 - DNA, 20 bp, Artificial Sequence
  Description of Artificial Sequence: Synthetic oligonucleotide
  Target: COL7A1; (-) strand; PAM type: NRG; PAM sequence: AAG
tggggcagacgcccagacca

SEQ ID NO: 8507 - DNA, 20 bp, Artificial Sequence
  Description of Artificial Sequence: Synthetic oligonucleotide
  Target: COL7A1; (-) strand; PAM type: NRG; PAM sequence: CAG
ggggacctggggcagacgcc

SEQ ID NO: 8508 - DNA, 20 bp, Artificial Sequence
  Description of Artificial Sequence: Synthetic oligonucleotide
  Target: COL7A1; (-) strand; PAM type: NRG; PAM sequence: CAG
tcgcagtaggggacctgggg

SEQ ID NO: 8509 - DNA, 20 bp, Artificial Sequence
  Description of Artificial Sequence: Synthetic oligonucleotide
  Target: COL7A1; (-) strand; PAM type: NRG; PAM sequence: GGG
ccctcgcagtaggggacctg

SEQ ID NO: 8510 - DNA, 20 bp, Artificial Sequence
  Description of Artificial Sequence: Synthetic oligonucleotide
  Target: COL7A1; (-) strand; PAM type: NRG; PAM sequence: GGG
tccctcgcagtaggggacct

SEQ ID NO: 8511 - DNA, 20 bp, Artificial Sequence
  Description of Artificial Sequence: Synthetic oligonucleotide
  Target: COL7A1; (-) strand; PAM type: NRG; PAM sequence: TGG
ctccctcgcagtaggggacc

SEQ ID NO: 8512 - DNA, 20 bp, Artificial Sequence
  Description of Artificial Sequence: Synthetic oligonucleotide
  Target: COL7A1; (-) strand; PAM type: NRG; PAM sequence: GGG
gagacgctccctcgcagtag

SEQ ID NO: 8513 - DNA, 20 bp, Artificial Sequence
  Description of Artificial Sequence: Synthetic oligonucleotide
  Target: COL7A1; (-) strand; PAM type: NRG; PAM sequence: GGG
ggagacgctccctcgcagta

SEQ ID NO: 8514 - DNA, 20 bp, Artificial Sequence
  Description of Artificial Sequence: Synthetic oligonucleotide
  Target: COL7A1; (-) strand; PAM type: NRG; PAM sequence: AGG
aggagacgctccctcgcagt

SEQ ID NO: 8515 - DNA, 20 bp, Artificial Sequence
  Description of Artificial Sequence: Synthetic oligonucleotide
  Target: COL7A1; (-) strand; PAM type: NRG; PAM sequence: TAG
gaggagacgctccctcgcag

SEQ ID NO: 8516 - DNA, 20 bp, Artificial Sequence
  Description of Artificial Sequence: Synthetic oligonucleotide
  Target: COL7A1; (-) strand; PAM type: NRG; PAM sequence: CAG
ctggaggagacgctccctcg

SEQ ID NO: 8517 - DNA, 20 bp, Artificial Sequence
  Description of Artificial Sequence: Synthetic oligonucleotide
  Target: COL7A1; (-) strand; PAM type: NRG; PAM sequence: GAG
tccaggtcagggtcctggag

SEQ ID NO: 8518 - DNA, 20 bp, Artificial Sequence
  Description of Artificial Sequence: Synthetic oligonucleotide
  Target: COL7A1; (-) strand; PAM type: NRG; PAM sequence: AGG
gttccaggtcagggtcctgg

SEQ ID NO: 8519 - DNA, 20 bp, Artificial Sequence
  Description of Artificial Sequence: Synthetic oligonucleotide
  Target: COL7A1; (-) strand; PAM type: NRG; PAM sequence: GAG
ggttccaggtcagggtcctg

SEQ ID NO: 8520 - DNA, 20 bp, Artificial Sequence
  Description of Artificial Sequence: Synthetic oligonucleotide
  Target: COL7A1; (-) strand; PAM type: NRG; PAM sequence: TGG
agggttccaggtcagggtcc

SEQ ID NO: 8521 - DNA, 20 bp, Artificial Sequence
  Description of Artificial Sequence: Synthetic oligonucleotide
  Target: COL7A1; (-) strand; PAM type: NRG; PAM sequence: GGG
tgggccagggttccaggtca

SEQ ID NO: 8522 - DNA, 20 bp, Artificial Sequence
  Description of Artificial Sequence: Synthetic oligonucleotide
  Target: COL7A1; (-) strand; PAM type: NRG; PAM sequence: AGG
ttgggccagggttccaggtc

SEQ ID NO: 8523 - DNA, 20 bp, Artificial Sequence
  Description of Artificial Sequence: Synthetic oligonucleotide
  Target: COL7A1; (-) strand; PAM type: NRG; PAM sequence: CAG
cttgggccagggttccaggt

SEQ ID NO: 8524 - DNA, 20 bp, Artificial Sequence
  Description of Artificial Sequence: Synthetic oligonucleotide
  Target: COL7A1; (-) strand; PAM type: NRG; PAM sequence: AGG
agtccttgggccagggttcc

SEQ ID NO: 8525 - DNA, 20 bp, Artificial Sequence
  Description of Artificial Sequence: Synthetic oligonucleotide
  Target: COL7A1; (-) strand; PAM type: NRG; PAM sequence: CAG
gagtccttgggccagggttc

SEQ ID NO: 8526 - DNA, 20 bp, Artificial Sequence
  Description of Artificial Sequence: Synthetic oligonucleotide
  Target: COL7A1; (-) strand; PAM type: NRG; PAM sequence: GGG
ggggaggagtccttgggcca

SEQ ID NO: 8527 - DNA, 20 bp, Artificial Sequence
  Description of Artificial Sequence: Synthetic oligonucleotide
  Target: COL7A1; (-) strand; PAM type: NRG; PAM sequence: AGG
gggggaggagtccttgggcc

SEQ ID NO: 8528 - DNA, 20 bp, Artificial Sequence
  Description of Artificial Sequence: Synthetic oligonucleotide
  Target: COL7A1; (-) strand; PAM type: NRG; PAM sequence: CAG
tgggggaggagtccttgggc

SEQ ID NO: 8529 - DNA, 20 bp, Artificial Sequence
  Description of Artificial Sequence: Synthetic oligonucleotide
  Target: COL7A1; (-) strand; PAM type: NRG; PAM sequence: GGG
gttctgggggaggagtcctt

SEQ ID NO: 8530 - DNA, 20 bp, Artificial Sequence
  Description of Artificial Sequence: Synthetic oligonucleotide
  Target: COL7A1; (-) strand; PAM type: NRG; PAM sequence: TGG
ggttctgggggaggagtcct

SEQ ID NO: 8531 - DNA, 20 bp, Artificial Sequence
  Description of Artificial Sequence: Synthetic oligonucleotide
  Target: COL7A1; (-) strand; PAM type: NRG; PAM sequence: GAG
tggatcgggttctgggggag

SEQ ID NO: 8532 - DNA, 20 bp, Artificial Sequence
  Description of Artificial Sequence: Synthetic oligonucleotide
  Target: COL7A1; (-) strand; PAM type: NRG; PAM sequence: AGG
cctggatcgggttctggggg

SEQ ID NO: 8533 - DNA, 20 bp, Artificial Sequence
  Description of Artificial Sequence: Synthetic oligonucleotide
  Target: COL7A1; (-) strand; PAM type: NRG; PAM sequence: GAG
gcctggatcgggttctgggg

SEQ ID NO: 8534 - DNA, 20 bp, Artificial Sequence
  Description of Artificial Sequence: Synthetic oligonucleotide
  Target: COL7A1; (-) strand; PAM type: NRG; PAM sequence: GGG
ctgcctggatcgggttctgg

SEQ ID NO: 8535 - DNA, 20 bp, Artificial Sequence
  Description of Artificial Sequence: Synthetic oligonucleotide
  Target: COL7A1; (-) strand; PAM type: NRG; PAM sequence: GGG
cctgcctggatcgggttctg

SEQ ID NO: 8536 - DNA, 20 bp, Artificial Sequence
  Description of Artificial Sequence: Synthetic oligonucleotide
  Target: COL7A1; (-) strand; PAM type: NRG; PAM sequence: GGG
gcctgcctggatcgggttct

SEQ ID NO: 8537 - DNA, 20 bp, Artificial Sequence
  Description of Artificial Sequence: Synthetic oligonucleotide
  Target: COL7A1; (-) strand; PAM type: NRG; PAM sequence: TGG
agcctgcctggatcgggttc

SEQ ID NO: 8538 - DNA, 20 bp, Artificial Sequence
  Description of Artificial Sequence: Synthetic oligonucleotide
  Target: COL7A1; (-) strand; PAM type: NRG; PAM sequence: GGG
gcactgagcctgcctggatc

SEQ ID NO: 8539 - DNA, 20 bp, Artificial Sequence
  Description of Artificial Sequence: Synthetic oligonucleotide
  Target: COL7A1; (-) strand; PAM type: NRG; PAM sequence: CGG
ggcactgagcctgcctggat

SEQ ID NO: 8540 - DNA, 20 bp, Artificial Sequence
  Description of Artificial Sequence: Synthetic oligonucleotide
  Target: COL7A1; (-) strand; PAM type: NRG; PAM sequence: TGG
aactgggcactgagcctgcc

SEQ ID NO: 8541 - DNA, 20 bp, Artificial Sequence
  Description of Artificial Sequence: Synthetic oligonucleotide
  Target: COL7A1; (-) strand; PAM type: NRG; PAM sequence: GAG
accgtggggaactgggcact

SEQ ID NO: 8542 - DNA, 20 bp, Artificial Sequence
  Description of Artificial Sequence: Synthetic oligonucleotide
  Target: COL7A1; (-) strand; PAM type: NRG; PAM sequence: GGG
agcccccaccgtggggaact

SEQ ID NO: 8543 - DNA, 20 bp, Artificial Sequence
  Description of Artificial Sequence: Synthetic oligonucleotide
  Target: COL7A1; (-) strand; PAM type: NRG; PAM sequence: TGG
gagcccccaccgtggggaac

SEQ ID NO: 8544 - DNA, 20 bp, Artificial Sequence
  Description of Artificial Sequence: Synthetic oligonucleotide
  Target: COL7A1; (-) strand; PAM type: NRG; PAM sequence: GGG
tgggctgagcccccaccgtg

SEQ ID NO: 8545 - DNA, 20 bp, Artificial Sequence
  Description of Artificial Sequence: Synthetic oligonucleotide
  Target: COL7A1; (-) strand; PAM type: NRG; PAM sequence: GGG
atgggctgagcccccaccgt

SEQ ID NO: 8546 - DNA, 20 bp, Artificial Sequence
  Description of Artificial Sequence: Synthetic oligonucleotide
  Target: COL7A1; (-) strand; PAM type: NRG; PAM sequence: TGG
tatgggctgagcccccaccg

SEQ ID NO: 8547 - DNA, 20 bp, Artificial Sequence
  Description of Artificial Sequence: Synthetic oligonucleotide
  Target: COL7A1; (-) strand; PAM type: NRG; PAM sequence: GAG
ccaggggacaggtatgggct

SEQ ID NO: 8548 - DNA, 20 bp, Artificial Sequence
  Description of Artificial Sequence: Synthetic oligonucleotide
  Target: COL7A1; (-) strand; PAM type: NRG; PAM sequence: GGG
cagagccaggggacaggtat

SEQ ID NO: 8549 - DNA, 20 bp, Artificial Sequence
  Description of Artificial Sequence: Synthetic oligonucleotide
  Target: COL7A1; (-) strand; PAM type: NRG; PAM sequence: TGG
ccagagccaggggacaggta

SEQ ID NO: 8550 - DNA, 20 bp, Artificial Sequence
  Description of Artificial Sequence: Synthetic oligonucleotide
  Target: COL7A1; (-) strand; PAM type: NRG; PAM sequence: AGG
gtggtccagagccaggggac

SEQ ID NO: 8551 - DNA, 20 bp, Artificial Sequence
  Description of Artificial Sequence: Synthetic oligonucleotide
  Target: COL7A1; (-) strand; PAM type: NRG; PAM sequence: CAG
ggtggtccagagccagggga

SEQ ID NO: 8552 - DNA, 20 bp, Artificial Sequence
  Description of Artificial Sequence: Synthetic oligonucleotide
  Target: COL7A1; (-) strand; PAM type: NRG; PAM sequence: GGG
cccgggtggtccagagccag

SEQ ID NO: 8553 - DNA, 20 bp, Artificial Sequence
  Description of Artificial Sequence: Synthetic oligonucleotide
  Target: COL7A1; (-) strand; PAM type: NRG; PAM sequence: GGG
ccccgggtggtccagagcca

SEQ ID NO: 8554 - DNA, 20 bp, Artificial Sequence
  Description of Artificial Sequence: Synthetic oligonucleotide
  Target: COL7A1; (-) strand; PAM type: NRG; PAM sequence: AGG
accccgggtggtccagagcc

SEQ ID NO: 8555 - DNA, 20 bp, Artificial Sequence
  Description of Artificial Sequence: Synthetic oligonucleotide
  Target: COL7A1; (-) strand; PAM type: NRG; PAM sequence: CAG
caccccgggtggtccagagc

SEQ ID NO: 8556 - DNA, 20 bp, Artificial Sequence
  Description of Artificial Sequence: Synthetic oligonucleotide
  Target: COL7A1; (-) strand; PAM type: NRG; PAM sequence: GAG
tgcccaccccgggtggtcca

SEQ ID NO: 8557 - DNA, 20 bp, Artificial Sequence
  Description of Artificial Sequence: Synthetic oligonucleotide
  Target: COL7A1; (-) strand; PAM type: NRG; PAM sequence: CAG
gctgcccaccccgggtggtc

SEQ ID NO: 8558 - DNA, 20 bp, Artificial Sequence
  Description of Artificial Sequence: Synthetic oligonucleotide
  Target: COL7A1; (-) strand; PAM type: NRG; PAM sequence: TGG
gcgccgctgcccaccccggg

SEQ ID NO: 8559 - DNA, 20 bp, Artificial Sequence
  Description of Artificial Sequence: Synthetic oligonucleotide
  Target: COL7A1; (-) strand; PAM type: NRG; PAM sequence: GGG
cgagcgccgctgcccacccc

SEQ ID NO: 8560 - DNA, 20 bp, Artificial Sequence
  Description of Artificial Sequence: Synthetic oligonucleotide
  Target: COL7A1; (-) strand; PAM type: NRG; PAM sequence: CGG
gcgagcgccgctgcccaccc

SEQ ID NO: 8561 - DNA, 20 bp, Artificial Sequence
  Description of Artificial Sequence: Synthetic oligonucleotide
  Target: COL7A1; (-) strand; PAM type: NRG; PAM sequence: GAG
ttgggacccgtgaggcctgc

SEQ ID NO: 8562 - DNA, 20 bp, Artificial Sequence
  Description of Artificial Sequence: Synthetic oligonucleotide
  Target: COL7A1; (-) strand; PAM type: NRG; PAM sequence: AGG
caaccgttttgggacccgtg

SEQ ID NO: 8563 - DNA, 20 bp, Artificial Sequence
  Description of Artificial Sequence: Synthetic oligonucleotide
  Target: COL7A1; (-) strand; PAM type: NRG; PAM sequence: GAG
ccaaccgttttgggacccgt

SEQ ID NO: 8564 - DNA, 20 bp, Artificial Sequence
  Description of Artificial Sequence: Synthetic oligonucleotide
  Target: COL7A1; (-) strand; PAM type: NRG; PAM sequence: GGG
gagggaatgccaaccgtttt

SEQ ID NO: 8565 - DNA, 20 bp, Artificial Sequence
  Description of Artificial Sequence: Synthetic oligonucleotide
  Target: COL7A1; (-) strand; PAM type: NRG; PAM sequence: TGG
ggagggaatgccaaccgttt

SEQ ID NO: 8566 - DNA, 20 bp, Artificial Sequence
  Description of Artificial Sequence: Synthetic oligonucleotide
  Target: COL7A1; (-) strand; PAM type: NRG; PAM sequence: GGG
ttgtctatggtggctgtgga

SEQ ID NO: 8567 - DNA, 20 bp, Artificial Sequence
  Description of Artificial Sequence: Synthetic oligonucleotide
  Target: COL7A1; (-) strand; PAM type: NRG; PAM sequence: AGG
tttgtctatggtggctgtgg

SEQ ID NO: 8568 - DNA, 20 bp, Artificial Sequence
  Description of Artificial Sequence: Synthetic oligonucleotide
  Target: COL7A1; (-) strand; PAM type: NRG; PAM sequence: GAG
ttttgtctatggtggctgtg

SEQ ID NO: 8569 - DNA, 20 bp, Artificial Sequence
  Description of Artificial Sequence: Synthetic oligonucleotide
  Target: COL7A1; (-) strand; PAM type: NRG; PAM sequence: TGG
ccttttgtctatggtggctg

SEQ ID NO: 8570 - DNA, 20 bp, Artificial Sequence
  Description of Artificial Sequence: Synthetic oligonucleotide
  Target: COL7A1; (-) strand; PAM type: NRG; PAM sequence: TGG
tgtcacccttttgtctatgg

SEQ ID NO: 8571 - DNA, 20 bp, Artificial Sequence
  Description of Artificial Sequence: Synthetic oligonucleotide
  Target: COL7A1; (-) strand; PAM type: NRG; PAM sequence: TGG
gcctgtcacccttttgtcta

SEQ ID NO: 8572 - DNA, 20 bp, Artificial Sequence
  Description of Artificial Sequence: Synthetic oligonucleotide
  Target: COL7A1; (-) strand; PAM type: NRG; PAM sequence: AGG
ggctgtgacaggcagcacag

SEQ ID NO: 8573 - DNA, 20 bp, Artificial Sequence
  Description of Artificial Sequence: Synthetic oligonucleotide
  Target: COL7A1; (-) strand; PAM type: NRG; PAM sequence: GAG
gggctgtgacaggcagcaca

SEQ ID NO: 8574 - DNA, 20 bp, Artificial Sequence
  Description of Artificial Sequence: Synthetic oligonucleotide
  Target: COL7A1; (-) strand; PAM type: NRG; PAM sequence: CAG
tcgggctgtgacaggcagca

SEQ ID NO: 8575 - DNA, 20 bp, Artificial Sequence
  Description of Artificial Sequence: Synthetic oligonucleotide
  Target: COL7A1; (-) strand; PAM type: NRG; PAM sequence: CAG
taccatcgggctgtgacagg

SEQ ID NO: 8576 - DNA, 20 bp, Artificial Sequence
  Description of Artificial Sequence: Synthetic oligonucleotide
  Target: COL7A1; (-) strand; PAM type: NRG; PAM sequence: AGG
tggtaccatcgggctgtgac

SEQ ID NO: 8577 - DNA, 20 bp, Artificial Sequence
  Description of Artificial Sequence: Synthetic oligonucleotide
  Target: COL7A1; (-) strand; PAM type: NRG; PAM sequence: CAG
ctggtaccatcgggctgtga

SEQ ID NO: 8578 - DNA, 20 bp, Artificial Sequence
  Description of Artificial Sequence: Synthetic oligonucleotide
  Target: COL7A1; (-) strand; PAM type: NRG; PAM sequence: GGG
caccctgcgctggtaccatc

SEQ ID NO: 8579 - DNA, 20 bp, Artificial Sequence
  Description of Artificial Sequence: Synthetic oligonucleotide
  Target: COL7A1; (-) strand; PAM type: NRG; PAM sequence: CGG
acaccctgcgctggtaccat

SEQ ID NO: 8580 - DNA, 20 bp, Artificial Sequence
  Description of Artificial Sequence: Synthetic oligonucleotide
  Target: COL7A1; (-) strand; PAM type: NRG; PAM sequence: TGG
gcactgcctacaccctgcgc

SEQ ID NO: 8581 - DNA, 20 bp, Artificial Sequence
  Description of Artificial Sequence: Synthetic oligonucleotide
  Target: COL7A1; (-) strand; PAM type: NRG; PAM sequence: GGG
tgttccctgccactggatga

SEQ ID NO: 8582 - DNA, 20 bp, Artificial Sequence
  Description of Artificial Sequence: Synthetic oligonucleotide
  Target: COL7A1; (-) strand; PAM type: NRG; PAM sequence: AGG
ctgttccctgccactggatg

SEQ ID NO: 8583 - DNA, 20 bp, Artificial Sequence
  Description of Artificial Sequence: Synthetic oligonucleotide
  Target: COL7A1; (-) strand; PAM type: NRG; PAM sequence: GAG
cctgttccctgccactggat

SEQ ID NO: 8584 - DNA, 20 bp, Artificial Sequence
  Description of Artificial Sequence: Synthetic oligonucleotide
  Target: COL7A1; (-) strand; PAM type: NRG; PAM sequence: TGG
agacccctgttccctgccac

SEQ ID NO: 8585 - DNA, 20 bp, Artificial Sequence
  Description of Artificial Sequence: Synthetic oligonucleotide
  Target: COL7A1; (-) strand; PAM type: NRG; PAM sequence: CAG
ctgacttgaccccattggcc

SEQ ID NO: 8586 - DNA, 20 bp, Artificial Sequence
  Description of Artificial Sequence: Synthetic oligonucleotide
  Target: COL7A1; (-) strand; PAM type: NRG; PAM sequence: TGG
ccctgctgacttgaccccat

SEQ ID NO: 8587 - DNA, 20 bp, Artificial Sequence
  Description of Artificial Sequence: Synthetic oligonucleotide
  Target: COL7A1; (-) strand; PAM type: NRG; PAM sequence: GAG
ggggaggggcaggcagggct

SEQ ID NO: 8588 - DNA, 20 bp, Artificial Sequence
  Description of Artificial Sequence: Synthetic oligonucleotide
  Target: COL7A1; (-) strand; PAM type: NRG; PAM sequence: GGG
ggtctggggaggggcaggca

SEQ ID NO: 8589 - DNA, 20 bp, Artificial Sequence
  Description of Artificial Sequence: Synthetic oligonucleotide
  Target: COL7A1; (-) strand; PAM type: NRG; PAM sequence: AGG
gggtctggggaggggcaggc

SEQ ID NO: 8590 - DNA, 20 bp, Artificial Sequence
  Description of Artificial Sequence: Synthetic oligonucleotide
  Target: COL7A1; (-) strand; PAM type: NRG; PAM sequence: CAG
ggggtctggggaggggcagg

SEQ ID NO: 8591 - DNA, 20 bp, Artificial Sequence
  Description of Artificial Sequence: Synthetic oligonucleotide
  Target: COL7A1; (-) strand; PAM type: NRG; PAM sequence: AGG
agcggggtctggggaggggc

SEQ ID NO: 8592 - DNA, 20 bp, Artificial Sequence
  Description of Artificial Sequence: Synthetic oligonucleotide
  Target: COL7A1; (-) strand; PAM type: NRG; PAM sequence: CAG
cagcggggtctggggagggg

SEQ ID NO: 8593 - DNA, 20 bp, Artificial Sequence
  Description of Artificial Sequence: Synthetic oligonucleotide
  Target: COL7A1; (-) strand; PAM type: NRG; PAM sequence: GGG
tgccagcggggtctggggag

SEQ ID NO: 8594 - DNA, 20 bp, Artificial Sequence
  Description of Artificial Sequence: Synthetic oligonucleotide
  Target: COL7A1; (-) strand; PAM type: NRG; PAM sequence: GGG
ctgccagcggggtctgggga

SEQ ID NO: 8595 - DNA, 20 bp, Artificial Sequence
  Description of Artificial Sequence: Synthetic oligonucleotide
  Target: COL7A1; (-) strand; PAM type: NRG; PAM sequence: AGG
gctgccagcggggtctgggg

SEQ ID NO: 8596 - DNA, 20 bp, Artificial Sequence
  Description of Artificial Sequence: Synthetic oligonucleotide
  Target: COL7A1; (-) strand; PAM type: NRG; PAM sequence: GAG
ggctgccagcggggtctggg

SEQ ID NO: 8597 - DNA, 20 bp, Artificial Sequence
  Description of Artificial Sequence: Synthetic oligonucleotide
  Target: COL7A1; (-) strand; PAM type: NRG; PAM sequence: GGG
ggggctgccagcggggtctg

SEQ ID NO: 8598 - DNA, 20 bp, Artificial Sequence
  Description of Artificial Sequence: Synthetic oligonucleotide
  Target: COL7A1; (-) strand; PAM type: NRG; PAM sequence: GGG
gggggctgccagcggggtct

SEQ ID NO: 8599 - DNA, 20 bp, Artificial Sequence
  Description of Artificial Sequence: Synthetic oligonucleotide
  Target: COL7A1; (-) strand; PAM type: NRG; PAM sequence: TGG
ggggggctgccagcggggtc

SEQ ID NO: 8600 - DNA, 20 bp, Artificial Sequence
  Description of Artificial Sequence: Synthetic oligonucleotide
  Target: COL7A1; (-) strand; PAM type: NRG; PAM sequence: GGG
agaatggggggctgccagcg

SEQ ID NO: 8601 - DNA, 20 bp, Artificial Sequence
  Description of Artificial Sequence: Synthetic oligonucleotide
  Target: COL7A1; (-) strand; PAM type: NRG; PAM sequence: GGG
gagaatggggggctgccagc

SEQ ID NO: 8602 - DNA, 20 bp, Artificial Sequence
  Description of Artificial Sequence: Synthetic oligonucleotide
  Target: COL7A1; (-) strand; PAM type: NRG; PAM sequence: CGG
tgagaatggggggctgccag

SEQ ID NO: 8603 - DNA, 20 bp, Artificial Sequence
  Description of Artificial Sequence: Synthetic oligonucleotide
  Target: COL7A1; (-) strand; PAM type: NRG; PAM sequence: CAG
tggtgagaatggggggctgc

SEQ ID NO: 8604 - DNA, 20 bp, Artificial Sequence
  Description of Artificial Sequence: Synthetic oligonucleotide
  Target: COL7A1; (-) strand; PAM type: NRG; PAM sequence: GGG
atagtgatggtgagaatggg

SEQ ID NO: 8605 - DNA, 20 bp, Artificial Sequence
  Description of Artificial Sequence: Synthetic oligonucleotide
  Target: COL7A1; (-) strand; PAM type: NRG; PAM sequence: GGG
gatagtgatggtgagaatgg

SEQ ID NO: 8606 - DNA, 20 bp, Artificial Sequence
  Description of Artificial Sequence: Synthetic oligonucleotide
  Target: COL7A1; (-) strand; PAM type: NRG; PAM sequence: GGG
ggatagtgatggtgagaatg

SEQ ID NO: 8607 - DNA, 20 bp, Artificial Sequence
  Description of Artificial Sequence: Synthetic oligonucleotide
  Target: COL7A1; (-) strand; PAM type: NRG; PAM sequence: GGG
gggatagtgatggtgagaat

SEQ ID NO: 8608 - DNA, 20 bp, Artificial Sequence
  Description of Artificial Sequence: Synthetic oligonucleotide
  Target: COL7A1; (-) strand; PAM type: NRG; PAM sequence: TGG
tgggatagtgatggtgagaa

SEQ ID NO: 8609 - DNA, 20 bp, Artificial Sequence
  Description of Artificial Sequence: Synthetic oligonucleotide
  Target: COL7A1; (-) strand; PAM type: NRG; PAM sequence: GAG
ctccttgggatagtgatggt

SEQ ID NO: 8610 - DNA, 20 bp, Artificial Sequence
  Description of Artificial Sequence: Synthetic oligonucleotide
  Target: COL7A1; (-) strand; PAM type: NRG; PAM sequence: TGG
gaagctccttgggatagtga

SEQ ID NO: 8611 - DNA, 20 bp, Artificial Sequence
  Description of Artificial Sequence: Synthetic oligonucleotide
  Target: COL7A1; (-) strand; PAM type: NRG; PAM sequence: TAG
gaccctgaagctccttggga

SEQ ID NO: 8612 - DNA, 20 bp, Artificial Sequence
  Description of Artificial Sequence: Synthetic oligonucleotide
  Target: COL7A1; (-) strand; PAM type: NRG; PAM sequence: GGG
ccaggaccctgaagctcctt

SEQ ID NO: 8613 - DNA, 20 bp, Artificial Sequence
  Description of Artificial Sequence: Synthetic oligonucleotide
  Target: COL7A1; (-) strand; PAM type: NRG; PAM sequence: TGG
accaggaccctgaagctcct

SEQ ID NO: 8614 - DNA, 20 bp, Artificial Sequence
  Description of Artificial Sequence: Synthetic oligonucleotide
  Target: COL7A1; (-) strand; PAM type: NRG; PAM sequence: AAG
ggaggagtaccaggaccctg

SEQ ID NO: 8615 - DNA, 20 bp, Artificial Sequence
  Description of Artificial Sequence: Synthetic oligonucleotide
  Target: COL7A1; (-) strand; PAM type: NRG; PAM sequence: AGG
gtattctgtggaggagtacc

SEQ ID NO: 8616 - DNA, 20 bp, Artificial Sequence
  Description of Artificial Sequence: Synthetic oligonucleotide
  Target: COL7A1; (-) strand; PAM type: NRG; PAM sequence: CAG
agtattctgtggaggagtac

SEQ ID NO: 8617 - DNA, 20 bp, Artificial Sequence
  Description of Artificial Sequence: Synthetic oligonucleotide
  Target: COL7A1; (-) strand; PAM type: NRG; PAM sequence: GAG
actccgagtattctgtggag

SEQ ID NO: 8618 - DNA, 20 bp, Artificial Sequence
  Description of Artificial Sequence: Synthetic oligonucleotide
  Target: COL7A1; (-) strand; PAM type: NRG; PAM sequence: AGG
atactccgagtattctgtgg

SEQ ID NO: 8619 - DNA, 20 bp, Artificial Sequence
  Description of Artificial Sequence: Synthetic oligonucleotide
  Target: COL7A1; (-) strand; PAM type: NRG; PAM sequence: GAG
aatactccgagtattctgtg

SEQ ID NO: 8620 - DNA, 20 bp, Artificial Sequence
  Description of Artificial Sequence: Synthetic oligonucleotide
  Target: COL7A1; (-) strand; PAM type: NRG; PAM sequence: TGG
tgaatactccgagtattctg

SEQ ID NO: 8621 - DNA, 20 bp, Artificial Sequence
  Description of Artificial Sequence: Synthetic oligonucleotide
  Target: COL7A1; (-) strand; PAM type: NRG; PAM sequence: GAG
atgagtactctgaatactcc

SEQ ID NO: 8622 - DNA, 20 bp, Artificial Sequence
  Description of Artificial Sequence: Synthetic oligonucleotide
  Target: COL7A1; (-) strand; PAM type: NRG; PAM sequence: GAG
gggtaccccctgaggatgat

SEQ ID NO: 8623 - DNA, 20 bp, Artificial Sequence
  Description of Artificial Sequence: Synthetic oligonucleotide
  Target: COL7A1; (-) strand; PAM type: NRG; PAM sequence: AGG
tgcagagcgggtaccccctg

SEQ ID NO: 8624 - DNA, 20 bp, Artificial Sequence
  Description of Artificial Sequence: Synthetic oligonucleotide
  Target: COL7A1; (-) strand; PAM type: NRG; PAM sequence: GAG
ctgcagagcgggtaccccct

SEQ ID NO: 8625 - DNA, 20 bp, Artificial Sequence
  Description of Artificial Sequence: Synthetic oligonucleotide
  Target: COL7A1; (-) strand; PAM type: NRG; PAM sequence: GGG
ccctgccctacctgcagagc

SEQ ID NO: 8626 - DNA, 20 bp, Artificial Sequence
  Description of Artificial Sequence: Synthetic oligonucleotide
  Target: COL7A1; (-) strand; PAM type: NRG; PAM sequence: CGG
accctgccctacctgcagag

SEQ ID NO: 8627 - DNA, 20 bp, Artificial Sequence
  Description of Artificial Sequence: Synthetic oligonucleotide
  Target: COL7A1; (-) strand; PAM type: NRG; PAM sequence: GAG
cacaccctgccctacctgca

SEQ ID NO: 8628 - DNA, 20 bp, Artificial Sequence
  Description of Artificial Sequence: Synthetic oligonucleotide
  Target: COL7A1; (-) strand; PAM type: NRG; PAM sequence: CAG
agcacaccctgccctacctg

SEQ ID NO: 8629 - DNA, 20 bp, Artificial Sequence
  Description of Artificial Sequence: Synthetic oligonucleotide
  Target: COL7A1; (-) strand; PAM type: NRG; PAM sequence: CAG
gggccagcagccactgctcc

SEQ ID NO: 8630 - DNA, 20 bp, Artificial Sequence
  Description of Artificial Sequence: Synthetic oligonucleotide
  Target: COL7A1; (-) strand; PAM type: NRG; PAM sequence: CAG
ccaccttgccccggggccag

SEQ ID NO: 8631 - DNA, 20 bp, Artificial Sequence
  Description of Artificial Sequence: Synthetic oligonucleotide
  Target: COL7A1; (-) strand; PAM type: NRG; PAM sequence: CAG
tgcccaccttgccccggggc

SEQ ID NO: 8632 - DNA, 20 bp, Artificial Sequence
  Description of Artificial Sequence: Synthetic oligonucleotide
  Target: COL7A1; (-) strand; PAM type: NRG; PAM sequence: GGG
gtgctgcccaccttgccccg

SEQ ID NO: 8633 - DNA, 20 bp, Artificial Sequence
  Description of Artificial Sequence: Synthetic oligonucleotide
  Target: COL7A1; (-) strand; PAM type: NRG; PAM sequence: GGG
agtgctgcccaccttgcccc

SEQ ID NO: 8634 - DNA, 20 bp, Artificial Sequence
  Description of Artificial Sequence: Synthetic oligonucleotide
  Target: COL7A1; (-) strand; PAM type: NRG; PAM sequence: CGG
cagtgctgcccaccttgccc

SEQ ID NO: 8635 - DNA, 20 bp, Artificial Sequence
  Description of Artificial Sequence: Synthetic oligonucleotide
  Target: COL7A1; (-) strand; PAM type: NRG; PAM sequence: CAG
tgtgtgcacacagtggaaat

SEQ ID NO: 8636 - DNA, 20 bp, Artificial Sequence
  Description of Artificial Sequence: Synthetic oligonucleotide
  Target: COL7A1; (-) strand; PAM type: NRG; PAM sequence: TGG
tgggcactgtgtgcacacag

SEQ ID NO: 8637 - DNA, 20 bp, Artificial Sequence
  Description of Artificial Sequence: Synthetic oligonucleotide
  Target: COL7A1; (-) strand; PAM type: NRG; PAM sequence: CAG
gcatgggcactgtgtgcaca

SEQ ID NO: 8638 - DNA, 20 bp, Artificial Sequence
  Description of Artificial Sequence: Synthetic oligonucleotide
  Target: COL7A1; (-) strand; PAM type: NRG; PAM sequence: GGG
tgcatgcagggcacacgcat

SEQ ID NO: 8639 - DNA, 20 bp, Artificial Sequence
  Description of Artificial Sequence: Synthetic oligonucleotide
  Target: COL7A1; (-) strand; PAM type: NRG; PAM sequence: TGG
ctgcatgcagggcacacgca

SEQ ID NO: 8640 - DNA, 20 bp, Artificial Sequence
  Description of Artificial Sequence: Synthetic oligonucleotide
  Target: COL7A1; (-) strand; PAM type: NRG; PAM sequence: GGG
gcacgtagggtctgcatgca

SEQ ID NO: 8641 - DNA, 20 bp, Artificial Sequence
  Description of Artificial Sequence: Synthetic oligonucleotide
  Target: COL7A1; (-) strand; PAM type: NRG; PAM sequence: AGG
agcacgtagggtctgcatgc

SEQ ID NO: 8642 - DNA, 20 bp, Artificial Sequence
  Description of Artificial Sequence: Synthetic oligonucleotide
  Target: COL7A1; (-) strand; PAM type: NRG; PAM sequence: CAG
aagcacgtagggtctgcatg

SEQ ID NO: 8643 - DNA, 20 bp, Artificial Sequence
  Description of Artificial Sequence: Synthetic oligonucleotide
  Target: COL7A1; (-) strand; PAM type: NRG; PAM sequence: GGG
gggcacacgccaagcacgta

SEQ ID NO: 8644 - DNA, 20 bp, Artificial Sequence
  Description of Artificial Sequence: Synthetic oligonucleotide
  Target: COL7A1; (-) strand; PAM type: NRG; PAM sequence: AGG
agggcacacgccaagcacgt

SEQ ID NO: 8645 - DNA, 20 bp, Artificial Sequence
  Description of Artificial Sequence: Synthetic oligonucleotide
  Target: COL7A1; (-) strand; PAM type: NRG; PAM sequence: TAG
cagggcacacgccaagcacg

SEQ ID NO: 8646 - DNA, 20 bp, Artificial Sequence
  Description of Artificial Sequence: Synthetic oligonucleotide
  Target: COL7A1; (-) strand; PAM type: NRG; PAM sequence: AAG
atgaatgcagggcacacgcc

SEQ ID NO: 8647 - DNA, 20 bp, Artificial Sequence
  Description of Artificial Sequence: Synthetic oligonucleotide
  Target: COL7A1; (-) strand; PAM type: NRG; PAM sequence: GGG
catgggtgtccatgaatgca

SEQ ID NO: 8648 - DNA, 20 bp, Artificial Sequence
  Description of Artificial Sequence: Synthetic oligonucleotide
  Target: COL7A1; (-) strand; PAM type: NRG; PAM sequence: AGG
acatgggtgtccatgaatgc

SEQ ID NO: 8649 - DNA, 20 bp, Artificial Sequence
  Description of Artificial Sequence: Synthetic oligonucleotide
  Target: COL7A1; (-) strand; PAM type: NRG; PAM sequence: CAG
cacatgggtgtccatgaatg

SEQ ID NO: 8650 - DNA, 20 bp, Artificial Sequence
  Description of Artificial Sequence: Synthetic oligonucleotide
  Target: COL7A1; (-) strand; PAM type: NRG; PAM sequence: GGG
tggggccgagacacgcacat

SEQ ID NO: 8651 - DNA, 20 bp, Artificial Sequence
  Description of Artificial Sequence: Synthetic oligonucleotide
  Target: COL7A1; (-) strand; PAM type: NRG; PAM sequence: TGG
gtggggccgagacacgcaca

SEQ ID NO: 8652 - DNA, 20 bp, Artificial Sequence
  Description of Artificial Sequence: Synthetic oligonucleotide
  Target: COL7A1; (-) strand; PAM type: NRG; PAM sequence: GAG
gggcagctatgggtggggcc

SEQ ID NO: 8653 - DNA, 20 bp, Artificial Sequence
  Description of Artificial Sequence: Synthetic oligonucleotide
  Target: COL7A1; (-) strand; PAM type: NRG; PAM sequence: GGG
ccgtggggcagctatgggtg

SEQ ID NO: 8654 - DNA, 20 bp, Artificial Sequence
  Description of Artificial Sequence: Synthetic oligonucleotide
  Target: COL7A1; (-) strand; PAM type: NRG; PAM sequence: GGG
cccgtggggcagctatgggt

SEQ ID NO: 8655 - DNA, 20 bp, Artificial Sequence
  Description of Artificial Sequence: Synthetic oligonucleotide
  Target: COL7A1; (-) strand; PAM type: NRG; PAM sequence: TGG
acccgtggggcagctatggg

SEQ ID NO: 8656 - DNA, 20 bp, Artificial Sequence
  Description of Artificial Sequence: Synthetic oligonucleotide
  Target: COL7A1; (-) strand; PAM type: NRG; PAM sequence: GGG
tgaacccgtggggcagctat

SEQ ID NO: 8657 - DNA, 20 bp, Artificial Sequence
  Description of Artificial Sequence: Synthetic oligonucleotide
  Target: COL7A1; (-) strand; PAM type: NRG; PAM sequence: TGG
ctgaacccgtggggcagcta

SEQ ID NO: 8658 - DNA, 20 bp, Artificial Sequence
  Description of Artificial Sequence: Synthetic oligonucleotide
  Target: COL7A1; (-) strand; PAM type: NRG; PAM sequence: CAG
ggacagctgaacccgtgggg

SEQ ID NO: 8659 - DNA, 20 bp, Artificial Sequence
  Description of Artificial Sequence: Synthetic oligonucleotide
  Target: COL7A1; (-) strand; PAM type: NRG; PAM sequence: GGG
tgaggacagctgaacccgtg

SEQ ID NO: 8660 - DNA, 20 bp, Artificial Sequence
  Description of Artificial Sequence: Synthetic oligonucleotide
  Target: COL7A1; (-) strand; PAM type: NRG; PAM sequence: GGG
gtgaggacagctgaacccgt

SEQ ID NO: 8661 - DNA, 20 bp, Artificial Sequence
  Description of Artificial Sequence: Synthetic oligonucleotide
  Target: COL7A1; (-) strand; PAM type: NRG; PAM sequence: TGG
ggtgaggacagctgaacccg

SEQ ID NO: 8662 - DNA, 20 bp, Artificial Sequence
  Description of Artificial Sequence: Synthetic oligonucleotide
  Target: COL7A1; (-) strand; PAM type: NRG; PAM sequence: CAG
gcagaggaggaaggtgagga

SEQ ID NO: 8663 - DNA, 20 bp, Artificial Sequence
  Description of Artificial Sequence: Synthetic oligonucleotide
  Target: COL7A1; (-) strand; PAM type: NRG; PAM sequence: AGG
tcatgcagaggaggaaggtg

SEQ ID NO: 8664 - DNA, 20 bp, Artificial Sequence
  Description of Artificial Sequence: Synthetic oligonucleotide
  Target: COL7A1; (-) strand; PAM type: NRG; PAM sequence: GAG
ctcatgcagaggaggaaggt

SEQ ID NO: 8665 - DNA, 20 bp, Artificial Sequence
  Description of Artificial Sequence: Synthetic oligonucleotide
  Target: COL7A1; (-) strand; PAM type: NRG; PAM sequence: AGG
gtctctcatgcagaggagga

SEQ ID NO: 8666 - DNA, 20 bp, Artificial Sequence
  Description of Artificial Sequence: Synthetic oligonucleotide
  Target: COL7A1; (-) strand; PAM type: NRG; PAM sequence: AAG
cgtctctcatgcagaggagg

SEQ ID NO: 8667 - DNA, 20 bp, Artificial Sequence
  Description of Artificial Sequence: Synthetic oligonucleotide
  Target: COL7A1; (-) strand; PAM type: NRG; PAM sequence: AGG
ccgcgtctctcatgcagagg

SEQ ID NO: 8668 - DNA, 20 bp, Artificial Sequence
  Description of Artificial Sequence: Synthetic oligonucleotide
  Target: COL7A1; (-) strand; PAM type: NRG; PAM sequence: GAG
tccgcgtctctcatgcagag

SEQ ID NO: 8669 - DNA, 20 bp, Artificial Sequence
  Description of Artificial Sequence: Synthetic oligonucleotide
  Target: COL7A1; (-) strand; PAM type: NRG; PAM sequence: AGG
gctccgcgtctctcatgcag

SEQ ID NO: 8670 - DNA, 20 bp, Artificial Sequence
  Description of Artificial Sequence: Synthetic oligonucleotide
  Target: COL7A1; (-) strand; PAM type: NRG; PAM sequence: GAG
tgctccgcgtctctcatgca

SEQ ID NO: 8671 - DNA, 20 bp, Artificial Sequence
  Description of Artificial Sequence: Synthetic oligonucleotide
  Target: COL7A1; (-) strand; PAM type: NRG; PAM sequence: CAG
tgtgctccgcgtctctcatg

SEQ ID NO: 8672 - DNA, 20 bp, Artificial Sequence
  Description of Artificial Sequence: Synthetic oligonucleotide
  Target: COL7A1; (-) strand; PAM type: NRG; PAM sequence: CAG
ctgcagacactgccggctcc

SEQ ID NO: 8673 - DNA, 20 bp, Artificial Sequence
  Description of Artificial Sequence: Synthetic oligonucleotide
  Target: COL7A1; (-) strand; PAM type: NRG; PAM sequence: CGG
agttatgctgcagacactgc

SEQ ID NO: 8674 - DNA, 20 bp, Artificial Sequence
  Description of Artificial Sequence: Synthetic oligonucleotide
  Target: COL7A1; (-) strand; PAM type: NRG; PAM sequence: CAG
acccctccctagttatgctg

SEQ ID NO: 8675 - DNA, 20 bp, Artificial Sequence
  Description of Artificial Sequence: Synthetic oligonucleotide
  Target: COL7A1; (-) strand; PAM type: NRG; PAM sequence: TAG
ttggctccaggacccctccc

SEQ ID NO: 8676 - DNA, 20 bp, Artificial Sequence
  Description of Artificial Sequence: Synthetic oligonucleotide
  Target: COL7A1; (-) strand; PAM type: NRG; PAM sequence: AGG
aggcccctgctcttggctcc

SEQ ID NO: 8677 - DNA, 20 bp, Artificial Sequence
  Description of Artificial Sequence: Synthetic oligonucleotide
  Target: COL7A1; (-) strand; PAM type: NRG; PAM sequence: CAG
gaggcccctgctcttggctc

SEQ ID NO: 8678 - DNA, 20 bp, Artificial Sequence
  Description of Artificial Sequence: Synthetic oligonucleotide
  Target: COL7A1; (-) strand; PAM type: NRG; PAM sequence: TGG
ggccctgaggcccctgctct

SEQ ID NO: 8679 - DNA, 20 bp, Artificial Sequence
  Description of Artificial Sequence: Synthetic oligonucleotide
  Target: COL7A1; (-) strand; PAM type: NRG; PAM sequence: AGG
atggtgacttcagggccctg

SEQ ID NO: 8680 - DNA, 20 bp, Artificial Sequence
  Description of Artificial Sequence: Synthetic oligonucleotide
  Target: COL7A1; (-) strand; PAM type: NRG; PAM sequence: GAG
catggtgacttcagggccct

SEQ ID NO: 8681 - DNA, 20 bp, Artificial Sequence
  Description of Artificial Sequence: Synthetic oligonucleotide
  Target: COL7A1; (-) strand; PAM type: NRG; PAM sequence: GGG
ggctgcccatggtgacttca

SEQ ID NO: 8682 - DNA, 20 bp, Artificial Sequence
  Description of Artificial Sequence: Synthetic oligonucleotide
  Target: COL7A1; (-) strand; PAM type: NRG; PAM sequence: AGG
tggctgcccatggtgacttc

SEQ ID NO: 8683 - DNA, 20 bp, Artificial Sequence
  Description of Artificial Sequence: Synthetic oligonucleotide
  Target: COL7A1; (-) strand; PAM type: NRG; PAM sequence: CAG
atggctgcccatggtgactt

SEQ ID NO: 8684 - DNA, 20 bp, Artificial Sequence
  Description of Artificial Sequence: Synthetic oligonucleotide
  Target: COL7A1; (-) strand; PAM type: NRG; PAM sequence: TGG
ttggctgggatggctgccca

SEQ ID NO: 8685 - DNA, 20 bp, Artificial Sequence
  Description of Artificial Sequence: Synthetic oligonucleotide
  Target: COL7A1; (-) strand; PAM type: NRG; PAM sequence: TGG
ctcaggggggttggctggga

SEQ ID NO: 8686 - DNA, 20 bp, Artificial Sequence
  Description of Artificial Sequence: Synthetic oligonucleotide
  Target: COL7A1; (-) strand; PAM type: NRG; PAM sequence: GGG
tcctctcaggggggttggct

SEQ ID NO: 8687 - DNA, 20 bp, Artificial Sequence
  Description of Artificial Sequence: Synthetic oligonucleotide
  Target: COL7A1; (-) strand; PAM type: NRG; PAM sequence: TGG
gtcctctcaggggggttggc

SEQ ID NO: 8688 - DNA, 20 bp, Artificial Sequence
  Description of Artificial Sequence: Synthetic oligonucleotide
  Target: COL7A1; (-) strand; PAM type: NRG; PAM sequence: TGG
tggggtcctctcaggggggt

SEQ ID NO: 8689 - DNA, 20 bp, Artificial Sequence
  Description of Artificial Sequence: Synthetic oligonucleotide
  Target: COL7A1; (-) strand; PAM type: NRG; PAM sequence: GGG
caactggggtcctctcaggg

SEQ ID NO: 8690 - DNA, 20 bp, Artificial Sequence
  Description of Artificial Sequence: Synthetic oligonucleotide
  Target: COL7A1; (-) strand; PAM type: NRG; PAM sequence: GGG
tcaactggggtcctctcagg

SEQ ID NO: 8691 - DNA, 20 bp, Artificial Sequence
  Description of Artificial Sequence: Synthetic oligonucleotide
  Target: COL7A1; (-) strand; PAM type: NRG; PAM sequence: GGG
atcaactggggtcctctcag

SEQ ID NO: 8692 - DNA, 20 bp, Artificial Sequence
  Description of Artificial Sequence: Synthetic oligonucleotide
  Target: COL7A1; (-) strand; PAM type: NRG; PAM sequence: GGG
tatcaactggggtcctctca

SEQ ID NO: 8693 - DNA, 20 bp, Artificial Sequence
  Description of Artificial Sequence: Synthetic oligonucleotide
  Target: COL7A1; (-) strand; PAM type: NRG; PAM sequence: AGG
ctatcaactggggtcctctc

SEQ ID NO: 8694 - DNA, 20 bp, Artificial Sequence
  Description of Artificial Sequence: Synthetic oligonucleotide
  Target: COL7A1; (-) strand; PAM type: NRG; PAM sequence: CAG
cctatcaactggggtcctct

SEQ ID NO: 8695 - DNA, 20 bp, Artificial Sequence
  Description of Artificial Sequence: Synthetic oligonucleotide
  Target: COL7A1; (-) strand; PAM type: NRG; PAM sequence: GGG
cctgccctgcctatcaactg

SEQ ID NO: 8696 - DNA, 20 bp, Artificial Sequence
  Description of Artificial Sequence: Synthetic oligonucleotide
  Target: COL7A1; (-) strand; PAM type: NRG; PAM sequence: GGG
ccctgccctgcctatcaact

SEQ ID NO: 8697 - DNA, 20 bp, Artificial Sequence
  Description of Artificial Sequence: Synthetic oligonucleotide
  Target: COL7A1; (-) strand; PAM type: NRG; PAM sequence: TGG
gccctgccctgcctatcaac

SEQ ID NO: 8698 - DNA, 20 bp, Artificial Sequence
  Description of Artificial Sequence: Synthetic oligonucleotide
  Target: COL7A1; (-) strand; PAM type: NRG; PAM sequence: AGG
cccagaactttcttcacccc

SEQ ID NO: 8699 - DNA, 20 bp, Artificial Sequence
  Description of Artificial Sequence: Synthetic oligonucleotide
  Target: COL7A1; (-) strand; PAM type: NRG; PAM sequence: CAG
tcccagaactttcttcaccc

SEQ ID NO: 8700 - DNA, 20 bp, Artificial Sequence
  Description of Artificial Sequence: Synthetic oligonucleotide
  Target: COL7A1; (-) strand; PAM type: NRG; PAM sequence: CAG
cgtgagtagttttctactcc

SEQ ID NO: 8701 - DNA, 20 bp, Artificial Sequence
  Description of Artificial Sequence: Synthetic oligonucleotide
  Target: COL7A1; (-) strand; PAM type: NRG; PAM sequence: TAG
tcgcatctggatcacgtgag

SEQ ID NO: 8702 - DNA, 20 bp, Artificial Sequence
  Description of Artificial Sequence: Synthetic oligonucleotide
  Target: COL7A1; (-) strand; PAM type: NRG; PAM sequence: GAG
tcatcgcatctggatcacgt

SEQ ID NO: 8703 - DNA, 20 bp, Artificial Sequence
  Description of Artificial Sequence: Synthetic oligonucleotide
  Target: COL7A1; (-) strand; PAM type: NRG; PAM sequence: TGG
cagggccagttcatcgcatc

SEQ ID NO: 8704 - DNA, 20 bp, Artificial Sequence
  Description of Artificial Sequence: Synthetic oligonucleotide
  Target: COL7A1; (-) strand; PAM type: NRG; PAM sequence: CAG
cccctctagcctgccagggc

SEQ ID NO: 8705 - DNA, 20 bp, Artificial Sequence
  Description of Artificial Sequence: Synthetic oligonucleotide
  Target: COL7A1; (-) strand; PAM type: NRG; PAM sequence: GGG
ctgccccctctagcctgcca

SEQ ID NO: 8706 - DNA, 20 bp, Artificial Sequence
  Description of Artificial Sequence: Synthetic oligonucleotide
  Target: COL7A1; (-) strand; PAM type: NRG; PAM sequence: AGG
tctgccccctctagcctgcc

SEQ ID NO: 8707 - DNA, 20 bp, Artificial Sequence
  Description of Artificial Sequence: Synthetic oligonucleotide
  Target: COL7A1; (-) strand; PAM type: NRG; PAM sequence: CAG
ctctgccccctctagcctgc

SEQ ID NO: 8708 - DNA, 20 bp, Artificial Sequence
  Description of Artificial Sequence: Synthetic oligonucleotide
  Target: COL7A1; (-) strand; PAM type: NRG; PAM sequence: TAG
ctatccctctctgccccctc

SEQ ID NO: 8709 - DNA, 20 bp, Artificial Sequence
  Description of Artificial Sequence: Synthetic oligonucleotide
  Target: COL7A1; (-) strand; PAM type: NRG; PAM sequence: TGG
ttctgtctcttgccttttgt

SEQ ID NO: 8710 - DNA, 20 bp, Artificial Sequence
  Description of Artificial Sequence: Synthetic oligonucleotide
  Target: COL7A1; (-) strand; PAM type: NRG; PAM sequence: TGG
cacctgcctgtttctgtgtc

SEQ ID NO: 8711 - DNA, 20 bp, Artificial Sequence
  Description of Artificial Sequence: Synthetic oligonucleotide
  Target: COL7A1; (-) strand; PAM type: NRG; PAM sequence: AAG
gtgggaggggcatcagagtg

SEQ ID NO: 8712 - DNA, 20 bp, Artificial Sequence
  Description of Artificial Sequence: Synthetic oligonucleotide
  Target: COL7A1; (-) strand; PAM type: NRG; PAM sequence: GAG
acccggtgggaggggcatca

SEQ ID NO: 8713 - DNA, 20 bp, Artificial Sequence
  Description of Artificial Sequence: Synthetic oligonucleotide
  Target: COL7A1; (-) strand; PAM type: NRG; PAM sequence: CAG
ggacccggtgggaggggcat

SEQ ID NO: 8714 - DNA, 20 bp, Artificial Sequence
  Description of Artificial Sequence: Synthetic oligonucleotide
  Target: COL7A1; (-) strand; PAM type: NRG; PAM sequence: GGG
tgacctggacccggtgggag

SEQ ID NO: 8715 - DNA, 20 bp, Artificial Sequence
  Description of Artificial Sequence: Synthetic oligonucleotide
  Target: COL7A1; (-) strand; PAM type: NRG; PAM sequence: GGG
ctgacctggacccggtggga

SEQ ID NO: 8716 - DNA, 20 bp, Artificial Sequence
  Description of Artificial Sequence: Synthetic oligonucleotide
  Target: COL7A1; (-) strand; PAM type: NRG; PAM sequence: AGG
cctgacctggacccggtggg

SEQ ID NO: 8717 - DNA, 20 bp, Artificial Sequence
  Description of Artificial Sequence: Synthetic oligonucleotide
  Target: COL7A1; (-) strand; PAM type: NRG; PAM sequence: GAG
gcctgacctggacccggtgg

SEQ ID NO: 8718 - DNA, 20 bp, Artificial Sequence
  Description of Artificial Sequence: Synthetic oligonucleotide
  Target: COL7A1; (-) strand; PAM type: NRG; PAM sequence: GGG
gggcctgacctggacccggt

SEQ ID NO: 8719 - DNA, 20 bp, Artificial Sequence
  Description of Artificial Sequence: Synthetic oligonucleotide
  Target: COL7A1; (-) strand; PAM type: NRG; PAM sequence: TGG
tgggcctgacctggacccgg

SEQ ID NO: 8720 - DNA, 20 bp, Artificial Sequence
  Description of Artificial Sequence: Synthetic oligonucleotide
  Target: COL7A1; (-) strand; PAM type: NRG; PAM sequence: CGG
ccttgggcctgacctggacc

SEQ ID NO: 8721 - DNA, 20 bp, Artificial Sequence
  Description of Artificial Sequence: Synthetic oligonucleotide
  Target: COL7A1; (-) strand; PAM type: NRG; PAM sequence: TGG
tggtccccttgggcctgacc

SEQ ID NO: 8722 - DNA, 20 bp, Artificial Sequence
  Description of Artificial Sequence: Synthetic oligonucleotide
  Target: COL7A1; (-) strand; PAM type: NRG; PAM sequence: GGG
ggagcagagctggtcccctt

SEQ ID NO: 8723 - DNA, 20 bp, Artificial Sequence
  Description of Artificial Sequence: Synthetic oligonucleotide
  Target: COL7A1; (-) strand; PAM type: NRG; PAM sequence: TGG
gggagcagagctggtcccct

SEQ ID NO: 8724 - DNA, 20 bp, Artificial Sequence
  Description of Artificial Sequence: Synthetic oligonucleotide
  Target: COL7A1; (-) strand; PAM type: NRG; PAM sequence: TGG
gatgatggtgggagcagagc

SEQ ID NO: 8725 - DNA, 20 bp, Artificial Sequence
  Description of Artificial Sequence: Synthetic oligonucleotide
  Target: COL7A1; (-) strand; PAM type: NRG; PAM sequence: GAG
gtgggatgatggtgggagca

SEQ ID NO: 8726 - DNA, 20 bp, Artificial Sequence
  Description of Artificial Sequence: Synthetic oligonucleotide
  Target: COL7A1; (-) strand; PAM type: NRG; PAM sequence: CAG
gagtgggatgatggtgggag

SEQ ID NO: 8727 - DNA, 20 bp, Artificial Sequence
  Description of Artificial Sequence: Synthetic oligonucleotide
  Target: COL7A1; (-) strand; PAM type: NRG; PAM sequence: GAG
ggggagtgggatgatggtgg

SEQ ID NO: 8728 - DNA, 20 bp, Artificial Sequence
  Description of Artificial Sequence: Synthetic oligonucleotide
  Target: COL7A1; (-) strand; PAM type: NRG; PAM sequence: GGG
gtggggagtgggatgatggt

SEQ ID NO: 8729 - DNA, 20 bp, Artificial Sequence
  Description of Artificial Sequence: Synthetic oligonucleotide
  Target: COL7A1; (-) strand; PAM type: NRG; PAM sequence: TGG
tgtggggagtgggatgatgg

SEQ ID NO: 8730 - DNA, 20 bp, Artificial Sequence
  Description of Artificial Sequence: Synthetic oligonucleotide
  Target: COL7A1; (-) strand; PAM type: NRG; PAM sequence: TGG
ctgtgtggggagtgggatga

SEQ ID NO: 8731 - DNA, 20 bp, Artificial Sequence
  Description of Artificial Sequence: Synthetic oligonucleotide
  Target: COL7A1; (-) strand; PAM type: NRG; PAM sequence: GGG
agcttggctgtgtggggagt

SEQ ID NO: 8732 - DNA, 20 bp, Artificial Sequence
  Description of Artificial Sequence: Synthetic oligonucleotide
  Target: COL7A1; (-) strand; PAM type: NRG; PAM sequence: TGG
cagcttggctgtgtggggag

SEQ ID NO: 8733 - DNA, 20 bp, Artificial Sequence
  Description of Artificial Sequence: Synthetic oligonucleotide
  Target: COL7A1; (-) strand; PAM type: NRG; PAM sequence: GAG
gtccagcttggctgtgtggg

SEQ ID NO: 8734 - DNA, 20 bp, Artificial Sequence
  Description of Artificial Sequence: Synthetic oligonucleotide
  Target: COL7A1; (-) strand; PAM type: NRG; PAM sequence: GGG
atgtccagcttggctgtgtg

SEQ ID NO: 8735 - DNA, 20 bp, Artificial Sequence
  Description of Artificial Sequence: Synthetic oligonucleotide
  Target: COL7A1; (-) strand; PAM type: NRG; PAM sequence: GGG
gatgtccagcttggctgtgt

SEQ ID NO: 8736 - DNA, 20 bp, Artificial Sequence
  Description of Artificial Sequence: Synthetic oligonucleotide
  Target: COL7A1; (-) strand; PAM type: NRG; PAM sequence: TGG
agatgtccagcttggctgtg

SEQ ID NO: 8737 - DNA, 20 bp, Artificial Sequence
  Description of Artificial Sequence: Synthetic oligonucleotide
  Target: COL7A1; (-) strand; PAM type: NRG; PAM sequence: TGG
gtgctctcagatgtccagct

SEQ ID NO: 8738 - DNA, 20 bp, Artificial Sequence
  Description of Artificial Sequence: Synthetic oligonucleotide
  Target: COL7A1; (-) strand; PAM type: NRG; PAM sequence: CAG
atgcagtgctctcagatgtc

SEQ ID NO: 8739 - DNA, 20 bp, Artificial Sequence
  Description of Artificial Sequence: Synthetic oligonucleotide
  Target: COL7A1; (-) strand; PAM type: NRG; PAM sequence: CAG
ggattgccatgcagtgctct

SEQ ID NO: 8740 - DNA, 20 bp, Artificial Sequence
  Description of Artificial Sequence: Synthetic oligonucleotide
  Target: COL7A1; (-) strand; PAM type: NRG; PAM sequence: CAG
ggcagatgaggattgccatg

SEQ ID NO: 8741 - DNA, 20 bp, Artificial Sequence
  Description of Artificial Sequence: Synthetic oligonucleotide
  Target: COL7A1; (-) strand; PAM type: NRG; PAM sequence: AGG
gggagacacacaggcagatg

SEQ ID NO: 8742 - DNA, 20 bp, Artificial Sequence
  Description of Artificial Sequence: Synthetic oligonucleotide
  Target: COL7A1; (-) strand; PAM type: NRG; PAM sequence: GAG
agggagacacacaggcagat

SEQ ID NO: 8743 - DNA, 20 bp, Artificial Sequence
  Description of Artificial Sequence: Synthetic oligonucleotide
  Target: COL7A1; (-) strand; PAM type: NRG; PAM sequence: CAG
agtggagggagacacacagg

SEQ ID NO: 8744 - DNA, 20 bp, Artificial Sequence
  Description of Artificial Sequence: Synthetic oligonucleotide
  Target: COL7A1; (-) strand; PAM type: NRG; PAM sequence: AGG
cccagtggagggagacacac

SEQ ID NO: 8745 - DNA, 20 bp, Artificial Sequence
  Description of Artificial Sequence: Synthetic oligonucleotide
  Target: COL7A1; (-) strand; PAM type: NRG; PAM sequence: CAG
ccccagtggagggagacaca

SEQ ID NO: 8746 - DNA, 20 bp, Artificial Sequence
  Description of Artificial Sequence: Synthetic oligonucleotide
  Target: COL7A1; (-) strand; PAM type: NRG; PAM sequence: GAG
acatgtgtccccagtggagg

SEQ ID NO: 8747 - DNA, 20 bp, Artificial Sequence
  Description of Artificial Sequence: Synthetic oligonucleotide
  Target: COL7A1; (-) strand; PAM type: NRG; PAM sequence: GGG
tgacatgtgtccccagtgga

SEQ ID NO: 8748 - DNA, 20 bp, Artificial Sequence
  Description of Artificial Sequence: Synthetic oligonucleotide
  Target: COL7A1; (-) strand; PAM type: NRG; PAM sequence: AGG
atgacatgtgtccccagtgg

SEQ ID NO: 8749 - DNA, 20 bp, Artificial Sequence
  Description of Artificial Sequence: Synthetic oligonucleotide
  Target: COL7A1; (-) strand; PAM type: NRG; PAM sequence: GAG
catgacatgtgtccccagtg

SEQ ID NO: 8750 - DNA, 20 bp, Artificial Sequence
  Description of Artificial Sequence: Synthetic oligonucleotide
  Target: COL7A1; (-) strand; PAM type: NRG; PAM sequence: TGG
cacatgacatgtgtccccag

SEQ ID NO: 8751 - DNA, 20 bp, Artificial Sequence
  Description of Artificial Sequence: Synthetic oligonucleotide
  Target: COL7A1; (-) strand; PAM type: NRG; PAM sequence: CAG
tgacacatgacatgtgtccc

SEQ ID NO: 8752 - DNA, 20 bp, Artificial Sequence
  Description of Artificial Sequence: Synthetic oligonucleotide
  Target: COL7A1; (-) strand; PAM type: NRG; PAM sequence: AGG
cagaaggacacatgtgctgc

SEQ ID NO: 8753 - DNA, 20 bp, Artificial Sequence
  Description of Artificial Sequence: Synthetic oligonucleotide
  Target: COL7A1; (-) strand; PAM type: NRG; PAM sequence: CAG
acagaaggacacatgtgctg

SEQ ID NO: 8754 - DNA, 20 bp, Artificial Sequence
  Description of Artificial Sequence: Synthetic oligonucleotide
  Target: COL7A1; (-) strand; PAM type: NRG; PAM sequence: AGG
gggatggatggatacacaga

SEQ ID NO: 8755 - DNA, 20 bp, Artificial Sequence
  Description of Artificial Sequence: Synthetic oligonucleotide
  Target: COL7A1; (-) strand; PAM type: NRG; PAM sequence: AAG
ggggatggatggatacacag

SEQ ID NO: 8756 - DNA, 20 bp, Artificial Sequence
  Description of Artificial Sequence: Synthetic oligonucleotide
  Target: COL7A1; (-) strand; PAM type: NRG; PAM sequence: CAG
tggggggatggatggataca

SEQ ID NO: 8757 - DNA, 20 bp, Artificial Sequence
  Description of Artificial Sequence: Synthetic oligonucleotide
  Target: COL7A1; (-) strand; PAM type: NRG; PAM sequence: TGG
caagaagatggggggatgga

SEQ ID NO: 8758 - DNA, 20 bp, Artificial Sequence
  Description of Artificial Sequence: Synthetic oligonucleotide
  Target: COL7A1; (-) strand; PAM type: NRG; PAM sequence: TGG
cagtcaagaagatgggggga

SEQ ID NO: 8759 - DNA, 20 bp, Artificial Sequence
  Description of Artificial Sequence: Synthetic oligonucleotide
  Target: COL7A1; (-) strand; PAM type: NRG; PAM sequence: GGG
caagcagtcaagaagatggg

SEQ ID NO: 8760 - DNA, 20 bp, Artificial Sequence
  Description of Artificial Sequence: Synthetic oligonucleotide
  Target: COL7A1; (-) strand; PAM type: NRG; PAM sequence: GGG
gcaagcagtcaagaagatgg

SEQ ID NO: 8761 - DNA, 20 bp, Artificial Sequence
  Description of Artificial Sequence: Synthetic oligonucleotide
  Target: COL7A1; (-) strand; PAM type: NRG; PAM sequence: GGG
ggcaagcagtcaagaagatg

SEQ ID NO: 8762 - DNA, 20 bp, Artificial Sequence
  Description of Artificial Sequence: Synthetic oligonucleotide
  Target: COL7A1; (-) strand; PAM type: NRG; PAM sequence: GGG
gggcaagcagtcaagaagat

SEQ ID NO: 8763 - DNA, 20 bp, Artificial Sequence
  Description of Artificial Sequence: Synthetic oligonucleotide
  Target: COL7A1; (-) strand; PAM type: NRG; PAM sequence: TGG
agggcaagcagtcaagaaga

SEQ ID NO: 8764 - DNA, 20 bp, Artificial Sequence
  Description of Artificial Sequence: Synthetic oligonucleotide
  Target: COL7A1; (-) strand; PAM type: NRG; PAM sequence: AAG
ttacagggcaagcagtcaag

SEQ ID NO: 8765 - DNA, 20 bp, Artificial Sequence
  Description of Artificial Sequence: Synthetic oligonucleotide
  Target: COL7A1; (-) strand; PAM type: NRG; PAM sequence: AAG
aacttacagggcaagcagtc

SEQ ID NO: 8766 - DNA, 20 bp, Artificial Sequence
  Description of Artificial Sequence: Synthetic oligonucleotide
  Target: COL7A1; (-) strand; PAM type: NRG; PAM sequence: CAG
cctagaacttacagggcaag

SEQ ID NO: 8767 - DNA, 20 bp, Artificial Sequence
  Description of Artificial Sequence: Synthetic oligonucleotide
  Target: COL7A1; (-) strand; PAM type: NRG; PAM sequence: AAG
gcccctagaacttacagggc

SEQ ID NO: 8768 - DNA, 20 bp, Artificial Sequence
  Description of Artificial Sequence: Synthetic oligonucleotide
  Target: COL7A1; (-) strand; PAM type: NRG; PAM sequence: GGG
gcaggcccctagaacttaca

SEQ ID NO: 8769 - DNA, 20 bp, Artificial Sequence
  Description of Artificial Sequence: Synthetic oligonucleotide
  Target: COL7A1; (-) strand; PAM type: NRG; PAM sequence: AGG
ggcaggcccctagaacttac

SEQ ID NO: 8770 - DNA, 20 bp, Artificial Sequence
  Description of Artificial Sequence: Synthetic oligonucleotide
  Target: COL7A1; (-) strand; PAM type: NRG; PAM sequence: CAG
aggcaggcccctagaactta

SEQ ID NO: 8771 - DNA, 20 bp, Artificial Sequence
  Description of Artificial Sequence: Synthetic oligonucleotide
  Target: COL7A1; (-) strand; PAM type: NRG; PAM sequence: TAG
ggcaagggcaggcaggcccc

SEQ ID NO: 8772 - DNA, 20 bp, Artificial Sequence
  Description of Artificial Sequence: Synthetic oligonucleotide
  Target: COL7A1; (-) strand; PAM type: NRG; PAM sequence: AGG
caccctaggcaagggcaggc

SEQ ID NO: 8773 - DNA, 20 bp, Artificial Sequence
  Description of Artificial Sequence: Synthetic oligonucleotide
  Target: COL7A1; (-) strand; PAM type: NRG; PAM sequence: CAG
gcaccctaggcaagggcagg

SEQ ID NO: 8774 - DNA, 20 bp, Artificial Sequence
  Description of Artificial Sequence: Synthetic oligonucleotide
  Target: COL7A1; (-) strand; PAM type: NRG; PAM sequence: AGG
ccagcaccctaggcaagggc

SEQ ID NO: 8775 - DNA, 20 bp, Artificial Sequence
  Description of Artificial Sequence: Synthetic oligonucleotide
  Target: COL7A1; (-) strand; PAM type: NRG; PAM sequence: CAG
cccagcaccctaggcaaggg

SEQ ID NO: 8776 - DNA, 20 bp, Artificial Sequence
  Description of Artificial Sequence: Synthetic oligonucleotide
  Target: COL7A1; (-) strand; PAM type: NRG; PAM sequence: GGG
caccccagcaccctaggcaa

SEQ ID NO: 8777 - DNA, 20 bp, Artificial Sequence
  Description of Artificial Sequence: Synthetic oligonucleotide
  Target: COL7A1; (-) strand; PAM type: NRG; PAM sequence: AGG
ccaccccagcaccctaggca

SEQ ID NO: 8778 - DNA, 20 bp, Artificial Sequence
  Description of Artificial Sequence: Synthetic oligonucleotide
  Target: COL7A1; (-) strand; PAM type: NRG; PAM sequence: AAG
tccaccccagcaccctaggc

SEQ ID NO: 8779 - DNA, 20 bp, Artificial Sequence
  Description of Artificial Sequence: Synthetic oligonucleotide
  Target: COL7A1; (-) strand; PAM type: NRG; PAM sequence: AGG
ccactccaccccagcaccct

SEQ ID NO: 8780 - DNA, 20 bp, Artificial Sequence
  Description of Artificial Sequence: Synthetic oligonucleotide
  Target: COL7A1; (-) strand; PAM type: NRG; PAM sequence: TAG
cccactccaccccagcaccc

SEQ ID NO: 8781 - DNA, 20 bp, Artificial Sequence
  Description of Artificial Sequence: Synthetic oligonucleotide
  Target: COL7A1; (-) strand; PAM type: NRG; PAM sequence: CAG
cgcagtctcccactccaccc

SEQ ID NO: 8782 - DNA, 20 bp, Artificial Sequence
  Description of Artificial Sequence: Synthetic oligonucleotide
  Target: COL7A1; (-) strand; PAM type: NRG; PAM sequence: CAG
ggtgagtggtgcccagcccg

SEQ ID NO: 8783 - DNA, 20 bp, Artificial Sequence
  Description of Artificial Sequence: Synthetic oligonucleotide
  Target: COL7A1; (-) strand; PAM type: NRG; PAM sequence: CAG
gcactgtggtgagtggtgcc

SEQ ID NO: 8784 - DNA, 20 bp, Artificial Sequence
  Description of Artificial Sequence: Synthetic oligonucleotide
  Target: COL7A1; (-) strand; PAM type: NRG; PAM sequence: TGG
tgagtcagcactgtggtgag

SEQ ID NO: 8785 - DNA, 20 bp, Artificial Sequence
  Description of Artificial Sequence: Synthetic oligonucleotide
  Target: COL7A1; (-) strand; PAM type: NRG; PAM sequence: GAG
agatgagtcagcactgtggt

SEQ ID NO: 8786 - DNA, 20 bp, Artificial Sequence
  Description of Artificial Sequence: Synthetic oligonucleotide
  Target: COL7A1; (-) strand; PAM type: NRG; PAM sequence: TGG
caagagatgagtcagcactg

SEQ ID NO: 8787 - DNA, 20 bp, Artificial Sequence
  Description of Artificial Sequence: Synthetic oligonucleotide
  Target: COL7A1; (-) strand; PAM type: NRG; PAM sequence: CAG
ttgtgcgccaagagatgagt

SEQ ID NO: 8788 - DNA, 20 bp, Artificial Sequence
  Description of Artificial Sequence: Synthetic oligonucleotide
  Target: COL7A1; (-) strand; PAM type: NRG; PAM sequence: GAG
ggctttgtgcgccaagagat

SEQ ID NO: 8789 - DNA, 20 bp, Artificial Sequence
  Description of Artificial Sequence: Synthetic oligonucleotide
  Target: COL7A1; (-) strand; PAM type: NRG; PAM sequence: GAG
tccggggctttgtgcgccaa

SEQ ID NO: 8790 - DNA, 20 bp, Artificial Sequence
  Description of Artificial Sequence: Synthetic oligonucleotide
  Target: COL7A1; (-) strand; PAM type: NRG; PAM sequence: AAG
catccggggctttgtgcgcc

SEQ ID NO: 8791 - DNA, 20 bp, Artificial Sequence
  Description of Artificial Sequence: Synthetic oligonucleotide
  Target: COL7A1; (-) strand; PAM type: NRG; PAM sequence: GGG
tcccaggaggatgacatccg

SEQ ID NO: 8792 - DNA, 20 bp, Artificial Sequence
  Description of Artificial Sequence: Synthetic oligonucleotide
  Target: COL7A1; (-) strand; PAM type: NRG; PAM sequence: GGG
ctcccaggaggatgacatcc

SEQ ID NO: 8793 - DNA, 20 bp, Artificial Sequence
  Description of Artificial Sequence: Synthetic oligonucleotide
  Target: COL7A1; (-) strand; PAM type: NRG; PAM sequence: CGG
gctcccaggaggatgacatc

SEQ ID NO: 8794 - DNA, 20 bp, Artificial Sequence
  Description of Artificial Sequence: Synthetic oligonucleotide
  Target: COL7A1; (-) strand; PAM type: NRG; PAM sequence: AGG
tgtggtcttctgctcccagg

SEQ ID NO: 8795 - DNA, 20 bp, Artificial Sequence
  Description of Artificial Sequence: Synthetic oligonucleotide
  Target: COL7A1; (-) strand; PAM type: NRG; PAM sequence: GAG
ctgtggtcttctgctcccag

SEQ ID NO: 8796 - DNA, 20 bp, Artificial Sequence
  Description of Artificial Sequence: Synthetic oligonucleotide
  Target: COL7A1; (-) strand; PAM type: NRG; PAM sequence: AGG
ccctgtggtcttctgctccc

SEQ ID NO: 8797 - DNA, 20 bp, Artificial Sequence
  Description of Artificial Sequence: Synthetic oligonucleotide
  Target: COL7A1; (-) strand; PAM type: NRG; PAM sequence: CAG
tccctgtggtcttctgctcc

SEQ ID NO: 8798 - DNA, 20 bp, Artificial Sequence
  Description of Artificial Sequence: Synthetic oligonucleotide
  Target: COL7A1; (-) strand; PAM type: NRG; PAM sequence: TGG
tgggttctttatggtccctg

SEQ ID NO: 8799 - DNA, 20 bp, Artificial Sequence
  Description of Artificial Sequence: Synthetic oligonucleotide
  Target: COL7A1; (-) strand; PAM type: NRG; PAM sequence: TGG
tgtgggccatgggttcttta

SEQ ID NO: 8800 - DNA, 20 bp, Artificial Sequence
  Description of Artificial Sequence: Synthetic oligonucleotide
  Target: COL7A1; (-) strand; PAM type: NRG; PAM sequence: GGG
atgtccttcctgtgggccat

SEQ ID NO: 8801 - DNA, 20 bp, Artificial Sequence
  Description of Artificial Sequence: Synthetic oligonucleotide
  Target: COL7A1; (-) strand; PAM type: NRG; PAM sequence: TGG
tatgtccttcctgtgggcca

SEQ ID NO: 8802 - DNA, 20 bp, Artificial Sequence
  Description of Artificial Sequence: Synthetic oligonucleotide
  Target: COL7A1; (-) strand; PAM type: NRG; PAM sequence: GGG
gtgccctatgtccttcctgt

SEQ ID NO: 8803 - DNA, 20 bp, Artificial Sequence
  Description of Artificial Sequence: Synthetic oligonucleotide
  Target: COL7A1; (-) strand; PAM type: NRG; PAM sequence: TGG
tgtgccctatgtccttcctg

SEQ ID NO: 8804 - DNA, 20 bp, Artificial Sequence
  Description of Artificial Sequence: Synthetic oligonucleotide
  Target: COL7A1; (-) strand; PAM type: NRG; PAM sequence: TAG
ggctccatgcagtctcacca

SEQ ID NO: 8805 - DNA, 20 bp, Artificial Sequence
  Description of Artificial Sequence: Synthetic oligonucleotide
  Target: COL7A1; (-) strand; PAM type: NRG; PAM sequence: CAG
ccctgggccctggctccatg

SEQ ID NO: 8806 - DNA, 20 bp, Artificial Sequence
  Description of Artificial Sequence: Synthetic oligonucleotide
  Target: COL7A1; (-) strand; PAM type: NRG; PAM sequence: TGG
gcaccctgacccctgggccc

SEQ ID NO: 8807 - DNA, 20 bp, Artificial Sequence
  Description of Artificial Sequence: Synthetic oligonucleotide
  Target: COL7A1; (-) strand; PAM type: NRG; PAM sequence: GGG
cacccagcaccctgacccct

SEQ ID NO: 8808 - DNA, 20 bp, Artificial Sequence
  Description of Artificial Sequence: Synthetic oligonucleotide
  Target: COL7A1; (-) strand; PAM type: NRG; PAM sequence: TGG
tcacccagcaccctgacccc

SEQ ID NO: 8809 - DNA, 20 bp, Artificial Sequence
  Description of Artificial Sequence: Synthetic oligonucleotide
  Target: COL7A1; (-) strand; PAM type: NRG; PAM sequence: CAG
ggggccctacctccctcacc

SEQ ID NO: 8810 - DNA, 20 bp, Artificial Sequence
  Description of Artificial Sequence: Synthetic oligonucleotide
  Target: COL7A1; (-) strand; PAM type: NRG; PAM sequence: GGG
gggtgggcctgggtgggctg

SEQ ID NO: 8811 - DNA, 20 bp, Artificial Sequence
  Description of Artificial Sequence: Synthetic oligonucleotide
  Target: COL7A1; (-) strand; PAM type: NRG; PAM sequence: GGG
tgggtgggcctgggtgggct

SEQ ID NO: 8812 - DNA, 20 bp, Artificial Sequence
  Description of Artificial Sequence: Synthetic oligonucleotide
  Target: COL7A1; (-) strand; PAM type: NRG; PAM sequence: TGG
ctgggtgggcctgggtgggc

SEQ ID NO: 8813 - DNA, 20 bp, Artificial Sequence
  Description of Artificial Sequence: Synthetic oligonucleotide
  Target: COL7A1; (-) strand; PAM type: NRG; PAM sequence: GGG
gggcctgggtgggcctgggt

SEQ ID NO: 8814 - DNA, 20 bp, Artificial Sequence
  Description of Artificial Sequence: Synthetic oligonucleotide
  Target: COL7A1; (-) strand; PAM type: NRG; PAM sequence: TGG
agggcctgggtgggcctggg

SEQ ID NO: 8815 - DNA, 20 bp, Artificial Sequence
  Description of Artificial Sequence: Synthetic oligonucleotide
  Target: COL7A1; (-) strand; PAM type: NRG; PAM sequence: GGG
gggagggcctgggtgggcct

SEQ ID NO: 8816 - DNA, 20 bp, Artificial Sequence
  Description of Artificial Sequence: Synthetic oligonucleotide
  Target: COL7A1; (-) strand; PAM type: NRG; PAM sequence: TGG
tgggagggcctgggtgggcc

SEQ ID NO: 8817 - DNA, 20 bp, Artificial Sequence
  Description of Artificial Sequence: Synthetic oligonucleotide
  Target: COL7A1; (-) strand; PAM type: NRG; PAM sequence: GGG
gggcctgggagggcctgggt

SEQ ID NO: 8818 - DNA, 20 bp, Artificial Sequence
  Description of Artificial Sequence: Synthetic oligonucleotide
  Target: COL7A1; (-) strand; PAM type: NRG; PAM sequence: TGG
tgggcctgggagggcctggg

SEQ ID NO: 8819 - DNA, 20 bp, Artificial Sequence
  Description of Artificial Sequence: Synthetic oligonucleotide
  Target: COL7A1; (-) strand; PAM type: NRG; PAM sequence: GGG
ggatgggcctgggagggcct

SEQ ID NO: 8820 - DNA, 20 bp, Artificial Sequence
  Description of Artificial Sequence: Synthetic oligonucleotide
  Target: COL7A1; (-) strand; PAM type: NRG; PAM sequence: TGG
tggatgggcctgggagggcc

SEQ ID NO: 8821 - DNA, 20 bp, Artificial Sequence
  Description of Artificial Sequence: Synthetic oligonucleotide
  Target: COL7A1; (-) strand; PAM type: NRG; PAM sequence: GGG
gggcctggatgggcctggga

SEQ ID NO: 8822 - DNA, 20 bp, Artificial Sequence
  Description of Artificial Sequence: Synthetic oligonucleotide
  Target: COL7A1; (-) strand; PAM type: NRG; PAM sequence: AGG
tgggcctggatgggcctggg

SEQ ID NO: 8823 - DNA, 20 bp, Artificial Sequence
  Description of Artificial Sequence: Synthetic oligonucleotide
  Target: COL7A1; (-) strand; PAM type: NRG; PAM sequence: GAG
gtgggcctggatgggcctgg

SEQ ID NO: 8824 - DNA, 20 bp, Artificial Sequence
  Description of Artificial Sequence: Synthetic oligonucleotide
  Target: COL7A1; (-) strand; PAM type: NRG; PAM sequence: GGG
gtgtgggcctggatgggcct

SEQ ID NO: 8825 - DNA, 20 bp, Artificial Sequence
  Description of Artificial Sequence: Synthetic oligonucleotide
  Target: COL7A1; (-) strand; PAM type: NRG; PAM sequence: TGG
agtgtgggcctggatgggcc

SEQ ID NO: 8826 - DNA, 20 bp, Artificial Sequence
  Description of Artificial Sequence: Synthetic oligonucleotide
  Target: COL7A1; (-) strand; PAM type: NRG; PAM sequence: GGG
cggtgagtgtgggcctggat

SEQ ID NO: 8827 - DNA, 20 bp, Artificial Sequence
  Description of Artificial Sequence: Synthetic oligonucleotide
  Target: COL7A1; (-) strand; PAM type: NRG; PAM sequence: TGG
acggtgagtgtgggcctgga

SEQ ID NO: 8828 - DNA, 20 bp, Artificial Sequence
  Description of Artificial Sequence: Synthetic oligonucleotide
  Target: COL7A1; (-) strand; PAM type: NRG; PAM sequence: TGG
actgacggtgagtgtgggcc

SEQ ID NO: 8829 - DNA, 20 bp, Artificial Sequence
  Description of Artificial Sequence: Synthetic oligonucleotide
  Target: COL7A1; (-) strand; PAM type: NRG; PAM sequence: GGG
gctgcactgacggtgagtgt

SEQ ID NO: 8830 - DNA, 20 bp, Artificial Sequence
  Description of Artificial Sequence: Synthetic oligonucleotide
  Target: COL7A1; (-) strand; PAM type: NRG; PAM sequence: TGG
agctgcactgacggtgagtg

SEQ ID NO: 8831 - DNA, 20 bp, Artificial Sequence
  Description of Artificial Sequence: Synthetic oligonucleotide
  Target: COL7A1; (-) strand; PAM type: NRG; PAM sequence: GAG
ggagaagctgcactgacggt

SEQ ID NO: 8832 - DNA, 20 bp, Artificial Sequence
  Description of Artificial Sequence: Synthetic oligonucleotide
  Target: COL7A1; (-) strand; PAM type: NRG; PAM sequence: CGG
gaagggagaagctgcactga

SEQ ID NO: 8833 - DNA, 20 bp, Artificial Sequence
  Description of Artificial Sequence: Synthetic oligonucleotide
  Target: COL7A1; (-) strand; PAM type: NRG; PAM sequence: AAG
tcctcgaggcgagaagggag

SEQ ID NO: 8834 - DNA, 20 bp, Artificial Sequence
  Description of Artificial Sequence: Synthetic oligonucleotide
  Target: COL7A1; (-) strand; PAM type: NRG; PAM sequence: GAG
cggtcctcgaggcgagaagg

SEQ ID NO: 8835 - DNA, 20 bp, Artificial Sequence
  Description of Artificial Sequence: Synthetic oligonucleotide
  Target: COL7A1; (-) strand; PAM type: NRG; PAM sequence: GGG
gccggtcctcgaggcgagaa

SEQ ID NO: 8836 - DNA, 20 bp, Artificial Sequence
  Description of Artificial Sequence: Synthetic oligonucleotide
  Target: COL7A1; (-) strand; PAM type: NRG; PAM sequence: AGG
tgccggtcctcgaggcgaga

SEQ ID NO: 8837 - DNA, 20 bp, Artificial Sequence
  Description of Artificial Sequence: Synthetic oligonucleotide
  Target: COL7A1; (-) strand; PAM type: NRG; PAM sequence: AAG
ctgccggtcctcgaggcgag

SEQ ID NO: 8838 - DNA, 20 bp, Artificial Sequence
  Description of Artificial Sequence: Synthetic oligonucleotide
  Target: COL7A1; (-) strand; PAM type: NRG; PAM sequence: GAG
ggcctgccggtcctcgaggc

SEQ ID NO: 8839 - DNA, 20 bp, Artificial Sequence
  Description of Artificial Sequence: Synthetic oligonucleotide
  Target: COL7A1; (-) strand; PAM type: NRG; PAM sequence: AGG
ccagggcctgccggtcctcg

SEQ ID NO: 8840 - DNA, 20 bp, Artificial Sequence
  Description of Artificial Sequence: Synthetic oligonucleotide
  Target: COL7A1; (-) strand; PAM type: NRG; PAM sequence: GAG
gccagggcctgccggtcctc

SEQ ID NO: 8841 - DNA, 20 bp, Artificial Sequence
  Description of Artificial Sequence: Synthetic oligonucleotide
  Target: COL7A1; (-) strand; PAM type: NRG; PAM sequence: CGG
taggggcggccagggcctgc

SEQ ID NO: 8842 - DNA, 20 bp, Artificial Sequence
  Description of Artificial Sequence: Synthetic oligonucleotide
  Target: COL7A1; (-) strand; PAM type: NRG; PAM sequence: GGG
gttgcacataggggcggcca

SEQ ID NO: 8843 - DNA, 20 bp, Artificial Sequence
  Description of Artificial Sequence: Synthetic oligonucleotide
  Target: COL7A1; (-) strand; PAM type: NRG; PAM sequence: AGG
tgttgcacataggggcggcc

SEQ ID NO: 8844 - DNA, 20 bp, Artificial Sequence
  Description of Artificial Sequence: Synthetic oligonucleotide
  Target: COL7A1; (-) strand; PAM type: NRG; PAM sequence: CAG
ctgttgcacataggggcggc

SEQ ID NO: 8845 - DNA, 20 bp, Artificial Sequence
  Description of Artificial Sequence: Synthetic oligonucleotide
  Target: COL7A1; (-) strand; PAM type: NRG; PAM sequence: CGG
ccatctgttgcacatagggg

SEQ ID NO: 8846 - DNA, 20 bp, Artificial Sequence
  Description of Artificial Sequence: Synthetic oligonucleotide
  Target: COL7A1; (-) strand; PAM type: NRG; PAM sequence: GGG
gtcccatctgttgcacatag

SEQ ID NO: 8847 - DNA, 20 bp, Artificial Sequence
  Description of Artificial Sequence: Synthetic oligonucleotide
  Target: COL7A1; (-) strand; PAM type: NRG; PAM sequence: GGG
ggtcccatctgttgcacata

SEQ ID NO: 8848 - DNA, 20 bp, Artificial Sequence
  Description of Artificial Sequence: Synthetic oligonucleotide
  Target: COL7A1; (-) strand; PAM type: NRG; PAM sequence: AGG
tggtcccatctgttgcacat

SEQ ID NO: 8849 - DNA, 20 bp, Artificial Sequence
  Description of Artificial Sequence: Synthetic oligonucleotide
  Target: COL7A1; (-) strand; PAM type: NRG; PAM sequence: TAG
ctggtcccatctgttgcaca

SEQ ID NO: 8850 - DNA, 20 bp, Artificial Sequence
  Description of Artificial Sequence: Synthetic oligonucleotide
  Target: COL7A1; (-) strand; PAM type: NRG; PAM sequence: TGG
tgaggtcagaggtcacagcc

SEQ ID NO: 8851 - DNA, 20 bp, Artificial Sequence
  Description of Artificial Sequence: Synthetic oligonucleotide
  Target: COL7A1; (-) strand; PAM type: NRG; PAM sequence: CAG
gtccctgaggtcagaggtca

SEQ ID NO: 8852 - DNA, 20 bp, Artificial Sequence
  Description of Artificial Sequence: Synthetic oligonucleotide
  Target: COL7A1; (-) strand; PAM type: NRG; PAM sequence: AGG
tctgttgtccctgaggtcag

SEQ ID NO: 8853 - DNA, 20 bp, Artificial Sequence
  Description of Artificial Sequence: Synthetic oligonucleotide
  Target: COL7A1; (-) strand; PAM type: NRG; PAM sequence: GAG
ttctgttgtccctgaggtca

SEQ ID NO: 8854 - DNA, 20 bp, Artificial Sequence
  Description of Artificial Sequence: Synthetic oligonucleotide
  Target: COL7A1; (-) strand; PAM type: NRG; PAM sequence: CAG
acttctgttgtccctgaggt

SEQ ID NO: 8855 - DNA, 20 bp, Artificial Sequence
  Description of Artificial Sequence: Synthetic oligonucleotide
  Target: COL7A1; (-) strand; PAM type: NRG; PAM sequence: AGG
ggtgacttctgttgtccctg

SEQ ID NO: 8856 - DNA, 20 bp, Artificial Sequence
  Description of Artificial Sequence: Synthetic oligonucleotide
  Target: COL7A1; (-) strand; PAM type: NRG; PAM sequence: GAG
gggtgacttctgttgtccct

SEQ ID NO: 8857 - DNA, 20 bp, Artificial Sequence
  Description of Artificial Sequence: Synthetic oligonucleotide
  Target: COL7A1; (-) strand; PAM type: NRG; PAM sequence: GGG
aaggcttgggtcagagatcg

SEQ ID NO: 8858 - DNA, 20 bp, Artificial Sequence
  Description of Artificial Sequence: Synthetic oligonucleotide
  Target: COL7A1; (-) strand; PAM type: NRG; PAM sequence: GGG
caaggcttgggtcagagatc

SEQ ID NO: 8859 - DNA, 20 bp, Artificial Sequence
  Description of Artificial Sequence: Synthetic oligonucleotide
  Target: COL7A1; (-) strand; PAM type: NRG; PAM sequence: CGG
ccaaggcttgggtcagagat

SEQ ID NO: 8860 - DNA, 20 bp, Artificial Sequence
  Description of Artificial Sequence: Synthetic oligonucleotide
  Target: COL7A1; (-) strand; PAM type: NRG; PAM sequence: GAG
ggattccaaggcttgggtca

SEQ ID NO: 8861 - DNA, 20 bp, Artificial Sequence
  Description of Artificial Sequence: Synthetic oligonucleotide
  Target: COL7A1; (-) strand; PAM type: NRG; PAM sequence: CAG
agggattccaaggcttgggt

SEQ ID NO: 8862 - DNA, 20 bp, Artificial Sequence
  Description of Artificial Sequence: Synthetic oligonucleotide
  Target: COL7A1; (-) strand; PAM type: NRG; PAM sequence: GGG
gagtagggattccaaggctt

SEQ ID NO: 8863 - DNA, 20 bp, Artificial Sequence
  Description of Artificial Sequence: Synthetic oligonucleotide
  Target: COL7A1; (-) strand; PAM type: NRG; PAM sequence: TGG
tgagtagggattccaaggct

SEQ ID NO: 8864 - DNA, 20 bp, Artificial Sequence
  Description of Artificial Sequence: Synthetic oligonucleotide
  Target: COL7A1; (-) strand; PAM type: NRG; PAM sequence: AGG
gcaggtgagtagggattcca

SEQ ID NO: 8865 - DNA, 20 bp, Artificial Sequence
  Description of Artificial Sequence: Synthetic oligonucleotide
  Target: COL7A1; (-) strand; PAM type: NRG; PAM sequence: AAG
agcaggtgagtagggattcc

SEQ ID NO: 8866 - DNA, 20 bp, Artificial Sequence
  Description of Artificial Sequence: Synthetic oligonucleotide
  Target: COL7A1; (-) strand; PAM type: NRG; PAM sequence: GGG
gagaggggagcaggtgagta

SEQ ID NO: 8867 - DNA, 20 bp, Artificial Sequence
  Description of Artificial Sequence: Synthetic oligonucleotide
  Target: COL7A1; (-) strand; PAM type: NRG; PAM sequence: AGG
agagaggggagcaggtgagt

SEQ ID NO: 8868 - DNA, 20 bp, Artificial Sequence
  Description of Artificial Sequence: Synthetic oligonucleotide
  Target: COL7A1; (-) strand; PAM type: NRG; PAM sequence: TAG
gagagaggggagcaggtgag

SEQ ID NO: 8869 - DNA, 20 bp, Artificial Sequence
  Description of Artificial Sequence: Synthetic oligonucleotide
  Target: COL7A1; (-) strand; PAM type: NRG; PAM sequence: GAG
ggcgagagaggggagcaggt

SEQ ID NO: 8870 - DNA, 20 bp, Artificial Sequence
  Description of Artificial Sequence: Synthetic oligonucleotide
  Target: COL7A1; (-) strand; PAM type: NRG; PAM sequence: AGG
tcctggcgagagaggggagc

SEQ ID NO: 8871 - DNA, 20 bp, Artificial Sequence
  Description of Artificial Sequence: Synthetic oligonucleotide
  Target: COL7A1; (-) strand; PAM type: NRG; PAM sequence: CAG
ctcctggcgagagaggggag

SEQ ID NO: 8872 - DNA, 20 bp, Artificial Sequence
  Description of Artificial Sequence: Synthetic oligonucleotide
  Target: COL7A1; (-) strand; PAM type: NRG; PAM sequence: GAG
gagctcctggcgagagaggg

SEQ ID NO: 8873 - DNA, 20 bp, Artificial Sequence
  Description of Artificial Sequence: Synthetic oligonucleotide
  Target: COL7A1; (-) strand; PAM type: NRG; PAM sequence: GGG
tggagctcctggcgagagag

SEQ ID NO: 8874 - DNA, 20 bp, Artificial Sequence
  Description of Artificial Sequence: Synthetic oligonucleotide
  Target: COL7A1; (-) strand; PAM type: NRG; PAM sequence: GGG
ctggagctcctggcgagaga

SEQ ID NO: 8875 - DNA, 20 bp, Artificial Sequence
  Description of Artificial Sequence: Synthetic oligonucleotide
  Target: COL7A1; (-) strand; PAM type: NRG; PAM sequence: AGG
cctggagctcctggcgagag

SEQ ID NO: 8876 - DNA, 20 bp, Artificial Sequence
  Description of Artificial Sequence: Synthetic oligonucleotide
  Target: COL7A1; (-) strand; PAM type: NRG; PAM sequence: GAG
ccctggagctcctggcgaga

SEQ ID NO: 8877 - DNA, 20 bp, Artificial Sequence
  Description of Artificial Sequence: Synthetic oligonucleotide
  Target: COL7A1; (-) strand; PAM type: NRG; PAM sequence: GAG
gtccctggagctcctggcga

SEQ ID NO: 8878 - DNA, 20 bp, Artificial Sequence
  Description of Artificial Sequence: Synthetic oligonucleotide
  Target: COL7A1; (-) strand; PAM type: NRG; PAM sequence: GAG
gggtccctggagctcctggc

SEQ ID NO: 8879 - DNA, 20 bp, Artificial Sequence
  Description of Artificial Sequence: Synthetic oligonucleotide
  Target: COL7A1; (-) strand; PAM type: NRG; PAM sequence: TGG
cctggggtccctggagctcc

SEQ ID NO: 8880 - DNA, 20 bp, Artificial Sequence
  Description of Artificial Sequence: Synthetic oligonucleotide
  Target: COL7A1; (-) strand; PAM type: NRG; PAM sequence: GAG
gggggctcctggggtccctg

SEQ ID NO: 8881 - DNA, 20 bp, Artificial Sequence
  Description of Artificial Sequence: Synthetic oligonucleotide
  Target: COL7A1; (-) strand; PAM type: NRG; PAM sequence: TGG
gtgggggctcctggggtccc

SEQ ID NO: 8882 - DNA, 20 bp, Artificial Sequence
  Description of Artificial Sequence: Synthetic oligonucleotide
  Target: COL7A1; (-) strand; PAM type: NRG; PAM sequence: GGG
gagagtggtgggggctcctg

SEQ ID NO: 8883 - DNA, 20 bp, Artificial Sequence
  Description of Artificial Sequence: Synthetic oligonucleotide
  Target: COL7A1; (-) strand; PAM type: NRG; PAM sequence: GGG
agagagtggtgggggctcct

SEQ ID NO: 8884 - DNA, 20 bp, Artificial Sequence
  Description of Artificial Sequence: Synthetic oligonucleotide
  Target: COL7A1; (-) strand; PAM type: NRG; PAM sequence: TGG
gagagagtggtgggggctcc

SEQ ID NO: 8885 - DNA, 20 bp, Artificial Sequence
  Description of Artificial Sequence: Synthetic oligonucleotide
  Target: COL7A1; (-) strand; PAM type: NRG; PAM sequence: GGG
ccccggagagagagtggtgg

SEQ ID NO: 8886 - DNA, 20 bp, Artificial Sequence
  Description of Artificial Sequence: Synthetic oligonucleotide
  Target: COL7A1; (-) strand; PAM type: NRG; PAM sequence: GGG
cccccggagagagagtggtg

SEQ ID NO: 8887 - DNA, 20 bp, Artificial Sequence
  Description of Artificial Sequence: Synthetic oligonucleotide
  Target: COL7A1; (-) strand; PAM type: NRG; PAM sequence: GGG
ccccccggagagagagtggt

SEQ ID NO: 8888 - DNA, 20 bp, Artificial Sequence
  Description of Artificial Sequence: Synthetic oligonucleotide
  Target: COL7A1; (-) strand; PAM type: NRG; PAM sequence: TGG
tccccccggagagagagtgg

SEQ ID NO: 8889 - DNA, 20 bp, Artificial Sequence
  Description of Artificial Sequence: Synthetic oligonucleotide
  Target: COL7A1; (-) strand; PAM type: NRG; PAM sequence: TGG
aggtccccccggagagagag

SEQ ID NO: 8890 - DNA, 20 bp, Artificial Sequence
  Description of Artificial Sequence: Synthetic oligonucleotide
  Target: COL7A1; (-) strand; PAM type: NRG; PAM sequence: GAG
gcgaggtccccccggagaga

SEQ ID NO: 8891 - DNA, 20 bp, Artificial Sequence
  Description of Artificial Sequence: Synthetic oligonucleotide
  Target: COL7A1; (-) strand; PAM type: NRG; PAM sequence: GAG
gagcgaggtccccccggaga

SEQ ID NO: 8892 - DNA, 20 bp, Artificial Sequence
  Description of Artificial Sequence: Synthetic oligonucleotide
  Target: COL7A1; (-) strand; PAM type: NRG; PAM sequence: GAG
gtgagcgaggtccccccgga

SEQ ID NO: 8893 - DNA, 20 bp, Artificial Sequence
  Description of Artificial Sequence: Synthetic oligonucleotide
  Target: COL7A1; (-) strand; PAM type: NRG; PAM sequence: GAG
gggtgagcgaggtccccccg

SEQ ID NO: 8894 - DNA, 20 bp, Artificial Sequence
  Description of Artificial Sequence: Synthetic oligonucleotide
  Target: COL7A1; (-) strand; PAM type: NRG; PAM sequence: CGG
cagggtgagcgaggtccccc

SEQ ID NO: 8895 - DNA, 20 bp, Artificial Sequence
  Description of Artificial Sequence: Synthetic oligonucleotide
  Target: COL7A1; (-) strand; PAM type: NRG; PAM sequence: AGG
tgtgtctgacagggtgagcg

SEQ ID NO: 8896 - DNA, 20 bp, Artificial Sequence
  Description of Artificial Sequence: Synthetic oligonucleotide
  Target: COL7A1; (-) strand; PAM type: NRG; PAM sequence: GAG
ctgtgtctgacagggtgagc

SEQ ID NO: 8897 - DNA, 20 bp, Artificial Sequence
  Description of Artificial Sequence: Synthetic oligonucleotide
  Target: COL7A1; (-) strand; PAM type: NRG; PAM sequence: GAG
gtccctgtgtctgacagggt

SEQ ID NO: 8898 - DNA, 20 bp, Artificial Sequence
  Description of Artificial Sequence: Synthetic oligonucleotide
  Target: COL7A1; (-) strand; PAM type: NRG; PAM sequence: GGG
cttggtccctgtgtctgaca

SEQ ID NO: 8899 - DNA, 20 bp, Artificial Sequence
  Description of Artificial Sequence: Synthetic oligonucleotide
  Target: COL7A1; (-) strand; PAM type: NRG; PAM sequence: AGG
acttggtccctgtgtctgac

SEQ ID NO: 8900 - DNA, 20 bp, Artificial Sequence
  Description of Artificial Sequence: Synthetic oligonucleotide
  Target: COL7A1; (-) strand; PAM type: NRG; PAM sequence: CAG
cacttggtccctgtgtctga

SEQ ID NO: 8901 - DNA, 20 bp, Artificial Sequence
  Description of Artificial Sequence: Synthetic oligonucleotide
  Target: COL7A1; (-) strand; PAM type: NRG; PAM sequence: TGG
tgcctctgaccctgctcact

SEQ ID NO: 8902 - DNA, 20 bp, Artificial Sequence
  Description of Artificial Sequence: Synthetic oligonucleotide
  Target: COL7A1; (-) strand; PAM type: NRG; PAM sequence: TGG
tgccccaacctctgaagctg

SEQ ID NO: 8903 - DNA, 20 bp, Artificial Sequence
  Description of Artificial Sequence: Synthetic oligonucleotide
  Target: COL7A1; (-) strand; PAM type: NRG; PAM sequence: AAG
cctgcctgccccaacctctg

SEQ ID NO: 8904 - DNA, 20 bp, Artificial Sequence
  Description of Artificial Sequence: Synthetic oligonucleotide
  Target: COL7A1; (-) strand; PAM type: NRG; PAM sequence: CAG
ccaacctcataaccatcttc

SEQ ID NO: 8905 - DNA, 20 bp, Artificial Sequence
  Description of Artificial Sequence: Synthetic oligonucleotide
  Target: COL7A1; (-) strand; PAM type: NRG; PAM sequence: CAG
ggccagaaggtaaggggccc

SEQ ID NO: 8906 - DNA, 20 bp, Artificial Sequence
  Description of Artificial Sequence: Synthetic oligonucleotide
  Target: COL7A1; (-) strand; PAM type: NRG; PAM sequence: GGG
cttcagggccagaaggtaag

SEQ ID NO: 8907 - DNA, 20 bp, Artificial Sequence
  Description of Artificial Sequence: Synthetic oligonucleotide
  Target: COL7A1; (-) strand; PAM type: NRG; PAM sequence: GGG
acttcagggccagaaggtaa

SEQ ID NO: 8908 - DNA, 20 bp, Artificial Sequence
  Description of Artificial Sequence: Synthetic oligonucleotide
  Target: COL7A1; (-) strand; PAM type: NRG; PAM sequence: AGG
gacttcagggccagaaggta

SEQ ID NO: 8909 - DNA, 20 bp, Artificial Sequence
  Description of Artificial Sequence: Synthetic oligonucleotide
  Target: COL7A1; (-) strand; PAM type: NRG; PAM sequence: AAG
ggacttcagggccagaaggt

SEQ ID NO: 8910 - DNA, 20 bp, Artificial Sequence
  Description of Artificial Sequence: Synthetic oligonucleotide
  Target: COL7A1; (-) strand; PAM type: NRG; PAM sequence: AGG
cgaaggacttcagggccaga

SEQ ID NO: 8911 - DNA, 20 bp, Artificial Sequence
  Description of Artificial Sequence: Synthetic oligonucleotide
  Target: COL7A1; (-) strand; PAM type: NRG; PAM sequence: AAG
ccgaaggacttcagggccag

SEQ ID NO: 8912 - DNA, 20 bp, Artificial Sequence
  Description of Artificial Sequence: Synthetic oligonucleotide
  Target: COL7A1; (-) strand; PAM type: NRG; PAM sequence: CAG
gccccgaaggacttcagggc

SEQ ID NO: 8913 - DNA, 20 bp, Artificial Sequence
  Description of Artificial Sequence: Synthetic oligonucleotide
  Target: COL7A1; (-) strand; PAM type: NRG; PAM sequence: GGG
agaggccccgaaggacttca

SEQ ID NO: 8914 - DNA, 20 bp, Artificial Sequence
  Description of Artificial Sequence: Synthetic oligonucleotide
  Target: COL7A1; (-) strand; PAM type: NRG; PAM sequence: AGG
cagaggccccgaaggacttc

SEQ ID NO: 8915 - DNA, 20 bp, Artificial Sequence
  Description of Artificial Sequence: Synthetic oligonucleotide
  Target: COL7A1; (-) strand; PAM type: NRG; PAM sequence: CAG
ccagaggccccgaaggactt

SEQ ID NO: 8916 - DNA, 20 bp, Artificial Sequence
  Description of Artificial Sequence: Synthetic oligonucleotide
  Target: COL7A1; (-) strand; PAM type: NRG; PAM sequence: AGG
gttggtcccagaggccccga

SEQ ID NO: 8917 - DNA, 20 bp, Artificial Sequence
  Description of Artificial Sequence: Synthetic oligonucleotide
  Target: COL7A1; (-) strand; PAM type: NRG; PAM sequence: AAG
tgttggtcccagaggccccg

SEQ ID NO: 8918 - DNA, 20 bp, Artificial Sequence
  Description of Artificial Sequence: Synthetic oligonucleotide
  Target: COL7A1; (-) strand; PAM type: NRG; PAM sequence: AGG
cctggcagtgttggtcccag

SEQ ID NO: 8919 - DNA, 20 bp, Artificial Sequence
  Description of Artificial Sequence: Synthetic oligonucleotide
  Target: COL7A1; (-) strand; PAM type: NRG; PAM sequence: GAG
acctggcagtgttggtccca

SEQ ID NO: 8920 - DNA, 20 bp, Artificial Sequence
  Description of Artificial Sequence: Synthetic oligonucleotide
  Target: COL7A1; (-) strand; PAM type: NRG; PAM sequence: CAG
ccacctggcagtgttggtcc

SEQ ID NO: 8921 - DNA, 20 bp, Artificial Sequence
  Description of Artificial Sequence: Synthetic oligonucleotide
  Target: COL7A1; (-) strand; PAM type: NRG; PAM sequence: TGG
ccagggccacctggcagtgt

SEQ ID NO: 8922 - DNA, 20 bp, Artificial Sequence
  Description of Artificial Sequence: Synthetic oligonucleotide
  Target: COL7A1; (-) strand; PAM type: NRG; PAM sequence: CAG
ggtcccccagggccacctgg

SEQ ID NO: 8923 - DNA, 20 bp, Artificial Sequence
  Description of Artificial Sequence: Synthetic oligonucleotide
  Target: COL7A1; (-) strand; PAM type: NRG; PAM sequence: TGG
gctggtcccccagggccacc

SEQ ID NO: 8924 - DNA, 20 bp, Artificial Sequence
  Description of Artificial Sequence: Synthetic oligonucleotide
  Target: COL7A1; (-) strand; PAM type: NRG; PAM sequence: GGG
atggctctgctggtccccca

SEQ ID NO: 8925 - DNA, 20 bp, Artificial Sequence
  Description of Artificial Sequence: Synthetic oligonucleotide
  Target: COL7A1; (-) strand; PAM type: NRG; PAM sequence: AGG
gatggctctgctggtccccc

SEQ ID NO: 8926 - DNA, 20 bp, Artificial Sequence
  Description of Artificial Sequence: Synthetic oligonucleotide
  Target: COL7A1; (-) strand; PAM type: NRG; PAM sequence: CAG
tgatggctctgctggtcccc

SEQ ID NO: 8927 - DNA, 20 bp, Artificial Sequence
  Description of Artificial Sequence: Synthetic oligonucleotide
  Target: COL7A1; (-) strand; PAM type: NRG; PAM sequence: TGG
agtggaaatgatggctctgc

SEQ ID NO: 8928 - DNA, 20 bp, Artificial Sequence
  Description of Artificial Sequence: Synthetic oligonucleotide
  Target: COL7A1; (-) strand; PAM type: NRG; PAM sequence: TGG
ccaggccccagtggaaatga

SEQ ID NO: 8929 - DNA, 20 bp, Artificial Sequence
  Description of Artificial Sequence: Synthetic oligonucleotide
  Target: COL7A1; (-) strand; PAM type: NRG; PAM sequence: TGG
gggggcttcccaggccccag

SEQ ID NO: 8930 - DNA, 20 bp, Artificial Sequence
  Description of Artificial Sequence: Synthetic oligonucleotide
  Target: COL7A1; (-) strand; PAM type: NRG; PAM sequence: CAG
attgggggcttcccaggccc

SEQ ID NO: 8931 - DNA, 20 bp, Artificial Sequence
  Description of Artificial Sequence: Synthetic oligonucleotide
  Target: COL7A1; (-) strand; PAM type: NRG; PAM sequence: AGG
ccaggaattgggggcttccc

SEQ ID NO: 8932 - DNA, 20 bp, Artificial Sequence
  Description of Artificial Sequence: Synthetic oligonucleotide
  Target: COL7A1; (-) strand; PAM type: NRG; PAM sequence: CAG
cccaggaattgggggcttcc

SEQ ID NO: 8933 - DNA, 20 bp, Artificial Sequence
  Description of Artificial Sequence: Synthetic oligonucleotide
  Target: COL7A1; (-) strand; PAM type: NRG; PAM sequence: GGG
cagggaaccccaggaattgg

SEQ ID NO: 8934 - DNA, 20 bp, Artificial Sequence
  Description of Artificial Sequence: Synthetic oligonucleotide
  Target: COL7A1; (-) strand; PAM type: NRG; PAM sequence: GGG
ccagggaaccccaggaattg

SEQ ID NO: 8935 - DNA, 20 bp, Artificial Sequence
  Description of Artificial Sequence: Synthetic oligonucleotide
  Target: COL7A1; (-) strand; PAM type: NRG; PAM sequence: GGG
cccagggaaccccaggaatt

SEQ ID NO: 8936 - DNA, 20 bp, Artificial Sequence
  Description of Artificial Sequence: Synthetic oligonucleotide
  Target: COL7A1; (-) strand; PAM type: NRG; PAM sequence: TGG
ccccagggaaccccaggaat

SEQ ID NO: 8937 - DNA, 20 bp, Artificial Sequence
  Description of Artificial Sequence: Synthetic oligonucleotide
  Target: COL7A1; (-) strand; PAM type: NRG; PAM sequence: AGG
atatctccccagggaacccc

SEQ ID NO: 8938 - DNA, 20 bp, Artificial Sequence
  Description of Artificial Sequence: Synthetic oligonucleotide
  Target: COL7A1; (-) strand; PAM type: NRG; PAM sequence: CAG
tatatctccccagggaaccc

SEQ ID NO: 8939 - DNA, 20 bp, Artificial Sequence
  Description of Artificial Sequence: Synthetic oligonucleotide
  Target: COL7A1; (-) strand; PAM type: NRG; PAM sequence: GGG
ctctgtcctatatctcccca

SEQ ID NO: 8940 - DNA, 20 bp, Artificial Sequence
  Description of Artificial Sequence: Synthetic oligonucleotide
  Target: COL7A1; (-) strand; PAM type: NRG; PAM sequence: AGG
actctgtcctatatctcccc

SEQ ID NO: 8941 - DNA, 20 bp, Artificial Sequence
  Description of Artificial Sequence: Synthetic oligonucleotide
  Target: COL7A1; (-) strand; PAM type: NRG; PAM sequence: CAG
gactctgtcctatatctccc

SEQ ID NO: 8942 - DNA, 20 bp, Artificial Sequence
  Description of Artificial Sequence: Synthetic oligonucleotide
  Target: COL7A1; (-) strand; PAM type: NRG; PAM sequence: GGG
tgggagagggtccatctctg

SEQ ID NO: 8943 - DNA, 20 bp, Artificial Sequence
  Description of Artificial Sequence: Synthetic oligonucleotide
  Target: COL7A1; (-) strand; PAM type: NRG; PAM sequence: GGG
ttgggagagggtccatctct

SEQ ID NO: 8944 - DNA, 20 bp, Artificial Sequence
  Description of Artificial Sequence: Synthetic oligonucleotide
  Target: COL7A1; (-) strand; PAM type: NRG; PAM sequence: TGG
tttgggagagggtccatctc

SEQ ID NO: 8945 - DNA, 20 bp, Artificial Sequence
  Description of Artificial Sequence: Synthetic oligonucleotide
  Target: COL7A1; (-) strand; PAM type: NRG; PAM sequence: GGG
ggagcgtgcactttgggaga

SEQ ID NO: 8946 - DNA, 20 bp, Artificial Sequence
  Description of Artificial Sequence: Synthetic oligonucleotide
  Target: COL7A1; (-) strand; PAM type: NRG; PAM sequence: AGG
gggagcgtgcactttgggag

SEQ ID NO: 8947 - DNA, 20 bp, Artificial Sequence
  Description of Artificial Sequence: Synthetic oligonucleotide
  Target: COL7A1; (-) strand; PAM type: NRG; PAM sequence: GAG
ggggagcgtgcactttggga

SEQ ID NO: 8948 - DNA, 20 bp, Artificial Sequence
  Description of Artificial Sequence: Synthetic oligonucleotide
  Target: COL7A1; (-) strand; PAM type: NRG; PAM sequence: GAG
gaggggagcgtgcactttgg

SEQ ID NO: 8949 - DNA, 20 bp, Artificial Sequence
  Description of Artificial Sequence: Synthetic oligonucleotide
  Target: COL7A1; (-) strand; PAM type: NRG; PAM sequence: GGG
ttgaggggagcgtgcacttt

SEQ ID NO: 8950 - DNA, 20 bp, Artificial Sequence
  Description of Artificial Sequence: Synthetic oligonucleotide
  Target: COL7A1; (-) strand; PAM type: NRG; PAM sequence: TGG
attgaggggagcgtgcactt

SEQ ID NO: 8951 - DNA, 20 bp, Artificial Sequence
  Description of Artificial Sequence: Synthetic oligonucleotide
  Target: COL7A1; (-) strand; PAM type: NRG; PAM sequence: GAG
tggtcatggtgaattgaggg

SEQ ID NO: 8952 - DNA, 20 bp, Artificial Sequence
  Description of Artificial Sequence: Synthetic oligonucleotide
  Target: COL7A1; (-) strand; PAM type: NRG; PAM sequence: GGG
catggtcatggtgaattgag

SEQ ID NO: 8953 - DNA, 20 bp, Artificial Sequence
  Description of Artificial Sequence: Synthetic oligonucleotide
  Target: COL7A1; (-) strand; PAM type: NRG; PAM sequence: GGG
ccatggtcatggtgaattga

SEQ ID NO: 8954 - DNA, 20 bp, Artificial Sequence
  Description of Artificial Sequence: Synthetic oligonucleotide
  Target: COL7A1; (-) strand; PAM type: NRG; PAM sequence: AGG
gccatggtcatggtgaattg

SEQ ID NO: 8955 - DNA, 20 bp, Artificial Sequence
  Description of Artificial Sequence: Synthetic oligonucleotide
  Target: COL7A1; (-) strand; PAM type: NRG; PAM sequence: GAG
agccatggtcatggtgaatt

SEQ ID NO: 8956 - DNA, 20 bp, Artificial Sequence
  Description of Artificial Sequence: Synthetic oligonucleotide
  Target: COL7A1; (-) strand; PAM type: NRG; PAM sequence: TGG
gtgagttgaagccatggtca

SEQ ID NO: 8957 - DNA, 20 bp, Artificial Sequence
  Description of Artificial Sequence: Synthetic oligonucleotide
  Target: COL7A1; (-) strand; PAM type: NRG; PAM sequence: TGG
gagcgggtgagttgaagcca

SEQ ID NO: 8958 - DNA, 20 bp, Artificial Sequence
  Description of Artificial Sequence: Synthetic oligonucleotide
  Target: COL7A1; (-) strand; PAM type: NRG; PAM sequence: AAG
aaaggggagcgggtgagttg

SEQ ID NO: 8959 - DNA, 20 bp, Artificial Sequence
  Description of Artificial Sequence: Synthetic oligonucleotide
  Target: COL7A1; (-) strand; PAM type: NRG; PAM sequence: GAG
ggcgagaaaggggagcgggt

SEQ ID NO: 8960 - DNA, 20 bp, Artificial Sequence
  Description of Artificial Sequence: Synthetic oligonucleotide
  Target: COL7A1; (-) strand; PAM type: NRG; PAM sequence: GGG
ccagggcgagaaaggggagc

SEQ ID NO: 8961 - DNA, 20 bp, Artificial Sequence
  Description of Artificial Sequence: Synthetic oligonucleotide
  Target: COL7A1; (-) strand; PAM type: NRG; PAM sequence: CGG
accagggcgagaaaggggag

SEQ ID NO: 8962 - DNA, 20 bp, Artificial Sequence
  Description of Artificial Sequence: Synthetic oligonucleotide
  Target: COL7A1; (-) strand; PAM type: NRG; PAM sequence: GAG
gtgaccagggcgagaaaggg

SEQ ID NO: 8963 - DNA, 20 bp, Artificial Sequence
  Description of Artificial Sequence: Synthetic oligonucleotide
  Target: COL7A1; (-) strand; PAM type: NRG; PAM sequence: GGG
gggtgaccagggcgagaaag

SEQ ID NO: 8964 - DNA, 20 bp, Artificial Sequence
  Description of Artificial Sequence: Synthetic oligonucleotide
  Target: COL7A1; (-) strand; PAM type: NRG; PAM sequence: GGG
agggtgaccagggcgagaaa

SEQ ID NO: 8965 - DNA, 20 bp, Artificial Sequence
  Description of Artificial Sequence: Synthetic oligonucleotide
  Target: COL7A1; (-) strand; PAM type: NRG; PAM sequence: AGG
aagggtgaccagggcgagaa

SEQ ID NO: 8966 - DNA, 20 bp, Artificial Sequence
  Description of Artificial Sequence: Synthetic oligonucleotide
  Target: COL7A1; (-) strand; PAM type: NRG; PAM sequence: AAG
caagggtgaccagggcgaga

SEQ ID NO: 8967 - DNA, 20 bp, Artificial Sequence
  Description of Artificial Sequence: Synthetic oligonucleotide
  Target: COL7A1; (-) strand; PAM type: NRG; PAM sequence: GAG
gccccaagggtgaccagggc

SEQ ID NO: 8968 - DNA, 20 bp, Artificial Sequence
  Description of Artificial Sequence: Synthetic oligonucleotide
  Target: COL7A1; (-) strand; PAM type: NRG; PAM sequence: GGG
ccaggccccaagggtgacca

SEQ ID NO: 8969 - DNA, 20 bp, Artificial Sequence
  Description of Artificial Sequence: Synthetic oligonucleotide
  Target: COL7A1; (-) strand; PAM type: NRG; PAM sequence: AGG
gccaggccccaagggtgacc

SEQ ID NO: 8970 - DNA, 20 bp, Artificial Sequence
  Description of Artificial Sequence: Synthetic oligonucleotide
  Target: COL7A1; (-) strand; PAM type: NRG; PAM sequence: CAG
agccaggccccaagggtgac

SEQ ID NO: 8971 - DNA, 20 bp, Artificial Sequence
  Description of Artificial Sequence: Synthetic oligonucleotide
  Target: COL7A1; (-) strand; PAM type: NRG; PAM sequence: GGG
gacgggcagccaggccccaa

SEQ ID NO: 8972 - DNA, 20 bp, Artificial Sequence
  Description of Artificial Sequence: Synthetic oligonucleotide
  Target: COL7A1; (-) strand; PAM type: NRG; PAM sequence: AGG
tgacgggcagccaggcccca

SEQ ID NO: 8973 - DNA, 20 bp, Artificial Sequence
  Description of Artificial Sequence: Synthetic oligonucleotide
  Target: COL7A1; (-) strand; PAM type: NRG; PAM sequence: AAG
ttgacgggcagccaggcccc

SEQ ID NO: 8974 - DNA, 20 bp, Artificial Sequence
  Description of Artificial Sequence: Synthetic oligonucleotide
  Target: COL7A1; (-) strand; PAM type: NRG; PAM sequence: AGG
cgaggctttgacgggcagcc

SEQ ID NO: 8975 - DNA, 20 bp, Artificial Sequence
  Description of Artificial Sequence: Synthetic oligonucleotide
  Target: COL7A1; (-) strand; PAM type: NRG; PAM sequence: CAG
ccgaggctttgacgggcagc

SEQ ID NO: 8976 - DNA, 20 bp, Artificial Sequence
  Description of Artificial Sequence: Synthetic oligonucleotide
  Target: COL7A1; (-) strand; PAM type: NRG; PAM sequence: CAG
gtgaccgaggctttgacggg

SEQ ID NO: 8977 - DNA, 20 bp, Artificial Sequence
  Description of Artificial Sequence: Synthetic oligonucleotide
  Target: COL7A1; (-) strand; PAM type: NRG; PAM sequence: GGG
agggtgaccgaggctttgac

SEQ ID NO: 8978 - DNA, 20 bp, Artificial Sequence
  Description of Artificial Sequence: Synthetic oligonucleotide
  Target: COL7A1; (-) strand; PAM type: NRG; PAM sequence: CGG
cagggtgaccgaggctttga

SEQ ID NO: 8979 - DNA, 20 bp, Artificial Sequence
  Description of Artificial Sequence: Synthetic oligonucleotide
  Target: COL7A1; (-) strand; PAM type: NRG; PAM sequence: AGG
ttctgttcccagggtgaccg

SEQ ID NO: 8980 - DNA, 20 bp, Artificial Sequence
  Description of Artificial Sequence: Synthetic oligonucleotide
  Target: COL7A1; (-) strand; PAM type: NRG; PAM sequence: GAG
cttctgttcccagggtgacc

SEQ ID NO: 8981 - DNA, 20 bp, Artificial Sequence
  Description of Artificial Sequence: Synthetic oligonucleotide
  Target: COL7A1; (-) strand; PAM type: NRG; PAM sequence: GGG
tcatgcttcttctgttccca

SEQ ID NO: 8982 - DNA, 20 bp, Artificial Sequence
  Description of Artificial Sequence: Synthetic oligonucleotide
  Target: COL7A1; (-) strand; PAM type: NRG; PAM sequence: AGG
ctcatgcttcttctgttccc

SEQ ID NO: 8983 - DNA, 20 bp, Artificial Sequence
  Description of Artificial Sequence: Synthetic oligonucleotide
  Target: COL7A1; (-) strand; PAM type: NRG; PAM sequence: CAG
tctcatgcttcttctgttcc

SEQ ID NO: 8984 - DNA, 20 bp, Artificial Sequence
  Description of Artificial Sequence: Synthetic oligonucleotide
  Target: COL7A1; (-) strand; PAM type: NRG; PAM sequence: AGG
ctgagggaggtcagggcaga

SEQ ID NO: 8985 - DNA, 20 bp, Artificial Sequence
  Description of Artificial Sequence: Synthetic oligonucleotide
  Target: COL7A1; (-) strand; PAM type: NRG; PAM sequence: AAG
gctgagggaggtcagggcag

SEQ ID NO: 8986 - DNA, 20 bp, Artificial Sequence
  Description of Artificial Sequence: Synthetic oligonucleotide
  Target: COL7A1; (-) strand; PAM type: NRG; PAM sequence: CAG
agagctgagggaggtcaggg

SEQ ID NO: 8987 - DNA, 20 bp, Artificial Sequence
  Description of Artificial Sequence: Synthetic oligonucleotide
  Target: COL7A1; (-) strand; PAM type: NRG; PAM sequence: GGG
tccagagctgagggaggtca

SEQ ID NO: 8988 - DNA, 20 bp, Artificial Sequence
  Description of Artificial Sequence: Synthetic oligonucleotide
  Target: COL7A1; (-) strand; PAM type: NRG; PAM sequence: AGG
ttccagagctgagggaggtc

SEQ ID NO: 8989 - DNA, 20 bp, Artificial Sequence
  Description of Artificial Sequence: Synthetic oligonucleotide
  Target: COL7A1; (-) strand; PAM type: NRG; PAM sequence: CAG
gttccagagctgagggaggt

SEQ ID NO: 8990 - DNA, 20 bp, Artificial Sequence
  Description of Artificial Sequence: Synthetic oligonucleotide
  Target: COL7A1; (-) strand; PAM type: NRG; PAM sequence: AGG
ggaggttccagagctgaggg

SEQ ID NO: 8991 - DNA, 20 bp, Artificial Sequence
  Description of Artificial Sequence: Synthetic oligonucleotide
  Target: COL7A1; (-) strand; PAM type: NRG; PAM sequence: GAG
gggaggttccagagctgagg

SEQ ID NO: 8992 - DNA, 20 bp, Artificial Sequence
  Description of Artificial Sequence: Synthetic oligonucleotide
  Target: COL7A1; (-) strand; PAM type: NRG; PAM sequence: GGG
cagggaggttccagagctga

SEQ ID NO: 8993 - DNA, 20 bp, Artificial Sequence
  Description of Artificial Sequence: Synthetic oligonucleotide
  Target: COL7A1; (-) strand; PAM type: NRG; PAM sequence: AGG
tcagggaggttccagagctg

SEQ ID NO: 8994 - DNA, 20 bp, Artificial Sequence
  Description of Artificial Sequence: Synthetic oligonucleotide
  Target: COL7A1; (-) strand; PAM type: NRG; PAM sequence: GAG
ttcagggaggttccagagct

SEQ ID NO: 8995 - DNA, 20 bp, Artificial Sequence
  Description of Artificial Sequence: Synthetic oligonucleotide
  Target: COL7A1; (-) strand; PAM type: NRG; PAM sequence: GAG
gggagttcagggaggttcca

SEQ ID NO: 8996 - DNA, 20 bp, Artificial Sequence
  Description of Artificial Sequence: Synthetic oligonucleotide
  Target: COL7A1; (-) strand; PAM type: NRG; PAM sequence: CAG
atgggagttcagggaggttc

SEQ ID NO: 8997 - DNA, 20 bp, Artificial Sequence
  Description of Artificial Sequence: Synthetic oligonucleotide
  Target: COL7A1; (-) strand; PAM type: NRG; PAM sequence: AGG
gagctcatgggagttcaggg

SEQ ID NO: 8998 - DNA, 20 bp, Artificial Sequence
  Description of Artificial Sequence: Synthetic oligonucleotide
  Target: COL7A1; (-) strand; PAM type: NRG; PAM sequence: GAG
ggagctcatgggagttcagg

SEQ ID NO: 8999 - DNA, 20 bp, Artificial Sequence
  Description of Artificial Sequence: Synthetic oligonucleotide
  Target: COL7A1; (-) strand; PAM type: NRG; PAM sequence: GGG
agggagctcatgggagttca

SEQ ID NO: 9000 - DNA, 20 bp, Artificial Sequence
  Description of Artificial Sequence: Synthetic oligonucleotide
  Target: COL7A1; (-) strand; PAM type: NRG; PAM sequence: AGG
cagggagctcatgggagttc

SEQ ID NO: 9001 - DNA, 20 bp, Artificial Sequence
  Description of Artificial Sequence: Synthetic oligonucleotide
  Target: COL7A1; (-) strand; PAM type: NRG; PAM sequence: CAG
ccagggagctcatgggagtt

SEQ ID NO: 9002 - DNA, 20 bp, Artificial Sequence
  Description of Artificial Sequence: Synthetic oligonucleotide
  Target: COL7A1; (-) strand; PAM type: NRG; PAM sequence: GAG
ttaggccagggagctcatgg

SEQ ID NO: 9003 - DNA, 20 bp, Artificial Sequence
  Description of Artificial Sequence: Synthetic oligonucleotide
  Target: COL7A1; (-) strand; PAM type: NRG; PAM sequence: GGG
cattaggccagggagctcat

SEQ ID NO: 9004 - DNA, 20 bp, Artificial Sequence
  Description of Artificial Sequence: Synthetic oligonucleotide
  Target: COL7A1; (-) strand; PAM type: NRG; PAM sequence: TGG
gcattaggccagggagctca

SEQ ID NO: 9005 - DNA, 20 bp, Artificial Sequence
  Description of Artificial Sequence: Synthetic oligonucleotide
  Target: COL7A1; (-) strand; PAM type: NRG; PAM sequence: GAG
ggtttgggcattaggccagg

SEQ ID NO: 9006 - DNA, 20 bp, Artificial Sequence
  Description of Artificial Sequence: Synthetic oligonucleotide
  Target: COL7A1; (-) strand; PAM type: NRG; PAM sequence: GGG
aaggtttgggcattaggcca

SEQ ID NO: 9007 - DNA, 20 bp, Artificial Sequence
  Description of Artificial Sequence: Synthetic oligonucleotide
  Target: COL7A1; (-) strand; PAM type: NRG; PAM sequence: AGG
gaaggtttgggcattaggcc

SEQ ID NO: 9008 - DNA, 20 bp, Artificial Sequence
  Description of Artificial Sequence: Synthetic oligonucleotide
  Target: COL7A1; (-) strand; PAM type: NRG; PAM sequence: CAG
agaaggtttgggcattaggc

SEQ ID NO: 9009 - DNA, 20 bp, Artificial Sequence
  Description of Artificial Sequence: Synthetic oligonucleotide
  Target: COL7A1; (-) strand; PAM type: NRG; PAM sequence: AGG
ttacagaaggtttgggcatt

SEQ ID NO: 9010 - DNA, 20 bp, Artificial Sequence
  Description of Artificial Sequence: Synthetic oligonucleotide
  Target: COL7A1; (-) strand; PAM type: NRG; PAM sequence: TAG
gttacagaaggtttgggcat

SEQ ID NO: 9011 - DNA, 20 bp, Artificial Sequence
  Description of Artificial Sequence: Synthetic oligonucleotide
  Target: COL7A1; (-) strand; PAM type: NRG; PAM sequence: GGG
gcttgggttacagaaggttt

SEQ ID NO: 9012 - DNA, 20 bp, Artificial Sequence
  Description of Artificial Sequence: Synthetic oligonucleotide
  Target: COL7A1; (-) strand; PAM type: NRG; PAM sequence: TGG
tgcttgggttacagaaggtt

SEQ ID NO: 9013 - DNA, 20 bp, Artificial Sequence
  Description of Artificial Sequence: Synthetic oligonucleotide
  Target: COL7A1; (-) strand; PAM type: NRG; PAM sequence: AGG
acaggtgcttgggttacaga

SEQ ID NO: 9014 - DNA, 20 bp, Artificial Sequence
  Description of Artificial Sequence: Synthetic oligonucleotide
  Target: COL7A1; (-) strand; PAM type: NRG; PAM sequence: AAG
cacaggtgcttgggttacag

SEQ ID NO: 9015 - DNA, 20 bp, Artificial Sequence
  Description of Artificial Sequence: Synthetic oligonucleotide
  Target: COL7A1; (-) strand; PAM type: NRG; PAM sequence: CAG
gctcacaggtgcttgggtta

SEQ ID NO: 9016 - DNA, 20 bp, Artificial Sequence
  Description of Artificial Sequence: Synthetic oligonucleotide
  Target: COL7A1; (-) strand; PAM type: NRG; PAM sequence: GGG
tggttggctcacaggtgctt

SEQ ID NO: 9017 - DNA, 20 bp, Artificial Sequence
  Description of Artificial Sequence: Synthetic oligonucleotide
  Target: COL7A1; (-) strand; PAM type: NRG; PAM sequence: TGG
ctggttggctcacaggtgct

SEQ ID NO: 9018 - DNA, 20 bp, Artificial Sequence
  Description of Artificial Sequence: Synthetic oligonucleotide
  Target: COL7A1; (-) strand; PAM type: NRG; PAM sequence: AGG
atcacatctggttggctcac

SEQ ID NO: 9019 - DNA, 20 bp, Artificial Sequence
  Description of Artificial Sequence: Synthetic oligonucleotide
  Target: COL7A1; (-) strand; PAM type: NRG; PAM sequence: CAG
gatcacatctggttggctca

SEQ ID NO: 9020 - DNA, 20 bp, Artificial Sequence
  Description of Artificial Sequence: Synthetic oligonucleotide
  Target: COL7A1; (-) strand; PAM type: NRG; PAM sequence: TGG
tcatggggatcacatctggt

SEQ ID NO: 9021 - DNA, 20 bp, Artificial Sequence
  Description of Artificial Sequence: Synthetic oligonucleotide
  Target: COL7A1; (-) strand; PAM type: NRG; PAM sequence: TGG
ggagtcatggggatcacatc

SEQ ID NO: 9022 - DNA, 20 bp, Artificial Sequence
  Description of Artificial Sequence: Synthetic oligonucleotide
  Target: COL7A1; (-) strand; PAM type: NRG; PAM sequence: GGG
atagtggagttggagtcatg

SEQ ID NO: 9023 - DNA, 20 bp, Artificial Sequence
  Description of Artificial Sequence: Synthetic oligonucleotide
  Target: COL7A1; (-) strand; PAM type: NRG; PAM sequence: GGG
tatagtggagttggagtcat

SEQ ID NO: 9024 - DNA, 20 bp, Artificial Sequence
  Description of Artificial Sequence: Synthetic oligonucleotide
  Target: COL7A1; (-) strand; PAM type: NRG; PAM sequence: TGG
ctatagtggagttggagtca

SEQ ID NO: 9025 - DNA, 20 bp, Artificial Sequence
  Description of Artificial Sequence: Synthetic oligonucleotide
  Target: COL7A1; (-) strand; PAM type: NRG; PAM sequence: GAG
agggggctatagtggagttg

SEQ ID NO: 9026 - DNA, 20 bp, Artificial Sequence
  Description of Artificial Sequence: Synthetic oligonucleotide
  Target: COL7A1; (-) strand; PAM type: NRG; PAM sequence: TGG
gcagggggctatagtggagt

SEQ ID NO: 9027 - DNA, 20 bp, Artificial Sequence
  Description of Artificial Sequence: Synthetic oligonucleotide
  Target: COL7A1; (-) strand; PAM type: NRG; PAM sequence: GAG
cagggcagggggctatagtg

SEQ ID NO: 9028 - DNA, 20 bp, Artificial Sequence
  Description of Artificial Sequence: Synthetic oligonucleotide
  Target: COL7A1; (-) strand; PAM type: NRG; PAM sequence: TGG
atcagggcagggggctatag

SEQ ID NO: 9029 - DNA, 20 bp, Artificial Sequence
  Description of Artificial Sequence: Synthetic oligonucleotide
  Target: COL7A1; (-) strand; PAM type: NRG; PAM sequence: TAG
tgcatcagggcagggggcta

SEQ ID NO: 9030 - DNA, 20 bp, Artificial Sequence
  Description of Artificial Sequence: Synthetic oligonucleotide
  Target: COL7A1; (-) strand; PAM type: NRG; PAM sequence: GGG
ggcatgtgcatcagggcagg

SEQ ID NO: 9031 - DNA, 20 bp, Artificial Sequence
  Description of Artificial Sequence: Synthetic oligonucleotide
  Target: COL7A1; (-) strand; PAM type: NRG; PAM sequence: GGG
gggcatgtgcatcagggcag

SEQ ID NO: 9032 - DNA, 20 bp, Artificial Sequence
  Description of Artificial Sequence: Synthetic oligonucleotide
  Target: COL7A1; (-) strand; PAM type: NRG; PAM sequence: GGG
ggggcatgtgcatcagggca

SEQ ID NO: 9033 - DNA, 20 bp, Artificial Sequence
  Description of Artificial Sequence: Synthetic oligonucleotide
  Target: COL7A1; (-) strand; PAM type: NRG; PAM sequence: AGG
gggggcatgtgcatcagggc

SEQ ID NO: 9034 - DNA, 20 bp, Artificial Sequence
  Description of Artificial Sequence: Synthetic oligonucleotide
  Target: COL7A1; (-) strand; PAM type: NRG; PAM sequence: CAG
agggggcatgtgcatcaggg

SEQ ID NO: 9035 - DNA, 20 bp, Artificial Sequence
  Description of Artificial Sequence: Synthetic oligonucleotide
  Target: COL7A1; (-) strand; PAM type: NRG; PAM sequence: GGG
tggagggggcatgtgcatca

SEQ ID NO: 9036 - DNA, 20 bp, Artificial Sequence
  Description of Artificial Sequence: Synthetic oligonucleotide
  Target: COL7A1; (-) strand; PAM type: NRG; PAM sequence: AGG
gtggagggggcatgtgcatc

SEQ ID NO: 9037 - DNA, 20 bp, Artificial Sequence
  Description of Artificial Sequence: Synthetic oligonucleotide
  Target: COL7A1; (-) strand; PAM type: NRG; PAM sequence: CAG
ggtggagggggcatgtgcat

SEQ ID NO: 9038 - DNA, 20 bp, Artificial Sequence
  Description of Artificial Sequence: Synthetic oligonucleotide
  Target: COL7A1; (-) strand; PAM type: NRG; PAM sequence: GGG
gaaagcatgggaggtggagg

SEQ ID NO: 9039 - DNA, 20 bp, Artificial Sequence
  Description of Artificial Sequence: Synthetic oligonucleotide
  Target: COL7A1; (-) strand; PAM type: NRG; PAM sequence: GGG
tgaaagcatgggaggtggag

SEQ ID NO: 9040 - DNA, 20 bp, Artificial Sequence
  Description of Artificial Sequence: Synthetic oligonucleotide
  Target: COL7A1; (-) strand; PAM type: NRG; PAM sequence: GGG
atgaaagcatgggaggtgga

SEQ ID NO: 9041 - DNA, 20 bp, Artificial Sequence
  Description of Artificial Sequence: Synthetic oligonucleotide
  Target: COL7A1; (-) strand; PAM type: NRG; PAM sequence: AGG
gatgaaagcatgggaggtgg

SEQ ID NO: 9042 - DNA, 20 bp, Artificial Sequence
  Description of Artificial Sequence: Synthetic oligonucleotide
  Target: COL7A1; (-) strand; PAM type: NRG; PAM sequence: GAG
ggatgaaagcatgggaggtg

SEQ ID NO: 9043 - DNA, 20 bp, Artificial Sequence
  Description of Artificial Sequence: Synthetic oligonucleotide
  Target: COL7A1; (-) strand; PAM type: NRG; PAM sequence: TGG
taggatgaaagcatgggagg

SEQ ID NO: 9044 - DNA, 20 bp, Artificial Sequence
  Description of Artificial Sequence: Synthetic oligonucleotide
  Target: COL7A1; (-) strand; PAM type: NRG; PAM sequence: AGG
agttaggatgaaagcatggg

SEQ ID NO: 9045 - DNA, 20 bp, Artificial Sequence
  Description of Artificial Sequence: Synthetic oligonucleotide
  Target: COL7A1; (-) strand; PAM type: NRG; PAM sequence: GAG
gagttaggatgaaagcatgg

SEQ ID NO: 9046 - DNA, 20 bp, Artificial Sequence
  Description of Artificial Sequence: Synthetic oligonucleotide
  Target: COL7A1; (-) strand; PAM type: NRG; PAM sequence: GGG
tggagttaggatgaaagcat

SEQ ID NO: 9047 - DNA, 20 bp, Artificial Sequence
  Description of Artificial Sequence: Synthetic oligonucleotide
  Target: COL7A1; (-) strand; PAM type: NRG; PAM sequence: TGG
gtggagttaggatgaaagca

SEQ ID NO: 9048 - DNA, 20 bp, Artificial Sequence
  Description of Artificial Sequence: Synthetic oligonucleotide
  Target: COL7A1; (-) strand; PAM type: NRG; PAM sequence: AAG
tcacagtggagttaggatga

SEQ ID NO: 9049 - DNA, 20 bp, Artificial Sequence
  Description of Artificial Sequence: Synthetic oligonucleotide
  Target: COL7A1; (-) strand; PAM type: NRG; PAM sequence: AGG
gttggggtcacagtggagtt

SEQ ID NO: 9050 - DNA, 20 bp, Artificial Sequence
  Description of Artificial Sequence: Synthetic oligonucleotide
  Target: COL7A1; (-) strand; PAM type: NRG; PAM sequence: TAG
ggttggggtcacagtggagt

SEQ ID NO: 9051 - DNA, 20 bp, Artificial Sequence
  Description of Artificial Sequence: Synthetic oligonucleotide
  Target: COL7A1; (-) strand; PAM type: NRG; PAM sequence: GAG
ggtgggttggggtcacagtg

SEQ ID NO: 9052 - DNA, 20 bp, Artificial Sequence
  Description of Artificial Sequence: Synthetic oligonucleotide
  Target: COL7A1; (-) strand; PAM type: NRG; PAM sequence: TGG
aaggtgggttggggtcacag

SEQ ID NO: 9053 - DNA, 20 bp, Artificial Sequence
  Description of Artificial Sequence: Synthetic oligonucleotide
  Target: COL7A1; (-) strand; PAM type: NRG; PAM sequence: CAG
gtcaaggtgggttggggtca

SEQ ID NO: 9054 - DNA, 20 bp, Artificial Sequence
  Description of Artificial Sequence: Synthetic oligonucleotide
  Target: COL7A1; (-) strand; PAM type: NRG; PAM sequence: GGG
cgaggtgtcaaggtgggttg

SEQ ID NO: 9055 - DNA, 20 bp, Artificial Sequence
  Description of Artificial Sequence: Synthetic oligonucleotide
  Target: COL7A1; (-) strand; PAM type: NRG; PAM sequence: GGG
tcgaggtgtcaaggtgggtt

SEQ ID NO: 9056 - DNA, 20 bp, Artificial Sequence
  Description of Artificial Sequence: Synthetic oligonucleotide
  Target: COL7A1; (-) strand; PAM type: NRG; PAM sequence: TGG
ctcgaggtgtcaaggtgggt

SEQ ID NO: 9057 - DNA, 20 bp, Artificial Sequence
  Description of Artificial Sequence: Synthetic oligonucleotide
  Target: COL7A1; (-) strand; PAM type: NRG; PAM sequence: GGG
tggtctcgaggtgtcaaggt

SEQ ID NO: 9058 - DNA, 20 bp, Artificial Sequence
  Description of Artificial Sequence: Synthetic oligonucleotide
  Target: COL7A1; (-) strand; PAM type: NRG; PAM sequence: TGG
ctggtctcgaggtgtcaagg

SEQ ID NO: 9059 - DNA, 20 bp, Artificial Sequence
  Description of Artificial Sequence: Synthetic oligonucleotide
  Target: COL7A1; (-) strand; PAM type: NRG; PAM sequence: AGG
gggctggtctcgaggtgtca

SEQ ID NO: 9060 - DNA, 20 bp, Artificial Sequence
  Description of Artificial Sequence: Synthetic oligonucleotide
  Target: COL7A1; (-) strand; PAM type: NRG; PAM sequence: AAG
ggggctggtctcgaggtgtc

SEQ ID NO: 9061 - DNA, 20 bp, Artificial Sequence
  Description of Artificial Sequence: Synthetic oligonucleotide
  Target: COL7A1; (-) strand; PAM type: NRG; PAM sequence: AGG
ctgaagtggggctggtctcg

SEQ ID NO: 9062 - DNA, 20 bp, Artificial Sequence
  Description of Artificial Sequence: Synthetic oligonucleotide
  Target: COL7A1; (-) strand; PAM type: NRG; PAM sequence: GAG
gctgaagtggggctggtctc

SEQ ID NO: 9063 - DNA, 20 bp, Artificial Sequence
  Description of Artificial Sequence: Synthetic oligonucleotide
  Target: COL7A1; (-) strand; PAM type: NRG; PAM sequence: TGG
tttgggggctgaagtggggc

SEQ ID NO: 9064 - DNA, 20 bp, Artificial Sequence
  Description of Artificial Sequence: Synthetic oligonucleotide
  Target: COL7A1; (-) strand; PAM type: NRG; PAM sequence: GGG
ggactttgggggctgaagtg

SEQ ID NO: 9065 - DNA, 20 bp, Artificial Sequence
  Description of Artificial Sequence: Synthetic oligonucleotide
  Target: COL7A1; (-) strand; PAM type: NRG; PAM sequence: GGG
gggactttgggggctgaagt

SEQ ID NO: 9066 - DNA, 20 bp, Artificial Sequence
  Description of Artificial Sequence: Synthetic oligonucleotide
  Target: COL7A1; (-) strand; PAM type: NRG; PAM sequence: TGG
tgggactttgggggctgaag

SEQ ID NO: 9067 - DNA, 20 bp, Artificial Sequence
  Description of Artificial Sequence: Synthetic oligonucleotide
  Target: COL7A1; (-) strand; PAM type: NRG; PAM sequence: AAG
ggttgggactttgggggctg

SEQ ID NO: 9068 - DNA, 20 bp, Artificial Sequence
  Description of Artificial Sequence: Synthetic oligonucleotide
  Target: COL7A1; (-) strand; PAM type: NRG; PAM sequence: GGG
gtagagggttgggactttgg

SEQ ID NO: 9069 - DNA, 20 bp, Artificial Sequence
  Description of Artificial Sequence: Synthetic oligonucleotide
  Target: COL7A1; (-) strand; PAM type: NRG; PAM sequence: GGG
tgtagagggttgggactttg

SEQ ID NO: 9070 - DNA, 20 bp, Artificial Sequence
  Description of Artificial Sequence: Synthetic oligonucleotide
  Target: COL7A1; (-) strand; PAM type: NRG; PAM sequence: GGG
ctgtagagggttgggacttt

SEQ ID NO: 9071 - DNA, 20 bp, Artificial Sequence
  Description of Artificial Sequence: Synthetic oligonucleotide
  Target: COL7A1; (-) strand; PAM type: NRG; PAM sequence: TGG
gctgtagagggttgggactt

SEQ ID NO: 9072 - DNA, 20 bp, Artificial Sequence
  Description of Artificial Sequence: Synthetic oligonucleotide
  Target: COL7A1; (-) strand; PAM type: NRG; PAM sequence: GGG
aaggaaggctgtagagggtt

SEQ ID NO: 9073 - DNA, 20 bp, Artificial Sequence
  Description of Artificial Sequence: Synthetic oligonucleotide
  Target: COL7A1; (-) strand; PAM type: NRG; PAM sequence: TGG
caaggaaggctgtagagggt

SEQ ID NO: 9074 - DNA, 20 bp, Artificial Sequence
  Description of Artificial Sequence: Synthetic oligonucleotide
  Target: COL7A1; (-) strand; PAM type: NRG; PAM sequence: GGG
gggacaaggaaggctgtaga

SEQ ID NO: 9075 - DNA, 20 bp, Artificial Sequence
  Description of Artificial Sequence: Synthetic oligonucleotide
  Target: COL7A1; (-) strand; PAM type: NRG; PAM sequence: AGG
agggacaaggaaggctgtag

SEQ ID NO: 9076 - DNA, 20 bp, Artificial Sequence
  Description of Artificial Sequence: Synthetic oligonucleotide
  Target: COL7A1; (-) strand; PAM type: NRG; PAM sequence: GAG
tagggacaaggaaggctgta

SEQ ID NO: 9077 - DNA, 20 bp, Artificial Sequence
  Description of Artificial Sequence: Synthetic oligonucleotide
  Target: COL7A1; (-) strand; PAM type: NRG; PAM sequence: TAG
tgtagggacaaggaaggctg

SEQ ID NO: 9078 - DNA, 20 bp, Artificial Sequence
  Description of Artificial Sequence: Synthetic oligonucleotide
  Target: COL7A1; (-) strand; PAM type: NRG; PAM sequence: AGG
tgggggtgtagggacaagga

SEQ ID NO: 9079 - DNA, 20 bp, Artificial Sequence
  Description of Artificial Sequence: Synthetic oligonucleotide
  Target: COL7A1; (-) strand; PAM type: NRG; PAM sequence: AAG
atgggggtgtagggacaagg

SEQ ID NO: 9080 - DNA, 20 bp, Artificial Sequence
  Description of Artificial Sequence: Synthetic oligonucleotide
  Target: COL7A1; (-) strand; PAM type: NRG; PAM sequence: AGG
gtcatgggggtgtagggaca

SEQ ID NO: 9081 - DNA, 20 bp, Artificial Sequence
  Description of Artificial Sequence: Synthetic oligonucleotide
  Target: COL7A1; (-) strand; PAM type: NRG; PAM sequence: AAG
ggtcatgggggtgtagggac

SEQ ID NO: 9082 - DNA, 20 bp, Artificial Sequence
  Description of Artificial Sequence: Synthetic oligonucleotide
  Target: COL7A1; (-) strand; PAM type: NRG; PAM sequence: GGG
ggtcgggtcatgggggtgta

SEQ ID NO: 9083 - DNA, 20 bp, Artificial Sequence
  Description of Artificial Sequence: Synthetic oligonucleotide
  Target: COL7A1; (-) strand; PAM type: NRG; PAM sequence: AGG
tggtcgggtcatgggggtgt

SEQ ID NO: 9084 - DNA, 20 bp, Artificial Sequence
  Description of Artificial Sequence: Synthetic oligonucleotide
  Target: COL7A1; (-) strand; PAM type: NRG; PAM sequence: TAG
atggtcgggtcatgggggtg

SEQ ID NO: 9085 - DNA, 20 bp, Artificial Sequence
  Description of Artificial Sequence: Synthetic oligonucleotide
  Target: COL7A1; (-) strand; PAM type: NRG; PAM sequence: GGG
agctcatggtcgggtcatgg

SEQ ID NO: 9086 - DNA, 20 bp, Artificial Sequence
  Description of Artificial Sequence: Synthetic oligonucleotide
  Target: COL7A1; (-) strand; PAM type: NRG; PAM sequence: GGG
aagctcatggtcgggtcatg

SEQ ID NO: 9087 - DNA, 20 bp, Artificial Sequence
  Description of Artificial Sequence: Synthetic oligonucleotide
  Target: COL7A1; (-) strand; PAM type: NRG; PAM sequence: GGG
gaagctcatggtcgggtcat

SEQ ID NO: 9088 - DNA, 20 bp, Artificial Sequence
  Description of Artificial Sequence: Synthetic oligonucleotide
  Target: COL7A1; (-) strand; PAM type: NRG; PAM sequence: TGG
ggaagctcatggtcgggtca

SEQ ID NO: 9089 - DNA, 20 bp, Artificial Sequence
  Description of Artificial Sequence: Synthetic oligonucleotide
  Target: COL7A1; (-) strand; PAM type: NRG; PAM sequence: GGG
gggcagggaagctcatggtc

SEQ ID NO: 9090 - DNA, 20 bp, Artificial Sequence
  Description of Artificial Sequence: Synthetic oligonucleotide
  Target: COL7A1; (-) strand; PAM type: NRG; PAM sequence: CGG
ggggcagggaagctcatggt

SEQ ID NO: 9091 - DNA, 20 bp, Artificial Sequence
  Description of Artificial Sequence: Synthetic oligonucleotide
  Target: COL7A1; (-) strand; PAM type: NRG; PAM sequence: TGG
ggatggggcagggaagctca

SEQ ID NO: 9092 - DNA, 20 bp, Artificial Sequence
  Description of Artificial Sequence: Synthetic oligonucleotide
  Target: COL7A1; (-) strand; PAM type: NRG; PAM sequence: AAG
ggagtcaggatggggcaggg

SEQ ID NO: 9093 - DNA, 20 bp, Artificial Sequence
  Description of Artificial Sequence: Synthetic oligonucleotide
  Target: COL7A1; (-) strand; PAM type: NRG; PAM sequence: GGG
cagggagtcaggatggggca

SEQ ID NO: 9094 - DNA, 20 bp, Artificial Sequence
  Description of Artificial Sequence: Synthetic oligonucleotide
  Target: COL7A1; (-) strand; PAM type: NRG; PAM sequence: AGG
acagggagtcaggatggggc

SEQ ID NO: 9095 - DNA, 20 bp, Artificial Sequence
  Description of Artificial Sequence: Synthetic oligonucleotide
  Target: COL7A1; (-) strand; PAM type: NRG; PAM sequence: CAG
gacagggagtcaggatgggg

SEQ ID NO: 9096 - DNA, 20 bp, Artificial Sequence
  Description of Artificial Sequence: Synthetic oligonucleotide
  Target: COL7A1; (-) strand; PAM type: NRG; PAM sequence: GGG
catgacagggagtcaggatg

SEQ ID NO: 9097 - DNA, 20 bp, Artificial Sequence
  Description of Artificial Sequence: Synthetic oligonucleotide
  Target: COL7A1; (-) strand; PAM type: NRG; PAM sequence: GGG
acatgacagggagtcaggat

SEQ ID NO: 9098 - DNA, 20 bp, Artificial Sequence
  Description of Artificial Sequence: Synthetic oligonucleotide
  Target: COL7A1; (-) strand; PAM type: NRG; PAM sequence: TGG
gacatgacagggagtcagga

SEQ ID NO: 9099 - DNA, 20 bp, Artificial Sequence
  Description of Artificial Sequence: Synthetic oligonucleotide
  Target: COL7A1; (-) strand; PAM type: NRG; PAM sequence: AGG
agtggacatgacagggagtc

SEQ ID NO: 9100 - DNA, 20 bp, Artificial Sequence
  Description of Artificial Sequence: Synthetic oligonucleotide
  Target: COL7A1; (-) strand; PAM type: NRG; PAM sequence: CAG
cagtggacatgacagggagt

SEQ ID NO: 9101 - DNA, 20 bp, Artificial Sequence
  Description of Artificial Sequence: Synthetic oligonucleotide
  Target: COL7A1; (-) strand; PAM type: NRG; PAM sequence: GAG
tggacagtggacatgacagg

SEQ ID NO: 9102 - DNA, 20 bp, Artificial Sequence
  Description of Artificial Sequence: Synthetic oligonucleotide
  Target: COL7A1; (-) strand; PAM type: NRG; PAM sequence: GGG
tgtggacagtggacatgaca

SEQ ID NO: 9103 - DNA, 20 bp, Artificial Sequence
  Description of Artificial Sequence: Synthetic oligonucleotide
  Target: COL7A1; (-) strand; PAM type: NRG; PAM sequence: AGG
ctgtggacagtggacatgac

SEQ ID NO: 9104 - DNA, 20 bp, Artificial Sequence
  Description of Artificial Sequence: Synthetic oligonucleotide
  Target: COL7A1; (-) strand; PAM type: NRG; PAM sequence: CAG
tctgtggacagtggacatga

SEQ ID NO: 9105 - DNA, 20 bp, Artificial Sequence
  Description of Artificial Sequence: Synthetic oligonucleotide
  Target: COL7A1; (-) strand; PAM type: NRG; PAM sequence: TGG
ggtacagggtctgtggacag

SEQ ID NO: 9106 - DNA, 20 bp, Artificial Sequence
  Description of Artificial Sequence: Synthetic oligonucleotide
  Target: COL7A1; (-) strand; PAM type: NRG; PAM sequence: CAG
caaggtacagggtctgtgga

SEQ ID NO: 9107 - DNA, 20 bp, Artificial Sequence
  Description of Artificial Sequence: Synthetic oligonucleotide
  Target: COL7A1; (-) strand; PAM type: NRG; PAM sequence: TGG
gtcccaaggtacagggtctg

SEQ ID NO: 9108 - DNA, 20 bp, Artificial Sequence
  Description of Artificial Sequence: Synthetic oligonucleotide
  Target: COL7A1; (-) strand; PAM type: NRG; PAM sequence: GGG
ctgatcggtcccaaggtaca

SEQ ID NO: 9109 - DNA, 20 bp, Artificial Sequence
  Description of Artificial Sequence: Synthetic oligonucleotide
  Target: COL7A1; (-) strand; PAM type: NRG; PAM sequence: AGG
cctgatcggtcccaaggtac

SEQ ID NO: 9110 - DNA, 20 bp, Artificial Sequence
  Description of Artificial Sequence: Synthetic oligonucleotide
  Target: COL7A1; (-) strand; PAM type: NRG; PAM sequence: CAG
gcctgatcggtcccaaggta

SEQ ID NO: 9111 - DNA, 20 bp, Artificial Sequence
  Description of Artificial Sequence: Synthetic oligonucleotide
  Target: COL7A1; (-) strand; PAM type: NRG; PAM sequence: AGG
ggagggcctgatcggtccca

SEQ ID NO: 9112 - DNA, 20 bp, Artificial Sequence
  Description of Artificial Sequence: Synthetic oligonucleotide
  Target: COL7A1; (-) strand; PAM type: NRG; PAM sequence: AAG
aggagggcctgatcggtccc

SEQ ID NO: 9113 - DNA, 20 bp, Artificial Sequence
  Description of Artificial Sequence: Synthetic oligonucleotide
  Target: COL7A1; (-) strand; PAM type: NRG; PAM sequence: CGG
cctggcaaggagggcctgat

SEQ ID NO: 9114 - DNA, 20 bp, Artificial Sequence
  Description of Artificial Sequence: Synthetic oligonucleotide
  Target: COL7A1; (-) strand; PAM type: NRG; PAM sequence: GGG
tcgggggcccctggcaagga

SEQ ID NO: 9115 - DNA, 20 bp, Artificial Sequence
  Description of Artificial Sequence: Synthetic oligonucleotide
  Target: COL7A1; (-) strand; PAM type: NRG; PAM sequence: AGG
gtcgggggcccctggcaagg

SEQ ID NO: 9116 - DNA, 20 bp, Artificial Sequence
  Description of Artificial Sequence: Synthetic oligonucleotide
  Target: COL7A1; (-) strand; PAM type: NRG; PAM sequence: GAG
agtcgggggcccctggcaag

SEQ ID NO: 9117 - DNA, 20 bp, Artificial Sequence
  Description of Artificial Sequence: Synthetic oligonucleotide
  Target: COL7A1; (-) strand; PAM type: NRG; PAM sequence: AGG
ccagtcgggggcccctggca

SEQ ID NO: 9118 - DNA, 20 bp, Artificial Sequence
  Description of Artificial Sequence: Synthetic oligonucleotide
  Target: COL7A1; (-) strand; PAM type: NRG; PAM sequence: AAG
gccagtcgggggcccctggc

SEQ ID NO: 9119 - DNA, 20 bp, Artificial Sequence
  Description of Artificial Sequence: Synthetic oligonucleotide
  Target: COL7A1; (-) strand; PAM type: NRG; PAM sequence: TGG
ccgggccagtcgggggcccc

SEQ ID NO: 9120 - DNA, 20 bp, Artificial Sequence
  Description of Artificial Sequence: Synthetic oligonucleotide
  Target: COL7A1; (-) strand; PAM type: NRG; PAM sequence: GGG
tggtgtgccgggccagtcgg

SEQ ID NO: 9121 - DNA, 20 bp, Artificial Sequence
  Description of Artificial Sequence: Synthetic oligonucleotide
  Target: COL7A1; (-) strand; PAM type: NRG; PAM sequence: GGG
ctggtgtgccgggccagtcg

SEQ ID NO: 9122 - DNA, 20 bp, Artificial Sequence
  Description of Artificial Sequence: Synthetic oligonucleotide
  Target: COL7A1; (-) strand; PAM type: NRG; PAM sequence: GGG
cctggtgtgccgggccagtc

SEQ ID NO: 9123 - DNA, 20 bp, Artificial Sequence
  Description of Artificial Sequence: Synthetic oligonucleotide
  Target: COL7A1; (-) strand; PAM type: NRG; PAM sequence: CGG
gcctggtgtgccgggccagt

SEQ ID NO: 9124 - DNA, 20 bp, Artificial Sequence
  Description of Artificial Sequence: Synthetic oligonucleotide
  Target: COL7A1; (-) strand; PAM type: NRG; PAM sequence: CAG
gggagcctggtgtgccgggc

SEQ ID NO: 9125 - DNA, 20 bp, Artificial Sequence
  Description of Artificial Sequence: Synthetic oligonucleotide
  Target: COL7A1; (-) strand; PAM type: NRG; PAM sequence: GGG
cagggggagcctggtgtgcc

SEQ ID NO: 9126 - DNA, 20 bp, Artificial Sequence
  Description of Artificial Sequence: Synthetic oligonucleotide
  Target: COL7A1; (-) strand; PAM type: NRG; PAM sequence: CGG
ccagggggagcctggtgtgc

SEQ ID NO: 9127 - DNA, 20 bp, Artificial Sequence
  Description of Artificial Sequence: Synthetic oligonucleotide
  Target: COL7A1; (-) strand; PAM type: NRG; PAM sequence: TGG
ttttttctccagggggagcc

SEQ ID NO: 9128 - DNA, 20 bp, Artificial Sequence
  Description of Artificial Sequence: Synthetic oligonucleotide
  Target: COL7A1; (-) strand; PAM type: NRG; PAM sequence: GAG
tgtctttttttctccagggg

SEQ ID NO: 9129 - DNA, 20 bp, Artificial Sequence
  Description of Artificial Sequence: Synthetic oligonucleotide
  Target: COL7A1; (-) strand; PAM type: NRG; PAM sequence: GGG
catgtctttttttctccagg

SEQ ID NO: 9130 - DNA, 20 bp, Artificial Sequence
  Description of Artificial Sequence: Synthetic oligonucleotide
  Target: COL7A1; (-) strand; PAM type: NRG; PAM sequence: GGG
tcatgtctttttttctccag

SEQ ID NO: 9131 - DNA, 20 bp, Artificial Sequence
  Description of Artificial Sequence: Synthetic oligonucleotide
  Target: COL7A1; (-) strand; PAM type: NRG; PAM sequence: GGG
ttcatgtctttttttctcca

SEQ ID NO: 9132 - DNA, 20 bp, Artificial Sequence
  Description of Artificial Sequence: Synthetic oligonucleotide
  Target: COL7A1; (-) strand; PAM type: NRG; PAM sequence: AGG
gttcatgtctttttttctcc

SEQ ID NO: 9133 - DNA, 20 bp, Artificial Sequence
  Description of Artificial Sequence: Synthetic oligonucleotide
  Target: COL7A1; (-) strand; PAM type: NRG; PAM sequence: CAG
agttcatgtctttttttctc

SEQ ID NO: 9134 - DNA, 20 bp, Artificial Sequence
  Description of Artificial Sequence: Synthetic oligonucleotide
  Target: COL7A1; (-) strand; PAM type: NRG; PAM sequence: AAG
gccacgggtggacgggggcc

SEQ ID NO: 9135 - DNA, 20 bp, Artificial Sequence
  Description of Artificial Sequence: Synthetic oligonucleotide
  Target: COL7A1; (-) strand; PAM type: NRG; PAM sequence: GGG
agggggccacgggtggacgg

SEQ ID NO: 9136 - DNA, 20 bp, Artificial Sequence
  Description of Artificial Sequence: Synthetic oligonucleotide
  Target: COL7A1; (-) strand; PAM type: NRG; PAM sequence: GGG
gagggggccacgggtggacg

SEQ ID NO: 9137 - DNA, 20 bp, Artificial Sequence
  Description of Artificial Sequence: Synthetic oligonucleotide
  Target: COL7A1; (-) strand; PAM type: NRG; PAM sequence: GGG
tgagggggccacgggtggac

SEQ ID NO: 9138 - DNA, 20 bp, Artificial Sequence
  Description of Artificial Sequence: Synthetic oligonucleotide
  Target: COL7A1; (-) strand; PAM type: NRG; PAM sequence: CGG
atgagggggccacgggtgga

SEQ ID NO: 9139 - DNA, 20 bp, Artificial Sequence
  Description of Artificial Sequence: Synthetic oligonucleotide
  Target: COL7A1; (-) strand; PAM type: NRG; PAM sequence: TGG
cagaatgagggggccacggg

SEQ ID NO: 9140 - DNA, 20 bp, Artificial Sequence
  Description of Artificial Sequence: Synthetic oligonucleotide
  Target: COL7A1; (-) strand; PAM type: NRG; PAM sequence: GGG
gctcagaatgagggggccac

SEQ ID NO: 9141 - DNA, 20 bp, Artificial Sequence
  Description of Artificial Sequence: Synthetic oligonucleotide
  Target: COL7A1; (-) strand; PAM type: NRG; PAM sequence: CGG
cgctcagaatgagggggcca

SEQ ID NO: 9142 - DNA, 20 bp, Artificial Sequence
  Description of Artificial Sequence: Synthetic oligonucleotide
  Target: COL7A1; (-) strand; PAM type: NRG; PAM sequence: GGG
tgggcacgctcagaatgagg

SEQ ID NO: 9143 - DNA, 20 bp, Artificial Sequence
  Description of Artificial Sequence: Synthetic oligonucleotide
  Target: COL7A1; (-) strand; PAM type: NRG; PAM sequence: GGG
gtgggcacgctcagaatgag

SEQ ID NO: 9144 - DNA, 20 bp, Artificial Sequence
  Description of Artificial Sequence: Synthetic oligonucleotide
  Target: COL7A1; (-) strand; PAM type: NRG; PAM sequence: GGG
tgtgggcacgctcagaatga

SEQ ID NO: 9145 - DNA, 20 bp, Artificial Sequence
  Description of Artificial Sequence: Synthetic oligonucleotide
  Target: COL7A1; (-) strand; PAM type: NRG; PAM sequence: AGG
gtgtgggcacgctcagaatg

SEQ ID NO: 9146 - DNA, 20 bp, Artificial Sequence
  Description of Artificial Sequence: Synthetic oligonucleotide
  Target: COL7A1; (-) strand; PAM type: NRG; PAM sequence: GAG
agtgtgggcacgctcagaat

SEQ ID NO: 9147 - DNA, 20 bp, Artificial Sequence
  Description of Artificial Sequence: Synthetic oligonucleotide
  Target: COL7A1; (-) strand; PAM type: NRG; PAM sequence: CAG
atggtgagtgtgggcacgct

SEQ ID NO: 9148 - DNA, 20 bp, Artificial Sequence
  Description of Artificial Sequence: Synthetic oligonucleotide
  Target: COL7A1; (-) strand; PAM type: NRG; PAM sequence: GGG
aaaggagagatggtgagtgt

SEQ ID NO: 9149 - DNA, 20 bp, Artificial Sequence
  Description of Artificial Sequence: Synthetic oligonucleotide
  Target: COL7A1; (-) strand; PAM type: NRG; PAM sequence: TGG
caaaggagagatggtgagtg

SEQ ID NO: 9150 - DNA, 20 bp, Artificial Sequence
  Description of Artificial Sequence: Synthetic oligonucleotide
  Target: COL7A1; (-) strand; PAM type: NRG; PAM sequence: GAG
ggacacaaaggagagatggt

SEQ ID NO: 9151 - DNA, 20 bp, Artificial Sequence
  Description of Artificial Sequence: Synthetic oligonucleotide
  Target: COL7A1; (-) strand; PAM type: NRG; PAM sequence: TGG
ggcaggacacaaaggagaga

SEQ ID NO: 9152 - DNA, 20 bp, Artificial Sequence
  Description of Artificial Sequence: Synthetic oligonucleotide
  Target: COL7A1; (-) strand; PAM type: NRG; PAM sequence: GAG
ggctggcaggacacaaagga

SEQ ID NO: 9153 - DNA, 20 bp, Artificial Sequence
  Description of Artificial Sequence: Synthetic oligonucleotide
  Target: COL7A1; (-) strand; PAM type: NRG; PAM sequence: GAG
cgggctggcaggacacaaag

SEQ ID NO: 9154 - DNA, 20 bp, Artificial Sequence
  Description of Artificial Sequence: Synthetic oligonucleotide
  Target: COL7A1; (-) strand; PAM type: NRG; PAM sequence: AGG
cccgggctggcaggacacaa

SEQ ID NO: 9155 - DNA, 20 bp, Artificial Sequence
  Description of Artificial Sequence: Synthetic oligonucleotide
  Target: COL7A1; (-) strand; PAM type: NRG; PAM sequence: AAG
ccccgggctggcaggacaca

SEQ ID NO: 9156 - DNA, 20 bp, Artificial Sequence
  Description of Artificial Sequence: Synthetic oligonucleotide
  Target: COL7A1; (-) strand; PAM type: NRG; PAM sequence: AGG
ccaggccgccccgggctggc

SEQ ID NO: 9157 - DNA, 20 bp, Artificial Sequence
  Description of Artificial Sequence: Synthetic oligonucleotide
  Target: COL7A1; (-) strand; PAM type: NRG; PAM sequence: CAG
cccaggccgccccgggctgg

SEQ ID NO: 9158 - DNA, 20 bp, Artificial Sequence
  Description of Artificial Sequence: Synthetic oligonucleotide
  Target: COL7A1; (-) strand; PAM type: NRG; PAM sequence: TGG
tcccccaggccgccccgggc

SEQ ID NO: 9159 - DNA, 20 bp, Artificial Sequence
  Description of Artificial Sequence: Synthetic oligonucleotide
  Target: COL7A1; (-) strand; PAM type: NRG; PAM sequence: GGG
ctggtcccccaggccgcccc

SEQ ID NO: 9160 - DNA, 20 bp, Artificial Sequence
  Description of Artificial Sequence: Synthetic oligonucleotide
  Target: COL7A1; (-) strand; PAM type: NRG; PAM sequence: CGG
gctggtcccccaggccgccc

SEQ ID NO: 9161 - DNA, 20 bp, Artificial Sequence
  Description of Artificial Sequence: Synthetic oligonucleotide
  Target: COL7A1; (-) strand; PAM type: NRG; PAM sequence: AGG
cagggagaagctggtccccc

SEQ ID NO: 9162 - DNA, 20 bp, Artificial Sequence
  Description of Artificial Sequence: Synthetic oligonucleotide
  Target: COL7A1; (-) strand; PAM type: NRG; PAM sequence: CAG
gcagggagaagctggtcccc

SEQ ID NO: 9163 - DNA, 20 bp, Artificial Sequence
  Description of Artificial Sequence: Synthetic oligonucleotide
  Target: COL7A1; (-) strand; PAM type: NRG; PAM sequence: TGG
tgatgcctgcagggagaagc

SEQ ID NO: 9164 - DNA, 20 bp, Artificial Sequence
  Description of Artificial Sequence: Synthetic oligonucleotide
  Target: COL7A1; (-) strand; PAM type: NRG; PAM sequence: AAG
tgcctgatgcctgcagggag

SEQ ID NO: 9165 - DNA, 20 bp, Artificial Sequence
  Description of Artificial Sequence: Synthetic oligonucleotide
  Target: COL7A1; (-) strand; PAM type: NRG; PAM sequence: GAG
cactgcctgatgcctgcagg

SEQ ID NO: 9166 - DNA, 20 bp, Artificial Sequence
  Description of Artificial Sequence: Synthetic oligonucleotide
  Target: COL7A1; (-) strand; PAM type: NRG; PAM sequence: GGG
cccactgcctgatgcctgca

SEQ ID NO: 9167 - DNA, 20 bp, Artificial Sequence
  Description of Artificial Sequence: Synthetic oligonucleotide
  Target: COL7A1; (-) strand; PAM type: NRG; PAM sequence: AGG
ccccactgcctgatgcctgc

SEQ ID NO: 9168 - DNA, 20 bp, Artificial Sequence
  Description of Artificial Sequence: Synthetic oligonucleotide
  Target: COL7A1; (-) strand; PAM type: NRG; PAM sequence: CAG
accccactgcctgatgcctg

SEQ ID NO: 9169 - DNA, 20 bp, Artificial Sequence
  Description of Artificial Sequence: Synthetic oligonucleotide
  Target: COL7A1; (-) strand; PAM type: NRG; PAM sequence: AGG
gctacgtggcctggggccta

SEQ ID NO: 9170 - DNA, 20 bp, Artificial Sequence
  Description of Artificial Sequence: Synthetic oligonucleotide
  Target: COL7A1; (-) strand; PAM type: NRG; PAM sequence: AAG
ggctacgtggcctggggcct

SEQ ID NO: 9171 - DNA, 20 bp, Artificial Sequence
  Description of Artificial Sequence: Synthetic oligonucleotide
  Target: COL7A1; (-) strand; PAM type: NRG; PAM sequence: GGG
ctggggggctacgtggcctg

SEQ ID NO: 9172 - DNA, 20 bp, Artificial Sequence
  Description of Artificial Sequence: Synthetic oligonucleotide
  Target: COL7A1; (-) strand; PAM type: NRG; PAM sequence: GGG
gctggggggctacgtggcct

SEQ ID NO: 9173 - DNA, 20 bp, Artificial Sequence
  Description of Artificial Sequence: Synthetic oligonucleotide
  Target: COL7A1; (-) strand; PAM type: NRG; PAM sequence: TGG
ggctggggggctacgtggcc

SEQ ID NO: 9174 - DNA, 20 bp, Artificial Sequence
  Description of Artificial Sequence: Synthetic oligonucleotide
  Target: COL7A1; (-) strand; PAM type: NRG; PAM sequence: TGG
atgggggctggggggctacg

SEQ ID NO: 9175 - DNA, 20 bp, Artificial Sequence
  Description of Artificial Sequence: Synthetic oligonucleotide
  Target: COL7A1; (-) strand; PAM type: NRG; PAM sequence: GGG
cagaggggatgggggctggg

SEQ ID NO: 9176 - DNA, 20 bp, Artificial Sequence
  Description of Artificial Sequence: Synthetic oligonucleotide
  Target: COL7A1; (-) strand; PAM type: NRG; PAM sequence: GGG
acagaggggatgggggctgg

SEQ ID NO: 9177 - DNA, 20 bp, Artificial Sequence
  Description of Artificial Sequence: Synthetic oligonucleotide
  Target: COL7A1; (-) strand; PAM type: NRG; PAM sequence: GGG
tacagaggggatgggggctg

SEQ ID NO: 9178 - DNA, 20 bp, Artificial Sequence
  Description of Artificial Sequence: Synthetic oligonucleotide
  Target: COL7A1; (-) strand; PAM type: NRG; PAM sequence: GGG
gtacagaggggatgggggct

SEQ ID NO: 9179 - DNA, 20 bp, Artificial Sequence
  Description of Artificial Sequence: Synthetic oligonucleotide
  Target: COL7A1; (-) strand; PAM type: NRG; PAM sequence: TGG
ggtacagaggggatgggggc

SEQ ID NO: 9180 - DNA, 20 bp, Artificial Sequence
  Description of Artificial Sequence: Synthetic oligonucleotide
  Target: COL7A1; (-) strand; PAM type: NRG; PAM sequence: GGG
acaaggtacagaggggatgg

SEQ ID NO: 9181 - DNA, 20 bp, Artificial Sequence
  Description of Artificial Sequence: Synthetic oligonucleotide
  Target: COL7A1; (-) strand; PAM type: NRG; PAM sequence: GGG
gacaaggtacagaggggatg

SEQ ID NO: 9182 - DNA, 20 bp, Artificial Sequence
  Description of Artificial Sequence: Synthetic oligonucleotide
  Target: COL7A1; (-) strand; PAM type: NRG; PAM sequence: GGG
agacaaggtacagaggggat

SEQ ID NO: 9183 - DNA, 20 bp, Artificial Sequence
  Description of Artificial Sequence: Synthetic oligonucleotide
  Target: COL7A1; (-) strand; PAM type: NRG; PAM sequence: TGG
gagacaaggtacagagggga

SEQ ID NO: 9184 - DNA, 20 bp, Artificial Sequence
  Description of Artificial Sequence: Synthetic oligonucleotide
  Target: COL7A1; (-) strand; PAM type: NRG; PAM sequence: GGG
aagggagacaaggtacagag

SEQ ID NO: 9185 - DNA, 20 bp, Artificial Sequence
  Description of Artificial Sequence: Synthetic oligonucleotide
  Target: COL7A1; (-) strand; PAM type: NRG; PAM sequence: GGG
gaagggagacaaggtacaga

SEQ ID NO: 9186 - DNA, 20 bp, Artificial Sequence
  Description of Artificial Sequence: Synthetic oligonucleotide
  Target: COL7A1; (-) strand; PAM type: NRG; PAM sequence: AGG
agaagggagacaaggtacag

SEQ ID NO: 9187 - DNA, 20 bp, Artificial Sequence
  Description of Artificial Sequence: Synthetic oligonucleotide
  Target: COL7A1; (-) strand; PAM type: NRG; PAM sequence: GAG
gagaagggagacaaggtaca

SEQ ID NO: 9188 - DNA, 20 bp, Artificial Sequence
  Description of Artificial Sequence: Synthetic oligonucleotide
  Target: COL7A1; (-) strand; PAM type: NRG; PAM sequence: CAG
gagagaagggagacaaggta

SEQ ID NO: 9189 - DNA, 20 bp, Artificial Sequence
  Description of Artificial Sequence: Synthetic oligonucleotide
  Target: COL7A1; (-) strand; PAM type: NRG; PAM sequence: AGG
tgatggagagaagggagaca

SEQ ID NO: 9190 - DNA, 20 bp, Artificial Sequence
  Description of Artificial Sequence: Synthetic oligonucleotide
  Target: COL7A1; (-) strand; PAM type: NRG; PAM sequence: AAG
ttgatggagagaagggagac

SEQ ID NO: 9191 - DNA, 20 bp, Artificial Sequence
  Description of Artificial Sequence: Synthetic oligonucleotide
  Target: COL7A1; (-) strand; PAM type: NRG; PAM sequence: GAG
tggccttgatggagagaagg

SEQ ID NO: 9192 - DNA, 20 bp, Artificial Sequence
  Description of Artificial Sequence: Synthetic oligonucleotide
  Target: COL7A1; (-) strand; PAM type: NRG; PAM sequence: GGG
tgtggccttgatggagagaa

SEQ ID NO: 9193 - DNA, 20 bp, Artificial Sequence
  Description of Artificial Sequence: Synthetic oligonucleotide
  Target: COL7A1; (-) strand; PAM type: NRG; PAM sequence: AGG
ctgtggccttgatggagaga

SEQ ID NO: 9194 - DNA, 20 bp, Artificial Sequence
  Description of Artificial Sequence: Synthetic oligonucleotide
  Target: COL7A1; (-) strand; PAM type: NRG; PAM sequence: AAG
cctgtggccttgatggagag

SEQ ID NO: 9195 - DNA, 20 bp, Artificial Sequence
  Description of Artificial Sequence: Synthetic oligonucleotide
  Target: COL7A1; (-) strand; PAM type: NRG; PAM sequence: GAG
gagcctgtggccttgatgga

SEQ ID NO: 9196 - DNA, 20 bp, Artificial Sequence
  Description of Artificial Sequence: Synthetic oligonucleotide
  Target: COL7A1; (-) strand; PAM type: NRG; PAM sequence: GAG
gggagcctgtggccttgatg

SEQ ID NO: 9197 - DNA, 20 bp, Artificial Sequence
  Description of Artificial Sequence: Synthetic oligonucleotide
  Target: COL7A1; (-) strand; PAM type: NRG; PAM sequence: TGG
aagggagcctgtggccttga

SEQ ID NO: 9198 - DNA, 20 bp, Artificial Sequence
  Description of Artificial Sequence: Synthetic oligonucleotide
  Target: COL7A1; (-) strand; PAM type: NRG; PAM sequence: TGG
cggggagtgaagggagcctg

SEQ ID NO: 9199 - DNA, 20 bp, Artificial Sequence
  Description of Artificial Sequence: Synthetic oligonucleotide
  Target: COL7A1; (-) strand; PAM type: NRG; PAM sequence: GAG
gggtgaacggggagtgaagg

SEQ ID NO: 9200 - DNA, 20 bp, Artificial Sequence
  Description of Artificial Sequence: Synthetic oligonucleotide
  Target: COL7A1; (-) strand; PAM type: NRG; PAM sequence: GGG
cagggtgaacggggagtgaa

SEQ ID NO: 9201 - DNA, 20 bp, Artificial Sequence
  Description of Artificial Sequence: Synthetic oligonucleotide
  Target: COL7A1; (-) strand; PAM type: NRG; PAM sequence: AGG
tcagggtgaacggggagtga

SEQ ID NO: 9202 - DNA, 20 bp, Artificial Sequence
  Description of Artificial Sequence: Synthetic oligonucleotide
  Target: COL7A1; (-) strand; PAM type: NRG; PAM sequence: AAG
ctcagggtgaacggggagtg

SEQ ID NO: 9203 - DNA, 20 bp, Artificial Sequence
  Description of Artificial Sequence: Synthetic oligonucleotide
  Target: COL7A1; (-) strand; PAM type: NRG; PAM sequence: GAG
tctccctcagggtgaacggg

SEQ ID NO: 9204 - DNA, 20 bp, Artificial Sequence
  Description of Artificial Sequence: Synthetic oligonucleotide
  Target: COL7A1; (-) strand; PAM type: NRG; PAM sequence: GGG
tttctccctcagggtgaacg

SEQ ID NO: 9205 - DNA, 20 bp, Artificial Sequence
  Description of Artificial Sequence: Synthetic oligonucleotide
  Target: COL7A1; (-) strand; PAM type: NRG; PAM sequence: GGG
ttttctccctcagggtgaac

SEQ ID NO: 9206 - DNA, 20 bp, Artificial Sequence
  Description of Artificial Sequence: Synthetic oligonucleotide
  Target: COL7A1; (-) strand; PAM type: NRG; PAM sequence: CGG
cttttctccctcagggtgaa

SEQ ID NO: 9207 - DNA, 20 bp, Artificial Sequence
  Description of Artificial Sequence: Synthetic oligonucleotide
  Target: COL7A1; (-) strand; PAM type: NRG; PAM sequence: GGG
tcatctgcttttctccctca

SEQ ID NO: 9208 - DNA, 20 bp, Artificial Sequence
  Description of Artificial Sequence: Synthetic oligonucleotide
  Target: COL7A1; (-) strand; PAM type: NRG; PAM sequence: AGG
ttcatctgcttttctccctc

SEQ ID NO: 9209 - DNA, 20 bp, Artificial Sequence
  Description of Artificial Sequence: Synthetic oligonucleotide
  Target: COL7A1; (-) strand; PAM type: NRG; PAM sequence: CAG
cttcatctgcttttctccct

SEQ ID NO: 9210 - DNA, 20 bp, Artificial Sequence
  Description of Artificial Sequence: Synthetic oligonucleotide
  Target: COL7A1; (-) strand; PAM type: NRG; PAM sequence: GGG
ggtcacagagtgaggtgtct

SEQ ID NO: 9211 - DNA, 20 bp, Artificial Sequence
  Description of Artificial Sequence: Synthetic oligonucleotide
  Target: COL7A1; (-) strand; PAM type: NRG; PAM sequence: TGG
gggtcacagagtgaggtgtc

SEQ ID NO: 9212 - DNA, 20 bp, Artificial Sequence
  Description of Artificial Sequence: Synthetic oligonucleotide
  Target: COL7A1; (-) strand; PAM type: NRG; PAM sequence: AGG
gtgaagggggtcacagagtg

SEQ ID NO: 9213 - DNA, 20 bp, Artificial Sequence
  Description of Artificial Sequence: Synthetic oligonucleotide
  Target: COL7A1; (-) strand; PAM type: NRG; PAM sequence: GAG
ggtgaagggggtcacagagt

SEQ ID NO: 9214 - DNA, 20 bp, Artificial Sequence
  Description of Artificial Sequence: Synthetic oligonucleotide
  Target: COL7A1; (-) strand; PAM type: NRG; PAM sequence: GAG
tcagggtgaagggggtcaca

SEQ ID NO: 9215 - DNA, 20 bp, Artificial Sequence
  Description of Artificial Sequence: Synthetic oligonucleotide
  Target: COL7A1; (-) strand; PAM type: NRG; PAM sequence: CAG
tttcagggtgaagggggtca

SEQ ID NO: 9216 - DNA, 20 bp, Artificial Sequence
  Description of Artificial Sequence: Synthetic oligonucleotide
  Target: COL7A1; (-) strand; PAM type: NRG; PAM sequence: GGG
agttagtttcagggtgaagg

SEQ ID NO: 9217 - DNA, 20 bp, Artificial Sequence
  Description of Artificial Sequence: Synthetic oligonucleotide
  Target: COL7A1; (-) strand; PAM type: NRG; PAM sequence: GGG
gagttagtttcagggtgaag

SEQ ID NO: 9218 - DNA, 20 bp, Artificial Sequence
  Description of Artificial Sequence: Synthetic oligonucleotide
  Target: COL7A1; (-) strand; PAM type: NRG; PAM sequence: GGG
agagttagtttcagggtgaa

SEQ ID NO: 9219 - DNA, 20 bp, Artificial Sequence
  Description of Artificial Sequence: Synthetic oligonucleotide
  Target: COL7A1; (-) strand; PAM type: NRG; PAM sequence: AGG
gagagttagtttcagggtga

SEQ ID NO: 9220 - DNA, 20 bp, Artificial Sequence
  Description of Artificial Sequence: Synthetic oligonucleotide
  Target: COL7A1; (-) strand; PAM type: NRG; PAM sequence: AAG
ggagagttagtttcagggtg

SEQ ID NO: 9221 - DNA, 20 bp, Artificial Sequence
  Description of Artificial Sequence: Synthetic oligonucleotide
  Target: COL7A1; (-) strand; PAM type: NRG; PAM sequence: GGG
tgtttggagagttagtttca

SEQ ID NO: 9222 - DNA, 20 bp, Artificial Sequence
  Description of Artificial Sequence: Synthetic oligonucleotide
  Target: COL7A1; (-) strand; PAM type: NRG; PAM sequence: AGG
ctgtttggagagttagtttc

SEQ ID NO: 9223 - DNA, 20 bp, Artificial Sequence
  Description of Artificial Sequence: Synthetic oligonucleotide
  Target: COL7A1; (-) strand; PAM type: NRG; PAM sequence: CAG
cctgtttggagagttagttt

SEQ ID NO: 9224 - DNA, 20 bp, Artificial Sequence
  Description of Artificial Sequence: Synthetic oligonucleotide
  Target: COL7A1; (-) strand; PAM type: NRG; PAM sequence: TAG
ctgaggcctgtttggagagt

SEQ ID NO: 9225 - DNA, 20 bp, Artificial Sequence
  Description of Artificial Sequence: Synthetic oligonucleotide
  Target: COL7A1; (-) strand; PAM type: NRG; PAM sequence: GAG
gtagctgaggcctgtttgga

SEQ ID NO: 9226 - DNA, 20 bp, Artificial Sequence
  Description of Artificial Sequence: Synthetic oligonucleotide
  Target: COL7A1; (-) strand; PAM type: NRG; PAM sequence: GAG
gagtagctgaggcctgtttg

SEQ ID NO: 9227 - DNA, 20 bp, Artificial Sequence
  Description of Artificial Sequence: Synthetic oligonucleotide
  Target: COL7A1; (-) strand; PAM type: NRG; PAM sequence: TGG
tggagtagctgaggcctgtt

SEQ ID NO: 9228 - DNA, 20 bp, Artificial Sequence
  Description of Artificial Sequence: Synthetic oligonucleotide
  Target: COL7A1; (-) strand; PAM type: NRG; PAM sequence: AGG
gtcagaggttggagtagctg

SEQ ID NO: 9229 - DNA, 20 bp, Artificial Sequence
  Description of Artificial Sequence: Synthetic oligonucleotide
  Target: COL7A1; (-) strand; PAM type: NRG; PAM sequence: GAG
ggtcagaggttggagtagct

SEQ ID NO: 9230 - DNA, 20 bp, Artificial Sequence
  Description of Artificial Sequence: Synthetic oligonucleotide
  Target: COL7A1; (-) strand; PAM type: NRG; PAM sequence: TAG
cactgggtcagaggttggag

SEQ ID NO: 9231 - DNA, 20 bp, Artificial Sequence
  Description of Artificial Sequence: Synthetic oligonucleotide
  Target: COL7A1; (-) strand; PAM type: NRG; PAM sequence: GAG
gggcactgggtcagaggttg

SEQ ID NO: 9232 - DNA, 20 bp, Artificial Sequence
  Description of Artificial Sequence: Synthetic oligonucleotide
  Target: COL7A1; (-) strand; PAM type: NRG; PAM sequence: TGG
tagggcactgggtcagaggt

SEQ ID NO: 9233 - DNA, 20 bp, Artificial Sequence
  Description of Artificial Sequence: Synthetic oligonucleotide
  Target: COL7A1; (-) strand; PAM type: NRG; PAM sequence: AGG
atattagggcactgggtcag

SEQ ID NO: 9234 - DNA, 20 bp, Artificial Sequence
  Description of Artificial Sequence: Synthetic oligonucleotide
  Target: COL7A1; (-) strand; PAM type: NRG; PAM sequence: GAG
gatattagggcactgggtca

SEQ ID NO: 9235 - DNA, 20 bp, Artificial Sequence
  Description of Artificial Sequence: Synthetic oligonucleotide
  Target: COL7A1; (-) strand; PAM type: NRG; PAM sequence: CAG
cagatattagggcactgggt

SEQ ID NO: 9236 - DNA, 20 bp, Artificial Sequence
  Description of Artificial Sequence: Synthetic oligonucleotide
  Target: COL7A1; (-) strand; PAM type: NRG; PAM sequence: GGG
gggtcagatattagggcact

SEQ ID NO: 9237 - DNA, 20 bp, Artificial Sequence
  Description of Artificial Sequence: Synthetic oligonucleotide
  Target: COL7A1; (-) strand; PAM type: NRG; PAM sequence: TGG
ggggtcagatattagggcac

SEQ ID NO: 9238 - DNA, 20 bp, Artificial Sequence
  Description of Artificial Sequence: Synthetic oligonucleotide
  Target: COL7A1; (-) strand; PAM type: NRG; PAM sequence: GGG
ggacctggggtcagatatta

SEQ ID NO: 9239 - DNA, 20 bp, Artificial Sequence
  Description of Artificial Sequence: Synthetic oligonucleotide
  Target: COL7A1; (-) strand; PAM type: NRG; PAM sequence: AGG
gggacctggggtcagatatt

SEQ ID NO: 9240 - DNA, 20 bp, Artificial Sequence
  Description of Artificial Sequence: Synthetic oligonucleotide
  Target: COL7A1; (-) strand; PAM type: NRG; PAM sequence: TAG
agggacctggggtcagatat

SEQ ID NO: 9241 - DNA, 20 bp, Artificial Sequence
  Description of Artificial Sequence: Synthetic oligonucleotide
  Target: COL7A1; (-) strand; PAM type: NRG; PAM sequence: CAG
aagggcgagggacctggggt

SEQ ID NO: 9242 - DNA, 20 bp, Artificial Sequence
  Description of Artificial Sequence: Synthetic oligonucleotide
  Target: COL7A1; (-) strand; PAM type: NRG; PAM sequence: GGG
gttgaagggcgagggacctg

SEQ ID NO: 9243 - DNA, 20 bp, Artificial Sequence
  Description of Artificial Sequence: Synthetic oligonucleotide
  Target: COL7A1; (-) strand; PAM type: NRG; PAM sequence: GGG
tgttgaagggcgagggacct

SEQ ID NO: 9244 - DNA, 20 bp, Artificial Sequence
  Description of Artificial Sequence: Synthetic oligonucleotide
  Target: COL7A1; (-) strand; PAM type: NRG; PAM sequence: TGG
atgttgaagggcgagggacc

SEQ ID NO: 9245 - DNA, 20 bp, Artificial Sequence
  Description of Artificial Sequence: Synthetic oligonucleotide
  Target: COL7A1; (-) strand; PAM type: NRG; PAM sequence: GGG
ggcctaatgttgaagggcga

SEQ ID NO: 9246 - DNA, 20 bp, Artificial Sequence
  Description of Artificial Sequence: Synthetic oligonucleotide
  Target: COL7A1; (-) strand; PAM type: NRG; PAM sequence: AGG
aggcctaatgttgaagggcg

SEQ ID NO: 9247 - DNA, 20 bp, Artificial Sequence
  Description of Artificial Sequence: Synthetic oligonucleotide
  Target: COL7A1; (-) strand; PAM type: NRG; PAM sequence: GAG
aaggcctaatgttgaagggc

SEQ ID NO: 9248 - DNA, 20 bp, Artificial Sequence
  Description of Artificial Sequence: Synthetic oligonucleotide
  Target: COL7A1; (-) strand; PAM type: NRG; PAM sequence: GGG
caggaaggcctaatgttgaa

SEQ ID NO: 9249 - DNA, 20 bp, Artificial Sequence
  Description of Artificial Sequence: Synthetic oligonucleotide
  Target: COL7A1; (-) strand; PAM type: NRG; PAM sequence: AGG
tcaggaaggcctaatgttga

SEQ ID NO: 9250 - DNA, 20 bp, Artificial Sequence
  Description of Artificial Sequence: Synthetic oligonucleotide
  Target: COL7A1; (-) strand; PAM type: NRG; PAM sequence: AAG
gtcaggaaggcctaatgttg

SEQ ID NO: 9251 - DNA, 20 bp, Artificial Sequence
  Description of Artificial Sequence: Synthetic oligonucleotide
  Target: COL7A1; (-) strand; PAM type: NRG; PAM sequence: AGG
tggtttttttctggtcagga

SEQ ID NO: 9252 - DNA, 20 bp, Artificial Sequence
  Description of Artificial Sequence: Synthetic oligonucleotide
  Target: COL7A1; (-) strand; PAM type: NRG; PAM sequence: AAG
ttggtttttttctggtcagg

SEQ ID NO: 9253 - DNA, 20 bp, Artificial Sequence
  Description of Artificial Sequence: Synthetic oligonucleotide
  Target: COL7A1; (-) strand; PAM type: NRG; PAM sequence: AGG
agattggtttttttctggtc

SEQ ID NO: 9254 - DNA, 20 bp, Artificial Sequence
  Description of Artificial Sequence: Synthetic oligonucleotide
  Target: COL7A1; (-) strand; PAM type: NRG; PAM sequence: CAG
aagattggtttttttctggt

SEQ ID NO: 9255 - DNA, 20 bp, Artificial Sequence
  Description of Artificial Sequence: Synthetic oligonucleotide
  Target: COL7A1; (-) strand; PAM type: NRG; PAM sequence: TGG
aaacaagattggtttttttc

SEQ ID NO: 9256 - DNA, 20 bp, Artificial Sequence
  Description of Artificial Sequence: Synthetic oligonucleotide
  Target: COL7A1; (-) strand; PAM type: NRG; PAM sequence: TGG
aggtaggaaagaaacaagat

SEQ ID NO: 9257 - DNA, 20 bp, Artificial Sequence
  Description of Artificial Sequence: Synthetic oligonucleotide
  Target: COL7A1; (-) strand; PAM type: NRG; PAM sequence: AAG
cctcaaggtaggaaagaaac

SEQ ID NO: 9258 - DNA, 20 bp, Artificial Sequence
  Description of Artificial Sequence: Synthetic oligonucleotide
  Target: COL7A1; (-) strand; PAM type: NRG; PAM sequence: AAG
cccggggcctcaaggtagga

SEQ ID NO: 9259 - DNA, 20 bp, Artificial Sequence
  Description of Artificial Sequence: Synthetic oligonucleotide
  Target: COL7A1; (-) strand; PAM type: NRG; PAM sequence: AGG
ggtccccggggcctcaaggt

SEQ ID NO: 9260 - DNA, 20 bp, Artificial Sequence
  Description of Artificial Sequence: Synthetic oligonucleotide
  Target: COL7A1; (-) strand; PAM type: NRG; PAM sequence: TAG
gggtccccggggcctcaagg

SEQ ID NO: 9261 - DNA, 20 bp, Artificial Sequence
  Description of Artificial Sequence: Synthetic oligonucleotide
  Target: COL7A1; (-) strand; PAM type: NRG; PAM sequence: AGG
catgggtccccggggcctca

SEQ ID NO: 9262 - DNA, 20 bp, Artificial Sequence
  Description of Artificial Sequence: Synthetic oligonucleotide
  Target: COL7A1; (-) strand; PAM type: NRG; PAM sequence: AAG
tcatgggtccccggggcctc

SEQ ID NO: 9263 - DNA, 20 bp, Artificial Sequence
  Description of Artificial Sequence: Synthetic oligonucleotide
  Target: COL7A1; (-) strand; PAM type: NRG; PAM sequence: GGG
gttggcttcatgggtccccg

SEQ ID NO: 9264 - DNA, 20 bp, Artificial Sequence
  Description of Artificial Sequence: Synthetic oligonucleotide
  Target: COL7A1; (-) strand; PAM type: NRG; PAM sequence: GGG
tgttggcttcatgggtcccc

SEQ ID NO: 9265 - DNA, 20 bp, Artificial Sequence
  Description of Artificial Sequence: Synthetic oligonucleotide
  Target: COL7A1; (-) strand; PAM type: NRG; PAM sequence: CGG
atgttggcttcatgggtccc

SEQ ID NO: 9266 - DNA, 20 bp, Artificial Sequence
  Description of Artificial Sequence: Synthetic oligonucleotide
  Target: COL7A1; (-) strand; PAM type: NRG; PAM sequence: GGG
aaaggagatgttggcttcat

SEQ ID NO: 9267 - DNA, 20 bp, Artificial Sequence
  Description of Artificial Sequence: Synthetic oligonucleotide
  Target: COL7A1; (-) strand; PAM type: NRG; PAM sequence: TGG
aaaaggagatgttggcttca

SEQ ID NO: 9268 - DNA, 20 bp, Artificial Sequence
  Description of Artificial Sequence: Synthetic oligonucleotide
  Target: COL7A1; (-) strand; PAM type: NRG; PAM sequence: TGG
cgaggagaaaaaggagatgt

SEQ ID NO: 9269 - DNA, 20 bp, Artificial Sequence
  Description of Artificial Sequence: Synthetic oligonucleotide
  Target: COL7A1; (-) strand; PAM type: NRG; PAM sequence: GAG
tggtatccgaggagaaaaag

SEQ ID NO: 9270 - DNA, 20 bp, Artificial Sequence
  Description of Artificial Sequence: Synthetic oligonucleotide
  Target: COL7A1; (-) strand; PAM type: NRG; PAM sequence: AGG
cctggtatccgaggagaaaa

SEQ ID NO: 9271 - DNA, 20 bp, Artificial Sequence
  Description of Artificial Sequence: Synthetic oligonucleotide
  Target: COL7A1; (-) strand; PAM type: NRG; PAM sequence: AAG
gcctggtatccgaggagaaa

SEQ ID NO: 9272 - DNA, 20 bp, Artificial Sequence
  Description of Artificial Sequence: Synthetic oligonucleotide
  Target: COL7A1; (-) strand; PAM type: NRG; PAM sequence: GAG
tggagtgcctggtatccgag

SEQ ID NO: 9273 - DNA, 20 bp, Artificial Sequence
  Description of Artificial Sequence: Synthetic oligonucleotide
  Target: COL7A1; (-) strand; PAM type: NRG; PAM sequence: AGG
gatggagtgcctggtatccg

SEQ ID NO: 9274 - DNA, 20 bp, Artificial Sequence
  Description of Artificial Sequence: Synthetic oligonucleotide
  Target: COL7A1; (-) strand; PAM type: NRG; PAM sequence: GAG
ggatggagtgcctggtatcc

SEQ ID NO: 9275 - DNA, 20 bp, Artificial Sequence
  Description of Artificial Sequence: Synthetic oligonucleotide
  Target: COL7A1; (-) strand; PAM type: NRG; PAM sequence: TGG
ccaggaaaggatggagtgcc

SEQ ID NO: 9276 - DNA, 20 bp, Artificial Sequence
  Description of Artificial Sequence: Synthetic oligonucleotide
  Target: COL7A1; (-) strand; PAM type: NRG; PAM sequence: GAG
gggatccccaggaaaggatg

SEQ ID NO: 9277 - DNA, 20 bp, Artificial Sequence
  Description of Artificial Sequence: Synthetic oligonucleotide
  Target: COL7A1; (-) strand; PAM type: NRG; PAM sequence: TGG
tagggatccccaggaaagga

SEQ ID NO: 9278 - DNA, 20 bp, Artificial Sequence
  Description of Artificial Sequence: Synthetic oligonucleotide
  Target: COL7A1; (-) strand; PAM type: NRG; PAM sequence: AGG
ctgctagggatccccaggaa

SEQ ID NO: 9279 - DNA, 20 bp, Artificial Sequence
  Description of Artificial Sequence: Synthetic oligonucleotide
  Target: COL7A1; (-) strand; PAM type: NRG; PAM sequence: AAG
cctgctagggatccccagga

SEQ ID NO: 9280 - DNA, 20 bp, Artificial Sequence
  Description of Artificial Sequence: Synthetic oligonucleotide
  Target: COL7A1; (-) strand; PAM type: NRG; PAM sequence: AGG
tctccctgctagggatcccc

SEQ ID NO: 9281 - DNA, 20 bp, Artificial Sequence
  Description of Artificial Sequence: Synthetic oligonucleotide
  Target: COL7A1; (-) strand; PAM type: NRG; PAM sequence: CAG
ctctccctgctagggatccc

SEQ ID NO: 9282 - DNA, 20 bp, Artificial Sequence
  Description of Artificial Sequence: Synthetic oligonucleotide
  Target: COL7A1; (-) strand; PAM type: NRG; PAM sequence: GGG
catggaccctctccctgcta

SEQ ID NO: 9283 - DNA, 20 bp, Artificial Sequence
  Description of Artificial Sequence: Synthetic oligonucleotide
  Target: COL7A1; (-) strand; PAM type: NRG; PAM sequence: AGG
acatggaccctctccctgct

SEQ ID NO: 9284 - DNA, 20 bp, Artificial Sequence
  Description of Artificial Sequence: Synthetic oligonucleotide
  Target: COL7A1; (-) strand; PAM type: NRG; PAM sequence: TAG
cacatggaccctctccctgc

SEQ ID NO: 9285 - DNA, 20 bp, Artificial Sequence
  Description of Artificial Sequence: Synthetic oligonucleotide
  Target: COL7A1; (-) strand; PAM type: NRG; PAM sequence: TGG
tgacctcctctgacctcaca

SEQ ID NO: 9286 - DNA, 20 bp, Artificial Sequence
  Description of Artificial Sequence: Synthetic oligonucleotide
  Target: COL7A1; (-) strand; PAM type: NRG; PAM sequence: TGG
ctatccagggcgattctctt

SEQ ID NO: 9287 - DNA, 20 bp, Artificial Sequence
  Description of Artificial Sequence: Synthetic oligonucleotide
  Target: COL7A1; (-) strand; PAM type: NRG; PAM sequence: GGG
tgttccctacccactatcca

SEQ ID NO: 9288 - DNA, 20 bp, Artificial Sequence
  Description of Artificial Sequence: Synthetic oligonucleotide
  Target: COL7A1; (-) strand; PAM type: NRG; PAM sequence: AGG
gtgttccctacccactatcc

SEQ ID NO: 9289 - DNA, 20 bp, Artificial Sequence
  Description of Artificial Sequence: Synthetic oligonucleotide
  Target: COL7A1; (-) strand; PAM type: NRG; PAM sequence: CAG
ggtgttccctacccactatc

SEQ ID NO: 9290 - DNA, 20 bp, Artificial Sequence
  Description of Artificial Sequence: Synthetic oligonucleotide
  Target: COL7A1; (-) strand; PAM type: NRG; PAM sequence: TGG
cagaggtgactcccacccca

SEQ ID NO: 9291 - DNA, 20 bp, Artificial Sequence
  Description of Artificial Sequence: Synthetic oligonucleotide
  Target: COL7A1; (-) strand; PAM type: NRG; PAM sequence: AGG
ccagtggctctggcctccag

SEQ ID NO: 9292 - DNA, 20 bp, Artificial Sequence
  Description of Artificial Sequence: Synthetic oligonucleotide
  Target: COL7A1; (-) strand; PAM type: NRG; PAM sequence: GAG
cccagtggctctggcctcca

SEQ ID NO: 9293 - DNA, 20 bp, Artificial Sequence
  Description of Artificial Sequence: Synthetic oligonucleotide
  Target: COL7A1; (-) strand; PAM type: NRG; PAM sequence: CAG
gccccagtggctctggcctc

SEQ ID NO: 9294 - DNA, 20 bp, Artificial Sequence
  Description of Artificial Sequence: Synthetic oligonucleotide
  Target: COL7A1; (-) strand; PAM type: NRG; PAM sequence: TGG
atggcaagccccagtggctc

SEQ ID NO: 9295 - DNA, 20 bp, Artificial Sequence
  Description of Artificial Sequence: Synthetic oligonucleotide
  Target: COL7A1; (-) strand; PAM type: NRG; PAM sequence: TGG
gtccccatggcaagccccag

SEQ ID NO: 9296 - DNA, 20 bp, Artificial Sequence
  Description of Artificial Sequence: Synthetic oligonucleotide
  Target: COL7A1; (-) strand; PAM type: NRG; PAM sequence: CAG
cttgtccccatggcaagccc

SEQ ID NO: 9297 - DNA, 20 bp, Artificial Sequence
  Description of Artificial Sequence: Synthetic oligonucleotide
  Target: COL7A1; (-) strand; PAM type: NRG; PAM sequence: AAG
gtgacccttgtccccatggc

SEQ ID NO: 9298 - DNA, 20 bp, Artificial Sequence
  Description of Artificial Sequence: Synthetic oligonucleotide
  Target: COL7A1; (-) strand; PAM type: NRG; PAM sequence: TGG
tatggtgacccttgtcccca

SEQ ID NO: 9299 - DNA, 20 bp, Artificial Sequence
  Description of Artificial Sequence: Synthetic oligonucleotide
  Target: COL7A1; (-) strand; PAM type: NRG; PAM sequence: TGG
atgatggtgtcccctgccta

SEQ ID NO: 9300 - DNA, 20 bp, Artificial Sequence
  Description of Artificial Sequence: Synthetic oligonucleotide
  Target: COL7A1; (-) strand; PAM type: NRG; PAM sequence: TGG
tccacagtagccgcctatga

SEQ ID NO: 9301 - DNA, 20 bp, Artificial Sequence
  Description of Artificial Sequence: Synthetic oligonucleotide
  Target: COL7A1; (-) strand; PAM type: NRG; PAM sequence: TAG
agggtcccccacctccacag

SEQ ID NO: 9302 - DNA, 20 bp, Artificial Sequence
  Description of Artificial Sequence: Synthetic oligonucleotide
  Target: COL7A1; (-) strand; PAM type: NRG; PAM sequence: CAG
cccagggtcccccacctcca

SEQ ID NO: 9303 - DNA, 20 bp, Artificial Sequence
  Description of Artificial Sequence: Synthetic oligonucleotide
  Target: COL7A1; (-) strand; PAM type: NRG; PAM sequence: GGG
tggtgtcctcatgtcaccca

SEQ ID NO: 9304 - DNA, 20 bp, Artificial Sequence
  Description of Artificial Sequence: Synthetic oligonucleotide
  Target: COL7A1; (-) strand; PAM type: NRG; PAM sequence: AGG
atggtgtcctcatgtcaccc

SEQ ID NO: 9305 - DNA, 20 bp, Artificial Sequence
  Description of Artificial Sequence: Synthetic oligonucleotide
  Target: COL7A1; (-) strand; PAM type: NRG; PAM sequence: CAG
catggtgtcctcatgtcacc

SEQ ID NO: 9306 - DNA, 20 bp, Artificial Sequence
  Description of Artificial Sequence: Synthetic oligonucleotide
  Target: COL7A1; (-) strand; PAM type: NRG; PAM sequence: TGG
atagtgacccagtgctctca

SEQ ID NO: 9307 - DNA, 20 bp, Artificial Sequence
  Description of Artificial Sequence: Synthetic oligonucleotide
  Target: COL7A1; (-) strand; PAM type: NRG; PAM sequence: CAG
cttttgaccttatagtgacc

SEQ ID NO: 9308 - DNA, 20 bp, Artificial Sequence
  Description of Artificial Sequence: Synthetic oligonucleotide
  Target: COL7A1; (-) strand; PAM type: NRG; PAM sequence: TAG
tgtggtagcttttgacctta

SEQ ID NO: 9309 - DNA, 20 bp, Artificial Sequence
  Description of Artificial Sequence: Synthetic oligonucleotide
  Target: COL7A1; (-) strand; PAM type: NRG; PAM sequence: TAG
tggtggtcccaccagtgtgg

SEQ ID NO: 9310 - DNA, 20 bp, Artificial Sequence
  Description of Artificial Sequence: Synthetic oligonucleotide
  Target: COL7A1; (-) strand; PAM type: NRG; PAM sequence: TGG
ccatggtggtcccaccagtg

SEQ ID NO: 9311 - DNA, 20 bp, Artificial Sequence
  Description of Artificial Sequence: Synthetic oligonucleotide
  Target: COL7A1; (-) strand; PAM type: NRG; PAM sequence: CAG
cgtcaccatggtggtcccac

SEQ ID NO: 9312 - DNA, 20 bp, Artificial Sequence
  Description of Artificial Sequence: Synthetic oligonucleotide
  Target: COL7A1; (-) strand; PAM type: NRG; PAM sequence: TGG
gagggcccccgtcaccatgg

SEQ ID NO: 9313 - DNA, 20 bp, Artificial Sequence
  Description of Artificial Sequence: Synthetic oligonucleotide
  Target: COL7A1; (-) strand; PAM type: NRG; PAM sequence: TGG
ccagagggcccccgtcacca

SEQ ID NO: 9314 - DNA, 20 bp, Artificial Sequence
  Description of Artificial Sequence: Synthetic oligonucleotide
  Target: COL7A1; (-) strand; PAM type: NRG; PAM sequence: GGG
aggggccccctgtccccaga

SEQ ID NO: 9315 - DNA, 20 bp, Artificial Sequence
  Description of Artificial Sequence: Synthetic oligonucleotide
  Target: COL7A1; (-) strand; PAM type: NRG; PAM sequence: AGG
caggggccccctgtccccag

SEQ ID NO: 9316 - DNA, 20 bp, Artificial Sequence
  Description of Artificial Sequence: Synthetic oligonucleotide
  Target: COL7A1; (-) strand; PAM type: NRG; PAM sequence: GAG
acaggggccccctgtcccca

SEQ ID NO: 9317 - DNA, 20 bp, Artificial Sequence
  Description of Artificial Sequence: Synthetic oligonucleotide
  Target: COL7A1; (-) strand; PAM type: NRG; PAM sequence: CAG
ccacaggggccccctgtccc

SEQ ID NO: 9318 - DNA, 20 bp, Artificial Sequence
  Description of Artificial Sequence: Synthetic oligonucleotide
  Target: COL7A1; (-) strand; PAM type: NRG; PAM sequence: GGG
agatgcccctgctcccacag

SEQ ID NO: 9319 - DNA, 20 bp, Artificial Sequence
  Description of Artificial Sequence: Synthetic oligonucleotide
  Target: COL7A1; (-) strand; PAM type: NRG; PAM sequence: GGG
aagatgcccctgctcccaca

SEQ ID NO: 9320 - DNA, 20 bp, Artificial Sequence
  Description of Artificial Sequence: Synthetic oligonucleotide
  Target: COL7A1; (-) strand; PAM type: NRG; PAM sequence: AGG
taagatgcccctgctcccac

SEQ ID NO: 9321 - DNA, 20 bp, Artificial Sequence
  Description of Artificial Sequence: Synthetic oligonucleotide
  Target: COL7A1; (-) strand; PAM type: NRG; PAM sequence: CAG
gtaagatgcccctgctccca

SEQ ID NO: 9322 - DNA, 20 bp, Artificial Sequence
  Description of Artificial Sequence: Synthetic oligonucleotide
  Target: COL7A1; (-) strand; PAM type: NRG; PAM sequence: AAG
gggatccctggtgacccggt

SEQ ID NO: 9323 - DNA, 20 bp, Artificial Sequence
  Description of Artificial Sequence: Synthetic oligonucleotide
  Target: COL7A1; (-) strand; PAM type: NRG; PAM sequence: CGG
agcagggatccctggtgacc

SEQ ID NO: 9324 - DNA, 20 bp, Artificial Sequence
  Description of Artificial Sequence: Synthetic oligonucleotide
  Target: COL7A1; (-) strand; PAM type: NRG; PAM sequence: TGG
cctggtgcagcagggatccc

SEQ ID NO: 9325 - DNA, 20 bp, Artificial Sequence
  Description of Artificial Sequence: Synthetic oligonucleotide
  Target: COL7A1; (-) strand; PAM type: NRG; PAM sequence: GGG
agggtcaacctggtgcagca

SEQ ID NO: 9326 - DNA, 20 bp, Artificial Sequence
  Description of Artificial Sequence: Synthetic oligonucleotide
  Target: COL7A1; (-) strand; PAM type: NRG; PAM sequence: AGG
cagggtcaacctggtgcagc

SEQ ID NO: 9327 - DNA, 20 bp, Artificial Sequence
  Description of Artificial Sequence: Synthetic oligonucleotide
  Target: COL7A1; (-) strand; PAM type: NRG; PAM sequence: CAG
acagggtcaacctggtgcag

SEQ ID NO: 9328 - DNA, 20 bp, Artificial Sequence
  Description of Artificial Sequence: Synthetic oligonucleotide
  Target: COL7A1; (-) strand; PAM type: NRG; PAM sequence: CAG
ctcacagggtcaacctggtg

SEQ ID NO: 9329 - DNA, 20 bp, Artificial Sequence
  Description of Artificial Sequence: Synthetic oligonucleotide
  Target: COL7A1; (-) strand; PAM type: NRG; PAM sequence: TGG
tgtttctcacagggtcaacc

SEQ ID NO: 9330 - DNA, 20 bp, Artificial Sequence
  Description of Artificial Sequence: Synthetic oligonucleotide
  Target: COL7A1; (-) strand; PAM type: NRG; PAM sequence: GGG
ccccatctgtgtttctcaca

SEQ ID NO: 9331 - DNA, 20 bp, Artificial Sequence
  Description of Artificial Sequence: Synthetic oligonucleotide
  Target: COL7A1; (-) strand; PAM type: NRG; PAM sequence: AGG
cccccatctgtgtttctcac

SEQ ID NO: 9332 - DNA, 20 bp, Artificial Sequence
  Description of Artificial Sequence: Synthetic oligonucleotide
  Target: COL7A1; (-) strand; PAM type: NRG; PAM sequence: CAG
tcccccatctgtgtttctca

SEQ ID NO: 9333 - DNA, 20 bp, Artificial Sequence
  Description of Artificial Sequence: Synthetic oligonucleotide
  Target: COL7A1; (-) strand; PAM type: NRG; PAM sequence: GGG
ttggggacagtcccactgaa

SEQ ID NO: 9334 - DNA, 20 bp, Artificial Sequence
  Description of Artificial Sequence: Synthetic oligonucleotide
  Target: COL7A1; (-) strand; PAM type: NRG; PAM sequence: AGG
gttggggacagtcccactga

SEQ ID NO: 9335 - DNA, 20 bp, Artificial Sequence
  Description of Artificial Sequence: Synthetic oligonucleotide
  Target: COL7A1; (-) strand; PAM type: NRG; PAM sequence: AAG
tgttggggacagtcccactg

SEQ ID NO: 9336 - DNA, 20 bp, Artificial Sequence
  Description of Artificial Sequence: Synthetic oligonucleotide
  Target: COL7A1; (-) strand; PAM type: NRG; PAM sequence: CAG
ggatgggccagtgttgggga

SEQ ID NO: 9337 - DNA, 20 bp, Artificial Sequence
  Description of Artificial Sequence: Synthetic oligonucleotide
  Target: COL7A1; (-) strand; PAM type: NRG; PAM sequence: GGG
cagcggatgggccagtgttg

SEQ ID NO: 9338 - DNA, 20 bp, Artificial Sequence
  Description of Artificial Sequence: Synthetic oligonucleotide
  Target: COL7A1; (-) strand; PAM type: NRG; PAM sequence: GGG
gcagcggatgggccagtgtt

SEQ ID NO: 9339 - DNA, 20 bp, Artificial Sequence
  Description of Artificial Sequence: Synthetic oligonucleotide
  Target: COL7A1; (-) strand; PAM type: NRG; PAM sequence: TGG
tgcagcggatgggccagtgt

SEQ ID NO: 9340 - DNA, 20 bp, Artificial Sequence
  Description of Artificial Sequence: Synthetic oligonucleotide
  Target: COL7A1; (-) strand; PAM type: NRG; PAM sequence: CAG
cacacatgcagcggatgggc

SEQ ID NO: 9341 - DNA, 20 bp, Artificial Sequence
  Description of Artificial Sequence: Synthetic oligonucleotide
  Target: COL7A1; (-) strand; PAM type: NRG; PAM sequence: GGG
tggccacacatgcagcggat

SEQ ID NO: 9342 - DNA, 20 bp, Artificial Sequence
  Description of Artificial Sequence: Synthetic oligonucleotide
  Target: COL7A1; (-) strand; PAM type: NRG; PAM sequence: TGG
gtggccacacatgcagcgga

SEQ ID NO: 9343 - DNA, 20 bp, Artificial Sequence
  Description of Artificial Sequence: Synthetic oligonucleotide
  Target: COL7A1; (-) strand; PAM type: NRG; PAM sequence: CGG
ctgagtggccacacatgcag

SEQ ID NO: 9344 - DNA, 20 bp, Artificial Sequence
  Description of Artificial Sequence: Synthetic oligonucleotide
  Target: COL7A1; (-) strand; PAM type: NRG; PAM sequence: CAG
catctgagtggccacacatg

SEQ ID NO: 9345 - DNA, 20 bp, Artificial Sequence
  Description of Artificial Sequence: Synthetic oligonucleotide
  Target: COL7A1; (-) strand; PAM type: NRG; PAM sequence: TGG
ctggccgctgagcatctgag

SEQ ID NO: 9346 - DNA, 20 bp, Artificial Sequence
  Description of Artificial Sequence: Synthetic oligonucleotide
  Target: COL7A1; (-) strand; PAM type: NRG; PAM sequence: GAG
gccctggccgctgagcatct

SEQ ID NO: 9347 - DNA, 20 bp, Artificial Sequence
  Description of Artificial Sequence: Synthetic oligonucleotide
  Target: COL7A1; (-) strand; PAM type: NRG; PAM sequence: GAG
tggcctgggccctggccgct

SEQ ID NO: 9348 - DNA, 20 bp, Artificial Sequence
  Description of Artificial Sequence: Synthetic oligonucleotide
  Target: COL7A1; (-) strand; PAM type: NRG; PAM sequence: TGG
tctgtgtgtggcctgggccc

SEQ ID NO: 9349 - DNA, 20 bp, Artificial Sequence
  Description of Artificial Sequence: Synthetic oligonucleotide
  Target: COL7A1; (-) strand; PAM type: NRG; PAM sequence: GGG
ccgggatctgtgtgtggcct

SEQ ID NO: 9350 - DNA, 20 bp, Artificial Sequence
  Description of Artificial Sequence: Synthetic oligonucleotide
  Target: COL7A1; (-) strand; PAM type: NRG; PAM sequence: TGG
cccgggatctgtgtgtggcc

SEQ ID NO: 9351 - DNA, 20 bp, Artificial Sequence
  Description of Artificial Sequence: Synthetic oligonucleotide
  Target: COL7A1; (-) strand; PAM type: NRG; PAM sequence: TGG
gttcacccgggatctgtgtg

SEQ ID NO: 9352 - DNA, 20 bp, Artificial Sequence
  Description of Artificial Sequence: Synthetic oligonucleotide
  Target: COL7A1; (-) strand; PAM type: NRG; PAM sequence: GGG
ggccccatgtgtgttcaccc

SEQ ID NO: 9353 - DNA, 20 bp, Artificial Sequence
  Description of Artificial Sequence: Synthetic oligonucleotide
  Target: COL7A1; (-) strand; PAM type: NRG; PAM sequence: CGG
cggccccatgtgtgttcacc

SEQ ID NO: 9354 - DNA, 20 bp, Artificial Sequence
  Description of Artificial Sequence: Synthetic oligonucleotide
  Target: COL7A1; (-) strand; PAM type: NRG; PAM sequence: CGG
ggttctggctcccttgctgc

SEQ ID NO: 9355 - DNA, 20 bp, Artificial Sequence
  Description of Artificial Sequence: Synthetic oligonucleotide
  Target: COL7A1; (-) strand; PAM type: NRG; PAM sequence: TGG
ctcttaagtgctgggggttc

SEQ ID NO: 9356 - DNA, 20 bp, Artificial Sequence
  Description of Artificial Sequence: Synthetic oligonucleotide
  Target: COL7A1; (-) strand; PAM type: NRG; PAM sequence: GGG
ggggtcctcttaagtgctgg

SEQ ID NO: 9357 - DNA, 20 bp, Artificial Sequence
  Description of Artificial Sequence: Synthetic oligonucleotide
  Target: COL7A1; (-) strand; PAM type: NRG; PAM sequence: GGG
gggggtcctcttaagtgctg

SEQ ID NO: 9358 - DNA, 20 bp, Artificial Sequence
  Description of Artificial Sequence: Synthetic oligonucleotide
  Target: COL7A1; (-) strand; PAM type: NRG; PAM sequence: GGG
tgggggtcctcttaagtgct

SEQ ID NO: 9359 - DNA, 20 bp, Artificial Sequence
  Description of Artificial Sequence: Synthetic oligonucleotide
  Target: COL7A1; (-) strand; PAM type: NRG; PAM sequence: TGG
ctgggggtcctcttaagtgc

SEQ ID NO: 9360 - DNA, 20 bp, Artificial Sequence
  Description of Artificial Sequence: Synthetic oligonucleotide
  Target: COL7A1; (-) strand; PAM type: NRG; PAM sequence: AAG
catatcctgggggtcctctt

SEQ ID NO: 9361 - DNA, 20 bp, Artificial Sequence
  Description of Artificial Sequence: Synthetic oligonucleotide
  Target: COL7A1; (-) strand; PAM type: NRG; PAM sequence: GGG
cacacacacacatatcctgg

SEQ ID NO: 9362 - DNA, 20 bp, Artificial Sequence
  Description of Artificial Sequence: Synthetic oligonucleotide
  Target: COL7A1; (-) strand; PAM type: NRG; PAM sequence: GGG
tcacacacacacatatcctg

SEQ ID NO: 9363 - DNA, 20 bp, Artificial Sequence
  Description of Artificial Sequence: Synthetic oligonucleotide
  Target: COL7A1; (-) strand; PAM type: NRG; PAM sequence: GGG
atcacacacacacatatcct

SEQ ID NO: 9364 - DNA, 20 bp, Artificial Sequence
  Description of Artificial Sequence: Synthetic oligonucleotide
  Target: COL7A1; (-) strand; PAM type: NRG; PAM sequence: TGG
catcacacacacacatatcc

SEQ ID NO: 9365 - DNA, 20 bp, Artificial Sequence
  Description of Artificial Sequence: Synthetic oligonucleotide
  Target: COL7A1; (-) strand; PAM type: NRG; PAM sequence: CAG
cccaggcccaggtccagagc

SEQ ID NO: 9366 - DNA, 20 bp, Artificial Sequence
  Description of Artificial Sequence: Synthetic oligonucleotide
  Target: COL7A1; (-) strand; PAM type: NRG; PAM sequence: GAG
caggcccaggcccaggtcca

SEQ ID NO: 9367 - DNA, 20 bp, Artificial Sequence
  Description of Artificial Sequence: Synthetic oligonucleotide
  Target: COL7A1; (-) strand; PAM type: NRG; PAM sequence: CAG
cccaggcccaggcccaggtc

SEQ ID NO: 9368 - DNA, 20 bp, Artificial Sequence
  Description of Artificial Sequence: Synthetic oligonucleotide
  Target: COL7A1; (-) strand; PAM type: NRG; PAM sequence: AGG
ccaggcccaggcccaggccc

SEQ ID NO: 9369 - DNA, 20 bp, Artificial Sequence
  Description of Artificial Sequence: Synthetic oligonucleotide
  Target: COL7A1; (-) strand; PAM type: NRG; PAM sequence: CAG
cccaggcccaggcccaggcc

SEQ ID NO: 9370 - DNA, 20 bp, Artificial Sequence
  Description of Artificial Sequence: Synthetic oligonucleotide
  Target: COL7A1; (-) strand; PAM type: NRG; PAM sequence: AGG
tctgccccaggcccaggccc

SEQ ID NO: 9371 - DNA, 20 bp, Artificial Sequence
  Description of Artificial Sequence: Synthetic oligonucleotide
  Target: COL7A1; (-) strand; PAM type: NRG; PAM sequence: CAG
ttctgccccaggcccaggcc

SEQ ID NO: 9372 - DNA, 20 bp, Artificial Sequence
  Description of Artificial Sequence: Synthetic oligonucleotide
  Target: COL7A1; (-) strand; PAM type: NRG; PAM sequence: AGG
gcaagttctgccccaggccc

SEQ ID NO: 9373 - DNA, 20 bp, Artificial Sequence
  Description of Artificial Sequence: Synthetic oligonucleotide
  Target: COL7A1; (-) strand; PAM type: NRG; PAM sequence: CAG
ggcaagttctgccccaggcc

SEQ ID NO: 9374 - DNA, 20 bp, Artificial Sequence
  Description of Artificial Sequence: Synthetic oligonucleotide
  Target: COL7A1; (-) strand; PAM type: NRG; PAM sequence: AGG
ccccaggcaagttctgcccc

SEQ ID NO: 9375 - DNA, 20 bp, Artificial Sequence
  Description of Artificial Sequence: Synthetic oligonucleotide
  Target: COL7A1; (-) strand; PAM type: NRG; PAM sequence: CAG
accccaggcaagttctgccc

SEQ ID NO: 9376 - DNA, 20 bp, Artificial Sequence
  Description of Artificial Sequence: Synthetic oligonucleotide
  Target: COL7A1; (-) strand; PAM type: NRG; PAM sequence: AAG
ggactcctgggaccccaggc

SEQ ID NO: 9377 - DNA, 20 bp, Artificial Sequence
  Description of Artificial Sequence: Synthetic oligonucleotide
  Target: COL7A1; (-) strand; PAM type: NRG; PAM sequence: AGG
gcgtggactcctgggacccc

SEQ ID NO: 9378 - DNA, 20 bp, Artificial Sequence
  Description of Artificial Sequence: Synthetic oligonucleotide
  Target: COL7A1; (-) strand; PAM type: NRG; PAM sequence: CAG
tgcgtggactcctgggaccc

SEQ ID NO: 9379 - DNA, 20 bp, Artificial Sequence
  Description of Artificial Sequence: Synthetic oligonucleotide
  Target: COL7A1; (-) strand; PAM type: NRG; PAM sequence: GGG
ccaggactgcgtggactcct

SEQ ID NO: 9380 - DNA, 20 bp, Artificial Sequence
  Description of Artificial Sequence: Synthetic oligonucleotide
  Target: COL7A1; (-) strand; PAM type: NRG; PAM sequence: TGG
gccaggactgcgtggactcc

SEQ ID NO: 9381 - DNA, 20 bp, Artificial Sequence
  Description of Artificial Sequence: Synthetic oligonucleotide
  Target: COL7A1; (-) strand; PAM type: NRG; PAM sequence: TGG
gccgggttgccaggactgcg

SEQ ID NO: 9382 - DNA, 20 bp, Artificial Sequence
  Description of Artificial Sequence: Synthetic oligonucleotide
  Target: COL7A1; (-) strand; PAM type: NRG; PAM sequence: AGG
aagggctcagccgggttgcc

SEQ ID NO: 9383 - DNA, 20 bp, Artificial Sequence
  Description of Artificial Sequence: Synthetic oligonucleotide
  Target: COL7A1; (-) strand; PAM type: NRG; PAM sequence: CAG
caagggctcagccgggttgc

SEQ ID NO: 9384 - DNA, 20 bp, Artificial Sequence
  Description of Artificial Sequence: Synthetic oligonucleotide
  Target: COL7A1; (-) strand; PAM type: NRG; PAM sequence: GGG
ctggtgacaagggctcagcc

SEQ ID NO: 9385 - DNA, 20 bp, Artificial Sequence
  Description of Artificial Sequence: Synthetic oligonucleotide
  Target: COL7A1; (-) strand; PAM type: NRG; PAM sequence: CGG
cctggtgacaagggctcagc

SEQ ID NO: 9386 - DNA, 20 bp, Artificial Sequence
  Description of Artificial Sequence: Synthetic oligonucleotide
  Target: COL7A1; (-) strand; PAM type: NRG; PAM sequence: CAG
agagcctggtgacaagggct

SEQ ID NO: 9387 - DNA, 20 bp, Artificial Sequence
  Description of Artificial Sequence: Synthetic oligonucleotide
  Target: COL7A1; (-) strand; PAM type: NRG; PAM sequence: GGG
aagggagagcctggtgacaa

SEQ ID NO: 9388 - DNA, 20 bp, Artificial Sequence
  Description of Artificial Sequence: Synthetic oligonucleotide
  Target: COL7A1; (-) strand; PAM type: NRG; PAM sequence: AGG
caagggagagcctggtgaca

SEQ ID NO: 9389 - DNA, 20 bp, Artificial Sequence
  Description of Artificial Sequence: Synthetic oligonucleotide
  Target: COL7A1; (-) strand; PAM type: NRG; PAM sequence: AAG
gcaagggagagcctggtgac

SEQ ID NO: 9390 - DNA, 20 bp, Artificial Sequence
  Description of Artificial Sequence: Synthetic oligonucleotide
  Target: COL7A1; (-) strand; PAM type: NRG; PAM sequence: TGG
cagggcagcaagggagagcc

SEQ ID NO: 9391 - DNA, 20 bp, Artificial Sequence
  Description of Artificial Sequence: Synthetic oligonucleotide
  Target: COL7A1; (-) strand; PAM type: NRG; PAM sequence: GAG
tcccacagggcagcaaggga

SEQ ID NO: 9392 - DNA, 20 bp, Artificial Sequence
  Description of Artificial Sequence: Synthetic oligonucleotide
  Target: COL7A1; (-) strand; PAM type: NRG; PAM sequence: GAG
actcccacagggcagcaagg

SEQ ID NO: 9393 - DNA, 20 bp, Artificial Sequence
  Description of Artificial Sequence: Synthetic oligonucleotide
  Target: COL7A1; (-) strand; PAM type: NRG; PAM sequence: GGG
tcactcccacagggcagcaa

SEQ ID NO: 9394 - DNA, 20 bp, Artificial Sequence
  Description of Artificial Sequence: Synthetic oligonucleotide
  Target: COL7A1; (-) strand; PAM type: NRG; PAM sequence: AGG
gtcactcccacagggcagca

SEQ ID NO: 9395 - DNA, 20 bp, Artificial Sequence
  Description of Artificial Sequence: Synthetic oligonucleotide
  Target: COL7A1; (-) strand; PAM type: NRG; PAM sequence: AAG
ggtcactcccacagggcagc

SEQ ID NO: 9396 - DNA, 20 bp, Artificial Sequence
  Description of Artificial Sequence: Synthetic oligonucleotide
  Target: COL7A1; (-) strand; PAM type: NRG; PAM sequence: CAG
tcctggtcactcccacaggg

SEQ ID NO: 9397 - DNA, 20 bp, Artificial Sequence
  Description of Artificial Sequence: Synthetic oligonucleotide
  Target: COL7A1; (-) strand; PAM type: NRG; PAM sequence: GGG
ctctcctggtcactcccaca

SEQ ID NO: 9398 - DNA, 20 bp, Artificial Sequence
  Description of Artificial Sequence: Synthetic oligonucleotide
  Target: COL7A1; (-) strand; PAM type: NRG; PAM sequence: AGG
cctctcctggtcactcccac

SEQ ID NO: 9399 - DNA, 20 bp, Artificial Sequence
  Description of Artificial Sequence: Synthetic oligonucleotide
  Target: COL7A1; (-) strand; PAM type: NRG; PAM sequence: CAG
ccctctcctggtcactccca

SEQ ID NO: 9400 - DNA, 20 bp, Artificial Sequence
  Description of Artificial Sequence: Synthetic oligonucleotide
  Target: COL7A1; (-) strand; PAM type: NRG; PAM sequence: TGG
tcctgactgaatccctctcc

SEQ ID NO: 9401 - DNA, 20 bp, Artificial Sequence
  Description of Artificial Sequence: Synthetic oligonucleotide
  Target: COL7A1; (-) strand; PAM type: NRG; PAM sequence: TGG
tctaagcccccagcctgatc

SEQ ID NO: 9402 - DNA, 20 bp, Artificial Sequence
  Description of Artificial Sequence: Synthetic oligonucleotide
  Target: COL7A1; (-) strand; PAM type: NRG; PAM sequence: CAG
ctcgttgtattctaagcccc

SEQ ID NO: 9403 - DNA, 20 bp, Artificial Sequence
  Description of Artificial Sequence: Synthetic oligonucleotide
  Target: COL7A1; (-) strand; PAM type: NRG; PAM sequence: AAG
tggcgggctcgttgtattct

SEQ ID NO: 9404 - DNA, 20 bp, Artificial Sequence
  Description of Artificial Sequence: Synthetic oligonucleotide
  Target: COL7A1; (-) strand; PAM type: NRG; PAM sequence: GGG
tgagctctgccccagctggc

SEQ ID NO: 9405 - DNA, 20 bp, Artificial Sequence
  Description of Artificial Sequence: Synthetic oligonucleotide
  Target: COL7A1; (-) strand; PAM type: NRG; PAM sequence: CGG
ttgagctctgccccagctgg

SEQ ID NO: 9406 - DNA, 20 bp, Artificial Sequence
  Description of Artificial Sequence: Synthetic oligonucleotide
  Target: COL7A1; (-) strand; PAM type: NRG; PAM sequence: TGG
gacttgagctctgccccagc

SEQ ID NO: 9407 - DNA, 20 bp, Artificial Sequence
  Description of Artificial Sequence: Synthetic oligonucleotide
  Target: COL7A1; (-) strand; PAM type: NRG; PAM sequence: CAG
gagtgacttgagctctgccc

SEQ ID NO: 9408 - DNA, 20 bp, Artificial Sequence
  Description of Artificial Sequence: Synthetic oligonucleotide
  Target: COL7A1; (-) strand; PAM type: NRG; PAM sequence: GAG
gggccgttcgggagtgactt

SEQ ID NO: 9409 - DNA, 20 bp, Artificial Sequence
  Description of Artificial Sequence: Synthetic oligonucleotide
  Target: COL7A1; (-) strand; PAM type: NRG; PAM sequence: GAG
gtgctgctagggccgttcgg

SEQ ID NO: 9410 - DNA, 20 bp, Artificial Sequence
  Description of Artificial Sequence: Synthetic oligonucleotide
  Target: COL7A1; (-) strand; PAM type: NRG; PAM sequence: GGG
acgtgctgctagggccgttc

SEQ ID NO: 9411 - DNA, 20 bp, Artificial Sequence
  Description of Artificial Sequence: Synthetic oligonucleotide
  Target: COL7A1; (-) strand; PAM type: NRG; PAM sequence: CGG
gacgtgctgctagggccgtt

SEQ ID NO: 9412 - DNA, 20 bp, Artificial Sequence
  Description of Artificial Sequence: Synthetic oligonucleotide
  Target: COL7A1; (-) strand; PAM type: NRG; PAM sequence: GGG
gctgggaggacgtgctgcta

SEQ ID NO: 9413 - DNA, 20 bp, Artificial Sequence
  Description of Artificial Sequence: Synthetic oligonucleotide
  Target: COL7A1; (-) strand; PAM type: NRG; PAM sequence: AGG
ggctgggaggacgtgctgct

SEQ ID NO: 9414 - DNA, 20 bp, Artificial Sequence
  Description of Artificial Sequence: Synthetic oligonucleotide
  Target: COL7A1; (-) strand; PAM type: NRG; PAM sequence: TAG
aggctgggaggacgtgctgc

SEQ ID NO: 9415 - DNA, 20 bp, Artificial Sequence
  Description of Artificial Sequence: Synthetic oligonucleotide
  Target: COL7A1; (-) strand; PAM type: NRG; PAM sequence: AGG
ccgctatggcacaggctggg

SEQ ID NO: 9416 - DNA, 20 bp, Artificial Sequence
  Description of Artificial Sequence: Synthetic oligonucleotide
  Target: COL7A1; (-) strand; PAM type: NRG; PAM sequence: GAG
cccgctatggcacaggctgg

SEQ ID NO: 9417 - DNA, 20 bp, Artificial Sequence
  Description of Artificial Sequence: Synthetic oligonucleotide
  Target: COL7A1; (-) strand; PAM type: NRG; PAM sequence: GGG
cacccgctatggcacaggct

SEQ ID NO: 9418 - DNA, 20 bp, Artificial Sequence
  Description of Artificial Sequence: Synthetic oligonucleotide
  Target: COL7A1; (-) strand; PAM type: NRG; PAM sequence: TGG
ccacccgctatggcacaggc

SEQ ID NO: 9419 - DNA, 20 bp, Artificial Sequence
  Description of Artificial Sequence: Synthetic oligonucleotide
  Target: COL7A1; (-) strand; PAM type: NRG; PAM sequence: AGG
agttccacccgctatggcac

SEQ ID NO: 9420 - DNA, 20 bp, Artificial Sequence
  Description of Artificial Sequence: Synthetic oligonucleotide
  Target: COL7A1; (-) strand; PAM type: NRG; PAM sequence: CAG
cagttccacccgctatggca

SEQ ID NO: 9421 - DNA, 20 bp, Artificial Sequence
  Description of Artificial Sequence: Synthetic oligonucleotide
  Target: COL7A1; (-) strand; PAM type: NRG; PAM sequence: TGG
gcccccagttccacccgcta

SEQ ID NO: 9422 - DNA, 20 bp, Artificial Sequence
  Description of Artificial Sequence: Synthetic oligonucleotide
  Target: COL7A1; (-) strand; PAM type: NRG; PAM sequence: CAG
agtctgtggactacagcccc

SEQ ID NO: 9423 - DNA, 20 bp, Artificial Sequence
  Description of Artificial Sequence: Synthetic oligonucleotide
  Target: COL7A1; (-) strand; PAM type: NRG; PAM sequence: CAG
atgagccagtctgtggacta

SEQ ID NO: 9424 - DNA, 20 bp, Artificial Sequence
  Description of Artificial Sequence: Synthetic oligonucleotide
  Target: COL7A1; (-) strand; PAM type: NRG; PAM sequence: TGG
gtgagaaatgagccagtctg

SEQ ID NO: 9425 - DNA, 20 bp, Artificial Sequence
  Description of Artificial Sequence: Synthetic oligonucleotide
  Target: COL7A1; (-) strand; PAM type: NRG; PAM sequence: CAG
ccttggggtgagaaatgagc

SEQ ID NO: 9426 - DNA, 20 bp, Artificial Sequence
  Description of Artificial Sequence: Synthetic oligonucleotide
  Target: COL7A1; (-) strand; PAM type: NRG; PAM sequence: GAG
gagtccttggggtgagaaat

SEQ ID NO: 9427 - DNA, 20 bp, Artificial Sequence
  Description of Artificial Sequence: Synthetic oligonucleotide
  Target: COL7A1; (-) strand; PAM type: NRG; PAM sequence: GAG
gggtctggagtccttggggt

SEQ ID NO: 9428 - DNA, 20 bp, Artificial Sequence
  Description of Artificial Sequence: Synthetic oligonucleotide
  Target: COL7A1; (-) strand; PAM type: NRG; PAM sequence: GGG
gcaagggtctggagtccttg

SEQ ID NO: 9429 - DNA, 20 bp, Artificial Sequence
  Description of Artificial Sequence: Synthetic oligonucleotide
  Target: COL7A1; (-) strand; PAM type: NRG; PAM sequence: GGG
ggcaagggtctggagtcctt

SEQ ID NO: 9430 - DNA, 20 bp, Artificial Sequence
  Description of Artificial Sequence: Synthetic oligonucleotide
  Target: COL7A1; (-) strand; PAM type: NRG; PAM sequence: TGG
gggcaagggtctggagtcct

SEQ ID NO: 9431 - DNA, 20 bp, Artificial Sequence
  Description of Artificial Sequence: Synthetic oligonucleotide
  Target: COL7A1; (-) strand; PAM type: NRG; PAM sequence: GAG
gagggcggggcaagggtctg

SEQ ID NO: 9432 - DNA, 20 bp, Artificial Sequence
  Description of Artificial Sequence: Synthetic oligonucleotide
  Target: COL7A1; (-) strand; PAM type: NRG; PAM sequence: TGG
aagagggcggggcaagggtc

SEQ ID NO: 9433 - DNA, 20 bp, Artificial Sequence
  Description of Artificial Sequence: Synthetic oligonucleotide
  Target: COL7A1; (-) strand; PAM type: NRG; PAM sequence: GGG
gtgataagagggcggggcaa

SEQ ID NO: 9434 - DNA, 20 bp, Artificial Sequence
  Description of Artificial Sequence: Synthetic oligonucleotide
  Target: COL7A1; (-) strand; PAM type: NRG; PAM sequence: AGG
agtgataagagggcggggca

SEQ ID NO: 9435 - DNA, 20 bp, Artificial Sequence
  Description of Artificial Sequence: Synthetic oligonucleotide
  Target: COL7A1; (-) strand; PAM type: NRG; PAM sequence: AAG
cagtgataagagggcggggc

SEQ ID NO: 9436 - DNA, 20 bp, Artificial Sequence
  Description of Artificial Sequence: Synthetic oligonucleotide
  Target: COL7A1; (-) strand; PAM type: NRG; PAM sequence: GGG
aacccagtgataagagggcg

SEQ ID NO: 9437 - DNA, 20 bp, Artificial Sequence
  Description of Artificial Sequence: Synthetic oligonucleotide
  Target: COL7A1; (-) strand; PAM type: NRG; PAM sequence: GGG
gaacccagtgataagagggc

SEQ ID NO: 9438 - DNA, 20 bp, Artificial Sequence
  Description of Artificial Sequence: Synthetic oligonucleotide
  Target: COL7A1; (-) strand; PAM type: NRG; PAM sequence: CGG
ggaacccagtgataagaggg

SEQ ID NO: 9439 - DNA, 20 bp, Artificial Sequence
  Description of Artificial Sequence: Synthetic oligonucleotide
  Target: COL7A1; (-) strand; PAM type: NRG; PAM sequence: GGG
tgaggaacccagtgataaga

SEQ ID NO: 9440 - DNA, 20 bp, Artificial Sequence
  Description of Artificial Sequence: Synthetic oligonucleotide
  Target: COL7A1; (-) strand; PAM type: NRG; PAM sequence: AGG
atgaggaacccagtgataag

SEQ ID NO: 9441 - DNA, 20 bp, Artificial Sequence
  Description of Artificial Sequence: Synthetic oligonucleotide
  Target: COL7A1; (-) strand; PAM type: NRG; PAM sequence: GAG
gatgaggaacccagtgataa

SEQ ID NO: 9442 - DNA, 20 bp, Artificial Sequence
  Description of Artificial Sequence: Synthetic oligonucleotide
  Target: COL7A1; (-) strand; PAM type: NRG; PAM sequence: AAG
gggatgaggaacccagtgat

SEQ ID NO: 9443 - DNA, 20 bp, Artificial Sequence
  Description of Artificial Sequence: Synthetic oligonucleotide
  Target: COL7A1; (-) strand; PAM type: NRG; PAM sequence: CAG
ttcagatgggatgaggaacc

SEQ ID NO: 9444 - DNA, 20 bp, Artificial Sequence
  Description of Artificial Sequence: Synthetic oligonucleotide
  Target: COL7A1; (-) strand; PAM type: NRG; PAM sequence: AGG
aaggtgcttcagatgggatg

SEQ ID NO: 9445 - DNA, 20 bp, Artificial Sequence
  Description of Artificial Sequence: Synthetic oligonucleotide
  Target: COL7A1; (-) strand; PAM type: NRG; PAM sequence: GAG
gaaggtgcttcagatgggat

SEQ ID NO: 9446 - DNA, 20 bp, Artificial Sequence
  Description of Artificial Sequence: Synthetic oligonucleotide
  Target: COL7A1; (-) strand; PAM type: NRG; PAM sequence: GGG
catctgaaggtgcttcagat

SEQ ID NO: 9447 - DNA, 20 bp, Artificial Sequence
  Description of Artificial Sequence: Synthetic oligonucleotide
  Target: COL7A1; (-) strand; PAM type: NRG; PAM sequence: TGG
ccatctgaaggtgcttcaga

SEQ ID NO: 9448 - DNA, 20 bp, Artificial Sequence
  Description of Artificial Sequence: Synthetic oligonucleotide
  Target: COL7A1; (-) strand; PAM type: NRG; PAM sequence: CAG
gtccccatctgaaggtgctt

SEQ ID NO: 9449 - DNA, 20 bp, Artificial Sequence
  Description of Artificial Sequence: Synthetic oligonucleotide
  Target: COL7A1; (-) strand; PAM type: NRG; PAM sequence: AGG
ccttgggtgtccccatctga

SEQ ID NO: 9450 - DNA, 20 bp, Artificial Sequence
  Description of Artificial Sequence: Synthetic oligonucleotide
  Target: COL7A1; (-) strand; PAM type: NRG; PAM sequence: AAG
tccttgggtgtccccatctg

SEQ ID NO: 9451 - DNA, 20 bp, Artificial Sequence
  Description of Artificial Sequence: Synthetic oligonucleotide
  Target: COL7A1; (-) strand; PAM type: NRG; PAM sequence: GGG
ggacaggaaaggggctcctt

SEQ ID NO: 9452 - DNA, 20 bp, Artificial Sequence
  Description of Artificial Sequence: Synthetic oligonucleotide
  Target: COL7A1; (-) strand; PAM type: NRG; PAM sequence: TGG
gggacaggaaaggggctcct

SEQ ID NO: 9453 - DNA, 20 bp, Artificial Sequence
  Description of Artificial Sequence: Synthetic oligonucleotide
  Target: COL7A1; (-) strand; PAM type: NRG; PAM sequence: GGG
gccctatagggacaggaaag

SEQ ID NO: 9454 - DNA, 20 bp, Artificial Sequence
  Description of Artificial Sequence: Synthetic oligonucleotide
  Target: COL7A1; (-) strand; PAM type: NRG; PAM sequence: GGG
ggccctatagggacaggaaa

SEQ ID NO: 9455 - DNA, 20 bp, Artificial Sequence
  Description of Artificial Sequence: Synthetic oligonucleotide
  Target: COL7A1; (-) strand; PAM type: NRG; PAM sequence: AGG
gggccctatagggacaggaa

SEQ ID NO: 9456 - DNA, 20 bp, Artificial Sequence
  Description of Artificial Sequence: Synthetic oligonucleotide
  Target: COL7A1; (-) strand; PAM type: NRG; PAM sequence: AAG
ggggccctatagggacagga

SEQ ID NO: 9457 - DNA, 20 bp, Artificial Sequence
  Description of Artificial Sequence: Synthetic oligonucleotide
  Target: COL7A1; (-) strand; PAM type: NRG; PAM sequence: AGG
tgaaggggccctatagggac

SEQ ID NO: 9458 - DNA, 20 bp, Artificial Sequence
  Description of Artificial Sequence: Synthetic oligonucleotide
  Target: COL7A1; (-) strand; PAM type: NRG; PAM sequence: CAG
atgaaggggccctataggga

SEQ ID NO: 9459 - DNA, 20 bp, Artificial Sequence
  Description of Artificial Sequence: Synthetic oligonucleotide
  Target: COL7A1; (-) strand; PAM type: NRG; PAM sequence: GGG
ccctatgaaggggccctata

SEQ ID NO: 9460 - DNA, 20 bp, Artificial Sequence
  Description of Artificial Sequence: Synthetic oligonucleotide
  Target: COL7A1; (-) strand; PAM type: NRG; PAM sequence: AGG
gccctatgaaggggccctat

SEQ ID NO: 9461 - DNA, 20 bp, Artificial Sequence
  Description of Artificial Sequence: Synthetic oligonucleotide
  Target: COL7A1; (-) strand; PAM type: NRG; PAM sequence: TAG
ggccctatgaaggggcccta

SEQ ID NO: 9462 - DNA, 20 bp, Artificial Sequence
  Description of Artificial Sequence: Synthetic oligonucleotide
  Target: COL7A1; (-) strand; PAM type: NRG; PAM sequence: GGG
tgtggactggccctatgaag

SEQ ID NO: 9463 - DNA, 20 bp, Artificial Sequence
  Description of Artificial Sequence: Synthetic oligonucleotide
  Target: COL7A1; (-) strand; PAM type: NRG; PAM sequence: GGG
ctgtggactggccctatgaa

SEQ ID NO: 9464 - DNA, 20 bp, Artificial Sequence
  Description of Artificial Sequence: Synthetic oligonucleotide
  Target: COL7A1; (-) strand; PAM type: NRG; PAM sequence: AGG
tctgtggactggccctatga

SEQ ID NO: 9465 - DNA, 20 bp, Artificial Sequence
  Description of Artificial Sequence: Synthetic oligonucleotide
  Target: COL7A1; (-) strand; PAM type: NRG; PAM sequence: AAG
ctctgtggactggccctatg

SEQ ID NO: 9466 - DNA, 20 bp, Artificial Sequence
  Description of Artificial Sequence: Synthetic oligonucleotide
  Target: COL7A1; (-) strand; PAM type: NRG; PAM sequence: TGG
gttaggagagctctgtggac

SEQ ID NO: 9467 - DNA, 20 bp, Artificial Sequence
  Description of Artificial Sequence: Synthetic oligonucleotide
  Target: COL7A1; (-) strand; PAM type: NRG; PAM sequence: TGG
gtgaggttaggagagctctg

SEQ ID NO: 9468 - DNA, 20 bp, Artificial Sequence
  Description of Artificial Sequence: Synthetic oligonucleotide
  Target: COL7A1; (-) strand; PAM type: NRG; PAM sequence: GAG
gccttggtgtgaggttagga

SEQ ID NO: 9469 - DNA, 20 bp, Artificial Sequence
  Description of Artificial Sequence: Synthetic oligonucleotide
  Target: COL7A1; (-) strand; PAM type: NRG; PAM sequence: GAG
aggccttggtgtgaggttag

SEQ ID NO: 9470 - DNA, 20 bp, Artificial Sequence
  Description of Artificial Sequence: Synthetic oligonucleotide
  Target: COL7A1; (-) strand; PAM type: NRG; PAM sequence: AGG
caaggccttggtgtgaggtt

SEQ ID NO: 9471 - DNA, 20 bp, Artificial Sequence
  Description of Artificial Sequence: Synthetic oligonucleotide
  Target: COL7A1; (-) strand; PAM type: NRG; PAM sequence: TAG
tcaaggccttggtgtgaggt

SEQ ID NO: 9472 - DNA, 20 bp, Artificial Sequence
  Description of Artificial Sequence: Synthetic oligonucleotide
  Target: COL7A1; (-) strand; PAM type: NRG; PAM sequence: AGG
gggctcaaggccttggtgtg

SEQ ID NO: 9473 - DNA, 20 bp, Artificial Sequence
  Description of Artificial Sequence: Synthetic oligonucleotide
  Target: COL7A1; (-) strand; PAM type: NRG; PAM sequence: GAG
agggctcaaggccttggtgt

SEQ ID NO: 9474 - DNA, 20 bp, Artificial Sequence
  Description of Artificial Sequence: Synthetic oligonucleotide
  Target: COL7A1; (-) strand; PAM type: NRG; PAM sequence: TGG
ctagggagggctcaaggcct

SEQ ID NO: 9475 - DNA, 20 bp, Artificial Sequence
  Description of Artificial Sequence: Synthetic oligonucleotide
  Target: COL7A1; (-) strand; PAM type: NRG; PAM sequence: AGG
ggggctctagggagggctca

SEQ ID NO: 9476 - DNA, 20 bp, Artificial Sequence
  Description of Artificial Sequence: Synthetic oligonucleotide
  Target: COL7A1; (-) strand; PAM type: NRG; PAM sequence: AAG
aggggctctagggagggctc

SEQ ID NO: 9477 - DNA, 20 bp, Artificial Sequence
  Description of Artificial Sequence: Synthetic oligonucleotide
  Target: COL7A1; (-) strand; PAM type: NRG; PAM sequence: GGG
gagaggaggggctctaggga

SEQ ID NO: 9478 - DNA, 20 bp, Artificial Sequence
  Description of Artificial Sequence: Synthetic oligonucleotide
  Target: COL7A1; (-) strand; PAM type: NRG; PAM sequence: AGG
cgagaggaggggctctaggg

SEQ ID NO: 9479 - DNA, 20 bp, Artificial Sequence
  Description of Artificial Sequence: Synthetic oligonucleotide
  Target: COL7A1; (-) strand; PAM type: NRG; PAM sequence: GAG
ccgagaggaggggctctagg

SEQ ID NO: 9480 - DNA, 20 bp, Artificial Sequence
  Description of Artificial Sequence: Synthetic oligonucleotide
  Target: COL7A1; (-) strand; PAM type: NRG; PAM sequence: GGG
ggccgagaggaggggctcta

SEQ ID NO: 9481 - DNA, 20 bp, Artificial Sequence
  Description of Artificial Sequence: Synthetic oligonucleotide
  Target: COL7A1; (-) strand; PAM type: NRG; PAM sequence: AGG
tggccgagaggaggggctct

SEQ ID NO: 9482 - DNA, 20 bp, Artificial Sequence
  Description of Artificial Sequence: Synthetic oligonucleotide
  Target: COL7A1; (-) strand; PAM type: NRG; PAM sequence: TAG
gtggccgagaggaggggctc

SEQ ID NO: 9483 - DNA, 20 bp, Artificial Sequence
  Description of Artificial Sequence: Synthetic oligonucleotide
  Target: COL7A1; (-) strand; PAM type: NRG; PAM sequence: GGG
tatggagtggccgagaggag

SEQ ID NO: 9484 - DNA, 20 bp, Artificial Sequence
  Description of Artificial Sequence: Synthetic oligonucleotide
  Target: COL7A1; (-) strand; PAM type: NRG; PAM sequence: GGG
ctatggagtggccgagagga

SEQ ID NO: 9485 - DNA, 20 bp, Artificial Sequence
  Description of Artificial Sequence: Synthetic oligonucleotide
  Target: COL7A1; (-) strand; PAM type: NRG; PAM sequence: AGG
actatggagtggccgagagg

SEQ ID NO: 9486 - DNA, 20 bp, Artificial Sequence
  Description of Artificial Sequence: Synthetic oligonucleotide
  Target: COL7A1; (-) strand; PAM type: NRG; PAM sequence: GAG
gactatggagtggccgagag

SEQ ID NO: 9487 - DNA, 20 bp, Artificial Sequence
  Description of Artificial Sequence: Synthetic oligonucleotide
  Target: COL7A1; (-) strand; PAM type: NRG; PAM sequence: AGG
ctgactatggagtggccgag

SEQ ID NO: 9488 - DNA, 20 bp, Artificial Sequence
  Description of Artificial Sequence: Synthetic oligonucleotide
  Target: COL7A1; (-) strand; PAM type: NRG; PAM sequence: GAG
gctgactatggagtggccga

SEQ ID NO: 9489 - DNA, 20 bp, Artificial Sequence
  Description of Artificial Sequence: Synthetic oligonucleotide
  Target: COL7A1; (-) strand; PAM type: NRG; PAM sequence: GAG
tggctgactatggagtggcc

SEQ ID NO: 9490 - DNA, 20 bp, Artificial Sequence
  Description of Artificial Sequence: Synthetic oligonucleotide
  Target: COL7A1; (-) strand; PAM type: NRG; PAM sequence: TGG
ttctgtggctgactatggag

SEQ ID NO: 9491 - DNA, 20 bp, Artificial Sequence
  Description of Artificial Sequence: Synthetic oligonucleotide
  Target: COL7A1; (-) strand; PAM type: NRG; PAM sequence: GAG
gggttctgtggctgactatg

SEQ ID NO: 9492 - DNA, 20 bp, Artificial Sequence
  Description of Artificial Sequence: Synthetic oligonucleotide
  Target: COL7A1; (-) strand; PAM type: NRG; PAM sequence: TGG
aggggttctgtggctgacta

SEQ ID NO: 9493 - DNA, 20 bp, Artificial Sequence
  Description of Artificial Sequence: Synthetic oligonucleotide
  Target: COL7A1; (-) strand; PAM type: NRG; PAM sequence: TGG
tttagggggaaggggttctg

SEQ ID NO: 9494 - DNA, 20 bp, Artificial Sequence
  Description of Artificial Sequence: Synthetic oligonucleotide
  Target: COL7A1; (-) strand; PAM type: NRG; PAM sequence: GGG
ttctggggtttagggggaag

SEQ ID NO: 9495 - DNA, 20 bp, Artificial Sequence
  Description of Artificial Sequence: Synthetic oligonucleotide
  Target: COL7A1; (-) strand; PAM type: NRG; PAM sequence: GGG
tttctggggtttagggggaa

SEQ ID NO: 9496 - DNA, 20 bp, Artificial Sequence
  Description of Artificial Sequence: Synthetic oligonucleotide
  Target: COL7A1; (-) strand; PAM type: NRG; PAM sequence: AGG
ctttctggggtttaggggga

SEQ ID NO: 9497 - DNA, 20 bp, Artificial Sequence
  Description of Artificial Sequence: Synthetic oligonucleotide
  Target: COL7A1; (-) strand; PAM type: NRG; PAM sequence: AAG
gctttctggggtttaggggg

SEQ ID NO: 9498 - DNA, 20 bp, Artificial Sequence
  Description of Artificial Sequence: Synthetic oligonucleotide
  Target: COL7A1; (-) strand; PAM type: NRG; PAM sequence: GGG
gaggctttctggggtttagg

SEQ ID NO: 9499 - DNA, 20 bp, Artificial Sequence
  Description of Artificial Sequence: Synthetic oligonucleotide
  Target: COL7A1; (-) strand; PAM type: NRG; PAM sequence: GGG
ggaggctttctggggtttag

SEQ ID NO: 9500 - DNA, 20 bp, Artificial Sequence
  Description of Artificial Sequence: Synthetic oligonucleotide
  Target: COL7A1; (-) strand; PAM type: NRG; PAM sequence: GGG
aggaggctttctggggttta

SEQ ID NO: 9501 - DNA, 20 bp, Artificial Sequence
  Description of Artificial Sequence: Synthetic oligonucleotide
  Target: COL7A1; (-) strand; PAM type: NRG; PAM sequence: AGG
gaggaggctttctggggttt

SEQ ID NO: 9502 - DNA, 20 bp, Artificial Sequence
  Description of Artificial Sequence: Synthetic oligonucleotide
  Target: COL7A1; (-) strand; PAM type: NRG; PAM sequence: TAG
ggaggaggctttctggggtt

SEQ ID NO: 9503 - DNA, 20 bp, Artificial Sequence
  Description of Artificial Sequence: Synthetic oligonucleotide
  Target: COL7A1; (-) strand; PAM type: NRG; PAM sequence: GGG
ggacaggaggaggctttctg

SEQ ID NO: 9504 - DNA, 20 bp, Artificial Sequence
  Description of Artificial Sequence: Synthetic oligonucleotide
  Target: COL7A1; (-) strand; PAM type: NRG; PAM sequence: GGG
aggacaggaggaggctttct

SEQ ID NO: 9505 - DNA, 20 bp, Artificial Sequence
  Description of Artificial Sequence: Synthetic oligonucleotide
  Target: COL7A1; (-) strand; PAM type: NRG; PAM sequence: TGG
gaggacaggaggaggctttc

SEQ ID NO: 9506 - DNA, 20 bp, Artificial Sequence
  Description of Artificial Sequence: Synthetic oligonucleotide
  Target: COL7A1; (-) strand; PAM type: NRG; PAM sequence: AGG
caggaggggaggacaggagg

SEQ ID NO: 9507 - DNA, 20 bp, Artificial Sequence
  Description of Artificial Sequence: Synthetic oligonucleotide
  Target: COL7A1; (-) strand; PAM type: NRG; PAM sequence: GAG
gcaggaggggaggacaggag

SEQ ID NO: 9508 - DNA, 20 bp, Artificial Sequence
  Description of Artificial Sequence: Synthetic oligonucleotide
  Target: COL7A1; (-) strand; PAM type: NRG; PAM sequence: AGG
gggcaggaggggaggacagg

SEQ ID NO: 9509 - DNA, 20 bp, Artificial Sequence
  Description of Artificial Sequence: Synthetic oligonucleotide
  Target: COL7A1; (-) strand; PAM type: NRG; PAM sequence: GAG
agggcaggaggggaggacag

SEQ ID NO: 9510 - DNA, 20 bp, Artificial Sequence
  Description of Artificial Sequence: Synthetic oligonucleotide
  Target: COL7A1; (-) strand; PAM type: NRG; PAM sequence: AGG
tgagggcaggaggggaggac

SEQ ID NO: 9511 - DNA, 20 bp, Artificial Sequence
  Description of Artificial Sequence: Synthetic oligonucleotide
  Target: COL7A1; (-) strand; PAM type: NRG; PAM sequence: CAG
gtgagggcaggaggggagga

SEQ ID NO: 9512 - DNA, 20 bp, Artificial Sequence
  Description of Artificial Sequence: Synthetic oligonucleotide
  Target: COL7A1; (-) strand; PAM type: NRG; PAM sequence: AGG
atctgtgagggcaggagggg

SEQ ID NO: 9513 - DNA, 20 bp, Artificial Sequence
  Description of Artificial Sequence: Synthetic oligonucleotide
  Target: COL7A1; (-) strand; PAM type: NRG; PAM sequence: GAG
catctgtgagggcaggaggg

SEQ ID NO: 9514 - DNA, 20 bp, Artificial Sequence
  Description of Artificial Sequence: Synthetic oligonucleotide
  Target: COL7A1; (-) strand; PAM type: NRG; PAM sequence: GGG
agcatctgtgagggcaggag

SEQ ID NO: 9515 - DNA, 20 bp, Artificial Sequence
  Description of Artificial Sequence: Synthetic oligonucleotide
  Target: COL7A1; (-) strand; PAM type: NRG; PAM sequence: GGG
cagcatctgtgagggcagga

SEQ ID NO: 9516 - DNA, 20 bp, Artificial Sequence
  Description of Artificial Sequence: Synthetic oligonucleotide
  Target: COL7A1; (-) strand; PAM type: NRG; PAM sequence: AGG
acagcatctgtgagggcagg

SEQ ID NO: 9517 - DNA, 20 bp, Artificial Sequence
  Description of Artificial Sequence: Synthetic oligonucleotide
  Target: COL7A1; (-) strand; PAM type: NRG; PAM sequence: GAG
cacagcatctgtgagggcag

SEQ ID NO: 9518 - DNA, 20 bp, Artificial Sequence
  Description of Artificial Sequence: Synthetic oligonucleotide
  Target: COL7A1; (-) strand; PAM type: NRG; PAM sequence: AGG
tccacagcatctgtgagggc

SEQ ID NO: 9519 - DNA, 20 bp, Artificial Sequence
  Description of Artificial Sequence: Synthetic oligonucleotide
  Target: COL7A1; (-) strand; PAM type: NRG; PAM sequence: CAG
ttccacagcatctgtgaggg

SEQ ID NO: 9520 - DNA, 20 bp, Artificial Sequence
  Description of Artificial Sequence: Synthetic oligonucleotide
  Target: COL7A1; (-) strand; PAM type: NRG; PAM sequence: GGG
tggttccacagcatctgtga

SEQ ID NO: 9521 - DNA, 20 bp, Artificial Sequence
  Description of Artificial Sequence: Synthetic oligonucleotide
  Target: COL7A1; (-) strand; PAM type: NRG; PAM sequence: AGG
gtggttccacagcatctgtg

SEQ ID NO: 9522 - DNA, 20 bp, Artificial Sequence
  Description of Artificial Sequence: Synthetic oligonucleotide
  Target: COL7A1; (-) strand; PAM type: NRG; PAM sequence: GAG
ggtggttccacagcatctgt

SEQ ID NO: 9523 - DNA, 20 bp, Artificial Sequence
  Description of Artificial Sequence: Synthetic oligonucleotide
  Target: COL7A1; (-) strand; PAM type: NRG; PAM sequence: CAG
ctgtggctgtggtggttcca

SEQ ID NO: 9524 - DNA, 20 bp, Artificial Sequence
  Description of Artificial Sequence: Synthetic oligonucleotide
  Target: COL7A1; (-) strand; PAM type: NRG; PAM sequence: TGG
gtggggtcctgtggctgtgg

SEQ ID NO: 9525 - DNA, 20 bp, Artificial Sequence
  Description of Artificial Sequence: Synthetic oligonucleotide
  Target: COL7A1; (-) strand; PAM type: NRG; PAM sequence: TGG
tctgtggggtcctgtggctg

SEQ ID NO: 9526 - DNA, 20 bp, Artificial Sequence
  Description of Artificial Sequence: Synthetic oligonucleotide
  Target: COL7A1; (-) strand; PAM type: NRG; PAM sequence: TGG
gtactctctgtggggtcctg

SEQ ID NO: 9527 - DNA, 20 bp, Artificial Sequence
  Description of Artificial Sequence: Synthetic oligonucleotide
  Target: COL7A1; (-) strand; PAM type: NRG; PAM sequence: GGG
agggtggtgtactctctgtg

SEQ ID NO: 9528 - DNA, 20 bp, Artificial Sequence
  Description of Artificial Sequence: Synthetic oligonucleotide
  Target: COL7A1; (-) strand; PAM type: NRG; PAM sequence: GGG
gagggtggtgtactctctgt

SEQ ID NO: 9529 - DNA, 20 bp, Artificial Sequence
  Description of Artificial Sequence: Synthetic oligonucleotide
  Target: COL7A1; (-) strand; PAM type: NRG; PAM sequence: TGG
agagggtggtgtactctctg

SEQ ID NO: 9530 - DNA, 20 bp, Artificial Sequence
  Description of Artificial Sequence: Synthetic oligonucleotide
  Target: COL7A1; (-) strand; PAM type: NRG; PAM sequence: TGG
acaaggtacagggaagaggg

SEQ ID NO: 9531 - DNA, 20 bp, Artificial Sequence
  Description of Artificial Sequence: Synthetic oligonucleotide
  Target: COL7A1; (-) strand; PAM type: NRG; PAM sequence: GGG
gtgacaaggtacagggaaga

SEQ ID NO: 9532 - DNA, 20 bp, Artificial Sequence
  Description of Artificial Sequence: Synthetic oligonucleotide
  Target: COL7A1; (-) strand; PAM type: NRG; PAM sequence: AGG
ggtgacaaggtacagggaag

SEQ ID NO: 9533 - DNA, 20 bp, Artificial Sequence
  Description of Artificial Sequence: Synthetic oligonucleotide
  Target: COL7A1; (-) strand; PAM type: NRG; PAM sequence: GAG
tggtgacaaggtacagggaa

SEQ ID NO: 9534 - DNA, 20 bp, Artificial Sequence
  Description of Artificial Sequence: Synthetic oligonucleotide
  Target: COL7A1; (-) strand; PAM type: NRG; PAM sequence: AAG
cctggtgacaaggtacaggg

SEQ ID NO: 9535 - DNA, 20 bp, Artificial Sequence
  Description of Artificial Sequence: Synthetic oligonucleotide
  Target: COL7A1; (-) strand; PAM type: NRG; PAM sequence: GGG
gaccctggtgacaaggtaca

SEQ ID NO: 9536 - DNA, 20 bp, Artificial Sequence
  Description of Artificial Sequence: Synthetic oligonucleotide
  Target: COL7A1; (-) strand; PAM type: NRG; PAM sequence: AGG
ggaccctggtgacaaggtac

SEQ ID NO: 9537 - DNA, 20 bp, Artificial Sequence
  Description of Artificial Sequence: Synthetic oligonucleotide
  Target: COL7A1; (-) strand; PAM type: NRG; PAM sequence: CAG
gggaccctggtgacaaggta

SEQ ID NO: 9538 - DNA, 20 bp, Artificial Sequence
  Description of Artificial Sequence: Synthetic oligonucleotide
  Target: COL7A1; (-) strand; PAM type: NRG; PAM sequence: AGG
caatggggaccctggtgaca

SEQ ID NO: 9539 - DNA, 20 bp, Artificial Sequence
  Description of Artificial Sequence: Synthetic oligonucleotide
  Target: COL7A1; (-) strand; PAM type: NRG; PAM sequence: AAG
acaatggggaccctggtgac

SEQ ID NO: 9540 - DNA, 20 bp, Artificial Sequence
  Description of Artificial Sequence: Synthetic oligonucleotide
  Target: COL7A1; (-) strand; PAM type: NRG; PAM sequence: TGG
cggggagacaatggggaccc

SEQ ID NO: 9541 - DNA, 20 bp, Artificial Sequence
  Description of Artificial Sequence: Synthetic oligonucleotide
  Target: COL7A1; (-) strand; PAM type: NRG; PAM sequence: GGG
aggacctcggggagacaatg

SEQ ID NO: 9542 - DNA, 20 bp, Artificial Sequence
  Description of Artificial Sequence: Synthetic oligonucleotide
  Target: COL7A1; (-) strand; PAM type: NRG; PAM sequence: GGG
aaggacctcggggagacaat

SEQ ID NO: 9543 - DNA, 20 bp, Artificial Sequence
  Description of Artificial Sequence: Synthetic oligonucleotide
  Target: COL7A1; (-) strand; PAM type: NRG; PAM sequence: TGG
aaaggacctcggggagacaa

SEQ ID NO: 9544 - DNA, 20 bp, Artificial Sequence
  Description of Artificial Sequence: Synthetic oligonucleotide
  Target: COL7A1; (-) strand; PAM type: NRG; PAM sequence: GAG
tggtgacaaaggacctcggg

SEQ ID NO: 9545 - DNA, 20 bp, Artificial Sequence
  Description of Artificial Sequence: Synthetic oligonucleotide
  Target: COL7A1; (-) strand; PAM type: NRG; PAM sequence: GGG
gatggtgacaaaggacctcg

SEQ ID NO: 9546 - DNA, 20 bp, Artificial Sequence
  Description of Artificial Sequence: Synthetic oligonucleotide
  Target: COL7A1; (-) strand; PAM type: NRG; PAM sequence: GGG
ggatggtgacaaaggacctc

SEQ ID NO: 9547 - DNA, 20 bp, Artificial Sequence
  Description of Artificial Sequence: Synthetic oligonucleotide
  Target: COL7A1; (-) strand; PAM type: NRG; PAM sequence: CGG
tggatggtgacaaaggacct

SEQ ID NO: 9548 - DNA, 20 bp, Artificial Sequence
  Description of Artificial Sequence: Synthetic oligonucleotide
  Target: COL7A1; (-) strand; PAM type: NRG; PAM sequence: AGG
cggggcttggatggtgacaa

SEQ ID NO: 9549 - DNA, 20 bp, Artificial Sequence
  Description of Artificial Sequence: Synthetic oligonucleotide
  Target: COL7A1; (-) strand; PAM type: NRG; PAM sequence: AAG
tcggggcttggatggtgaca

SEQ ID NO: 9550 - DNA, 20 bp, Artificial Sequence
  Description of Artificial Sequence: Synthetic oligonucleotide
  Target: COL7A1; (-) strand; PAM type: NRG; PAM sequence: TGG
cgagggcctcggggcttgga

SEQ ID NO: 9551 - DNA, 20 bp, Artificial Sequence
  Description of Artificial Sequence: Synthetic oligonucleotide
  Target: COL7A1; (-) strand; PAM type: NRG; PAM sequence: TGG
tgaacgagggcctcggggct

SEQ ID NO: 9552 - DNA, 20 bp, Artificial Sequence
  Description of Artificial Sequence: Synthetic oligonucleotide
  Target: COL7A1; (-) strand; PAM type: NRG; PAM sequence: GGG
cagggtgaacgagggcctcg

SEQ ID NO: 9553 - DNA, 20 bp, Artificial Sequence
  Description of Artificial Sequence: Synthetic oligonucleotide
  Target: COL7A1; (-) strand; PAM type: NRG; PAM sequence: GGG
ccagggtgaacgagggcctc

SEQ ID NO: 9554 - DNA, 20 bp, Artificial Sequence
  Description of Artificial Sequence: Synthetic oligonucleotide
  Target: COL7A1; (-) strand; PAM type: NRG; PAM sequence: CGG
cccagggtgaacgagggcct

SEQ ID NO: 9555 - DNA, 20 bp, Artificial Sequence
  Description of Artificial Sequence: Synthetic oligonucleotide
  Target: COL7A1; (-) strand; PAM type: NRG; PAM sequence: GGG
aaccaacccagggtgaacga

SEQ ID NO: 9556 - DNA, 20 bp, Artificial Sequence
  Description of Artificial Sequence: Synthetic oligonucleotide
  Target: COL7A1; (-) strand; PAM type: NRG; PAM sequence: AGG
aaaccaacccagggtgaacg

SEQ ID NO: 9557 - DNA, 20 bp, Artificial Sequence
  Description of Artificial Sequence: Synthetic oligonucleotide
  Target: COL7A1; (-) strand; PAM type: NRG; PAM sequence: GAG
caaaccaacccagggtgaac

SEQ ID NO: 9558 - DNA, 20 bp, Artificial Sequence
  Description of Artificial Sequence: Synthetic oligonucleotide
  Target: COL7A1; (-) strand; PAM type: NRG; PAM sequence: GGG
ttcttacccaaaccaaccca

SEQ ID NO: 9559 - DNA, 20 bp, Artificial Sequence
  Description of Artificial Sequence: Synthetic oligonucleotide
  Target: COL7A1; (-) strand; PAM type: NRG; PAM sequence: AGG
cttcttacccaaaccaaccc

SEQ ID NO: 9560 - DNA, 20 bp, Artificial Sequence
  Description of Artificial Sequence: Synthetic oligonucleotide
  Target: COL7A1; (-) strand; PAM type: NRG; PAM sequence: CAG
acttcttacccaaaccaacc

SEQ ID NO: 9561 - DNA, 20 bp, Artificial Sequence
  Description of Artificial Sequence: Synthetic oligonucleotide
  Target: COL7A1; (-) strand; PAM type: NRG; PAM sequence: CAG
cccagagggtgagggacctt

SEQ ID NO: 9562 - DNA, 20 bp, Artificial Sequence
  Description of Artificial Sequence: Synthetic oligonucleotide
  Target: COL7A1; (-) strand; PAM type: NRG; PAM sequence: GGG
ctcaaactcccagagggtga

SEQ ID NO: 9563 - DNA, 20 bp, Artificial Sequence
  Description of Artificial Sequence: Synthetic oligonucleotide
  Target: COL7A1; (-) strand; PAM type: NRG; PAM sequence: AGG
gctcaaactcccagagggtg

SEQ ID NO: 9564 - DNA, 20 bp, Artificial Sequence
  Description of Artificial Sequence: Synthetic oligonucleotide
  Target: COL7A1; (-) strand; PAM type: NRG; PAM sequence: GAG
agctcaaactcccagagggt

SEQ ID NO: 9565 - DNA, 20 bp, Artificial Sequence
  Description of Artificial Sequence: Synthetic oligonucleotide
  Target: COL7A1; (-) strand; PAM type: NRG; PAM sequence: GGG
tgagagctcaaactcccaga

SEQ ID NO: 9566 - DNA, 20 bp, Artificial Sequence
  Description of Artificial Sequence: Synthetic oligonucleotide
  Target: COL7A1; (-) strand; PAM type: NRG; PAM sequence: AGG
ctgagagctcaaactcccag

SEQ ID NO: 9567 - DNA, 20 bp, Artificial Sequence
  Description of Artificial Sequence: Synthetic oligonucleotide
  Target: COL7A1; (-) strand; PAM type: NRG; PAM sequence: GAG
tctgagagctcaaactccca

SEQ ID NO: 9568 - DNA, 20 bp, Artificial Sequence
  Description of Artificial Sequence: Synthetic oligonucleotide
  Target: COL7A1; (-) strand; PAM type: NRG; PAM sequence: CAG
catctgagagctcaaactcc

SEQ ID NO: 9569 - DNA, 20 bp, Artificial Sequence
  Description of Artificial Sequence: Synthetic oligonucleotide
  Target: COL7A1; (-) strand; PAM type: NRG; PAM sequence: GAG
ggctggcccagggcatctga

SEQ ID NO: 9570 - DNA, 20 bp, Artificial Sequence
  Description of Artificial Sequence: Synthetic oligonucleotide
  Target: COL7A1; (-) strand; PAM type: NRG; PAM sequence: GAG
ggggctggcccagggcatct

SEQ ID NO: 9571 - DNA, 20 bp, Artificial Sequence
  Description of Artificial Sequence: Synthetic oligonucleotide
  Target: COL7A1; (-) strand; PAM type: NRG; PAM sequence: GGG
gaccccgtggggctggccca

SEQ ID NO: 9572 - DNA, 20 bp, Artificial Sequence
  Description of Artificial Sequence: Synthetic oligonucleotide
  Target: COL7A1; (-) strand; PAM type: NRG; PAM sequence: AGG
ggaccccgtggggctggccc

SEQ ID NO: 9573 - DNA, 20 bp, Artificial Sequence
  Description of Artificial Sequence: Synthetic oligonucleotide
  Target: COL7A1; (-) strand; PAM type: NRG; PAM sequence: CAG
gggaccccgtggggctggcc

SEQ ID NO: 9574 - DNA, 20 bp, Artificial Sequence
  Description of Artificial Sequence: Synthetic oligonucleotide
  Target: COL7A1; (-) strand; PAM type: NRG; PAM sequence: TGG
cgagagggaccccgtggggc

SEQ ID NO: 9575 - DNA, 20 bp, Artificial Sequence
  Description of Artificial Sequence: Synthetic oligonucleotide
  Target: COL7A1; (-) strand; PAM type: NRG; PAM sequence: GGG
ggtgcgagagggaccccgtg

SEQ ID NO: 9576 - DNA, 20 bp, Artificial Sequence
  Description of Artificial Sequence: Synthetic oligonucleotide
  Target: COL7A1; (-) strand; PAM type: NRG; PAM sequence: GGG
gggtgcgagagggaccccgt

SEQ ID NO: 9577 - DNA, 20 bp, Artificial Sequence
  Description of Artificial Sequence: Synthetic oligonucleotide
  Target: COL7A1; (-) strand; PAM type: NRG; PAM sequence: TGG
tgggtgcgagagggaccccg

SEQ ID NO: 9578 - DNA, 20 bp, Artificial Sequence
  Description of Artificial Sequence: Synthetic oligonucleotide
  Target: COL7A1; (-) strand; PAM type: NRG; PAM sequence: GGG
ggtctcccctgggtgcgaga

SEQ ID NO: 9579 - DNA, 20 bp, Artificial Sequence
  Description of Artificial Sequence: Synthetic oligonucleotide
  Target: COL7A1; (-) strand; PAM type: NRG; PAM sequence: AGG
gggtctcccctgggtgcgag

SEQ ID NO: 9580 - DNA, 20 bp, Artificial Sequence
  Description of Artificial Sequence: Synthetic oligonucleotide
  Target: COL7A1; (-) strand; PAM type: NRG; PAM sequence: GAG
tgggtctcccctgggtgcga

SEQ ID NO: 9581 - DNA, 20 bp, Artificial Sequence
  Description of Artificial Sequence: Synthetic oligonucleotide
  Target: COL7A1; (-) strand; PAM type: NRG; PAM sequence: GAG
actgggtctcccctgggtgc

SEQ ID NO: 9582 - DNA, 20 bp, Artificial Sequence
  Description of Artificial Sequence: Synthetic oligonucleotide
  Target: COL7A1; (-) strand; PAM type: NRG; PAM sequence: GGG
gtgtggactgggtctcccct

SEQ ID NO: 9583 - DNA, 20 bp, Artificial Sequence
  Description of Artificial Sequence: Synthetic oligonucleotide
  Target: COL7A1; (-) strand; PAM type: NRG; PAM sequence: TGG
cgtgtggactgggtctcccc

SEQ ID NO: 9584 - DNA, 20 bp, Artificial Sequence
  Description of Artificial Sequence: Synthetic oligonucleotide
  Target: COL7A1; (-) strand; PAM type: NRG; PAM sequence: GGG
agtgggcccacgtgtggact

SEQ ID NO: 9585 - DNA, 20 bp, Artificial Sequence
  Description of Artificial Sequence: Synthetic oligonucleotide
  Target: COL7A1; (-) strand; PAM type: NRG; PAM sequence: TGG
gagtgggcccacgtgtggac

SEQ ID NO: 9586 - DNA, 20 bp, Artificial Sequence
  Description of Artificial Sequence: Synthetic oligonucleotide
  Target: COL7A1; (-) strand; PAM type: NRG; PAM sequence: TGG
atggtgagtgggcccacgtg

SEQ ID NO: 9587 - DNA, 20 bp, Artificial Sequence
  Description of Artificial Sequence: Synthetic oligonucleotide
  Target: COL7A1; (-) strand; PAM type: NRG; PAM sequence: GGG
ccaagggggacatggtgagt

SEQ ID NO: 9588 - DNA, 20 bp, Artificial Sequence
  Description of Artificial Sequence: Synthetic oligonucleotide
  Target: COL7A1; (-) strand; PAM type: NRG; PAM sequence: TGG
gccaagggggacatggtgag

SEQ ID NO: 9589 - DNA, 20 bp, Artificial Sequence
  Description of Artificial Sequence: Synthetic oligonucleotide
  Target: COL7A1; (-) strand; PAM type: NRG; PAM sequence: GAG
ggtgccaagggggacatggt

SEQ ID NO: 9590 - DNA, 20 bp, Artificial Sequence
  Description of Artificial Sequence: Synthetic oligonucleotide
  Target: COL7A1; (-) strand; PAM type: NRG; PAM sequence: TGG
acggggtgccaagggggaca

SEQ ID NO: 9591 - DNA, 20 bp, Artificial Sequence
  Description of Artificial Sequence: Synthetic oligonucleotide
  Target: COL7A1; (-) strand; PAM type: NRG; PAM sequence: GGG
aggcccacggggtgccaagg

SEQ ID NO: 9592 - DNA, 20 bp, Artificial Sequence
  Description of Artificial Sequence: Synthetic oligonucleotide
  Target: COL7A1; (-) strand; PAM type: NRG; PAM sequence: GGG
caggcccacggggtgccaag

SEQ ID NO: 9593 - DNA, 20 bp, Artificial Sequence
  Description of Artificial Sequence: Synthetic oligonucleotide
  Target: COL7A1; (-) strand; PAM type: NRG; PAM sequence: GGG
ccaggcccacggggtgccaa

SEQ ID NO: 9594 - DNA, 20 bp, Artificial Sequence
  Description of Artificial Sequence: Synthetic oligonucleotide
  Target: COL7A1; (-) strand; PAM type: NRG; PAM sequence: AGG
tccaggcccacggggtgcca

SEQ ID NO: 9595 - DNA, 20 bp, Artificial Sequence
  Description of Artificial Sequence: Synthetic oligonucleotide
  Target: COL7A1; (-) strand; PAM type: NRG; PAM sequence: AAG
ctccaggcccacggggtgcc

SEQ ID NO: 9596 - DNA, 20 bp, Artificial Sequence
  Description of Artificial Sequence: Synthetic oligonucleotide
  Target: COL7A1; (-) strand; PAM type: NRG; PAM sequence: GGG
ctggggcctccaggcccacg

SEQ ID NO: 9597 - DNA, 20 bp, Artificial Sequence
  Description of Artificial Sequence: Synthetic oligonucleotide
  Target: COL7A1; (-) strand; PAM type: NRG; PAM sequence: GGG
cctggggcctccaggcccac

SEQ ID NO: 9598 - DNA, 20 bp, Artificial Sequence
  Description of Artificial Sequence: Synthetic oligonucleotide
  Target: COL7A1; (-) strand; PAM type: NRG; PAM sequence: CGG
tcctggggcctccaggccca

SEQ ID NO: 9599 - DNA, 20 bp, Artificial Sequence
  Description of Artificial Sequence: Synthetic oligonucleotide
  Target: COL7A1; (-) strand; PAM type: NRG; PAM sequence: AGG
gctgtgatcctggggcctcc

SEQ ID NO: 9600 - DNA, 20 bp, Artificial Sequence
  Description of Artificial Sequence: Synthetic oligonucleotide
  Target: COL7A1; (-) strand; PAM type: NRG; PAM sequence: CAG
agctgtgatcctggggcctc

SEQ ID NO: 9601 - DNA, 20 bp, Artificial Sequence
  Description of Artificial Sequence: Synthetic oligonucleotide
  Target: COL7A1; (-) strand; PAM type: NRG; PAM sequence: GGG
gagactcagctgtgatcctg

SEQ ID NO: 9602 - DNA, 20 bp, Artificial Sequence
  Description of Artificial Sequence: Synthetic oligonucleotide
  Target: COL7A1; (-) strand; PAM type: NRG; PAM sequence: GGG
ggagactcagctgtgatcct

SEQ ID NO: 9603 - DNA, 20 bp, Artificial Sequence
  Description of Artificial Sequence: Synthetic oligonucleotide
  Target: COL7A1; (-) strand; PAM type: NRG; PAM sequence: TGG
gggagactcagctgtgatcc

SEQ ID NO: 9604 - DNA, 20 bp, Artificial Sequence
  Description of Artificial Sequence: Synthetic oligonucleotide
  Target: COL7A1; (-) strand; PAM type: NRG; PAM sequence: CAG
cctgccccctcagggagact

SEQ ID NO: 9605 - DNA, 20 bp, Artificial Sequence
  Description of Artificial Sequence: Synthetic oligonucleotide
  Target: COL7A1; (-) strand; PAM type: NRG; PAM sequence: GAG
ttcctgcctgccccctcagg

SEQ ID NO: 9606 - DNA, 20 bp, Artificial Sequence
  Description of Artificial Sequence: Synthetic oligonucleotide
  Target: COL7A1; (-) strand; PAM type: NRG; PAM sequence: GGG
gattcctgcctgccccctca

SEQ ID NO: 9607 - DNA, 20 bp, Artificial Sequence
  Description of Artificial Sequence: Synthetic oligonucleotide
  Target: COL7A1; (-) strand; PAM type: NRG; PAM sequence: AGG
tgattcctgcctgccccctc

SEQ ID NO: 9608 - DNA, 20 bp, Artificial Sequence
  Description of Artificial Sequence: Synthetic oligonucleotide
  Target: COL7A1; (-) strand; PAM type: NRG; PAM sequence: CAG
ctgattcctgcctgccccct

SEQ ID NO: 9609 - DNA, 20 bp, Artificial Sequence
  Description of Artificial Sequence: Synthetic oligonucleotide
  Target: COL7A1; (-) strand; PAM type: NRG; PAM sequence: GGG
ggagggcagggcaggggcca

SEQ ID NO: 9610 - DNA, 20 bp, Artificial Sequence
  Description of Artificial Sequence: Synthetic oligonucleotide
  Target: COL7A1; (-) strand; PAM type: NRG; PAM sequence: AGG
gggagggcagggcaggggcc

SEQ ID NO: 9611 - DNA, 20 bp, Artificial Sequence
  Description of Artificial Sequence: Synthetic oligonucleotide
  Target: COL7A1; (-) strand; PAM type: NRG; PAM sequence: CAG
ggggagggcagggcaggggc

SEQ ID NO: 9612 - DNA, 20 bp, Artificial Sequence
  Description of Artificial Sequence: Synthetic oligonucleotide
  Target: COL7A1; (-) strand; PAM type: NRG; PAM sequence: GGG
gcatggggagggcagggcag

SEQ ID NO: 9613 - DNA, 20 bp, Artificial Sequence
  Description of Artificial Sequence: Synthetic oligonucleotide
  Target: COL7A1; (-) strand; PAM type: NRG; PAM sequence: GGG
ggcatggggagggcagggca

SEQ ID NO: 9614 - DNA, 20 bp, Artificial Sequence
  Description of Artificial Sequence: Synthetic oligonucleotide
  Target: COL7A1; (-) strand; PAM type: NRG; PAM sequence: AGG
gggcatggggagggcagggc

SEQ ID NO: 9615 - DNA, 20 bp, Artificial Sequence
  Description of Artificial Sequence: Synthetic oligonucleotide
  Target: COL7A1; (-) strand; PAM type: NRG; PAM sequence: CAG
tgggcatggggagggcaggg

SEQ ID NO: 9616 - DNA, 20 bp, Artificial Sequence
  Description of Artificial Sequence: Synthetic oligonucleotide
  Target: COL7A1; (-) strand; PAM type: NRG; PAM sequence: GGG
gtgtgggcatggggagggca

SEQ ID NO: 9617 - DNA, 20 bp, Artificial Sequence
  Description of Artificial Sequence: Synthetic oligonucleotide
  Target: COL7A1; (-) strand; PAM type: NRG; PAM sequence: AGG
agtgtgggcatggggagggc

SEQ ID NO: 9618 - DNA, 20 bp, Artificial Sequence
  Description of Artificial Sequence: Synthetic oligonucleotide
  Target: COL7A1; (-) strand; PAM type: NRG; PAM sequence: CAG
gagtgtgggcatggggaggg

SEQ ID NO: 9619 - DNA, 20 bp, Artificial Sequence
  Description of Artificial Sequence: Synthetic oligonucleotide
  Target: COL7A1; (-) strand; PAM type: NRG; PAM sequence: GGG
ggtgagtgtgggcatgggga

SEQ ID NO: 9620 - DNA, 20 bp, Artificial Sequence
  Description of Artificial Sequence: Synthetic oligonucleotide
  Target: COL7A1; (-) strand; PAM type: NRG; PAM sequence: AGG
aggtgagtgtgggcatgggg

SEQ ID NO: 9621 - DNA, 20 bp, Artificial Sequence
  Description of Artificial Sequence: Synthetic oligonucleotide
  Target: COL7A1; (-) strand; PAM type: NRG; PAM sequence: GAG
aaggtgagtgtgggcatggg

SEQ ID NO: 9622 - DNA, 20 bp, Artificial Sequence
  Description of Artificial Sequence: Synthetic oligonucleotide
  Target: COL7A1; (-) strand; PAM type: NRG; PAM sequence: GGG
acaaggtgagtgtgggcatg

SEQ ID NO: 9623 - DNA, 20 bp, Artificial Sequence
  Description of Artificial Sequence: Synthetic oligonucleotide
  Target: COL7A1; (-) strand; PAM type: NRG; PAM sequence: GGG
gacaaggtgagtgtgggcat

SEQ ID NO: 9624 - DNA, 20 bp, Artificial Sequence
  Description of Artificial Sequence: Synthetic oligonucleotide
  Target: COL7A1; (-) strand; PAM type: NRG; PAM sequence: TGG
tgacaaggtgagtgtgggca

SEQ ID NO: 9625 - DNA, 20 bp, Artificial Sequence
  Description of Artificial Sequence: Synthetic oligonucleotide
  Target: COL7A1; (-) strand; PAM type: NRG; PAM sequence: GGG
aagggtgacaaggtgagtgt

SEQ ID NO: 9626 - DNA, 20 bp, Artificial Sequence
  Description of Artificial Sequence: Synthetic oligonucleotide
  Target: COL7A1; (-) strand; PAM type: NRG; PAM sequence: TGG
aaagggtgacaaggtgagtg

SEQ ID NO: 9627 - DNA, 20 bp, Artificial Sequence
  Description of Artificial Sequence: Synthetic oligonucleotide
  Target: COL7A1; (-) strand; PAM type: NRG; PAM sequence: GAG
ggactaaagggtgacaaggt

SEQ ID NO: 9628 - DNA, 20 bp, Artificial Sequence
  Description of Artificial Sequence: Synthetic oligonucleotide
  Target: COL7A1; (-) strand; PAM type: NRG; PAM sequence: AGG
tgcaggactaaagggtgaca

SEQ ID NO: 9629 - DNA, 20 bp, Artificial Sequence
  Description of Artificial Sequence: Synthetic oligonucleotide
  Target: COL7A1; (-) strand; PAM type: NRG; PAM sequence: AAG
gtgcaggactaaagggtgac

SEQ ID NO: 9630 - DNA, 20 bp, Artificial Sequence
  Description of Artificial Sequence: Synthetic oligonucleotide
  Target: COL7A1; (-) strand; PAM type: NRG; PAM sequence: GGG
gttgggagtgcaggactaaa

SEQ ID NO: 9631 - DNA, 20 bp, Artificial Sequence
  Description of Artificial Sequence: Synthetic oligonucleotide
  Target: COL7A1; (-) strand; PAM type: NRG; PAM sequence: AGG
tgttgggagtgcaggactaa

SEQ ID NO: 9632 - DNA, 20 bp, Artificial Sequence
  Description of Artificial Sequence: Synthetic oligonucleotide
  Target: COL7A1; (-) strand; PAM type: NRG; PAM sequence: AAG
atgttgggagtgcaggacta

SEQ ID NO: 9633 - DNA, 20 bp, Artificial Sequence
  Description of Artificial Sequence: Synthetic oligonucleotide
  Target: COL7A1; (-) strand; PAM type: NRG; PAM sequence: AGG
tagggtgatgttgggagtgc

SEQ ID NO: 9634 - DNA, 20 bp, Artificial Sequence
  Description of Artificial Sequence: Synthetic oligonucleotide
  Target: COL7A1; (-) strand; PAM type: NRG; PAM sequence: CAG
atagggtgatgttgggagtg

SEQ ID NO: 9635 - DNA, 20 bp, Artificial Sequence
  Description of Artificial Sequence: Synthetic oligonucleotide
  Target: COL7A1; (-) strand; PAM type: NRG; PAM sequence: GAG
gcccaatagggtgatgttgg

SEQ ID NO: 9636 - DNA, 20 bp, Artificial Sequence
  Description of Artificial Sequence: Synthetic oligonucleotide
  Target: COL7A1; (-) strand; PAM type: NRG; PAM sequence: GGG
ttgcccaatagggtgatgtt

SEQ ID NO: 9637 - DNA, 20 bp, Artificial Sequence
  Description of Artificial Sequence: Synthetic oligonucleotide
  Target: COL7A1; (-) strand; PAM type: NRG; PAM sequence: TGG
tttgcccaatagggtgatgt

SEQ ID NO: 9638 - DNA, 20 bp, Artificial Sequence
  Description of Artificial Sequence: Synthetic oligonucleotide
  Target: COL7A1; (-) strand; PAM type: NRG; PAM sequence: GGG
tcacactcttttgcccaata

SEQ ID NO: 9639 - DNA, 20 bp, Artificial Sequence
  Description of Artificial Sequence: Synthetic oligonucleotide
  Target: COL7A1; (-) strand; PAM type: NRG; PAM sequence: AGG
ctcacactcttttgcccaat

SEQ ID NO: 9640 - DNA, 20 bp, Artificial Sequence
  Description of Artificial Sequence: Synthetic oligonucleotide
  Target: COL7A1; (-) strand; PAM type: NRG; PAM sequence: TAG
actcacactcttttgcccaa

SEQ ID NO: 9641 - DNA, 20 bp, Artificial Sequence
  Description of Artificial Sequence: Synthetic oligonucleotide
  Target: COL7A1; (-) strand; PAM type: NRG; PAM sequence: GGG
ggggcctccccagtttgggc

SEQ ID NO: 9642 - DNA, 20 bp, Artificial Sequence
  Description of Artificial Sequence: Synthetic oligonucleotide
  Target: COL7A1; (-) strand; PAM type: NRG; PAM sequence: CGG
cggggcctccccagtttggg

SEQ ID NO: 9643 - DNA, 20 bp, Artificial Sequence
  Description of Artificial Sequence: Synthetic oligonucleotide
  Target: COL7A1; (-) strand; PAM type: NRG; PAM sequence: GGG
gtgcggggcctccccagttt

SEQ ID NO: 9644 - DNA, 20 bp, Artificial Sequence
  Description of Artificial Sequence: Synthetic oligonucleotide
  Target: COL7A1; (-) strand; PAM type: NRG; PAM sequence: TGG
ggtgcggggcctccccagtt

SEQ ID NO: 9645 - DNA, 20 bp, Artificial Sequence
  Description of Artificial Sequence: Synthetic oligonucleotide
  Target: COL7A1; (-) strand; PAM type: NRG; PAM sequence: CAG
attcaggtgcggggcctccc

SEQ ID NO: 9646 - DNA, 20 bp, Artificial Sequence
  Description of Artificial Sequence: Synthetic oligonucleotide
  Target: COL7A1; (-) strand; PAM type: NRG; PAM sequence: GGG
gatattagaattcaggtgcg

SEQ ID NO: 9647 - DNA, 20 bp, Artificial Sequence
  Description of Artificial Sequence: Synthetic oligonucleotide
  Target: COL7A1; (-) strand; PAM type: NRG; PAM sequence: GGG
tgatattagaattcaggtgc

SEQ ID NO: 9648 - DNA, 20 bp, Artificial Sequence
  Description of Artificial Sequence: Synthetic oligonucleotide
  Target: COL7A1; (-) strand; PAM type: NRG; PAM sequence: CGG
atgatattagaattcaggtg

SEQ ID NO: 9649 - DNA, 20 bp, Artificial Sequence
  Description of Artificial Sequence: Synthetic oligonucleotide
  Target: COL7A1; (-) strand; PAM type: NRG; PAM sequence: AGG
cttgtatgatattagaattc

SEQ ID NO: 9650 - DNA, 20 bp, Artificial Sequence
  Description of Artificial Sequence: Synthetic oligonucleotide
  Target: COL7A1; (-) strand; PAM type: NRG; PAM sequence: CAG
tcttgtatgatattagaatt

SEQ ID NO: 9651 - DNA, 20 bp, Artificial Sequence
  Description of Artificial Sequence: Synthetic oligonucleotide
  Target: COL7A1; (-) strand; PAM type: NRG; PAM sequence: TAG
gagtggatcttgtatgatat

SEQ ID NO: 9652 - DNA, 20 bp, Artificial Sequence
  Description of Artificial Sequence: Synthetic oligonucleotide
  Target: COL7A1; (-) strand; PAM type: NRG; PAM sequence: TGG
ggcatgagtgggggggtgag

SEQ ID NO: 9653 - DNA, 20 bp, Artificial Sequence
  Description of Artificial Sequence: Synthetic oligonucleotide
  Target: COL7A1; (-) strand; PAM type: NRG; PAM sequence: GAG
cctggcatgagtgggggggt

SEQ ID NO: 9654 - DNA, 20 bp, Artificial Sequence
  Description of Artificial Sequence: Synthetic oligonucleotide
  Target: COL7A1; (-) strand; PAM type: NRG; PAM sequence: GGG
aggtcctggcatgagtgggg

SEQ ID NO: 9655 - DNA, 20 bp, Artificial Sequence
  Description of Artificial Sequence: Synthetic oligonucleotide
  Target: COL7A1; (-) strand; PAM type: NRG; PAM sequence: GGG
aaggtcctggcatgagtggg

SEQ ID NO: 9656 - DNA, 20 bp, Artificial Sequence
  Description of Artificial Sequence: Synthetic oligonucleotide
  Target: COL7A1; (-) strand; PAM type: NRG; PAM sequence: GGG
gaaggtcctggcatgagtgg

SEQ ID NO: 9657 - DNA, 20 bp, Artificial Sequence
  Description of Artificial Sequence: Synthetic oligonucleotide
  Target: COL7A1; (-) strand; PAM type: NRG; PAM sequence: GGG
ggaaggtcctggcatgagtg

SEQ ID NO: 9658 - DNA, 20 bp, Artificial Sequence
  Description of Artificial Sequence: Synthetic oligonucleotide
  Target: COL7A1; (-) strand; PAM type: NRG; PAM sequence: GGG
gggaaggtcctggcatgagt

SEQ ID NO: 9659 - DNA, 20 bp, Artificial Sequence
  Description of Artificial Sequence: Synthetic oligonucleotide
  Target: COL7A1; (-) strand; PAM type: NRG; PAM sequence: TGG
ggggaaggtcctggcatgag

SEQ ID NO: 9660 - DNA, 20 bp, Artificial Sequence
  Description of Artificial Sequence: Synthetic oligonucleotide
  Target: COL7A1; (-) strand; PAM type: NRG; PAM sequence: GAG
cgtggggaaggtcctggcat

SEQ ID NO: 9661 - DNA, 20 bp, Artificial Sequence
  Description of Artificial Sequence: Synthetic oligonucleotide
  Target: COL7A1; (-) strand; PAM type: NRG; PAM sequence: TGG
taggaacgtggggaaggtcc

SEQ ID NO: 9662 - DNA, 20 bp, Artificial Sequence
  Description of Artificial Sequence: Synthetic oligonucleotide
  Target: COL7A1; (-) strand; PAM type: NRG; PAM sequence: AGG
agaaggtaggaacgtgggga

SEQ ID NO: 9663 - DNA, 20 bp, Artificial Sequence
  Description of Artificial Sequence: Synthetic oligonucleotide
  Target: COL7A1; (-) strand; PAM type: NRG; PAM sequence: AAG
gagaaggtaggaacgtgggg

SEQ ID NO: 9664 - DNA, 20 bp, Artificial Sequence
  Description of Artificial Sequence: Synthetic oligonucleotide
  Target: COL7A1; (-) strand; PAM type: NRG; PAM sequence: GGG
ggggagaaggtaggaacgtg

SEQ ID NO: 9665 - DNA, 20 bp, Artificial Sequence
  Description of Artificial Sequence: Synthetic oligonucleotide
  Target: COL7A1; (-) strand; PAM type: NRG; PAM sequence: GGG
tggggagaaggtaggaacgt

SEQ ID NO: 9666 - DNA, 20 bp, Artificial Sequence
  Description of Artificial Sequence: Synthetic oligonucleotide
  Target: COL7A1; (-) strand; PAM type: NRG; PAM sequence: TGG
gtggggagaaggtaggaacg

SEQ ID NO: 9667 - DNA, 20 bp, Artificial Sequence
  Description of Artificial Sequence: Synthetic oligonucleotide
  Target: COL7A1; (-) strand; PAM type: NRG; PAM sequence: AGG
ggagagcgtggggagaaggt

SEQ ID NO: 9668 - DNA, 20 bp, Artificial Sequence
  Description of Artificial Sequence: Synthetic oligonucleotide
  Target: COL7A1; (-) strand; PAM type: NRG; PAM sequence: TAG
gggagagcgtggggagaagg

SEQ ID NO: 9669 - DNA, 20 bp, Artificial Sequence
  Description of Artificial Sequence: Synthetic oligonucleotide
  Target: COL7A1; (-) strand; PAM type: NRG; PAM sequence: AGG
caggggagagcgtggggaga

SEQ ID NO: 9670 - DNA, 20 bp, Artificial Sequence
  Description of Artificial Sequence: Synthetic oligonucleotide
  Target: COL7A1; (-) strand; PAM type: NRG; PAM sequence: AAG
gcaggggagagcgtggggag

SEQ ID NO: 9671 - DNA, 20 bp, Artificial Sequence
  Description of Artificial Sequence: Synthetic oligonucleotide
  Target: COL7A1; (-) strand; PAM type: NRG; PAM sequence: GAG
gcagcaggggagagcgtggg

SEQ ID NO: 9672 - DNA, 20 bp, Artificial Sequence
  Description of Artificial Sequence: Synthetic oligonucleotide
  Target: COL7A1; (-) strand; PAM type: NRG; PAM sequence: GGG
tggcagcaggggagagcgtg

SEQ ID NO: 9673 - DNA, 20 bp, Artificial Sequence
  Description of Artificial Sequence: Synthetic oligonucleotide
  Target: COL7A1; (-) strand; PAM type: NRG; PAM sequence: GGG
ctggcagcaggggagagcgt

SEQ ID NO: 9674 - DNA, 20 bp, Artificial Sequence
  Description of Artificial Sequence: Synthetic oligonucleotide
  Target: COL7A1; (-) strand; PAM type: NRG; PAM sequence: TGG
cctggcagcaggggagagcg

SEQ ID NO: 9675 - DNA, 20 bp, Artificial Sequence
  Description of Artificial Sequence: Synthetic oligonucleotide
  Target: COL7A1; (-) strand; PAM type: NRG; PAM sequence: GAG
ggccccctggcagcagggga

SEQ ID NO: 9676 - DNA, 20 bp, Artificial Sequence
  Description of Artificial Sequence: Synthetic oligonucleotide
  Target: COL7A1; (-) strand; PAM type: NRG; PAM sequence: GAG
ggggccccctggcagcaggg

SEQ ID NO: 9677 - DNA, 20 bp, Artificial Sequence
  Description of Artificial Sequence: Synthetic oligonucleotide
  Target: COL7A1; (-) strand; PAM type: NRG; PAM sequence: GGG
caggggccccctggcagcag

SEQ ID NO: 9678 - DNA, 20 bp, Artificial Sequence
  Description of Artificial Sequence: Synthetic oligonucleotide
  Target: COL7A1; (-) strand; PAM type: NRG; PAM sequence: GGG
acaggggccccctggcagca

SEQ ID NO: 9679 - DNA, 20 bp, Artificial Sequence
  Description of Artificial Sequence: Synthetic oligonucleotide
  Target: COL7A1; (-) strand; PAM type: NRG; PAM sequence: AGG
cacaggggccccctggcagc

SEQ ID NO: 9680 - DNA, 20 bp, Artificial Sequence
  Description of Artificial Sequence: Synthetic oligonucleotide
  Target: COL7A1; (-) strand; PAM type: NRG; PAM sequence: CAG
acacaggggccccctggcag

SEQ ID NO: 9681 - DNA, 20 bp, Artificial Sequence
  Description of Artificial Sequence: Synthetic oligonucleotide
  Target: COL7A1; (-) strand; PAM type: NRG; PAM sequence: CAG
ctcacacaggggccccctgg

SEQ ID NO: 9682 - DNA, 20 bp, Artificial Sequence
  Description of Artificial Sequence: Synthetic oligonucleotide
  Target: COL7A1; (-) strand; PAM type: NRG; PAM sequence: TGG
tctctcacacaggggccccc

SEQ ID NO: 9683 - DNA, 20 bp, Artificial Sequence
  Description of Artificial Sequence: Synthetic oligonucleotide
  Target: COL7A1; (-) strand; PAM type: NRG; PAM sequence: GGG
ggtcaccttctctcacacag

SEQ ID NO: 9684 - DNA, 20 bp, Artificial Sequence
  Description of Artificial Sequence: Synthetic oligonucleotide
  Target: COL7A1; (-) strand; PAM type: NRG; PAM sequence: GGG
cggtcaccttctctcacaca

SEQ ID NO: 9685 - DNA, 20 bp, Artificial Sequence
  Description of Artificial Sequence: Synthetic oligonucleotide
  Target: COL7A1; (-) strand; PAM type: NRG; PAM sequence: AGG
acggtcaccttctctcacac

SEQ ID NO: 9686 - DNA, 20 bp, Artificial Sequence
  Description of Artificial Sequence: Synthetic oligonucleotide
  Target: COL7A1; (-) strand; PAM type: NRG; PAM sequence: CAG
cacggtcaccttctctcaca

SEQ ID NO: 9687 - DNA, 20 bp, Artificial Sequence
  Description of Artificial Sequence: Synthetic oligonucleotide
  Target: COL7A1; (-) strand; PAM type: NRG; PAM sequence: CGG
gccctggttcctgtagctca

SEQ ID NO: 9688 - DNA, 20 bp, Artificial Sequence
  Description of Artificial Sequence: Synthetic oligonucleotide
  Target: COL7A1; (-) strand; PAM type: NRG; PAM sequence: TAG
ctccactgccctggttcctg

SEQ ID NO: 9689 - DNA, 20 bp, Artificial Sequence
  Description of Artificial Sequence: Synthetic oligonucleotide
  Target: COL7A1; (-) strand; PAM type: NRG; PAM sequence: TGG
tcctccgtcctccactgccc

SEQ ID NO: 9690 - DNA, 20 bp, Artificial Sequence
  Description of Artificial Sequence: Synthetic oligonucleotide
  Target: COL7A1; (-) strand; PAM type: NRG; PAM sequence: TGG
ctacccctgtcccctttgtc

SEQ ID NO: 9691 - DNA, 20 bp, Artificial Sequence
  Description of Artificial Sequence: Synthetic oligonucleotide
  Target: COL7A1; (-) strand; PAM type: NRG; PAM sequence: TGG
tgccatcctccctagccctc

SEQ ID NO: 9692 - DNA, 20 bp, Artificial Sequence
  Description of Artificial Sequence: Synthetic oligonucleotide
  Target: COL7A1; (-) strand; PAM type: NRG; PAM sequence: TAG
ggactctctgccatcctccc

SEQ ID NO: 9693 - DNA, 20 bp, Artificial Sequence
  Description of Artificial Sequence: Synthetic oligonucleotide
  Target: COL7A1; (-) strand; PAM type: NRG; PAM sequence: AGG
gcctgtgccctttgtacccc

SEQ ID NO: 9694 - DNA, 20 bp, Artificial Sequence
  Description of Artificial Sequence: Synthetic oligonucleotide
  Target: COL7A1; (-) strand; PAM type: NRG; PAM sequence: CAG
tgcctgtgccctttgtaccc

SEQ ID NO: 9695 - DNA, 20 bp, Artificial Sequence
  Description of Artificial Sequence: Synthetic oligonucleotide
  Target: COL7A1; (-) strand; PAM type: NRG; PAM sequence: CAG
aagtgacagtgctgtgactt

SEQ ID NO: 9696 - DNA, 20 bp, Artificial Sequence
  Description of Artificial Sequence: Synthetic oligonucleotide
  Target: COL7A1; (-) strand; PAM type: NRG; PAM sequence: CAG
ggtcccgctggggaaagtga

SEQ ID NO: 9697 - DNA, 20 bp, Artificial Sequence
  Description of Artificial Sequence: Synthetic oligonucleotide
  Target: COL7A1; (-) strand; PAM type: NRG; PAM sequence: AAG
acggtgggtcccgctgggga

SEQ ID NO: 9698 - DNA, 20 bp, Artificial Sequence
  Description of Artificial Sequence: Synthetic oligonucleotide
  Target: COL7A1; (-) strand; PAM type: NRG; PAM sequence: GGG
actcacggtgggtcccgctg

SEQ ID NO: 9699 - DNA, 20 bp, Artificial Sequence
  Description of Artificial Sequence: Synthetic oligonucleotide
  Target: COL7A1; (-) strand; PAM type: NRG; PAM sequence: GGG
gactcacggtgggtcccgct

SEQ ID NO: 9700 - DNA, 20 bp, Artificial Sequence
  Description of Artificial Sequence: Synthetic oligonucleotide
  Target: COL7A1; (-) strand; PAM type: NRG; PAM sequence: TGG
ggactcacggtgggtcccgc

SEQ ID NO: 9701 - DNA, 20 bp, Artificial Sequence
  Description of Artificial Sequence: Synthetic oligonucleotide
  Target: COL7A1; (-) strand; PAM type: NRG; PAM sequence: GGG
ggaccccgaggactcacggt

SEQ ID NO: 9702 - DNA, 20 bp, Artificial Sequence
  Description of Artificial Sequence: Synthetic oligonucleotide
  Target: COL7A1; (-) strand; PAM type: NRG; PAM sequence: TGG
gggaccccgaggactcacgg

SEQ ID NO: 9703 - DNA, 20 bp, Artificial Sequence
  Description of Artificial Sequence: Synthetic oligonucleotide
  Target: COL7A1; (-) strand; PAM type: NRG; PAM sequence: CGG
ggagggaccccgaggactca

SEQ ID NO: 9704 - DNA, 20 bp, Artificial Sequence
  Description of Artificial Sequence: Synthetic oligonucleotide
  Target: COL7A1; (-) strand; PAM type: NRG; PAM sequence: AGG
cccggccaggagggaccccg

SEQ ID NO: 9705 - DNA, 20 bp, Artificial Sequence
  Description of Artificial Sequence: Synthetic oligonucleotide
  Target: COL7A1; (-) strand; PAM type: NRG; PAM sequence: GAG
ccccggccaggagggacccc

SEQ ID NO: 9706 - DNA, 20 bp, Artificial Sequence
  Description of Artificial Sequence: Synthetic oligonucleotide
  Target: COL7A1; (-) strand; PAM type: NRG; PAM sequence: GGG
gatggccgccccggccagga

SEQ ID NO: 9707 - DNA, 20 bp, Artificial Sequence
  Description of Artificial Sequence: Synthetic oligonucleotide
  Target: COL7A1; (-) strand; PAM type: NRG; PAM sequence: AGG
agatggccgccccggccagg

SEQ ID NO: 9708 - DNA, 20 bp, Artificial Sequence
  Description of Artificial Sequence: Synthetic oligonucleotide
  Target: COL7A1; (-) strand; PAM type: NRG; PAM sequence: GAG
aagatggccgccccggccag

SEQ ID NO: 9709 - DNA, 20 bp, Artificial Sequence
  Description of Artificial Sequence: Synthetic oligonucleotide
  Target: COL7A1; (-) strand; PAM type: NRG; PAM sequence: AGG
tgaagatggccgccccggcc

SEQ ID NO: 9710 - DNA, 20 bp, Artificial Sequence
  Description of Artificial Sequence: Synthetic oligonucleotide
  Target: COL7A1; (-) strand; PAM type: NRG; PAM sequence: CAG
gtgaagatggccgccccggc

SEQ ID NO: 9711 - DNA, 20 bp, Artificial Sequence
  Description of Artificial Sequence: Synthetic oligonucleotide
  Target: COL7A1; (-) strand; PAM type: NRG; PAM sequence: CGG
cagggtgaagatggccgccc

SEQ ID NO: 9712 - DNA, 20 bp, Artificial Sequence
  Description of Artificial Sequence: Synthetic oligonucleotide
  Target: COL7A1; (-) strand; PAM type: NRG; PAM sequence: TGG
gtcaccatccagggtgaaga

SEQ ID NO: 9713 - DNA, 20 bp, Artificial Sequence
  Description of Artificial Sequence: Synthetic oligonucleotide
  Target: COL7A1; (-) strand; PAM type: NRG; PAM sequence: AAG
taatgtcaccatccagggtg

SEQ ID NO: 9714 - DNA, 20 bp, Artificial Sequence
  Description of Artificial Sequence: Synthetic oligonucleotide
  Target: COL7A1; (-) strand; PAM type: NRG; PAM sequence: GGG
gaacctaatgtcaccatcca

SEQ ID NO: 9715 - DNA, 20 bp, Artificial Sequence
  Description of Artificial Sequence: Synthetic oligonucleotide
  Target: COL7A1; (-) strand; PAM type: NRG; PAM sequence: AGG
tgaacctaatgtcaccatcc

SEQ ID NO: 9716 - DNA, 20 bp, Artificial Sequence
  Description of Artificial Sequence: Synthetic oligonucleotide
  Target: COL7A1; (-) strand; PAM type: NRG; PAM sequence: CAG
atgaacctaatgtcaccatc

SEQ ID NO: 9717 - DNA, 20 bp, Artificial Sequence
  Description of Artificial Sequence: Synthetic oligonucleotide
  Target: COL7A1; (-) strand; PAM type: NRG; PAM sequence: GAG
gcctctgatttccaacctct

SEQ ID NO: 9718 - DNA, 20 bp, Artificial Sequence
  Description of Artificial Sequence: Synthetic oligonucleotide
  Target: COL7A1; (-) strand; PAM type: NRG; PAM sequence: CAG
cagccgaactcccttcatcc

SEQ ID NO: 9719 - DNA, 20 bp, Artificial Sequence
  Description of Artificial Sequence: Synthetic oligonucleotide
  Target: COL7A1; (-) strand; PAM type: NRG; PAM sequence: CAG
ggtacgtatgtcttactcca

SEQ ID NO: 9720 - DNA, 20 bp, Artificial Sequence
  Description of Artificial Sequence: Synthetic oligonucleotide
  Target: COL7A1; (-) strand; PAM type: NRG; PAM sequence: GGG
gcgtggggagccaggcatcc

SEQ ID NO: 9721 - DNA, 20 bp, Artificial Sequence
  Description of Artificial Sequence: Synthetic oligonucleotide
  Target: COL7A1; (-) strand; PAM type: NRG; PAM sequence: CGG
agcgtggggagccaggcatc

SEQ ID NO: 9722 - DNA, 20 bp, Artificial Sequence
  Description of Artificial Sequence: Synthetic oligonucleotide
  Target: COL7A1; (-) strand; PAM type: NRG; PAM sequence: AGG
cgaggcgagcgtggggagcc

SEQ ID NO: 9723 - DNA, 20 bp, Artificial Sequence
  Description of Artificial Sequence: Synthetic oligonucleotide
  Target: COL7A1; (-) strand; PAM type: NRG; PAM sequence: CAG
ccgaggcgagcgtggggagc

SEQ ID NO: 9724 - DNA, 20 bp, Artificial Sequence
  Description of Artificial Sequence: Synthetic oligonucleotide
  Target: COL7A1; (-) strand; PAM type: NRG; PAM sequence: GAG
ggccccgaggcgagcgtggg

SEQ ID NO: 9725 - DNA, 20 bp, Artificial Sequence
  Description of Artificial Sequence: Synthetic oligonucleotide
  Target: COL7A1; (-) strand; PAM type: NRG; PAM sequence: GGG
tgggccccgaggcgagcgtg

SEQ ID NO: 9726 - DNA, 20 bp, Artificial Sequence
  Description of Artificial Sequence: Synthetic oligonucleotide
  Target: COL7A1; (-) strand; PAM type: NRG; PAM sequence: GGG
ctgggccccgaggcgagcgt

SEQ ID NO: 9727 - DNA, 20 bp, Artificial Sequence
  Description of Artificial Sequence: Synthetic oligonucleotide
  Target: COL7A1; (-) strand; PAM type: NRG; PAM sequence: TGG
cctgggccccgaggcgagcg

SEQ ID NO: 9728 - DNA, 20 bp, Artificial Sequence
  Description of Artificial Sequence: Synthetic oligonucleotide
  Target: COL7A1; (-) strand; PAM type: NRG; PAM sequence: GAG
ggctgcctgggccccgaggc

SEQ ID NO: 9729 - DNA, 20 bp, Artificial Sequence
  Description of Artificial Sequence: Synthetic oligonucleotide
  Target: COL7A1; (-) strand; PAM type: NRG; PAM sequence: AGG
gtagggctgcctgggccccg

SEQ ID NO: 9730 - DNA, 20 bp, Artificial Sequence
  Description of Artificial Sequence: Synthetic oligonucleotide
  Target: COL7A1; (-) strand; PAM type: NRG; PAM sequence: GAG
agtagggctgcctgggcccc

SEQ ID NO: 9731 - DNA, 20 bp, Artificial Sequence
  Description of Artificial Sequence: Synthetic oligonucleotide
  Target: COL7A1; (-) strand; PAM type: NRG; PAM sequence: GGG
accctggagtagggctgcct

SEQ ID NO: 9732 - DNA, 20 bp, Artificial Sequence
  Description of Artificial Sequence: Synthetic oligonucleotide
  Target: COL7A1; (-) strand; PAM type: NRG; PAM sequence: TGG
gaccctggagtagggctgcc

SEQ ID NO: 9733 - DNA, 20 bp, Artificial Sequence
  Description of Artificial Sequence: Synthetic oligonucleotide
  Target: COL7A1; (-) strand; PAM type: NRG; PAM sequence: GGG
tccagggagaccctggagta

SEQ ID NO: 9734 - DNA, 20 bp, Artificial Sequence
  Description of Artificial Sequence: Synthetic oligonucleotide
  Target: COL7A1; (-) strand; PAM type: NRG; PAM sequence: AGG
ctccagggagaccctggagt

SEQ ID NO: 9735 - DNA, 20 bp, Artificial Sequence
  Description of Artificial Sequence: Synthetic oligonucleotide
  Target: COL7A1; (-) strand; PAM type: NRG; PAM sequence: TAG
tctccagggagaccctggag

SEQ ID NO: 9736 - DNA, 20 bp, Artificial Sequence
  Description of Artificial Sequence: Synthetic oligonucleotide
  Target: COL7A1; (-) strand; PAM type: NRG; PAM sequence: GAG
tggtctccagggagaccctg

SEQ ID NO: 9737 - DNA, 20 bp, Artificial Sequence
  Description of Artificial Sequence: Synthetic oligonucleotide
  Target: COL7A1; (-) strand; PAM type: NRG; PAM sequence: TGG
gttggtctccagggagaccc

SEQ ID NO: 9738 - DNA, 20 bp, Artificial Sequence
  Description of Artificial Sequence: Synthetic oligonucleotide
  Target: COL7A1; (-) strand; PAM type: NRG; PAM sequence: GAG
gtgtcctgttggtctccagg

SEQ ID NO: 9739 - DNA, 20 bp, Artificial Sequence
  Description of Artificial Sequence: Synthetic oligonucleotide
  Target: COL7A1; (-) strand; PAM type: NRG; PAM sequence: GGG
cggtgtcctgttggtctcca

SEQ ID NO: 9740 - DNA, 20 bp, Artificial Sequence
  Description of Artificial Sequence: Synthetic oligonucleotide
  Target: COL7A1; (-) strand; PAM type: NRG; PAM sequence: AGG
ccggtgtcctgttggtctcc

SEQ ID NO: 9741 - DNA, 20 bp, Artificial Sequence
  Description of Artificial Sequence: Synthetic oligonucleotide
  Target: COL7A1; (-) strand; PAM type: NRG; PAM sequence: CAG
cccggtgtcctgttggtctc

SEQ ID NO: 9742 - DNA, 20 bp, Artificial Sequence
  Description of Artificial Sequence: Synthetic oligonucleotide
  Target: COL7A1; (-) strand; PAM type: NRG; PAM sequence: TGG
actgatccccggtgtcctgt

SEQ ID NO: 9743 - DNA, 20 bp, Artificial Sequence
  Description of Artificial Sequence: Synthetic oligonucleotide
  Target: COL7A1; (-) strand; PAM type: NRG; PAM sequence: CGG
tgattcccctcactgatccc

SEQ ID NO: 9744 - DNA, 20 bp, Artificial Sequence
  Description of Artificial Sequence: Synthetic oligonucleotide
  Target: COL7A1; (-) strand; PAM type: NRG; PAM sequence: CAG
tgtgccctggtcaccccctt

SEQ ID NO: 9745 - DNA, 20 bp, Artificial Sequence
  Description of Artificial Sequence: Synthetic oligonucleotide
  Target: COL7A1; (-) strand; PAM type: NRG; PAM sequence: TGG
gctgactctctcttgtgccc

SEQ ID NO: 9746 - DNA, 20 bp, Artificial Sequence
  Description of Artificial Sequence: Synthetic oligonucleotide
  Target: COL7A1; (-) strand; PAM type: NRG; PAM sequence: AAG
ggagacaaggtaggtgggac

SEQ ID NO: 9747 - DNA, 20 bp, Artificial Sequence
  Description of Artificial Sequence: Synthetic oligonucleotide
  Target: COL7A1; (-) strand; PAM type: NRG; PAM sequence: GGG
tcaaaggagacaaggtaggt

SEQ ID NO: 9748 - DNA, 20 bp, Artificial Sequence
  Description of Artificial Sequence: Synthetic oligonucleotide
  Target: COL7A1; (-) strand; PAM type: NRG; PAM sequence: TGG
ctcaaaggagacaaggtagg

SEQ ID NO: 9749 - DNA, 20 bp, Artificial Sequence
  Description of Artificial Sequence: Synthetic oligonucleotide
  Target: COL7A1; (-) strand; PAM type: NRG; PAM sequence: AGG
ggactcaaaggagacaaggt

SEQ ID NO: 9750 - DNA, 20 bp, Artificial Sequence
  Description of Artificial Sequence: Synthetic oligonucleotide
  Target: COL7A1; (-) strand; PAM type: NRG; PAM sequence: TAG
tggactcaaaggagacaagg

SEQ ID NO: 9751 - DNA, 20 bp, Artificial Sequence
  Description of Artificial Sequence: Synthetic oligonucleotide
  Target: COL7A1; (-) strand; PAM type: NRG; PAM sequence: AGG
ctctggactcaaaggagaca

SEQ ID NO: 9752 - DNA, 20 bp, Artificial Sequence
  Description of Artificial Sequence: Synthetic oligonucleotide
  Target: COL7A1; (-) strand; PAM type: NRG; PAM sequence: AAG
cctctggactcaaaggagac

SEQ ID NO: 9753 - DNA, 20 bp, Artificial Sequence
  Description of Artificial Sequence: Synthetic oligonucleotide
  Target: COL7A1; (-) strand; PAM type: NRG; PAM sequence: GAG
tggggcctctggactcaaag

SEQ ID NO: 9754 - DNA, 20 bp, Artificial Sequence
  Description of Artificial Sequence: Synthetic oligonucleotide
  Target: COL7A1; (-) strand; PAM type: NRG; PAM sequence: AGG
cctggggcctctggactcaa

SEQ ID NO: 9755 - DNA, 20 bp, Artificial Sequence
  Description of Artificial Sequence: Synthetic oligonucleotide
  Target: COL7A1; (-) strand; PAM type: NRG; PAM sequence: AAG
acctggggcctctggactca

SEQ ID NO: 9756 - DNA, 20 bp, Artificial Sequence
  Description of Artificial Sequence: Synthetic oligonucleotide
  Target: COL7A1; (-) strand; PAM type: NRG; PAM sequence: TGG
cagggaccacctggggcctc

SEQ ID NO: 9757 - DNA, 20 bp, Artificial Sequence
  Description of Artificial Sequence: Synthetic oligonucleotide
  Target: COL7A1; (-) strand; PAM type: NRG; PAM sequence: GGG
tgacctacagggaccacctg

SEQ ID NO: 9758 - DNA, 20 bp, Artificial Sequence
  Description of Artificial Sequence: Synthetic oligonucleotide
  Target: COL7A1; (-) strand; PAM type: NRG; PAM sequence: GGG
ctgacctacagggaccacct

SEQ ID NO: 9759 - DNA, 20 bp, Artificial Sequence
  Description of Artificial Sequence: Synthetic oligonucleotide
  Target: COL7A1; (-) strand; PAM type: NRG; PAM sequence: TGG
tctgacctacagggaccacc

SEQ ID NO: 9760 - DNA, 20 bp, Artificial Sequence
  Description of Artificial Sequence: Synthetic oligonucleotide
  Target: COL7A1; (-) strand; PAM type: NRG; PAM sequence: GGG
tcacctcactctgacctaca

SEQ ID NO: 9761 - DNA, 20 bp, Artificial Sequence
  Description of Artificial Sequence: Synthetic oligonucleotide
  Target: COL7A1; (-) strand; PAM type: NRG; PAM sequence: AGG
ctcacctcactctgacctac

SEQ ID NO: 9762 - DNA, 20 bp, Artificial Sequence
  Description of Artificial Sequence: Synthetic oligonucleotide
  Target: COL7A1; (-) strand; PAM type: NRG; PAM sequence: CAG
cctcacctcactctgaccta

SEQ ID NO: 9763 - DNA, 20 bp, Artificial Sequence
  Description of Artificial Sequence: Synthetic oligonucleotide
  Target: COL7A1; (-) strand; PAM type: NRG; PAM sequence: AGG
ggaggcgctttgagagccac

SEQ ID NO: 9764 - DNA, 20 bp, Artificial Sequence
  Description of Artificial Sequence: Synthetic oligonucleotide
  Target: COL7A1; (-) strand; PAM type: NRG; PAM sequence: CAG
gggaggcgctttgagagcca

SEQ ID NO: 9765 - DNA, 20 bp, Artificial Sequence
  Description of Artificial Sequence: Synthetic oligonucleotide
  Target: COL7A1; (-) strand; PAM type: NRG; PAM sequence: GAG
tgttgggggaggcgctttga

SEQ ID NO: 9766 - DNA, 20 bp, Artificial Sequence
  Description of Artificial Sequence: Synthetic oligonucleotide
  Target: COL7A1; (-) strand; PAM type: NRG; PAM sequence: GAG
ggtgttgggggaggcgcttt

SEQ ID NO: 9767 - DNA, 20 bp, Artificial Sequence
  Description of Artificial Sequence: Synthetic oligonucleotide
  Target: COL7A1; (-) strand; PAM type: NRG; PAM sequence: AGG
acactgtggggtgttggggg

SEQ ID NO: 9768 - DNA, 20 bp, Artificial Sequence
  Description of Artificial Sequence: Synthetic oligonucleotide
  Target: COL7A1; (-) strand; PAM type: NRG; PAM sequence: GAG
cacactgtggggtgttgggg

SEQ ID NO: 9769 - DNA, 20 bp, Artificial Sequence
  Description of Artificial Sequence: Synthetic oligonucleotide
  Target: COL7A1; (-) strand; PAM type: NRG; PAM sequence: GGG
gccacactgtggggtgttgg

SEQ ID NO: 9770 - DNA, 20 bp, Artificial Sequence
  Description of Artificial Sequence: Synthetic oligonucleotide
  Target: COL7A1; (-) strand; PAM type: NRG; PAM sequence: GGG
ggccacactgtggggtgttg

SEQ ID NO: 9771 - DNA, 20 bp, Artificial Sequence
  Description of Artificial Sequence: Synthetic oligonucleotide
  Target: COL7A1; (-) strand; PAM type: NRG; PAM sequence: GGG
gggccacactgtggggtgtt

SEQ ID NO: 9772 - DNA, 20 bp, Artificial Sequence
  Description of Artificial Sequence: Synthetic oligonucleotide
  Target: COL7A1; (-) strand; PAM type: NRG; PAM sequence: TGG
cgggccacactgtggggtgt

SEQ ID NO: 9773 - DNA, 20 bp, Artificial Sequence
  Description of Artificial Sequence: Synthetic oligonucleotide
  Target: COL7A1; (-) strand; PAM type: NRG; PAM sequence: GGG
atggggcgggccacactgtg

SEQ ID NO: 9774 - DNA, 20 bp, Artificial Sequence
  Description of Artificial Sequence: Synthetic oligonucleotide
  Target: COL7A1; (-) strand; PAM type: NRG; PAM sequence: GGG
gatggggcgggccacactgt

SEQ ID NO: 9775 - DNA, 20 bp, Artificial Sequence
  Description of Artificial Sequence: Synthetic oligonucleotide
  Target: COL7A1; (-) strand; PAM type: NRG; PAM sequence: TGG
ggatggggcgggccacactg

SEQ ID NO: 9776 - DNA, 20 bp, Artificial Sequence
  Description of Artificial Sequence: Synthetic oligonucleotide
  Target: COL7A1; (-) strand; PAM type: NRG; PAM sequence: GGG
gtgaggacttaggatggggc

SEQ ID NO: 9777 - DNA, 20 bp, Artificial Sequence
  Description of Artificial Sequence: Synthetic oligonucleotide
  Target: COL7A1; (-) strand; PAM type: NRG; PAM sequence: CGG
cgtgaggacttaggatgggg

SEQ ID NO: 9778 - DNA, 20 bp, Artificial Sequence
  Description of Artificial Sequence: Synthetic oligonucleotide
  Target: COL7A1; (-) strand; PAM type: NRG; PAM sequence: GGG
cctcgtgaggacttaggatg

SEQ ID NO: 9779 - DNA, 20 bp, Artificial Sequence
  Description of Artificial Sequence: Synthetic oligonucleotide
  Target: COL7A1; (-) strand; PAM type: NRG; PAM sequence: GGG
tcctcgtgaggacttaggat

SEQ ID NO: 9780 - DNA, 20 bp, Artificial Sequence
  Description of Artificial Sequence: Synthetic oligonucleotide
  Target: COL7A1; (-) strand; PAM type: NRG; PAM sequence: TGG
gtcctcgtgaggacttagga

SEQ ID NO: 9781 - DNA, 20 bp, Artificial Sequence
  Description of Artificial Sequence: Synthetic oligonucleotide
  Target: COL7A1; (-) strand; PAM type: NRG; PAM sequence: AGG
tcctgtcctcgtgaggactt

SEQ ID NO: 9782 - DNA, 20 bp, Artificial Sequence
  Description of Artificial Sequence: Synthetic oligonucleotide
  Target: COL7A1; (-) strand; PAM type: NRG; PAM sequence: TAG
ttcctgtcctcgtgaggact

SEQ ID NO: 9783 - DNA, 20 bp, Artificial Sequence
  Description of Artificial Sequence: Synthetic oligonucleotide
  Target: COL7A1; (-) strand; PAM type: NRG; PAM sequence: AGG
tttgatttcctgtcctcgtg

SEQ ID NO: 9784 - DNA, 20 bp, Artificial Sequence
  Description of Artificial Sequence: Synthetic oligonucleotide
  Target: COL7A1; (-) strand; PAM type: NRG; PAM sequence: GAG
atttgatttcctgtcctcgt

SEQ ID NO: 9785 - DNA, 20 bp, Artificial Sequence
  Description of Artificial Sequence: Synthetic oligonucleotide
  Target: COL7A1; (-) strand; PAM type: NRG; PAM sequence: AAG
tggtgagtagaggtgcccta

SEQ ID NO: 9786 - DNA, 20 bp, Artificial Sequence
  Description of Artificial Sequence: Synthetic oligonucleotide
  Target: COL7A1; (-) strand; PAM type: NRG; PAM sequence: AGG
ccggggtcagtggtgagtag

SEQ ID NO: 9787 - DNA, 20 bp, Artificial Sequence
  Description of Artificial Sequence: Synthetic oligonucleotide
  Target: COL7A1; (-) strand; PAM type: NRG; PAM sequence: GAG
accggggtcagtggtgagta

SEQ ID NO: 9788 - DNA, 20 bp, Artificial Sequence
  Description of Artificial Sequence: Synthetic oligonucleotide
  Target: COL7A1; (-) strand; PAM type: NRG; PAM sequence: TAG
ccaccggggtcagtggtgag

SEQ ID NO: 9789 - DNA, 20 bp, Artificial Sequence
  Description of Artificial Sequence: Synthetic oligonucleotide
  Target: COL7A1; (-) strand; PAM type: NRG; PAM sequence: GAG
ggaccaccggggtcagtggt

SEQ ID NO: 9790 - DNA, 20 bp, Artificial Sequence
  Description of Artificial Sequence: Synthetic oligonucleotide
  Target: COL7A1; (-) strand; PAM type: NRG; PAM sequence: TGG
acctggaccaccggggtcag

SEQ ID NO: 9791 - DNA, 20 bp, Artificial Sequence
  Description of Artificial Sequence: Synthetic oligonucleotide
  Target: COL7A1; (-) strand; PAM type: NRG; PAM sequence: CAG
gccacctggaccaccggggt

SEQ ID NO: 9792 - DNA, 20 bp, Artificial Sequence
  Description of Artificial Sequence: Synthetic oligonucleotide
  Target: COL7A1; (-) strand; PAM type: NRG; PAM sequence: GGG
tggggccacctggaccaccg

SEQ ID NO: 9793 - DNA, 20 bp, Artificial Sequence
  Description of Artificial Sequence: Synthetic oligonucleotide
  Target: COL7A1; (-) strand; PAM type: NRG; PAM sequence: GGG
ctggggccacctggaccacc

SEQ ID NO: 9794 - DNA, 20 bp, Artificial Sequence
  Description of Artificial Sequence: Synthetic oligonucleotide
  Target: COL7A1; (-) strand; PAM type: NRG; PAM sequence: CGG
cctggggccacctggaccac

SEQ ID NO: 9795 - DNA, 20 bp, Artificial Sequence
  Description of Artificial Sequence: Synthetic oligonucleotide
  Target: COL7A1; (-) strand; PAM type: NRG; PAM sequence: TGG
ccaggacccctggggccacc

SEQ ID NO: 9796 - DNA, 20 bp, Artificial Sequence
  Description of Artificial Sequence: Synthetic oligonucleotide
  Target: COL7A1; (-) strand; PAM type: NRG; PAM sequence: GGG
aaggaatcccaggacccctg

SEQ ID NO: 9797 - DNA, 20 bp, Artificial Sequence
  Description of Artificial Sequence: Synthetic oligonucleotide
  Target: COL7A1; (-) strand; PAM type: NRG; PAM sequence: GGG
gaaggaatcccaggacccct

SEQ ID NO: 9798 - DNA, 20 bp, Artificial Sequence
  Description of Artificial Sequence: Synthetic oligonucleotide
  Target: COL7A1; (-) strand; PAM type: NRG; PAM sequence: TGG
agaaggaatcccaggacccc

SEQ ID NO: 9799 - DNA, 20 bp, Artificial Sequence
  Description of Artificial Sequence: Synthetic oligonucleotide
  Target: COL7A1; (-) strand; PAM type: NRG; PAM sequence: AGG
ccagggagagaaggaatccc

SEQ ID NO: 9800 - DNA, 20 bp, Artificial Sequence
  Description of Artificial Sequence: Synthetic oligonucleotide
  Target: COL7A1; (-) strand; PAM type: NRG; PAM sequence: CAG
cccagggagagaaggaatcc

SEQ ID NO: 9801 - DNA, 20 bp, Artificial Sequence
  Description of Artificial Sequence: Synthetic oligonucleotide
  Target: COL7A1; (-) strand; PAM type: NRG; PAM sequence: AGG
gcaggccccccagggagaga

SEQ ID NO: 9802 - DNA, 20 bp, Artificial Sequence
  Description of Artificial Sequence: Synthetic oligonucleotide
  Target: COL7A1; (-) strand; PAM type: NRG; PAM sequence: AAG
ggcaggccccccagggagag

SEQ ID NO: 9803 - DNA, 20 bp, Artificial Sequence
  Description of Artificial Sequence: Synthetic oligonucleotide
  Target: COL7A1; (-) strand; PAM type: NRG; PAM sequence: GAG
tctggcaggccccccaggga

SEQ ID NO: 9804 - DNA, 20 bp, Artificial Sequence
  Description of Artificial Sequence: Synthetic oligonucleotide
  Target: COL7A1; (-) strand; PAM type: NRG; PAM sequence: GAG
ggtctggcaggccccccagg

SEQ ID NO: 9805 - DNA, 20 bp, Artificial Sequence
  Description of Artificial Sequence: Synthetic oligonucleotide
  Target: COL7A1; (-) strand; PAM type: NRG; PAM sequence: GGG
agggtctggcaggcccccca

SEQ ID NO: 9806 - DNA, 20 bp, Artificial Sequence
  Description of Artificial Sequence: Synthetic oligonucleotide
  Target: COL7A1; (-) strand; PAM type: NRG; PAM sequence: AGG
tagggtctggcaggcccccc

SEQ ID NO: 9807 - DNA, 20 bp, Artificial Sequence
  Description of Artificial Sequence: Synthetic oligonucleotide
  Target: COL7A1; (-) strand; PAM type: NRG; PAM sequence: CAG
gtagggtctggcaggccccc

SEQ ID NO: 9808 - DNA, 20 bp, Artificial Sequence
  Description of Artificial Sequence: Synthetic oligonucleotide
  Target: COL7A1; (-) strand; PAM type: NRG; PAM sequence: AGG
tttttctggtagggtctggc

SEQ ID NO: 9809 - DNA, 20 bp, Artificial Sequence
  Description of Artificial Sequence: Synthetic oligonucleotide
  Target: COL7A1; (-) strand; PAM type: NRG; PAM sequence: CAG
atttttctggtagggtctgg

SEQ ID NO: 9810 - DNA, 20 bp, Artificial Sequence
  Description of Artificial Sequence: Synthetic oligonucleotide
  Target: COL7A1; (-) strand; PAM type: NRG; PAM sequence: TGG
cccatttttctggtagggtc

SEQ ID NO: 9811 - DNA, 20 bp, Artificial Sequence
  Description of Artificial Sequence: Synthetic oligonucleotide
  Target: COL7A1; (-) strand; PAM type: NRG; PAM sequence: GGG
cttgccccatttttctggta

SEQ ID NO: 9812 - DNA, 20 bp, Artificial Sequence
  Description of Artificial Sequence: Synthetic oligonucleotide
  Target: COL7A1; (-) strand; PAM type: NRG; PAM sequence: AGG
tcttgccccatttttctggt

SEQ ID NO: 9813 - DNA, 20 bp, Artificial Sequence
  Description of Artificial Sequence: Synthetic oligonucleotide
  Target: COL7A1; (-) strand; PAM type: NRG; PAM sequence: TAG
ctcttgccccatttttctgg

SEQ ID NO: 9814 - DNA, 20 bp, Artificial Sequence
  Description of Artificial Sequence: Synthetic oligonucleotide
  Target: COL7A1; (-) strand; PAM type: NRG; PAM sequence: TGG
cctctcttgccccatttttc

SEQ ID NO: 9815 - DNA, 20 bp, Artificial Sequence
  Description of Artificial Sequence: Synthetic oligonucleotide
  Target: COL7A1; (-) strand; PAM type: NRG; PAM sequence: AAG
cagagggtaggagggttccc

SEQ ID NO: 9816 - DNA, 20 bp, Artificial Sequence
  Description of Artificial Sequence: Synthetic oligonucleotide
  Target: COL7A1; (-) strand; PAM type: NRG; PAM sequence: GGG
tgagggggcagagggtagga

SEQ ID NO: 9817 - DNA, 20 bp, Artificial Sequence
  Description of Artificial Sequence: Synthetic oligonucleotide
  Target: COL7A1; (-) strand; PAM type: NRG; PAM sequence: AGG
ttgagggggcagagggtagg

SEQ ID NO: 9818 - DNA, 20 bp, Artificial Sequence
  Description of Artificial Sequence: Synthetic oligonucleotide
  Target: COL7A1; (-) strand; PAM type: NRG; PAM sequence: GAG
cttgagggggcagagggtag

SEQ ID NO: 9819 - DNA, 20 bp, Artificial Sequence
  Description of Artificial Sequence: Synthetic oligonucleotide
  Target: COL7A1; (-) strand; PAM type: NRG; PAM sequence: AGG
gtcttgagggggcagagggt

SEQ ID NO: 9820 - DNA, 20 bp, Artificial Sequence
  Description of Artificial Sequence: Synthetic oligonucleotide
  Target: COL7A1; (-) strand; PAM type: NRG; PAM sequence: TAG
agtcttgagggggcagaggg

SEQ ID NO: 9821 - DNA, 20 bp, Artificial Sequence
  Description of Artificial Sequence: Synthetic oligonucleotide
  Target: COL7A1; (-) strand; PAM type: NRG; PAM sequence: GGG
cccagtcttgagggggcaga

SEQ ID NO: 9822 - DNA, 20 bp, Artificial Sequence
  Description of Artificial Sequence: Synthetic oligonucleotide
  Target: COL7A1; (-) strand; PAM type: NRG; PAM sequence: AGG
tcccagtcttgagggggcag

SEQ ID NO: 9823 - DNA, 20 bp, Artificial Sequence
  Description of Artificial Sequence: Synthetic oligonucleotide
  Target: COL7A1; (-) strand; PAM type: NRG; PAM sequence: GAG
ttcccagtcttgagggggca

SEQ ID NO: 9824 - DNA, 20 bp, Artificial Sequence
  Description of Artificial Sequence: Synthetic oligonucleotide
  Target: COL7A1; (-) strand; PAM type: NRG; PAM sequence: CAG
ggttcccagtcttgaggggg

SEQ ID NO: 9825 - DNA, 20 bp, Artificial Sequence
  Description of Artificial Sequence: Synthetic oligonucleotide
  Target: COL7A1; (-) strand; PAM type: NRG; PAM sequence: GGG
gggggttcccagtcttgagg

SEQ ID NO: 9826 - DNA, 20 bp, Artificial Sequence
  Description of Artificial Sequence: Synthetic oligonucleotide
  Target: COL7A1; (-) strand; PAM type: NRG; PAM sequence: GGG
tgggggttcccagtcttgag

SEQ ID NO: 9827 - DNA, 20 bp, Artificial Sequence
  Description of Artificial Sequence: Synthetic oligonucleotide
  Target: COL7A1; (-) strand; PAM type: NRG; PAM sequence: GGG
ttgggggttcccagtcttga

SEQ ID NO: 9828 - DNA, 20 bp, Artificial Sequence
  Description of Artificial Sequence: Synthetic oligonucleotide
  Target: COL7A1; (-) strand; PAM type: NRG; PAM sequence: AGG
cttgggggttcccagtcttg

SEQ ID NO: 9829 - DNA, 20 bp, Artificial Sequence
  Description of Artificial Sequence: Synthetic oligonucleotide
  Target: COL7A1; (-) strand; PAM type: NRG; PAM sequence: GAG
ccttgggggttcccagtctt

SEQ ID NO: 9830 - DNA, 20 bp, Artificial Sequence
  Description of Artificial Sequence: Synthetic oligonucleotide
  Target: COL7A1; (-) strand; PAM type: NRG; PAM sequence: CAG
ggccctgccttgggggttcc

SEQ ID NO: 9831 - DNA, 20 bp, Artificial Sequence
  Description of Artificial Sequence: Synthetic oligonucleotide
  Target: COL7A1; (-) strand; PAM type: NRG; PAM sequence: GGG
aggagggggccctgccttgg

SEQ ID NO: 9832 - DNA, 20 bp, Artificial Sequence
  Description of Artificial Sequence: Synthetic oligonucleotide
  Target: COL7A1; (-) strand; PAM type: NRG; PAM sequence: GGG
gaggagggggccctgccttg

SEQ ID NO: 9833 - DNA, 20 bp, Artificial Sequence
  Description of Artificial Sequence: Synthetic oligonucleotide
  Target: COL7A1; (-) strand; PAM type: NRG; PAM sequence: GGG
tgaggagggggccctgcctt

SEQ ID NO: 9834 - DNA, 20 bp, Artificial Sequence
  Description of Artificial Sequence: Synthetic oligonucleotide
  Target: COL7A1; (-) strand; PAM type: NRG; PAM sequence: TGG
gtgaggagggggccctgcct

SEQ ID NO: 9835 - DNA, 20 bp, Artificial Sequence
  Description of Artificial Sequence: Synthetic oligonucleotide
  Target: COL7A1; (-) strand; PAM type: NRG; PAM sequence: GGG
atccatggtgggtgaggagg

SEQ ID NO: 9836 - DNA, 20 bp, Artificial Sequence
  Description of Artificial Sequence: Synthetic oligonucleotide
  Target: COL7A1; (-) strand; PAM type: NRG; PAM sequence: GGG
aatccatggtgggtgaggag

SEQ ID NO: 9837 - DNA, 20 bp, Artificial Sequence
  Description of Artificial Sequence: Synthetic oligonucleotide
  Target: COL7A1; (-) strand; PAM type: NRG; PAM sequence: GGG
gaatccatggtgggtgagga

SEQ ID NO: 9838 - DNA, 20 bp, Artificial Sequence
  Description of Artificial Sequence: Synthetic oligonucleotide
  Target: COL7A1; (-) strand; PAM type: NRG; PAM sequence: AGG
tgaatccatggtgggtgagg

SEQ ID NO: 9839 - DNA, 20 bp, Artificial Sequence
  Description of Artificial Sequence: Synthetic oligonucleotide
  Target: COL7A1; (-) strand; PAM type: NRG; PAM sequence: GAG
gtgaatccatggtgggtgag

SEQ ID NO: 9840 - DNA, 20 bp, Artificial Sequence
  Description of Artificial Sequence: Synthetic oligonucleotide
  Target: COL7A1; (-) strand; PAM type: NRG; PAM sequence: AGG
tggtgaatccatggtgggtg

SEQ ID NO: 9841 - DNA, 20 bp, Artificial Sequence
  Description of Artificial Sequence: Synthetic oligonucleotide
  Target: COL7A1; (-) strand; PAM type: NRG; PAM sequence: GAG
atggtgaatccatggtgggt

SEQ ID NO: 9842 - DNA, 20 bp, Artificial Sequence
  Description of Artificial Sequence: Synthetic oligonucleotide
  Target: COL7A1; (-) strand; PAM type: NRG; PAM sequence: GGG
gggcatggtgaatccatggt

SEQ ID NO: 9843 - DNA, 20 bp, Artificial Sequence
  Description of Artificial Sequence: Synthetic oligonucleotide
  Target: COL7A1; (-) strand; PAM type: NRG; PAM sequence: TGG
ggggcatggtgaatccatgg

SEQ ID NO: 9844 - DNA, 20 bp, Artificial Sequence
  Description of Artificial Sequence: Synthetic oligonucleotide
  Target: COL7A1; (-) strand; PAM type: NRG; PAM sequence: TGG
gtaggggcatggtgaatcca

SEQ ID NO: 9845 - DNA, 20 bp, Artificial Sequence
  Description of Artificial Sequence: Synthetic oligonucleotide
  Target: COL7A1; (-) strand; PAM type: NRG; PAM sequence: TGG
gggaacagcatgtaggggca

SEQ ID NO: 9846 - DNA, 20 bp, Artificial Sequence
  Description of Artificial Sequence: Synthetic oligonucleotide
  Target: COL7A1; (-) strand; PAM type: NRG; PAM sequence: GGG
gggctgggaacagcatgtag

SEQ ID NO: 9847 - DNA, 20 bp, Artificial Sequence
  Description of Artificial Sequence: Synthetic oligonucleotide
  Target: COL7A1; (-) strand; PAM type: NRG; PAM sequence: GGG
ggggctgggaacagcatgta

SEQ ID NO: 9848 - DNA, 20 bp, Artificial Sequence
  Description of Artificial Sequence: Synthetic oligonucleotide
  Target: COL7A1; (-) strand; PAM type: NRG; PAM sequence: AGG
aggggctgggaacagcatgt

SEQ ID NO: 9849 - DNA, 20 bp, Artificial Sequence
  Description of Artificial Sequence: Synthetic oligonucleotide
  Target: COL7A1; (-) strand; PAM type: NRG; PAM sequence: TAG
gaggggctgggaacagcatg

SEQ ID NO: 9850 - DNA, 20 bp, Artificial Sequence
  Description of Artificial Sequence: Synthetic oligonucleotide
  Target: COL7A1; (-) strand; PAM type: NRG; PAM sequence: CAG
agcgggtgaggggctgggaa

SEQ ID NO: 9851 - DNA, 20 bp, Artificial Sequence
  Description of Artificial Sequence: Synthetic oligonucleotide
  Target: COL7A1; (-) strand; PAM type: NRG; PAM sequence: GGG
tggagagcgggtgaggggct

SEQ ID NO: 9852 - DNA, 20 bp, Artificial Sequence
  Description of Artificial Sequence: Synthetic oligonucleotide
  Target: COL7A1; (-) strand; PAM type: NRG; PAM sequence: TGG
gtggagagcgggtgaggggc

SEQ ID NO: 9853 - DNA, 20 bp, Artificial Sequence
  Description of Artificial Sequence: Synthetic oligonucleotide
  Target: COL7A1; (-) strand; PAM type: NRG; PAM sequence: GGG
cctagtggagagcgggtgag

SEQ ID NO: 9854 - DNA, 20 bp, Artificial Sequence
  Description of Artificial Sequence: Synthetic oligonucleotide
  Target: COL7A1; (-) strand; PAM type: NRG; PAM sequence: GGG
ccctagtggagagcgggtga

SEQ ID NO: 9855 - DNA, 20 bp, Artificial Sequence
  Description of Artificial Sequence: Synthetic oligonucleotide
  Target: COL7A1; (-) strand; PAM type: NRG; PAM sequence: AGG
gccctagtggagagcgggtg

SEQ ID NO: 9856 - DNA, 20 bp, Artificial Sequence
  Description of Artificial Sequence: Synthetic oligonucleotide
  Target: COL7A1; (-) strand; PAM type: NRG; PAM sequence: GAG
ggccctagtggagagcgggt

SEQ ID NO: 9857 - DNA, 20 bp, Artificial Sequence
  Description of Artificial Sequence: Synthetic oligonucleotide
  Target: COL7A1; (-) strand; PAM type: NRG; PAM sequence: GGG
gccaggccctagtggagagc

SEQ ID NO: 9858 - DNA, 20 bp, Artificial Sequence
  Description of Artificial Sequence: Synthetic oligonucleotide
  Target: COL7A1; (-) strand; PAM type: NRG; PAM sequence: CGG
agccaggccctagtggagag

SEQ ID NO: 9859 - DNA, 20 bp, Artificial Sequence
  Description of Artificial Sequence: Synthetic oligonucleotide
  Target: COL7A1; (-) strand; PAM type: NRG; PAM sequence: GAG
gtcagccaggccctagtgga

SEQ ID NO: 9860 - DNA, 20 bp, Artificial Sequence
  Description of Artificial Sequence: Synthetic oligonucleotide
  Target: COL7A1; (-) strand; PAM type: NRG; PAM sequence: GAG
gggtcagccaggccctagtg

SEQ ID NO: 9861 - DNA, 20 bp, Artificial Sequence
  Description of Artificial Sequence: Synthetic oligonucleotide
  Target: COL7A1; (-) strand; PAM type: NRG; PAM sequence: TGG
atgggtcagccaggccctag

SEQ ID NO: 9862 - DNA, 20 bp, Artificial Sequence
  Description of Artificial Sequence: Synthetic oligonucleotide
  Target: COL7A1; (-) strand; PAM type: NRG; PAM sequence: TAG
gagatgggtcagccaggccc

SEQ ID NO: 9863 - DNA, 20 bp, Artificial Sequence
  Description of Artificial Sequence: Synthetic oligonucleotide
  Target: COL7A1; (-) strand; PAM type: NRG; PAM sequence: AGG
cgaggagagatgggtcagcc

SEQ ID NO: 9864 - DNA, 20 bp, Artificial Sequence
  Description of Artificial Sequence: Synthetic oligonucleotide
  Target: COL7A1; (-) strand; PAM type: NRG; PAM sequence: CAG
tcgaggagagatgggtcagc

SEQ ID NO: 9865 - DNA, 20 bp, Artificial Sequence
  Description of Artificial Sequence: Synthetic oligonucleotide
  Target: COL7A1; (-) strand; PAM type: NRG; PAM sequence: CAG
gccctcgaggagagatgggt

SEQ ID NO: 9866 - DNA, 20 bp, Artificial Sequence
  Description of Artificial Sequence: Synthetic oligonucleotide
  Target: COL7A1; (-) strand; PAM type: NRG; PAM sequence: GGG
acaggccctcgaggagagat

SEQ ID NO: 9867 - DNA, 20 bp, Artificial Sequence
  Description of Artificial Sequence: Synthetic oligonucleotide
  Target: COL7A1; (-) strand; PAM type: NRG; PAM sequence: TGG
gacaggccctcgaggagaga

SEQ ID NO: 9868 - DNA, 20 bp, Artificial Sequence
  Description of Artificial Sequence: Synthetic oligonucleotide
  Target: COL7A1; (-) strand; PAM type: NRG; PAM sequence: GAG
gtcagacaggccctcgagga

SEQ ID NO: 9869 - DNA, 20 bp, Artificial Sequence
  Description of Artificial Sequence: Synthetic oligonucleotide
  Target: COL7A1; (-) strand; PAM type: NRG; PAM sequence: GAG
gggtcagacaggccctcgag

SEQ ID NO: 9870 - DNA, 20 bp, Artificial Sequence
  Description of Artificial Sequence: Synthetic oligonucleotide
  Target: COL7A1; (-) strand; PAM type: NRG; PAM sequence: AGG
ccgggtcagacaggccctcg

SEQ ID NO: 9871 - DNA, 20 bp, Artificial Sequence
  Description of Artificial Sequence: Synthetic oligonucleotide
  Target: COL7A1; (-) strand; PAM type: NRG; PAM sequence: GAG
cccgggtcagacaggccctc

SEQ ID NO: 9872 - DNA, 20 bp, Artificial Sequence
  Description of Artificial Sequence: Synthetic oligonucleotide
  Target: COL7A1; (-) strand; PAM type: NRG; PAM sequence: AGG
gttgggttcccgggtcagac

SEQ ID NO: 9873 - DNA, 20 bp, Artificial Sequence
  Description of Artificial Sequence: Synthetic oligonucleotide
  Target: COL7A1; (-) strand; PAM type: NRG; PAM sequence: CAG
tgttgggttcccgggtcaga

SEQ ID NO: 9874 - DNA, 20 bp, Artificial Sequence
  Description of Artificial Sequence: Synthetic oligonucleotide
  Target: COL7A1; (-) strand; PAM type: NRG; PAM sequence: CAG
gtgttgttgggttcccgggt

SEQ ID NO: 9875 - DNA, 20 bp, Artificial Sequence
  Description of Artificial Sequence: Synthetic oligonucleotide
  Target: COL7A1; (-) strand; PAM type: NRG; PAM sequence: GGG
cctggtgttgttgggttccc

SEQ ID NO: 9876 - DNA, 20 bp, Artificial Sequence
  Description of Artificial Sequence: Synthetic oligonucleotide
  Target: COL7A1; (-) strand; PAM type: NRG; PAM sequence: CGG
tcctggtgttgttgggttcc

SEQ ID NO: 9877 - DNA, 20 bp, Artificial Sequence
  Description of Artificial Sequence: Synthetic oligonucleotide
  Target: COL7A1; (-) strand; PAM type: NRG; PAM sequence: GGG
ccggtgctcctggtgttgtt

SEQ ID NO: 9878 - DNA, 20 bp, Artificial Sequence
  Description of Artificial Sequence: Synthetic oligonucleotide
  Target: COL7A1; (-) strand; PAM type: NRG; PAM sequence: TGG
cccggtgctcctggtgttgt

SEQ ID NO: 9879 - DNA, 20 bp, Artificial Sequence
  Description of Artificial Sequence: Synthetic oligonucleotide
  Target: COL7A1; (-) strand; PAM type: NRG; PAM sequence: TGG
cctggcctgcccggtgctcc

SEQ ID NO: 9880 - DNA, 20 bp, Artificial Sequence
  Description of Artificial Sequence: Synthetic oligonucleotide
  Target: COL7A1; (-) strand; PAM type: NRG; PAM sequence: CGG
ctgggcctccctggcctgcc

SEQ ID NO: 9881 - DNA, 20 bp, Artificial Sequence
  Description of Artificial Sequence: Synthetic oligonucleotide
  Target: COL7A1; (-) strand; PAM type: NRG; PAM sequence: TGG
cagggagatctgggcctccc

SEQ ID NO: 9882 - DNA, 20 bp, Artificial Sequence
  Description of Artificial Sequence: Synthetic oligonucleotide
  Target: COL7A1; (-) strand; PAM type: NRG; PAM sequence: GGG
tttttatttcagggagatct

SEQ ID NO: 9883 - DNA, 20 bp, Artificial Sequence
  Description of Artificial Sequence: Synthetic oligonucleotide
  Target: COL7A1; (-) strand; PAM type: NRG; PAM sequence: TGG
gtttttatttcagggagatc

SEQ ID NO: 9884 - DNA, 20 bp, Artificial Sequence
  Description of Artificial Sequence: Synthetic oligonucleotide
  Target: COL7A1; (-) strand; PAM type: NRG; PAM sequence: GAG
tttgctgtttttatttcagg

SEQ ID NO: 9885 - DNA, 20 bp, Artificial Sequence
  Description of Artificial Sequence: Synthetic oligonucleotide
  Target: COL7A1; (-) strand; PAM type: NRG; PAM sequence: GGG
cctttgctgtttttatttca

SEQ ID NO: 9886 - DNA, 20 bp, Artificial Sequence
  Description of Artificial Sequence: Synthetic oligonucleotide
  Target: COL7A1; (-) strand; PAM type: NRG; PAM sequence: AGG
ccctttgctgtttttatttc

SEQ ID NO: 9887 - DNA, 20 bp, Artificial Sequence
  Description of Artificial Sequence: Synthetic oligonucleotide
  Target: COL7A1; (-) strand; PAM type: NRG; PAM sequence: CAG
tccctttgctgtttttattt

SEQ ID NO: 9888 - DNA, 20 bp, Artificial Sequence
  Description of Artificial Sequence: Synthetic oligonucleotide
  Target: COL7A1; (-) strand; PAM type: NRG; PAM sequence: GGG
tctgatgagagtcctgggag

SEQ ID NO: 9889 - DNA, 20 bp, Artificial Sequence
  Description of Artificial Sequence: Synthetic oligonucleotide
  Target: COL7A1; (-) strand; PAM type: NRG; PAM sequence: GGG
ttctgatgagagtcctggga

SEQ ID NO: 9890 - DNA, 20 bp, Artificial Sequence
  Description of Artificial Sequence: Synthetic oligonucleotide
  Target: COL7A1; (-) strand; PAM type: NRG; PAM sequence: AGG
gttctgatgagagtcctggg

SEQ ID NO: 9891 - DNA, 20 bp, Artificial Sequence
  Description of Artificial Sequence: Synthetic oligonucleotide
  Target: COL7A1; (-) strand; PAM type: NRG; PAM sequence: GAG
agttctgatgagagtcctgg

SEQ ID NO: 9892 - DNA, 20 bp, Artificial Sequence
  Description of Artificial Sequence: Synthetic oligonucleotide
  Target: COL7A1; (-) strand; PAM type: NRG; PAM sequence: GGG
ggagttctgatgagagtcct

SEQ ID NO: 9893 - DNA, 20 bp, Artificial Sequence
  Description of Artificial Sequence: Synthetic oligonucleotide
  Target: COL7A1; (-) strand; PAM type: NRG; PAM sequence: TGG
gggagttctgatgagagtcc

SEQ ID NO: 9894 - DNA, 20 bp, Artificial Sequence
  Description of Artificial Sequence: Synthetic oligonucleotide
  Target: COL7A1; (-) strand; PAM type: NRG; PAM sequence: GAG
ggaagagggagttctgatga

SEQ ID NO: 9895 - DNA, 20 bp, Artificial Sequence
  Description of Artificial Sequence: Synthetic oligonucleotide
  Target: COL7A1; (-) strand; PAM type: NRG; PAM sequence: GAG
gaggaagagggagttctgat

SEQ ID NO: 9896 - DNA, 20 bp, Artificial Sequence
  Description of Artificial Sequence: Synthetic oligonucleotide
  Target: COL7A1; (-) strand; PAM type: NRG; PAM sequence: GAG
gcccccacaggaggaagagg

SEQ ID NO: 9897 - DNA, 20 bp, Artificial Sequence
  Description of Artificial Sequence: Synthetic oligonucleotide
  Target: COL7A1; (-) strand; PAM type: NRG; PAM sequence: GGG
gggcccccacaggaggaaga

SEQ ID NO: 9898 - DNA, 20 bp, Artificial Sequence
  Description of Artificial Sequence: Synthetic oligonucleotide
  Target: COL7A1; (-) strand; PAM type: NRG; PAM sequence: AGG
cgggcccccacaggaggaag

SEQ ID NO: 9899 - DNA, 20 bp, Artificial Sequence
  Description of Artificial Sequence: Synthetic oligonucleotide
  Target: COL7A1; (-) strand; PAM type: NRG; PAM sequence: GAG
ccgggcccccacaggaggaa

SEQ ID NO: 9900 - DNA, 20 bp, Artificial Sequence
  Description of Artificial Sequence: Synthetic oligonucleotide
  Target: COL7A1; (-) strand; PAM type: NRG; PAM sequence: AAG
ggccgggcccccacaggagg

SEQ ID NO: 9901 - DNA, 20 bp, Artificial Sequence
  Description of Artificial Sequence: Synthetic oligonucleotide
  Target: COL7A1; (-) strand; PAM type: NRG; PAM sequence: AGG
gcaggccgggcccccacagg

SEQ ID NO: 9902 - DNA, 20 bp, Artificial Sequence
  Description of Artificial Sequence: Synthetic oligonucleotide
  Target: COL7A1; (-) strand; PAM type: NRG; PAM sequence: GAG
agcaggccgggcccccacag

SEQ ID NO: 9903 - DNA, 20 bp, Artificial Sequence
  Description of Artificial Sequence: Synthetic oligonucleotide
  Target: COL7A1; (-) strand; PAM type: NRG; PAM sequence: AGG
gcagcaggccgggcccccac

SEQ ID NO: 9904 - DNA, 20 bp, Artificial Sequence
  Description of Artificial Sequence: Synthetic oligonucleotide
  Target: COL7A1; (-) strand; PAM type: NRG; PAM sequence: CAG
ggcagcaggccgggccccca

SEQ ID NO: 9905 - DNA, 20 bp, Artificial Sequence
  Description of Artificial Sequence: Synthetic oligonucleotide
  Target: COL7A1; (-) strand; PAM type: NRG; PAM sequence: GGG
agttgtaggggcagcaggcc

SEQ ID NO: 9906 - DNA, 20 bp, Artificial Sequence
  Description of Artificial Sequence: Synthetic oligonucleotide
  Target: COL7A1; (-) strand; PAM type: NRG; PAM sequence: CGG
cagttgtaggggcagcaggc

SEQ ID NO: 9907 - DNA, 20 bp, Artificial Sequence
  Description of Artificial Sequence: Synthetic oligonucleotide
  Target: COL7A1; (-) strand; PAM type: NRG; PAM sequence: AGG
tcaccagttgtaggggcagc

SEQ ID NO: 9908 - DNA, 20 bp, Artificial Sequence
  Description of Artificial Sequence: Synthetic oligonucleotide
  Target: COL7A1; (-) strand; PAM type: NRG; PAM sequence: CAG
atcaccagttgtaggggcag

SEQ ID NO: 9909 - DNA, 20 bp, Artificial Sequence
  Description of Artificial Sequence: Synthetic oligonucleotide
  Target: COL7A1; (-) strand; PAM type: NRG; PAM sequence: CAG
cccatcaccagttgtagggg

SEQ ID NO: 9910 - DNA, 20 bp, Artificial Sequence
  Description of Artificial Sequence: Synthetic oligonucleotide
  Target: COL7A1; (-) strand; PAM type: NRG; PAM sequence: GGG
tgccccatcaccagttgtag

SEQ ID NO: 9911 - DNA, 20 bp, Artificial Sequence
  Description of Artificial Sequence: Synthetic oligonucleotide
  Target: COL7A1; (-) strand; PAM type: NRG; PAM sequence: GGG
atgccccatcaccagttgta

SEQ ID NO: 9912 - DNA, 20 bp, Artificial Sequence
  Description of Artificial Sequence: Synthetic oligonucleotide
  Target: COL7A1; (-) strand; PAM type: NRG; PAM sequence: AGG
aatgccccatcaccagttgt

SEQ ID NO: 9913 - DNA, 20 bp, Artificial Sequence
  Description of Artificial Sequence: Synthetic oligonucleotide
  Target: COL7A1; (-) strand; PAM type: NRG; PAM sequence: TAG
caatgccccatcaccagttg

SEQ ID NO: 9914 - DNA, 20 bp, Artificial Sequence
  Description of Artificial Sequence: Synthetic oligonucleotide
  Target: COL7A1; (-) strand; PAM type: NRG; PAM sequence: CAG
gtaagtcaatgccccatcac

SEQ ID NO: 9915 - DNA, 20 bp, Artificial Sequence
  Description of Artificial Sequence: Synthetic oligonucleotide
  Target: COL7A1; (-) strand; PAM type: NRG; PAM sequence: AAG
ggccctccaggtgtgaaggt

SEQ ID NO: 9916 - DNA, 20 bp, Artificial Sequence
  Description of Artificial Sequence: Synthetic oligonucleotide
  Target: COL7A1; (-) strand; PAM type: NRG; PAM sequence: AGG
tcctggccctccaggtgtga

SEQ ID NO: 9917 - DNA, 20 bp, Artificial Sequence
  Description of Artificial Sequence: Synthetic oligonucleotide
  Target: COL7A1; (-) strand; PAM type: NRG; PAM sequence: AAG
ctcctggccctccaggtgtg

SEQ ID NO: 9918 - DNA, 20 bp, Artificial Sequence
  Description of Artificial Sequence: Synthetic oligonucleotide
  Target: COL7A1; (-) strand; PAM type: NRG; PAM sequence: AGG
cctgggcctcctggccctcc

SEQ ID NO: 9919 - DNA, 20 bp, Artificial Sequence
  Description of Artificial Sequence: Synthetic oligonucleotide
  Target: COL7A1; (-) strand; PAM type: NRG; PAM sequence: CAG
ccctgggcctcctggccctc

SEQ ID NO: 9920 - DNA, 20 bp, Artificial Sequence
  Description of Artificial Sequence: Synthetic oligonucleotide
  Target: COL7A1; (-) strand; PAM type: NRG; PAM sequence: TGG
ccgggctcccctgggcctcc

SEQ ID NO: 9921 - DNA, 20 bp, Artificial Sequence
  Description of Artificial Sequence: Synthetic oligonucleotide
  Target: COL7A1; (-) strand; PAM type: NRG; PAM sequence: GGG
tcggggtcccgggctcccct

SEQ ID NO: 9922 - DNA, 20 bp, Artificial Sequence
  Description of Artificial Sequence: Synthetic oligonucleotide
  Target: COL7A1; (-) strand; PAM type: NRG; PAM sequence: TGG
gtcggggtcccgggctcccc

SEQ ID NO: 9923 - DNA, 20 bp, Artificial Sequence
  Description of Artificial Sequence: Synthetic oligonucleotide
  Target: COL7A1; (-) strand; PAM type: NRG; PAM sequence: GGG
gacccaggagtcggggtccc

SEQ ID NO: 9924 - DNA, 20 bp, Artificial Sequence
  Description of Artificial Sequence: Synthetic oligonucleotide
  Target: COL7A1; (-) strand; PAM type: NRG; PAM sequence: CGG
tgacccaggagtcggggtcc

SEQ ID NO: 9925 - DNA, 20 bp, Artificial Sequence
  Description of Artificial Sequence: Synthetic oligonucleotide
  Target: COL7A1; (-) strand; PAM type: NRG; PAM sequence: GGG
aaagggtgacccaggagtcg

SEQ ID NO: 9926 - DNA, 20 bp, Artificial Sequence
  Description of Artificial Sequence: Synthetic oligonucleotide
  Target: COL7A1; (-) strand; PAM type: NRG; PAM sequence: GGG
caaagggtgacccaggagtc

SEQ ID NO: 9927 - DNA, 20 bp, Artificial Sequence
  Description of Artificial Sequence: Synthetic oligonucleotide
  Target: COL7A1; (-) strand; PAM type: NRG; PAM sequence: CGG
tcaaagggtgacccaggagt

SEQ ID NO: 9928 - DNA, 20 bp, Artificial Sequence
  Description of Artificial Sequence: Synthetic oligonucleotide
  Target: COL7A1; (-) strand; PAM type: NRG; PAM sequence: GAG
ttcctcaaagggtgacccag

SEQ ID NO: 9929 - DNA, 20 bp, Artificial Sequence
  Description of Artificial Sequence: Synthetic oligonucleotide
  Target: COL7A1; (-) strand; PAM type: NRG; PAM sequence: AGG
ttttcctcaaagggtgaccc

SEQ ID NO: 9930 - DNA, 20 bp, Artificial Sequence
  Description of Artificial Sequence: Synthetic oligonucleotide
  Target: COL7A1; (-) strand; PAM type: NRG; PAM sequence: CAG
cttttcctcaaagggtgacc

SEQ ID NO: 9931 - DNA, 20 bp, Artificial Sequence
  Description of Artificial Sequence: Synthetic oligonucleotide
  Target: COL7A1; (-) strand; PAM type: NRG; PAM sequence: GGG
cgatgcctcttttcctcaaa

SEQ ID NO: 9932 - DNA, 20 bp, Artificial Sequence
  Description of Artificial Sequence: Synthetic oligonucleotide
  Target: COL7A1; (-) strand; PAM type: NRG; PAM sequence: AGG
ccgatgcctcttttcctcaa

SEQ ID NO: 9933 - DNA, 20 bp, Artificial Sequence
  Description of Artificial Sequence: Synthetic oligonucleotide
  Target: COL7A1; (-) strand; PAM type: NRG; PAM sequence: AAG
tccgatgcctcttttcctca

SEQ ID NO: 9934 - DNA, 20 bp, Artificial Sequence
  Description of Artificial Sequence: Synthetic oligonucleotide
  Target: COL7A1; (-) strand; PAM type: NRG; PAM sequence: GAG
tcctggtcgtgagactccct

SEQ ID NO: 9935 - DNA, 20 bp, Artificial Sequence
  Description of Artificial Sequence: Synthetic oligonucleotide
  Target: COL7A1; (-) strand; PAM type: NRG; PAM sequence: GAG
cctgctggggtcctggtcgt

SEQ ID NO: 9936 - DNA, 20 bp, Artificial Sequence
  Description of Artificial Sequence: Synthetic oligonucleotide
  Target: COL7A1; (-) strand; PAM type: NRG; PAM sequence: TGG
aagggtccctgctggggtcc

SEQ ID NO: 9937 - DNA, 20 bp, Artificial Sequence
  Description of Artificial Sequence: Synthetic oligonucleotide
  Target: COL7A1; (-) strand; PAM type: NRG; PAM sequence: GGG
acccagaagggtccctgctg

SEQ ID NO: 9938 - DNA, 20 bp, Artificial Sequence
  Description of Artificial Sequence: Synthetic oligonucleotide
  Target: COL7A1; (-) strand; PAM type: NRG; PAM sequence: GGG
tacccagaagggtccctgct

SEQ ID NO: 9939 - DNA, 20 bp, Artificial Sequence
  Description of Artificial Sequence: Synthetic oligonucleotide
  Target: COL7A1; (-) strand; PAM type: NRG; PAM sequence: TGG
gtacccagaagggtccctgc

SEQ ID NO: 9940 - DNA, 20 bp, Artificial Sequence
  Description of Artificial Sequence: Synthetic oligonucleotide
  Target: COL7A1; (-) strand; PAM type: NRG; PAM sequence: GGG
caaggtatgtgtacccagaa

SEQ ID NO: 9941 - DNA, 20 bp, Artificial Sequence
  Description of Artificial Sequence: Synthetic oligonucleotide
  Target: COL7A1; (-) strand; PAM type: NRG; PAM sequence: AGG
tcaaggtatgtgtacccaga

SEQ ID NO: 9942 - DNA, 20 bp, Artificial Sequence
  Description of Artificial Sequence: Synthetic oligonucleotide
  Target: COL7A1; (-) strand; PAM type: NRG; PAM sequence: AAG
ttcaaggtatgtgtacccag

SEQ ID NO: 9943 - DNA, 20 bp, Artificial Sequence
  Description of Artificial Sequence: Synthetic oligonucleotide
  Target: COL7A1; (-) strand; PAM type: NRG; PAM sequence: CAG
ggtttcaaggtatgtgtacc

SEQ ID NO: 9944 - DNA, 20 bp, Artificial Sequence
  Description of Artificial Sequence: Synthetic oligonucleotide
  Target: COL7A1; (-) strand; PAM type: NRG; PAM sequence: AGG
tccaggacccaaaggtttca

SEQ ID NO: 9945 - DNA, 20 bp, Artificial Sequence
  Description of Artificial Sequence: Synthetic oligonucleotide
  Target: COL7A1; (-) strand; PAM type: NRG; PAM sequence: AAG
ctccaggacccaaaggtttc

SEQ ID NO: 9946 - DNA, 20 bp, Artificial Sequence
  Description of Artificial Sequence: Synthetic oligonucleotide
  Target: COL7A1; (-) strand; PAM type: NRG; PAM sequence: AGG
aaaggggctccaggacccaa

SEQ ID NO: 9947 - DNA, 20 bp, Artificial Sequence
  Description of Artificial Sequence: Synthetic oligonucleotide
  Target: COL7A1; (-) strand; PAM type: NRG; PAM sequence: AAG
gaaaggggctccaggaccca

SEQ ID NO: 9948 - DNA, 20 bp, Artificial Sequence
  Description of Artificial Sequence: Synthetic oligonucleotide
  Target: COL7A1; (-) strand; PAM type: NRG; PAM sequence: AGG
tagggtcagaaaggggctcc

SEQ ID NO: 9949 - DNA, 20 bp, Artificial Sequence
  Description of Artificial Sequence: Synthetic oligonucleotide
  Target: COL7A1; (-) strand; PAM type: NRG; PAM sequence: CAG
ttagggtcagaaaggggctc

SEQ ID NO: 9950 - DNA, 20 bp, Artificial Sequence
  Description of Artificial Sequence: Synthetic oligonucleotide
  Target: COL7A1; (-) strand; PAM type: NRG; PAM sequence: GGG
gttttcttagggtcagaaag

SEQ ID NO: 9951 - DNA, 20 bp, Artificial Sequence
  Description of Artificial Sequence: Synthetic oligonucleotide
  Target: COL7A1; (-) strand; PAM type: NRG; PAM sequence: GGG
ggttttcttagggtcagaaa

SEQ ID NO: 9952 - DNA, 20 bp, Artificial Sequence
  Description of Artificial Sequence: Synthetic oligonucleotide
  Target: COL7A1; (-) strand; PAM type: NRG; PAM sequence: AGG
gggttttcttagggtcagaa

SEQ ID NO: 9953 - DNA, 20 bp, Artificial Sequence
  Description of Artificial Sequence: Synthetic oligonucleotide
  Target: COL7A1; (-) strand; PAM type: NRG; PAM sequence: AAG
tgggttttcttagggtcaga

SEQ ID NO: 9954 - DNA, 20 bp, Artificial Sequence
  Description of Artificial Sequence: Synthetic oligonucleotide
  Target: COL7A1; (-) strand; PAM type: NRG; PAM sequence: CAG
ttgctgggttttcttagggt

SEQ ID NO: 9955 - DNA, 20 bp, Artificial Sequence
  Description of Artificial Sequence: Synthetic oligonucleotide
  Target: COL7A1; (-) strand; PAM type: NRG; PAM sequence: GGG
ctgtttgctgggttttctta

SEQ ID NO: 9956 - DNA, 20 bp, Artificial Sequence
  Description of Artificial Sequence: Synthetic oligonucleotide
  Target: COL7A1; (-) strand; PAM type: NRG; PAM sequence: AGG
gctgtttgctgggttttctt

SEQ ID NO: 9957 - DNA, 20 bp, Artificial Sequence
  Description of Artificial Sequence: Synthetic oligonucleotide
  Target: COL7A1; (-) strand; PAM type: NRG; PAM sequence: TAG
tgctgtttgctgggttttct

SEQ ID NO: 9958 - DNA, 20 bp, Artificial Sequence
  Description of Artificial Sequence: Synthetic oligonucleotide
  Target: COL7A1; (-) strand; PAM type: NRG; PAM sequence: GGG
cctctcaaatgctgtttgct

SEQ ID NO: 9959 - DNA, 20 bp, Artificial Sequence
  Description of Artificial Sequence: Synthetic oligonucleotide
  Target: COL7A1; (-) strand; PAM type: NRG; PAM sequence: TGG
ccctctcaaatgctgtttgc

SEQ ID NO: 9960 - DNA, 20 bp, Artificial Sequence
  Description of Artificial Sequence: Synthetic oligonucleotide
  Target: COL7A1; (-) strand; PAM type: NRG; PAM sequence: CAG
aactcccctgggaatatttt

SEQ ID NO: 9961 - DNA, 20 bp, Artificial Sequence
  Description of Artificial Sequence: Synthetic oligonucleotide
  Target: COL7A1; (-) strand; PAM type: NRG; PAM sequence: GGG
ggtcacatcagaactcccct

SEQ ID NO: 9962 - DNA, 20 bp, Artificial Sequence
  Description of Artificial Sequence: Synthetic oligonucleotide
  Target: COL7A1; (-) strand; PAM type: NRG; PAM sequence: TGG
tggtcacatcagaactcccc

SEQ ID NO: 9963 - DNA, 20 bp, Artificial Sequence
  Description of Artificial Sequence: Synthetic oligonucleotide
  Target: COL7A1; (-) strand; PAM type: NRG; PAM sequence: CAG
ccatgtgttcatggtcacat

SEQ ID NO: 9964 - DNA, 20 bp, Artificial Sequence
  Description of Artificial Sequence: Synthetic oligonucleotide
  Target: COL7A1; (-) strand; PAM type: NRG; PAM sequence: TGG
tctgagttcccatgtgttca

SEQ ID NO: 9965 - DNA, 20 bp, Artificial Sequence
  Description of Artificial Sequence: Synthetic oligonucleotide
  Target: COL7A1; (-) strand; PAM type: NRG; PAM sequence: GAG
caattcttggtcgcatgtct

SEQ ID NO: 9966 - DNA, 20 bp, Artificial Sequence
  Description of Artificial Sequence: Synthetic oligonucleotide
  Target: COL7A1; (-) strand; PAM type: NRG; PAM sequence: TGG
agctcctgtgagccaattct

SEQ ID NO: 9967 - DNA, 20 bp, Artificial Sequence
  Description of Artificial Sequence: Synthetic oligonucleotide
  Target: COL7A1; (-) strand; PAM type: NRG; PAM sequence: GAG
ggtcatgtctgagctcctgt

SEQ ID NO: 9968 - DNA, 20 bp, Artificial Sequence
  Description of Artificial Sequence: Synthetic oligonucleotide
  Target: COL7A1; (-) strand; PAM type: NRG; PAM sequence: GAG
gataggccatggtcatgtct

SEQ ID NO: 9969 - DNA, 20 bp, Artificial Sequence
  Description of Artificial Sequence: Synthetic oligonucleotide
  Target: COL7A1; (-) strand; PAM type: NRG; PAM sequence: TGG
tgctgtcctgagataggcca

SEQ ID NO: 9970 - DNA, 20 bp, Artificial Sequence
  Description of Artificial Sequence: Synthetic oligonucleotide
  Target: COL7A1; (-) strand; PAM type: NRG; PAM sequence: AGG
tgtctgtgctgtcctgagat

SEQ ID NO: 9971 - DNA, 20 bp, Artificial Sequence
  Description of Artificial Sequence: Synthetic oligonucleotide
  Target: COL7A1; (-) strand; PAM type: NRG; PAM sequence: TAG
ctgtctgtgctgtcctgaga

SEQ ID NO: 9972 - DNA, 20 bp, Artificial Sequence
  Description of Artificial Sequence: Synthetic oligonucleotide
  Target: COL7A1; (-) strand; PAM type: NRG; PAM sequence: GAG
ccctctgtctgtgctgtcct

SEQ ID NO: 9973 - DNA, 20 bp, Artificial Sequence
  Description of Artificial Sequence: Synthetic oligonucleotide
  Target: COL7A1; (-) strand; PAM type: NRG; PAM sequence: GAG
acctgtctatggtagtatct

SEQ ID NO: 9974 - DNA, 20 bp, Artificial Sequence
  Description of Artificial Sequence: Synthetic oligonucleotide
  Target: COL7A1; (-) strand; PAM type: NRG; PAM sequence: TAG
gaactcccacctgtctatgg

SEQ ID NO: 9975 - DNA, 20 bp, Artificial Sequence
  Description of Artificial Sequence: Synthetic oligonucleotide
  Target: COL7A1; (-) strand; PAM type: NRG; PAM sequence: TGG
cctgaactcccacctgtcta

SEQ ID NO: 9976 - DNA, 20 bp, Artificial Sequence
  Description of Artificial Sequence: Synthetic oligonucleotide
  Target: COL7A1; (-) strand; PAM type: NRG; PAM sequence: GGG
agatgtctgcactcgcgtgt

SEQ ID NO: 9977 - DNA, 20 bp, Artificial Sequence
  Description of Artificial Sequence: Synthetic oligonucleotide
  Target: COL7A1; (-) strand; PAM type: NRG; PAM sequence: TGG
cagatgtctgcactcgcgtg

SEQ ID NO: 9978 - DNA, 20 bp, Artificial Sequence
  Description of Artificial Sequence: Synthetic oligonucleotide
  Target: COL7A1; (-) strand; PAM type: NRG; PAM sequence: CAG
cgcactcacgtctgtggagc

SEQ ID NO: 9979 - DNA, 20 bp, Artificial Sequence
  Description of Artificial Sequence: Synthetic oligonucleotide
  Target: COL7A1; (-) strand; PAM type: NRG; PAM sequence: GAG
tgtccgcactcacgtctgtg

SEQ ID NO: 9980 - DNA, 20 bp, Artificial Sequence
  Description of Artificial Sequence: Synthetic oligonucleotide
  Target: COL7A1; (-) strand; PAM type: NRG; PAM sequence: TGG
tgtgtccgcactcacgtctg

SEQ ID NO: 9981 - DNA, 20 bp, Artificial Sequence
  Description of Artificial Sequence: Synthetic oligonucleotide
  Target: COL7A1; (-) strand; PAM type: NRG; PAM sequence: GAG
acgtgttggggttcccctct

SEQ ID NO: 9982 - DNA, 20 bp, Artificial Sequence
  Description of Artificial Sequence: Synthetic oligonucleotide
  Target: COL7A1; (-) strand; PAM type: NRG; PAM sequence: GGG
acccgggagtggacgtgttg

SEQ ID NO: 9983 - DNA, 20 bp, Artificial Sequence
  Description of Artificial Sequence: Synthetic oligonucleotide
  Target: COL7A1; (-) strand; PAM type: NRG; PAM sequence: GGG
tacccgggagtggacgtgtt

SEQ ID NO: 9984 - DNA, 20 bp, Artificial Sequence
  Description of Artificial Sequence: Synthetic oligonucleotide
  Target: COL7A1; (-) strand; PAM type: NRG; PAM sequence: TGG
ctacccgggagtggacgtgt

SEQ ID NO: 9985 - DNA, 20 bp, Artificial Sequence
  Description of Artificial Sequence: Synthetic oligonucleotide
  Target: COL7A1; (-) strand; PAM type: NRG; PAM sequence: TGG
atgcctgctctacccgggag

SEQ ID NO: 9986 - DNA, 20 bp, Artificial Sequence
  Description of Artificial Sequence: Synthetic oligonucleotide
  Target: COL7A1; (-) strand; PAM type: NRG; PAM sequence: GAG
gccatgcctgctctacccgg

SEQ ID NO: 9987 - DNA, 20 bp, Artificial Sequence
  Description of Artificial Sequence: Synthetic oligonucleotide
  Target: COL7A1; (-) strand; PAM type: NRG; PAM sequence: GGG
tggccatgcctgctctaccc

SEQ ID NO: 9988 - DNA, 20 bp, Artificial Sequence
  Description of Artificial Sequence: Synthetic oligonucleotide
  Target: COL7A1; (-) strand; PAM type: NRG; PAM sequence: CGG
gtggccatgcctgctctacc

SEQ ID NO: 9989 - DNA, 20 bp, Artificial Sequence
  Description of Artificial Sequence: Synthetic oligonucleotide
  Target: COL7A1; (-) strand; PAM type: NRG; PAM sequence: TGG
ggctgccagcgttcagcctg

SEQ ID NO: 9990 - DNA, 20 bp, Artificial Sequence
  Description of Artificial Sequence: Synthetic oligonucleotide
  Target: COL7A1; (-) strand; PAM type: NRG; PAM sequence: CAG
tgcccctggctgccagcgtt

SEQ ID NO: 9991 - DNA, 20 bp, Artificial Sequence
  Description of Artificial Sequence: Synthetic oligonucleotide
  Target: COL7A1; (-) strand; PAM type: NRG; PAM sequence: CAG
tttcccctgcccctggctgc

SEQ ID NO: 9992 - DNA, 20 bp, Artificial Sequence
  Description of Artificial Sequence: Synthetic oligonucleotide
  Target: COL7A1; (-) strand; PAM type: NRG; PAM sequence: TGG
atcctcctttcccctgcccc

SEQ ID NO: 9993 - DNA, 20 bp, Artificial Sequence
  Description of Artificial Sequence: Synthetic oligonucleotide
  Target: COL7A1; (-) strand; PAM type: NRG; PAM sequence: TGG
agttcttgtgaacctctcct

SEQ ID NO: 9994 - DNA, 20 bp, Artificial Sequence
  Description of Artificial Sequence: Synthetic oligonucleotide
  Target: COL7A1; (-) strand; PAM type: NRG; PAM sequence: GAG
ccagatcccaggacacacct

SEQ ID NO: 9995 - DNA, 20 bp, Artificial Sequence
  Description of Artificial Sequence: Synthetic oligonucleotide
  Target: COL7A1; (-) strand; PAM type: NRG; PAM sequence: AGG
ggtctgatctcccagatccc

SEQ ID NO: 9996 - DNA, 20 bp, Artificial Sequence
  Description of Artificial Sequence: Synthetic oligonucleotide
  Target: COL7A1; (-) strand; PAM type: NRG; PAM sequence: CAG
tggtctgatctcccagatcc

SEQ ID NO: 9997 - DNA, 20 bp, Artificial Sequence
  Description of Artificial Sequence: Synthetic oligonucleotide
  Target: COL7A1; (-) strand; PAM type: NRG; PAM sequence: CAG
tgtgctctggtctgatctcc

SEQ ID NO: 9998 - DNA, 20 bp, Artificial Sequence
  Description of Artificial Sequence: Synthetic oligonucleotide
  Target: COL7A1; (-) strand; PAM type: NRG; PAM sequence: TGG
atctgggcacacgtgtgctc

SEQ ID NO: 9999 - DNA, 20 bp, Artificial Sequence
  Description of Artificial Sequence: Synthetic oligonucleotide
  Target: COL7A1; (-) strand; PAM type: NRG; PAM sequence: GGG
gtctgtttctcaccacatct

SEQ ID NO: 10000 - DNA, 20 bp, Artificial Sequence
  Description of Artificial Sequence: Synthetic oligonucleotide
  Target: COL7A1; (-) strand; PAM type: NRG; PAM sequence: TGG
ggtctgtttctcaccacatc

SEQ ID NO: 10001 - DNA, 20 bp, Artificial Sequence
  Description of Artificial Sequence: Synthetic oligonucleotide
  Target: COL7A1; (-) strand; PAM type: NRG; PAM sequence: TGG
ggcttctgtgtgcccatcct

SEQ ID NO: 10002 - DNA, 20 bp, Artificial Sequence
  Description of Artificial Sequence: Synthetic oligonucleotide
  Target: COL7A1; (-) strand; PAM type: NRG; PAM sequence: TGG
gagctctgggggccctgtct

SEQ ID NO: 10003 - DNA, 20 bp, Artificial Sequence
  Description of Artificial Sequence: Synthetic oligonucleotide
  Target: COL7A1; (-) strand; PAM type: NRG; PAM sequence: GGG
ttccacactctgagctctgg

SEQ ID NO: 10004 - DNA, 20 bp, Artificial Sequence
  Description of Artificial Sequence: Synthetic oligonucleotide
  Target: COL7A1; (-) strand; PAM type: NRG; PAM sequence: GGG
cttccacactctgagctctg

SEQ ID NO: 10005 - DNA, 20 bp, Artificial Sequence
  Description of Artificial Sequence: Synthetic oligonucleotide
  Target: COL7A1; (-) strand; PAM type: NRG; PAM sequence: GGG
gcttccacactctgagctct

SEQ ID NO: 10006 - DNA, 20 bp, Artificial Sequence
  Description of Artificial Sequence: Synthetic oligonucleotide
  Target: COL7A1; (-) strand; PAM type: NRG; PAM sequence: TGG
ggcttccacactctgagctc

SEQ ID NO: 10007 - DNA, 20 bp, Artificial Sequence
  Description of Artificial Sequence: Synthetic oligonucleotide
  Target: COL7A1; (-) strand; PAM type: NRG; PAM sequence: GAG
actgtcggcttccacactct

SEQ ID NO: 10008 - DNA, 20 bp, Artificial Sequence
  Description of Artificial Sequence: Synthetic oligonucleotide
  Target: COL7A1; (-) strand; PAM type: NRG; PAM sequence: CGG
cacagggagccacacactgt

SEQ ID NO: 10009 - DNA, 20 bp, Artificial Sequence
  Description of Artificial Sequence: Synthetic oligonucleotide
  Target: COL7A1; (-) strand; PAM type: NRG; PAM sequence: GAG
cctgctctctggatcacagg

SEQ ID NO: 10010 - DNA, 20 bp, Artificial Sequence
  Description of Artificial Sequence: Synthetic oligonucleotide
  Target: COL7A1; (-) strand; PAM type: NRG; PAM sequence: GGG
agcctgctctctggatcaca

SEQ ID NO: 10011 - DNA, 20 bp, Artificial Sequence
  Description of Artificial Sequence: Synthetic oligonucleotide
  Target: COL7A1; (-) strand; PAM type: NRG; PAM sequence: AGG
gagcctgctctctggatcac

SEQ ID NO: 10012 - DNA, 20 bp, Artificial Sequence
  Description of Artificial Sequence: Synthetic oligonucleotide
  Target: COL7A1; (-) strand; PAM type: NRG; PAM sequence: CAG
ggagcctgctctctggatca

SEQ ID NO: 10013 - DNA, 20 bp, Artificial Sequence
  Description of Artificial Sequence: Synthetic oligonucleotide
  Target: COL7A1; (-) strand; PAM type: NRG; PAM sequence: TGG
acatccaggagcctgctctc

SEQ ID NO: 10014 - DNA, 20 bp, Artificial Sequence
  Description of Artificial Sequence: Synthetic oligonucleotide
  Target: COL7A1; (-) strand; PAM type: NRG; PAM sequence: GAG
ctgcatgtcccaacatccag

SEQ ID NO: 10015 - DNA, 20 bp, Artificial Sequence
  Description of Artificial Sequence: Synthetic oligonucleotide
  Target: COL7A1; (-) strand; PAM type: NRG; PAM sequence: AGG
ggctgcatgtcccaacatcc

SEQ ID NO: 10016 - DNA, 20 bp, Artificial Sequence
  Description of Artificial Sequence: Synthetic oligonucleotide
  Target: COL7A1; (-) strand; PAM type: NRG; PAM sequence: CAG
gggctgcatgtcccaacatc

SEQ ID NO: 10017 - DNA, 20 bp, Artificial Sequence
  Description of Artificial Sequence: Synthetic oligonucleotide
  Target: COL7A1; (-) strand; PAM type: NRG; PAM sequence: GGG
catgtctgagcccctgagtc

SEQ ID NO: 10018 - DNA, 20 bp, Artificial Sequence
  Description of Artificial Sequence: Synthetic oligonucleotide
  Target: COL7A1; (-) strand; PAM type: NRG; PAM sequence: CGG
acatgtctgagcccctgagt

SEQ ID NO: 10019 - DNA, 20 bp, Artificial Sequence
  Description of Artificial Sequence: Synthetic oligonucleotide
  Target: COL7A1; (-) strand; PAM type: NRG; PAM sequence: GAG
gggcacatgtctgagcccct

SEQ ID NO: 10020 - DNA, 20 bp, Artificial Sequence
  Description of Artificial Sequence: Synthetic oligonucleotide
  Target: COL7A1; (-) strand; PAM type: NRG; PAM sequence: GAG
ttgggccggggcacatgtct

SEQ ID NO: 10021 - DNA, 20 bp, Artificial Sequence
  Description of Artificial Sequence: Synthetic oligonucleotide
  Target: COL7A1; (-) strand; PAM type: NRG; PAM sequence: GGG
aaggggccactcttgggccg

SEQ ID NO: 10022 - DNA, 20 bp, Artificial Sequence
  Description of Artificial Sequence: Synthetic oligonucleotide
  Target: COL7A1; (-) strand; PAM type: NRG; PAM sequence: GGG
taaggggccactcttgggcc

SEQ ID NO: 10023 - DNA, 20 bp, Artificial Sequence
  Description of Artificial Sequence: Synthetic oligonucleotide
  Target: COL7A1; (-) strand; PAM type: NRG; PAM sequence: CGG
ataaggggccactcttgggc

SEQ ID NO: 10024 - DNA, 20 bp, Artificial Sequence
  Description of Artificial Sequence: Synthetic oligonucleotide
  Target: COL7A1; (-) strand; PAM type: NRG; PAM sequence: GGG
gggcataaggggccactctt

SEQ ID NO: 10025 - DNA, 20 bp, Artificial Sequence
  Description of Artificial Sequence: Synthetic oligonucleotide
  Target: COL7A1; (-) strand; PAM type: NRG; PAM sequence: TGG
cgggcataaggggccactct

SEQ ID NO: 10026 - DNA, 20 bp, Artificial Sequence
  Description of Artificial Sequence: Synthetic oligonucleotide
  Target: COL7A1; (-) strand; PAM type: NRG; PAM sequence: GGG
agtgtgatggcgggcataag

SEQ ID NO: 10027 - DNA, 20 bp, Artificial Sequence
  Description of Artificial Sequence: Synthetic oligonucleotide
  Target: COL7A1; (-) strand; PAM type: NRG; PAM sequence: GGG
gagtgtgatggcgggcataa

SEQ ID NO: 10028 - DNA, 20 bp, Artificial Sequence
  Description of Artificial Sequence: Synthetic oligonucleotide
  Target: COL7A1; (-) strand; PAM type: NRG; PAM sequence: AGG
ggagtgtgatggcgggcata

SEQ ID NO: 10029 - DNA, 20 bp, Artificial Sequence
  Description of Artificial Sequence: Synthetic oligonucleotide
  Target: COL7A1; (-) strand; PAM type: NRG; PAM sequence: AAG
aggagtgtgatggcgggcat

SEQ ID NO: 10030 - DNA, 20 bp, Artificial Sequence
  Description of Artificial Sequence: Synthetic oligonucleotide
  Target: COL7A1; (-) strand; PAM type: NRG; PAM sequence: GGG
ggcctgaggagtgtgatggc

SEQ ID NO: 10031 - DNA, 20 bp, Artificial Sequence
  Description of Artificial Sequence: Synthetic oligonucleotide
  Target: COL7A1; (-) strand; PAM type: NRG; PAM sequence: CGG
tggcctgaggagtgtgatgg

SEQ ID NO: 10032 - DNA, 20 bp, Artificial Sequence
  Description of Artificial Sequence: Synthetic oligonucleotide
  Target: COL7A1; (-) strand; PAM type: NRG; PAM sequence: TGG
gcctggcctgaggagtgtga

SEQ ID NO: 10033 - DNA, 20 bp, Artificial Sequence
  Description of Artificial Sequence: Synthetic oligonucleotide
  Target: COL7A1; (-) strand; PAM type: NRG; PAM sequence: GAG
aagggcgagcctggcctgag

SEQ ID NO: 10034 - DNA, 20 bp, Artificial Sequence
  Description of Artificial Sequence: Synthetic oligonucleotide
  Target: COL7A1; (-) strand; PAM type: NRG; PAM sequence: AGG
gcaagggcgagcctggcctg

SEQ ID NO: 10035 - DNA, 20 bp, Artificial Sequence
  Description of Artificial Sequence: Synthetic oligonucleotide
  Target: COL7A1; (-) strand; PAM type: NRG; PAM sequence: GAG
ggcaagggcgagcctggcct

SEQ ID NO: 10036 - DNA, 20 bp, Artificial Sequence
  Description of Artificial Sequence: Synthetic oligonucleotide
  Target: COL7A1; (-) strand; PAM type: NRG; PAM sequence: TGG
ggcctaggcaagggcgagcc

SEQ ID NO: 10037 - DNA, 20 bp, Artificial Sequence
  Description of Artificial Sequence: Synthetic oligonucleotide
  Target: COL7A1; (-) strand; PAM type: NRG; PAM sequence: GAG
tccggggcctaggcaagggc

SEQ ID NO: 10038 - DNA, 20 bp, Artificial Sequence
  Description of Artificial Sequence: Synthetic oligonucleotide
  Target: COL7A1; (-) strand; PAM type: NRG; PAM sequence: GGG
tgagtccggggcctaggcaa

SEQ ID NO: 10039 - DNA, 20 bp, Artificial Sequence
  Description of Artificial Sequence: Synthetic oligonucleotide
  Target: COL7A1; (-) strand; PAM type: NRG; PAM sequence: AGG
gtgagtccggggcctaggca

SEQ ID NO: 10040 - DNA, 20 bp, Artificial Sequence
  Description of Artificial Sequence: Synthetic oligonucleotide
  Target: COL7A1; (-) strand; PAM type: NRG; PAM sequence: AAG
tgtgagtccggggcctaggc

SEQ ID NO: 10041 - DNA, 20 bp, Artificial Sequence
  Description of Artificial Sequence: Synthetic oligonucleotide
  Target: COL7A1; (-) strand; PAM type: NRG; PAM sequence: AGG
aagatgtgagtccggggcct

SEQ ID NO: 10042 - DNA, 20 bp, Artificial Sequence
  Description of Artificial Sequence: Synthetic oligonucleotide
  Target: COL7A1; (-) strand; PAM type: NRG; PAM sequence: TAG
gaagatgtgagtccggggcc

SEQ ID NO: 10043 - DNA, 20 bp, Artificial Sequence
  Description of Artificial Sequence: Synthetic oligonucleotide
  Target: COL7A1; (-) strand; PAM type: NRG; PAM sequence: GGG
ctggggaagatgtgagtccg

SEQ ID NO: 10044 - DNA, 20 bp, Artificial Sequence
  Description of Artificial Sequence: Synthetic oligonucleotide
  Target: COL7A1; (-) strand; PAM type: NRG; PAM sequence: GGG
cctggggaagatgtgagtcc

SEQ ID NO: 10045 - DNA, 20 bp, Artificial Sequence
  Description of Artificial Sequence: Synthetic oligonucleotide
  Target: COL7A1; (-) strand; PAM type: NRG; PAM sequence: CGG
ccctggggaagatgtgagtc

SEQ ID NO: 10046 - DNA, 20 bp, Artificial Sequence
  Description of Artificial Sequence: Synthetic oligonucleotide
  Target: COL7A1; (-) strand; PAM type: NRG; PAM sequence: GAG
ggagaccctggggaagatgt

SEQ ID NO: 10047 - DNA, 20 bp, Artificial Sequence
  Description of Artificial Sequence: Synthetic oligonucleotide
  Target: COL7A1; (-) strand; PAM type: NRG; PAM sequence: AAG
ggagcccggagaccctgggg

SEQ ID NO: 10048 - DNA, 20 bp, Artificial Sequence
  Description of Artificial Sequence: Synthetic oligonucleotide
  Target: COL7A1; (-) strand; PAM type: NRG; PAM sequence: GGG
aggggagcccggagaccctg

SEQ ID NO: 10049 - DNA, 20 bp, Artificial Sequence
  Description of Artificial Sequence: Synthetic oligonucleotide
  Target: COL7A1; (-) strand; PAM type: NRG; PAM sequence: GGG
caggggagcccggagaccct

SEQ ID NO: 10050 - DNA, 20 bp, Artificial Sequence
  Description of Artificial Sequence: Synthetic oligonucleotide
  Target: COL7A1; (-) strand; PAM type: NRG; PAM sequence: TGG
gcaggggagcccggagaccc

SEQ ID NO: 10051 - DNA, 20 bp, Artificial Sequence
  Description of Artificial Sequence: Synthetic oligonucleotide
  Target: COL7A1; (-) strand; PAM type: NRG; PAM sequence: GAG
tggccgtgcaggggagcccg

SEQ ID NO: 10052 - DNA, 20 bp, Artificial Sequence
  Description of Artificial Sequence: Synthetic oligonucleotide
  Target: COL7A1; (-) strand; PAM type: NRG; PAM sequence: CGG
gctggccgtgcaggggagcc

SEQ ID NO: 10053 - DNA, 20 bp, Artificial Sequence
  Description of Artificial Sequence: Synthetic oligonucleotide
  Target: COL7A1; (-) strand; PAM type: NRG; PAM sequence: GAG
gtgaagctggccgtgcaggg

SEQ ID NO: 10054 - DNA, 20 bp, Artificial Sequence
  Description of Artificial Sequence: Synthetic oligonucleotide
  Target: COL7A1; (-) strand; PAM type: NRG; PAM sequence: GGG
gggtgaagctggccgtgcag

SEQ ID NO: 10055 - DNA, 20 bp, Artificial Sequence
  Description of Artificial Sequence: Synthetic oligonucleotide
  Target: COL7A1; (-) strand; PAM type: NRG; PAM sequence: GGG
agggtgaagctggccgtgca

SEQ ID NO: 10056 - DNA, 20 bp, Artificial Sequence
  Description of Artificial Sequence: Synthetic oligonucleotide
  Target: COL7A1; (-) strand; PAM type: NRG; PAM sequence: AGG
cagggtgaagctggccgtgc

SEQ ID NO: 10057 - DNA, 20 bp, Artificial Sequence
  Description of Artificial Sequence: Synthetic oligonucleotide
  Target: COL7A1; (-) strand; PAM type: NRG; PAM sequence: CAG
gcagggtgaagctggccgtg

SEQ ID NO: 10058 - DNA, 20 bp, Artificial Sequence
  Description of Artificial Sequence: Synthetic oligonucleotide
  Target: COL7A1; (-) strand; PAM type: NRG; PAM sequence: TGG
cattctgtgcagggtgaagc

SEQ ID NO: 10059 - DNA, 20 bp, Artificial Sequence
  Description of Artificial Sequence: Synthetic oligonucleotide
  Target: COL7A1; (-) strand; PAM type: NRG; PAM sequence: AAG
ctgccattctgtgcagggtg

SEQ ID NO: 10060 - DNA, 20 bp, Artificial Sequence
  Description of Artificial Sequence: Synthetic oligonucleotide
  Target: COL7A1; (-) strand; PAM type: NRG; PAM sequence: GGG
ctcacctgccattctgtgca

SEQ ID NO: 10061 - DNA, 20 bp, Artificial Sequence
  Description of Artificial Sequence: Synthetic oligonucleotide
  Target: COL7A1; (-) strand; PAM type: NRG; PAM sequence: AGG
cctcacctgccattctgtgc

SEQ ID NO: 10062 - DNA, 20 bp, Artificial Sequence
  Description of Artificial Sequence: Synthetic oligonucleotide
  Target: COL7A1; (-) strand; PAM type: NRG; PAM sequence: CAG
ccctcacctgccattctgtg

SEQ ID NO: 10063 - DNA, 20 bp, Artificial Sequence
  Description of Artificial Sequence: Synthetic oligonucleotide
  Target: COL7A1; (-) strand; PAM type: NRG; PAM sequence: CAG
tgagcagagaaggctcagtc

SEQ ID NO: 10064 - DNA, 20 bp, Artificial Sequence
  Description of Artificial Sequence: Synthetic oligonucleotide
  Target: COL7A1; (-) strand; PAM type: NRG; PAM sequence: CAG
actactgagcagagaaggct

SEQ ID NO: 10065 - DNA, 20 bp, Artificial Sequence
  Description of Artificial Sequence: Synthetic oligonucleotide
  Target: COL7A1; (-) strand; PAM type: NRG; PAM sequence: AGG
gcctgactactgagcagaga

SEQ ID NO: 10066 - DNA, 20 bp, Artificial Sequence
  Description of Artificial Sequence: Synthetic oligonucleotide
  Target: COL7A1; (-) strand; PAM type: NRG; PAM sequence: AAG
ggcctgactactgagcagag

SEQ ID NO: 10067 - DNA, 20 bp, Artificial Sequence
  Description of Artificial Sequence: Synthetic oligonucleotide
  Target: COL7A1; (-) strand; PAM type: NRG; PAM sequence: GAG
tggggcctgactactgagca

SEQ ID NO: 10068 - DNA, 20 bp, Artificial Sequence
  Description of Artificial Sequence: Synthetic oligonucleotide
  Target: COL7A1; (-) strand; PAM type: NRG; PAM sequence: CAG
cctggggcctgactactgag

SEQ ID NO: 10069 - DNA, 20 bp, Artificial Sequence
  Description of Artificial Sequence: Synthetic oligonucleotide
  Target: COL7A1; (-) strand; PAM type: NRG; PAM sequence: GAG
ggccctggggcctgactact

SEQ ID NO: 10070 - DNA, 20 bp, Artificial Sequence
  Description of Artificial Sequence: Synthetic oligonucleotide
  Target: COL7A1; (-) strand; PAM type: NRG; PAM sequence: GGG
ggtgaggtgggttggccctg

SEQ ID NO: 10071 - DNA, 20 bp, Artificial Sequence
  Description of Artificial Sequence: Synthetic oligonucleotide
  Target: COL7A1; (-) strand; PAM type: NRG; PAM sequence: GGG
aggtgaggtgggttggccct

SEQ ID NO: 10072 - DNA, 20 bp, Artificial Sequence
  Description of Artificial Sequence: Synthetic oligonucleotide
  Target: COL7A1; (-) strand; PAM type: NRG; PAM sequence: TGG
aaggtgaggtgggttggccc

SEQ ID NO: 10073 - DNA, 20 bp, Artificial Sequence
  Description of Artificial Sequence: Synthetic oligonucleotide
  Target: COL7A1; (-) strand; PAM type: NRG; PAM sequence: TGG
ggcgagaaggtgaggtgggt

SEQ ID NO: 10074 - DNA, 20 bp, Artificial Sequence
  Description of Artificial Sequence: Synthetic oligonucleotide
  Target: COL7A1; (-) strand; PAM type: NRG; PAM sequence: GGG
gcgaggcgagaaggtgaggt

SEQ ID NO: 10075 - DNA, 20 bp, Artificial Sequence
  Description of Artificial Sequence: Synthetic oligonucleotide
  Target: COL7A1; (-) strand; PAM type: NRG; PAM sequence: TGG
cgcgaggcgagaaggtgagg

SEQ ID NO: 10076 - DNA, 20 bp, Artificial Sequence
  Description of Artificial Sequence: Synthetic oligonucleotide
  Target: COL7A1; (-) strand; PAM type: NRG; PAM sequence: AGG
ggccgcgaggcgagaaggtg

SEQ ID NO: 10077 - DNA, 20 bp, Artificial Sequence
  Description of Artificial Sequence: Synthetic oligonucleotide
  Target: COL7A1; (-) strand; PAM type: NRG; PAM sequence: GAG
gggccgcgaggcgagaaggt

SEQ ID NO: 10078 - DNA, 20 bp, Artificial Sequence
  Description of Artificial Sequence: Synthetic oligonucleotide
  Target: COL7A1; (-) strand; PAM type: NRG; PAM sequence: AGG
gccagggccgcgaggcgaga

SEQ ID NO: 10079 - DNA, 20 bp, Artificial Sequence
  Description of Artificial Sequence: Synthetic oligonucleotide
  Target: COL7A1; (-) strand; PAM type: NRG; PAM sequence: AAG
tgccagggccgcgaggcgag

SEQ ID NO: 10080 - DNA, 20 bp, Artificial Sequence
  Description of Artificial Sequence: Synthetic oligonucleotide
  Target: COL7A1; (-) strand; PAM type: NRG; PAM sequence: GAG
gactgccagggccgcgaggc

SEQ ID NO: 10081 - DNA, 20 bp, Artificial Sequence
  Description of Artificial Sequence: Synthetic oligonucleotide
  Target: COL7A1; (-) strand; PAM type: NRG; PAM sequence: AGG
cgaggactgccagggccgcg

SEQ ID NO: 10082 - DNA, 20 bp, Artificial Sequence
  Description of Artificial Sequence: Synthetic oligonucleotide
  Target: COL7A1; (-) strand; PAM type: NRG; PAM sequence: GAG
ccgaggactgccagggccgc

SEQ ID NO: 10083 - DNA, 20 bp, Artificial Sequence
  Description of Artificial Sequence: Synthetic oligonucleotide
  Target: COL7A1; (-) strand; PAM type: NRG; PAM sequence: GGG
aaggtgaccgaggactgcca

SEQ ID NO: 10084 - DNA, 20 bp, Artificial Sequence
  Description of Artificial Sequence: Synthetic oligonucleotide
  Target: COL7A1; (-) strand; PAM type: NRG; PAM sequence: AGG
aaaggtgaccgaggactgcc

SEQ ID NO: 10085 - DNA, 20 bp, Artificial Sequence
  Description of Artificial Sequence: Synthetic oligonucleotide
  Target: COL7A1; (-) strand; PAM type: NRG; PAM sequence: CAG
caaaggtgaccgaggactgc

SEQ ID NO: 10086 - DNA, 20 bp, Artificial Sequence
  Description of Artificial Sequence: Synthetic oligonucleotide
  Target: COL7A1; (-) strand; PAM type: NRG; PAM sequence: AGG
cagggagccaaaggtgaccg

SEQ ID NO: 10087 - DNA, 20 bp, Artificial Sequence
  Description of Artificial Sequence: Synthetic oligonucleotide
  Target: COL7A1; (-) strand; PAM type: NRG; PAM sequence: GAG
acagggagccaaaggtgacc

SEQ ID NO: 10088 - DNA, 20 bp, Artificial Sequence
  Description of Artificial Sequence: Synthetic oligonucleotide
  Target: COL7A1; (-) strand; PAM type: NRG; PAM sequence: AGG
ctctgtcaacagggagccaa

SEQ ID NO: 10089 - DNA, 20 bp, Artificial Sequence
  Description of Artificial Sequence: Synthetic oligonucleotide
  Target: COL7A1; (-) strand; PAM type: NRG; PAM sequence: AAG
cctctgtcaacagggagcca

SEQ ID NO: 10090 - DNA, 20 bp, Artificial Sequence
  Description of Artificial Sequence: Synthetic oligonucleotide
  Target: COL7A1; (-) strand; PAM type: NRG; PAM sequence: GAG
tcctgacctctgtcaacagg

SEQ ID NO: 10091 - DNA, 20 bp, Artificial Sequence
  Description of Artificial Sequence: Synthetic oligonucleotide
  Target: COL7A1; (-) strand; PAM type: NRG; PAM sequence: GGG
cctcctgacctctgtcaaca

SEQ ID NO: 10092 - DNA, 20 bp, Artificial Sequence
  Description of Artificial Sequence: Synthetic oligonucleotide
  Target: COL7A1; (-) strand; PAM type: NRG; PAM sequence: AGG
gcctcctgacctctgtcaac

SEQ ID NO: 10093 - DNA, 20 bp, Artificial Sequence
  Description of Artificial Sequence: Synthetic oligonucleotide
  Target: COL7A1; (-) strand; PAM type: NRG; PAM sequence: CAG
tgcctcctgacctctgtcaa

SEQ ID NO: 10094 - DNA, 20 bp, Artificial Sequence
  Description of Artificial Sequence: Synthetic oligonucleotide
  Target: COL7A1; (-) strand; PAM type: NRG; PAM sequence: GAG
tggccccatgcctccctccg

SEQ ID NO: 10095 - DNA, 20 bp, Artificial Sequence
  Description of Artificial Sequence: Synthetic oligonucleotide
  Target: COL7A1; (-) strand; PAM type: NRG; PAM sequence: CGG
tctggccccatgcctccctc

SEQ ID NO: 10096 - DNA, 20 bp, Artificial Sequence
  Description of Artificial Sequence: Synthetic oligonucleotide
  Target: COL7A1; (-) strand; PAM type: NRG; PAM sequence: TGG
tagaccgcatatttaagctc

SEQ ID NO: 10097 - DNA, 20 bp, Artificial Sequence
  Description of Artificial Sequence: Synthetic oligonucleotide
  Target: COL7A1; (-) strand; PAM type: NRG; PAM sequence: AAG
tcatagtagaccgcatattt

SEQ ID NO: 10098 - DNA, 20 bp, Artificial Sequence
  Description of Artificial Sequence: Synthetic oligonucleotide
  Target: COL7A1; (-) strand; PAM type: NRG; PAM sequence: TAG
atgaccctcagctttcatag

SEQ ID NO: 10099 - DNA, 20 bp, Artificial Sequence
  Description of Artificial Sequence: Synthetic oligonucleotide
  Target: COL7A1; (-) strand; PAM type: NRG; PAM sequence: TAG
ctcatgaccctcagctttca

SEQ ID NO: 10100 - DNA, 20 bp, Artificial Sequence
  Description of Artificial Sequence: Synthetic oligonucleotide
  Target: COL7A1; (-) strand; PAM type: NRG; PAM sequence: CAG
ttacccaccctcatgaccct

SEQ ID NO: 10101 - DNA, 20 bp, Artificial Sequence
  Description of Artificial Sequence: Synthetic oligonucleotide
  Target: COL7A1; (-) strand; PAM type: NRG; PAM sequence: TAG
aacttctgaccttcgaccca

SEQ ID NO: 10102 - DNA, 20 bp, Artificial Sequence
  Description of Artificial Sequence: Synthetic oligonucleotide
  Target: COL7A1; (-) strand; PAM type: NRG; PAM sequence: TGG
tgggggtcctgtctctccag

SEQ ID NO: 10103 - DNA, 20 bp, Artificial Sequence
  Description of Artificial Sequence: Synthetic oligonucleotide
  Target: COL7A1; (-) strand; PAM type: NRG; PAM sequence: CAG
ttctgggggtcctgtctctc

SEQ ID NO: 10104 - DNA, 20 bp, Artificial Sequence
  Description of Artificial Sequence: Synthetic oligonucleotide
  Target: COL7A1; (-) strand; PAM type: NRG; PAM sequence: GGG
tctgacagcagatgttctgg

SEQ ID NO: 10105 - DNA, 20 bp, Artificial Sequence
  Description of Artificial Sequence: Synthetic oligonucleotide
  Target: COL7A1; (-) strand; PAM type: NRG; PAM sequence: GGG
ttctgacagcagatgttctg

SEQ ID NO: 10106 - DNA, 20 bp, Artificial Sequence
  Description of Artificial Sequence: Synthetic oligonucleotide
  Target: COL7A1; (-) strand; PAM type: NRG; PAM sequence: GGG
cttctgacagcagatgttct

SEQ ID NO: 10107 - DNA, 20 bp, Artificial Sequence
  Description of Artificial Sequence: Synthetic oligonucleotide
  Target: COL7A1; (-) strand; PAM type: NRG; PAM sequence: TGG
acttctgacagcagatgttc

SEQ ID NO: 10108 - DNA, 20 bp, Artificial Sequence
  Description of Artificial Sequence: Synthetic oligonucleotide
  Target: COL7A1; (-) strand; PAM type: NRG; PAM sequence: CAG
aagtagggaacttctgacag

SEQ ID NO: 10109 - DNA, 20 bp, Artificial Sequence
  Description of Artificial Sequence: Synthetic oligonucleotide
  Target: COL7A1; (-) strand; PAM type: NRG; PAM sequence: CAG
ggtaagtagggaacttctga

SEQ ID NO: 10110 - DNA, 20 bp, Artificial Sequence
  Description of Artificial Sequence: Synthetic oligonucleotide
  Target: COL7A1; (-) strand; PAM type: NRG; PAM sequence: GGG
ggtgggtgagccggtaagta

SEQ ID NO: 10111 - DNA, 20 bp, Artificial Sequence
  Description of Artificial Sequence: Synthetic oligonucleotide
  Target: COL7A1; (-) strand; PAM type: NRG; PAM sequence: AGG
tggtgggtgagccggtaagt

SEQ ID NO: 10112 - DNA, 20 bp, Artificial Sequence
  Description of Artificial Sequence: Synthetic oligonucleotide
  Target: COL7A1; (-) strand; PAM type: NRG; PAM sequence: TAG
ctggtgggtgagccggtaag

SEQ ID NO: 10113 - DNA, 20 bp, Artificial Sequence
  Description of Artificial Sequence: Synthetic oligonucleotide
  Target: COL7A1; (-) strand; PAM type: NRG; PAM sequence: AAG
gacctggtgggtgagccggt

SEQ ID NO: 10114 - DNA, 20 bp, Artificial Sequence
  Description of Artificial Sequence: Synthetic oligonucleotide
  Target: COL7A1; (-) strand; PAM type: NRG; PAM sequence: CGG
tggagacctggtgggtgagc

SEQ ID NO: 10115 - DNA, 20 bp, Artificial Sequence
  Description of Artificial Sequence: Synthetic oligonucleotide
  Target: COL7A1; (-) strand; PAM type: NRG; PAM sequence: GAG
ttgctggagacctggtgggt

SEQ ID NO: 10116 - DNA, 20 bp, Artificial Sequence
  Description of Artificial Sequence: Synthetic oligonucleotide
  Target: COL7A1; (-) strand; PAM type: NRG; PAM sequence: GGG
ggccttgctggagacctggt

SEQ ID NO: 10117 - DNA, 20 bp, Artificial Sequence
  Description of Artificial Sequence: Synthetic oligonucleotide
  Target: COL7A1; (-) strand; PAM type: NRG; PAM sequence: TGG
aggccttgctggagacctgg

SEQ ID NO: 10118 - DNA, 20 bp, Artificial Sequence
  Description of Artificial Sequence: Synthetic oligonucleotide
  Target: COL7A1; (-) strand; PAM type: NRG; PAM sequence: TGG
tggaggccttgctggagacc

SEQ ID NO: 10119 - DNA, 20 bp, Artificial Sequence
  Description of Artificial Sequence: Synthetic oligonucleotide
  Target: COL7A1; (-) strand; PAM type: NRG; PAM sequence: GAG
agcccctggaggccttgctg

SEQ ID NO: 10120 - DNA, 20 bp, Artificial Sequence
  Description of Artificial Sequence: Synthetic oligonucleotide
  Target: COL7A1; (-) strand; PAM type: NRG; PAM sequence: TGG
ggagcccctggaggccttgc

SEQ ID NO: 10121 - DNA, 20 bp, Artificial Sequence
  Description of Artificial Sequence: Synthetic oligonucleotide
  Target: COL7A1; (-) strand; PAM type: NRG; PAM sequence: AGG
ccttaccagggagcccctgg

SEQ ID NO: 10122 - DNA, 20 bp, Artificial Sequence
  Description of Artificial Sequence: Synthetic oligonucleotide
  Target: COL7A1; (-) strand; PAM type: NRG; PAM sequence: GAG
cccttaccagggagcccctg

SEQ ID NO: 10123 - DNA, 20 bp, Artificial Sequence
  Description of Artificial Sequence: Synthetic oligonucleotide
  Target: COL7A1; (-) strand; PAM type: NRG; PAM sequence: TGG
cccccttaccagggagcccc

SEQ ID NO: 10124 - DNA, 20 bp, Artificial Sequence
  Description of Artificial Sequence: Synthetic oligonucleotide
  Target: COL7A1; (-) strand; PAM type: NRG; PAM sequence: GAG
gacctctcccccttaccagg

SEQ ID NO: 10125 - DNA, 20 bp, Artificial Sequence
  Description of Artificial Sequence: Synthetic oligonucleotide
  Target: COL7A1; (-) strand; PAM type: NRG; PAM sequence: GGG
ctgacctctcccccttacca

SEQ ID NO: 10126 - DNA, 20 bp, Artificial Sequence
  Description of Artificial Sequence: Synthetic oligonucleotide
  Target: COL7A1; (-) strand; PAM type: NRG; PAM sequence: AGG
actgacctctcccccttacc

SEQ ID NO: 10127 - DNA, 20 bp, Artificial Sequence
  Description of Artificial Sequence: Synthetic oligonucleotide
  Target: COL7A1; (-) strand; PAM type: NRG; PAM sequence: CAG
cactgacctctcccccttac

SEQ ID NO: 10128 - DNA, 20 bp, Artificial Sequence
  Description of Artificial Sequence: Synthetic oligonucleotide
  Target: COL7A1; (-) strand; PAM type: NRG; PAM sequence: AGG
gggtcaactggtgggggcca

SEQ ID NO: 10129 - DNA, 20 bp, Artificial Sequence
  Description of Artificial Sequence: Synthetic oligonucleotide
  Target: COL7A1; (-) strand; PAM type: NRG; PAM sequence: AAG
ggggtcaactggtgggggcc

SEQ ID NO: 10130 - DNA, 20 bp, Artificial Sequence
  Description of Artificial Sequence: Synthetic oligonucleotide
  Target: COL7A1; (-) strand; PAM type: NRG; PAM sequence: GGG
gagggggggtcaactggtgg

SEQ ID NO: 10131 - DNA, 20 bp, Artificial Sequence
  Description of Artificial Sequence: Synthetic oligonucleotide
  Target: COL7A1; (-) strand; PAM type: NRG; PAM sequence: GGG
tgagggggggtcaactggtg

SEQ ID NO: 10132 - DNA, 20 bp, Artificial Sequence
  Description of Artificial Sequence: Synthetic oligonucleotide
  Target: COL7A1; (-) strand; PAM type: NRG; PAM sequence: GGG
gtgagggggggtcaactggt

SEQ ID NO: 10133 - DNA, 20 bp, Artificial Sequence
  Description of Artificial Sequence: Synthetic oligonucleotide
  Target: COL7A1; (-) strand; PAM type: NRG; PAM sequence: TGG
agtgagggggggtcaactgg

SEQ ID NO: 10134 - DNA, 20 bp, Artificial Sequence
  Description of Artificial Sequence: Synthetic oligonucleotide
  Target: COL7A1; (-) strand; PAM type: NRG; PAM sequence: TGG
gccagtgagggggggtcaac

SEQ ID NO: 10135 - DNA, 20 bp, Artificial Sequence
  Description of Artificial Sequence: Synthetic oligonucleotide
  Target: COL7A1; (-) strand; PAM type: NRG; PAM sequence: GGG
gtggggctgccagtgagggg

SEQ ID NO: 10136 - DNA, 20 bp, Artificial Sequence
  Description of Artificial Sequence: Synthetic oligonucleotide
  Target: COL7A1; (-) strand; PAM type: NRG; PAM sequence: GGG
tgtggggctgccagtgaggg

SEQ ID NO: 10137 - DNA, 20 bp, Artificial Sequence
  Description of Artificial Sequence: Synthetic oligonucleotide
  Target: COL7A1; (-) strand; PAM type: NRG; PAM sequence: GGG
gtgtggggctgccagtgagg

SEQ ID NO: 10138 - DNA, 20 bp, Artificial Sequence
  Description of Artificial Sequence: Synthetic oligonucleotide
  Target: COL7A1; (-) strand; PAM type: NRG; PAM sequence: GGG
tgtgtggggctgccagtgag

SEQ ID NO: 10139 - DNA, 20 bp, Artificial Sequence
  Description of Artificial Sequence: Synthetic oligonucleotide
  Target: COL7A1; (-) strand; PAM type: NRG; PAM sequence: GGG
gtgtgtggggctgccagtga

SEQ ID NO: 10140 - DNA, 20 bp, Artificial Sequence
  Description of Artificial Sequence: Synthetic oligonucleotide
  Target: COL7A1; (-) strand; PAM type: NRG; PAM sequence: AGG
tgtgtgtggggctgccagtg

SEQ ID NO: 10141 - DNA, 20 bp, Artificial Sequence
  Description of Artificial Sequence: Synthetic oligonucleotide
  Target: COL7A1; (-) strand; PAM type: NRG; PAM sequence: GAG
gtgtgtgtggggctgccagt

SEQ ID NO: 10142 - DNA, 20 bp, Artificial Sequence
  Description of Artificial Sequence: Synthetic oligonucleotide
  Target: COL7A1; (-) strand; PAM type: NRG; PAM sequence: CAG
gtgagtgtgtgtggggctgc

SEQ ID NO: 10143 - DNA, 20 bp, Artificial Sequence
  Description of Artificial Sequence: Synthetic oligonucleotide
  Target: COL7A1; (-) strand; PAM type: NRG; PAM sequence: GGG
agagaaggtgagtgtgtgtg

SEQ ID NO: 10144 - DNA, 20 bp, Artificial Sequence
  Description of Artificial Sequence: Synthetic oligonucleotide
  Target: COL7A1; (-) strand; PAM type: NRG; PAM sequence: GGG
gagagaaggtgagtgtgtgt

SEQ ID NO: 10145 - DNA, 20 bp, Artificial Sequence
  Description of Artificial Sequence: Synthetic oligonucleotide
  Target: COL7A1; (-) strand; PAM type: NRG; PAM sequence: TGG
ggagagaaggtgagtgtgtg

SEQ ID NO: 10146 - DNA, 20 bp, Artificial Sequence
  Description of Artificial Sequence: Synthetic oligonucleotide
  Target: COL7A1; (-) strand; PAM type: NRG; PAM sequence: GAG
ggagcaaagggagagaaggt

SEQ ID NO: 10147 - DNA, 20 bp, Artificial Sequence
  Description of Artificial Sequence: Synthetic oligonucleotide
  Target: COL7A1; (-) strand; PAM type: NRG; PAM sequence: AGG
ccctggagcaaagggagaga

SEQ ID NO: 10148 - DNA, 20 bp, Artificial Sequence
  Description of Artificial Sequence: Synthetic oligonucleotide
  Target: COL7A1; (-) strand; PAM type: NRG; PAM sequence: AAG
tccctggagcaaagggagag

SEQ ID NO: 10149 - DNA, 20 bp, Artificial Sequence
  Description of Artificial Sequence: Synthetic oligonucleotide
  Target: COL7A1; (-) strand; PAM type: NRG; PAM sequence: GAG
ggctccctggagcaaaggga

SEQ ID NO: 10150 - DNA, 20 bp, Artificial Sequence
  Description of Artificial Sequence: Synthetic oligonucleotide
  Target: COL7A1; (-) strand; PAM type: NRG; PAM sequence: GAG
cgggctccctggagcaaagg

SEQ ID NO: 10151 - DNA, 20 bp, Artificial Sequence
  Description of Artificial Sequence: Synthetic oligonucleotide
  Target: COL7A1; (-) strand; PAM type: NRG; PAM sequence: GGG
gtcgggctccctggagcaaa

SEQ ID NO: 10152 - DNA, 20 bp, Artificial Sequence
  Description of Artificial Sequence: Synthetic oligonucleotide
  Target: COL7A1; (-) strand; PAM type: NRG; PAM sequence: AGG
ggtcgggctccctggagcaa

SEQ ID NO: 10153 - DNA, 20 bp, Artificial Sequence
  Description of Artificial Sequence: Synthetic oligonucleotide
  Target: COL7A1; (-) strand; PAM type: NRG; PAM sequence: AAG
tggtcgggctccctggagca

SEQ ID NO: 10154 - DNA, 20 bp, Artificial Sequence
  Description of Artificial Sequence: Synthetic oligonucleotide
  Target: COL7A1; (-) strand; PAM type: NRG; PAM sequence: GAG
ggctgtggtcgggctccctg

SEQ ID NO: 10155 - DNA, 20 bp, Artificial Sequence
  Description of Artificial Sequence: Synthetic oligonucleotide
  Target: COL7A1; (-) strand; PAM type: NRG; PAM sequence: TGG
caggctgtggtcgggctccc

SEQ ID NO: 10156 - DNA, 20 bp, Artificial Sequence
  Description of Artificial Sequence: Synthetic oligonucleotide
  Target: COL7A1; (-) strand; PAM type: NRG; PAM sequence: GGG
attccccacaggctgtggtc

SEQ ID NO: 10157 - DNA, 20 bp, Artificial Sequence
  Description of Artificial Sequence: Synthetic oligonucleotide
  Target: COL7A1; (-) strand; PAM type: NRG; PAM sequence: CGG
cattccccacaggctgtggt

SEQ ID NO: 10158 - DNA, 20 bp, Artificial Sequence
  Description of Artificial Sequence: Synthetic oligonucleotide
  Target: COL7A1; (-) strand; PAM type: NRG; PAM sequence: TGG
ctagcattccccacaggctg

SEQ ID NO: 10159 - DNA, 20 bp, Artificial Sequence
  Description of Artificial Sequence: Synthetic oligonucleotide
  Target: COL7A1; (-) strand; PAM type: NRG; PAM sequence: AGG
aactcactagcattccccac

SEQ ID NO: 10160 - DNA, 20 bp, Artificial Sequence
  Description of Artificial Sequence: Synthetic oligonucleotide
  Target: COL7A1; (-) strand; PAM type: NRG; PAM sequence: CAG
aaactcactagcattcccca

SEQ ID NO: 10161 - DNA, 20 bp, Artificial Sequence
  Description of Artificial Sequence: Synthetic oligonucleotide
  Target: COL7A1; (-) strand; PAM type: NRG; PAM sequence: TAG
gggaggaggaggaaactcac

SEQ ID NO: 10162 - DNA, 20 bp, Artificial Sequence
  Description of Artificial Sequence: Synthetic oligonucleotide
  Target: COL7A1; (-) strand; PAM type: NRG; PAM sequence: AGG
ggtgggggcgggggaggagg

SEQ ID NO: 10163 - DNA, 20 bp, Artificial Sequence
  Description of Artificial Sequence: Synthetic oligonucleotide
  Target: COL7A1; (-) strand; PAM type: NRG; PAM sequence: GAG
gggtgggggcgggggaggag

SEQ ID NO: 10164 - DNA, 20 bp, Artificial Sequence
  Description of Artificial Sequence: Synthetic oligonucleotide
  Target: COL7A1; (-) strand; PAM type: NRG; PAM sequence: AGG
cagggtgggggcgggggagg

SEQ ID NO: 10165 - DNA, 20 bp, Artificial Sequence
  Description of Artificial Sequence: Synthetic oligonucleotide
  Target: COL7A1; (-) strand; PAM type: NRG; PAM sequence: GAG
gcagggtgggggcgggggag

SEQ ID NO: 10166 - DNA, 20 bp, Artificial Sequence
  Description of Artificial Sequence: Synthetic oligonucleotide
  Target: COL7A1; (-) strand; PAM type: NRG; PAM sequence: AGG
tggcagggtgggggcggggg

SEQ ID NO: 10167 - DNA, 20 bp, Artificial Sequence
  Description of Artificial Sequence: Synthetic oligonucleotide
  Target: COL7A1; (-) strand; PAM type: NRG; PAM sequence: GAG
gtggcagggtgggggcgggg

SEQ ID NO: 10168 - DNA, 20 bp, Artificial Sequence
  Description of Artificial Sequence: Synthetic oligonucleotide
  Target: COL7A1; (-) strand; PAM type: NRG; PAM sequence: GGG
gggtggcagggtgggggcgg

SEQ ID NO: 10169 - DNA, 20 bp, Artificial Sequence
  Description of Artificial Sequence: Synthetic oligonucleotide
  Target: COL7A1; (-) strand; PAM type: NRG; PAM sequence: GGG
ggggtggcagggtgggggcg

SEQ ID NO: 10170 - DNA, 20 bp, Artificial Sequence
  Description of Artificial Sequence: Synthetic oligonucleotide
  Target: COL7A1; (-) strand; PAM type: NRG; PAM sequence: GGG
gggggtggcagggtgggggc

SEQ ID NO: 10171 - DNA, 20 bp, Artificial Sequence
  Description of Artificial Sequence: Synthetic oligonucleotide
  Target: COL7A1; (-) strand; PAM type: NRG; PAM sequence: CGG
tgggggtggcagggtggggg

SEQ ID NO: 10172 - DNA, 20 bp, Artificial Sequence
  Description of Artificial Sequence: Synthetic oligonucleotide
  Target: COL7A1; (-) strand; PAM type: NRG; PAM sequence: GGG
ccatgggggtggcagggtgg

SEQ ID NO: 10173 - DNA, 20 bp, Artificial Sequence
  Description of Artificial Sequence: Synthetic oligonucleotide
  Target: COL7A1; (-) strand; PAM type: NRG; PAM sequence: GGG
gccatgggggtggcagggtg

SEQ ID NO: 10174 - DNA, 20 bp, Artificial Sequence
  Description of Artificial Sequence: Synthetic oligonucleotide
  Target: COL7A1; (-) strand; PAM type: NRG; PAM sequence: GGG
tgccatgggggtggcagggt

SEQ ID NO: 10175 - DNA, 20 bp, Artificial Sequence
  Description of Artificial Sequence: Synthetic oligonucleotide
  Target: COL7A1; (-) strand; PAM type: NRG; PAM sequence: TGG
atgccatgggggtggcaggg

SEQ ID NO: 10176 - DNA, 20 bp, Artificial Sequence
  Description of Artificial Sequence: Synthetic oligonucleotide
  Target: COL7A1; (-) strand; PAM type: NRG; PAM sequence: GGG
caaatgccatgggggtggca

SEQ ID NO: 10177 - DNA, 20 bp, Artificial Sequence
  Description of Artificial Sequence: Synthetic oligonucleotide
  Target: COL7A1; (-) strand; PAM type: NRG; PAM sequence: AGG
ccaaatgccatgggggtggc

SEQ ID NO: 10178 - DNA, 20 bp, Artificial Sequence
  Description of Artificial Sequence: Synthetic oligonucleotide
  Target: COL7A1; (-) strand; PAM type: NRG; PAM sequence: CAG
tccaaatgccatgggggtgg

SEQ ID NO: 10179 - DNA, 20 bp, Artificial Sequence
  Description of Artificial Sequence: Synthetic oligonucleotide
  Target: COL7A1; (-) strand; PAM type: NRG; PAM sequence: TGG
gtttccaaatgccatggggg

SEQ ID NO: 10180 - DNA, 20 bp, Artificial Sequence
  Description of Artificial Sequence: Synthetic oligonucleotide
  Target: COL7A1; (-) strand; PAM type: NRG; PAM sequence: GGG
cctgtttccaaatgccatgg

SEQ ID NO: 10181 - DNA, 20 bp, Artificial Sequence
  Description of Artificial Sequence: Synthetic oligonucleotide
  Target: COL7A1; (-) strand; PAM type: NRG; PAM sequence: GGG
gcctgtttccaaatgccatg

SEQ ID NO: 10182 - DNA, 20 bp, Artificial Sequence
  Description of Artificial Sequence: Synthetic oligonucleotide
  Target: COL7A1; (-) strand; PAM type: NRG; PAM sequence: GGG
agcctgtttccaaatgccat

SEQ ID NO: 10183 - DNA, 20 bp, Artificial Sequence
  Description of Artificial Sequence: Synthetic oligonucleotide
  Target: COL7A1; (-) strand; PAM type: NRG; PAM sequence: TGG
aagcctgtttccaaatgcca

SEQ ID NO: 10184 - DNA, 20 bp, Artificial Sequence
  Description of Artificial Sequence: Synthetic oligonucleotide
  Target: COL7A1; (-) strand; PAM type: NRG; PAM sequence: AAG
aactcctctgcctcacccac

SEQ ID NO: 10185 - DNA, 20 bp, Artificial Sequence
  Description of Artificial Sequence: Synthetic oligonucleotide
  Target: COL7A1; (-) strand; PAM type: NRG; PAM sequence: CAG
accctgacttccaccccctg

SEQ ID NO: 10186 - DNA, 20 bp, Artificial Sequence
  Description of Artificial Sequence: Synthetic oligonucleotide
  Target: COL7A1; (-) strand; PAM type: NRG; PAM sequence: AGG
ccccacgggggcccctggac

SEQ ID NO: 10187 - DNA, 20 bp, Artificial Sequence
  Description of Artificial Sequence: Synthetic oligonucleotide
  Target: COL7A1; (-) strand; PAM type: NRG; PAM sequence: CAG
gccccacgggggcccctgga

SEQ ID NO: 10188 - DNA, 20 bp, Artificial Sequence
  Description of Artificial Sequence: Synthetic oligonucleotide
  Target: COL7A1; (-) strand; PAM type: NRG; PAM sequence: TGG
cctggccccacgggggcccc

SEQ ID NO: 10189 - DNA, 20 bp, Artificial Sequence
  Description of Artificial Sequence: Synthetic oligonucleotide
  Target: COL7A1; (-) strand; PAM type: NRG; PAM sequence: GGG
aggagaacctggccccacgg

SEQ ID NO: 10190 - DNA, 20 bp, Artificial Sequence
  Description of Artificial Sequence: Synthetic oligonucleotide
  Target: COL7A1; (-) strand; PAM type: NRG; PAM sequence: GGG
aaggagaacctggccccacg

SEQ ID NO: 10191 - DNA, 20 bp, Artificial Sequence
  Description of Artificial Sequence: Synthetic oligonucleotide
  Target: COL7A1; (-) strand; PAM type: NRG; PAM sequence: GGG
aaaggagaacctggccccac

SEQ ID NO: 10192 - DNA, 20 bp, Artificial Sequence
  Description of Artificial Sequence: Synthetic oligonucleotide
  Target: COL7A1; (-) strand; PAM type: NRG; PAM sequence: CGG
taaaggagaacctggcccca

SEQ ID NO: 10193 - DNA, 20 bp, Artificial Sequence
  Description of Artificial Sequence: Synthetic oligonucleotide
  Target: COL7A1; (-) strand; PAM type: NRG; PAM sequence: TGG
gtcggacctaaaggagaacc

SEQ ID NO: 10194 - DNA, 20 bp, Artificial Sequence
  Description of Artificial Sequence: Synthetic oligonucleotide
  Target: COL7A1; (-) strand; PAM type: NRG; PAM sequence: GAG
tggccctgtcggacctaaag

SEQ ID NO: 10195 - DNA, 20 bp, Artificial Sequence
  Description of Artificial Sequence: Synthetic oligonucleotide
  Target: COL7A1; (-) strand; PAM type: NRG; PAM sequence: AGG
cctggccctgtcggacctaa

SEQ ID NO: 10196 - DNA, 20 bp, Artificial Sequence
  Description of Artificial Sequence: Synthetic oligonucleotide
  Target: COL7A1; (-) strand; PAM type: NRG; PAM sequence: AAG
gcctggccctgtcggaccta

SEQ ID NO: 10197 - DNA, 20 bp, Artificial Sequence
  Description of Artificial Sequence: Synthetic oligonucleotide
  Target: COL7A1; (-) strand; PAM type: NRG; PAM sequence: CGG
ccaggtctgcctggccctgt

SEQ ID NO: 10198 - DNA, 20 bp, Artificial Sequence
  Description of Artificial Sequence: Synthetic oligonucleotide
  Target: COL7A1; (-) strand; PAM type: NRG; PAM sequence: TGG
taggggtcaccaggtctgcc

SEQ ID NO: 10199 - DNA, 20 bp, Artificial Sequence
  Description of Artificial Sequence: Synthetic oligonucleotide
  Target: COL7A1; (-) strand; PAM type: NRG; PAM sequence: AGG
gctctgccataggggtcacc

SEQ ID NO: 10200 - DNA, 20 bp, Artificial Sequence
  Description of Artificial Sequence: Synthetic oligonucleotide
  Target: COL7A1; (-) strand; PAM type: NRG; PAM sequence: CAG
tgctctgccataggggtcac

SEQ ID NO: 10201 - DNA, 20 bp, Artificial Sequence
  Description of Artificial Sequence: Synthetic oligonucleotide
  Target: COL7A1; (-) strand; PAM type: NRG; PAM sequence: GGG
ctcacgctgctctgccatag

SEQ ID NO: 10202 - DNA, 20 bp, Artificial Sequence
  Description of Artificial Sequence: Synthetic oligonucleotide
  Target: COL7A1; (-) strand; PAM type: NRG; PAM sequence: GGG
cctcacgctgctctgccata

SEQ ID NO: 10203 - DNA, 20 bp, Artificial Sequence
  Description of Artificial Sequence: Synthetic oligonucleotide
  Target: COL7A1; (-) strand; PAM type: NRG; PAM sequence: AGG
tcctcacgctgctctgccat

SEQ ID NO: 10204 - DNA, 20 bp, Artificial Sequence
  Description of Artificial Sequence: Synthetic oligonucleotide
  Target: COL7A1; (-) strand; PAM type: NRG; PAM sequence: TAG
ttcctcacgctgctctgcca

SEQ ID NO: 10205 - DNA, 20 bp, Artificial Sequence
  Description of Artificial Sequence: Synthetic oligonucleotide
  Target: COL7A1; (-) strand; PAM type: NRG; PAM sequence: GAG
ggtggtggtggagaggcact

SEQ ID NO: 10206 - DNA, 20 bp, Artificial Sequence
  Description of Artificial Sequence: Synthetic oligonucleotide
  Target: COL7A1; (-) strand; PAM type: NRG; PAM sequence: AGG
cagcaggggtggtggtggag

SEQ ID NO: 10207 - DNA, 20 bp, Artificial Sequence
  Description of Artificial Sequence: Synthetic oligonucleotide
  Target: COL7A1; (-) strand; PAM type: NRG; PAM sequence: GAG
gcagcaggggtggtggtgga

SEQ ID NO: 10208 - DNA, 20 bp, Artificial Sequence
  Description of Artificial Sequence: Synthetic oligonucleotide
  Target: COL7A1; (-) strand; PAM type: NRG; PAM sequence: GAG
gggcagcaggggtggtggtg

SEQ ID NO: 10209 - DNA, 20 bp, Artificial Sequence
  Description of Artificial Sequence: Synthetic oligonucleotide
  Target: COL7A1; (-) strand; PAM type: NRG; PAM sequence: TGG
tggggcagcaggggtggtgg

SEQ ID NO: 10210 - DNA, 20 bp, Artificial Sequence
  Description of Artificial Sequence: Synthetic oligonucleotide
  Target: COL7A1; (-) strand; PAM type: NRG; PAM sequence: TGG
gagtggggcagcaggggtgg

SEQ ID NO: 10211 - DNA, 20 bp, Artificial Sequence
  Description of Artificial Sequence: Synthetic oligonucleotide
  Target: COL7A1; (-) strand; PAM type: NRG; PAM sequence: TGG
gaggagtggggcagcagggg

SEQ ID NO: 10212 - DNA, 20 bp, Artificial Sequence
  Description of Artificial Sequence: Synthetic oligonucleotide
  Target: COL7A1; (-) strand; PAM type: NRG; PAM sequence: GGG
tatgaggagtggggcagcag

SEQ ID NO: 10213 - DNA, 20 bp, Artificial Sequence
  Description of Artificial Sequence: Synthetic oligonucleotide
  Target: COL7A1; (-) strand; PAM type: NRG; PAM sequence: GGG
atatgaggagtggggcagca

SEQ ID NO: 10214 - DNA, 20 bp, Artificial Sequence
  Description of Artificial Sequence: Synthetic oligonucleotide
  Target: COL7A1; (-) strand; PAM type: NRG; PAM sequence: AGG
aatatgaggagtggggcagc

SEQ ID NO: 10215 - DNA, 20 bp, Artificial Sequence
  Description of Artificial Sequence: Synthetic oligonucleotide
  Target: COL7A1; (-) strand; PAM type: NRG; PAM sequence: CAG
aaatatgaggagtggggcag

SEQ ID NO: 10216 - DNA, 20 bp, Artificial Sequence
  Description of Artificial Sequence: Synthetic oligonucleotide
  Target: COL7A1; (-) strand; PAM type: NRG; PAM sequence: CAG
ctgaaatatgaggagtgggg

SEQ ID NO: 10217 - DNA, 20 bp, Artificial Sequence
  Description of Artificial Sequence: Synthetic oligonucleotide
  Target: COL7A1; (-) strand; PAM type: NRG; PAM sequence: GGG
ggcctgaaatatgaggagtg

SEQ ID NO: 10218 - DNA, 20 bp, Artificial Sequence
  Description of Artificial Sequence: Synthetic oligonucleotide
  Target: COL7A1; (-) strand; PAM type: NRG; PAM sequence: GGG
gggcctgaaatatgaggagt

SEQ ID NO: 10219 - DNA, 20 bp, Artificial Sequence
  Description of Artificial Sequence: Synthetic oligonucleotide
  Target: COL7A1; (-) strand; PAM type: NRG; PAM sequence: TGG
tgggcctgaaatatgaggag

SEQ ID NO: 10220 - DNA, 20 bp, Artificial Sequence
  Description of Artificial Sequence: Synthetic oligonucleotide
  Target: COL7A1; (-) strand; PAM type: NRG; PAM sequence: GAG
ctgtgggcctgaaatatgag

SEQ ID NO: 10221 - DNA, 20 bp, Artificial Sequence
  Description of Artificial Sequence: Synthetic oligonucleotide
  Target: COL7A1; (-) strand; PAM type: NRG; PAM sequence: AGG
agctgtgggcctgaaatatg

SEQ ID NO: 10222 - DNA, 20 bp, Artificial Sequence
  Description of Artificial Sequence: Synthetic oligonucleotide
  Target: COL7A1; (-) strand; PAM type: NRG; PAM sequence: GAG
cagctgtgggcctgaaatat

SEQ ID NO: 10223 - DNA, 20 bp, Artificial Sequence
  Description of Artificial Sequence: Synthetic oligonucleotide
  Target: COL7A1; (-) strand; PAM type: NRG; PAM sequence: GGG
agggtgtggtgcccagctgt

SEQ ID NO: 10224 - DNA, 20 bp, Artificial Sequence
  Description of Artificial Sequence: Synthetic oligonucleotide
  Target: COL7A1; (-) strand; PAM type: NRG; PAM sequence: TGG
tagggtgtggtgcccagctg

SEQ ID NO: 10225 - DNA, 20 bp, Artificial Sequence
  Description of Artificial Sequence: Synthetic oligonucleotide
  Target: COL7A1; (-) strand; PAM type: NRG; PAM sequence: CAG
gctcgctagggtgtggtgcc

SEQ ID NO: 10226 - DNA, 20 bp, Artificial Sequence
  Description of Artificial Sequence: Synthetic oligonucleotide
  Target: COL7A1; (-) strand; PAM type: NRG; PAM sequence: TGG
gggggcagctcgctagggtg

SEQ ID NO: 10227 - DNA, 20 bp, Artificial Sequence
  Description of Artificial Sequence: Synthetic oligonucleotide
  Target: COL7A1; (-) strand; PAM type: NRG; PAM sequence: GGG
gttctgggggcagctcgcta

SEQ ID NO: 10228 - DNA, 20 bp, Artificial Sequence
  Description of Artificial Sequence: Synthetic oligonucleotide
  Target: COL7A1; (-) strand; PAM type: NRG; PAM sequence: AGG
tgttctgggggcagctcgct

SEQ ID NO: 10229 - DNA, 20 bp, Artificial Sequence
  Description of Artificial Sequence: Synthetic oligonucleotide
  Target: COL7A1; (-) strand; PAM type: NRG; PAM sequence: TAG
gtgttctgggggcagctcgc

SEQ ID NO: 10230 - DNA, 20 bp, Artificial Sequence
  Description of Artificial Sequence: Synthetic oligonucleotide
  Target: COL7A1; (-) strand; PAM type: NRG; PAM sequence: CAG
gccagtatgtgttctggggg

SEQ ID NO: 10231 - DNA, 20 bp, Artificial Sequence
  Description of Artificial Sequence: Synthetic oligonucleotide
  Target: COL7A1; (-) strand; PAM type: NRG; PAM sequence: GGG
tgtgccagtatgtgttctgg

SEQ ID NO: 10232 - DNA, 20 bp, Artificial Sequence
  Description of Artificial Sequence: Synthetic oligonucleotide
  Target: COL7A1; (-) strand; PAM type: NRG; PAM sequence: GGG
gtgtgccagtatgtgttctg

SEQ ID NO: 10233 - DNA, 20 bp, Artificial Sequence
  Description of Artificial Sequence: Synthetic oligonucleotide
  Target: COL7A1; (-) strand; PAM type: NRG; PAM sequence: GGG
ggtgtgccagtatgtgttct

SEQ ID NO: 10234 - DNA, 20 bp, Artificial Sequence
  Description of Artificial Sequence: Synthetic oligonucleotide
  Target: COL7A1; (-) strand; PAM type: NRG; PAM sequence: TGG
tggtgtgccagtatgtgttc

SEQ ID NO: 10235 - DNA, 20 bp, Artificial Sequence
  Description of Artificial Sequence: Synthetic oligonucleotide
  Target: COL7A1; (-) strand; PAM type: NRG; PAM sequence: CAG
cagagggagccctggtgtgc

SEQ ID NO: 10236 - DNA, 20 bp, Artificial Sequence
  Description of Artificial Sequence: Synthetic oligonucleotide
  Target: COL7A1; (-) strand; PAM type: NRG; PAM sequence: TGG
gatggagacagagggagccc

SEQ ID NO: 10237 - DNA, 20 bp, Artificial Sequence
  Description of Artificial Sequence: Synthetic oligonucleotide
  Target: COL7A1; (-) strand; PAM type: NRG; PAM sequence: GAG
ggaaaagatggagacagagg

SEQ ID NO: 10238 - DNA, 20 bp, Artificial Sequence
  Description of Artificial Sequence: Synthetic oligonucleotide
  Target: COL7A1; (-) strand; PAM type: NRG; PAM sequence: GGG
gtggaaaagatggagacaga

SEQ ID NO: 10239 - DNA, 20 bp, Artificial Sequence
  Description of Artificial Sequence: Synthetic oligonucleotide
  Target: COL7A1; (-) strand; PAM type: NRG; PAM sequence: AGG
agtggaaaagatggagacag

SEQ ID NO: 10240 - DNA, 20 bp, Artificial Sequence
  Description of Artificial Sequence: Synthetic oligonucleotide
  Target: COL7A1; (-) strand; PAM type: NRG; PAM sequence: GAG
cagtggaaaagatggagaca

SEQ ID NO: 10241 - DNA, 20 bp, Artificial Sequence
  Description of Artificial Sequence: Synthetic oligonucleotide
  Target: COL7A1; (-) strand; PAM type: NRG; PAM sequence: CAG
gccagtggaaaagatggaga

SEQ ID NO: 10242 - DNA, 20 bp, Artificial Sequence
  Description of Artificial Sequence: Synthetic oligonucleotide
  Target: COL7A1; (-) strand; PAM type: NRG; PAM sequence: GAG
tggtgccagtggaaaagatg

SEQ ID NO: 10243 - DNA, 20 bp, Artificial Sequence
  Description of Artificial Sequence: Synthetic oligonucleotide
  Target: COL7A1; (-) strand; PAM type: NRG; PAM sequence: TGG
gatggtgccagtggaaaaga

SEQ ID NO: 10244 - DNA, 20 bp, Artificial Sequence
  Description of Artificial Sequence: Synthetic oligonucleotide
  Target: COL7A1; (-) strand; PAM type: NRG; PAM sequence: AAG
tcgagatggtgccagtggaa

SEQ ID NO: 10245 - DNA, 20 bp, Artificial Sequence
  Description of Artificial Sequence: Synthetic oligonucleotide
  Target: COL7A1; (-) strand; PAM type: NRG; PAM sequence: TGG
ccaggtcgagatggtgccag

SEQ ID NO: 10246 - DNA, 20 bp, Artificial Sequence
  Description of Artificial Sequence: Synthetic oligonucleotide
  Target: COL7A1; (-) strand; PAM type: NRG; PAM sequence: CAG
gccccaggtcgagatggtgc

SEQ ID NO: 10247 - DNA, 20 bp, Artificial Sequence
  Description of Artificial Sequence: Synthetic oligonucleotide
  Target: COL7A1; (-) strand; PAM type: NRG; PAM sequence: TGG
ccgggagccccaggtcgaga

SEQ ID NO: 10248 - DNA, 20 bp, Artificial Sequence
  Description of Artificial Sequence: Synthetic oligonucleotide
  Target: COL7A1; (-) strand; PAM type: NRG; PAM sequence: GAG
gaagccgggagccccaggtc

SEQ ID NO: 10249 - DNA, 20 bp, Artificial Sequence
  Description of Artificial Sequence: Synthetic oligonucleotide
  Target: COL7A1; (-) strand; PAM type: NRG; PAM sequence: AGG
acagggaagccgggagcccc

SEQ ID NO: 10250 - DNA, 20 bp, Artificial Sequence
  Description of Artificial Sequence: Synthetic oligonucleotide
  Target: COL7A1; (-) strand; PAM type: NRG; PAM sequence: CAG
gacagggaagccgggagccc

SEQ ID NO: 10251 - DNA, 20 bp, Artificial Sequence
  Description of Artificial Sequence: Synthetic oligonucleotide
  Target: COL7A1; (-) strand; PAM type: NRG; PAM sequence: GAG
gggggagacagggaagccgg

SEQ ID NO: 10252 - DNA, 20 bp, Artificial Sequence
  Description of Artificial Sequence: Synthetic oligonucleotide
  Target: COL7A1; (-) strand; PAM type: NRG; PAM sequence: GGG
cagggggagacagggaagcc

SEQ ID NO: 10253 - DNA, 20 bp, Artificial Sequence
  Description of Artificial Sequence: Synthetic oligonucleotide
  Target: COL7A1; (-) strand; PAM type: NRG; PAM sequence: CGG
tcagggggagacagggaagc

SEQ ID NO: 10254 - DNA, 20 bp, Artificial Sequence
  Description of Artificial Sequence: Synthetic oligonucleotide
  Target: COL7A1; (-) strand; PAM type: NRG; PAM sequence: AAG
cctctcagggggagacaggg

SEQ ID NO: 10255 - DNA, 20 bp, Artificial Sequence
  Description of Artificial Sequence: Synthetic oligonucleotide
  Target: COL7A1; (-) strand; PAM type: NRG; PAM sequence: GGG
ttccctctcagggggagaca

SEQ ID NO: 10256 - DNA, 20 bp, Artificial Sequence
  Description of Artificial Sequence: Synthetic oligonucleotide
  Target: COL7A1; (-) strand; PAM type: NRG; PAM sequence: AGG
cttccctctcagggggagac

SEQ ID NO: 10257 - DNA, 20 bp, Artificial Sequence
  Description of Artificial Sequence: Synthetic oligonucleotide
  Target: COL7A1; (-) strand; PAM type: NRG; PAM sequence: CAG
tcttccctctcagggggaga

SEQ ID NO: 10258 - DNA, 20 bp, Artificial Sequence
  Description of Artificial Sequence: Synthetic oligonucleotide
  Target: COL7A1; (-) strand; PAM type: NRG; PAM sequence: GAG
gagctcttccctctcagggg

SEQ ID NO: 10259 - DNA, 20 bp, Artificial Sequence
  Description of Artificial Sequence: Synthetic oligonucleotide
  Target: COL7A1; (-) strand; PAM type: NRG; PAM sequence: GGG
cagagctcttccctctcagg

SEQ ID NO: 10260 - DNA, 20 bp, Artificial Sequence
  Description of Artificial Sequence: Synthetic oligonucleotide
  Target: COL7A1; (-) strand; PAM type: NRG; PAM sequence: GGG
acagagctcttccctctcag

SEQ ID NO: 10261 - DNA, 20 bp, Artificial Sequence
  Description of Artificial Sequence: Synthetic oligonucleotide
  Target: COL7A1; (-) strand; PAM type: NRG; PAM sequence: GGG
gacagagctcttccctctca

SEQ ID NO: 10262 - DNA, 20 bp, Artificial Sequence
  Description of Artificial Sequence: Synthetic oligonucleotide
  Target: COL7A1; (-) strand; PAM type: NRG; PAM sequence: AGG
tgacagagctcttccctctc

SEQ ID NO: 10263 - DNA, 20 bp, Artificial Sequence
  Description of Artificial Sequence: Synthetic oligonucleotide
  Target: COL7A1; (-) strand; PAM type: NRG; PAM sequence: CAG
ctgacagagctcttccctct

SEQ ID NO: 10264 - DNA, 20 bp, Artificial Sequence
  Description of Artificial Sequence: Synthetic oligonucleotide
  Target: COL7A1; (-) strand; PAM type: NRG; PAM sequence: GAG
gtcgacaggcagccctgaca

SEQ ID NO: 10265 - DNA, 20 bp, Artificial Sequence
  Description of Artificial Sequence: Synthetic oligonucleotide
  Target: COL7A1; (-) strand; PAM type: NRG; PAM sequence: CAG
gggtcgacaggcagccctga

SEQ ID NO: 10266 - DNA, 20 bp, Artificial Sequence
  Description of Artificial Sequence: Synthetic oligonucleotide
  Target: COL7A1; (-) strand; PAM type: NRG; PAM sequence: CAG
aggggtcaagggtcgacagg

SEQ ID NO: 10267 - DNA, 20 bp, Artificial Sequence
  Description of Artificial Sequence: Synthetic oligonucleotide
  Target: COL7A1; (-) strand; PAM type: NRG; PAM sequence: AGG
tccaggggtcaagggtcgac

SEQ ID NO: 10268 - DNA, 20 bp, Artificial Sequence
  Description of Artificial Sequence: Synthetic oligonucleotide
  Target: COL7A1; (-) strand; PAM type: NRG; PAM sequence: CAG
ctccaggggtcaagggtcga

SEQ ID NO: 10269 - DNA, 20 bp, Artificial Sequence
  Description of Artificial Sequence: Synthetic oligonucleotide
  Target: COL7A1; (-) strand; PAM type: NRG; PAM sequence: GGG
ggttgggctccaggggtcaa

SEQ ID NO: 10270 - DNA, 20 bp, Artificial Sequence
  Description of Artificial Sequence: Synthetic oligonucleotide
  Target: COL7A1; (-) strand; PAM type: NRG; PAM sequence: AGG
gggttgggctccaggggtca

SEQ ID NO: 10271 - DNA, 20 bp, Artificial Sequence
  Description of Artificial Sequence: Synthetic oligonucleotide
  Target: COL7A1; (-) strand; PAM type: NRG; PAM sequence: AAG
agggttgggctccaggggtc

SEQ ID NO: 10272 - DNA, 20 bp, Artificial Sequence
  Description of Artificial Sequence: Synthetic oligonucleotide
  Target: COL7A1; (-) strand; PAM type: NRG; PAM sequence: GGG
ggtcaagggttgggctccag

SEQ ID NO: 10273 - DNA, 20 bp, Artificial Sequence
  Description of Artificial Sequence: Synthetic oligonucleotide
  Target: COL7A1; (-) strand; PAM type: NRG; PAM sequence: GGG
gggtcaagggttgggctcca

SEQ ID NO: 10274 - DNA, 20 bp, Artificial Sequence
  Description of Artificial Sequence: Synthetic oligonucleotide
  Target: COL7A1; (-) strand; PAM type: NRG; PAM sequence: AGG
ggggtcaagggttgggctcc

SEQ ID NO: 10275 - DNA, 20 bp, Artificial Sequence
  Description of Artificial Sequence: Synthetic oligonucleotide
  Target: COL7A1; (-) strand; PAM type: NRG; PAM sequence: CAG
gggggtcaagggttgggctc

SEQ ID NO: 10276 - DNA, 20 bp, Artificial Sequence
  Description of Artificial Sequence: Synthetic oligonucleotide
  Target: COL7A1; (-) strand; PAM type: NRG; PAM sequence: GGG
agttctgggggtcaagggtt

SEQ ID NO: 10277 - DNA, 20 bp, Artificial Sequence
  Description of Artificial Sequence: Synthetic oligonucleotide
  Target: COL7A1; (-) strand; PAM type: NRG; PAM sequence: TGG
gagttctgggggtcaagggt

SEQ ID NO: 10278 - DNA, 20 bp, Artificial Sequence
  Description of Artificial Sequence: Synthetic oligonucleotide
  Target: COL7A1; (-) strand; PAM type: NRG; PAM sequence: GGG
tggtgagttctgggggtcaa

SEQ ID NO: 10279 - DNA, 20 bp, Artificial Sequence
  Description of Artificial Sequence: Synthetic oligonucleotide
  Target: COL7A1; (-) strand; PAM type: NRG; PAM sequence: AGG
gtggtgagttctgggggtca

SEQ ID NO: 10280 - DNA, 20 bp, Artificial Sequence
  Description of Artificial Sequence: Synthetic oligonucleotide
  Target: COL7A1; (-) strand; PAM type: NRG; PAM sequence: AAG
agtggtgagttctgggggtc

SEQ ID NO: 10281 - DNA, 20 bp, Artificial Sequence
  Description of Artificial Sequence: Synthetic oligonucleotide
  Target: COL7A1; (-) strand; PAM type: NRG; PAM sequence: GGG
ggacaagtggtgagttctgg

SEQ ID NO: 10282 - DNA, 20 bp, Artificial Sequence
  Description of Artificial Sequence: Synthetic oligonucleotide
  Target: COL7A1; (-) strand; PAM type: NRG; PAM sequence: GGG
tggacaagtggtgagttctg

SEQ ID NO: 10283 - DNA, 20 bp, Artificial Sequence
  Description of Artificial Sequence: Synthetic oligonucleotide
  Target: COL7A1; (-) strand; PAM type: NRG; PAM sequence: GGG
ctggacaagtggtgagttct

SEQ ID NO: 10284 - DNA, 20 bp, Artificial Sequence
  Description of Artificial Sequence: Synthetic oligonucleotide
  Target: COL7A1; (-) strand; PAM type: NRG; PAM sequence: TGG
cctggacaagtggtgagttc

SEQ ID NO: 10285 - DNA, 20 bp, Artificial Sequence
  Description of Artificial Sequence: Synthetic oligonucleotide
  Target: COL7A1; (-) strand; PAM type: NRG; PAM sequence: GAG
ggtttgcctggacaagtggt

SEQ ID NO: 10286 - DNA, 20 bp, Artificial Sequence
  Description of Artificial Sequence: Synthetic oligonucleotide
  Target: COL7A1; (-) strand; PAM type: NRG; PAM sequence: TGG
tccaggtttgcctggacaag

SEQ ID NO: 10287 - DNA, 20 bp, Artificial Sequence
  Description of Artificial Sequence: Synthetic oligonucleotide
  Target: COL7A1; (-) strand; PAM type: NRG; PAM sequence: AAG
gtctccaggtttgcctggac

SEQ ID NO: 10288 - DNA, 20 bp, Artificial Sequence
  Description of Artificial Sequence: Synthetic oligonucleotide
  Target: COL7A1; (-) strand; PAM type: NRG; PAM sequence: TGG
caggggtctccaggtttgcc

SEQ ID NO: 10289 - DNA, 20 bp, Artificial Sequence
  Description of Artificial Sequence: Synthetic oligonucleotide
  Target: COL7A1; (-) strand; PAM type: NRG; PAM sequence: AGG
cagggtccacaggggtctcc

SEQ ID NO: 10290 - DNA, 20 bp, Artificial Sequence
  Description of Artificial Sequence: Synthetic oligonucleotide
  Target: COL7A1; (-) strand; PAM type: NRG; PAM sequence: CAG
tcagggtccacaggggtctc

SEQ ID NO: 10291 - DNA, 20 bp, Artificial Sequence
  Description of Artificial Sequence: Synthetic oligonucleotide
  Target: COL7A1; (-) strand; PAM type: NRG; PAM sequence: GGG
ttctccgtcagggtccacag

SEQ ID NO: 10292 - DNA, 20 bp, Artificial Sequence
  Description of Artificial Sequence: Synthetic oligonucleotide
  Target: COL7A1; (-) strand; PAM type: NRG; PAM sequence: GGG
gttctccgtcagggtccaca

SEQ ID NO: 10293 - DNA, 20 bp, Artificial Sequence
  Description of Artificial Sequence: Synthetic oligonucleotide
  Target: COL7A1; (-) strand; PAM type: NRG; PAM sequence: AGG
tgttctccgtcagggtccac

SEQ ID NO: 10294 - DNA, 20 bp, Artificial Sequence
  Description of Artificial Sequence: Synthetic oligonucleotide
  Target: COL7A1; (-) strand; PAM type: NRG; PAM sequence: CAG
ttgttctccgtcagggtcca

SEQ ID NO: 10295 - DNA, 20 bp, Artificial Sequence
  Description of Artificial Sequence: Synthetic oligonucleotide
  Target: COL7A1; (-) strand; PAM type: NRG; PAM sequence: GGG
atccgacttgttctccgtca

SEQ ID NO: 10296 - DNA, 20 bp, Artificial Sequence
  Description of Artificial Sequence: Synthetic oligonucleotide
  Target: COL7A1; (-) strand; PAM type: NRG; PAM sequence: AGG
catccgacttgttctccgtc

SEQ ID NO: 10297 - DNA, 20 bp, Artificial Sequence
  Description of Artificial Sequence: Synthetic oligonucleotide
  Target: COL7A1; (-) strand; PAM type: NRG; PAM sequence: CAG
acatccgacttgttctccgt

SEQ ID NO: 10298 - DNA, 20 bp, Artificial Sequence
  Description of Artificial Sequence: Synthetic oligonucleotide
  Target: COL7A1; (-) strand; PAM type: NRG; PAM sequence: GGG
caccgtgttttcactccttg

SEQ ID NO: 10299 - DNA, 20 bp, Artificial Sequence
  Description of Artificial Sequence: Synthetic oligonucleotide
  Target: COL7A1; (-) strand; PAM type: NRG; PAM sequence: GGG
acaccgtgttttcactcctt

SEQ ID NO: 10300 - DNA, 20 bp, Artificial Sequence
  Description of Artificial Sequence: Synthetic oligonucleotide
  Target: COL7A1; (-) strand; PAM type: NRG; PAM sequence: TGG
gacaccgtgttttcactcct

SEQ ID NO: 10301 - DNA, 20 bp, Artificial Sequence
  Description of Artificial Sequence: Synthetic oligonucleotide
  Target: COL7A1; (-) strand; PAM type: NRG; PAM sequence: GGG
gagtccctgtggcccctgta

SEQ ID NO: 10302 - DNA, 20 bp, Artificial Sequence
  Description of Artificial Sequence: Synthetic oligonucleotide
  Target: COL7A1; (-) strand; PAM type: NRG; PAM sequence: AGG
tgagtccctgtggcccctgt

SEQ ID NO: 10303 - DNA, 20 bp, Artificial Sequence
  Description of Artificial Sequence: Synthetic oligonucleotide
  Target: COL7A1; (-) strand; PAM type: NRG; PAM sequence: TAG
gtgagtccctgtggcccctg

SEQ ID NO: 10304 - DNA, 20 bp, Artificial Sequence
  Description of Artificial Sequence: Synthetic oligonucleotide
  Target: COL7A1; (-) strand; PAM type: NRG; PAM sequence: TGG
ttgtggtgagtgagtccctg

SEQ ID NO: 10305 - DNA, 20 bp, Artificial Sequence
  Description of Artificial Sequence: Synthetic oligonucleotide
  Target: COL7A1; (-) strand; PAM type: NRG; PAM sequence: GAG
cttcaggccttgtggtgagt

SEQ ID NO: 10306 - DNA, 20 bp, Artificial Sequence
  Description of Artificial Sequence: Synthetic oligonucleotide
  Target: COL7A1; (-) strand; PAM type: NRG; PAM sequence: GAG
ggcccttcaggccttgtggt

SEQ ID NO: 10307 - DNA, 20 bp, Artificial Sequence
  Description of Artificial Sequence: Synthetic oligonucleotide
  Target: COL7A1; (-) strand; PAM type: NRG; PAM sequence: TGG
ccccggcccttcaggccttg

SEQ ID NO: 10308 - DNA, 20 bp, Artificial Sequence
  Description of Artificial Sequence: Synthetic oligonucleotide
  Target: COL7A1; (-) strand; PAM type: NRG; PAM sequence: AGG
cctggaccccccggcccttc

SEQ ID NO: 10309 - DNA, 20 bp, Artificial Sequence
  Description of Artificial Sequence: Synthetic oligonucleotide
  Target: COL7A1; (-) strand; PAM type: NRG; PAM sequence: CAG
tcctggaccccccggccctt

SEQ ID NO: 10310 - DNA, 20 bp, Artificial Sequence
  Description of Artificial Sequence: Synthetic oligonucleotide
  Target: COL7A1; (-) strand; PAM type: NRG; PAM sequence: CGG
gtgggacttcctggaccccc

SEQ ID NO: 10311 - DNA, 20 bp, Artificial Sequence
  Description of Artificial Sequence: Synthetic oligonucleotide
  Target: COL7A1; (-) strand; PAM type: NRG; PAM sequence: TGG
actggagctgtgggacttcc

SEQ ID NO: 10312 - DNA, 20 bp, Artificial Sequence
  Description of Artificial Sequence: Synthetic oligonucleotide
  Target: COL7A1; (-) strand; PAM type: NRG; PAM sequence: GGG
actggacctactggagctgt

SEQ ID NO: 10313 - DNA, 20 bp, Artificial Sequence
  Description of Artificial Sequence: Synthetic oligonucleotide
  Target: COL7A1; (-) strand; PAM type: NRG; PAM sequence: TGG
gactggacctactggagctg

SEQ ID NO: 10314 - DNA, 20 bp, Artificial Sequence
  Description of Artificial Sequence: Synthetic oligonucleotide
  Target: COL7A1; (-) strand; PAM type: NRG; PAM sequence: GAG
gggcctgactggacctactg

SEQ ID NO: 10315 - DNA, 20 bp, Artificial Sequence
  Description of Artificial Sequence: Synthetic oligonucleotide
  Target: COL7A1; (-) strand; PAM type: NRG; PAM sequence: TGG
cagggcctgactggacctac

SEQ ID NO: 10316 - DNA, 20 bp, Artificial Sequence
  Description of Artificial Sequence: Synthetic oligonucleotide
  Target: COL7A1; (-) strand; PAM type: NRG; PAM sequence: TGG
ctcttcctccagggcctgac

SEQ ID NO: 10317 - DNA, 20 bp, Artificial Sequence
  Description of Artificial Sequence: Synthetic oligonucleotide
  Target: COL7A1; (-) strand; PAM type: NRG; PAM sequence: GGG
ctgaactttctcttcctcca

SEQ ID NO: 10318 - DNA, 20 bp, Artificial Sequence
  Description of Artificial Sequence: Synthetic oligonucleotide
  Target: COL7A1; (-) strand; PAM type: NRG; PAM sequence: AGG
cctgaactttctcttcctcc

SEQ ID NO: 10319 - DNA, 20 bp, Artificial Sequence
  Description of Artificial Sequence: Synthetic oligonucleotide
  Target: COL7A1; (-) strand; PAM type: NRG; PAM sequence: CAG
ccctgaactttctcttcctc

SEQ ID NO: 10320 - DNA, 20 bp, Artificial Sequence
  Description of Artificial Sequence: Synthetic oligonucleotide
  Target: COL7A1; (-) strand; PAM type: NRG; PAM sequence: TGG
catagggagatgggtggggt

SEQ ID NO: 10321 - DNA, 20 bp, Artificial Sequence
  Description of Artificial Sequence: Synthetic oligonucleotide
  Target: COL7A1; (-) strand; PAM type: NRG; PAM sequence: GGG
gggtcatagggagatgggtg

SEQ ID NO: 10322 - DNA, 20 bp, Artificial Sequence
  Description of Artificial Sequence: Synthetic oligonucleotide
  Target: COL7A1; (-) strand; PAM type: NRG; PAM sequence: GGG
agggtcatagggagatgggt

SEQ ID NO: 10323 - DNA, 20 bp, Artificial Sequence
  Description of Artificial Sequence: Synthetic oligonucleotide
  Target: COL7A1; (-) strand; PAM type: NRG; PAM sequence: TGG
tagggtcatagggagatggg

SEQ ID NO: 10324 - DNA, 20 bp, Artificial Sequence
  Description of Artificial Sequence: Synthetic oligonucleotide
  Target: COL7A1; (-) strand; PAM type: NRG; PAM sequence: GGG
ggttagggtcatagggagat

SEQ ID NO: 10325 - DNA, 20 bp, Artificial Sequence
  Description of Artificial Sequence: Synthetic oligonucleotide
  Target: COL7A1; (-) strand; PAM type: NRG; PAM sequence: TGG
aggttagggtcatagggaga

SEQ ID NO: 10326 - DNA, 20 bp, Artificial Sequence
  Description of Artificial Sequence: Synthetic oligonucleotide
  Target: COL7A1; (-) strand; PAM type: NRG; PAM sequence: GAG
tcacaggttagggtcatagg

SEQ ID NO: 10327 - DNA, 20 bp, Artificial Sequence
  Description of Artificial Sequence: Synthetic oligonucleotide
  Target: COL7A1; (-) strand; PAM type: NRG; PAM sequence: GGG
gctcacaggttagggtcata

SEQ ID NO: 10328 - DNA, 20 bp, Artificial Sequence
  Description of Artificial Sequence: Synthetic oligonucleotide
  Target: COL7A1; (-) strand; PAM type: NRG; PAM sequence: AGG
agctcacaggttagggtcat

SEQ ID NO: 10329 - DNA, 20 bp, Artificial Sequence
  Description of Artificial Sequence: Synthetic oligonucleotide
  Target: COL7A1; (-) strand; PAM type: NRG; PAM sequence: TAG
tagctcacaggttagggtca

SEQ ID NO: 10330 - DNA, 20 bp, Artificial Sequence
  Description of Artificial Sequence: Synthetic oligonucleotide
  Target: COL7A1; (-) strand; PAM type: NRG; PAM sequence: GGG
gtggcctagctcacaggtta

SEQ ID NO: 10331 - DNA, 20 bp, Artificial Sequence
  Description of Artificial Sequence: Synthetic oligonucleotide
  Target: COL7A1; (-) strand; PAM type: NRG; PAM sequence: AGG
agtggcctagctcacaggtt

SEQ ID NO: 10332 - DNA, 20 bp, Artificial Sequence
  Description of Artificial Sequence: Synthetic oligonucleotide
  Target: COL7A1; (-) strand; PAM type: NRG; PAM sequence: TAG
gagtggcctagctcacaggt

SEQ ID NO: 10333 - DNA, 20 bp, Artificial Sequence
  Description of Artificial Sequence: Synthetic oligonucleotide
  Target: COL7A1; (-) strand; PAM type: NRG; PAM sequence: AGG
gggtgagtggcctagctcac

SEQ ID NO: 10334 - DNA, 20 bp, Artificial Sequence
  Description of Artificial Sequence: Synthetic oligonucleotide
  Target: COL7A1; (-) strand; PAM type: NRG; PAM sequence: CAG
cgggtgagtggcctagctca

SEQ ID NO: 10335 - DNA, 20 bp, Artificial Sequence
  Description of Artificial Sequence: Synthetic oligonucleotide
  Target: COL7A1; (-) strand; PAM type: NRG; PAM sequence: TAG
tccaggacgggtgagtggcc

SEQ ID NO: 10336 - DNA, 20 bp, Artificial Sequence
  Description of Artificial Sequence: Synthetic oligonucleotide
  Target: COL7A1; (-) strand; PAM type: NRG; PAM sequence: TGG
ggacctccaggacgggtgag

SEQ ID NO: 10337 - DNA, 20 bp, Artificial Sequence
  Description of Artificial Sequence: Synthetic oligonucleotide
  Target: COL7A1; (-) strand; PAM type: NRG; PAM sequence: GAG
acaggacctccaggacgggt

SEQ ID NO: 10338 - DNA, 20 bp, Artificial Sequence
  Description of Artificial Sequence: Synthetic oligonucleotide
  Target: COL7A1; (-) strand; PAM type: NRG; PAM sequence: GGG
agagacaggacctccaggac

SEQ ID NO: 10339 - DNA, 20 bp, Artificial Sequence
  Description of Artificial Sequence: Synthetic oligonucleotide
  Target: COL7A1; (-) strand; PAM type: NRG; PAM sequence: CGG
gagagacaggacctccagga

SEQ ID NO: 10340 - DNA, 20 bp, Artificial Sequence
  Description of Artificial Sequence: Synthetic oligonucleotide
  Target: COL7A1; (-) strand; PAM type: NRG; PAM sequence: AGG
cctggagagacaggacctcc

SEQ ID NO: 10341 - DNA, 20 bp, Artificial Sequence
  Description of Artificial Sequence: Synthetic oligonucleotide
  Target: COL7A1; (-) strand; PAM type: NRG; PAM sequence: CAG
gcctggagagacaggacctc

SEQ ID NO: 10342 - DNA, 20 bp, Artificial Sequence
  Description of Artificial Sequence: Synthetic oligonucleotide
  Target: COL7A1; (-) strand; PAM type: NRG; PAM sequence: AGG
cagggggagcctggagagac

SEQ ID NO: 10343 - DNA, 20 bp, Artificial Sequence
  Description of Artificial Sequence: Synthetic oligonucleotide
  Target: COL7A1; (-) strand; PAM type: NRG; PAM sequence: CAG
gcagggggagcctggagaga

SEQ ID NO: 10344 - DNA, 20 bp, Artificial Sequence
  Description of Artificial Sequence: Synthetic oligonucleotide
  Target: COL7A1; (-) strand; PAM type: NRG; PAM sequence: GAG
gtttgcagggggagcctgga

SEQ ID NO: 10345 - DNA, 20 bp, Artificial Sequence
  Description of Artificial Sequence: Synthetic oligonucleotide
  Target: COL7A1; (-) strand; PAM type: NRG; PAM sequence: GAG
ttgtttgcagggggagcctg

SEQ ID NO: 10346 - DNA, 20 bp, Artificial Sequence
  Description of Artificial Sequence: Synthetic oligonucleotide
  Target: COL7A1; (-) strand; PAM type: NRG; PAM sequence: TGG
ggttgtttgcagggggagcc

SEQ ID NO: 10347 - DNA, 20 bp, Artificial Sequence
  Description of Artificial Sequence: Synthetic oligonucleotide
  Target: COL7A1; (-) strand; PAM type: NRG; PAM sequence: GAG
ctctgggttgtttgcagggg

SEQ ID NO: 10348 - DNA, 20 bp, Artificial Sequence
  Description of Artificial Sequence: Synthetic oligonucleotide
  Target: COL7A1; (-) strand; PAM type: NRG; PAM sequence: GGG
gtctctgggttgtttgcagg

SEQ ID NO: 10349 - DNA, 20 bp, Artificial Sequence
  Description of Artificial Sequence: Synthetic oligonucleotide
  Target: COL7A1; (-) strand; PAM type: NRG; PAM sequence: GGG
agtctctgggttgtttgcag

SEQ ID NO: 10350 - DNA, 20 bp, Artificial Sequence
  Description of Artificial Sequence: Synthetic oligonucleotide
  Target: COL7A1; (-) strand; PAM type: NRG; PAM sequence: GGG
cagtctctgggttgtttgca

SEQ ID NO: 10351 - DNA, 20 bp, Artificial Sequence
  Description of Artificial Sequence: Synthetic oligonucleotide
  Target: COL7A1; (-) strand; PAM type: NRG; PAM sequence: AGG
gcagtctctgggttgtttgc

SEQ ID NO: 10352 - DNA, 20 bp, Artificial Sequence
  Description of Artificial Sequence: Synthetic oligonucleotide
  Target: COL7A1; (-) strand; PAM type: NRG; PAM sequence: CAG
tgcagtctctgggttgtttg

SEQ ID NO: 10353 - DNA, 20 bp, Artificial Sequence
  Description of Artificial Sequence: Synthetic oligonucleotide
  Target: COL7A1; (-) strand; PAM type: NRG; PAM sequence: GGG
gctctgctcatgcagtctct

SEQ ID NO: 10354 - DNA, 20 bp, Artificial Sequence
  Description of Artificial Sequence: Synthetic oligonucleotide
  Target: COL7A1; (-) strand; PAM type: NRG; PAM sequence: TGG
ggctctgctcatgcagtctc

SEQ ID NO: 10355 - DNA, 20 bp, Artificial Sequence
  Description of Artificial Sequence: Synthetic oligonucleotide
  Target: COL7A1; (-) strand; PAM type: NRG; PAM sequence: CAG
ccacgtgggctctgctcatg

SEQ ID NO: 10356 - DNA, 20 bp, Artificial Sequence
  Description of Artificial Sequence: Synthetic oligonucleotide
  Target: COL7A1; (-) strand; PAM type: NRG; PAM sequence: GGG
tccaggagccctggccacgt

SEQ ID NO: 10357 - DNA, 20 bp, Artificial Sequence
  Description of Artificial Sequence: Synthetic oligonucleotide
  Target: COL7A1; (-) strand; PAM type: NRG; PAM sequence: TGG
ctccaggagccctggccacg

SEQ ID NO: 10358 - DNA, 20 bp, Artificial Sequence
  Description of Artificial Sequence: Synthetic oligonucleotide
  Target: COL7A1; (-) strand; PAM type: NRG; PAM sequence: TGG
aggatgagctccaggagccc

SEQ ID NO: 10359 - DNA, 20 bp, Artificial Sequence
  Description of Artificial Sequence: Synthetic oligonucleotide
  Target: COL7A1; (-) strand; PAM type: NRG; PAM sequence: GAG
gcaatgaggatgagctccag

SEQ ID NO: 10360 - DNA, 20 bp, Artificial Sequence
  Description of Artificial Sequence: Synthetic oligonucleotide
  Target: COL7A1; (-) strand; PAM type: NRG; PAM sequence: AGG
ctgcaatgaggatgagctcc

SEQ ID NO: 10361 - DNA, 20 bp, Artificial Sequence
  Description of Artificial Sequence: Synthetic oligonucleotide
  Target: COL7A1; (-) strand; PAM type: NRG; PAM sequence: CAG
cctgcaatgaggatgagctc

SEQ ID NO: 10362 - DNA, 20 bp, Artificial Sequence
  Description of Artificial Sequence: Synthetic oligonucleotide
  Target: COL7A1; (-) strand; PAM type: NRG; PAM sequence: GAG
tcatctcctgcaatgaggat

SEQ ID NO: 10363 - DNA, 20 bp, Artificial Sequence
  Description of Artificial Sequence: Synthetic oligonucleotide
  Target: COL7A1; (-) strand; PAM type: NRG; PAM sequence: AGG
ggctgtcatctcctgcaatg

SEQ ID NO: 10364 - DNA, 20 bp, Artificial Sequence
  Description of Artificial Sequence: Synthetic oligonucleotide
  Target: COL7A1; (-) strand; PAM type: NRG; PAM sequence: GAG
gggctgtcatctcctgcaat

SEQ ID NO: 10365 - DNA, 20 bp, Artificial Sequence
  Description of Artificial Sequence: Synthetic oligonucleotide
  Target: COL7A1; (-) strand; PAM type: NRG; PAM sequence: GGG
gtagtgtgcgccaacctcct

SEQ ID NO: 10366 - DNA, 20 bp, Artificial Sequence
  Description of Artificial Sequence: Synthetic oligonucleotide
  Target: COL7A1; (-) strand; PAM type: NRG; PAM sequence: TGG
ggtagtgtgcgccaacctcc

SEQ ID NO: 10367 - DNA, 20 bp, Artificial Sequence
  Description of Artificial Sequence: Synthetic oligonucleotide
  Target: COL7A1; (-) strand; PAM type: NRG; PAM sequence: TAG
agctgtgtccatgcctgggg

SEQ ID NO: 10368 - DNA, 20 bp, Artificial Sequence
  Description of Artificial Sequence: Synthetic oligonucleotide
  Target: COL7A1; (-) strand; PAM type: NRG; PAM sequence: GGG
tcaagctgtgtccatgcctg

SEQ ID NO: 10369 - DNA, 20 bp, Artificial Sequence
  Description of Artificial Sequence: Synthetic oligonucleotide
  Target: COL7A1; (-) strand; PAM type: NRG; PAM sequence: GGG
ttcaagctgtgtccatgcct

SEQ ID NO: 10370 - DNA, 20 bp, Artificial Sequence
  Description of Artificial Sequence: Synthetic oligonucleotide
  Target: COL7A1; (-) strand; PAM type: NRG; PAM sequence: TGG
cttcaagctgtgtccatgcc

SEQ ID NO: 10371 - DNA, 20 bp, Artificial Sequence
  Description of Artificial Sequence: Synthetic oligonucleotide
  Target: COL7A1; (-) strand; PAM type: NRG; PAM sequence: AAG
taggaggaggaggctccttc

SEQ ID NO: 10372 - DNA, 20 bp, Artificial Sequence
  Description of Artificial Sequence: Synthetic oligonucleotide
  Target: COL7A1; (-) strand; PAM type: NRG; PAM sequence: AGG
ggtgtgtggataggaggagg

SEQ ID NO: 10373 - DNA, 20 bp, Artificial Sequence
  Description of Artificial Sequence: Synthetic oligonucleotide
  Target: COL7A1; (-) strand; PAM type: NRG; PAM sequence: GAG
aggtgtgtggataggaggag

SEQ ID NO: 10374 - DNA, 20 bp, Artificial Sequence
  Description of Artificial Sequence: Synthetic oligonucleotide
  Target: COL7A1; (-) strand; PAM type: NRG; PAM sequence: AGG
ctaggtgtgtggataggagg

SEQ ID NO: 10375 - DNA, 20 bp, Artificial Sequence
  Description of Artificial Sequence: Synthetic oligonucleotide
  Target: COL7A1; (-) strand; PAM type: NRG; PAM sequence: GAG
tctaggtgtgtggataggag

SEQ ID NO: 10376 - DNA, 20 bp, Artificial Sequence
  Description of Artificial Sequence: Synthetic oligonucleotide
  Target: COL7A1; (-) strand; PAM type: NRG; PAM sequence: AGG
agtctaggtgtgtggatagg

SEQ ID NO: 10377 - DNA, 20 bp, Artificial Sequence
  Description of Artificial Sequence: Synthetic oligonucleotide
  Target: COL7A1; (-) strand; PAM type: NRG; PAM sequence: GAG
gagtctaggtgtgtggatag

SEQ ID NO: 10378 - DNA, 20 bp, Artificial Sequence
  Description of Artificial Sequence: Synthetic oligonucleotide
  Target: COL7A1; (-) strand; PAM type: NRG; PAM sequence: AGG
gtgagtctaggtgtgtggat

SEQ ID NO: 10379 - DNA, 20 bp, Artificial Sequence
  Description of Artificial Sequence: Synthetic oligonucleotide
  Target: COL7A1; (-) strand; PAM type: NRG; PAM sequence: TAG
ggtgagtctaggtgtgtgga

SEQ ID NO: 10380 - DNA, 20 bp, Artificial Sequence
  Description of Artificial Sequence: Synthetic oligonucleotide
  Target: COL7A1; (-) strand; PAM type: NRG; PAM sequence: TGG
tgaaggtgagtctaggtgtg

SEQ ID NO: 10381 - DNA, 20 bp, Artificial Sequence
  Description of Artificial Sequence: Synthetic oligonucleotide
  Target: COL7A1; (-) strand; PAM type: NRG; PAM sequence: AGG
tctggcctgaaggtgagtct

SEQ ID NO: 10382 - DNA, 20 bp, Artificial Sequence
  Description of Artificial Sequence: Synthetic oligonucleotide
  Target: COL7A1; (-) strand; PAM type: NRG; PAM sequence: TAG
ttctggcctgaaggtgagtc

SEQ ID NO: 10383 - DNA, 20 bp, Artificial Sequence
  Description of Artificial Sequence: Synthetic oligonucleotide
  Target: COL7A1; (-) strand; PAM type: NRG; PAM sequence: GAG
ggaccttctggcctgaaggt

SEQ ID NO: 10384 - DNA, 20 bp, Artificial Sequence
  Description of Artificial Sequence: Synthetic oligonucleotide
  Target: COL7A1; (-) strand; PAM type: NRG; PAM sequence: AGG
ccaaggaccttctggcctga

SEQ ID NO: 10385 - DNA, 20 bp, Artificial Sequence
  Description of Artificial Sequence: Synthetic oligonucleotide
  Target: COL7A1; (-) strand; PAM type: NRG; PAM sequence: AAG
cccaaggaccttctggcctg

SEQ ID NO: 10386 - DNA, 20 bp, Artificial Sequence
  Description of Artificial Sequence: Synthetic oligonucleotide
  Target: COL7A1; (-) strand; PAM type: NRG; PAM sequence: TGG
gcaggaccccaaggaccttc

SEQ ID NO: 10387 - DNA, 20 bp, Artificial Sequence
  Description of Artificial Sequence: Synthetic oligonucleotide
  Target: COL7A1; (-) strand; PAM type: NRG; PAM sequence: AGG
gctggccctgcaggacccca

SEQ ID NO: 10388 - DNA, 20 bp, Artificial Sequence
  Description of Artificial Sequence: Synthetic oligonucleotide
  Target: COL7A1; (-) strand; PAM type: NRG; PAM sequence: AAG
tgctggccctgcaggacccc

SEQ ID NO: 10389 - DNA, 20 bp, Artificial Sequence
  Description of Artificial Sequence: Synthetic oligonucleotide
  Target: COL7A1; (-) strand; PAM type: NRG; PAM sequence: AGG
tagggtcttgctggccctgc

SEQ ID NO: 10390 - DNA, 20 bp, Artificial Sequence
  Description of Artificial Sequence: Synthetic oligonucleotide
  Target: COL7A1; (-) strand; PAM type: NRG; PAM sequence: CAG
ctagggtcttgctggccctg

SEQ ID NO: 10391 - DNA, 20 bp, Artificial Sequence
  Description of Artificial Sequence: Synthetic oligonucleotide
  Target: COL7A1; (-) strand; PAM type: NRG; PAM sequence: TGG
ccttttctctagggtcttgc

SEQ ID NO: 10392 - DNA, 20 bp, Artificial Sequence
  Description of Artificial Sequence: Synthetic oligonucleotide
  Target: COL7A1; (-) strand; PAM type: NRG; PAM sequence: GGG
gcccttgacccttttctcta

SEQ ID NO: 10393 - DNA, 20 bp, Artificial Sequence
  Description of Artificial Sequence: Synthetic oligonucleotide
  Target: COL7A1; (-) strand; PAM type: NRG; PAM sequence: AGG
tgcccttgacccttttctct

SEQ ID NO: 10394 - DNA, 20 bp, Artificial Sequence
  Description of Artificial Sequence: Synthetic oligonucleotide
  Target: COL7A1; (-) strand; PAM type: NRG; PAM sequence: TAG
ctgcccttgacccttttctc

SEQ ID NO: 10395 - DNA, 20 bp, Artificial Sequence
  Description of Artificial Sequence: Synthetic oligonucleotide
  Target: COL7A1; (-) strand; PAM type: NRG; PAM sequence: GAG
ccttctctgtgttaatccct

SEQ ID NO: 10396 - DNA, 20 bp, Artificial Sequence
  Description of Artificial Sequence: Synthetic oligonucleotide
  Target: COL7A1; (-) strand; PAM type: NRG; PAM sequence: AGG
ttggccacagctgatgagcc

SEQ ID NO: 10397 - DNA, 20 bp, Artificial Sequence
  Description of Artificial Sequence: Synthetic oligonucleotide
  Target: COL7A1; (-) strand; PAM type: NRG; PAM sequence: CAG
attggccacagctgatgagc

SEQ ID NO: 10398 - DNA, 20 bp, Artificial Sequence
  Description of Artificial Sequence: Synthetic oligonucleotide
  Target: COL7A1; (-) strand; PAM type: NRG; PAM sequence: GAG
aggcattggccacagctgat

SEQ ID NO: 10399 - DNA, 20 bp, Artificial Sequence
  Description of Artificial Sequence: Synthetic oligonucleotide
  Target: COL7A1; (-) strand; PAM type: NRG; PAM sequence: CAG
gctgggataggcattggcca

SEQ ID NO: 10400 - DNA, 20 bp, Artificial Sequence
  Description of Artificial Sequence: Synthetic oligonucleotide
  Target: COL7A1; (-) strand; PAM type: NRG; PAM sequence: TGG
ggaagggctgggataggcat

SEQ ID NO: 10401 - DNA, 20 bp, Artificial Sequence
  Description of Artificial Sequence: Synthetic oligonucleotide
  Target: COL7A1; (-) strand; PAM type: NRG; PAM sequence: AGG
gggtctggaagggctgggat

SEQ ID NO: 10402 - DNA, 20 bp, Artificial Sequence
  Description of Artificial Sequence: Synthetic oligonucleotide
  Target: COL7A1; (-) strand; PAM type: NRG; PAM sequence: TAG
agggtctggaagggctggga

SEQ ID NO: 10403 - DNA, 20 bp, Artificial Sequence
  Description of Artificial Sequence: Synthetic oligonucleotide
  Target: COL7A1; (-) strand; PAM type: NRG; PAM sequence: GGG
ggtgagggtctggaagggct

SEQ ID NO: 10404 - DNA, 20 bp, Artificial Sequence
  Description of Artificial Sequence: Synthetic oligonucleotide
  Target: COL7A1; (-) strand; PAM type: NRG; PAM sequence: TGG
tggtgagggtctggaagggc

SEQ ID NO: 10405 - DNA, 20 bp, Artificial Sequence
  Description of Artificial Sequence: Synthetic oligonucleotide
  Target: COL7A1; (-) strand; PAM type: NRG; PAM sequence: GGG
tgcctggtgagggtctggaa

SEQ ID NO: 10406 - DNA, 20 bp, Artificial Sequence
  Description of Artificial Sequence: Synthetic oligonucleotide
  Target: COL7A1; (-) strand; PAM type: NRG; PAM sequence: AGG
ctgcctggtgagggtctgga

SEQ ID NO: 10407 - DNA, 20 bp, Artificial Sequence
  Description of Artificial Sequence: Synthetic oligonucleotide
  Target: COL7A1; (-) strand; PAM type: NRG; PAM sequence: AAG
actgcctggtgagggtctgg

SEQ ID NO: 10408 - DNA, 20 bp, Artificial Sequence
  Description of Artificial Sequence: Synthetic oligonucleotide
  Target: COL7A1; (-) strand; PAM type: NRG; PAM sequence: TGG
aacactgcctggtgagggtc

SEQ ID NO: 10409 - DNA, 20 bp, Artificial Sequence
  Description of Artificial Sequence: Synthetic oligonucleotide
  Target: COL7A1; (-) strand; PAM type: NRG; PAM sequence: GGG
cagggaacactgcctggtga

SEQ ID NO: 10410 - DNA, 20 bp, Artificial Sequence
  Description of Artificial Sequence: Synthetic oligonucleotide
  Target: COL7A1; (-) strand; PAM type: NRG; PAM sequence: AGG
ccagggaacactgcctggtg

SEQ ID NO: 10411 - DNA, 20 bp, Artificial Sequence
  Description of Artificial Sequence: Synthetic oligonucleotide
  Target: COL7A1; (-) strand; PAM type: NRG; PAM sequence: GAG
accagggaacactgcctggt

SEQ ID NO: 10412 - DNA, 20 bp, Artificial Sequence
  Description of Artificial Sequence: Synthetic oligonucleotide
  Target: COL7A1; (-) strand; PAM type: NRG; PAM sequence: TGG
agtgaccagggaacactgcc

SEQ ID NO: 10413 - DNA, 20 bp, Artificial Sequence
  Description of Artificial Sequence: Synthetic oligonucleotide
  Target: COL7A1; (-) strand; PAM type: NRG; PAM sequence: GGG
ggtgccccggtgagtgacca

SEQ ID NO: 10414 - DNA, 20 bp, Artificial Sequence
  Description of Artificial Sequence: Synthetic oligonucleotide
  Target: COL7A1; (-) strand; PAM type: NRG; PAM sequence: AGG
tggtgccccggtgagtgacc

SEQ ID NO: 10415 - DNA, 20 bp, Artificial Sequence
  Description of Artificial Sequence: Synthetic oligonucleotide
  Target: COL7A1; (-) strand; PAM type: NRG; PAM sequence: CAG
ctggtgccccggtgagtgac

SEQ ID NO: 10416 - DNA, 20 bp, Artificial Sequence
  Description of Artificial Sequence: Synthetic oligonucleotide
  Target: COL7A1; (-) strand; PAM type: NRG; PAM sequence: GAG
ggaccacctggtgccccggt

SEQ ID NO: 10417 - DNA, 20 bp, Artificial Sequence
  Description of Artificial Sequence: Synthetic oligonucleotide
  Target: COL7A1; (-) strand; PAM type: NRG; PAM sequence: CGG
ccctggaccacctggtgccc

SEQ ID NO: 10418 - DNA, 20 bp, Artificial Sequence
  Description of Artificial Sequence: Synthetic oligonucleotide
  Target: COL7A1; (-) strand; PAM type: NRG; PAM sequence: TGG
catggagaccctggaccacc

SEQ ID NO: 10419 - DNA, 20 bp, Artificial Sequence
  Description of Artificial Sequence: Synthetic oligonucleotide
  Target: COL7A1; (-) strand; PAM type: NRG; PAM sequence: TGG
cagggtggtcatggagaccc

SEQ ID NO: 10420 - DNA, 20 bp, Artificial Sequence
  Description of Artificial Sequence: Synthetic oligonucleotide
  Target: COL7A1; (-) strand; PAM type: NRG; PAM sequence: GAG
gccacaacagggtggtcatg

SEQ ID NO: 10421 - DNA, 20 bp, Artificial Sequence
  Description of Artificial Sequence: Synthetic oligonucleotide
  Target: COL7A1; (-) strand; PAM type: NRG; PAM sequence: TGG
tcgccacaacagggtggtca

SEQ ID NO: 10422 - DNA, 20 bp, Artificial Sequence
  Description of Artificial Sequence: Synthetic oligonucleotide
  Target: COL7A1; (-) strand; PAM type: NRG; PAM sequence: TGG
tctttttcgccacaacaggg

SEQ ID NO: 10423 - DNA, 20 bp, Artificial Sequence
  Description of Artificial Sequence: Synthetic oligonucleotide
  Target: COL7A1; (-) strand; PAM type: NRG; PAM sequence: GGG
gactctttttcgccacaaca

SEQ ID NO: 10424 - DNA, 20 bp, Artificial Sequence
  Description of Artificial Sequence: Synthetic oligonucleotide
  Target: COL7A1; (-) strand; PAM type: NRG; PAM sequence: AGG
agactctttttcgccacaac

SEQ ID NO: 10425 - DNA, 20 bp, Artificial Sequence
  Description of Artificial Sequence: Synthetic oligonucleotide
  Target: COL7A1; (-) strand; PAM type: NRG; PAM sequence: CAG
cagactctttttcgccacaa

SEQ ID NO: 10426 - DNA, 20 bp, Artificial Sequence
  Description of Artificial Sequence: Synthetic oligonucleotide
  Target: COL7A1; (-) strand; PAM type: NRG; PAM sequence: CAG
tgcggctaactccccctcat

SEQ ID NO: 10427 - DNA, 20 bp, Artificial Sequence
  Description of Artificial Sequence: Synthetic oligonucleotide
  Target: COL7A1; (-) strand; PAM type: NRG; PAM sequence: CGG
tcagtttccttggtggggtg

SEQ ID NO: 10428 - DNA, 20 bp, Artificial Sequence
  Description of Artificial Sequence: Synthetic oligonucleotide
  Target: COL7A1; (-) strand; PAM type: NRG; PAM sequence: GGG
ctgcctcagtttccttggtg

SEQ ID NO: 10429 - DNA, 20 bp, Artificial Sequence
  Description of Artificial Sequence: Synthetic oligonucleotide
  Target: COL7A1; (-) strand; PAM type: NRG; PAM sequence: GGG
actgcctcagtttccttggt

SEQ ID NO: 10430 - DNA, 20 bp, Artificial Sequence
  Description of Artificial Sequence: Synthetic oligonucleotide
  Target: COL7A1; (-) strand; PAM type: NRG; PAM sequence: TGG
tactgcctcagtttccttgg

SEQ ID NO: 10431 - DNA, 20 bp, Artificial Sequence
  Description of Artificial Sequence: Synthetic oligonucleotide
  Target: COL7A1; (-) strand; PAM type: NRG; PAM sequence: TGG
cagtactgcctcagtttcct

SEQ ID NO: 10432 - DNA, 20 bp, Artificial Sequence
  Description of Artificial Sequence: Synthetic oligonucleotide
  Target: COL7A1; (-) strand; PAM type: NRG; PAM sequence: CAG
cccagtgaccagtactgcct

SEQ ID NO: 10433 - DNA, 20 bp, Artificial Sequence
  Description of Artificial Sequence: Synthetic oligonucleotide
  Target: COL7A1; (-) strand; PAM type: NRG; PAM sequence: CAG
ctgtgccctgccccagtgac

SEQ ID NO: 10434 - DNA, 20 bp, Artificial Sequence
  Description of Artificial Sequence: Synthetic oligonucleotide
  Target: COL7A1; (-) strand; PAM type: NRG; PAM sequence: CAG
ccccatcctgtgccctgccc

SEQ ID NO: 10435 - DNA, 20 bp, Artificial Sequence
  Description of Artificial Sequence: Synthetic oligonucleotide
  Target: COL7A1; (-) strand; PAM type: NRG; PAM sequence: AAG
tggcccagtggtgagtaccc

SEQ ID NO: 10436 - DNA, 20 bp, Artificial Sequence
  Description of Artificial Sequence: Synthetic oligonucleotide
  Target: COL7A1; (-) strand; PAM type: NRG; PAM sequence: GAG
ggcccccctggcccagtggt

SEQ ID NO: 10437 - DNA, 20 bp, Artificial Sequence
  Description of Artificial Sequence: Synthetic oligonucleotide
  Target: COL7A1; (-) strand; PAM type: NRG; PAM sequence: TGG
aagaggcccccctggcccag

SEQ ID NO: 10438 - DNA, 20 bp, Artificial Sequence
  Description of Artificial Sequence: Synthetic oligonucleotide
  Target: COL7A1; (-) strand; PAM type: NRG; PAM sequence: CAG
tccaagaggcccccctggcc

SEQ ID NO: 10439 - DNA, 20 bp, Artificial Sequence
  Description of Artificial Sequence: Synthetic oligonucleotide
  Target: COL7A1; (-) strand; PAM type: NRG; PAM sequence: TGG
cagggtccaagaggcccccc

SEQ ID NO: 10440 - DNA, 20 bp, Artificial Sequence
  Description of Artificial Sequence: Synthetic oligonucleotide
  Target: COL7A1; (-) strand; PAM type: NRG; PAM sequence: AGG
tagggtctgcagggtccaag

SEQ ID NO: 10441 - DNA, 20 bp, Artificial Sequence
  Description of Artificial Sequence: Synthetic oligonucleotide
  Target: COL7A1; (-) strand; PAM type: NRG; PAM sequence: GAG
gtagggtctgcagggtccaa

SEQ ID NO: 10442 - DNA, 20 bp, Artificial Sequence
  Description of Artificial Sequence: Synthetic oligonucleotide
  Target: COL7A1; (-) strand; PAM type: NRG; PAM sequence: AAG
atgtagggtctgcagggtcc

SEQ ID NO: 10443 - DNA, 20 bp, Artificial Sequence
  Description of Artificial Sequence: Synthetic oligonucleotide
  Target: COL7A1; (-) strand; PAM type: NRG; PAM sequence: GGG
ctctctatgtagggtctgca

SEQ ID NO: 10444 - DNA, 20 bp, Artificial Sequence
  Description of Artificial Sequence: Synthetic oligonucleotide
  Target: COL7A1; (-) strand; PAM type: NRG; PAM sequence: AGG
cctctctatgtagggtctgc

SEQ ID NO: 10445 - DNA, 20 bp, Artificial Sequence
  Description of Artificial Sequence: Synthetic oligonucleotide
  Target: COL7A1; (-) strand; PAM type: NRG; PAM sequence: CAG
ccctctctatgtagggtctg

SEQ ID NO: 10446 - DNA, 20 bp, Artificial Sequence
  Description of Artificial Sequence: Synthetic oligonucleotide
  Target: COL7A1; (-) strand; PAM type: NRG; PAM sequence: GGG
atcagtgccctctctatgta

SEQ ID NO: 10447 - DNA, 20 bp, Artificial Sequence
  Description of Artificial Sequence: Synthetic oligonucleotide
  Target: COL7A1; (-) strand; PAM type: NRG; PAM sequence: AGG
catcagtgccctctctatgt

SEQ ID NO: 10448 - DNA, 20 bp, Artificial Sequence
  Description of Artificial Sequence: Synthetic oligonucleotide
  Target: COL7A1; (-) strand; PAM type: NRG; PAM sequence: TAG
tcatcagtgccctctctatg

SEQ ID NO: 10449 - DNA, 20 bp, Artificial Sequence
  Description of Artificial Sequence: Synthetic oligonucleotide
  Target: COL7A1; (-) strand; PAM type: NRG; PAM sequence: CAG
aggcccagattgaggctcat

SEQ ID NO: 10450 - DNA, 20 bp, Artificial Sequence
  Description of Artificial Sequence: Synthetic oligonucleotide
  Target: COL7A1; (-) strand; PAM type: NRG; PAM sequence: AGG
cccaagtgaggcccagattg

SEQ ID NO: 10451 - DNA, 20 bp, Artificial Sequence
  Description of Artificial Sequence: Synthetic oligonucleotide
  Target: COL7A1; (-) strand; PAM type: NRG; PAM sequence: GAG
gcccaagtgaggcccagatt

SEQ ID NO: 10452 - DNA, 20 bp, Artificial Sequence
  Description of Artificial Sequence: Synthetic oligonucleotide
  Target: COL7A1; (-) strand; PAM type: NRG; PAM sequence: CAG
gaacaggcccaagtgaggcc

SEQ ID NO: 10453 - DNA, 20 bp, Artificial Sequence
  Description of Artificial Sequence: Synthetic oligonucleotide
  Target: COL7A1; (-) strand; PAM type: NRG; PAM sequence: AGG
gttgggaacaggcccaagtg

SEQ ID NO: 10454 - DNA, 20 bp, Artificial Sequence
  Description of Artificial Sequence: Synthetic oligonucleotide
  Target: COL7A1; (-) strand; PAM type: NRG; PAM sequence: GAG
ggttgggaacaggcccaagt

SEQ ID NO: 10455 - DNA, 20 bp, Artificial Sequence
  Description of Artificial Sequence: Synthetic oligonucleotide
  Target: COL7A1; (-) strand; PAM type: NRG; PAM sequence: AAG
cagaggttgggaacaggccc

SEQ ID NO: 10456 - DNA, 20 bp, Artificial Sequence
  Description of Artificial Sequence: Synthetic oligonucleotide
  Target: COL7A1; (-) strand; PAM type: NRG; PAM sequence: AGG
agcccccagaggttgggaac

SEQ ID NO: 10457 - DNA, 20 bp, Artificial Sequence
  Description of Artificial Sequence: Synthetic oligonucleotide
  Target: COL7A1; (-) strand; PAM type: NRG; PAM sequence: CAG
aagcccccagaggttgggaa

SEQ ID NO: 10458 - DNA, 20 bp, Artificial Sequence
  Description of Artificial Sequence: Synthetic oligonucleotide
  Target: COL7A1; (-) strand; PAM type: NRG; PAM sequence: GGG
ggaaaaagcccccagaggtt

SEQ ID NO: 10459 - DNA, 20 bp, Artificial Sequence
  Description of Artificial Sequence: Synthetic oligonucleotide
  Target: COL7A1; (-) strand; PAM type: NRG; PAM sequence: TGG
aggaaaaagcccccagaggt

SEQ ID NO: 10460 - DNA, 20 bp, Artificial Sequence
  Description of Artificial Sequence: Synthetic oligonucleotide
  Target: COL7A1; (-) strand; PAM type: NRG; PAM sequence: AGG
cccaaggaaaaagcccccag

SEQ ID NO: 10461 - DNA, 20 bp, Artificial Sequence
  Description of Artificial Sequence: Synthetic oligonucleotide
  Target: COL7A1; (-) strand; PAM type: NRG; PAM sequence: GAG
ccccaaggaaaaagccccca

SEQ ID NO: 10462 - DNA, 20 bp, Artificial Sequence
  Description of Artificial Sequence: Synthetic oligonucleotide
  Target: COL7A1; (-) strand; PAM type: NRG; PAM sequence: CAG
acccccaaggaaaaagcccc

SEQ ID NO: 10463 - DNA, 20 bp, Artificial Sequence
  Description of Artificial Sequence: Synthetic oligonucleotide
  Target: COL7A1; (-) strand; PAM type: NRG; PAM sequence: AAG
gaaattgacccccaaggaaa

SEQ ID NO: 10464 - DNA, 20 bp, Artificial Sequence
  Description of Artificial Sequence: Synthetic oligonucleotide
  Target: COL7A1; (-) strand; PAM type: NRG; PAM sequence: AGG
ggtatggaaattgaccccca

SEQ ID NO: 10465 - DNA, 20 bp, Artificial Sequence
  Description of Artificial Sequence: Synthetic oligonucleotide
  Target: COL7A1; (-) strand; PAM type: NRG; PAM sequence: AAG
aggtatggaaattgaccccc

SEQ ID NO: 10466 - DNA, 20 bp, Artificial Sequence
  Description of Artificial Sequence: Synthetic oligonucleotide
  Target: COL7A1; (-) strand; PAM type: NRG; PAM sequence: TGG
tgactggaaagggtgaggta

SEQ ID NO: 10467 - DNA, 20 bp, Artificial Sequence
  Description of Artificial Sequence: Synthetic oligonucleotide
  Target: COL7A1; (-) strand; PAM type: NRG; PAM sequence: AGG
atctgtgactggaaagggtg

SEQ ID NO: 10468 - DNA, 20 bp, Artificial Sequence
  Description of Artificial Sequence: Synthetic oligonucleotide
  Target: COL7A1; (-) strand; PAM type: NRG; PAM sequence: GAG
tatctgtgactggaaagggt

SEQ ID NO: 10469 - DNA, 20 bp, Artificial Sequence
  Description of Artificial Sequence: Synthetic oligonucleotide
  Target: COL7A1; (-) strand; PAM type: NRG; PAM sequence: GGG
gtattatctgtgactggaaa

SEQ ID NO: 10470 - DNA, 20 bp, Artificial Sequence
  Description of Artificial Sequence: Synthetic oligonucleotide
  Target: COL7A1; (-) strand; PAM type: NRG; PAM sequence: AGG
ggtattatctgtgactggaa

SEQ ID NO: 10471 - DNA, 20 bp, Artificial Sequence
  Description of Artificial Sequence: Synthetic oligonucleotide
  Target: COL7A1; (-) strand; PAM type: NRG; PAM sequence: AAG
aggtattatctgtgactgga

SEQ ID NO: 10472 - DNA, 20 bp, Artificial Sequence
  Description of Artificial Sequence: Synthetic oligonucleotide
  Target: COL7A1; (-) strand; PAM type: NRG; PAM sequence: TGG
gggtaggtattatctgtgac

SEQ ID NO: 10473 - DNA, 20 bp, Artificial Sequence
  Description of Artificial Sequence: Synthetic oligonucleotide
  Target: COL7A1; (-) strand; PAM type: NRG; PAM sequence: AGG
atgagaggcagtccatgggt

SEQ ID NO: 10474 - DNA, 20 bp, Artificial Sequence
  Description of Artificial Sequence: Synthetic oligonucleotide
  Target: COL7A1; (-) strand; PAM type: NRG; PAM sequence: TAG
tatgagaggcagtccatggg

SEQ ID NO: 10475 - DNA, 20 bp, Artificial Sequence
  Description of Artificial Sequence: Synthetic oligonucleotide
  Target: COL7A1; (-) strand; PAM type: NRG; PAM sequence: GGG
atctatgagaggcagtccat

SEQ ID NO: 10476 - DNA, 20 bp, Artificial Sequence
  Description of Artificial Sequence: Synthetic oligonucleotide
  Target: COL7A1; (-) strand; PAM type: NRG; PAM sequence: TGG
tatctatgagaggcagtcca

SEQ ID NO: 10477 - DNA, 20 bp, Artificial Sequence
  Description of Artificial Sequence: Synthetic oligonucleotide
  Target: COL7A1; (-) strand; PAM type: NRG; PAM sequence: CAG
tgtgtgctatctatgagagg

SEQ ID NO: 10478 - DNA, 20 bp, Artificial Sequence
  Description of Artificial Sequence: Synthetic oligonucleotide
  Target: COL7A1; (-) strand; PAM type: NRG; PAM sequence: AGG
ccgtgtgtgctatctatgag

SEQ ID NO: 10479 - DNA, 20 bp, Artificial Sequence
  Description of Artificial Sequence: Synthetic oligonucleotide
  Target: COL7A1; (-) strand; PAM type: NRG; PAM sequence: GAG
cccgtgtgtgctatctatga

SEQ ID NO: 10480 - DNA, 20 bp, Artificial Sequence
  Description of Artificial Sequence: Synthetic oligonucleotide
  Target: COL7A1; (-) strand; PAM type: NRG; PAM sequence: GAG
ggcccgtgtgtgctatctat

SEQ ID NO: 10481 - DNA, 20 bp, Artificial Sequence
  Description of Artificial Sequence: Synthetic oligonucleotide
  Target: COL7A1; (-) strand; PAM type: NRG; PAM sequence: AGG
gtatgtggatgtgtgtgtgc

SEQ ID NO: 10482 - DNA, 20 bp, Artificial Sequence
  Description of Artificial Sequence: Synthetic oligonucleotide
  Target: COL7A1; (-) strand; PAM type: NRG; PAM sequence: CAG
tgtatgtggatgtgtgtgtg

SEQ ID NO: 10483 - DNA, 20 bp, Artificial Sequence
  Description of Artificial Sequence: Synthetic oligonucleotide
  Target: COL7A1; (-) strand; PAM type: NRG; PAM sequence: TGG
tgtctgtgtgtggttgtatg

SEQ ID NO: 10484 - DNA, 20 bp, Artificial Sequence
  Description of Artificial Sequence: Synthetic oligonucleotide
  Target: COL7A1; (-) strand; PAM type: NRG; PAM sequence: TGG
tgtgtgcctgtgtctgtgtg

SEQ ID NO: 10485 - DNA, 20 bp, Artificial Sequence
  Description of Artificial Sequence: Synthetic oligonucleotide
  Target: COL7A1; (-) strand; PAM type: NRG; PAM sequence: AGG
caggctccggaccctccgct

SEQ ID NO: 10486 - DNA, 20 bp, Artificial Sequence
  Description of Artificial Sequence: Synthetic oligonucleotide
  Target: COL7A1; (-) strand; PAM type: NRG; PAM sequence: TAG
ccaggctccggaccctccgc

SEQ ID NO: 10487 - DNA, 20 bp, Artificial Sequence
  Description of Artificial Sequence: Synthetic oligonucleotide
  Target: COL7A1; (-) strand; PAM type: NRG; PAM sequence: CGG
aagcacctggccccaggctc

SEQ ID NO: 10488 - DNA, 20 bp, Artificial Sequence
  Description of Artificial Sequence: Synthetic oligonucleotide
  Target: COL7A1; (-) strand; PAM type: NRG; PAM sequence: AGG
tggctgaagcacctggcccc

SEQ ID NO: 10489 - DNA, 20 bp, Artificial Sequence
  Description of Artificial Sequence: Synthetic oligonucleotide
  Target: COL7A1; (-) strand; PAM type: NRG; PAM sequence: CAG
gtggctgaagcacctggccc

SEQ ID NO: 10490 - DNA, 20 bp, Artificial Sequence
  Description of Artificial Sequence: Synthetic oligonucleotide
  Target: COL7A1; (-) strand; PAM type: NRG; PAM sequence: TGG
tgagtggtggctgaagcacc

SEQ ID NO: 10491 - DNA, 20 bp, Artificial Sequence
  Description of Artificial Sequence: Synthetic oligonucleotide
  Target: COL7A1; (-) strand; PAM type: NRG; PAM sequence: AAG
aagccggtgagtggtggctg

SEQ ID NO: 10492 - DNA, 20 bp, Artificial Sequence
  Description of Artificial Sequence: Synthetic oligonucleotide
  Target: COL7A1; (-) strand; PAM type: NRG; PAM sequence: TGG
gaagggaagccggtgagtgg

SEQ ID NO: 10493 - DNA, 20 bp, Artificial Sequence
  Description of Artificial Sequence: Synthetic oligonucleotide
  Target: COL7A1; (-) strand; PAM type: NRG; PAM sequence: TGG
cctgaagggaagccggtgag

SEQ ID NO: 10494 - DNA, 20 bp, Artificial Sequence
  Description of Artificial Sequence: Synthetic oligonucleotide
  Target: COL7A1; (-) strand; PAM type: NRG; PAM sequence: GAG
gggcctgaagggaagccggt

SEQ ID NO: 10495 - DNA, 20 bp, Artificial Sequence
  Description of Artificial Sequence: Synthetic oligonucleotide
  Target: COL7A1; (-) strand; PAM type: NRG; PAM sequence: CGG
ggctgggcctgaagggaagc

SEQ ID NO: 10496 - DNA, 20 bp, Artificial Sequence
  Description of Artificial Sequence: Synthetic oligonucleotide
  Target: COL7A1; (-) strand; PAM type: NRG; PAM sequence: AAG
gtatggctgggcctgaaggg

SEQ ID NO: 10497 - DNA, 20 bp, Artificial Sequence
  Description of Artificial Sequence: Synthetic oligonucleotide
  Target: COL7A1; (-) strand; PAM type: NRG; PAM sequence: GGG
gtggtatggctgggcctgaa

SEQ ID NO: 10498 - DNA, 20 bp, Artificial Sequence
  Description of Artificial Sequence: Synthetic oligonucleotide
  Target: COL7A1; (-) strand; PAM type: NRG; PAM sequence: AGG
cgtggtatggctgggcctga

SEQ ID NO: 10499 - DNA, 20 bp, Artificial Sequence
  Description of Artificial Sequence: Synthetic oligonucleotide
  Target: COL7A1; (-) strand; PAM type: NRG; PAM sequence: AAG
gcgtggtatggctgggcctg

SEQ ID NO: 10500 - DNA, 20 bp, Artificial Sequence
  Description of Artificial Sequence: Synthetic oligonucleotide
  Target: COL7A1; (-) strand; PAM type: NRG; PAM sequence: GGG
caggagagcgtggtatggct

SEQ ID NO: 10501 - DNA, 20 bp, Artificial Sequence
  Description of Artificial Sequence: Synthetic oligonucleotide
  Target: COL7A1; (-) strand; PAM type: NRG; PAM sequence: TGG
ccaggagagcgtggtatggc

SEQ ID NO: 10502 - DNA, 20 bp, Artificial Sequence
  Description of Artificial Sequence: Synthetic oligonucleotide
  Target: COL7A1; (-) strand; PAM type: NRG; PAM sequence: TGG
tctaccaggagagcgtggta

SEQ ID NO: 10503 - DNA, 20 bp, Artificial Sequence
  Description of Artificial Sequence: Synthetic oligonucleotide
  Target: COL7A1; (-) strand; PAM type: NRG; PAM sequence: TGG
cagggtctaccaggagagcg

SEQ ID NO: 10504 - DNA, 20 bp, Artificial Sequence
  Description of Artificial Sequence: Synthetic oligonucleotide
  Target: COL7A1; (-) strand; PAM type: NRG; PAM sequence: GAG
ctctgcagggtctaccagga

SEQ ID NO: 10505 - DNA, 20 bp, Artificial Sequence
  Description of Artificial Sequence: Synthetic oligonucleotide
  Target: COL7A1; (-) strand; PAM type: NRG; PAM sequence: GAG
ttctctgcagggtctaccag

SEQ ID NO: 10506 - DNA, 20 bp, Artificial Sequence
  Description of Artificial Sequence: Synthetic oligonucleotide
  Target: COL7A1; (-) strand; PAM type: NRG; PAM sequence: AGG
tattctctgcagggtctacc

SEQ ID NO: 10507 - DNA, 20 bp, Artificial Sequence
  Description of Artificial Sequence: Synthetic oligonucleotide
  Target: COL7A1; (-) strand; PAM type: NRG; PAM sequence: CAG
ctattctctgcagggtctac

SEQ ID NO: 10508 - DNA, 20 bp, Artificial Sequence
  Description of Artificial Sequence: Synthetic oligonucleotide
  Target: COL7A1; (-) strand; PAM type: NRG; PAM sequence: GGG
ccttaaacctattctctgca

SEQ ID NO: 10509 - DNA, 20 bp, Artificial Sequence
  Description of Artificial Sequence: Synthetic oligonucleotide
  Target: COL7A1; (-) strand; PAM type: NRG; PAM sequence: AGG
gccttaaacctattctctgc

SEQ ID NO: 10510 - DNA, 20 bp, Artificial Sequence
  Description of Artificial Sequence: Synthetic oligonucleotide
  Target: COL7A1; (-) strand; PAM type: NRG; PAM sequence: CAG
ggccttaaacctattctctg

SEQ ID NO: 10511 - DNA, 20 bp, Artificial Sequence
  Description of Artificial Sequence: Synthetic oligonucleotide
  Target: COL7A1; (-) strand; PAM type: NRG; PAM sequence: AGG
aagttggaactgggaaacta

SEQ ID NO: 10512 - DNA, 20 bp, Artificial Sequence
  Description of Artificial Sequence: Synthetic oligonucleotide
  Target: COL7A1; (-) strand; PAM type: NRG; PAM sequence: AAG
gaagttggaactgggaaact

SEQ ID NO: 10513 - DNA, 20 bp, Artificial Sequence
  Description of Artificial Sequence: Synthetic oligonucleotide
  Target: COL7A1; (-) strand; PAM type: NRG; PAM sequence: GGG
gtggaggggaagttggaact

SEQ ID NO: 10514 - DNA, 20 bp, Artificial Sequence
  Description of Artificial Sequence: Synthetic oligonucleotide
  Target: COL7A1; (-) strand; PAM type: NRG; PAM sequence: TGG
ggtggaggggaagttggaac

SEQ ID NO: 10515 - DNA, 20 bp, Artificial Sequence
  Description of Artificial Sequence: Synthetic oligonucleotide
  Target: COL7A1; (-) strand; PAM type: NRG; PAM sequence: TGG
atggtgggtggaggggaagt

SEQ ID NO: 10516 - DNA, 20 bp, Artificial Sequence
  Description of Artificial Sequence: Synthetic oligonucleotide
  Target: COL7A1; (-) strand; PAM type: NRG; PAM sequence: AAG
ggggatggtgggtggagggg

SEQ ID NO: 10517 - DNA, 20 bp, Artificial Sequence
  Description of Artificial Sequence: Synthetic oligonucleotide
  Target: COL7A1; (-) strand; PAM type: NRG; PAM sequence: GGG
tagggggatggtgggtggag

SEQ ID NO: 10518 - DNA, 20 bp, Artificial Sequence
  Description of Artificial Sequence: Synthetic oligonucleotide
  Target: COL7A1; (-) strand; PAM type: NRG; PAM sequence: GGG
ctagggggatggtgggtgga

SEQ ID NO: 10519 - DNA, 20 bp, Artificial Sequence
  Description of Artificial Sequence: Synthetic oligonucleotide
  Target: COL7A1; (-) strand; PAM type: NRG; PAM sequence: AGG
tctagggggatggtgggtgg

SEQ ID NO: 10520 - DNA, 20 bp, Artificial Sequence
  Description of Artificial Sequence: Synthetic oligonucleotide
  Target: COL7A1; (-) strand; PAM type: NRG; PAM sequence: GAG
gtctagggggatggtgggtg

SEQ ID NO: 10521 - DNA, 20 bp, Artificial Sequence
  Description of Artificial Sequence: Synthetic oligonucleotide
  Target: COL7A1; (-) strand; PAM type: NRG; PAM sequence: TGG
ctgtctagggggatggtggg

SEQ ID NO: 10522 - DNA, 20 bp, Artificial Sequence
  Description of Artificial Sequence: Synthetic oligonucleotide
  Target: COL7A1; (-) strand; PAM type: NRG; PAM sequence: GGG
actctgtctagggggatggt

SEQ ID NO: 10523 - DNA, 20 bp, Artificial Sequence
  Description of Artificial Sequence: Synthetic oligonucleotide
  Target: COL7A1; (-) strand; PAM type: NRG; PAM sequence: TGG
gactctgtctagggggatgg

SEQ ID NO: 10524 - DNA, 20 bp, Artificial Sequence
  Description of Artificial Sequence: Synthetic oligonucleotide
  Target: COL7A1; (-) strand; PAM type: NRG; PAM sequence: TGG
cctgactctgtctaggggga

SEQ ID NO: 10525 - DNA, 20 bp, Artificial Sequence
  Description of Artificial Sequence: Synthetic oligonucleotide
  Target: COL7A1; (-) strand; PAM type: NRG; PAM sequence: GGG
gggtcctgactctgtctagg

SEQ ID NO: 10526 - DNA, 20 bp, Artificial Sequence
  Description of Artificial Sequence: Synthetic oligonucleotide
  Target: COL7A1; (-) strand; PAM type: NRG; PAM sequence: GGG
tgggtcctgactctgtctag

SEQ ID NO: 10527 - DNA, 20 bp, Artificial Sequence
  Description of Artificial Sequence: Synthetic oligonucleotide
  Target: COL7A1; (-) strand; PAM type: NRG; PAM sequence: GGG
ctgggtcctgactctgtcta

SEQ ID NO: 10528 - DNA, 20 bp, Artificial Sequence
  Description of Artificial Sequence: Synthetic oligonucleotide
  Target: COL7A1; (-) strand; PAM type: NRG; PAM sequence: AGG
tctgggtcctgactctgtct

SEQ ID NO: 10529 - DNA, 20 bp, Artificial Sequence
  Description of Artificial Sequence: Synthetic oligonucleotide
  Target: COL7A1; (-) strand; PAM type: NRG; PAM sequence: TAG
gtctgggtcctgactctgtc

SEQ ID NO: 10530 - DNA, 20 bp, Artificial Sequence
  Description of Artificial Sequence: Synthetic oligonucleotide
  Target: COL7A1; (-) strand; PAM type: NRG; PAM sequence: GGG
tgtactgcctgggactgtct

SEQ ID NO: 10531 - DNA, 20 bp, Artificial Sequence
  Description of Artificial Sequence: Synthetic oligonucleotide
  Target: COL7A1; (-) strand; PAM type: NRG; PAM sequence: TGG
ctgtactgcctgggactgtc

SEQ ID NO: 10532 - DNA, 20 bp, Artificial Sequence
  Description of Artificial Sequence: Synthetic oligonucleotide
  Target: COL7A1; (-) strand; PAM type: NRG; PAM sequence: GGG
ggctggggtctgtactgcct

SEQ ID NO: 10533 - DNA, 20 bp, Artificial Sequence
  Description of Artificial Sequence: Synthetic oligonucleotide
  Target: COL7A1; (-) strand; PAM type: NRG; PAM sequence: TGG
gggctggggtctgtactgcc

SEQ ID NO: 10534 - DNA, 20 bp, Artificial Sequence
  Description of Artificial Sequence: Synthetic oligonucleotide
  Target: COL7A1; (-) strand; PAM type: NRG; PAM sequence: GGG
ttgtcctgtgtgcagggctg

SEQ ID NO: 10535 - DNA, 20 bp, Artificial Sequence
  Description of Artificial Sequence: Synthetic oligonucleotide
  Target: COL7A1; (-) strand; PAM type: NRG; PAM sequence: GGG
attgtcctgtgtgcagggct

SEQ ID NO: 10536 - DNA, 20 bp, Artificial Sequence
  Description of Artificial Sequence: Synthetic oligonucleotide
  Target: COL7A1; (-) strand; PAM type: NRG; PAM sequence: TGG
tattgtcctgtgtgcagggc

SEQ ID NO: 10537 - DNA, 20 bp, Artificial Sequence
  Description of Artificial Sequence: Synthetic oligonucleotide
  Target: COL7A1; (-) strand; PAM type: NRG; PAM sequence: GGG
catgtattgtcctgtgtgca

SEQ ID NO: 10538 - DNA, 20 bp, Artificial Sequence
  Description of Artificial Sequence: Synthetic oligonucleotide
  Target: COL7A1; (-) strand; PAM type: NRG; PAM sequence: AGG
acatgtattgtcctgtgtgc

SEQ ID NO: 10539 - DNA, 20 bp, Artificial Sequence
  Description of Artificial Sequence: Synthetic oligonucleotide
  Target: COL7A1; (-) strand; PAM type: NRG; PAM sequence: CAG
cacatgtattgtcctgtgtg

SEQ ID NO: 10540 - DNA, 20 bp, Artificial Sequence
  Description of Artificial Sequence: Synthetic oligonucleotide
  Target: COL7A1; (-) strand; PAM type: NRG; PAM sequence: TGG
gccacacatgtgcaagaagg

SEQ ID NO: 10541 - DNA, 20 bp, Artificial Sequence
  Description of Artificial Sequence: Synthetic oligonucleotide
  Target: COL7A1; (-) strand; PAM type: NRG; PAM sequence: AGG
acagccacacatgtgcaaga

SEQ ID NO: 10542 - DNA, 20 bp, Artificial Sequence
  Description of Artificial Sequence: Synthetic oligonucleotide
  Target: COL7A1; (-) strand; PAM type: NRG; PAM sequence: AAG
aacagccacacatgtgcaag

SEQ ID NO: 10543 - DNA, 20 bp, Artificial Sequence
  Description of Artificial Sequence: Synthetic oligonucleotide
  Target: COL7A1; (-) strand; PAM type: NRG; PAM sequence: AAG
cccaacagccacacatgtgc

SEQ ID NO: 10544 - DNA, 20 bp, Artificial Sequence
  Description of Artificial Sequence: Synthetic oligonucleotide
  Target: COL7A1; (-) strand; PAM type: NRG; PAM sequence: CAG
cccggtaagtccttgcccaa

SEQ ID NO: 10545 - DNA, 20 bp, Artificial Sequence
  Description of Artificial Sequence: Synthetic oligonucleotide
  Target: COL7A1; (-) strand; PAM type: NRG; PAM sequence: AAG
ggtcaggacggcaacccggt

SEQ ID NO: 10546 - DNA, 20 bp, Artificial Sequence
  Description of Artificial Sequence: Synthetic oligonucleotide
  Target: COL7A1; (-) strand; PAM type: NRG; PAM sequence: CGG
gaggggtcaggacggcaacc

SEQ ID NO: 10547 - DNA, 20 bp, Artificial Sequence
  Description of Artificial Sequence: Synthetic oligonucleotide
  Target: COL7A1; (-) strand; PAM type: NRG; PAM sequence: CGG
cctggaccgaggggtcagga

SEQ ID NO: 10548 - DNA, 20 bp, Artificial Sequence
  Description of Artificial Sequence: Synthetic oligonucleotide
  Target: COL7A1; (-) strand; PAM type: NRG; PAM sequence: AGG
agagcctggaccgaggggtc

SEQ ID NO: 10549 - DNA, 20 bp, Artificial Sequence
  Description of Artificial Sequence: Synthetic oligonucleotide
  Target: COL7A1; (-) strand; PAM type: NRG; PAM sequence: CAG
gagagcctggaccgaggggt

SEQ ID NO: 10550 - DNA, 20 bp, Artificial Sequence
  Description of Artificial Sequence: Synthetic oligonucleotide
  Target: COL7A1; (-) strand; PAM type: NRG; PAM sequence: GGG
cggggagagcctggaccgag

SEQ ID NO: 10551 - DNA, 20 bp, Artificial Sequence
  Description of Artificial Sequence: Synthetic oligonucleotide
  Target: COL7A1; (-) strand; PAM type: NRG; PAM sequence: GGG
ccggggagagcctggaccga

SEQ ID NO: 10552 - DNA, 20 bp, Artificial Sequence
  Description of Artificial Sequence: Synthetic oligonucleotide
  Target: COL7A1; (-) strand; PAM type: NRG; PAM sequence: AGG
accggggagagcctggaccg

SEQ ID NO: 10553 - DNA, 20 bp, Artificial Sequence
  Description of Artificial Sequence: Synthetic oligonucleotide
  Target: COL7A1; (-) strand; PAM type: NRG; PAM sequence: GAG
gaccggggagagcctggacc

SEQ ID NO: 10554 - DNA, 20 bp, Artificial Sequence
  Description of Artificial Sequence: Synthetic oligonucleotide
  Target: COL7A1; (-) strand; PAM type: NRG; PAM sequence: TGG
aaaggagaccggggagagcc

SEQ ID NO: 10555 - DNA, 20 bp, Artificial Sequence
  Description of Artificial Sequence: Synthetic oligonucleotide
  Target: COL7A1; (-) strand; PAM type: NRG; PAM sequence: GAG
gcatcaaaggagaccgggga

SEQ ID NO: 10556 - DNA, 20 bp, Artificial Sequence
  Description of Artificial Sequence: Synthetic oligonucleotide
  Target: COL7A1; (-) strand; PAM type: NRG; PAM sequence: GAG
aggcatcaaaggagaccggg

SEQ ID NO: 10557 - DNA, 20 bp, Artificial Sequence
  Description of Artificial Sequence: Synthetic oligonucleotide
  Target: COL7A1; (-) strand; PAM type: NRG; PAM sequence: GGG
ccaggcatcaaaggagaccg

SEQ ID NO: 10558 - DNA, 20 bp, Artificial Sequence
  Description of Artificial Sequence: Synthetic oligonucleotide
  Target: COL7A1; (-) strand; PAM type: NRG; PAM sequence: GGG
gccaggcatcaaaggagacc

SEQ ID NO: 10559 - DNA, 20 bp, Artificial Sequence
  Description of Artificial Sequence: Synthetic oligonucleotide
  Target: COL7A1; (-) strand; PAM type: NRG; PAM sequence: CGG
tgccaggcatcaaaggagac

SEQ ID NO: 10560 - DNA, 20 bp, Artificial Sequence
  Description of Artificial Sequence: Synthetic oligonucleotide
  Target: COL7A1; (-) strand; PAM type: NRG; PAM sequence: GAG
gggtgtgccaggcatcaaag

SEQ ID NO: 10561 - DNA, 20 bp, Artificial Sequence
  Description of Artificial Sequence: Synthetic oligonucleotide
  Target: COL7A1; (-) strand; PAM type: NRG; PAM sequence: AGG
cagggtgtgccaggcatcaa

SEQ ID NO: 10562 - DNA, 20 bp, Artificial Sequence
  Description of Artificial Sequence: Synthetic oligonucleotide
  Target: COL7A1; (-) strand; PAM type: NRG; PAM sequence: AAG
tcagggtgtgccaggcatca

SEQ ID NO: 10563 - DNA, 20 bp, Artificial Sequence
  Description of Artificial Sequence: Synthetic oligonucleotide
  Target: COL7A1; (-) strand; PAM type: NRG; PAM sequence: AGG
ctctgccttcagggtgtgcc

SEQ ID NO: 10564 - DNA, 20 bp, Artificial Sequence
  Description of Artificial Sequence: Synthetic oligonucleotide
  Target: COL7A1; (-) strand; PAM type: NRG; PAM sequence: CAG
actctgccttcagggtgtgc

SEQ ID NO: 10565 - DNA, 20 bp, Artificial Sequence
  Description of Artificial Sequence: Synthetic oligonucleotide
  Target: COL7A1; (-) strand; PAM type: NRG; PAM sequence: GGG
ggcacgacactctgccttca

SEQ ID NO: 10566 - DNA, 20 bp, Artificial Sequence
  Description of Artificial Sequence: Synthetic oligonucleotide
  Target: COL7A1; (-) strand; PAM type: NRG; PAM sequence: AGG
gggcacgacactctgccttc

SEQ ID NO: 10567 - DNA, 20 bp, Artificial Sequence
  Description of Artificial Sequence: Synthetic oligonucleotide
  Target: COL7A1; (-) strand; PAM type: NRG; PAM sequence: CAG
agggcacgacactctgcctt

SEQ ID NO: 10568 - DNA, 20 bp, Artificial Sequence
  Description of Artificial Sequence: Synthetic oligonucleotide
  Target: COL7A1; (-) strand; PAM type: NRG; PAM sequence: GGG
tggcagggactgggggctca

SEQ ID NO: 10569 - DNA, 20 bp, Artificial Sequence
  Description of Artificial Sequence: Synthetic oligonucleotide
  Target: COL7A1; (-) strand; PAM type: NRG; PAM sequence: AGG
gtggcagggactgggggctc

SEQ ID NO: 10570 - DNA, 20 bp, Artificial Sequence
  Description of Artificial Sequence: Synthetic oligonucleotide
  Target: COL7A1; (-) strand; PAM type: NRG; PAM sequence: CAG
cgtggcagggactgggggct

SEQ ID NO: 10571 - DNA, 20 bp, Artificial Sequence
  Description of Artificial Sequence: Synthetic oligonucleotide
  Target: COL7A1; (-) strand; PAM type: NRG; PAM sequence: GGG
gggcacgtggcagggactgg

SEQ ID NO: 10572 - DNA, 20 bp, Artificial Sequence
  Description of Artificial Sequence: Synthetic oligonucleotide
  Target: COL7A1; (-) strand; PAM type: NRG; PAM sequence: GGG
tgggcacgtggcagggactg

SEQ ID NO: 10573 - DNA, 20 bp, Artificial Sequence
  Description of Artificial Sequence: Synthetic oligonucleotide
  Target: COL7A1; (-) strand; PAM type: NRG; PAM sequence: GGG
ctgggcacgtggcagggact

SEQ ID NO: 10574 - DNA, 20 bp, Artificial Sequence
  Description of Artificial Sequence: Synthetic oligonucleotide
  Target: COL7A1; (-) strand; PAM type: NRG; PAM sequence: TGG
cctgggcacgtggcagggac

SEQ ID NO: 10575 - DNA, 20 bp, Artificial Sequence
  Description of Artificial Sequence: Synthetic oligonucleotide
  Target: COL7A1; (-) strand; PAM type: NRG; PAM sequence: GGG
atgcacctgggcacgtggca

SEQ ID NO: 10576 - DNA, 20 bp, Artificial Sequence
  Description of Artificial Sequence: Synthetic oligonucleotide
  Target: COL7A1; (-) strand; PAM type: NRG; PAM sequence: AGG
tatgcacctgggcacgtggc

SEQ ID NO: 10577 - DNA, 20 bp, Artificial Sequence
  Description of Artificial Sequence: Synthetic oligonucleotide
  Target: COL7A1; (-) strand; PAM type: NRG; PAM sequence: CAG
atatgcacctgggcacgtgg

SEQ ID NO: 10578 - DNA, 20 bp, Artificial Sequence
  Description of Artificial Sequence: Synthetic oligonucleotide
  Target: COL7A1; (-) strand; PAM type: NRG; PAM sequence: TGG
tgcatatgcacctgggcacg

SEQ ID NO: 10579 - DNA, 20 bp, Artificial Sequence
  Description of Artificial Sequence: Synthetic oligonucleotide
  Target: COL7A1; (-) strand; PAM type: NRG; PAM sequence: GGG
ggtggtgtgcatatgcacct

SEQ ID NO: 10580 - DNA, 20 bp, Artificial Sequence
  Description of Artificial Sequence: Synthetic oligonucleotide
  Target: COL7A1; (-) strand; PAM type: NRG; PAM sequence: TGG
aggtggtgtgcatatgcacc

SEQ ID NO: 10581 - DNA, 20 bp, Artificial Sequence
  Description of Artificial Sequence: Synthetic oligonucleotide
  Target: COL7A1; (-) strand; PAM type: NRG; PAM sequence: TGG
ttctgggggcacactagagg

SEQ ID NO: 10582 - DNA, 20 bp, Artificial Sequence
  Description of Artificial Sequence: Synthetic oligonucleotide
  Target: COL7A1; (-) strand; PAM type: NRG; PAM sequence: AGG
cctttctgggggcacactag

SEQ ID NO: 10583 - DNA, 20 bp, Artificial Sequence
  Description of Artificial Sequence: Synthetic oligonucleotide
  Target: COL7A1; (-) strand; PAM type: NRG; PAM sequence: GAG
tcctttctgggggcacacta

SEQ ID NO: 10584 - DNA, 20 bp, Artificial Sequence
  Description of Artificial Sequence: Synthetic oligonucleotide
  Target: COL7A1; (-) strand; PAM type: NRG; PAM sequence: TAG
cctcctttctgggggcacac

SEQ ID NO: 10585 - DNA, 20 bp, Artificial Sequence
  Description of Artificial Sequence: Synthetic oligonucleotide
  Target: COL7A1; (-) strand; PAM type: NRG; PAM sequence: GGG
agagtccccctcctttctgg

SEQ ID NO: 10586 - DNA, 20 bp, Artificial Sequence
  Description of Artificial Sequence: Synthetic oligonucleotide
  Target: COL7A1; (-) strand; PAM type: NRG; PAM sequence: GGG
tagagtccccctcctttctg

SEQ ID NO: 10587 - DNA, 20 bp, Artificial Sequence
  Description of Artificial Sequence: Synthetic oligonucleotide
  Target: COL7A1; (-) strand; PAM type: NRG; PAM sequence: GGG
atagagtccccctcctttct

SEQ ID NO: 10588 - DNA, 20 bp, Artificial Sequence
  Description of Artificial Sequence: Synthetic oligonucleotide
  Target: COL7A1; (-) strand; PAM type: NRG; PAM sequence: TGG
catagagtccccctcctttc

SEQ ID NO: 10589 - DNA, 20 bp, Artificial Sequence
  Description of Artificial Sequence: Synthetic oligonucleotide
  Target: COL7A1; (-) strand; PAM type: NRG; PAM sequence: GAG
cctctctccacccttccata

SEQ ID NO: 10590 - DNA, 20 bp, Artificial Sequence
  Description of Artificial Sequence: Synthetic oligonucleotide
  Target: COL7A1; (-) strand; PAM type: NRG; PAM sequence: TAG
ggcctctctccacccttcca

SEQ ID NO: 10591 - DNA, 20 bp, Artificial Sequence
  Description of Artificial Sequence: Synthetic oligonucleotide
  Target: COL7A1; (-) strand; PAM type: NRG; PAM sequence: AGG
gtcccaaaggagacagggtg

SEQ ID NO: 10592 - DNA, 20 bp, Artificial Sequence
  Description of Artificial Sequence: Synthetic oligonucleotide
  Target: COL7A1; (-) strand; PAM type: NRG; PAM sequence: GAG
ggtcccaaaggagacagggt

SEQ ID NO: 10593 - DNA, 20 bp, Artificial Sequence
  Description of Artificial Sequence: Synthetic oligonucleotide
  Target: COL7A1; (-) strand; PAM type: NRG; PAM sequence: GGG
ccaaggtcccaaaggagaca

SEQ ID NO: 10594 - DNA, 20 bp, Artificial Sequence
  Description of Artificial Sequence: Synthetic oligonucleotide
  Target: COL7A1; (-) strand; PAM type: NRG; PAM sequence: AGG
accaaggtcccaaaggagac

SEQ ID NO: 10595 - DNA, 20 bp, Artificial Sequence
  Description of Artificial Sequence: Synthetic oligonucleotide
  Target: COL7A1; (-) strand; PAM type: NRG; PAM sequence: CAG
gaccaaggtcccaaaggaga

SEQ ID NO: 10596 - DNA, 20 bp, Artificial Sequence
  Description of Artificial Sequence: Synthetic oligonucleotide
  Target: COL7A1; (-) strand; PAM type: NRG; PAM sequence: GAG
tggtgaccaaggtcccaaag

SEQ ID NO: 10597 - DNA, 20 bp, Artificial Sequence
  Description of Artificial Sequence: Synthetic oligonucleotide
  Target: COL7A1; (-) strand; PAM type: NRG; PAM sequence: AGG
aatggtgaccaaggtcccaa

SEQ ID NO: 10598 - DNA, 20 bp, Artificial Sequence
  Description of Artificial Sequence: Synthetic oligonucleotide
  Target: COL7A1; (-) strand; PAM type: NRG; PAM sequence: AAG
caatggtgaccaaggtccca

SEQ ID NO: 10599 - DNA, 20 bp, Artificial Sequence
  Description of Artificial Sequence: Synthetic oligonucleotide
  Target: COL7A1; (-) strand; PAM type: NRG; PAM sequence: AGG
ccgggcagcaatggtgacca

SEQ ID NO: 10600 - DNA, 20 bp, Artificial Sequence
  Description of Artificial Sequence: Synthetic oligonucleotide
  Target: COL7A1; (-) strand; PAM type: NRG; PAM sequence: AAG
gccgggcagcaatggtgacc

SEQ ID NO: 10601 - DNA, 20 bp, Artificial Sequence
  Description of Artificial Sequence: Synthetic oligonucleotide
  Target: COL7A1; (-) strand; PAM type: NRG; PAM sequence: TGG
cagggggagccgggcagcaa

SEQ ID NO: 10602 - DNA, 20 bp, Artificial Sequence
  Description of Artificial Sequence: Synthetic oligonucleotide
  Target: COL7A1; (-) strand; PAM type: NRG; PAM sequence: CAG
tccccacagggggagccggg

SEQ ID NO: 10603 - DNA, 20 bp, Artificial Sequence
  Description of Artificial Sequence: Synthetic oligonucleotide
  Target: COL7A1; (-) strand; PAM type: NRG; PAM sequence: GGG
tcatccccacagggggagcc

SEQ ID NO: 10604 - DNA, 20 bp, Artificial Sequence
  Description of Artificial Sequence: Synthetic oligonucleotide
  Target: COL7A1; (-) strand; PAM type: NRG; PAM sequence: CGG
ctcatccccacagggggagc

SEQ ID NO: 10605 - DNA, 20 bp, Artificial Sequence
  Description of Artificial Sequence: Synthetic oligonucleotide
  Target: COL7A1; (-) strand; PAM type: NRG; PAM sequence: GAG
acatctcatccccacagggg

SEQ ID NO: 10606 - DNA, 20 bp, Artificial Sequence
  Description of Artificial Sequence: Synthetic oligonucleotide
  Target: COL7A1; (-) strand; PAM type: NRG; PAM sequence: GGG
tgacatctcatccccacagg

SEQ ID NO: 10607 - DNA, 20 bp, Artificial Sequence
  Description of Artificial Sequence: Synthetic oligonucleotide
  Target: COL7A1; (-) strand; PAM type: NRG; PAM sequence: GGG
ttgacatctcatccccacag

SEQ ID NO: 10608 - DNA, 20 bp, Artificial Sequence
  Description of Artificial Sequence: Synthetic oligonucleotide
  Target: COL7A1; (-) strand; PAM type: NRG; PAM sequence: GGG
cttgacatctcatccccaca

SEQ ID NO: 10609 - DNA, 20 bp, Artificial Sequence
  Description of Artificial Sequence: Synthetic oligonucleotide
  Target: COL7A1; (-) strand; PAM type: NRG; PAM sequence: AGG
acttgacatctcatccccac

SEQ ID NO: 10610 - DNA, 20 bp, Artificial Sequence
  Description of Artificial Sequence: Synthetic oligonucleotide
  Target: COL7A1; (-) strand; PAM type: NRG; PAM sequence: CAG
gacttgacatctcatcccca

SEQ ID NO: 10611 - DNA, 20 bp, Artificial Sequence
  Description of Artificial Sequence: Synthetic oligonucleotide
  Target: COL7A1; (-) strand; PAM type: NRG; PAM sequence: GGG
caccctctgccatggcacta

SEQ ID NO: 10612 - DNA, 20 bp, Artificial Sequence
  Description of Artificial Sequence: Synthetic oligonucleotide
  Target: COL7A1; (-) strand; PAM type: NRG; PAM sequence: AGG
ccaccctctgccatggcact

SEQ ID NO: 10613 - DNA, 20 bp, Artificial Sequence
  Description of Artificial Sequence: Synthetic oligonucleotide
  Target: COL7A1; (-) strand; PAM type: NRG; PAM sequence: TAG
gccaccctctgccatggcac

SEQ ID NO: 10614 - DNA, 20 bp, Artificial Sequence
  Description of Artificial Sequence: Synthetic oligonucleotide
  Target: COL7A1; (-) strand; PAM type: NRG; PAM sequence: TGG
ctcggggccaccctctgcca

SEQ ID NO: 10615 - DNA, 20 bp, Artificial Sequence
  Description of Artificial Sequence: Synthetic oligonucleotide
  Target: COL7A1; (-) strand; PAM type: NRG; PAM sequence: GGG
cagtgtgtggaatcagctcg

SEQ ID NO: 10616 - DNA, 20 bp, Artificial Sequence
  Description of Artificial Sequence: Synthetic oligonucleotide
  Target: COL7A1; (-) strand; PAM type: NRG; PAM sequence: GGG
tcagtgtgtggaatcagctc

SEQ ID NO: 10617 - DNA, 20 bp, Artificial Sequence
  Description of Artificial Sequence: Synthetic oligonucleotide
  Target: COL7A1; (-) strand; PAM type: NRG; PAM sequence: CGG
gtcagtgtgtggaatcagct

SEQ ID NO: 10618 - DNA, 20 bp, Artificial Sequence
  Description of Artificial Sequence: Synthetic oligonucleotide
  Target: COL7A1; (-) strand; PAM type: NRG; PAM sequence: CAG
ctaaggtcagtgtgtggaat

SEQ ID NO: 10619 - DNA, 20 bp, Artificial Sequence
  Description of Artificial Sequence: Synthetic oligonucleotide
  Target: COL7A1; (-) strand; PAM type: NRG; PAM sequence: TGG
agggtgctaaggtcagtgtg

SEQ ID NO: 10620 - DNA, 20 bp, Artificial Sequence
  Description of Artificial Sequence: Synthetic oligonucleotide
  Target: COL7A1; (-) strand; PAM type: NRG; PAM sequence: CAG
ggactcaagggtgctaaggt

SEQ ID NO: 10621 - DNA, 20 bp, Artificial Sequence
  Description of Artificial Sequence: Synthetic oligonucleotide
  Target: COL7A1; (-) strand; PAM type: NRG; PAM sequence: AGG
ccctggactcaagggtgcta

SEQ ID NO: 10622 - DNA, 20 bp, Artificial Sequence
  Description of Artificial Sequence: Synthetic oligonucleotide
  Target: COL7A1; (-) strand; PAM type: NRG; PAM sequence: AAG
cccctggactcaagggtgct

SEQ ID NO: 10623 - DNA, 20 bp, Artificial Sequence
  Description of Artificial Sequence: Synthetic oligonucleotide
  Target: COL7A1; (-) strand; PAM type: NRG; PAM sequence: GGG
cagggaccccctggactcaa

SEQ ID NO: 10624 - DNA, 20 bp, Artificial Sequence
  Description of Artificial Sequence: Synthetic oligonucleotide
  Target: COL7A1; (-) strand; PAM type: NRG; PAM sequence: AGG
acagggaccccctggactca

SEQ ID NO: 10625 - DNA, 20 bp, Artificial Sequence
  Description of Artificial Sequence: Synthetic oligonucleotide
  Target: COL7A1; (-) strand; PAM type: NRG; PAM sequence: AAG
aacagggaccccctggactc

SEQ ID NO: 10626 - DNA, 20 bp, Artificial Sequence
  Description of Artificial Sequence: Synthetic oligonucleotide
  Target: COL7A1; (-) strand; PAM type: NRG; PAM sequence: TGG
tctggagaacagggaccccc

SEQ ID NO: 10627 - DNA, 20 bp, Artificial Sequence
  Description of Artificial Sequence: Synthetic oligonucleotide
  Target: COL7A1; (-) strand; PAM type: NRG; PAM sequence: GGG
cctggactctctggagaaca

SEQ ID NO: 10628 - DNA, 20 bp, Artificial Sequence
  Description of Artificial Sequence: Synthetic oligonucleotide
  Target: COL7A1; (-) strand; PAM type: NRG; PAM sequence: AGG
tcctggactctctggagaac

SEQ ID NO: 10629 - DNA, 20 bp, Artificial Sequence
  Description of Artificial Sequence: Synthetic oligonucleotide
  Target: COL7A1; (-) strand; PAM type: NRG; PAM sequence: CAG
gtcctggactctctggagaa

SEQ ID NO: 10630 - DNA, 20 bp, Artificial Sequence
  Description of Artificial Sequence: Synthetic oligonucleotide
  Target: COL7A1; (-) strand; PAM type: NRG; PAM sequence: GAG
gccaggtcctggactctctg

SEQ ID NO: 10631 - DNA, 20 bp, Artificial Sequence
  Description of Artificial Sequence: Synthetic oligonucleotide
  Target: COL7A1; (-) strand; PAM type: NRG; PAM sequence: TGG
gagccaggtcctggactctc

SEQ ID NO: 10632 - DNA, 20 bp, Artificial Sequence
  Description of Artificial Sequence: Synthetic oligonucleotide
  Target: COL7A1; (-) strand; PAM type: NRG; PAM sequence: TGG
tctgtggatgagccaggtcc

SEQ ID NO: 10633 - DNA, 20 bp, Artificial Sequence
  Description of Artificial Sequence: Synthetic oligonucleotide
  Target: COL7A1; (-) strand; PAM type: NRG; PAM sequence: AGG
taggtgtctgtggatgagcc

SEQ ID NO: 10634 - DNA, 20 bp, Artificial Sequence
  Description of Artificial Sequence: Synthetic oligonucleotide
  Target: COL7A1; (-) strand; PAM type: NRG; PAM sequence: CAG
gtaggtgtctgtggatgagc

SEQ ID NO: 10635 - DNA, 20 bp, Artificial Sequence
  Description of Artificial Sequence: Synthetic oligonucleotide
  Target: COL7A1; (-) strand; PAM type: NRG; PAM sequence: GAG
gtttgtaggtgtctgtggat

SEQ ID NO: 10636 - DNA, 20 bp, Artificial Sequence
  Description of Artificial Sequence: Synthetic oligonucleotide
  Target: COL7A1; (-) strand; PAM type: NRG; PAM sequence: TGG
cttgtgtttgtaggtgtctg

SEQ ID NO: 10637 - DNA, 20 bp, Artificial Sequence
  Description of Artificial Sequence: Synthetic oligonucleotide
  Target: COL7A1; (-) strand; PAM type: NRG; PAM sequence: AGG
ccctgtgaccttgtgtttgt

SEQ ID NO: 10638 - DNA, 20 bp, Artificial Sequence
  Description of Artificial Sequence: Synthetic oligonucleotide
  Target: COL7A1; (-) strand; PAM type: NRG; PAM sequence: TAG
cccctgtgaccttgtgtttg

SEQ ID NO: 10639 - DNA, 20 bp, Artificial Sequence
  Description of Artificial Sequence: Synthetic oligonucleotide
  Target: COL7A1; (-) strand; PAM type: NRG; PAM sequence: GAG
tcccccatgcctctatgaca

SEQ ID NO: 10640 - DNA, 20 bp, Artificial Sequence
  Description of Artificial Sequence: Synthetic oligonucleotide
  Target: COL7A1; (-) strand; PAM type: NRG; PAM sequence: CAG
actcccccatgcctctatga

SEQ ID NO: 10641 - DNA, 20 bp, Artificial Sequence
  Description of Artificial Sequence: Synthetic oligonucleotide
  Target: COL7A1; (-) strand; PAM type: NRG; PAM sequence: GAG
ctataaccctctgtgatcct

SEQ ID NO: 10642 - DNA, 20 bp, Artificial Sequence
  Description of Artificial Sequence: Synthetic oligonucleotide
  Target: COL7A1; (-) strand; PAM type: NRG; PAM sequence: TGG
ggtagtgtgtgccataaccc

SEQ ID NO: 10643 - DNA, 20 bp, Artificial Sequence
  Description of Artificial Sequence: Synthetic oligonucleotide
  Target: COL7A1; (-) strand; PAM type: NRG; PAM sequence: TAG
cttggtccccagaaatatgg

SEQ ID NO: 10644 - DNA, 20 bp, Artificial Sequence
  Description of Artificial Sequence: Synthetic oligonucleotide
  Target: COL7A1; (-) strand; PAM type: NRG; PAM sequence: TGG
tagcttggtccccagaaata

SEQ ID NO: 10645 - DNA, 20 bp, Artificial Sequence
  Description of Artificial Sequence: Synthetic oligonucleotide
  Target: COL7A1; (-) strand; PAM type: NRG; PAM sequence: CAG
gccacccttagcttggtccc

SEQ ID NO: 10646 - DNA, 20 bp, Artificial Sequence
  Description of Artificial Sequence: Synthetic oligonucleotide
  Target: COL7A1; (-) strand; PAM type: NRG; PAM sequence: TGG
ccaggaagccacccttagct

SEQ ID NO: 10647 - DNA, 20 bp, Artificial Sequence
  Description of Artificial Sequence: Synthetic oligonucleotide
  Target: COL7A1; (-) strand; PAM type: NRG; PAM sequence: TAG
agtgaccaggaagccaccct

SEQ ID NO: 10648 - DNA, 20 bp, Artificial Sequence
  Description of Artificial Sequence: Synthetic oligonucleotide
  Target: COL7A1; (-) strand; PAM type: NRG; PAM sequence: AAG
tcctgtgactagtgaccagg

SEQ ID NO: 10649 - DNA, 20 bp, Artificial Sequence
  Description of Artificial Sequence: Synthetic oligonucleotide
  Target: COL7A1; (-) strand; PAM type: NRG; PAM sequence: AGG
tagtcctgtgactagtgacc

SEQ ID NO: 10650 - DNA, 20 bp, Artificial Sequence
  Description of Artificial Sequence: Synthetic oligonucleotide
  Target: COL7A1; (-) strand; PAM type: NRG; PAM sequence: CAG
ttagtcctgtgactagtgac

SEQ ID NO: 10651 - DNA, 20 bp, Artificial Sequence
  Description of Artificial Sequence: Synthetic oligonucleotide
  Target: COL7A1; (-) strand; PAM type: NRG; PAM sequence: TAG
ccctgccttagtcctgtgac

SEQ ID NO: 10652 - DNA, 20 bp, Artificial Sequence
  Description of Artificial Sequence: Synthetic oligonucleotide
  Target: COL7A1; (-) strand; PAM type: NRG; PAM sequence: TAG
tgatcaccccatccctgcct

SEQ ID NO: 10653 - DNA, 20 bp, Artificial Sequence
  Description of Artificial Sequence: Synthetic oligonucleotide
  Target: COL7A1; (-) strand; PAM type: NRG; PAM sequence: AGG
ccccggaccccctggcccca

SEQ ID NO: 10654 - DNA, 20 bp, Artificial Sequence
  Description of Artificial Sequence: Synthetic oligonucleotide
  Target: COL7A1; (-) strand; PAM type: NRG; PAM sequence: AAG
cccccggaccccctggcccc

SEQ ID NO: 10655 - DNA, 20 bp, Artificial Sequence
  Description of Artificial Sequence: Synthetic oligonucleotide
  Target: COL7A1; (-) strand; PAM type: NRG; PAM sequence: TGG
cctgggccccccggaccccc

SEQ ID NO: 10656 - DNA, 20 bp, Artificial Sequence
  Description of Artificial Sequence: Synthetic oligonucleotide
  Target: COL7A1; (-) strand; PAM type: NRG; PAM sequence: CGG
cctggaacccctgggccccc

SEQ ID NO: 10657 - DNA, 20 bp, Artificial Sequence
  Description of Artificial Sequence: Synthetic oligonucleotide
  Target: COL7A1; (-) strand; PAM type: NRG; PAM sequence: GGG
ctggactccctggaacccct

SEQ ID NO: 10658 - DNA, 20 bp, Artificial Sequence
  Description of Artificial Sequence: Synthetic oligonucleotide
  Target: COL7A1; (-) strand; PAM type: NRG; PAM sequence: TGG
cctggactccctggaacccc

SEQ ID NO: 10659 - DNA, 20 bp, Artificial Sequence
  Description of Artificial Sequence: Synthetic oligonucleotide
  Target: COL7A1; (-) strand; PAM type: NRG; PAM sequence: TGG
gatggccctcctggactccc

SEQ ID NO: 10660 - DNA, 20 bp, Artificial Sequence
  Description of Artificial Sequence: Synthetic oligonucleotide
  Target: COL7A1; (-) strand; PAM type: NRG; PAM sequence: TGG
cagggcagagatggccctcc

SEQ ID NO: 10661 - DNA, 20 bp, Artificial Sequence
  Description of Artificial Sequence: Synthetic oligonucleotide
  Target: COL7A1; (-) strand; PAM type: NRG; PAM sequence: TGG
tgtttcctgcagggcagaga

SEQ ID NO: 10662 - DNA, 20 bp, Artificial Sequence
  Description of Artificial Sequence: Synthetic oligonucleotide
  Target: COL7A1; (-) strand; PAM type: NRG; PAM sequence: GAG
ttcttgtttcctgcagggca

SEQ ID NO: 10663 - DNA, 20 bp, Artificial Sequence
  Description of Artificial Sequence: Synthetic oligonucleotide
  Target: COL7A1; (-) strand; PAM type: NRG; PAM sequence: CAG
ttttcttgtttcctgcaggg

SEQ ID NO: 10664 - DNA, 20 bp, Artificial Sequence
  Description of Artificial Sequence: Synthetic oligonucleotide
  Target: COL7A1; (-) strand; PAM type: NRG; PAM sequence: GGG
ccattttcttgtttcctgca

SEQ ID NO: 10665 - DNA, 20 bp, Artificial Sequence
  Description of Artificial Sequence: Synthetic oligonucleotide
  Target: COL7A1; (-) strand; PAM type: NRG; PAM sequence: AGG
cccattttcttgtttcctgc

SEQ ID NO: 10666 - DNA, 20 bp, Artificial Sequence
  Description of Artificial Sequence: Synthetic oligonucleotide
  Target: COL7A1; (-) strand; PAM type: NRG; PAM sequence: CAG
ccccattttcttgtttcctg

SEQ ID NO: 10667 - DNA, 20 bp, Artificial Sequence
  Description of Artificial Sequence: Synthetic oligonucleotide
  Target: COL7A1; (-) strand; PAM type: NRG; PAM sequence: GGG
gctgtctggaggctgtgctg

SEQ ID NO: 10668 - DNA, 20 bp, Artificial Sequence
  Description of Artificial Sequence: Synthetic oligonucleotide
  Target: COL7A1; (-) strand; PAM type: NRG; PAM sequence: GGG
ggctgtctggaggctgtgct

SEQ ID NO: 10669 - DNA, 20 bp, Artificial Sequence
  Description of Artificial Sequence: Synthetic oligonucleotide
  Target: COL7A1; (-) strand; PAM type: NRG; PAM sequence: TGG
aggctgtctggaggctgtgc

SEQ ID NO: 10670 - DNA, 20 bp, Artificial Sequence
  Description of Artificial Sequence: Synthetic oligonucleotide
  Target: COL7A1; (-) strand; PAM type: NRG; PAM sequence: AGG
tcgtggggcaggctgtctgg

SEQ ID NO: 10671 - DNA, 20 bp, Artificial Sequence
  Description of Artificial Sequence: Synthetic oligonucleotide
  Target: COL7A1; (-) strand; PAM type: NRG; PAM sequence: GAG
ttcgtggggcaggctgtctg

SEQ ID NO: 10672 - DNA, 20 bp, Artificial Sequence
  Description of Artificial Sequence: Synthetic oligonucleotide
  Target: COL7A1; (-) strand; PAM type: NRG; PAM sequence: TGG
gcttcgtggggcaggctgtc

SEQ ID NO: 10673 - DNA, 20 bp, Artificial Sequence
  Description of Artificial Sequence: Synthetic oligonucleotide
  Target: COL7A1; (-) strand; PAM type: NRG; PAM sequence: AGG
tgcgatgggcttcgtggggc

SEQ ID NO: 10674 - DNA, 20 bp, Artificial Sequence
  Description of Artificial Sequence: Synthetic oligonucleotide
  Target: COL7A1; (-) strand; PAM type: NRG; PAM sequence: CAG
ctgcgatgggcttcgtgggg

SEQ ID NO: 10675 - DNA, 20 bp, Artificial Sequence
  Description of Artificial Sequence: Synthetic oligonucleotide
  Target: COL7A1; (-) strand; PAM type: NRG; PAM sequence: GGG
gggctgcgatgggcttcgtg

SEQ ID NO: 10676 - DNA, 20 bp, Artificial Sequence
  Description of Artificial Sequence: Synthetic oligonucleotide
  Target: COL7A1; (-) strand; PAM type: NRG; PAM sequence: GGG
tgggctgcgatgggcttcgt

SEQ ID NO: 10677 - DNA, 20 bp, Artificial Sequence
  Description of Artificial Sequence: Synthetic oligonucleotide
  Target: COL7A1; (-) strand; PAM type: NRG; PAM sequence: TGG
gtgggctgcgatgggcttcg

SEQ ID NO: 10678 - DNA, 20 bp, Artificial Sequence
  Description of Artificial Sequence: Synthetic oligonucleotide
  Target: COL7A1; (-) strand; PAM type: NRG; PAM sequence: GGG
gagaacaggtgggctgcgat

SEQ ID NO: 10679 - DNA, 20 bp, Artificial Sequence
  Description of Artificial Sequence: Synthetic oligonucleotide
  Target: COL7A1; (-) strand; PAM type: NRG; PAM sequence: TGG
ggagaacaggtgggctgcga

SEQ ID NO: 10680 - DNA, 20 bp, Artificial Sequence
  Description of Artificial Sequence: Synthetic oligonucleotide
  Target: COL7A1; (-) strand; PAM type: NRG; PAM sequence: GGG
ggagaacgtggagaacaggt

SEQ ID NO: 10681 - DNA, 20 bp, Artificial Sequence
  Description of Artificial Sequence: Synthetic oligonucleotide
  Target: COL7A1; (-) strand; PAM type: NRG; PAM sequence: TGG
aggagaacgtggagaacagg

SEQ ID NO: 10682 - DNA, 20 bp, Artificial Sequence
  Description of Artificial Sequence: Synthetic oligonucleotide
  Target: COL7A1; (-) strand; PAM type: NRG; PAM sequence: AGG
gaaaggagaacgtggagaac

SEQ ID NO: 10683 - DNA, 20 bp, Artificial Sequence
  Description of Artificial Sequence: Synthetic oligonucleotide
  Target: COL7A1; (-) strand; PAM type: NRG; PAM sequence: CAG
agaaaggagaacgtggagaa

SEQ ID NO: 10684 - DNA, 20 bp, Artificial Sequence
  Description of Artificial Sequence: Synthetic oligonucleotide
  Target: COL7A1; (-) strand; PAM type: NRG; PAM sequence: GAG
gggagagaaaggagaacgtg

SEQ ID NO: 10685 - DNA, 20 bp, Artificial Sequence
  Description of Artificial Sequence: Synthetic oligonucleotide
  Target: COL7A1; (-) strand; PAM type: NRG; PAM sequence: TGG
cggggagagaaaggagaacg

SEQ ID NO: 10686 - DNA, 20 bp, Artificial Sequence
  Description of Artificial Sequence: Synthetic oligonucleotide
  Target: COL7A1; (-) strand; PAM type: NRG; PAM sequence: GAG
gggagaacggggagagaaag

SEQ ID NO: 10687 - DNA, 20 bp, Artificial Sequence
  Description of Artificial Sequence: Synthetic oligonucleotide
  Target: COL7A1; (-) strand; PAM type: NRG; PAM sequence: AGG
cagggagaacggggagagaa

SEQ ID NO: 10688 - DNA, 20 bp, Artificial Sequence
  Description of Artificial Sequence: Synthetic oligonucleotide
  Target: COL7A1; (-) strand; PAM type: NRG; PAM sequence: AAG
tcagggagaacggggagaga

SEQ ID NO: 10689 - DNA, 20 bp, Artificial Sequence
  Description of Artificial Sequence: Synthetic oligonucleotide
  Target: COL7A1; (-) strand; PAM type: NRG; PAM sequence: GAG
catttcagggagaacgggga

SEQ ID NO: 10690 - DNA, 20 bp, Artificial Sequence
  Description of Artificial Sequence: Synthetic oligonucleotide
  Target: COL7A1; (-) strand; PAM type: NRG; PAM sequence: GAG
tgcatttcagggagaacggg

SEQ ID NO: 10691 - DNA, 20 bp, Artificial Sequence
  Description of Artificial Sequence: Synthetic oligonucleotide
  Target: COL7A1; (-) strand; PAM type: NRG; PAM sequence: GGG
tttgcatttcagggagaacg

SEQ ID NO: 10692 - DNA, 20 bp, Artificial Sequence
  Description of Artificial Sequence: Synthetic oligonucleotide
  Target: COL7A1; (-) strand; PAM type: NRG; PAM sequence: GGG
atttgcatttcagggagaac

SEQ ID NO: 10693 - DNA, 20 bp, Artificial Sequence
  Description of Artificial Sequence: Synthetic oligonucleotide
  Target: COL7A1; (-) strand; PAM type: NRG; PAM sequence: CGG
tatttgcatttcagggagaa

SEQ ID NO: 10694 - DNA, 20 bp, Artificial Sequence
  Description of Artificial Sequence: Synthetic oligonucleotide
  Target: COL7A1; (-) strand; PAM type: NRG; PAM sequence: GAG
cccgctatttgcatttcagg

SEQ ID NO: 10695 - DNA, 20 bp, Artificial Sequence
  Description of Artificial Sequence: Synthetic oligonucleotide
  Target: COL7A1; (-) strand; PAM type: NRG; PAM sequence: GGG
cacccgctatttgcatttca

SEQ ID NO: 10696 - DNA, 20 bp, Artificial Sequence
  Description of Artificial Sequence: Synthetic oligonucleotide
  Target: COL7A1; (-) strand; PAM type: NRG; PAM sequence: AGG
tcacccgctatttgcatttc

SEQ ID NO: 10697 - DNA, 20 bp, Artificial Sequence
  Description of Artificial Sequence: Synthetic oligonucleotide
  Target: COL7A1; (-) strand; PAM type: NRG; PAM sequence: CAG
ctcacccgctatttgcattt

SEQ ID NO: 10698 - DNA, 20 bp, Artificial Sequence
  Description of Artificial Sequence: Synthetic oligonucleotide
  Target: COL7A1; (-) strand; PAM type: NRG; PAM sequence: TGG
ggtgggaccccccatgggct

SEQ ID NO: 10699 - DNA, 20 bp, Artificial Sequence
  Description of Artificial Sequence: Synthetic oligonucleotide
  Target: COL7A1; (-) strand; PAM type: NRG; PAM sequence: GGG
ggaggggtgggaccccccat

SEQ ID NO: 10700 - DNA, 20 bp, Artificial Sequence
  Description of Artificial Sequence: Synthetic oligonucleotide
  Target: COL7A1; (-) strand; PAM type: NRG; PAM sequence: TGG
gggaggggtgggacccccca

SEQ ID NO: 10701 - DNA, 20 bp, Artificial Sequence
  Description of Artificial Sequence: Synthetic oligonucleotide
  Target: COL7A1; (-) strand; PAM type: NRG; PAM sequence: GGG
gaagaggggttgggaggggt

SEQ ID NO: 10702 - DNA, 20 bp, Artificial Sequence
  Description of Artificial Sequence: Synthetic oligonucleotide
  Target: COL7A1; (-) strand; PAM type: NRG; PAM sequence: TGG
ggaagaggggttgggagggg

SEQ ID NO: 10703 - DNA, 20 bp, Artificial Sequence
  Description of Artificial Sequence: Synthetic oligonucleotide
  Target: COL7A1; (-) strand; PAM type: NRG; PAM sequence: GGG
gagggaagaggggttgggag

SEQ ID NO: 10704 - DNA, 20 bp, Artificial Sequence
  Description of Artificial Sequence: Synthetic oligonucleotide
  Target: COL7A1; (-) strand; PAM type: NRG; PAM sequence: GGG
tgagggaagaggggttggga

SEQ ID NO: 10705 - DNA, 20 bp, Artificial Sequence
  Description of Artificial Sequence: Synthetic oligonucleotide
  Target: COL7A1; (-) strand; PAM type: NRG; PAM sequence: AGG
gtgagggaagaggggttggg

SEQ ID NO: 10706 - DNA, 20 bp, Artificial Sequence
  Description of Artificial Sequence: Synthetic oligonucleotide
  Target: COL7A1; (-) strand; PAM type: NRG; PAM sequence: GAG
agtgagggaagaggggttgg

SEQ ID NO: 10707 - DNA, 20 bp, Artificial Sequence
  Description of Artificial Sequence: Synthetic oligonucleotide
  Target: COL7A1; (-) strand; PAM type: NRG; PAM sequence: GGG
agagtgagggaagaggggtt

SEQ ID NO: 10708 - DNA, 20 bp, Artificial Sequence
  Description of Artificial Sequence: Synthetic oligonucleotide
  Target: COL7A1; (-) strand; PAM type: NRG; PAM sequence: TGG
gagagtgagggaagaggggt

SEQ ID NO: 10709 - DNA, 20 bp, Artificial Sequence
  Description of Artificial Sequence: Synthetic oligonucleotide
  Target: COL7A1; (-) strand; PAM type: NRG; PAM sequence: GGG
ccaggagagtgagggaagag

SEQ ID NO: 10710 - DNA, 20 bp, Artificial Sequence
  Description of Artificial Sequence: Synthetic oligonucleotide
  Target: COL7A1; (-) strand; PAM type: NRG; PAM sequence: GGG
gccaggagagtgagggaaga

SEQ ID NO: 10711 - DNA, 20 bp, Artificial Sequence
  Description of Artificial Sequence: Synthetic oligonucleotide
  Target: COL7A1; (-) strand; PAM type: NRG; PAM sequence: AGG
ggccaggagagtgagggaag

SEQ ID NO: 10712 - DNA, 20 bp, Artificial Sequence
  Description of Artificial Sequence: Synthetic oligonucleotide
  Target: COL7A1; (-) strand; PAM type: NRG; PAM sequence: GAG
tggccaggagagtgagggaa

SEQ ID NO: 10713 - DNA, 20 bp, Artificial Sequence
  Description of Artificial Sequence: Synthetic oligonucleotide
  Target: COL7A1; (-) strand; PAM type: NRG; PAM sequence: AAG
gctggccaggagagtgaggg

SEQ ID NO: 10714 - DNA, 20 bp, Artificial Sequence
  Description of Artificial Sequence: Synthetic oligonucleotide
  Target: COL7A1; (-) strand; PAM type: NRG; PAM sequence: GGG
ggggctggccaggagagtga

SEQ ID NO: 10715 - DNA, 20 bp, Artificial Sequence
  Description of Artificial Sequence: Synthetic oligonucleotide
  Target: COL7A1; (-) strand; PAM type: NRG; PAM sequence: AGG
gggggctggccaggagagtg

SEQ ID NO: 10716 - DNA, 20 bp, Artificial Sequence
  Description of Artificial Sequence: Synthetic oligonucleotide
  Target: COL7A1; (-) strand; PAM type: NRG; PAM sequence: GAG
tgggggctggccaggagagt

SEQ ID NO: 10717 - DNA, 20 bp, Artificial Sequence
  Description of Artificial Sequence: Synthetic oligonucleotide
  Target: COL7A1; (-) strand; PAM type: NRG; PAM sequence: GAG
aggctgggggctggccagga

SEQ ID NO: 10718 - DNA, 20 bp, Artificial Sequence
  Description of Artificial Sequence: Synthetic oligonucleotide
  Target: COL7A1; (-) strand; PAM type: NRG; PAM sequence: GAG
tgaggctgggggctggccag

SEQ ID NO: 10719 - DNA, 20 bp, Artificial Sequence
  Description of Artificial Sequence: Synthetic oligonucleotide
  Target: COL7A1; (-) strand; PAM type: NRG; PAM sequence: AGG
ggtgaggctgggggctggcc

SEQ ID NO: 10720 - DNA, 20 bp, Artificial Sequence
  Description of Artificial Sequence: Synthetic oligonucleotide
  Target: COL7A1; (-) strand; PAM type: NRG; PAM sequence: CAG
gggtgaggctgggggctggc

SEQ ID NO: 10721 - DNA, 20 bp, Artificial Sequence
  Description of Artificial Sequence: Synthetic oligonucleotide
  Target: COL7A1; (-) strand; PAM type: NRG; PAM sequence: TGG
gagagggtgaggctgggggc

SEQ ID NO: 10722 - DNA, 20 bp, Artificial Sequence
  Description of Artificial Sequence: Synthetic oligonucleotide
  Target: COL7A1; (-) strand; PAM type: NRG; PAM sequence: GGG
aggagagagggtgaggctgg

SEQ ID NO: 10723 - DNA, 20 bp, Artificial Sequence
  Description of Artificial Sequence: Synthetic oligonucleotide
  Target: COL7A1; (-) strand; PAM type: NRG; PAM sequence: GGG
caggagagagggtgaggctg

SEQ ID NO: 10724 - DNA, 20 bp, Artificial Sequence
  Description of Artificial Sequence: Synthetic oligonucleotide
  Target: COL7A1; (-) strand; PAM type: NRG; PAM sequence: GGG
ccaggagagagggtgaggct

SEQ ID NO: 10725 - DNA, 20 bp, Artificial Sequence
  Description of Artificial Sequence: Synthetic oligonucleotide
  Target: COL7A1; (-) strand; PAM type: NRG; PAM sequence: TGG
gccaggagagagggtgaggc

SEQ ID NO: 10726 - DNA, 20 bp, Artificial Sequence
  Description of Artificial Sequence: Synthetic oligonucleotide
  Target: COL7A1; (-) strand; PAM type: NRG; PAM sequence: AGG
gaaggccaggagagagggtg

SEQ ID NO: 10727 - DNA, 20 bp, Artificial Sequence
  Description of Artificial Sequence: Synthetic oligonucleotide
  Target: COL7A1; (-) strand; PAM type: NRG; PAM sequence: GAG
ggaaggccaggagagagggt

SEQ ID NO: 10728 - DNA, 20 bp, Artificial Sequence
  Description of Artificial Sequence: Synthetic oligonucleotide
  Target: COL7A1; (-) strand; PAM type: NRG; PAM sequence: GGG
ggcaggaaggccaggagaga

SEQ ID NO: 10729 - DNA, 20 bp, Artificial Sequence
  Description of Artificial Sequence: Synthetic oligonucleotide
  Target: COL7A1; (-) strand; PAM type: NRG; PAM sequence: AGG
aggcaggaaggccaggagag

SEQ ID NO: 10730 - DNA, 20 bp, Artificial Sequence
  Description of Artificial Sequence: Synthetic oligonucleotide
  Target: COL7A1; (-) strand; PAM type: NRG; PAM sequence: GAG
gaggcaggaaggccaggaga

SEQ ID NO: 10731 - DNA, 20 bp, Artificial Sequence
  Description of Artificial Sequence: Synthetic oligonucleotide
  Target: COL7A1; (-) strand; PAM type: NRG; PAM sequence: GAG
gagaggcaggaaggccagga

SEQ ID NO: 10732 - DNA, 20 bp, Artificial Sequence
  Description of Artificial Sequence: Synthetic oligonucleotide
  Target: COL7A1; (-) strand; PAM type: NRG; PAM sequence: GAG
gggagaggcaggaaggccag

SEQ ID NO: 10733 - DNA, 20 bp, Artificial Sequence
  Description of Artificial Sequence: Synthetic oligonucleotide
  Target: COL7A1; (-) strand; PAM type: NRG; PAM sequence: AGG
gtgggagaggcaggaaggcc

SEQ ID NO: 10734 - DNA, 20 bp, Artificial Sequence
  Description of Artificial Sequence: Synthetic oligonucleotide
  Target: COL7A1; (-) strand; PAM type: NRG; PAM sequence: CAG
tgtgggagaggcaggaaggc

SEQ ID NO: 10735 - DNA, 20 bp, Artificial Sequence
  Description of Artificial Sequence: Synthetic oligonucleotide
  Target: COL7A1; (-) strand; PAM type: NRG; PAM sequence: AGG
ggggtgtgggagaggcagga

SEQ ID NO: 10736 - DNA, 20 bp, Artificial Sequence
  Description of Artificial Sequence: Synthetic oligonucleotide
  Target: COL7A1; (-) strand; PAM type: NRG; PAM sequence: AAG
gggggtgtgggagaggcagg

SEQ ID NO: 10737 - DNA, 20 bp, Artificial Sequence
  Description of Artificial Sequence: Synthetic oligonucleotide
  Target: COL7A1; (-) strand; PAM type: NRG; PAM sequence: AGG
gctgggggtgtgggagaggc

SEQ ID NO: 10738 - DNA, 20 bp, Artificial Sequence
  Description of Artificial Sequence: Synthetic oligonucleotide
  Target: COL7A1; (-) strand; PAM type: NRG; PAM sequence: CAG
ggctgggggtgtgggagagg

SEQ ID NO: 10739 - DNA, 20 bp, Artificial Sequence
  Description of Artificial Sequence: Synthetic oligonucleotide
  Target: COL7A1; (-) strand; PAM type: NRG; PAM sequence: AGG
cagggctgggggtgtgggag

SEQ ID NO: 10740 - DNA, 20 bp, Artificial Sequence
  Description of Artificial Sequence: Synthetic oligonucleotide
  Target: COL7A1; (-) strand; PAM type: NRG; PAM sequence: GAG
gcagggctgggggtgtggga

SEQ ID NO: 10741 - DNA, 20 bp, Artificial Sequence
  Description of Artificial Sequence: Synthetic oligonucleotide
  Target: COL7A1; (-) strand; PAM type: NRG; PAM sequence: GAG
aggcagggctgggggtgtgg

SEQ ID NO: 10742 - DNA, 20 bp, Artificial Sequence
  Description of Artificial Sequence: Synthetic oligonucleotide
  Target: COL7A1; (-) strand; PAM type: NRG; PAM sequence: GGG
ccaggcagggctgggggtgt

SEQ ID NO: 10743 - DNA, 20 bp, Artificial Sequence
  Description of Artificial Sequence: Synthetic oligonucleotide
  Target: COL7A1; (-) strand; PAM type: NRG; PAM sequence: TGG
cccaggcagggctgggggtg

SEQ ID NO: 10744 - DNA, 20 bp, Artificial Sequence
  Description of Artificial Sequence: Synthetic oligonucleotide
  Target: COL7A1; (-) strand; PAM type: NRG; PAM sequence: GGG
gggctcccaggcagggctgg

SEQ ID NO: 10745 - DNA, 20 bp, Artificial Sequence
  Description of Artificial Sequence: Synthetic oligonucleotide
  Target: COL7A1; (-) strand; PAM type: NRG; PAM sequence: GGG
cgggctcccaggcagggctg

SEQ ID NO: 10746 - DNA, 20 bp, Artificial Sequence
  Description of Artificial Sequence: Synthetic oligonucleotide
  Target: COL7A1; (-) strand; PAM type: NRG; PAM sequence: GGG
ccgggctcccaggcagggct

SEQ ID NO: 10747 - DNA, 20 bp, Artificial Sequence
  Description of Artificial Sequence: Synthetic oligonucleotide
  Target: COL7A1; (-) strand; PAM type: NRG; PAM sequence: TGG
cccgggctcccaggcagggc

SEQ ID NO: 10748 - DNA, 20 bp, Artificial Sequence
  Description of Artificial Sequence: Synthetic oligonucleotide
  Target: COL7A1; (-) strand; PAM type: NRG; PAM sequence: GGG
tattcccgggctcccaggca

SEQ ID NO: 10749 - DNA, 20 bp, Artificial Sequence
  Description of Artificial Sequence: Synthetic oligonucleotide
  Target: COL7A1; (-) strand; PAM type: NRG; PAM sequence: AGG
gtattcccgggctcccaggc

SEQ ID NO: 10750 - DNA, 20 bp, Artificial Sequence
  Description of Artificial Sequence: Synthetic oligonucleotide
  Target: COL7A1; (-) strand; PAM type: NRG; PAM sequence: CAG
ggtattcccgggctcccagg

SEQ ID NO: 10751 - DNA, 20 bp, Artificial Sequence
  Description of Artificial Sequence: Synthetic oligonucleotide
  Target: COL7A1; (-) strand; PAM type: NRG; PAM sequence: AGG
cctggtattcccgggctccc

SEQ ID NO: 10752 - DNA, 20 bp, Artificial Sequence
  Description of Artificial Sequence: Synthetic oligonucleotide
  Target: COL7A1; (-) strand; PAM type: NRG; PAM sequence: CAG
gcctggtattcccgggctcc

SEQ ID NO: 10753 - DNA, 20 bp, Artificial Sequence
  Description of Artificial Sequence: Synthetic oligonucleotide
  Target: COL7A1; (-) strand; PAM type: NRG; PAM sequence: GGG
ctggaaagcctggtattccc

SEQ ID NO: 10754 - DNA, 20 bp, Artificial Sequence
  Description of Artificial Sequence: Synthetic oligonucleotide
  Target: COL7A1; (-) strand; PAM type: NRG; PAM sequence: CGG
cctggaaagcctggtattcc

SEQ ID NO: 10755 - DNA, 20 bp, Artificial Sequence
  Description of Artificial Sequence: Synthetic oligonucleotide
  Target: COL7A1; (-) strand; PAM type: NRG; PAM sequence: TGG
gccggggagcctggaaagcc

SEQ ID NO: 10756 - DNA, 20 bp, Artificial Sequence
  Description of Artificial Sequence: Synthetic oligonucleotide
  Target: COL7A1; (-) strand; PAM type: NRG; PAM sequence: AAG
gccttgccggggagcctgga

SEQ ID NO: 10757 - DNA, 20 bp, Artificial Sequence
  Description of Artificial Sequence: Synthetic oligonucleotide
  Target: COL7A1; (-) strand; PAM type: NRG; PAM sequence: TGG
tccggccttgccggggagcc

SEQ ID NO: 10758 - DNA, 20 bp, Artificial Sequence
  Description of Artificial Sequence: Synthetic oligonucleotide
  Target: COL7A1; (-) strand; PAM type: NRG; PAM sequence: GAG
ggccttccggccttgccggg

SEQ ID NO: 10759 - DNA, 20 bp, Artificial Sequence
  Description of Artificial Sequence: Synthetic oligonucleotide
  Target: COL7A1; (-) strand; PAM type: NRG; PAM sequence: GGG
cgggccttccggccttgccg

SEQ ID NO: 10760 - DNA, 20 bp, Artificial Sequence
  Description of Artificial Sequence: Synthetic oligonucleotide
  Target: COL7A1; (-) strand; PAM type: NRG; PAM sequence: GGG
ccgggccttccggccttgcc

SEQ ID NO: 10761 - DNA, 20 bp, Artificial Sequence
  Description of Artificial Sequence: Synthetic oligonucleotide
  Target: COL7A1; (-) strand; PAM type: NRG; PAM sequence: CGG
cccgggccttccggccttgc

SEQ ID NO: 10762 - DNA, 20 bp, Artificial Sequence
  Description of Artificial Sequence: Synthetic oligonucleotide
  Target: COL7A1; (-) strand; PAM type: NRG; PAM sequence: CGG
aggggcccccccgggccttc

SEQ ID NO: 10763 - DNA, 20 bp, Artificial Sequence
  Description of Artificial Sequence: Synthetic oligonucleotide
  Target: COL7A1; (-) strand; PAM type: NRG; PAM sequence: GGG
ttggggagaggggccccccc

SEQ ID NO: 10764 - DNA, 20 bp, Artificial Sequence
  Description of Artificial Sequence: Synthetic oligonucleotide
  Target: COL7A1; (-) strand; PAM type: NRG; PAM sequence: CGG
cttggggagaggggcccccc

SEQ ID NO: 10765 - DNA, 20 bp, Artificial Sequence
  Description of Artificial Sequence: Synthetic oligonucleotide
  Target: COL7A1; (-) strand; PAM type: NRG; PAM sequence: GGG
ggtctggcccttggggagag

SEQ ID NO: 10766 - DNA, 20 bp, Artificial Sequence
  Description of Artificial Sequence: Synthetic oligonucleotide
  Target: COL7A1; (-) strand; PAM type: NRG; PAM sequence: GGG
tggtctggcccttggggaga

SEQ ID NO: 10767 - DNA, 20 bp, Artificial Sequence
  Description of Artificial Sequence: Synthetic oligonucleotide
  Target: COL7A1; (-) strand; PAM type: NRG; PAM sequence: AGG
ctggtctggcccttggggag

SEQ ID NO: 10768 - DNA, 20 bp, Artificial Sequence
  Description of Artificial Sequence: Synthetic oligonucleotide
  Target: COL7A1; (-) strand; PAM type: NRG; PAM sequence: GAG
cctggtctggcccttgggga

SEQ ID NO: 10769 - DNA, 20 bp, Artificial Sequence
  Description of Artificial Sequence: Synthetic oligonucleotide
  Target: COL7A1; (-) strand; PAM type: NRG; PAM sequence: GAG
cacctggtctggcccttggg

SEQ ID NO: 10770 - DNA, 20 bp, Artificial Sequence
  Description of Artificial Sequence: Synthetic oligonucleotide
  Target: COL7A1; (-) strand; PAM type: NRG; PAM sequence: GGG
gccacctggtctggcccttg

SEQ ID NO: 10771 - DNA, 20 bp, Artificial Sequence
  Description of Artificial Sequence: Synthetic oligonucleotide
  Target: COL7A1; (-) strand; PAM type: NRG; PAM sequence: GGG
ggccacctggtctggccctt

SEQ ID NO: 10772 - DNA, 20 bp, Artificial Sequence
  Description of Artificial Sequence: Synthetic oligonucleotide
  Target: COL7A1; (-) strand; PAM type: NRG; PAM sequence: TGG
gggccacctggtctggccct

SEQ ID NO: 10773 - DNA, 20 bp, Artificial Sequence
  Description of Artificial Sequence: Synthetic oligonucleotide
  Target: COL7A1; (-) strand; PAM type: NRG; PAM sequence: TGG
ccctcaggggccacctggtc

SEQ ID NO: 10774 - DNA, 20 bp, Artificial Sequence
  Description of Artificial Sequence: Synthetic oligonucleotide
  Target: COL7A1; (-) strand; PAM type: NRG; PAM sequence: TGG
cctggccctcaggggccacc

SEQ ID NO: 10775 - DNA, 20 bp, Artificial Sequence
  Description of Artificial Sequence: Synthetic oligonucleotide
  Target: COL7A1; (-) strand; PAM type: NRG; PAM sequence: GGG
gtggagaccctggccctcag

SEQ ID NO: 10776 - DNA, 20 bp, Artificial Sequence
  Description of Artificial Sequence: Synthetic oligonucleotide
  Target: COL7A1; (-) strand; PAM type: NRG; PAM sequence: GGG
cgtggagaccctggccctca

SEQ ID NO: 10777 - DNA, 20 bp, Artificial Sequence
  Description of Artificial Sequence: Synthetic oligonucleotide
  Target: COL7A1; (-) strand; PAM type: NRG; PAM sequence: AGG
ccgtggagaccctggccctc

SEQ ID NO: 10778 - DNA, 20 bp, Artificial Sequence
  Description of Artificial Sequence: Synthetic oligonucleotide
  Target: COL7A1; (-) strand; PAM type: NRG; PAM sequence: CAG
accgtggagaccctggccct

SEQ ID NO: 10779 - DNA, 20 bp, Artificial Sequence
  Description of Artificial Sequence: Synthetic oligonucleotide
  Target: COL7A1; (-) strand; PAM type: NRG; PAM sequence: TGG
aagggcgaccgtggagaccc

SEQ ID NO: 10780 - DNA, 20 bp, Artificial Sequence
  Description of Artificial Sequence: Synthetic oligonucleotide
  Target: COL7A1; (-) strand; PAM type: NRG; PAM sequence: GAG
cgggctgaagggcgaccgtg

SEQ ID NO: 10781 - DNA, 20 bp, Artificial Sequence
  Description of Artificial Sequence: Synthetic oligonucleotide
  Target: COL7A1; (-) strand; PAM type: NRG; PAM sequence: TGG
cgcgggctgaagggcgaccg

SEQ ID NO: 10782 - DNA, 20 bp, Artificial Sequence
  Description of Artificial Sequence: Synthetic oligonucleotide
  Target: COL7A1; (-) strand; PAM type: NRG; PAM sequence: GGG
cctggagaacgcgggctgaa

SEQ ID NO: 10783 - DNA, 20 bp, Artificial Sequence
  Description of Artificial Sequence: Synthetic oligonucleotide
  Target: COL7A1; (-) strand; PAM type: NRG; PAM sequence: AGG
tcctggagaacgcgggctga

SEQ ID NO: 10784 - DNA, 20 bp, Artificial Sequence
  Description of Artificial Sequence: Synthetic oligonucleotide
  Target: COL7A1; (-) strand; PAM type: NRG; PAM sequence: AAG
ttcctggagaacgcgggctg

SEQ ID NO: 10785 - DNA, 20 bp, Artificial Sequence
  Description of Artificial Sequence: Synthetic oligonucleotide
  Target: COL7A1; (-) strand; PAM type: NRG; PAM sequence: GGG
tcggctttcctggagaacgc

SEQ ID NO: 10786 - DNA, 20 bp, Artificial Sequence
  Description of Artificial Sequence: Synthetic oligonucleotide
  Target: COL7A1; (-) strand; PAM type: NRG; PAM sequence: CGG
atcggctttcctggagaacg

SEQ ID NO: 10787 - DNA, 20 bp, Artificial Sequence
  Description of Artificial Sequence: Synthetic oligonucleotide
  Target: COL7A1; (-) strand; PAM type: NRG; PAM sequence: GAG
gggccccatcggctttcctg

SEQ ID NO: 10788 - DNA, 20 bp, Artificial Sequence
  Description of Artificial Sequence: Synthetic oligonucleotide
  Target: COL7A1; (-) strand; PAM type: NRG; PAM sequence: TGG
cagggccccatcggctttcc

SEQ ID NO: 10789 - DNA, 20 bp, Artificial Sequence
  Description of Artificial Sequence: Synthetic oligonucleotide
  Target: COL7A1; (-) strand; PAM type: NRG; PAM sequence: CGG
ccactcctgcagggccccat

SEQ ID NO: 10790 - DNA, 20 bp, Artificial Sequence
  Description of Artificial Sequence: Synthetic oligonucleotide
  Target: COL7A1; (-) strand; PAM type: NRG; PAM sequence: GGG
ttctctcttccactcctgca

SEQ ID NO: 10791 - DNA, 20 bp, Artificial Sequence
  Description of Artificial Sequence: Synthetic oligonucleotide
  Target: COL7A1; (-) strand; PAM type: NRG; PAM sequence: AGG
attctctcttccactcctgc

SEQ ID NO: 10792 - DNA, 20 bp, Artificial Sequence
  Description of Artificial Sequence: Synthetic oligonucleotide
  Target: COL7A1; (-) strand; PAM type: NRG; PAM sequence: CAG
cattctctcttccactcctg

SEQ ID NO: 10793 - DNA, 20 bp, Artificial Sequence
  Description of Artificial Sequence: Synthetic oligonucleotide
  Target: COL7A1; (-) strand; PAM type: NRG; PAM sequence: CAG
gggtgtagctgtacagccac

SEQ ID NO: 10794 - DNA, 20 bp, Artificial Sequence
  Description of Artificial Sequence: Synthetic oligonucleotide
  Target: COL7A1; (-) strand; PAM type: NRG; PAM sequence: CAG
tggagtggggtgtagctgta

SEQ ID NO: 10795 - DNA, 20 bp, Artificial Sequence
  Description of Artificial Sequence: Synthetic oligonucleotide
  Target: COL7A1; (-) strand; PAM type: NRG; PAM sequence: TAG
gtgccccgtggagtggggtg

SEQ ID NO: 10796 - DNA, 20 bp, Artificial Sequence
  Description of Artificial Sequence: Synthetic oligonucleotide
  Target: COL7A1; (-) strand; PAM type: NRG; PAM sequence: GGG
gggttgtgccccgtggagtg

SEQ ID NO: 10797 - DNA, 20 bp, Artificial Sequence
  Description of Artificial Sequence: Synthetic oligonucleotide
  Target: COL7A1; (-) strand; PAM type: NRG; PAM sequence: GGG
tgggttgtgccccgtggagt

SEQ ID NO: 10798 - DNA, 20 bp, Artificial Sequence
  Description of Artificial Sequence: Synthetic oligonucleotide
  Target: COL7A1; (-) strand; PAM type: NRG; PAM sequence: TGG
gtgggttgtgccccgtggag

SEQ ID NO: 10799 - DNA, 20 bp, Artificial Sequence
  Description of Artificial Sequence: Synthetic oligonucleotide
  Target: COL7A1; (-) strand; PAM type: NRG; PAM sequence: GAG
tcagtgggttgtgccccgtg

SEQ ID NO: 10800 - DNA, 20 bp, Artificial Sequence
  Description of Artificial Sequence: Synthetic oligonucleotide
  Target: COL7A1; (-) strand; PAM type: NRG; PAM sequence: TGG
gctcagtgggttgtgccccg

SEQ ID NO: 10801 - DNA, 20 bp, Artificial Sequence
  Description of Artificial Sequence: Synthetic oligonucleotide
  Target: COL7A1; (-) strand; PAM type: NRG; PAM sequence: GGG
gtgagcagaagtggctcagt

SEQ ID NO: 10802 - DNA, 20 bp, Artificial Sequence
  Description of Artificial Sequence: Synthetic oligonucleotide
  Target: COL7A1; (-) strand; PAM type: NRG; PAM sequence: TGG
ggtgagcagaagtggctcag

SEQ ID NO: 10803 - DNA, 20 bp, Artificial Sequence
  Description of Artificial Sequence: Synthetic oligonucleotide
  Target: COL7A1; (-) strand; PAM type: NRG; PAM sequence: CAG
ggaggtgagcagaagtggct

SEQ ID NO: 10804 - DNA, 20 bp, Artificial Sequence
  Description of Artificial Sequence: Synthetic oligonucleotide
  Target: COL7A1; (-) strand; PAM type: NRG; PAM sequence: TGG
ggcaaggaggtgagcagaag

SEQ ID NO: 10805 - DNA, 20 bp, Artificial Sequence
  Description of Artificial Sequence: Synthetic oligonucleotide
  Target: COL7A1; (-) strand; PAM type: NRG; PAM sequence: AAG
ccaggcaaggaggtgagcag

SEQ ID NO: 10806 - DNA, 20 bp, Artificial Sequence
  Description of Artificial Sequence: Synthetic oligonucleotide
  Target: COL7A1; (-) strand; PAM type: NRG; PAM sequence: CAG
cccccaggcaaggaggtgag

SEQ ID NO: 10807 - DNA, 20 bp, Artificial Sequence
  Description of Artificial Sequence: Synthetic oligonucleotide
  Target: COL7A1; (-) strand; PAM type: NRG; PAM sequence: GAG
ggccccccaggcaaggaggt

SEQ ID NO: 10808 - DNA, 20 bp, Artificial Sequence
  Description of Artificial Sequence: Synthetic oligonucleotide
  Target: COL7A1; (-) strand; PAM type: NRG; PAM sequence: AGG
acagggccccccaggcaagg

SEQ ID NO: 10809 - DNA, 20 bp, Artificial Sequence
  Description of Artificial Sequence: Synthetic oligonucleotide
  Target: COL7A1; (-) strand; PAM type: NRG; PAM sequence: GAG
aacagggccccccaggcaag

SEQ ID NO: 10810 - DNA, 20 bp, Artificial Sequence
  Description of Artificial Sequence: Synthetic oligonucleotide
  Target: COL7A1; (-) strand; PAM type: NRG; PAM sequence: AGG
cgaacagggccccccaggca

SEQ ID NO: 10811 - DNA, 20 bp, Artificial Sequence
  Description of Artificial Sequence: Synthetic oligonucleotide
  Target: COL7A1; (-) strand; PAM type: NRG; PAM sequence: AAG
gcgaacagggccccccaggc

SEQ ID NO: 10812 - DNA, 20 bp, Artificial Sequence
  Description of Artificial Sequence: Synthetic oligonucleotide
  Target: COL7A1; (-) strand; PAM type: NRG; PAM sequence: AGG
tcaggcgaacagggcccccc

SEQ ID NO: 10813 - DNA, 20 bp, Artificial Sequence
  Description of Artificial Sequence: Synthetic oligonucleotide
  Target: COL7A1; (-) strand; PAM type: NRG; PAM sequence: CAG
ctcaggcgaacagggccccc

SEQ ID NO: 10814 - DNA, 20 bp, Artificial Sequence
  Description of Artificial Sequence: Synthetic oligonucleotide
  Target: COL7A1; (-) strand; PAM type: NRG; PAM sequence: GGG
aagggggactcaggcgaaca

SEQ ID NO: 10815 - DNA, 20 bp, Artificial Sequence
  Description of Artificial Sequence: Synthetic oligonucleotide
  Target: COL7A1; (-) strand; PAM type: NRG; PAM sequence: AGG
caagggggactcaggcgaac

SEQ ID NO: 10816 - DNA, 20 bp, Artificial Sequence
  Description of Artificial Sequence: Synthetic oligonucleotide
  Target: COL7A1; (-) strand; PAM type: NRG; PAM sequence: CAG
ccaagggggactcaggcgaa

SEQ ID NO: 10817 - DNA, 20 bp, Artificial Sequence
  Description of Artificial Sequence: Synthetic oligonucleotide
  Target: COL7A1; (-) strand; PAM type: NRG; PAM sequence: AGG
cgaggccccaagggggactc

SEQ ID NO: 10818 - DNA, 20 bp, Artificial Sequence
  Description of Artificial Sequence: Synthetic oligonucleotide
  Target: COL7A1; (-) strand; PAM type: NRG; PAM sequence: CAG
tcgaggccccaagggggact

SEQ ID NO: 10819 - DNA, 20 bp, Artificial Sequence
  Description of Artificial Sequence: Synthetic oligonucleotide
  Target: COL7A1; (-) strand; PAM type: NRG; PAM sequence: GGG
acggcgtcgaggccccaagg

SEQ ID NO: 10820 - DNA, 20 bp, Artificial Sequence
  Description of Artificial Sequence: Synthetic oligonucleotide
  Target: COL7A1; (-) strand; PAM type: NRG; PAM sequence: GGG
aacggcgtcgaggccccaag

SEQ ID NO: 10821 - DNA, 20 bp, Artificial Sequence
  Description of Artificial Sequence: Synthetic oligonucleotide
  Target: COL7A1; (-) strand; PAM type: NRG; PAM sequence: GGG
gaacggcgtcgaggccccaa

SEQ ID NO: 10822 - DNA, 20 bp, Artificial Sequence
  Description of Artificial Sequence: Synthetic oligonucleotide
  Target: COL7A1; (-) strand; PAM type: NRG; PAM sequence: AGG
cgaacggcgtcgaggcccca

SEQ ID NO: 10823 - DNA, 20 bp, Artificial Sequence
  Description of Artificial Sequence: Synthetic oligonucleotide
  Target: COL7A1; (-) strand; PAM type: NRG; PAM sequence: AAG
ccgaacggcgtcgaggcccc

SEQ ID NO: 10824 - DNA, 20 bp, Artificial Sequence
  Description of Artificial Sequence: Synthetic oligonucleotide
  Target: COL7A1; (-) strand; PAM type: NRG; PAM sequence: AGG
cctgtgcccgaacggcgtcg

SEQ ID NO: 10825 - DNA, 20 bp, Artificial Sequence
  Description of Artificial Sequence: Synthetic oligonucleotide
  Target: COL7A1; (-) strand; PAM type: NRG; PAM sequence: GAG
gcctgtgcccgaacggcgtc

SEQ ID NO: 10826 - DNA, 20 bp, Artificial Sequence
  Description of Artificial Sequence: Synthetic oligonucleotide
  Target: COL7A1; (-) strand; PAM type: NRG; PAM sequence: CGG
gcttcctgcctgtgcccgaa

SEQ ID NO: 10827 - DNA, 20 bp, Artificial Sequence
  Description of Artificial Sequence: Synthetic oligonucleotide
  Target: COL7A1; (-) strand; PAM type: NRG; PAM sequence: TAG
acctgggatgagagctctgg

SEQ ID NO: 10828 - DNA, 20 bp, Artificial Sequence
  Description of Artificial Sequence: Synthetic oligonucleotide
  Target: COL7A1; (-) strand; PAM type: NRG; PAM sequence: TGG
gagacctgggatgagagctc

SEQ ID NO: 10829 - DNA, 20 bp, Artificial Sequence
  Description of Artificial Sequence: Synthetic oligonucleotide
  Target: COL7A1; (-) strand; PAM type: NRG; PAM sequence: GAG
atcgtggagacctgggatga

SEQ ID NO: 10830 - DNA, 20 bp, Artificial Sequence
  Description of Artificial Sequence: Synthetic oligonucleotide
  Target: COL7A1; (-) strand; PAM type: NRG; PAM sequence: GAG
agatcgtggagacctgggat

SEQ ID NO: 10831 - DNA, 20 bp, Artificial Sequence
  Description of Artificial Sequence: Synthetic oligonucleotide
  Target: COL7A1; (-) strand; PAM type: NRG; PAM sequence: GGG
gcgggagatcgtggagacct

SEQ ID NO: 10832 - DNA, 20 bp, Artificial Sequence
  Description of Artificial Sequence: Synthetic oligonucleotide
  Target: COL7A1; (-) strand; PAM type: NRG; PAM sequence: TGG
tgcgggagatcgtggagacc

SEQ ID NO: 10833 - DNA, 20 bp, Artificial Sequence
  Description of Artificial Sequence: Synthetic oligonucleotide
  Target: COL7A1; (-) strand; PAM type: NRG; PAM sequence: GAG
ctgccctgcgggagatcgtg

SEQ ID NO: 10834 - DNA, 20 bp, Artificial Sequence
  Description of Artificial Sequence: Synthetic oligonucleotide
  Target: COL7A1; (-) strand; PAM type: NRG; PAM sequence: TGG
atctgccctgcgggagatcg

SEQ ID NO: 10835 - DNA, 20 bp, Artificial Sequence
  Description of Artificial Sequence: Synthetic oligonucleotide
  Target: COL7A1; (-) strand; PAM type: NRG; PAM sequence: GAG
ctcaggcatctgccctgcgg

SEQ ID NO: 10836 - DNA, 20 bp, Artificial Sequence
  Description of Artificial Sequence: Synthetic oligonucleotide
  Target: COL7A1; (-) strand; PAM type: NRG; PAM sequence: GGG
ccctcaggcatctgccctgc

SEQ ID NO: 10837 - DNA, 20 bp, Artificial Sequence
  Description of Artificial Sequence: Synthetic oligonucleotide
  Target: COL7A1; (-) strand; PAM type: NRG; PAM sequence: CGG
tccctcaggcatctgccctg

SEQ ID NO: 10838 - DNA, 20 bp, Artificial Sequence
  Description of Artificial Sequence: Synthetic oligonucleotide
  Target: COL7A1; (-) strand; PAM type: NRG; PAM sequence: AGG
ctgacctcttgctgtccctc

SEQ ID NO: 10839 - DNA, 20 bp, Artificial Sequence
  Description of Artificial Sequence: Synthetic oligonucleotide
  Target: COL7A1; (-) strand; PAM type: NRG; PAM sequence: CAG
tctgacctcttgctgtccct

SEQ ID NO: 10840 - DNA, 20 bp, Artificial Sequence
  Description of Artificial Sequence: Synthetic oligonucleotide
  Target: COL7A1; (-) strand; PAM type: NRG; PAM sequence: CGG
gcccacaggcataggggctg

SEQ ID NO: 10841 - DNA, 20 bp, Artificial Sequence
  Description of Artificial Sequence: Synthetic oligonucleotide
  Target: COL7A1; (-) strand; PAM type: NRG; PAM sequence: GGG
agtggtgcccacaggcatag

SEQ ID NO: 10842 - DNA, 20 bp, Artificial Sequence
  Description of Artificial Sequence: Synthetic oligonucleotide
  Target: COL7A1; (-) strand; PAM type: NRG; PAM sequence: GGG
tagtggtgcccacaggcata

SEQ ID NO: 10843 - DNA, 20 bp, Artificial Sequence
  Description of Artificial Sequence: Synthetic oligonucleotide
  Target: COL7A1; (-) strand; PAM type: NRG; PAM sequence: AGG
ctagtggtgcccacaggcat

SEQ ID NO: 10844 - DNA, 20 bp, Artificial Sequence
  Description of Artificial Sequence: Synthetic oligonucleotide
  Target: COL7A1; (-) strand; PAM type: NRG; PAM sequence: TAG
gctagtggtgcccacaggca

SEQ ID NO: 10845 - DNA, 20 bp, Artificial Sequence
  Description of Artificial Sequence: Synthetic oligonucleotide
  Target: COL7A1; (-) strand; PAM type: NRG; PAM sequence: AGG
ttggggctagtggtgcccac

SEQ ID NO: 10846 - DNA, 20 bp, Artificial Sequence
  Description of Artificial Sequence: Synthetic oligonucleotide
  Target: COL7A1; (-) strand; PAM type: NRG; PAM sequence: CAG
cttggggctagtggtgccca

SEQ ID NO: 10847 - DNA, 20 bp, Artificial Sequence
  Description of Artificial Sequence: Synthetic oligonucleotide
  Target: COL7A1; (-) strand; PAM type: NRG; PAM sequence: TGG
gtgggggcccttggggctag

SEQ ID NO: 10848 - DNA, 20 bp, Artificial Sequence
  Description of Artificial Sequence: Synthetic oligonucleotide
  Target: COL7A1; (-) strand; PAM type: NRG; PAM sequence: TAG
caagtgggggcccttggggc

SEQ ID NO: 10849 - DNA, 20 bp, Artificial Sequence
  Description of Artificial Sequence: Synthetic oligonucleotide
  Target: COL7A1; (-) strand; PAM type: NRG; PAM sequence: GGG
gggacaagtgggggcccttg

SEQ ID NO: 10850 - DNA, 20 bp, Artificial Sequence
  Description of Artificial Sequence: Synthetic oligonucleotide
  Target: COL7A1; (-) strand; PAM type: NRG; PAM sequence: GGG
agggacaagtgggggccctt

SEQ ID NO: 10851 - DNA, 20 bp, Artificial Sequence
  Description of Artificial Sequence: Synthetic oligonucleotide
  Target: COL7A1; (-) strand; PAM type: NRG; PAM sequence: TGG
tagggacaagtgggggccct

SEQ ID NO: 10852 - DNA, 20 bp, Artificial Sequence
  Description of Artificial Sequence: Synthetic oligonucleotide
  Target: COL7A1; (-) strand; PAM type: NRG; PAM sequence: GGG
ctgggggtagggacaagtgg

SEQ ID NO: 10853 - DNA, 20 bp, Artificial Sequence
  Description of Artificial Sequence: Synthetic oligonucleotide
  Target: COL7A1; (-) strand; PAM type: NRG; PAM sequence: GGG
gctgggggtagggacaagtg

SEQ ID NO: 10854 - DNA, 20 bp, Artificial Sequence
  Description of Artificial Sequence: Synthetic oligonucleotide
  Target: COL7A1; (-) strand; PAM type: NRG; PAM sequence: GGG
ggctgggggtagggacaagt

SEQ ID NO: 10855 - DNA, 20 bp, Artificial Sequence
  Description of Artificial Sequence: Synthetic oligonucleotide
  Target: COL7A1; (-) strand; PAM type: NRG; PAM sequence: TGG
gggctgggggtagggacaag

SEQ ID NO: 10856 - DNA, 20 bp, Artificial Sequence
  Description of Artificial Sequence: Synthetic oligonucleotide
  Target: COL7A1; (-) strand; PAM type: NRG; PAM sequence: AAG
taggggctgggggtagggac

SEQ ID NO: 10857 - DNA, 20 bp, Artificial Sequence
  Description of Artificial Sequence: Synthetic oligonucleotide
  Target: COL7A1; (-) strand; PAM type: NRG; PAM sequence: GGG
ttgtttaggggctgggggta

SEQ ID NO: 10858 - DNA, 20 bp, Artificial Sequence
  Description of Artificial Sequence: Synthetic oligonucleotide
  Target: COL7A1; (-) strand; PAM type: NRG; PAM sequence: AGG
gttgtttaggggctgggggt

SEQ ID NO: 10859 - DNA, 20 bp, Artificial Sequence
  Description of Artificial Sequence: Synthetic oligonucleotide
  Target: COL7A1; (-) strand; PAM type: NRG; PAM sequence: TAG
ggttgtttaggggctggggg

SEQ ID NO: 10860 - DNA, 20 bp, Artificial Sequence
  Description of Artificial Sequence: Synthetic oligonucleotide
  Target: COL7A1; (-) strand; PAM type: NRG; PAM sequence: GGG
gtgggttgtttaggggctgg

SEQ ID NO: 10861 - DNA, 20 bp, Artificial Sequence
  Description of Artificial Sequence: Synthetic oligonucleotide
  Target: COL7A1; (-) strand; PAM type: NRG; PAM sequence: GGG
ggtgggttgtttaggggctg

SEQ ID NO: 10862 - DNA, 20 bp, Artificial Sequence
  Description of Artificial Sequence: Synthetic oligonucleotide
  Target: COL7A1; (-) strand; PAM type: NRG; PAM sequence: GGG
aggtgggttgtttaggggct

SEQ ID NO: 10863 - DNA, 20 bp, Artificial Sequence
  Description of Artificial Sequence: Synthetic oligonucleotide
  Target: COL7A1; (-) strand; PAM type: NRG; PAM sequence: TGG
aaggtgggttgtttaggggc

SEQ ID NO: 10864 - DNA, 20 bp, Artificial Sequence
  Description of Artificial Sequence: Synthetic oligonucleotide
  Target: COL7A1; (-) strand; PAM type: NRG; PAM sequence: GGG
catcaaggtgggttgtttag

SEQ ID NO: 10865 - DNA, 20 bp, Artificial Sequence
  Description of Artificial Sequence: Synthetic oligonucleotide
  Target: COL7A1; (-) strand; PAM type: NRG; PAM sequence: GGG
gcatcaaggtgggttgttta

SEQ ID NO: 10866 - DNA, 20 bp, Artificial Sequence
  Description of Artificial Sequence: Synthetic oligonucleotide
  Target: COL7A1; (-) strand; PAM type: NRG; PAM sequence: AGG
ggcatcaaggtgggttgttt

SEQ ID NO: 10867 - DNA, 20 bp, Artificial Sequence
  Description of Artificial Sequence: Synthetic oligonucleotide
  Target: COL7A1; (-) strand; PAM type: NRG; PAM sequence: TAG
tggcatcaaggtgggttgtt

SEQ ID NO: 10868 - DNA, 20 bp, Artificial Sequence
  Description of Artificial Sequence: Synthetic oligonucleotide
  Target: COL7A1; (-) strand; PAM type: NRG; PAM sequence: GGG
gaaactgctggcatcaaggt

SEQ ID NO: 10869 - DNA, 20 bp, Artificial Sequence
  Description of Artificial Sequence: Synthetic oligonucleotide
  Target: COL7A1; (-) strand; PAM type: NRG; PAM sequence: TGG
ggaaactgctggcatcaagg

SEQ ID NO: 10870 - DNA, 20 bp, Artificial Sequence
  Description of Artificial Sequence: Synthetic oligonucleotide
  Target: COL7A1; (-) strand; PAM type: NRG; PAM sequence: AGG
gctggaaactgctggcatca

SEQ ID NO: 10871 - DNA, 20 bp, Artificial Sequence
  Description of Artificial Sequence: Synthetic oligonucleotide
  Target: COL7A1; (-) strand; PAM type: NRG; PAM sequence: AAG
tgctggaaactgctggcatc

SEQ ID NO: 10872 - DNA, 20 bp, Artificial Sequence
  Description of Artificial Sequence: Synthetic oligonucleotide
  Target: COL7A1; (-) strand; PAM type: NRG; PAM sequence: TGG
gatcggttgctggaaactgc

SEQ ID NO: 10873 - DNA, 20 bp, Artificial Sequence
  Description of Artificial Sequence: Synthetic oligonucleotide
  Target: COL7A1; (-) strand; PAM type: NRG; PAM sequence: TGG
ccagaatgtggatcggttgc

SEQ ID NO: 10874 - DNA, 20 bp, Artificial Sequence
  Description of Artificial Sequence: Synthetic oligonucleotide
  Target: COL7A1; (-) strand; PAM type: NRG; PAM sequence: CGG
tttgtccccagaatgtggat

SEQ ID NO: 10875 - DNA, 20 bp, Artificial Sequence
  Description of Artificial Sequence: Synthetic oligonucleotide
  Target: COL7A1; (-) strand; PAM type: NRG; PAM sequence: TGG
cagactttgtccccagaatg

SEQ ID NO: 10876 - DNA, 20 bp, Artificial Sequence
  Description of Artificial Sequence: Synthetic oligonucleotide
  Target: COL7A1; (-) strand; PAM type: NRG; PAM sequence: CAG
cttcacccagactttgtccc

SEQ ID NO: 10877 - DNA, 20 bp, Artificial Sequence
  Description of Artificial Sequence: Synthetic oligonucleotide
  Target: COL7A1; (-) strand; PAM type: NRG; PAM sequence: CAG
gtcatgggcagcccttcacc

SEQ ID NO: 10878 - DNA, 20 bp, Artificial Sequence
  Description of Artificial Sequence: Synthetic oligonucleotide
  Target: COL7A1; (-) strand; PAM type: NRG; PAM sequence: CAG
aggagcttctctgtcatggg

SEQ ID NO: 10879 - DNA, 20 bp, Artificial Sequence
  Description of Artificial Sequence: Synthetic oligonucleotide
  Target: COL7A1; (-) strand; PAM type: NRG; PAM sequence: GGG
ggcaggagcttctctgtcat

SEQ ID NO: 10880 - DNA, 20 bp, Artificial Sequence
  Description of Artificial Sequence: Synthetic oligonucleotide
  Target: COL7A1; (-) strand; PAM type: NRG; PAM sequence: TGG
aggcaggagcttctctgtca

SEQ ID NO: 10881 - DNA, 20 bp, Artificial Sequence
  Description of Artificial Sequence: Synthetic oligonucleotide
  Target: COL7A1; (-) strand; PAM type: NRG; PAM sequence: GAG
ccgtgcggggcagaaggcag

SEQ ID NO: 10882 - DNA, 20 bp, Artificial Sequence
  Description of Artificial Sequence: Synthetic oligonucleotide
  Target: COL7A1; (-) strand; PAM type: NRG; PAM sequence: AGG
ggccgtgcggggcagaaggc

SEQ ID NO: 10883 - DNA, 20 bp, Artificial Sequence
  Description of Artificial Sequence: Synthetic oligonucleotide
  Target: COL7A1; (-) strand; PAM type: NRG; PAM sequence: CAG
aggccgtgcggggcagaagg

SEQ ID NO: 10884 - DNA, 20 bp, Artificial Sequence
  Description of Artificial Sequence: Synthetic oligonucleotide
  Target: COL7A1; (-) strand; PAM type: NRG; PAM sequence: AGG
ctgaggccgtgcggggcaga

SEQ ID NO: 10885 - DNA, 20 bp, Artificial Sequence
  Description of Artificial Sequence: Synthetic oligonucleotide
  Target: COL7A1; (-) strand; PAM type: NRG; PAM sequence: AAG
cctgaggccgtgcggggcag

SEQ ID NO: 10886 - DNA, 20 bp, Artificial Sequence
  Description of Artificial Sequence: Synthetic oligonucleotide
  Target: COL7A1; (-) strand; PAM type: NRG; PAM sequence: CAG
tttcctgaggccgtgcgggg

SEQ ID NO: 10887 - DNA, 20 bp, Artificial Sequence
  Description of Artificial Sequence: Synthetic oligonucleotide
  Target: COL7A1; (-) strand; PAM type: NRG; PAM sequence: GGG
tgctttcctgaggccgtgcg

SEQ ID NO: 10888 - DNA, 20 bp, Artificial Sequence
  Description of Artificial Sequence: Synthetic oligonucleotide
  Target: COL7A1; (-) strand; PAM type: NRG; PAM sequence: GGG
gtgctttcctgaggccgtgc

SEQ ID NO: 10889 - DNA, 20 bp, Artificial Sequence
  Description of Artificial Sequence: Synthetic oligonucleotide
  Target: COL7A1; (-) strand; PAM type: NRG; PAM sequence: CGG
ggtgctttcctgaggccgtg

SEQ ID NO: 10890 - DNA, 20 bp, Artificial Sequence
  Description of Artificial Sequence: Synthetic oligonucleotide
  Target: COL7A1; (-) strand; PAM type: NRG; PAM sequence: AGG
ggtgtgaaggtgctttcctg

SEQ ID NO: 10891 - DNA, 20 bp, Artificial Sequence
  Description of Artificial Sequence: Synthetic oligonucleotide
  Target: COL7A1; (-) strand; PAM type: NRG; PAM sequence: GAG
gggtgtgaaggtgctttcct

SEQ ID NO: 10892 - DNA, 20 bp, Artificial Sequence
  Description of Artificial Sequence: Synthetic oligonucleotide
  Target: COL7A1; (-) strand; PAM type: NRG; PAM sequence: AGG
gcctagggaaaagggtgtga

SEQ ID NO: 10893 - DNA, 20 bp, Artificial Sequence
  Description of Artificial Sequence: Synthetic oligonucleotide
  Target: COL7A1; (-) strand; PAM type: NRG; PAM sequence: AAG
ggcctagggaaaagggtgtg

SEQ ID NO: 10894 - DNA, 20 bp, Artificial Sequence
  Description of Artificial Sequence: Synthetic oligonucleotide
  Target: COL7A1; (-) strand; PAM type: NRG; PAM sequence: GGG
ggcaagaggcctagggaaaa

SEQ ID NO: 10895 - DNA, 20 bp, Artificial Sequence
  Description of Artificial Sequence: Synthetic oligonucleotide
  Target: COL7A1; (-) strand; PAM type: NRG; PAM sequence: AGG
gggcaagaggcctagggaaa

SEQ ID NO: 10896 - DNA, 20 bp, Artificial Sequence
  Description of Artificial Sequence: Synthetic oligonucleotide
  Target: COL7A1; (-) strand; PAM type: NRG; PAM sequence: AAG
tgggcaagaggcctagggaa

SEQ ID NO: 10897 - DNA, 20 bp, Artificial Sequence
  Description of Artificial Sequence: Synthetic oligonucleotide
  Target: COL7A1; (-) strand; PAM type: NRG; PAM sequence: GGG
tgctctgggcaagaggccta

SEQ ID NO: 10898 - DNA, 20 bp, Artificial Sequence
  Description of Artificial Sequence: Synthetic oligonucleotide
  Target: COL7A1; (-) strand; PAM type: NRG; PAM sequence: AGG
gtgctctgggcaagaggcct

SEQ ID NO: 10899 - DNA, 20 bp, Artificial Sequence
  Description of Artificial Sequence: Synthetic oligonucleotide
  Target: COL7A1; (-) strand; PAM type: NRG; PAM sequence: TAG
ggtgctctgggcaagaggcc

SEQ ID NO: 10900 - DNA, 20 bp, Artificial Sequence
  Description of Artificial Sequence: Synthetic oligonucleotide
  Target: COL7A1; (-) strand; PAM type: NRG; PAM sequence: AGG
taaagggtgctctgggcaag

SEQ ID NO: 10901 - DNA, 20 bp, Artificial Sequence
  Description of Artificial Sequence: Synthetic oligonucleotide
  Target: COL7A1; (-) strand; PAM type: NRG; PAM sequence: GAG
ctaaagggtgctctgggcaa

SEQ ID NO: 10902 - DNA, 20 bp, Artificial Sequence
  Description of Artificial Sequence: Synthetic oligonucleotide
  Target: COL7A1; (-) strand; PAM type: NRG; PAM sequence: AAG
tgctaaagggtgctctgggc

SEQ ID NO: 10903 - DNA, 20 bp, Artificial Sequence
  Description of Artificial Sequence: Synthetic oligonucleotide
  Target: COL7A1; (-) strand; PAM type: NRG; PAM sequence: GGG
caagtgctaaagggtgctct

SEQ ID NO: 10904 - DNA, 20 bp, Artificial Sequence
  Description of Artificial Sequence: Synthetic oligonucleotide
  Target: COL7A1; (-) strand; PAM type: NRG; PAM sequence: TGG
ccaagtgctaaagggtgctc

SEQ ID NO: 10905 - DNA, 20 bp, Artificial Sequence
  Description of Artificial Sequence: Synthetic oligonucleotide
  Target: COL7A1; (-) strand; PAM type: NRG; PAM sequence: GGG
tgcctcaaccaagtgctaaa

SEQ ID NO: 10906 - DNA, 20 bp, Artificial Sequence
  Description of Artificial Sequence: Synthetic oligonucleotide
  Target: COL7A1; (-) strand; PAM type: NRG; PAM sequence: AGG
atgcctcaaccaagtgctaa

SEQ ID NO: 10907 - DNA, 20 bp, Artificial Sequence
  Description of Artificial Sequence: Synthetic oligonucleotide
  Target: COL7A1; (-) strand; PAM type: NRG; PAM sequence: AAG
catgcctcaaccaagtgcta

SEQ ID NO: 10908 - DNA, 20 bp, Artificial Sequence
  Description of Artificial Sequence: Synthetic oligonucleotide
  Target: COL7A1; (-) strand; PAM type: NRG; PAM sequence: AAG
tctccagccatgcctcaacc

SEQ ID NO: 10909 - DNA, 20 bp, Artificial Sequence
  Description of Artificial Sequence: Synthetic oligonucleotide
  Target: COL7A1; (-) strand; PAM type: NRG; PAM sequence: CAG
aaggggctcccaggagtctc

SEQ ID NO: 10910 - DNA, 20 bp, Artificial Sequence
  Description of Artificial Sequence: Synthetic oligonucleotide
  Target: COL7A1; (-) strand; PAM type: NRG; PAM sequence: GAG
caccagaaaggggctcccag

SEQ ID NO: 10911 - DNA, 20 bp, Artificial Sequence
  Description of Artificial Sequence: Synthetic oligonucleotide
  Target: COL7A1; (-) strand; PAM type: NRG; PAM sequence: AGG
cacaccagaaaggggctccc

SEQ ID NO: 10912 - DNA, 20 bp, Artificial Sequence
  Description of Artificial Sequence: Synthetic oligonucleotide
  Target: COL7A1; (-) strand; PAM type: NRG; PAM sequence: CAG
acacaccagaaaggggctcc

SEQ ID NO: 10913 - DNA, 20 bp, Artificial Sequence
  Description of Artificial Sequence: Synthetic oligonucleotide
  Target: COL7A1; (-) strand; PAM type: NRG; PAM sequence: GGG
agtggggacacaccagaaag

SEQ ID NO: 10914 - DNA, 20 bp, Artificial Sequence
  Description of Artificial Sequence: Synthetic oligonucleotide
  Target: COL7A1; (-) strand; PAM type: NRG; PAM sequence: GGG
cagtggggacacaccagaaa

SEQ ID NO: 10915 - DNA, 20 bp, Artificial Sequence
  Description of Artificial Sequence: Synthetic oligonucleotide
  Target: COL7A1; (-) strand; PAM type: NRG; PAM sequence: AGG
gcagtggggacacaccagaa

SEQ ID NO: 10916 - DNA, 20 bp, Artificial Sequence
  Description of Artificial Sequence: Synthetic oligonucleotide
  Target: COL7A1; (-) strand; PAM type: NRG; PAM sequence: AAG
ggcagtggggacacaccaga

SEQ ID NO: 10917 - DNA, 20 bp, Artificial Sequence
  Description of Artificial Sequence: Synthetic oligonucleotide
  Target: COL7A1; (-) strand; PAM type: NRG; PAM sequence: CAG
cttgggcagtggggacacac

SEQ ID NO: 10918 - DNA, 20 bp, Artificial Sequence
  Description of Artificial Sequence: Synthetic oligonucleotide
  Target: COL7A1; (-) strand; PAM type: NRG; PAM sequence: GGG
tcaagggaacttgggcagtg

SEQ ID NO: 10919 - DNA, 20 bp, Artificial Sequence
  Description of Artificial Sequence: Synthetic oligonucleotide
  Target: COL7A1; (-) strand; PAM type: NRG; PAM sequence: GGG
ctcaagggaacttgggcagt

SEQ ID NO: 10920 - DNA, 20 bp, Artificial Sequence
  Description of Artificial Sequence: Synthetic oligonucleotide
  Target: COL7A1; (-) strand; PAM type: NRG; PAM sequence: TGG
actcaagggaacttgggcag

SEQ ID NO: 10921 - DNA, 20 bp, Artificial Sequence
  Description of Artificial Sequence: Synthetic oligonucleotide
  Target: COL7A1; (-) strand; PAM type: NRG; PAM sequence: CAG
cacactcaagggaacttggg

SEQ ID NO: 10922 - DNA, 20 bp, Artificial Sequence
  Description of Artificial Sequence: Synthetic oligonucleotide
  Target: COL7A1; (-) strand; PAM type: NRG; PAM sequence: GGG
gcccacactcaagggaactt

SEQ ID NO: 10923 - DNA, 20 bp, Artificial Sequence
  Description of Artificial Sequence: Synthetic oligonucleotide
  Target: COL7A1; (-) strand; PAM type: NRG; PAM sequence: TGG
agcccacactcaagggaact

SEQ ID NO: 10924 - DNA, 20 bp, Artificial Sequence
  Description of Artificial Sequence: Synthetic oligonucleotide
  Target: COL7A1; (-) strand; PAM type: NRG; PAM sequence: GGG
ttcttgtagcccacactcaa

SEQ ID NO: 10925 - DNA, 20 bp, Artificial Sequence
  Description of Artificial Sequence: Synthetic oligonucleotide
  Target: COL7A1; (-) strand; PAM type: NRG; PAM sequence: AGG
gttcttgtagcccacactca

SEQ ID NO: 10926 - DNA, 20 bp, Artificial Sequence
  Description of Artificial Sequence: Synthetic oligonucleotide
  Target: COL7A1; (-) strand; PAM type: NRG; PAM sequence: AAG
ggttcttgtagcccacactc

SEQ ID NO: 10927 - DNA, 20 bp, Artificial Sequence
  Description of Artificial Sequence: Synthetic oligonucleotide
  Target: COL7A1; (-) strand; PAM type: NRG; PAM sequence: TAG
ctgccccattggggttcttg

SEQ ID NO: 10928 - DNA, 20 bp, Artificial Sequence
  Description of Artificial Sequence: Synthetic oligonucleotide
  Target: COL7A1; (-) strand; PAM type: NRG; PAM sequence: GGG
ttcagtgccctgccccattg

SEQ ID NO: 10929 - DNA, 20 bp, Artificial Sequence
  Description of Artificial Sequence: Synthetic oligonucleotide
  Target: COL7A1; (-) strand; PAM type: NRG; PAM sequence: GGG
gttcagtgccctgccccatt

SEQ ID NO: 10930 - DNA, 20 bp, Artificial Sequence
  Description of Artificial Sequence: Synthetic oligonucleotide
  Target: COL7A1; (-) strand; PAM type: NRG; PAM sequence: TGG
tgttcagtgccctgccccat

SEQ ID NO: 10931 - DNA, 20 bp, Artificial Sequence
  Description of Artificial Sequence: Synthetic oligonucleotide
  Target: COL7A1; (-) strand; PAM type: NRG; PAM sequence: CAG
taggttctgtgctgtgtgtt

SEQ ID NO: 10932 - DNA, 20 bp, Artificial Sequence
  Description of Artificial Sequence: Synthetic oligonucleotide
  Target: COL7A1; (-) strand; PAM type: NRG; PAM sequence: AGG
cccttgccatgaggctccat

SEQ ID NO: 10933 - DNA, 20 bp, Artificial Sequence
  Description of Artificial Sequence: Synthetic oligonucleotide
  Target: COL7A1; (-) strand; PAM type: NRG; PAM sequence: TAG
ccccttgccatgaggctcca

SEQ ID NO: 10934 - DNA, 20 bp, Artificial Sequence
  Description of Artificial Sequence: Synthetic oligonucleotide
  Target: COL7A1; (-) strand; PAM type: NRG; PAM sequence: AGG
atccccttccccttgccatg

SEQ ID NO: 10935 - DNA, 20 bp, Artificial Sequence
  Description of Artificial Sequence: Synthetic oligonucleotide
  Target: COL7A1; (-) strand; PAM type: NRG; PAM sequence: GAG
catccccttccccttgccat

SEQ ID NO: 10936 - DNA, 20 bp, Artificial Sequence
  Description of Artificial Sequence: Synthetic oligonucleotide
  Target: COL7A1; (-) strand; PAM type: NRG; PAM sequence: GGG
tctgttttgcatgcccattg

SEQ ID NO: 10937 - DNA, 20 bp, Artificial Sequence
  Description of Artificial Sequence: Synthetic oligonucleotide
  Target: COL7A1; (-) strand; PAM type: NRG; PAM sequence: GGG
ctctgttttgcatgcccatt

SEQ ID NO: 10938 - DNA, 20 bp, Artificial Sequence
  Description of Artificial Sequence: Synthetic oligonucleotide
  Target: COL7A1; (-) strand; PAM type: NRG; PAM sequence: TGG
actctgttttgcatgcccat

SEQ ID NO: 10939 - DNA, 20 bp, Artificial Sequence
  Description of Artificial Sequence: Synthetic oligonucleotide
  Target: COL7A1; (-) strand; PAM type: NRG; PAM sequence: GGG
tgtgccggtgagccaggctt

SEQ ID NO: 10940 - DNA, 20 bp, Artificial Sequence
  Description of Artificial Sequence: Synthetic oligonucleotide
  Target: COL7A1; (-) strand; PAM type: NRG; PAM sequence: TGG
gtgtgccggtgagccaggct

SEQ ID NO: 10941 - DNA, 20 bp, Artificial Sequence
  Description of Artificial Sequence: Synthetic oligonucleotide
  Target: COL7A1; (-) strand; PAM type: NRG; PAM sequence: AGG
tggaagtgtgccggtgagcc

SEQ ID NO: 10942 - DNA, 20 bp, Artificial Sequence
  Description of Artificial Sequence: Synthetic oligonucleotide
  Target: COL7A1; (-) strand; PAM type: NRG; PAM sequence: CAG
ctggaagtgtgccggtgagc

SEQ ID NO: 10943 - DNA, 20 bp, Artificial Sequence
  Description of Artificial Sequence: Synthetic oligonucleotide
  Target: COL7A1; (-) strand; PAM type: NRG; PAM sequence: GAG
gagcctggaagtgtgccggt

SEQ ID NO: 10944 - DNA, 20 bp, Artificial Sequence
  Description of Artificial Sequence: Synthetic oligonucleotide
  Target: COL7A1; (-) strand; PAM type: NRG; PAM sequence: CGG
aggagagcctggaagtgtgc

SEQ ID NO: 10945 - DNA, 20 bp, Artificial Sequence
  Description of Artificial Sequence: Synthetic oligonucleotide
  Target: COL7A1; (-) strand; PAM type: NRG; PAM sequence: AAG
ggcctgcgaggagagcctgg

SEQ ID NO: 10946 - DNA, 20 bp, Artificial Sequence
  Description of Artificial Sequence: Synthetic oligonucleotide
  Target: COL7A1; (-) strand; PAM type: NRG; PAM sequence: TGG
cgtggcctgcgaggagagcc

SEQ ID NO: 10947 - DNA, 20 bp, Artificial Sequence
  Description of Artificial Sequence: Synthetic oligonucleotide
  Target: COL7A1; (-) strand; PAM type: NRG; PAM sequence: GAG
gagagcgtggcctgcgagga

SEQ ID NO: 10948 - DNA, 20 bp, Artificial Sequence
  Description of Artificial Sequence: Synthetic oligonucleotide
  Target: COL7A1; (-) strand; PAM type: NRG; PAM sequence: GAG
tggagagcgtggcctgcgag

SEQ ID NO: 10949 - DNA, 20 bp, Artificial Sequence
  Description of Artificial Sequence: Synthetic oligonucleotide
  Target: COL7A1; (-) strand; PAM type: NRG; PAM sequence: AGG
cctggagagcgtggcctgcg

SEQ ID NO: 10950 - DNA, 20 bp, Artificial Sequence
  Description of Artificial Sequence: Synthetic oligonucleotide
  Target: COL7A1; (-) strand; PAM type: NRG; PAM sequence: GAG
ccctggagagcgtggcctgc

SEQ ID NO: 10951 - DNA, 20 bp, Artificial Sequence
  Description of Artificial Sequence: Synthetic oligonucleotide
  Target: COL7A1; (-) strand; PAM type: NRG; PAM sequence: TGG
cagggcctccctggagagcg

SEQ ID NO: 10952 - DNA, 20 bp, Artificial Sequence
  Description of Artificial Sequence: Synthetic oligonucleotide
  Target: COL7A1; (-) strand; PAM type: NRG; PAM sequence: GAG
ctctccagggcctccctgga

SEQ ID NO: 10953 - DNA, 20 bp, Artificial Sequence
  Description of Artificial Sequence: Synthetic oligonucleotide
  Target: COL7A1; (-) strand; PAM type: NRG; PAM sequence: GAG
atctctccagggcctccctg

SEQ ID NO: 10954 - DNA, 20 bp, Artificial Sequence
  Description of Artificial Sequence: Synthetic oligonucleotide
  Target: COL7A1; (-) strand; PAM type: NRG; PAM sequence: TGG
tcatctctccagggcctccc

SEQ ID NO: 10955 - DNA, 20 bp, Artificial Sequence
  Description of Artificial Sequence: Synthetic oligonucleotide
  Target: COL7A1; (-) strand; PAM type: NRG; PAM sequence: GGG
agtttgtcttcatctctcca

SEQ ID NO: 10956 - DNA, 20 bp, Artificial Sequence
  Description of Artificial Sequence: Synthetic oligonucleotide
  Target: COL7A1; (-) strand; PAM type: NRG; PAM sequence: AGG
cagtttgtcttcatctctcc

SEQ ID NO: 10957 - DNA, 20 bp, Artificial Sequence
  Description of Artificial Sequence: Synthetic oligonucleotide
  Target: COL7A1; (-) strand; PAM type: NRG; PAM sequence: CAG
gcagtttgtcttcatctctc

SEQ ID NO: 10958 - DNA, 20 bp, Artificial Sequence
  Description of Artificial Sequence: Synthetic oligonucleotide
  Target: COL7A1; (-) strand; PAM type: NRG; PAM sequence: CAG
acccataggctggttcctag

SEQ ID NO: 10959 - DNA, 20 bp, Artificial Sequence
  Description of Artificial Sequence: Synthetic oligonucleotide
  Target: COL7A1; (-) strand; PAM type: NRG; PAM sequence: TAG
cacacccataggctggttcc

SEQ ID NO: 10960 - DNA, 20 bp, Artificial Sequence
  Description of Artificial Sequence: Synthetic oligonucleotide
  Target: COL7A1; (-) strand; PAM type: NRG; PAM sequence: TGG
gcacatgcacacccataggc

SEQ ID NO: 10961 - DNA, 20 bp, Artificial Sequence
  Description of Artificial Sequence: Synthetic oligonucleotide
  Target: COL7A1; (-) strand; PAM type: NRG; PAM sequence: AGG
atgtgcacatgcacacccat

SEQ ID NO: 10962 - DNA, 20 bp, Artificial Sequence
  Description of Artificial Sequence: Synthetic oligonucleotide
  Target: COL7A1; (-) strand; PAM type: NRG; PAM sequence: TAG
catgtgcacatgcacaccca

SEQ ID NO: 10963 - DNA, 20 bp, Artificial Sequence
  Description of Artificial Sequence: Synthetic oligonucleotide
  Target: COL7A1; (-) strand; PAM type: NRG; PAM sequence: CAG
tccacatgcccaggtagcca

SEQ ID NO: 10964 - DNA, 20 bp, Artificial Sequence
  Description of Artificial Sequence: Synthetic oligonucleotide
  Target: COL7A1; (-) strand; PAM type: NRG; PAM sequence: TAG
accttttccacatgcccagg

SEQ ID NO: 10965 - DNA, 20 bp, Artificial Sequence
  Description of Artificial Sequence: Synthetic oligonucleotide
  Target: COL7A1; (-) strand; PAM type: NRG; PAM sequence: AGG
cccaccttttccacatgccc

SEQ ID NO: 10966 - DNA, 20 bp, Artificial Sequence
  Description of Artificial Sequence: Synthetic oligonucleotide
  Target: COL7A1; (-) strand; PAM type: NRG; PAM sequence: CAG
ccccaccttttccacatgcc

SEQ ID NO: 10967 - DNA, 20 bp, Artificial Sequence
  Description of Artificial Sequence: Synthetic oligonucleotide
  Target: COL7A1; (-) strand; PAM type: NRG; PAM sequence: AGG
gatccaaaggggagcaggtg

SEQ ID NO: 10968 - DNA, 20 bp, Artificial Sequence
  Description of Artificial Sequence: Synthetic oligonucleotide
  Target: COL7A1; (-) strand; PAM type: NRG; PAM sequence: GAG
ggatccaaaggggagcaggt

SEQ ID NO: 10969 - DNA, 20 bp, Artificial Sequence
  Description of Artificial Sequence: Synthetic oligonucleotide
  Target: COL7A1; (-) strand; PAM type: NRG; PAM sequence: AGG
gactggatccaaaggggagc

SEQ ID NO: 10970 - DNA, 20 bp, Artificial Sequence
  Description of Artificial Sequence: Synthetic oligonucleotide
  Target: COL7A1; (-) strand; PAM type: NRG; PAM sequence: CAG
agactggatccaaaggggag

SEQ ID NO: 10971 - DNA, 20 bp, Artificial Sequence
  Description of Artificial Sequence: Synthetic oligonucleotide
  Target: COL7A1; (-) strand; PAM type: NRG; PAM sequence: GAG
gggagactggatccaaaggg

SEQ ID NO: 10972 - DNA, 20 bp, Artificial Sequence
  Description of Artificial Sequence: Synthetic oligonucleotide
  Target: COL7A1; (-) strand; PAM type: NRG; PAM sequence: GGG
tggggagactggatccaaag

SEQ ID NO: 10973 - DNA, 20 bp, Artificial Sequence
  Description of Artificial Sequence: Synthetic oligonucleotide
  Target: COL7A1; (-) strand; PAM type: NRG; PAM sequence: GGG
gtggggagactggatccaaa

SEQ ID NO: 10974 - DNA, 20 bp, Artificial Sequence
  Description of Artificial Sequence: Synthetic oligonucleotide
  Target: COL7A1; (-) strand; PAM type: NRG; PAM sequence: AGG
cgtggggagactggatccaa

SEQ ID NO: 10975 - DNA, 20 bp, Artificial Sequence
  Description of Artificial Sequence: Synthetic oligonucleotide
  Target: COL7A1; (-) strand; PAM type: NRG; PAM sequence: AAG
ccgtggggagactggatcca

SEQ ID NO: 10976 - DNA, 20 bp, Artificial Sequence
  Description of Artificial Sequence: Synthetic oligonucleotide
  Target: COL7A1; (-) strand; PAM type: NRG; PAM sequence: TGG
cagggtgaccgtggggagac

SEQ ID NO: 10977 - DNA, 20 bp, Artificial Sequence
  Description of Artificial Sequence: Synthetic oligonucleotide
  Target: COL7A1; (-) strand; PAM type: NRG; PAM sequence: GAG
gttttcagggtgaccgtggg

SEQ ID NO: 10978 - DNA, 20 bp, Artificial Sequence
  Description of Artificial Sequence: Synthetic oligonucleotide
  Target: COL7A1; (-) strand; PAM type: NRG; PAM sequence: GGG
ttgttttcagggtgaccgtg

SEQ ID NO: 10979 - DNA, 20 bp, Artificial Sequence
  Description of Artificial Sequence: Synthetic oligonucleotide
  Target: COL7A1; (-) strand; PAM type: NRG; PAM sequence: GGG
cttgttttcagggtgaccgt

SEQ ID NO: 10980 - DNA, 20 bp, Artificial Sequence
  Description of Artificial Sequence: Synthetic oligonucleotide
  Target: COL7A1; (-) strand; PAM type: NRG; PAM sequence: TGG
tcttgttttcagggtgaccg

SEQ ID NO: 10981 - DNA, 20 bp, Artificial Sequence
  Description of Artificial Sequence: Synthetic oligonucleotide
  Target: COL7A1; (-) strand; PAM type: NRG; PAM sequence: GGG
cctggtcattcttgttttca

SEQ ID NO: 10982 - DNA, 20 bp, Artificial Sequence
  Description of Artificial Sequence: Synthetic oligonucleotide
  Target: COL7A1; (-) strand; PAM type: NRG; PAM sequence: AGG
acctggtcattcttgttttc

SEQ ID NO: 10983 - DNA, 20 bp, Artificial Sequence
  Description of Artificial Sequence: Synthetic oligonucleotide
  Target: COL7A1; (-) strand; PAM type: NRG; PAM sequence: CAG
cacctggtcattcttgtttt

SEQ ID NO: 10984 - DNA, 20 bp, Artificial Sequence
  Description of Artificial Sequence: Synthetic oligonucleotide
  Target: COL7A1; (-) strand; PAM type: NRG; PAM sequence: TGG
ctgggggccatttccccacc

SEQ ID NO: 10985 - DNA, 20 bp, Artificial Sequence
  Description of Artificial Sequence: Synthetic oligonucleotide
  Target: COL7A1; (-) strand; PAM type: NRG; PAM sequence: GGG
gagggggctgaccaggctgg

SEQ ID NO: 10986 - DNA, 20 bp, Artificial Sequence
  Description of Artificial Sequence: Synthetic oligonucleotide
  Target: COL7A1; (-) strand; PAM type: NRG; PAM sequence: GGG
tgagggggctgaccaggctg

SEQ ID NO: 10987 - DNA, 20 bp, Artificial Sequence
  Description of Artificial Sequence: Synthetic oligonucleotide
  Target: COL7A1; (-) strand; PAM type: NRG; PAM sequence: GGG
gtgagggggctgaccaggct

SEQ ID NO: 10988 - DNA, 20 bp, Artificial Sequence
  Description of Artificial Sequence: Synthetic oligonucleotide
  Target: COL7A1; (-) strand; PAM type: NRG; PAM sequence: TGG
ggtgagggggctgaccaggc

SEQ ID NO: 10989 - DNA, 20 bp, Artificial Sequence
  Description of Artificial Sequence: Synthetic oligonucleotide
  Target: COL7A1; (-) strand; PAM type: NRG; PAM sequence: AGG
gcgtggtgagggggctgacc

SEQ ID NO: 10990 - DNA, 20 bp, Artificial Sequence
  Description of Artificial Sequence: Synthetic oligonucleotide
  Target: COL7A1; (-) strand; PAM type: NRG; PAM sequence: CAG
ggcgtggtgagggggctgac

SEQ ID NO: 10991 - DNA, 20 bp, Artificial Sequence
  Description of Artificial Sequence: Synthetic oligonucleotide
  Target: COL7A1; (-) strand; PAM type: NRG; PAM sequence: GGG
gggtagggggcgtggtgagg

SEQ ID NO: 10992 - DNA, 20 bp, Artificial Sequence
  Description of Artificial Sequence: Synthetic oligonucleotide
  Target: COL7A1; (-) strand; PAM type: NRG; PAM sequence: GGG
tgggtagggggcgtggtgag

SEQ ID NO: 10993 - DNA, 20 bp, Artificial Sequence
  Description of Artificial Sequence: Synthetic oligonucleotide
  Target: COL7A1; (-) strand; PAM type: NRG; PAM sequence: GGG
ttgggtagggggcgtggtga

SEQ ID NO: 10994 - DNA, 20 bp, Artificial Sequence
  Description of Artificial Sequence: Synthetic oligonucleotide
  Target: COL7A1; (-) strand; PAM type: NRG; PAM sequence: AGG
gttgggtagggggcgtggtg

SEQ ID NO: 10995 - DNA, 20 bp, Artificial Sequence
  Description of Artificial Sequence: Synthetic oligonucleotide
  Target: COL7A1; (-) strand; PAM type: NRG; PAM sequence: GAG
tgttgggtagggggcgtggt

SEQ ID NO: 10996 - DNA, 20 bp, Artificial Sequence
  Description of Artificial Sequence: Synthetic oligonucleotide
  Target: COL7A1; (-) strand; PAM type: NRG; PAM sequence: TGG
cggatgttgggtagggggcg

SEQ ID NO: 10997 - DNA, 20 bp, Artificial Sequence
  Description of Artificial Sequence: Synthetic oligonucleotide
  Target: COL7A1; (-) strand; PAM type: NRG; PAM sequence: GGG
gagtgcggatgttgggtagg

SEQ ID NO: 10998 - DNA, 20 bp, Artificial Sequence
  Description of Artificial Sequence: Synthetic oligonucleotide
  Target: COL7A1; (-) strand; PAM type: NRG; PAM sequence: GGG
tgagtgcggatgttgggtag

SEQ ID NO: 10999 - DNA, 20 bp, Artificial Sequence
  Description of Artificial Sequence: Synthetic oligonucleotide
  Target: COL7A1; (-) strand; PAM type: NRG; PAM sequence: GGG
gtgagtgcggatgttgggta

SEQ ID NO: 11000 - DNA, 20 bp, Artificial Sequence
  Description of Artificial Sequence: Synthetic oligonucleotide
  Target: COL7A1; (-) strand; PAM type: NRG; PAM sequence: AGG
ggtgagtgcggatgttgggt

SEQ ID NO: 11001 - DNA, 20 bp, Artificial Sequence
  Description of Artificial Sequence: Synthetic oligonucleotide
  Target: COL7A1; (-) strand; PAM type: NRG; PAM sequence: TAG
aggtgagtgcggatgttggg

SEQ ID NO: 11002 - DNA, 20 bp, Artificial Sequence
  Description of Artificial Sequence: Synthetic oligonucleotide
  Target: COL7A1; (-) strand; PAM type: NRG; PAM sequence: GGG
ccaaggtgagtgcggatgtt

SEQ ID NO: 11003 - DNA, 20 bp, Artificial Sequence
  Description of Artificial Sequence: Synthetic oligonucleotide
  Target: COL7A1; (-) strand; PAM type: NRG; PAM sequence: TGG
cccaaggtgagtgcggatgt

SEQ ID NO: 11004 - DNA, 20 bp, Artificial Sequence
  Description of Artificial Sequence: Synthetic oligonucleotide
  Target: COL7A1; (-) strand; PAM type: NRG; PAM sequence: CGG
cacgggccccaaggtgagtg

SEQ ID NO: 11005 - DNA, 20 bp, Artificial Sequence
  Description of Artificial Sequence: Synthetic oligonucleotide
  Target: COL7A1; (-) strand; PAM type: NRG; PAM sequence: GAG
ggaggcacgggccccaaggt

SEQ ID NO: 11006 - DNA, 20 bp, Artificial Sequence
  Description of Artificial Sequence: Synthetic oligonucleotide
  Target: COL7A1; (-) strand; PAM type: NRG; PAM sequence: AGG
cccaggaggcacgggcccca

SEQ ID NO: 11007 - DNA, 20 bp, Artificial Sequence
  Description of Artificial Sequence: Synthetic oligonucleotide
  Target: COL7A1; (-) strand; PAM type: NRG; PAM sequence: AAG
tcccaggaggcacgggcccc

SEQ ID NO: 11008 - DNA, 20 bp, Artificial Sequence
  Description of Artificial Sequence: Synthetic oligonucleotide
  Target: COL7A1; (-) strand; PAM type: NRG; PAM sequence: GGG
cctggtgtcccaggaggcac

SEQ ID NO: 11009 - DNA, 20 bp, Artificial Sequence
  Description of Artificial Sequence: Synthetic oligonucleotide
  Target: COL7A1; (-) strand; PAM type: NRG; PAM sequence: CGG
tcctggtgtcccaggaggca

SEQ ID NO: 11010 - DNA, 20 bp, Artificial Sequence
  Description of Artificial Sequence: Synthetic oligonucleotide
  Target: COL7A1; (-) strand; PAM type: NRG; PAM sequence: AGG
ggttttcctggtgtcccagg

SEQ ID NO: 11011 - DNA, 20 bp, Artificial Sequence
  Description of Artificial Sequence: Synthetic oligonucleotide
  Target: COL7A1; (-) strand; PAM type: NRG; PAM sequence: GAG
gggttttcctggtgtcccag

SEQ ID NO: 11012 - DNA, 20 bp, Artificial Sequence
  Description of Artificial Sequence: Synthetic oligonucleotide
  Target: COL7A1; (-) strand; PAM type: NRG; PAM sequence: AGG
cagggttttcctggtgtccc

SEQ ID NO: 11013 - DNA, 20 bp, Artificial Sequence
  Description of Artificial Sequence: Synthetic oligonucleotide
  Target: COL7A1; (-) strand; PAM type: NRG; PAM sequence: CAG
tcagggttttcctggtgtcc

SEQ ID NO: 11014 - DNA, 20 bp, Artificial Sequence
  Description of Artificial Sequence: Synthetic oligonucleotide
  Target: COL7A1; (-) strand; PAM type: NRG; PAM sequence: TGG
gccgtatctcagggttttcc

SEQ ID NO: 11015 - DNA, 20 bp, Artificial Sequence
  Description of Artificial Sequence: Synthetic oligonucleotide
  Target: COL7A1; (-) strand; PAM type: NRG; PAM sequence: GGG
ttgtgttctgccgtatctca

SEQ ID NO: 11016 - DNA, 20 bp, Artificial Sequence
  Description of Artificial Sequence: Synthetic oligonucleotide
  Target: COL7A1; (-) strand; PAM type: NRG; PAM sequence: AGG
tttgtgttctgccgtatctc

SEQ ID NO: 11017 - DNA, 20 bp, Artificial Sequence
  Description of Artificial Sequence: Synthetic oligonucleotide
  Target: COL7A1; (-) strand; PAM type: NRG; PAM sequence: CAG
ctttgtgttctgccgtatct

SEQ ID NO: 11018 - DNA, 20 bp, Artificial Sequence
  Description of Artificial Sequence: Synthetic oligonucleotide
  Target: COL7A1; (-) strand; PAM type: NRG; PAM sequence: GGG
caaccctcctgggaagccat

SEQ ID NO: 11019 - DNA, 20 bp, Artificial Sequence
  Description of Artificial Sequence: Synthetic oligonucleotide
  Target: COL7A1; (-) strand; PAM type: NRG; PAM sequence: TGG
gcaaccctcctgggaagcca

SEQ ID NO: 11020 - DNA, 20 bp, Artificial Sequence
  Description of Artificial Sequence: Synthetic oligonucleotide
  Target: COL7A1; (-) strand; PAM type: NRG; PAM sequence: AAG
caatgggcaaccctcctggg

SEQ ID NO: 11021 - DNA, 20 bp, Artificial Sequence
  Description of Artificial Sequence: Synthetic oligonucleotide
  Target: COL7A1; (-) strand; PAM type: NRG; PAM sequence: GGG
tttcaatgggcaaccctcct

SEQ ID NO: 11022 - DNA, 20 bp, Artificial Sequence
  Description of Artificial Sequence: Synthetic oligonucleotide
  Target: COL7A1; (-) strand; PAM type: NRG; PAM sequence: TGG
gtttcaatgggcaaccctcc

SEQ ID NO: 11023 - DNA, 20 bp, Artificial Sequence
  Description of Artificial Sequence: Synthetic oligonucleotide
  Target: COL7A1; (-) strand; PAM type: NRG; PAM sequence: GGG
agaagccatgatgtttcaat

SEQ ID NO: 11024 - DNA, 20 bp, Artificial Sequence
  Description of Artificial Sequence: Synthetic oligonucleotide
  Target: COL7A1; (-) strand; PAM type: NRG; PAM sequence: TGG
tagaagccatgatgtttcaa

SEQ ID NO: 11025 - DNA, 20 bp, Artificial Sequence
  Description of Artificial Sequence: Synthetic oligonucleotide
  Target: COL7A1; (-) strand; PAM type: NRG; PAM sequence: AAG
ctgggacttcagagcattag

SEQ ID NO: 11026 - DNA, 20 bp, Artificial Sequence
  Description of Artificial Sequence: Synthetic oligonucleotide
  Target: COL7A1; (-) strand; PAM type: NRG; PAM sequence: TAG
attctgggacttcagagcat

SEQ ID NO: 11027 - DNA, 20 bp, Artificial Sequence
  Description of Artificial Sequence: Synthetic oligonucleotide
  Target: COL7A1; (-) strand; PAM type: NRG; PAM sequence: GAG
tgggtcattctgggacttca

SEQ ID NO: 11028 - DNA, 20 bp, Artificial Sequence
  Description of Artificial Sequence: Synthetic oligonucleotide
  Target: COL7A1; (-) strand; PAM type: NRG; PAM sequence: CAG
cctgggtcattctgggactt

SEQ ID NO: 11029 - DNA, 20 bp, Artificial Sequence
  Description of Artificial Sequence: Synthetic oligonucleotide
  Target: COL7A1; (-) strand; PAM type: NRG; PAM sequence: GGG
tgagtgtcctgggtcattct

SEQ ID NO: 11030 - DNA, 20 bp, Artificial Sequence
  Description of Artificial Sequence: Synthetic oligonucleotide
  Target: COL7A1; (-) strand; PAM type: NRG; PAM sequence: TGG
gtgagtgtcctgggtcattc

SEQ ID NO: 11031 - DNA, 20 bp, Artificial Sequence
  Description of Artificial Sequence: Synthetic oligonucleotide
  Target: COL7A1; (-) strand; PAM type: NRG; PAM sequence: GGG
cctggccaggtgagtgtcct

SEQ ID NO: 11032 - DNA, 20 bp, Artificial Sequence
  Description of Artificial Sequence: Synthetic oligonucleotide
  Target: COL7A1; (-) strand; PAM type: NRG; PAM sequence: TGG
tcctggccaggtgagtgtcc

SEQ ID NO: 11033 - DNA, 20 bp, Artificial Sequence
  Description of Artificial Sequence: Synthetic oligonucleotide
  Target: COL7A1; (-) strand; PAM type: NRG; PAM sequence: GAG
gtgggccctcctggccaggt

SEQ ID NO: 11034 - DNA, 20 bp, Artificial Sequence
  Description of Artificial Sequence: Synthetic oligonucleotide
  Target: COL7A1; (-) strand; PAM type: NRG; PAM sequence: AGG
gccagtgggccctcctggcc

SEQ ID NO: 11035 - DNA, 20 bp, Artificial Sequence
  Description of Artificial Sequence: Synthetic oligonucleotide
  Target: COL7A1; (-) strand; PAM type: NRG; PAM sequence: CAG
ggccagtgggccctcctggc

SEQ ID NO: 11036 - DNA, 20 bp, Artificial Sequence
  Description of Artificial Sequence: Synthetic oligonucleotide
  Target: COL7A1; (-) strand; PAM type: NRG; PAM sequence: TGG
ccagggccagtgggccctcc

SEQ ID NO: 11037 - DNA, 20 bp, Artificial Sequence
  Description of Artificial Sequence: Synthetic oligonucleotide
  Target: COL7A1; (-) strand; PAM type: NRG; PAM sequence: GGG
ccaggcctcccagggccagt

SEQ ID NO: 11038 - DNA, 20 bp, Artificial Sequence
  Description of Artificial Sequence: Synthetic oligonucleotide
  Target: COL7A1; (-) strand; PAM type: NRG; PAM sequence: TGG
tccaggcctcccagggccag

SEQ ID NO: 11039 - DNA, 20 bp, Artificial Sequence
  Description of Artificial Sequence: Synthetic oligonucleotide
  Target: COL7A1; (-) strand; PAM type: NRG; PAM sequence: CAG
gcctccaggcctcccagggc

SEQ ID NO: 11040 - DNA, 20 bp, Artificial Sequence
  Description of Artificial Sequence: Synthetic oligonucleotide
  Target: COL7A1; (-) strand; PAM type: NRG; PAM sequence: GGG
aggggcctccaggcctccca

SEQ ID NO: 11041 - DNA, 20 bp, Artificial Sequence
  Description of Artificial Sequence: Synthetic oligonucleotide
  Target: COL7A1; (-) strand; PAM type: NRG; PAM sequence: AGG
caggggcctccaggcctccc

SEQ ID NO: 11042 - DNA, 20 bp, Artificial Sequence
  Description of Artificial Sequence: Synthetic oligonucleotide
  Target: COL7A1; (-) strand; PAM type: NRG; PAM sequence: CAG
ccaggggcctccaggcctcc

SEQ ID NO: 11043 - DNA, 20 bp, Artificial Sequence
  Description of Artificial Sequence: Synthetic oligonucleotide
  Target: COL7A1; (-) strand; PAM type: NRG; PAM sequence: AGG
cttggaccccaggggcctcc

SEQ ID NO: 11044 - DNA, 20 bp, Artificial Sequence
  Description of Artificial Sequence: Synthetic oligonucleotide
  Target: COL7A1; (-) strand; PAM type: NRG; PAM sequence: CAG
ccttggaccccaggggcctc

SEQ ID NO: 11045 - DNA, 20 bp, Artificial Sequence
  Description of Artificial Sequence: Synthetic oligonucleotide
  Target: COL7A1; (-) strand; PAM type: NRG; PAM sequence: GGG
ctggtatccttggaccccag

SEQ ID NO: 11046 - DNA, 20 bp, Artificial Sequence
  Description of Artificial Sequence: Synthetic oligonucleotide
  Target: COL7A1; (-) strand; PAM type: NRG; PAM sequence: GGG
cctggtatccttggacccca

SEQ ID NO: 11047 - DNA, 20 bp, Artificial Sequence
  Description of Artificial Sequence: Synthetic oligonucleotide
  Target: COL7A1; (-) strand; PAM type: NRG; PAM sequence: AGG
tcctggtatccttggacccc

SEQ ID NO: 11048 - DNA, 20 bp, Artificial Sequence
  Description of Artificial Sequence: Synthetic oligonucleotide
  Target: COL7A1; (-) strand; PAM type: NRG; PAM sequence: CAG
ctcctggtatccttggaccc

SEQ ID NO: 11049 - DNA, 20 bp, Artificial Sequence
  Description of Artificial Sequence: Synthetic oligonucleotide
  Target: COL7A1; (-) strand; PAM type: NRG; PAM sequence: TGG
cgtggagctcctggtatcct

SEQ ID NO: 11050 - DNA, 20 bp, Artificial Sequence
  Description of Artificial Sequence: Synthetic oligonucleotide
  Target: COL7A1; (-) strand; PAM type: NRG; PAM sequence: TGG
aagggtgagcgtggagctcc

SEQ ID NO: 11051 - DNA, 20 bp, Artificial Sequence
  Description of Artificial Sequence: Synthetic oligonucleotide
  Target: COL7A1; (-) strand; PAM type: NRG; PAM sequence: GAG
tggccccaagggtgagcgtg

SEQ ID NO: 11052 - DNA, 20 bp, Artificial Sequence
  Description of Artificial Sequence: Synthetic oligonucleotide
  Target: COL7A1; (-) strand; PAM type: NRG; PAM sequence: TGG
gatggccccaagggtgagcg

SEQ ID NO: 11053 - DNA, 20 bp, Artificial Sequence
  Description of Artificial Sequence: Synthetic oligonucleotide
  Target: COL7A1; (-) strand; PAM type: NRG; PAM sequence: GAG
gtcgtgatggccccaagggt

SEQ ID NO: 11054 - DNA, 20 bp, Artificial Sequence
  Description of Artificial Sequence: Synthetic oligonucleotide
  Target: COL7A1; (-) strand; PAM type: NRG; PAM sequence: GGG
cagggtcgtgatggccccaa

SEQ ID NO: 11055 - DNA, 20 bp, Artificial Sequence
  Description of Artificial Sequence: Synthetic oligonucleotide
  Target: COL7A1; (-) strand; PAM type: NRG; PAM sequence: AGG
acagggtcgtgatggcccca

SEQ ID NO: 11056 - DNA, 20 bp, Artificial Sequence
  Description of Artificial Sequence: Synthetic oligonucleotide
  Target: COL7A1; (-) strand; PAM type: NRG; PAM sequence: AAG
cacagggtcgtgatggcccc

SEQ ID NO: 11057 - DNA, 20 bp, Artificial Sequence
  Description of Artificial Sequence: Synthetic oligonucleotide
  Target: COL7A1; (-) strand; PAM type: NRG; PAM sequence: TGG
catccttcacagggtcgtga

SEQ ID NO: 11058 - DNA, 20 bp, Artificial Sequence
  Description of Artificial Sequence: Synthetic oligonucleotide
  Target: COL7A1; (-) strand; PAM type: NRG; PAM sequence: GGG
tgctggctgcatccttcaca

SEQ ID NO: 11059 - DNA, 20 bp, Artificial Sequence
  Description of Artificial Sequence: Synthetic oligonucleotide
  Target: COL7A1; (-) strand; PAM type: NRG; PAM sequence: AGG
atgctggctgcatccttcac

SEQ ID NO: 11060 - DNA, 20 bp, Artificial Sequence
  Description of Artificial Sequence: Synthetic oligonucleotide
  Target: COL7A1; (-) strand; PAM type: NRG; PAM sequence: CAG
gatgctggctgcatccttca

SEQ ID NO: 11061 - DNA, 20 bp, Artificial Sequence
  Description of Artificial Sequence: Synthetic oligonucleotide
  Target: COL7A1; (-) strand; PAM type: NRG; PAM sequence: TGG
aggtctcagggtgctgatgc

SEQ ID NO: 11062 - DNA, 20 bp, Artificial Sequence
  Description of Artificial Sequence: Synthetic oligonucleotide
  Target: COL7A1; (-) strand; PAM type: NRG; PAM sequence: GGG
cactcttttctgaggtctca

SEQ ID NO: 11063 - DNA, 20 bp, Artificial Sequence
  Description of Artificial Sequence: Synthetic oligonucleotide
  Target: COL7A1; (-) strand; PAM type: NRG; PAM sequence: AGG
ccactcttttctgaggtctc

SEQ ID NO: 11064 - DNA, 20 bp, Artificial Sequence
  Description of Artificial Sequence: Synthetic oligonucleotide
  Target: COL7A1; (-) strand; PAM type: NRG; PAM sequence: CAG
tccactcttttctgaggtct

SEQ ID NO: 11065 - DNA, 20 bp, Artificial Sequence
  Description of Artificial Sequence: Synthetic oligonucleotide
  Target: COL7A1; (-) strand; PAM type: NRG; PAM sequence: AGG
tatgactccactcttttctg

SEQ ID NO: 11066 - DNA, 20 bp, Artificial Sequence
  Description of Artificial Sequence: Synthetic oligonucleotide
  Target: COL7A1; (-) strand; PAM type: NRG; PAM sequence: GAG
atatgactccactcttttct

SEQ ID NO: 11067 - DNA, 20 bp, Artificial Sequence
  Description of Artificial Sequence: Synthetic oligonucleotide
  Target: COL7A1; (-) strand; PAM type: NRG; PAM sequence: GGG
acccctgaccctgaccctgg

SEQ ID NO: 11068 - DNA, 20 bp, Artificial Sequence
  Description of Artificial Sequence: Synthetic oligonucleotide
  Target: COL7A1; (-) strand; PAM type: NRG; PAM sequence: GGG
gacccctgaccctgaccctg

SEQ ID NO: 11069 - DNA, 20 bp, Artificial Sequence
  Description of Artificial Sequence: Synthetic oligonucleotide
  Target: COL7A1; (-) strand; PAM type: NRG; PAM sequence: GGG
tgacccctgaccctgaccct

SEQ ID NO: 11070 - DNA, 20 bp, Artificial Sequence
  Description of Artificial Sequence: Synthetic oligonucleotide
  Target: COL7A1; (-) strand; PAM type: NRG; PAM sequence: TGG
ctgacccctgaccctgaccc

SEQ ID NO: 11071 - DNA, 20 bp, Artificial Sequence
  Description of Artificial Sequence: Synthetic oligonucleotide
  Target: COL7A1; (-) strand; PAM type: NRG; PAM sequence: GAG
tgggagagaagtgagtattg

SEQ ID NO: 11072 - DNA, 20 bp, Artificial Sequence
  Description of Artificial Sequence: Synthetic oligonucleotide
  Target: COL7A1; (-) strand; PAM type: NRG; PAM sequence: TGG
tctgggagagaagtgagtat

SEQ ID NO: 11073 - DNA, 20 bp, Artificial Sequence
  Description of Artificial Sequence: Synthetic oligonucleotide
  Target: COL7A1; (-) strand; PAM type: NRG; PAM sequence: GAG
ggcgcctctgggagagaagt

SEQ ID NO: 11074 - DNA, 20 bp, Artificial Sequence
  Description of Artificial Sequence: Synthetic oligonucleotide
  Target: COL7A1; (-) strand; PAM type: NRG; PAM sequence: AAG
ttcaggcgcctctgggagag

SEQ ID NO: 11075 - DNA, 20 bp, Artificial Sequence
  Description of Artificial Sequence: Synthetic oligonucleotide
  Target: COL7A1; (-) strand; PAM type: NRG; PAM sequence: GAG
agattcaggcgcctctggga

SEQ ID NO: 11076 - DNA, 20 bp, Artificial Sequence
  Description of Artificial Sequence: Synthetic oligonucleotide
  Target: COL7A1; (-) strand; PAM type: NRG; PAM sequence: GAG
ggagattcaggcgcctctgg

SEQ ID NO: 11077 - DNA, 20 bp, Artificial Sequence
  Description of Artificial Sequence: Synthetic oligonucleotide
  Target: COL7A1; (-) strand; PAM type: NRG; PAM sequence: GGG
aaggagattcaggcgcctct

SEQ ID NO: 11078 - DNA, 20 bp, Artificial Sequence
  Description of Artificial Sequence: Synthetic oligonucleotide
  Target: COL7A1; (-) strand; PAM type: NRG; PAM sequence: TGG
aaaggagattcaggcgcctc

SEQ ID NO: 11079 - DNA, 20 bp, Artificial Sequence
  Description of Artificial Sequence: Synthetic oligonucleotide
  Target: COL7A1; (-) strand; PAM type: NRG; PAM sequence: AGG
tagggagagaaaggagattc

SEQ ID NO: 11080 - DNA, 20 bp, Artificial Sequence
  Description of Artificial Sequence: Synthetic oligonucleotide
  Target: COL7A1; (-) strand; PAM type: NRG; PAM sequence: CAG
ttagggagagaaaggagatt

SEQ ID NO: 11081 - DNA, 20 bp, Artificial Sequence
  Description of Artificial Sequence: Synthetic oligonucleotide
  Target: COL7A1; (-) strand; PAM type: NRG; PAM sequence: GAG
tcttccttagggagagaaag

SEQ ID NO: 11082 - DNA, 20 bp, Artificial Sequence
  Description of Artificial Sequence: Synthetic oligonucleotide
  Target: COL7A1; (-) strand; PAM type: NRG; PAM sequence: AGG
tgtcttccttagggagagaa

SEQ ID NO: 11083 - DNA, 20 bp, Artificial Sequence
  Description of Artificial Sequence: Synthetic oligonucleotide
  Target: COL7A1; (-) strand; PAM type: NRG; PAM sequence: AAG
ttgtcttccttagggagaga

SEQ ID NO: 11084 - DNA, 20 bp, Artificial Sequence
  Description of Artificial Sequence: Synthetic oligonucleotide
  Target: COL7A1; (-) strand; PAM type: NRG; PAM sequence: GAG
atccttgtcttccttaggga

SEQ ID NO: 11085 - DNA, 20 bp, Artificial Sequence
  Description of Artificial Sequence: Synthetic oligonucleotide
  Target: COL7A1; (-) strand; PAM type: NRG; PAM sequence: GAG
gcatccttgtcttccttagg

SEQ ID NO: 11086 - DNA, 20 bp, Artificial Sequence
  Description of Artificial Sequence: Synthetic oligonucleotide
  Target: COL7A1; (-) strand; PAM type: NRG; PAM sequence: GGG
aagcatccttgtcttcctta

SEQ ID NO: 11087 - DNA, 20 bp, Artificial Sequence
  Description of Artificial Sequence: Synthetic oligonucleotide
  Target: COL7A1; (-) strand; PAM type: NRG; PAM sequence: AGG
gaagcatccttgtcttcctt

SEQ ID NO: 11088 - DNA, 20 bp, Artificial Sequence
  Description of Artificial Sequence: Synthetic oligonucleotide
  Target: COL7A1; (-) strand; PAM type: NRG; PAM sequence: TAG
tgaagcatccttgtcttcct

SEQ ID NO: 11089 - DNA, 20 bp, Artificial Sequence
  Description of Artificial Sequence: Synthetic oligonucleotide
  Target: COL7A1; (-) strand; PAM type: NRG; PAM sequence: AAG
tctgcttggagccatgcctg

SEQ ID NO: 11090 - DNA, 20 bp, Artificial Sequence
  Description of Artificial Sequence: Synthetic oligonucleotide
  Target: COL7A1; (-) strand; PAM type: NRG; PAM sequence: GAG
gtctctctggtctctgcttg

SEQ ID NO: 11091 - DNA, 20 bp, Artificial Sequence
  Description of Artificial Sequence: Synthetic oligonucleotide
  Target: COL7A1; (-) strand; PAM type: NRG; PAM sequence: TGG
gggtctctctggtctctgct

SEQ ID NO: 11092 - DNA, 20 bp, Artificial Sequence
  Description of Artificial Sequence: Synthetic oligonucleotide
  Target: COL7A1; (-) strand; PAM type: NRG; PAM sequence: TGG
tcccccacctggggtctctc

SEQ ID NO: 11093 - DNA, 20 bp, Artificial Sequence
  Description of Artificial Sequence: Synthetic oligonucleotide
  Target: COL7A1; (-) strand; PAM type: NRG; PAM sequence: GGG
aaggtaaagtcccccacctg

SEQ ID NO: 11094 - DNA, 20 bp, Artificial Sequence
  Description of Artificial Sequence: Synthetic oligonucleotide
  Target: COL7A1; (-) strand; PAM type: NRG; PAM sequence: GGG
gaaggtaaagtcccccacct

SEQ ID NO: 11095 - DNA, 20 bp, Artificial Sequence
  Description of Artificial Sequence: Synthetic oligonucleotide
  Target: COL7A1; (-) strand; PAM type: NRG; PAM sequence: TGG
ggaaggtaaagtcccccacc

SEQ ID NO: 11096 - DNA, 20 bp, Artificial Sequence
  Description of Artificial Sequence: Synthetic oligonucleotide
  Target: COL7A1; (-) strand; PAM type: NRG; PAM sequence: AAG
gagaagacgggaggaaggta

SEQ ID NO: 11097 - DNA, 20 bp, Artificial Sequence
  Description of Artificial Sequence: Synthetic oligonucleotide
  Target: COL7A1; (-) strand; PAM type: NRG; PAM sequence: AGG
ccctggagaagacgggagga

SEQ ID NO: 11098 - DNA, 20 bp, Artificial Sequence
  Description of Artificial Sequence: Synthetic oligonucleotide
  Target: COL7A1; (-) strand; PAM type: NRG; PAM sequence: AAG
accctggagaagacgggagg

SEQ ID NO: 11099 - DNA, 20 bp, Artificial Sequence
  Description of Artificial Sequence: Synthetic oligonucleotide
  Target: COL7A1; (-) strand; PAM type: NRG; PAM sequence: AGG
gggaccctggagaagacggg

SEQ ID NO: 11100 - DNA, 20 bp, Artificial Sequence
  Description of Artificial Sequence: Synthetic oligonucleotide
  Target: COL7A1; (-) strand; PAM type: NRG; PAM sequence: GAG
ggggaccctggagaagacgg

SEQ ID NO: 11101 - DNA, 20 bp, Artificial Sequence
  Description of Artificial Sequence: Synthetic oligonucleotide
  Target: COL7A1; (-) strand; PAM type: NRG; PAM sequence: GGG
ctggggaccctggagaagac

SEQ ID NO: 11102 - DNA, 20 bp, Artificial Sequence
  Description of Artificial Sequence: Synthetic oligonucleotide
  Target: COL7A1; (-) strand; PAM type: NRG; PAM sequence: CGG
cctggggaccctggagaaga

SEQ ID NO: 11103 - DNA, 20 bp, Artificial Sequence
  Description of Artificial Sequence: Synthetic oligonucleotide
  Target: COL7A1; (-) strand; PAM type: NRG; PAM sequence: AAG
agaacctggggaccctggag

SEQ ID NO: 11104 - DNA, 20 bp, Artificial Sequence
  Description of Artificial Sequence: Synthetic oligonucleotide
  Target: COL7A1; (-) strand; PAM type: NRG; PAM sequence: GAG
gggagaacctggggaccctg

SEQ ID NO: 11105 - DNA, 20 bp, Artificial Sequence
  Description of Artificial Sequence: Synthetic oligonucleotide
  Target: COL7A1; (-) strand; PAM type: NRG; PAM sequence: TGG
cagggagaacctggggaccc

SEQ ID NO: 11106 - DNA, 20 bp, Artificial Sequence
  Description of Artificial Sequence: Synthetic oligonucleotide
  Target: COL7A1; (-) strand; PAM type: NRG; PAM sequence: GGG
ctgcccacagggagaacctg

SEQ ID NO: 11107 - DNA, 20 bp, Artificial Sequence
  Description of Artificial Sequence: Synthetic oligonucleotide
  Target: COL7A1; (-) strand; PAM type: NRG; PAM sequence: GGG
tctgcccacagggagaacct

SEQ ID NO: 11108 - DNA, 20 bp, Artificial Sequence
  Description of Artificial Sequence: Synthetic oligonucleotide
  Target: COL7A1; (-) strand; PAM type: NRG; PAM sequence: TGG
ctctgcccacagggagaacc

SEQ ID NO: 11109 - DNA, 20 bp, Artificial Sequence
  Description of Artificial Sequence: Synthetic oligonucleotide
  Target: COL7A1; (-) strand; PAM type: NRG; PAM sequence: GAG
gtgagtcctctgcccacagg

SEQ ID NO: 11110 - DNA, 20 bp, Artificial Sequence
  Description of Artificial Sequence: Synthetic oligonucleotide
  Target: COL7A1; (-) strand; PAM type: NRG; PAM sequence: GGG
atgtgagtcctctgcccaca

SEQ ID NO: 11111 - DNA, 20 bp, Artificial Sequence
  Description of Artificial Sequence: Synthetic oligonucleotide
  Target: COL7A1; (-) strand; PAM type: NRG; PAM sequence: AGG
gatgtgagtcctctgcccac

SEQ ID NO: 11112 - DNA, 20 bp, Artificial Sequence
  Description of Artificial Sequence: Synthetic oligonucleotide
  Target: COL7A1; (-) strand; PAM type: NRG; PAM sequence: CAG
tgatgtgagtcctctgccca

SEQ ID NO: 11113 - DNA, 20 bp, Artificial Sequence
  Description of Artificial Sequence: Synthetic oligonucleotide
  Target: COL7A1; (-) strand; PAM type: NRG; PAM sequence: GAG
gtgaatgtttgggctgatgt

SEQ ID NO: 11114 - DNA, 20 bp, Artificial Sequence
  Description of Artificial Sequence: Synthetic oligonucleotide
  Target: COL7A1; (-) strand; PAM type: NRG; PAM sequence: GGG
ccagacaccagtgaatgttt

SEQ ID NO: 11115 - DNA, 20 bp, Artificial Sequence
  Description of Artificial Sequence: Synthetic oligonucleotide
  Target: COL7A1; (-) strand; PAM type: NRG; PAM sequence: TGG
gccagacaccagtgaatgtt

SEQ ID NO: 11116 - DNA, 20 bp, Artificial Sequence
  Description of Artificial Sequence: Synthetic oligonucleotide
  Target: COL7A1; (-) strand; PAM type: NRG; PAM sequence: CAG
agtgtcttgcagccagacac

SEQ ID NO: 11117 - DNA, 20 bp, Artificial Sequence
  Description of Artificial Sequence: Synthetic oligonucleotide
  Target: COL7A1; (-) strand; PAM type: NRG; PAM sequence: CAG
gcaaggtagtgtcttgcagc

SEQ ID NO: 11118 - DNA, 20 bp, Artificial Sequence
  Description of Artificial Sequence: Synthetic oligonucleotide
  Target: COL7A1; (-) strand; PAM type: NRG; PAM sequence: CAG
tctagcaaggtagtgtcttg

SEQ ID NO: 11119 - DNA, 20 bp, Artificial Sequence
  Description of Artificial Sequence: Synthetic oligonucleotide
  Target: COL7A1; (-) strand; PAM type: NRG; PAM sequence: TAG
tcatctgaaatctagcaagg

SEQ ID NO: 11120 - DNA, 20 bp, Artificial Sequence
  Description of Artificial Sequence: Synthetic oligonucleotide
  Target: COL7A1; (-) strand; PAM type: NRG; PAM sequence: AGG
cagtcatctgaaatctagca

SEQ ID NO: 11121 - DNA, 20 bp, Artificial Sequence
  Description of Artificial Sequence: Synthetic oligonucleotide
  Target: COL7A1; (-) strand; PAM type: NRG; PAM sequence: AAG
acagtcatctgaaatctagc

SEQ ID NO: 11122 - DNA, 20 bp, Artificial Sequence
  Description of Artificial Sequence: Synthetic oligonucleotide
  Target: COL7A1; (-) strand; PAM type: NRG; PAM sequence: TAG
agtcacagtcatctgaaatc

SEQ ID NO: 11123 - DNA, 20 bp, Artificial Sequence
  Description of Artificial Sequence: Synthetic oligonucleotide
  Target: COL7A1; (-) strand; PAM type: NRG; PAM sequence: CAG
caggcacagaaatacagtca

SEQ ID NO: 11124 - DNA, 20 bp, Artificial Sequence
  Description of Artificial Sequence: Synthetic oligonucleotide
  Target: COL7A1; (-) strand; PAM type: NRG; PAM sequence: CAG
gagctacaggcacagaaata

SEQ ID NO: 11125 - DNA, 20 bp, Artificial Sequence
  Description of Artificial Sequence: Synthetic oligonucleotide
  Target: COL7A1; (-) strand; PAM type: NRG; PAM sequence: CAG
caaccatggagctacaggca

SEQ ID NO: 11126 - DNA, 20 bp, Artificial Sequence
  Description of Artificial Sequence: Synthetic oligonucleotide
  Target: COL7A1; (-) strand; PAM type: NRG; PAM sequence: AGG
acacacaaccatggagctac

SEQ ID NO: 11127 - DNA, 20 bp, Artificial Sequence
  Description of Artificial Sequence: Synthetic oligonucleotide
  Target: COL7A1; (-) strand; PAM type: NRG; PAM sequence: CAG
cacacacaaccatggagcta

SEQ ID NO: 11128 - DNA, 20 bp, Artificial Sequence
  Description of Artificial Sequence: Synthetic oligonucleotide
  Target: COL7A1; (-) strand; PAM type: NRG; PAM sequence: GAG
ccaagacacacacaaccatg

SEQ ID NO: 11129 - DNA, 20 bp, Artificial Sequence
  Description of Artificial Sequence: Synthetic oligonucleotide
  Target: COL7A1; (-) strand; PAM type: NRG; PAM sequence: TGG
ctccaagacacacacaacca

SEQ ID NO: 11130 - DNA, 20 bp, Artificial Sequence
  Description of Artificial Sequence: Synthetic oligonucleotide
  Target: COL7A1; (-) strand; PAM type: NRG; PAM sequence: AAG
acggccacaggccatgctcc

SEQ ID NO: 11131 - DNA, 20 bp, Artificial Sequence
  Description of Artificial Sequence: Synthetic oligonucleotide
  Target: COL7A1; (-) strand; PAM type: NRG; PAM sequence: AGG
cagctcactcagacggccac

SEQ ID NO: 11132 - DNA, 20 bp, Artificial Sequence
  Description of Artificial Sequence: Synthetic oligonucleotide
  Target: COL7A1; (-) strand; PAM type: NRG; PAM sequence: CAG
gcagctcactcagacggcca

SEQ ID NO: 11133 - DNA, 20 bp, Artificial Sequence
  Description of Artificial Sequence: Synthetic oligonucleotide
  Target: COL7A1; (-) strand; PAM type: NRG; PAM sequence: CGG
catgtagcagctcactcaga

SEQ ID NO: 11134 - DNA, 20 bp, Artificial Sequence
  Description of Artificial Sequence: Synthetic oligonucleotide
  Target: COL7A1; (-) strand; PAM type: NRG; PAM sequence: CAG
tagacatgtagcagctcact

SEQ ID NO: 11135 - DNA, 20 bp, Artificial Sequence
  Description of Artificial Sequence: Synthetic oligonucleotide
  Target: COL7A1; (-) strand; PAM type: NRG; PAM sequence: CAG
gcacacccttagacatgtag

SEQ ID NO: 11136 - DNA, 20 bp, Artificial Sequence
  Description of Artificial Sequence: Synthetic oligonucleotide
  Target: COL7A1; (-) strand; PAM type: NRG; PAM sequence: TAG
caggcacacccttagacatg

SEQ ID NO: 11137 - DNA, 20 bp, Artificial Sequence
  Description of Artificial Sequence: Synthetic oligonucleotide
  Target: COL7A1; (-) strand; PAM type: NRG; PAM sequence: TAG
ggcctatgcaggcacaccct

SEQ ID NO: 11138 - DNA, 20 bp, Artificial Sequence
  Description of Artificial Sequence: Synthetic oligonucleotide
  Target: COL7A1; (-) strand; PAM type: NRG; PAM sequence: AGG
tggggtgagcaggcctatgc

SEQ ID NO: 11139 - DNA, 20 bp, Artificial Sequence
  Description of Artificial Sequence: Synthetic oligonucleotide
  Target: COL7A1; (-) strand; PAM type: NRG; PAM sequence: CAG
ttggggtgagcaggcctatg

SEQ ID NO: 11140 - DNA, 20 bp, Artificial Sequence
  Description of Artificial Sequence: Synthetic oligonucleotide
  Target: COL7A1; (-) strand; PAM type: NRG; PAM sequence: AGG
agttgcctgttggggtgagc

SEQ ID NO: 11141 - DNA, 20 bp, Artificial Sequence
  Description of Artificial Sequence: Synthetic oligonucleotide
  Target: COL7A1; (-) strand; PAM type: NRG; PAM sequence: CAG
cagttgcctgttggggtgag

SEQ ID NO: 11142 - DNA, 20 bp, Artificial Sequence
  Description of Artificial Sequence: Synthetic oligonucleotide
  Target: COL7A1; (-) strand; PAM type: NRG; PAM sequence: GAG
gtgcagttgcctgttggggt

SEQ ID NO: 11143 - DNA, 20 bp, Artificial Sequence
  Description of Artificial Sequence: Synthetic oligonucleotide
  Target: COL7A1; (-) strand; PAM type: NRG; PAM sequence: GGG
atgtgtgcagttgcctgttg

SEQ ID NO: 11144 - DNA, 20 bp, Artificial Sequence
  Description of Artificial Sequence: Synthetic oligonucleotide
  Target: COL7A1; (-) strand; PAM type: NRG; PAM sequence: GGG
catgtgtgcagttgcctgtt

SEQ ID NO: 11145 - DNA, 20 bp, Artificial Sequence
  Description of Artificial Sequence: Synthetic oligonucleotide
  Target: COL7A1; (-) strand; PAM type: NRG; PAM sequence: TGG
acatgtgtgcagttgcctgt

SEQ ID NO: 11146 - DNA, 20 bp, Artificial Sequence
  Description of Artificial Sequence: Synthetic oligonucleotide
  Target: COL7A1; (-) strand; PAM type: NRG; PAM sequence: CAG
agagtcaaaggacatgtgtg

SEQ ID NO: 11147 - DNA, 20 bp, Artificial Sequence
  Description of Artificial Sequence: Synthetic oligonucleotide
  Target: COL7A1; (-) strand; PAM type: NRG; PAM sequence: AGG
ctctagagagccagagtcaa

SEQ ID NO: 11148 - DNA, 20 bp, Artificial Sequence
  Description of Artificial Sequence: Synthetic oligonucleotide
  Target: COL7A1; (-) strand; PAM type: NRG; PAM sequence: AAG
cctctagagagccagagtca

SEQ ID NO: 11149 - DNA, 20 bp, Artificial Sequence
  Description of Artificial Sequence: Synthetic oligonucleotide
  Target: COL7A1; (-) strand; PAM type: NRG; PAM sequence: GAG
gagctacctctagagagcca

SEQ ID NO: 11150 - DNA, 20 bp, Artificial Sequence
  Description of Artificial Sequence: Synthetic oligonucleotide
  Target: COL7A1; (-) strand; PAM type: NRG; PAM sequence: CAG
tggagctacctctagagagc

SEQ ID NO: 11151 - DNA, 20 bp, Artificial Sequence
  Description of Artificial Sequence: Synthetic oligonucleotide
  Target: COL7A1; (-) strand; PAM type: NRG; PAM sequence: GAG
aatgtggagctacctctaga

SEQ ID NO: 11152 - DNA, 20 bp, Artificial Sequence
  Description of Artificial Sequence: Synthetic oligonucleotide
  Target: COL7A1; (-) strand; PAM type: NRG; PAM sequence: GAG
taaatgtggagctacctcta

SEQ ID NO: 11153 - DNA, 20 bp, Artificial Sequence
  Description of Artificial Sequence: Synthetic oligonucleotide
  Target: COL7A1; (-) strand; PAM type: NRG; PAM sequence: TAG
cataaatgtggagctacctc

SEQ ID NO: 11154 - DNA, 20 bp, Artificial Sequence
  Description of Artificial Sequence: Synthetic oligonucleotide
  Target: COL7A1; (-) strand; PAM type: NRG; PAM sequence: GAG
cccagagatgcataaatgtg

SEQ ID NO: 11155 - DNA, 20 bp, Artificial Sequence
  Description of Artificial Sequence: Synthetic oligonucleotide
  Target: COL7A1; (-) strand; PAM type: NRG; PAM sequence: TGG
aacccagagatgcataaatg

SEQ ID NO: 11156 - DNA, 20 bp, Artificial Sequence
  Description of Artificial Sequence: Synthetic oligonucleotide
  Target: COL7A1; (-) strand; PAM type: NRG; PAM sequence: GAG
tgtggacgatcaccaaccca

SEQ ID NO: 11157 - DNA, 20 bp, Artificial Sequence
  Description of Artificial Sequence: Synthetic oligonucleotide
  Target: COL7A1; (-) strand; PAM type: NRG; PAM sequence: CAG
catgtggacgatcaccaacc

SEQ ID NO: 11158 - DNA, 20 bp, Artificial Sequence
  Description of Artificial Sequence: Synthetic oligonucleotide
  Target: COL7A1; (-) strand; PAM type: NRG; PAM sequence: TGG
atgcacacacccaggacatg

SEQ ID NO: 11159 - DNA, 20 bp, Artificial Sequence
  Description of Artificial Sequence: Synthetic oligonucleotide
  Target: COL7A1; (-) strand; PAM type: NRG; PAM sequence: AGG
acatggatatgcacacaccc

SEQ ID NO: 11160 - DNA, 20 bp, Artificial Sequence
  Description of Artificial Sequence: Synthetic oligonucleotide
  Target: COL7A1; (-) strand; PAM type: NRG; PAM sequence: CAG
cacatggatatgcacacacc

SEQ ID NO: 11161 - DNA, 20 bp, Artificial Sequence
  Description of Artificial Sequence: Synthetic oligonucleotide
  Target: COL7A1; (-) strand; PAM type: NRG; PAM sequence: TGG
tacatgtactaagacacaca

SEQ ID NO: 11162 - DNA, 20 bp, Artificial Sequence
  Description of Artificial Sequence: Synthetic oligonucleotide
  Target: COL7A1; (-) strand; PAM type: NRG; PAM sequence: AAG
gacccatgggtacatgtact

SEQ ID NO: 11163 - DNA, 20 bp, Artificial Sequence
  Description of Artificial Sequence: Synthetic oligonucleotide
  Target: COL7A1; (-) strand; PAM type: NRG; PAM sequence: GGG
accaggacacacagacccat

SEQ ID NO: 11164 - DNA, 20 bp, Artificial Sequence
  Description of Artificial Sequence: Synthetic oligonucleotide
  Target: COL7A1; (-) strand; PAM type: NRG; PAM sequence: TGG
gaccaggacacacagaccca

SEQ ID NO: 11165 - DNA, 20 bp, Artificial Sequence
  Description of Artificial Sequence: Synthetic oligonucleotide
  Target: COL7A1; (-) strand; PAM type: NRG; PAM sequence: CAG
tgcaaacagaccaggacaca

SEQ ID NO: 11166 - DNA, 20 bp, Artificial Sequence
  Description of Artificial Sequence: Synthetic oligonucleotide
  Target: COL7A1; (-) strand; PAM type: NRG; PAM sequence: AGG
ccaagatgtgcaaacagacc

SEQ ID NO: 11167 - DNA, 20 bp, Artificial Sequence
  Description of Artificial Sequence: Synthetic oligonucleotide
  Target: COL7A1; (-) strand; PAM type: NRG; PAM sequence: CAG
gccaagatgtgcaaacagac

SEQ ID NO: 11168 - DNA, 20 bp, Artificial Sequence
  Description of Artificial Sequence: Synthetic oligonucleotide
  Target: COL7A1; (-) strand; PAM type: NRG; PAM sequence: CAG
catgggccaagatgtgcaaa

SEQ ID NO: 11169 - DNA, 20 bp, Artificial Sequence
  Description of Artificial Sequence: Synthetic oligonucleotide
  Target: COL7A1; (-) strand; PAM type: NRG; PAM sequence: AAG
cccatatgcagacatgggcc

SEQ ID NO: 11170 - DNA, 20 bp, Artificial Sequence
  Description of Artificial Sequence: Synthetic oligonucleotide
  Target: COL7A1; (-) strand; PAM type: NRG; PAM sequence: GGG
ccatgcccatatgcagacat

SEQ ID NO: 11171 - DNA, 20 bp, Artificial Sequence
  Description of Artificial Sequence: Synthetic oligonucleotide
  Target: COL7A1; (-) strand; PAM type: NRG; PAM sequence: TGG
cccatgcccatatgcagaca

SEQ ID NO: 11172 - DNA, 20 bp, Artificial Sequence
  Description of Artificial Sequence: Synthetic oligonucleotide
  Target: COL7A1; (-) strand; PAM type: NRG; PAM sequence: CAG
tataagcccatgcccatatg

SEQ ID NO: 11173 - DNA, 20 bp, Artificial Sequence
  Description of Artificial Sequence: Synthetic oligonucleotide
  Target: COL7A1; (-) strand; PAM type: NRG; PAM sequence: AAG
tgctctttggagacatgtat

SEQ ID NO: 11174 - DNA, 20 bp, Artificial Sequence
  Description of Artificial Sequence: Synthetic oligonucleotide
  Target: COL7A1; (-) strand; PAM type: NRG; PAM sequence: GAG
gtataagcccatgctctttg

SEQ ID NO: 11175 - DNA, 20 bp, Artificial Sequence
  Description of Artificial Sequence: Synthetic oligonucleotide
  Target: COL7A1; (-) strand; PAM type: NRG; PAM sequence: TGG
atgtataagcccatgctctt

SEQ ID NO: 11176 - DNA, 20 bp, Artificial Sequence
  Description of Artificial Sequence: Synthetic oligonucleotide
  Target: COL7A1; (-) strand; PAM type: NRG; PAM sequence: AAG
atggctctcaaggcatgtat

SEQ ID NO: 11177 - DNA, 20 bp, Artificial Sequence
  Description of Artificial Sequence: Synthetic oligonucleotide
  Target: COL7A1; (-) strand; PAM type: NRG; PAM sequence: AGG
gccaagacacatggctctca

SEQ ID NO: 11178 - DNA, 20 bp, Artificial Sequence
  Description of Artificial Sequence: Synthetic oligonucleotide
  Target: COL7A1; (-) strand; PAM type: NRG; PAM sequence: AAG
tgccaagacacatggctctc

SEQ ID NO: 11179 - DNA, 20 bp, Artificial Sequence
  Description of Artificial Sequence: Synthetic oligonucleotide
  Target: COL7A1; (-) strand; PAM type: NRG; PAM sequence: TGG
cagacagatgccaagacaca

SEQ ID NO: 11180 - DNA, 20 bp, Artificial Sequence
  Description of Artificial Sequence: Synthetic oligonucleotide
  Target: COL7A1; (-) strand; PAM type: NRG; PAM sequence: AAG
aagagttgcagacagatgcc

SEQ ID NO: 11181 - DNA, 20 bp, Artificial Sequence
  Description of Artificial Sequence: Synthetic oligonucleotide
  Target: COL7A1; (-) strand; PAM type: NRG; PAM sequence: CAG
ctacacacaagagttgcaga

SEQ ID NO: 11182 - DNA, 20 bp, Artificial Sequence
  Description of Artificial Sequence: Synthetic oligonucleotide
  Target: COL7A1; (-) strand; PAM type: NRG; PAM sequence: CAG
tgagctacacacaagagttg

SEQ ID NO: 11183 - DNA, 20 bp, Artificial Sequence
  Description of Artificial Sequence: Synthetic oligonucleotide
  Target: COL7A1; (-) strand; PAM type: NRG; PAM sequence: GAG
acacattgagctacacacaa

SEQ ID NO: 11184 - DNA, 20 bp, Artificial Sequence
  Description of Artificial Sequence: Synthetic oligonucleotide
  Target: COL7A1; (-) strand; PAM type: NRG; PAM sequence: AAG
atacacattgagctacacac

SEQ ID NO: 11185 - DNA, 20 bp, Artificial Sequence
  Description of Artificial Sequence: Synthetic oligonucleotide
  Target: COL7A1; (-) strand; PAM type: NRG; PAM sequence: GAG
cgcttatggtcatacacatt

SEQ ID NO: 11186 - DNA, 20 bp, Artificial Sequence
  Description of Artificial Sequence: Synthetic oligonucleotide
  Target: COL7A1; (-) strand; PAM type: NRG; PAM sequence: TGG
tatggtcacccacacgctta

SEQ ID NO: 11187 - DNA, 20 bp, Artificial Sequence
  Description of Artificial Sequence: Synthetic oligonucleotide
  Target: COL7A1; (-) strand; PAM type: NRG; PAM sequence: TGG
tgctggcccatgactttata

SEQ ID NO: 11188 - DNA, 20 bp, Artificial Sequence
  Description of Artificial Sequence: Synthetic oligonucleotide
  Target: COL7A1; (-) strand; PAM type: NRG; PAM sequence: TGG
tgacatgtgctaggacatgc

SEQ ID NO: 11189 - DNA, 20 bp, Artificial Sequence
  Description of Artificial Sequence: Synthetic oligonucleotide
  Target: COL7A1; (-) strand; PAM type: NRG; PAM sequence: AGG
tctgacctgtgacatgtgct

SEQ ID NO: 11190 - DNA, 20 bp, Artificial Sequence
  Description of Artificial Sequence: Synthetic oligonucleotide
  Target: COL7A1; (-) strand; PAM type: NRG; PAM sequence: TAG
ctctgacctgtgacatgtgc

SEQ ID NO: 11191 - DNA, 20 bp, Artificial Sequence
  Description of Artificial Sequence: Synthetic oligonucleotide
  Target: COL7A1; (-) strand; PAM type: NRG; PAM sequence: TGG
catggtgagacacacatgga

SEQ ID NO: 11192 - DNA, 20 bp, Artificial Sequence
  Description of Artificial Sequence: Synthetic oligonucleotide
  Target: COL7A1; (-) strand; PAM type: NRG; PAM sequence: TGG
gagacatggtgagacacaca

SEQ ID NO: 11193 - DNA, 20 bp, Artificial Sequence
  Description of Artificial Sequence: Synthetic oligonucleotide
  Target: COL7A1; (-) strand; PAM type: NRG; PAM sequence: GAG
gacctgtgttgagacatggt

SEQ ID NO: 11194 - DNA, 20 bp, Artificial Sequence
  Description of Artificial Sequence: Synthetic oligonucleotide
  Target: COL7A1; (-) strand; PAM type: NRG; PAM sequence: TGG
tgtggacctgtgttgagaca

SEQ ID NO: 11195 - DNA, 20 bp, Artificial Sequence
  Description of Artificial Sequence: Synthetic oligonucleotide
  Target: COL7A1; (-) strand; PAM type: NRG; PAM sequence: GAG
accgcatgtggacctgtgtt

SEQ ID NO: 11196 - DNA, 20 bp, Artificial Sequence
  Description of Artificial Sequence: Synthetic oligonucleotide
  Target: COL7A1; (-) strand; PAM type: NRG; PAM sequence: TGG
catggacccaagaccgcatg

SEQ ID NO: 11197 - DNA, 20 bp, Artificial Sequence
  Description of Artificial Sequence: Synthetic oligonucleotide
  Target: COL7A1; (-) strand; PAM type: NRG; PAM sequence: AAG
atgtgctaagacatggaccc

SEQ ID NO: 11198 - DNA, 20 bp, Artificial Sequence
  Description of Artificial Sequence: Synthetic oligonucleotide
  Target: COL7A1; (-) strand; PAM type: NRG; PAM sequence: TGG
cagactcatgtgctaagaca

SEQ ID NO: 11199 - DNA, 20 bp, Artificial Sequence
  Description of Artificial Sequence: Synthetic oligonucleotide
  Target: COL7A1; (-) strand; PAM type: NRG; PAM sequence: AAG
tccacccagactcatgtgct

SEQ ID NO: 11200 - DNA, 20 bp, Artificial Sequence
  Description of Artificial Sequence: Synthetic oligonucleotide
  Target: COL7A1; (-) strand; PAM type: NRG; PAM sequence: CAG
gatacccagacacttccacc

SEQ ID NO: 11201 - DNA, 20 bp, Artificial Sequence
  Description of Artificial Sequence: Synthetic oligonucleotide
  Target: COL7A1; (-) strand; PAM type: NRG; PAM sequence: CAG
cttagagacatgttgatacc

SEQ ID NO: 11202 - DNA, 20 bp, Artificial Sequence
  Description of Artificial Sequence: Synthetic oligonucleotide
  Target: COL7A1; (-) strand; PAM type: NRG; PAM sequence: GAG
agccacatttggggcactta

SEQ ID NO: 11203 - DNA, 20 bp, Artificial Sequence
  Description of Artificial Sequence: Synthetic oligonucleotide
  Target: COL7A1; (-) strand; PAM type: NRG; PAM sequence: TAG
gtagccacatttggggcact

SEQ ID NO: 11204 - DNA, 20 bp, Artificial Sequence
  Description of Artificial Sequence: Synthetic oligonucleotide
  Target: COL7A1; (-) strand; PAM type: NRG; PAM sequence: GGG
ctggtgtgtagccacatttg

SEQ ID NO: 11205 - DNA, 20 bp, Artificial Sequence
  Description of Artificial Sequence: Synthetic oligonucleotide
  Target: COL7A1; (-) strand; PAM type: NRG; PAM sequence: GGG
actggtgtgtagccacattt

SEQ ID NO: 11206 - DNA, 20 bp, Artificial Sequence
  Description of Artificial Sequence: Synthetic oligonucleotide
  Target: COL7A1; (-) strand; PAM type: NRG; PAM sequence: TGG
cactggtgtgtagccacatt

SEQ ID NO: 11207 - DNA, 20 bp, Artificial Sequence
  Description of Artificial Sequence: Synthetic oligonucleotide
  Target: COL7A1; (-) strand; PAM type: NRG; PAM sequence: TAG
ggcacaaacacactggtgtg

SEQ ID NO: 11208 - DNA, 20 bp, Artificial Sequence
  Description of Artificial Sequence: Synthetic oligonucleotide
  Target: COL7A1; (-) strand; PAM type: NRG; PAM sequence: TGG
gtcgacaggcacaaacacac

SEQ ID NO: 11209 - DNA, 20 bp, Artificial Sequence
  Description of Artificial Sequence: Synthetic oligonucleotide
  Target: COL7A1; (-) strand; PAM type: NRG; PAM sequence: AGG
agagccacagacaggtcgac

SEQ ID NO: 11210 - DNA, 20 bp, Artificial Sequence
  Description of Artificial Sequence: Synthetic oligonucleotide
  Target: COL7A1; (-) strand; PAM type: NRG; PAM sequence: CAG
aagagccacagacaggtcga

SEQ ID NO: 11211 - DNA, 20 bp, Artificial Sequence
  Description of Artificial Sequence: Synthetic oligonucleotide
  Target: COL7A1; (-) strand; PAM type: NRG; PAM sequence: AGG
acaggtgaagagccacagac

SEQ ID NO: 11212 - DNA, 20 bp, Artificial Sequence
  Description of Artificial Sequence: Synthetic oligonucleotide
  Target: COL7A1; (-) strand; PAM type: NRG; PAM sequence: CAG
cacaggtgaagagccacaga

SEQ ID NO: 11213 - DNA, 20 bp, Artificial Sequence
  Description of Artificial Sequence: Synthetic oligonucleotide
  Target: COL7A1; (-) strand; PAM type: NRG; PAM sequence: CAG
taggcacaggtgaagagcca

SEQ ID NO: 11214 - DNA, 20 bp, Artificial Sequence
  Description of Artificial Sequence: Synthetic oligonucleotide
  Target: COL7A1; (-) strand; PAM type: NRG; PAM sequence: GAG
cagccataggcacaggtgaa

SEQ ID NO: 11215 - DNA, 20 bp, Artificial Sequence
  Description of Artificial Sequence: Synthetic oligonucleotide
  Target: COL7A1; (-) strand; PAM type: NRG; PAM sequence: AAG
cacagccataggcacaggtg

SEQ ID NO: 11216 - DNA, 20 bp, Artificial Sequence
  Description of Artificial Sequence: Synthetic oligonucleotide
  Target: COL7A1; (-) strand; PAM type: NRG; PAM sequence: AGG
taacccacagccataggcac

SEQ ID NO: 11217 - DNA, 20 bp, Artificial Sequence
  Description of Artificial Sequence: Synthetic oligonucleotide
  Target: COL7A1; (-) strand; PAM type: NRG; PAM sequence: CAG
ataacccacagccataggca

SEQ ID NO: 11218 - DNA, 20 bp, Artificial Sequence
  Description of Artificial Sequence: Synthetic oligonucleotide
  Target: COL7A1; (-) strand; PAM type: NRG; PAM sequence: AGG
cccagataacccacagccat

SEQ ID NO: 11219 - DNA, 20 bp, Artificial Sequence
  Description of Artificial Sequence: Synthetic oligonucleotide
  Target: COL7A1; (-) strand; PAM type: NRG; PAM sequence: TAG
gcccagataacccacagcca

SEQ ID NO: 11220 - DNA, 20 bp, Artificial Sequence
  Description of Artificial Sequence: Synthetic oligonucleotide
  Target: COL7A1; (-) strand; PAM type: NRG; PAM sequence: CAG
acacatgcccagataaccca

SEQ ID NO: 11221 - DNA, 20 bp, Artificial Sequence
  Description of Artificial Sequence: Synthetic oligonucleotide
  Target: COL7A1; (-) strand; PAM type: NRG; PAM sequence: CAG
aggatgggctgacacatgcc

SEQ ID NO: 11222 - DNA, 20 bp, Artificial Sequence
  Description of Artificial Sequence: Synthetic oligonucleotide
  Target: COL7A1; (-) strand; PAM type: NRG; PAM sequence: GGG
gggccaatttatgccaggat

SEQ ID NO: 11223 - DNA, 20 bp, Artificial Sequence
  Description of Artificial Sequence: Synthetic oligonucleotide
  Target: COL7A1; (-) strand; PAM type: NRG; PAM sequence: TGG
tgggccaatttatgccagga

SEQ ID NO: 11224 - DNA, 20 bp, Artificial Sequence
  Description of Artificial Sequence: Synthetic oligonucleotide
  Target: COL7A1; (-) strand; PAM type: NRG; PAM sequence: AGG
tgaatgggccaatttatgcc

SEQ ID NO: 11225 - DNA, 20 bp, Artificial Sequence
  Description of Artificial Sequence: Synthetic oligonucleotide
  Target: COL7A1; (-) strand; PAM type: NRG; PAM sequence: CAG
gtgaatgggccaatttatgc

SEQ ID NO: 11226 - DNA, 20 bp, Artificial Sequence
  Description of Artificial Sequence: Synthetic oligonucleotide
  Target: COL7A1; (-) strand; PAM type: NRG; PAM sequence: GGG
acatagggagttaggtgaat

SEQ ID NO: 11227 - DNA, 20 bp, Artificial Sequence
  Description of Artificial Sequence: Synthetic oligonucleotide
  Target: COL7A1; (-) strand; PAM type: NRG; PAM sequence: TGG
cacatagggagttaggtgaa

SEQ ID NO: 11228 - DNA, 20 bp, Artificial Sequence
  Description of Artificial Sequence: Synthetic oligonucleotide
  Target: COL7A1; (-) strand; PAM type: NRG; PAM sequence: AGG
tcacagacacatagggagtt

SEQ ID NO: 11229 - DNA, 20 bp, Artificial Sequence
  Description of Artificial Sequence: Synthetic oligonucleotide
  Target: COL7A1; (-) strand; PAM type: NRG; PAM sequence: TAG
ctcacagacacatagggagt

SEQ ID NO: 11230 - DNA, 20 bp, Artificial Sequence
  Description of Artificial Sequence: Synthetic oligonucleotide
  Target: COL7A1; (-) strand; PAM type: NRG; PAM sequence: GAG
cagcctcacagacacatagg

SEQ ID NO: 11231 - DNA, 20 bp, Artificial Sequence
  Description of Artificial Sequence: Synthetic oligonucleotide
  Target: COL7A1; (-) strand; PAM type: NRG; PAM sequence: GGG
ggcagcctcacagacacata

SEQ ID NO: 11232 - DNA, 20 bp, Artificial Sequence
  Description of Artificial Sequence: Synthetic oligonucleotide
  Target: COL7A1; (-) strand; PAM type: NRG; PAM sequence: AGG
aggcagcctcacagacacat

SEQ ID NO: 11233 - DNA, 20 bp, Artificial Sequence
  Description of Artificial Sequence: Synthetic oligonucleotide
  Target: COL7A1; (-) strand; PAM type: NRG; PAM sequence: TAG
caggcagcctcacagacaca

SEQ ID NO: 11234 - DNA, 20 bp, Artificial Sequence
  Description of Artificial Sequence: Synthetic oligonucleotide
  Target: COL7A1; (-) strand; PAM type: NRG; PAM sequence: CAG
tgcacacacaggcagcctca

SEQ ID NO: 11235 - DNA, 20 bp, Artificial Sequence
  Description of Artificial Sequence: Synthetic oligonucleotide
  Target: COL7A1; (-) strand; PAM type: NRG; PAM sequence: CAG
gttctatatgcacacacagg

SEQ ID NO: 11236 - DNA, 20 bp, Artificial Sequence
  Description of Artificial Sequence: Synthetic oligonucleotide
  Target: COL7A1; (-) strand; PAM type: NRG; PAM sequence: AGG
atagttctatatgcacacac

SEQ ID NO: 11237 - DNA, 20 bp, Artificial Sequence
  Description of Artificial Sequence: Synthetic oligonucleotide
  Target: COL7A1; (-) strand; PAM type: NRG; PAM sequence: CAG
catagttctatatgcacaca

SEQ ID NO: 11238 - DNA, 20 bp, Artificial Sequence
  Description of Artificial Sequence: Synthetic oligonucleotide
  Target: COL7A1; (-) strand; PAM type: NRG; PAM sequence: TAG
ttgcgccaggcctggaaaca

SEQ ID NO: 11239 - DNA, 20 bp, Artificial Sequence
  Description of Artificial Sequence: Synthetic oligonucleotide
  Target: COL7A1; (-) strand; PAM type: NRG; PAM sequence: TGG
gtgagccattgcgccaggcc

SEQ ID NO: 11240 - DNA, 20 bp, Artificial Sequence
  Description of Artificial Sequence: Synthetic oligonucleotide
  Target: COL7A1; (-) strand; PAM type: NRG; PAM sequence: AGG
caggcgtgagccattgcgcc

SEQ ID NO: 11241 - DNA, 20 bp, Artificial Sequence
  Description of Artificial Sequence: Synthetic oligonucleotide
  Target: COL7A1; (-) strand; PAM type: NRG; PAM sequence: CAG
acaggcgtgagccattgcgc

SEQ ID NO: 11242 - DNA, 20 bp, Artificial Sequence
  Description of Artificial Sequence: Synthetic oligonucleotide
  Target: COL7A1; (-) strand; PAM type: NRG; PAM sequence: GAG
agtgctgggattacaggcgt

SEQ ID NO: 11243 - DNA, 20 bp, Artificial Sequence
  Description of Artificial Sequence: Synthetic oligonucleotide
  Target: COL7A1; (-) strand; PAM type: NRG; PAM sequence: AGG
tcctaaagtgctgggattac

SEQ ID NO: 11244 - DNA, 20 bp, Artificial Sequence
  Description of Artificial Sequence: Synthetic oligonucleotide
  Target: COL7A1; (-) strand; PAM type: NRG; PAM sequence: CAG
ctcctaaagtgctgggatta

SEQ ID NO: 11245 - DNA, 20 bp, Artificial Sequence
  Description of Artificial Sequence: Synthetic oligonucleotide
  Target: COL7A1; (-) strand; PAM type: NRG; PAM sequence: GGG
cctcggcctcctaaagtgct

SEQ ID NO: 11246 - DNA, 20 bp, Artificial Sequence
  Description of Artificial Sequence: Synthetic oligonucleotide
  Target: COL7A1; (-) strand; PAM type: NRG; PAM sequence: TGG
gcctcggcctcctaaagtgc

SEQ ID NO: 11247 - DNA, 20 bp, Artificial Sequence
  Description of Artificial Sequence: Synthetic oligonucleotide
  Target: COL7A1; (-) strand; PAM type: NRG; PAM sequence: AAG
ccgcccgcctcggcctccta

SEQ ID NO: 11248 - DNA, 20 bp, Artificial Sequence
  Description of Artificial Sequence: Synthetic oligonucleotide
  Target: COL7A1; (-) strand; PAM type: NRG; PAM sequence: CGG
ctcaggtgatccgcccgcct

SEQ ID NO: 11249 - DNA, 20 bp, Artificial Sequence
  Description of Artificial Sequence: Synthetic oligonucleotide
  Target: COL7A1; (-) strand; PAM type: NRG; PAM sequence: AGG
gctgatcacaaactgacctc

SEQ ID NO: 11250 - DNA, 20 bp, Artificial Sequence
  Description of Artificial Sequence: Synthetic oligonucleotide
  Target: COL7A1; (-) strand; PAM type: NRG; PAM sequence: CAG
ggctgatcacaaactgacct

SEQ ID NO: 11251 - DNA, 20 bp, Artificial Sequence
  Description of Artificial Sequence: Synthetic oligonucleotide
  Target: COL7A1; (-) strand; PAM type: NRG; PAM sequence: AGG
ggggtttctccatgttagtc

SEQ ID NO: 11252 - DNA, 20 bp, Artificial Sequence
  Description of Artificial Sequence: Synthetic oligonucleotide
  Target: COL7A1; (-) strand; PAM type: NRG; PAM sequence: CAG
tggggtttctccatgttagt

SEQ ID NO: 11253 - DNA, 20 bp, Artificial Sequence
  Description of Artificial Sequence: Synthetic oligonucleotide
  Target: COL7A1; (-) strand; PAM type: NRG; PAM sequence: TAG
gagatggggtttctccatgt

SEQ ID NO: 11254 - DNA, 20 bp, Artificial Sequence
  Description of Artificial Sequence: Synthetic oligonucleotide
  Target: COL7A1; (-) strand; PAM type: NRG; PAM sequence: GGG
ttgtatttttagtagagatg

SEQ ID NO: 11255 - DNA, 20 bp, Artificial Sequence
  Description of Artificial Sequence: Synthetic oligonucleotide
  Target: COL7A1; (-) strand; PAM type: NRG; PAM sequence: GGG
tttgtatttttagtagagat

SEQ ID NO: 11256 - DNA, 20 bp, Artificial Sequence
  Description of Artificial Sequence: Synthetic oligonucleotide
  Target: COL7A1; (-) strand; PAM type: NRG; PAM sequence: TGG
ttttgtatttttagtagaga

SEQ ID NO: 11257 - DNA, 20 bp, Artificial Sequence
  Description of Artificial Sequence: Synthetic oligonucleotide
  Target: COL7A1; (-) strand; PAM type: NRG; PAM sequence: GAG
ctaattttgtatttttagta

SEQ ID NO: 11258 - DNA, 20 bp, Artificial Sequence
  Description of Artificial Sequence: Synthetic oligonucleotide
  Target: COL7A1; (-) strand; PAM type: NRG; PAM sequence: TAG
ggctaattttgtatttttag

SEQ ID NO: 11259 - DNA, 20 bp, Artificial Sequence
  Description of Artificial Sequence: Synthetic oligonucleotide
  Target: COL7A1; (-) strand; PAM type: NRG; PAM sequence: TAG
cctggctaattttgtatttt

SEQ ID NO: 11260 - DNA, 20 bp, Artificial Sequence
  Description of Artificial Sequence: Synthetic oligonucleotide
  Target: COL7A1; (-) strand; PAM type: NRG; PAM sequence: TGG
caggcatgcgccaccatgcc

SEQ ID NO: 11261 - DNA, 20 bp, Artificial Sequence
  Description of Artificial Sequence: Synthetic oligonucleotide
  Target: COL7A1; (-) strand; PAM type: NRG; PAM sequence: AGG
tcccgagtaactgggattac

SEQ ID NO: 11262 - DNA, 20 bp, Artificial Sequence
  Description of Artificial Sequence: Synthetic oligonucleotide
  Target: COL7A1; (-) strand; PAM type: NRG; PAM sequence: CAG
ctcccgagtaactgggatta

SEQ ID NO: 11263 - DNA, 20 bp, Artificial Sequence
  Description of Artificial Sequence: Synthetic oligonucleotide
  Target: COL7A1; (-) strand; PAM type: NRG; PAM sequence: GGG
cctcaacctcccgagtaact

SEQ ID NO: 11264 - DNA, 20 bp, Artificial Sequence
  Description of Artificial Sequence: Synthetic oligonucleotide
  Target: COL7A1; (-) strand; PAM type: NRG; PAM sequence: TGG
gcctcaacctcccgagtaac

SEQ ID NO: 11265 - DNA, 20 bp, Artificial Sequence
  Description of Artificial Sequence: Synthetic oligonucleotide
  Target: COL7A1; (-) strand; PAM type: NRG; PAM sequence: GAG
ttctcctgcctcaacctccc

SEQ ID NO: 11266 - DNA, 20 bp, Artificial Sequence
  Description of Artificial Sequence: Synthetic oligonucleotide
  Target: COL7A1; (-) strand; PAM type: NRG; PAM sequence: AAG
aaccttcgactctcgggttc

SEQ ID NO: 11267 - DNA, 20 bp, Artificial Sequence
  Description of Artificial Sequence: Synthetic oligonucleotide
  Target: COL7A1; (-) strand; PAM type: NRG; PAM sequence: GGG
cactgcaaccttcgactctc

SEQ ID NO: 11268 - DNA, 20 bp, Artificial Sequence
  Description of Artificial Sequence: Synthetic oligonucleotide
  Target: COL7A1; (-) strand; PAM type: NRG; PAM sequence: CGG
tcactgcaaccttcgactct

SEQ ID NO: 11269 - DNA, 20 bp, Artificial Sequence
  Description of Artificial Sequence: Synthetic oligonucleotide
  Target: COL7A1; (-) strand; PAM type: NRG; PAM sequence: CAG
ggagtgcagtggcacaatct

SEQ ID NO: 11270 - DNA, 20 bp, Artificial Sequence
  Description of Artificial Sequence: Synthetic oligonucleotide
  Target: COL7A1; (-) strand; PAM type: NRG; PAM sequence: TGG
ttgcccaggttggagtgcag

SEQ ID NO: 11271 - DNA, 20 bp, Artificial Sequence
  Description of Artificial Sequence: Synthetic oligonucleotide
  Target: COL7A1; (-) strand; PAM type: NRG; PAM sequence: CAG
ttgttgcccaggttggagtg

SEQ ID NO: 11272 - DNA, 20 bp, Artificial Sequence
  Description of Artificial Sequence: Synthetic oligonucleotide
  Target: COL7A1; (-) strand; PAM type: NRG; PAM sequence: GAG
cgctcttgttgcccaggttg

SEQ ID NO: 11273 - DNA, 20 bp, Artificial Sequence
  Description of Artificial Sequence: Synthetic oligonucleotide
  Target: COL7A1; (-) strand; PAM type: NRG; PAM sequence: TGG
ttcgctcttgttgcccaggt

SEQ ID NO: 11274 - DNA, 20 bp, Artificial Sequence
  Description of Artificial Sequence: Synthetic oligonucleotide
  Target: COL7A1; (-) strand; PAM type: NRG; PAM sequence: AGG
gagtttcgctcttgttgccc

SEQ ID NO: 11275 - DNA, 20 bp, Artificial Sequence
  Description of Artificial Sequence: Synthetic oligonucleotide
  Target: COL7A1; (-) strand; PAM type: NRG; PAM sequence: CAG
ggagtttcgctcttgttgcc

SEQ ID NO: 11276 - DNA, 20 bp, Artificial Sequence
  Description of Artificial Sequence: Synthetic oligonucleotide
  Target: COL7A1; (-) strand; PAM type: NRG; PAM sequence: GAG
gtttttttttttttgagatg

SEQ ID NO: 11277 - DNA, 20 bp, Artificial Sequence
  Description of Artificial Sequence: Synthetic oligonucleotide
  Target: COL7A1; (-) strand; PAM type: NRG; PAM sequence: TGG
tagtttttttttttttgaga

SEQ ID NO: 11278 - DNA, 20 bp, Artificial Sequence
  Description of Artificial Sequence: Synthetic oligonucleotide
  Target: COL7A1; (-) strand; PAM type: NRG; PAM sequence: GAG
aacatagttttttttttttt

SEQ ID NO: 11279 - DNA, 20 bp, Artificial Sequence
  Description of Artificial Sequence: Synthetic oligonucleotide
  Target: COL7A1; (-) strand; PAM type: NRG; PAM sequence: TAG
tacagatgcatccagaaaca

SEQ ID NO: 11280 - DNA, 20 bp, Artificial Sequence
  Description of Artificial Sequence: Synthetic oligonucleotide
  Target: COL7A1; (-) strand; PAM type: NRG; PAM sequence: CAG
cccagacatacagatgcatc

SEQ ID NO: 11281 - DNA, 20 bp, Artificial Sequence
  Description of Artificial Sequence: Synthetic oligonucleotide
  Target: COL7A1; (-) strand; PAM type: NRG; PAM sequence: CAG
tgcatcctggcccagacata

SEQ ID NO: 11282 - DNA, 20 bp, Artificial Sequence
  Description of Artificial Sequence: Synthetic oligonucleotide
  Target: COL7A1; (-) strand; PAM type: NRG; PAM sequence: CAG
tagacacatgcatcctggcc

SEQ ID NO: 11283 - DNA, 20 bp, Artificial Sequence
  Description of Artificial Sequence: Synthetic oligonucleotide
  Target: COL7A1; (-) strand; PAM type: NRG; PAM sequence: TGG
acgtgtagacacatgcatcc

SEQ ID NO: 11284 - DNA, 20 bp, Artificial Sequence
  Description of Artificial Sequence: Synthetic oligonucleotide
  Target: COL7A1; (-) strand; PAM type: NRG; PAM sequence: TAG
caacacatgaggcacacgtg

SEQ ID NO: 11285 - DNA, 20 bp, Artificial Sequence
  Description of Artificial Sequence: Synthetic oligonucleotide
  Target: COL7A1; (-) strand; PAM type: NRG; PAM sequence: AGG
aagatctgtagcaacacatg

SEQ ID NO: 11286 - DNA, 20 bp, Artificial Sequence
  Description of Artificial Sequence: Synthetic oligonucleotide
  Target: COL7A1; (-) strand; PAM type: NRG; PAM sequence: GAG
caagatctgtagcaacacat

SEQ ID NO: 11287 - DNA, 20 bp, Artificial Sequence
  Description of Artificial Sequence: Synthetic oligonucleotide
  Target: COL7A1; (-) strand; PAM type: NRG; PAM sequence: TAG
acctacacagccaagatctg

SEQ ID NO: 11288 - DNA, 20 bp, Artificial Sequence
  Description of Artificial Sequence: Synthetic oligonucleotide
  Target: COL7A1; (-) strand; PAM type: NRG; PAM sequence: AAG
gccagcacacctacacagcc

SEQ ID NO: 11289 - DNA, 20 bp, Artificial Sequence
  Description of Artificial Sequence: Synthetic oligonucleotide
  Target: COL7A1; (-) strand; PAM type: NRG; PAM sequence: CAG
gaaacgccagcacacctaca

SEQ ID NO: 11290 - DNA, 20 bp, Artificial Sequence
  Description of Artificial Sequence: Synthetic oligonucleotide
  Target: COL7A1; (-) strand; PAM type: NRG; PAM sequence: CAG
cgaaacctgccaagaaacgc

SEQ ID NO: 11291 - DNA, 20 bp, Artificial Sequence
  Description of Artificial Sequence: Synthetic oligonucleotide
  Target: COL7A1; (-) strand; PAM type: NRG; PAM sequence: AAG
cagctgcggcgaaacctgcc

SEQ ID NO: 11292 - DNA, 20 bp, Artificial Sequence
  Description of Artificial Sequence: Synthetic oligonucleotide
  Target: COL7A1; (-) strand; PAM type: NRG; PAM sequence: CGG
gagtgtgtccagggcagctg

SEQ ID NO: 11293 - DNA, 20 bp, Artificial Sequence
  Description of Artificial Sequence: Synthetic oligonucleotide
  Target: COL7A1; (-) strand; PAM type: NRG; PAM sequence: CAG
aaacgtgagtgtgtccaggg

SEQ ID NO: 11294 - DNA, 20 bp, Artificial Sequence
  Description of Artificial Sequence: Synthetic oligonucleotide
  Target: COL7A1; (-) strand; PAM type: NRG; PAM sequence: GGG
aaaaaacgtgagtgtgtcca

SEQ ID NO: 11295 - DNA, 20 bp, Artificial Sequence
  Description of Artificial Sequence: Synthetic oligonucleotide
  Target: COL7A1; (-) strand; PAM type: NRG; PAM sequence: AGG
gaaaaaacgtgagtgtgtcc

SEQ ID NO: 11296 - DNA, 20 bp, Artificial Sequence
  Description of Artificial Sequence: Synthetic oligonucleotide
  Target: COL7A1; (-) strand; PAM type: NRG; PAM sequence: CAG
ggaaaaaacgtgagtgtgtc

SEQ ID NO: 11297 - DNA, 20 bp, Artificial Sequence
  Description of Artificial Sequence: Synthetic oligonucleotide
  Target: COL7A1; (-) strand; PAM type: NRG; PAM sequence: GAG
ggcctgaatggaaaaaacgt

SEQ ID NO: 11298 - DNA, 20 bp, Artificial Sequence
  Description of Artificial Sequence: Synthetic oligonucleotide
  Target: COL7A1; (-) strand; PAM type: NRG; PAM sequence: TGG
gatggcaaacctggcctgaa

SEQ ID NO: 11299 - DNA, 20 bp, Artificial Sequence
  Description of Artificial Sequence: Synthetic oligonucleotide
  Target: COL7A1; (-) strand; PAM type: NRG; PAM sequence: TGG
ccaggcgaggatggcaaacc

SEQ ID NO: 11300 - DNA, 20 bp, Artificial Sequence
  Description of Artificial Sequence: Synthetic oligonucleotide
  Target: COL7A1; (-) strand; PAM type: NRG; PAM sequence: TGG
cagggaaagccaggcgagga

SEQ ID NO: 11301 - DNA, 20 bp, Artificial Sequence
  Description of Artificial Sequence: Synthetic oligonucleotide
  Target: COL7A1; (-) strand; PAM type: NRG; PAM sequence: AGG
cccacagggaaagccaggcg

SEQ ID NO: 11302 - DNA, 20 bp, Artificial Sequence
  Description of Artificial Sequence: Synthetic oligonucleotide
  Target: COL7A1; (-) strand; PAM type: NRG; PAM sequence: GAG
tcccacagggaaagccaggc

SEQ ID NO: 11303 - DNA, 20 bp, Artificial Sequence
  Description of Artificial Sequence: Synthetic oligonucleotide
  Target: COL7A1; (-) strand; PAM type: NRG; PAM sequence: AGG
ctgttcccacagggaaagcc

SEQ ID NO: 11304 - DNA, 20 bp, Artificial Sequence
  Description of Artificial Sequence: Synthetic oligonucleotide
  Target: COL7A1; (-) strand; PAM type: NRG; PAM sequence: CAG
tctgttcccacagggaaagc

SEQ ID NO: 11305 - DNA, 20 bp, Artificial Sequence
  Description of Artificial Sequence: Synthetic oligonucleotide
  Target: COL7A1; (-) strand; PAM type: NRG; PAM sequence: AAG
gtgatctgttcccacaggga

SEQ ID NO: 11306 - DNA, 20 bp, Artificial Sequence
  Description of Artificial Sequence: Synthetic oligonucleotide
  Target: COL7A1; (-) strand; PAM type: NRG; PAM sequence: GGG
accagtgatctgttcccaca

SEQ ID NO: 11307 - DNA, 20 bp, Artificial Sequence
  Description of Artificial Sequence: Synthetic oligonucleotide
  Target: COL7A1; (-) strand; PAM type: NRG; PAM sequence: AGG
aaccagtgatctgttcccac

SEQ ID NO: 11308 - DNA, 20 bp, Artificial Sequence
  Description of Artificial Sequence: Synthetic oligonucleotide
  Target: COL7A1; (-) strand; PAM type: NRG; PAM sequence: CAG
caaccagtgatctgttccca

SEQ ID NO: 11309 - DNA, 20 bp, Artificial Sequence
  Description of Artificial Sequence: Synthetic oligonucleotide
  Target: COL7A1; (-) strand; PAM type: NRG; PAM sequence: CAG
cccgatccccgacatccaac

SEQ ID NO: 11310 - DNA, 20 bp, Artificial Sequence
  Description of Artificial Sequence: Synthetic oligonucleotide
  Target: COL7A1; (-) strand; PAM type: NRG; PAM sequence: CAG
ccctggattaccggtgagac

SEQ ID NO: 11311 - DNA, 20 bp, Artificial Sequence
  Description of Artificial Sequence: Synthetic oligonucleotide
  Target: COL7A1; (-) strand; PAM type: NRG; PAM sequence: GAG
ggtccccctggattaccggt

SEQ ID NO: 11312 - DNA, 20 bp, Artificial Sequence
  Description of Artificial Sequence: Synthetic oligonucleotide
  Target: COL7A1; (-) strand; PAM type: NRG; PAM sequence: CGG
ctctggtccccctggattac

SEQ ID NO: 11313 - DNA, 20 bp, Artificial Sequence
  Description of Artificial Sequence: Synthetic oligonucleotide
  Target: COL7A1; (-) strand; PAM type: NRG; PAM sequence: TGG
cctggcccctctggtccccc

SEQ ID NO: 11314 - DNA, 20 bp, Artificial Sequence
  Description of Artificial Sequence: Synthetic oligonucleotide
  Target: COL7A1; (-) strand; PAM type: NRG; PAM sequence: TGG
cagggcctccctggcccctc

SEQ ID NO: 11315 - DNA, 20 bp, Artificial Sequence
  Description of Artificial Sequence: Synthetic oligonucleotide
  Target: COL7A1; (-) strand; PAM type: NRG; PAM sequence: TGG
cgtggagaacagggcctccc

SEQ ID NO: 11316 - DNA, 20 bp, Artificial Sequence
  Description of Artificial Sequence: Synthetic oligonucleotide
  Target: COL7A1; (-) strand; PAM type: NRG; PAM sequence: GGG
ccaggcctccgtggagaaca

SEQ ID NO: 11317 - DNA, 20 bp, Artificial Sequence
  Description of Artificial Sequence: Synthetic oligonucleotide
  Target: COL7A1; (-) strand; PAM type: NRG; PAM sequence: AGG
tccaggcctccgtggagaac

SEQ ID NO: 11318 - DNA, 20 bp, Artificial Sequence
  Description of Artificial Sequence: Synthetic oligonucleotide
  Target: COL7A1; (-) strand; PAM type: NRG; PAM sequence: CAG
ttccaggcctccgtggagaa

SEQ ID NO: 11319 - DNA, 20 bp, Artificial Sequence
  Description of Artificial Sequence: Synthetic oligonucleotide
  Target: COL7A1; (-) strand; PAM type: NRG; PAM sequence: GAG
ggggcttccaggcctccgtg

SEQ ID NO: 11320 - DNA, 20 bp, Artificial Sequence
  Description of Artificial Sequence: Synthetic oligonucleotide
  Target: COL7A1; (-) strand; PAM type: NRG; PAM sequence: TGG
caggggcttccaggcctccg

SEQ ID NO: 11321 - DNA, 20 bp, Artificial Sequence
  Description of Artificial Sequence: Synthetic oligonucleotide
  Target: COL7A1; (-) strand; PAM type: NRG; PAM sequence: AGG
gactttttccaggggcttcc

SEQ ID NO: 11322 - DNA, 20 bp, Artificial Sequence
  Description of Artificial Sequence: Synthetic oligonucleotide
  Target: COL7A1; (-) strand; PAM type: NRG; PAM sequence: CAG
agactttttccaggggcttc

SEQ ID NO: 11323 - DNA, 20 bp, Artificial Sequence
  Description of Artificial Sequence: Synthetic oligonucleotide
  Target: COL7A1; (-) strand; PAM type: NRG; PAM sequence: GGG
ttaacaaagactttttccag

SEQ ID NO: 11324 - DNA, 20 bp, Artificial Sequence
  Description of Artificial Sequence: Synthetic oligonucleotide
  Target: COL7A1; (-) strand; PAM type: NRG; PAM sequence: GGG
cttaacaaagactttttcca

SEQ ID NO: 11325 - DNA, 20 bp, Artificial Sequence
  Description of Artificial Sequence: Synthetic oligonucleotide
  Target: COL7A1; (-) strand; PAM type: NRG; PAM sequence: AGG
tcttaacaaagactttttcc

SEQ ID NO: 11326 - DNA, 20 bp, Artificial Sequence
  Description of Artificial Sequence: Synthetic oligonucleotide
  Target: COL7A1; (-) strand; PAM type: NRG; PAM sequence: CAG
atcttaacaaagactttttc

SEQ ID NO: 11327 - DNA, 20 bp, Artificial Sequence
  Description of Artificial Sequence: Synthetic oligonucleotide
  Target: COL7A1; (-) strand; PAM type: NRG; PAM sequence: AAG
aggccctataaatcttaaca

SEQ ID NO: 11328 - DNA, 20 bp, Artificial Sequence
  Description of Artificial Sequence: Synthetic oligonucleotide
  Target: COL7A1; (-) strand; PAM type: NRG; PAM sequence: AGG
tgccccaagggatatctcag

SEQ ID NO: 11329 - DNA, 20 bp, Artificial Sequence
  Description of Artificial Sequence: Synthetic oligonucleotide
  Target: COL7A1; (-) strand; PAM type: NRG; PAM sequence: GAG
gtgccccaagggatatctca

SEQ ID NO: 11330 - DNA, 20 bp, Artificial Sequence
  Description of Artificial Sequence: Synthetic oligonucleotide
  Target: COL7A1; (-) strand; PAM type: NRG; PAM sequence: CAG
gtgtgccccaagggatatct

SEQ ID NO: 11331 - DNA, 20 bp, Artificial Sequence
  Description of Artificial Sequence: Synthetic oligonucleotide
  Target: COL7A1; (-) strand; PAM type: NRG; PAM sequence: GGG
gtccatggggtgtgccccaa

SEQ ID NO: 11332 - DNA, 20 bp, Artificial Sequence
  Description of Artificial Sequence: Synthetic oligonucleotide
  Target: COL7A1; (-) strand; PAM type: NRG; PAM sequence: AGG
agtccatggggtgtgcccca

SEQ ID NO: 11333 - DNA, 20 bp, Artificial Sequence
  Description of Artificial Sequence: Synthetic oligonucleotide
  Target: COL7A1; (-) strand; PAM type: NRG; PAM sequence: AAG
tagtccatggggtgtgcccc

SEQ ID NO: 11334 - DNA, 20 bp, Artificial Sequence
  Description of Artificial Sequence: Synthetic oligonucleotide
  Target: COL7A1; (-) strand; PAM type: NRG; PAM sequence: GGG
tggggtcctcttagtccatg

SEQ ID NO: 11335 - DNA, 20 bp, Artificial Sequence
  Description of Artificial Sequence: Synthetic oligonucleotide
  Target: COL7A1; (-) strand; PAM type: NRG; PAM sequence: GGG
ttggggtcctcttagtccat

SEQ ID NO: 11336 - DNA, 20 bp, Artificial Sequence
  Description of Artificial Sequence: Synthetic oligonucleotide
  Target: COL7A1; (-) strand; PAM type: NRG; PAM sequence: TGG
tttggggtcctcttagtcca

SEQ ID NO: 11337 - DNA, 20 bp, Artificial Sequence
  Description of Artificial Sequence: Synthetic oligonucleotide
  Target: COL7A1; (-) strand; PAM type: NRG; PAM sequence: TAG
agatctttttggggtcctct

SEQ ID NO: 11338 - DNA, 20 bp, Artificial Sequence
  Description of Artificial Sequence: Synthetic oligonucleotide
  Target: COL7A1; (-) strand; PAM type: NRG; PAM sequence: GGG
cctggagggagatctttttg

SEQ ID NO: 11339 - DNA, 20 bp, Artificial Sequence
  Description of Artificial Sequence: Synthetic oligonucleotide
  Target: COL7A1; (-) strand; PAM type: NRG; PAM sequence: GGG
ccctggagggagatcttttt

SEQ ID NO: 11340 - DNA, 20 bp, Artificial Sequence
  Description of Artificial Sequence: Synthetic oligonucleotide
  Target: COL7A1; (-) strand; PAM type: NRG; PAM sequence: TGG
accctggagggagatctttt

SEQ ID NO: 11341 - DNA, 20 bp, Artificial Sequence
  Description of Artificial Sequence: Synthetic oligonucleotide
  Target: COL7A1; (-) strand; PAM type: NRG; PAM sequence: GAG
gggggtctctaccctggagg

SEQ ID NO: 11342 - DNA, 20 bp, Artificial Sequence
  Description of Artificial Sequence: Synthetic oligonucleotide
  Target: COL7A1; (-) strand; PAM type: NRG; PAM sequence: GGG
ctgggggtctctaccctgga

SEQ ID NO: 11343 - DNA, 20 bp, Artificial Sequence
  Description of Artificial Sequence: Synthetic oligonucleotide
  Target: COL7A1; (-) strand; PAM type: NRG; PAM sequence: AGG
cctgggggtctctaccctgg

SEQ ID NO: 11344 - DNA, 20 bp, Artificial Sequence
  Description of Artificial Sequence: Synthetic oligonucleotide
  Target: COL7A1; (-) strand; PAM type: NRG; PAM sequence: GAG
tcctgggggtctctaccctg

SEQ ID NO: 11345 - DNA, 20 bp, Artificial Sequence
  Description of Artificial Sequence: Synthetic oligonucleotide
  Target: COL7A1; (-) strand; PAM type: NRG; PAM sequence: TGG
agtcctgggggtctctaccc

SEQ ID NO: 11346 - DNA, 20 bp, Artificial Sequence
  Description of Artificial Sequence: Synthetic oligonucleotide
  Target: COL7A1; (-) strand; PAM type: NRG; PAM sequence: GGG
atgggacctctcagtcctgg

SEQ ID NO: 11347 - DNA, 20 bp, Artificial Sequence
  Description of Artificial Sequence: Synthetic oligonucleotide
  Target: COL7A1; (-) strand; PAM type: NRG; PAM sequence: GGG
aatgggacctctcagtcctg

SEQ ID NO: 11348 - DNA, 20 bp, Artificial Sequence
  Description of Artificial Sequence: Synthetic oligonucleotide
  Target: COL7A1; (-) strand; PAM type: NRG; PAM sequence: GGG
caatgggacctctcagtcct

SEQ ID NO: 11349 - DNA, 20 bp, Artificial Sequence
  Description of Artificial Sequence: Synthetic oligonucleotide
  Target: COL7A1; (-) strand; PAM type: NRG; PAM sequence: TGG
tcaatgggacctctcagtcc

SEQ ID NO: 11350 - DNA, 20 bp, Artificial Sequence
  Description of Artificial Sequence: Synthetic oligonucleotide
  Target: COL7A1; (-) strand; PAM type: NRG; PAM sequence: CAG
gggatctcaatgggacctct

SEQ ID NO: 11351 - DNA, 20 bp, Artificial Sequence
  Description of Artificial Sequence: Synthetic oligonucleotide
  Target: COL7A1; (-) strand; PAM type: NRG; PAM sequence: GGG
tgtgcctgagggatctcaat

SEQ ID NO: 11352 - DNA, 20 bp, Artificial Sequence
  Description of Artificial Sequence: Synthetic oligonucleotide
  Target: COL7A1; (-) strand; PAM type: NRG; PAM sequence: TGG
ctgtgcctgagggatctcaa

SEQ ID NO: 11353 - DNA, 20 bp, Artificial Sequence
  Description of Artificial Sequence: Synthetic oligonucleotide
  Target: COL7A1; (-) strand; PAM type: NRG; PAM sequence: GGG
tccatggggtctgtgcctga

SEQ ID NO: 11354 - DNA, 20 bp, Artificial Sequence
  Description of Artificial Sequence: Synthetic oligonucleotide
  Target: COL7A1; (-) strand; PAM type: NRG; PAM sequence: AGG
atccatggggtctgtgcctg

SEQ ID NO: 11355 - DNA, 20 bp, Artificial Sequence
  Description of Artificial Sequence: Synthetic oligonucleotide
  Target: COL7A1; (-) strand; PAM type: NRG; PAM sequence: GAG
catccatggggtctgtgcct

SEQ ID NO: 11356 - DNA, 20 bp, Artificial Sequence
  Description of Artificial Sequence: Synthetic oligonucleotide
  Target: COL7A1; (-) strand; PAM type: NRG; PAM sequence: GGG
agcaggggcccccatccatg

SEQ ID NO: 11357 - DNA, 20 bp, Artificial Sequence
  Description of Artificial Sequence: Synthetic oligonucleotide
  Target: COL7A1; (-) strand; PAM type: NRG; PAM sequence: GGG
cagcaggggcccccatccat

SEQ ID NO: 11358 - DNA, 20 bp, Artificial Sequence
  Description of Artificial Sequence: Synthetic oligonucleotide
  Target: COL7A1; (-) strand; PAM type: NRG; PAM sequence: TGG
tcagcaggggcccccatcca

SEQ ID NO: 11359 - DNA, 20 bp, Artificial Sequence
  Description of Artificial Sequence: Synthetic oligonucleotide
  Target: COL7A1; (-) strand; PAM type: NRG; PAM sequence: GGG
tcccttgggagtctcagcag

SEQ ID NO: 11360 - DNA, 20 bp, Artificial Sequence
  Description of Artificial Sequence: Synthetic oligonucleotide
  Target: COL7A1; (-) strand; PAM type: NRG; PAM sequence: GGG
ttcccttgggagtctcagca

SEQ ID NO: 11361 - DNA, 20 bp, Artificial Sequence
  Description of Artificial Sequence: Synthetic oligonucleotide
  Target: COL7A1; (-) strand; PAM type: NRG; PAM sequence: AGG
cttcccttgggagtctcagc

SEQ ID NO: 11362 - DNA, 20 bp, Artificial Sequence
  Description of Artificial Sequence: Synthetic oligonucleotide
  Target: COL7A1; (-) strand; PAM type: NRG; PAM sequence: CAG
tcttcccttgggagtctcag

SEQ ID NO: 11363 - DNA, 20 bp, Artificial Sequence
  Description of Artificial Sequence: Synthetic oligonucleotide
  Target: COL7A1; (-) strand; PAM type: NRG; PAM sequence: CAG
ggttcttcccttgggagtct

SEQ ID NO: 11364 - DNA, 20 bp, Artificial Sequence
  Description of Artificial Sequence: Synthetic oligonucleotide
  Target: COL7A1; (-) strand; PAM type: NRG; PAM sequence: GAG
cctgggggttcttcccttgg

SEQ ID NO: 11365 - DNA, 20 bp, Artificial Sequence
  Description of Artificial Sequence: Synthetic oligonucleotide
  Target: COL7A1; (-) strand; PAM type: NRG; PAM sequence: GGG
gtcctgggggttcttccctt

SEQ ID NO: 11366 - DNA, 20 bp, Artificial Sequence
  Description of Artificial Sequence: Synthetic oligonucleotide
  Target: COL7A1; (-) strand; PAM type: NRG; PAM sequence: TGG
agtcctgggggttcttccct

SEQ ID NO: 11367 - DNA, 20 bp, Artificial Sequence
  Description of Artificial Sequence: Synthetic oligonucleotide
  Target: COL7A1; (-) strand; PAM type: NRG; PAM sequence: GGG
ataggccctccaagtcctgg

SEQ ID NO: 11368 - DNA, 20 bp, Artificial Sequence
  Description of Artificial Sequence: Synthetic oligonucleotide
  Target: COL7A1; (-) strand; PAM type: NRG; PAM sequence: GGG
cataggccctccaagtcctg

SEQ ID NO: 11369 - DNA, 20 bp, Artificial Sequence
  Description of Artificial Sequence: Synthetic oligonucleotide
  Target: COL7A1; (-) strand; PAM type: NRG; PAM sequence: GGG
tcataggccctccaagtcct

SEQ ID NO: 11370 - DNA, 20 bp, Artificial Sequence
  Description of Artificial Sequence: Synthetic oligonucleotide
  Target: COL7A1; (-) strand; PAM type: NRG; PAM sequence: TGG
ttcataggccctccaagtcc

SEQ ID NO: 11371 - DNA, 20 bp, Artificial Sequence
  Description of Artificial Sequence: Synthetic oligonucleotide
  Target: COL7A1; (-) strand; PAM type: NRG; PAM sequence: AAG
ggggtcttcataggccctcc

SEQ ID NO: 11372 - DNA, 20 bp, Artificial Sequence
  Description of Artificial Sequence: Synthetic oligonucleotide
  Target: COL7A1; (-) strand; PAM type: NRG; PAM sequence: AGG
tttgccttgggggtcttcat

SEQ ID NO: 11373 - DNA, 20 bp, Artificial Sequence
  Description of Artificial Sequence: Synthetic oligonucleotide
  Target: COL7A1; (-) strand; PAM type: NRG; PAM sequence: TAG
ctttgccttgggggtcttca

SEQ ID NO: 11374 - DNA, 20 bp, Artificial Sequence
  Description of Artificial Sequence: Synthetic oligonucleotide
  Target: COL7A1; (-) strand; PAM type: NRG; PAM sequence: GGG
tctgaccttctttgccttgg

SEQ ID NO: 11375 - DNA, 20 bp, Artificial Sequence
  Description of Artificial Sequence: Synthetic oligonucleotide
  Target: COL7A1; (-) strand; PAM type: NRG; PAM sequence: GGG
ttctgaccttctttgccttg

SEQ ID NO: 11376 - DNA, 20 bp, Artificial Sequence
  Description of Artificial Sequence: Synthetic oligonucleotide
  Target: COL7A1; (-) strand; PAM type: NRG; PAM sequence: GGG
tttctgaccttctttgcctt

SEQ ID NO: 11377 - DNA, 20 bp, Artificial Sequence
  Description of Artificial Sequence: Synthetic oligonucleotide
  Target: COL7A1; (-) strand; PAM type: NRG; PAM sequence: TGG
ctttctgaccttctttgcct

SEQ ID NO: 11378 - DNA, 20 bp, Artificial Sequence
  Description of Artificial Sequence: Synthetic oligonucleotide
  Target: COL7A1; (-) strand; PAM type: NRG; PAM sequence: TAG
ccctggcacacaggttttag

SEQ ID NO: 11379 - DNA, 20 bp, Artificial Sequence
  Description of Artificial Sequence: Synthetic oligonucleotide
  Target: COL7A1; (-) strand; PAM type: NRG; PAM sequence: TAG
agtccctggcacacaggttt

SEQ ID NO: 11380 - DNA, 20 bp, Artificial Sequence
  Description of Artificial Sequence: Synthetic oligonucleotide
  Target: COL7A1; (-) strand; PAM type: NRG; PAM sequence: AGG
ggtctcagtccctggcacac

SEQ ID NO: 11381 - DNA, 20 bp, Artificial Sequence
  Description of Artificial Sequence: Synthetic oligonucleotide
  Target: COL7A1; (-) strand; PAM type: NRG; PAM sequence: CAG
gggtctcagtccctggcaca

SEQ ID NO: 11382 - DNA, 20 bp, Artificial Sequence
  Description of Artificial Sequence: Synthetic oligonucleotide
  Target: COL7A1; (-) strand; PAM type: NRG; PAM sequence: TGG
tttgggagggtctcagtccc

SEQ ID NO: 11383 - DNA, 20 bp, Artificial Sequence
  Description of Artificial Sequence: Synthetic oligonucleotide
  Target: COL7A1; (-) strand; PAM type: NRG; PAM sequence: CAG
ccttgcctttgggagggtct

SEQ ID NO: 11384 - DNA, 20 bp, Artificial Sequence
  Description of Artificial Sequence: Synthetic oligonucleotide
  Target: COL7A1; (-) strand; PAM type: NRG; PAM sequence: GGG
gttcagccttgcctttggga

SEQ ID NO: 11385 - DNA, 20 bp, Artificial Sequence
  Description of Artificial Sequence: Synthetic oligonucleotide
  Target: COL7A1; (-) strand; PAM type: NRG; PAM sequence: AGG
ggttcagccttgcctttggg

SEQ ID NO: 11386 - DNA, 20 bp, Artificial Sequence
  Description of Artificial Sequence: Synthetic oligonucleotide
  Target: COL7A1; (-) strand; PAM type: NRG; PAM sequence: GAG
cggttcagccttgcctttgg

SEQ ID NO: 11387 - DNA, 20 bp, Artificial Sequence
  Description of Artificial Sequence: Synthetic oligonucleotide
  Target: COL7A1; (-) strand; PAM type: NRG; PAM sequence: GGG
gtcggttcagccttgccttt

SEQ ID NO: 11388 - DNA, 20 bp, Artificial Sequence
  Description of Artificial Sequence: Synthetic oligonucleotide
  Target: COL7A1; (-) strand; PAM type: NRG; PAM sequence: TGG
ggtcggttcagccttgcctt

SEQ ID NO: 11389 - DNA, 20 bp, Artificial Sequence
  Description of Artificial Sequence: Synthetic oligonucleotide
  Target: COL7A1; (-) strand; PAM type: NRG; PAM sequence: CAG
gagttggtggggggtcggtt

SEQ ID NO: 11390 - DNA, 20 bp, Artificial Sequence
  Description of Artificial Sequence: Synthetic oligonucleotide
  Target: COL7A1; (-) strand; PAM type: NRG; PAM sequence: CGG
cgagagagttggtggggggt

SEQ ID NO: 11391 - DNA, 20 bp, Artificial Sequence
  Description of Artificial Sequence: Synthetic oligonucleotide
  Target: COL7A1; (-) strand; PAM type: NRG; PAM sequence: GGG
catccgagagagttggtggg

SEQ ID NO: 11392 - DNA, 20 bp, Artificial Sequence
  Description of Artificial Sequence: Synthetic oligonucleotide
  Target: COL7A1; (-) strand; PAM type: NRG; PAM sequence: GGG
gcatccgagagagttggtgg

SEQ ID NO: 11393 - DNA, 20 bp, Artificial Sequence
  Description of Artificial Sequence: Synthetic oligonucleotide
  Target: COL7A1; (-) strand; PAM type: NRG; PAM sequence: GGG
agcatccgagagagttggtg

SEQ ID NO: 11394 - DNA, 20 bp, Artificial Sequence
  Description of Artificial Sequence: Synthetic oligonucleotide
  Target: COL7A1; (-) strand; PAM type: NRG; PAM sequence: GGG
cagcatccgagagagttggt

SEQ ID NO: 11395 - DNA, 20 bp, Artificial Sequence
  Description of Artificial Sequence: Synthetic oligonucleotide
  Target: COL7A1; (-) strand; PAM type: NRG; PAM sequence: TGG
acagcatccgagagagttgg

SEQ ID NO: 11396 - DNA, 20 bp, Artificial Sequence
  Description of Artificial Sequence: Synthetic oligonucleotide
  Target: COL7A1; (-) strand; PAM type: NRG; PAM sequence: TGG
gtcacagcatccgagagagt

SEQ ID NO: 11397 - DNA, 20 bp, Artificial Sequence
  Description of Artificial Sequence: Synthetic oligonucleotide
  Target: COL7A1; (-) strand; PAM type: NRG; PAM sequence: GAG
catagtcacagcatccgaga

SEQ ID NO: 11398 - DNA, 20 bp, Artificial Sequence
  Description of Artificial Sequence: Synthetic oligonucleotide
  Target: COL7A1; (-) strand; PAM type: NRG; PAM sequence: GAG
atcatagtcacagcatccga

SEQ ID NO: 11399 - DNA, 20 bp, Artificial Sequence
  Description of Artificial Sequence: Synthetic oligonucleotide
  Target: COL7A1; (-) strand; PAM type: NRG; PAM sequence: GAG
tcatcatagtcacagcatcc

SEQ ID NO: 11400 - DNA, 20 bp, Artificial Sequence
  Description of Artificial Sequence: Synthetic oligonucleotide
  Target: COL7A1; (-) strand; PAM type: NRG; PAM sequence: CAG
caaccagatcatcatagtca

SEQ ID NO: 11401 - DNA, 20 bp, Artificial Sequence
  Description of Artificial Sequence: Synthetic oligonucleotide
  Target: COL7A1; (-) strand; PAM type: NRG; PAM sequence: TAG
aagctccaaccagatcatca

SEQ ID NO: 11402 - DNA, 20 bp, Artificial Sequence
  Description of Artificial Sequence: Synthetic oligonucleotide
  Target: COL7A1; (-) strand; PAM type: NRG; PAM sequence: CAG
ggggctgcgtaagctccaac

SEQ ID NO: 11403 - DNA, 20 bp, Artificial Sequence
  Description of Artificial Sequence: Synthetic oligonucleotide
  Target: COL7A1; (-) strand; PAM type: NRG; PAM sequence: AAG
gagggggctcggggctgcgt

SEQ ID NO: 11404 - DNA, 20 bp, Artificial Sequence
  Description of Artificial Sequence: Synthetic oligonucleotide
  Target: COL7A1; (-) strand; PAM type: NRG; PAM sequence: GGG
gctgggacagagggggctcg

SEQ ID NO: 11405 - DNA, 20 bp, Artificial Sequence
  Description of Artificial Sequence: Synthetic oligonucleotide
  Target: COL7A1; (-) strand; PAM type: NRG; PAM sequence: GGG
tgctgggacagagggggctc

SEQ ID NO: 11406 - DNA, 20 bp, Artificial Sequence
  Description of Artificial Sequence: Synthetic oligonucleotide
  Target: COL7A1; (-) strand; PAM type: NRG; PAM sequence: CGG
atgctgggacagagggggct

SEQ ID NO: 11407 - DNA, 20 bp, Artificial Sequence
  Description of Artificial Sequence: Synthetic oligonucleotide
  Target: COL7A1; (-) strand; PAM type: NRG; PAM sequence: GGG
gggagatgctgggacagagg

SEQ ID NO: 11408 - DNA, 20 bp, Artificial Sequence
  Description of Artificial Sequence: Synthetic oligonucleotide
  Target: COL7A1; (-) strand; PAM type: NRG; PAM sequence: GGG
ggggagatgctgggacagag

SEQ ID NO: 11409 - DNA, 20 bp, Artificial Sequence
  Description of Artificial Sequence: Synthetic oligonucleotide
  Target: COL7A1; (-) strand; PAM type: NRG; PAM sequence: GGG
aggggagatgctgggacaga

SEQ ID NO: 11410 - DNA, 20 bp, Artificial Sequence
  Description of Artificial Sequence: Synthetic oligonucleotide
  Target: COL7A1; (-) strand; PAM type: NRG; PAM sequence: AGG
gaggggagatgctgggacag

SEQ ID NO: 11411 - DNA, 20 bp, Artificial Sequence
  Description of Artificial Sequence: Synthetic oligonucleotide
  Target: COL7A1; (-) strand; PAM type: NRG; PAM sequence: GAG
tgaggggagatgctgggaca

SEQ ID NO: 11412 - DNA, 20 bp, Artificial Sequence
  Description of Artificial Sequence: Synthetic oligonucleotide
  Target: COL7A1; (-) strand; PAM type: NRG; PAM sequence: CAG
agtgaggggagatgctggga

SEQ ID NO: 11413 - DNA, 20 bp, Artificial Sequence
  Description of Artificial Sequence: Synthetic oligonucleotide
  Target: COL7A1; (-) strand; PAM type: NRG; PAM sequence: GGG
cgtaagtgaggggagatgct

SEQ ID NO: 11414 - DNA, 20 bp, Artificial Sequence
  Description of Artificial Sequence: Synthetic oligonucleotide
  Target: COL7A1; (-) strand; PAM type: NRG; PAM sequence: TGG
acgtaagtgaggggagatgc

SEQ ID NO: 11415 - DNA, 20 bp, Artificial Sequence
  Description of Artificial Sequence: Synthetic oligonucleotide
  Target: COL7A1; (-) strand; PAM type: NRG; PAM sequence: GAG
gggagagacgtaagtgaggg

SEQ ID NO: 11416 - DNA, 20 bp, Artificial Sequence
  Description of Artificial Sequence: Synthetic oligonucleotide
  Target: COL7A1; (-) strand; PAM type: NRG; PAM sequence: GGG
cagggagagacgtaagtgag

SEQ ID NO: 11417 - DNA, 20 bp, Artificial Sequence
  Description of Artificial Sequence: Synthetic oligonucleotide
  Target: COL7A1; (-) strand; PAM type: NRG; PAM sequence: GGG
ccagggagagacgtaagtga

SEQ ID NO: 11418 - DNA, 20 bp, Artificial Sequence
  Description of Artificial Sequence: Synthetic oligonucleotide
  Target: COL7A1; (-) strand; PAM type: NRG; PAM sequence: AGG
cccagggagagacgtaagtg

SEQ ID NO: 11419 - DNA, 20 bp, Artificial Sequence
  Description of Artificial Sequence: Synthetic oligonucleotide
  Target: COL7A1; (-) strand; PAM type: NRG; PAM sequence: GAG
acccagggagagacgtaagt

SEQ ID NO: 11420 - DNA, 20 bp, Artificial Sequence
  Description of Artificial Sequence: Synthetic oligonucleotide
  Target: COL7A1; (-) strand; PAM type: NRG; PAM sequence: AAG
ggggacccagggagagacgt

SEQ ID NO: 11421 - DNA, 20 bp, Artificial Sequence
  Description of Artificial Sequence: Synthetic oligonucleotide
  Target: COL7A1; (-) strand; PAM type: NRG; PAM sequence: GAG
caaagctggggacccaggga

SEQ ID NO: 11422 - DNA, 20 bp, Artificial Sequence
  Description of Artificial Sequence: Synthetic oligonucleotide
  Target: COL7A1; (-) strand; PAM type: NRG; PAM sequence: GAG
ggcaaagctggggacccagg

SEQ ID NO: 11423 - DNA, 20 bp, Artificial Sequence
  Description of Artificial Sequence: Synthetic oligonucleotide
  Target: COL7A1; (-) strand; PAM type: NRG; PAM sequence: GGG
caggcaaagctggggaccca

SEQ ID NO: 11424 - DNA, 20 bp, Artificial Sequence
  Description of Artificial Sequence: Synthetic oligonucleotide
  Target: COL7A1; (-) strand; PAM type: NRG; PAM sequence: AGG
gcaggcaaagctggggaccc

SEQ ID NO: 11425 - DNA, 20 bp, Artificial Sequence
  Description of Artificial Sequence: Synthetic oligonucleotide
  Target: COL7A1; (-) strand; PAM type: NRG; PAM sequence: CAG
tgcaggcaaagctggggacc

SEQ ID NO: 11426 - DNA, 20 bp, Artificial Sequence
  Description of Artificial Sequence: Synthetic oligonucleotide
  Target: COL7A1; (-) strand; PAM type: NRG; PAM sequence: GGG
gggtgctgcaggcaaagctg

SEQ ID NO: 11427 - DNA, 20 bp, Artificial Sequence
  Description of Artificial Sequence: Synthetic oligonucleotide
  Target: COL7A1; (-) strand; PAM type: NRG; PAM sequence: GGG
agggtgctgcaggcaaagct

SEQ ID NO: 11428 - DNA, 20 bp, Artificial Sequence
  Description of Artificial Sequence: Synthetic oligonucleotide
  Target: COL7A1; (-) strand; PAM type: NRG; PAM sequence: TGG
cagggtgctgcaggcaaagc

SEQ ID NO: 11429 - DNA, 20 bp, Artificial Sequence
  Description of Artificial Sequence: Synthetic oligonucleotide
  Target: COL7A1; (-) strand; PAM type: NRG; PAM sequence: AAG
tcctcagggtgctgcaggca

SEQ ID NO: 11430 - DNA, 20 bp, Artificial Sequence
  Description of Artificial Sequence: Synthetic oligonucleotide
  Target: COL7A1; (-) strand; PAM type: NRG; PAM sequence: AGG
gtctctcctcagggtgctgc

SEQ ID NO: 11431 - DNA, 20 bp, Artificial Sequence
  Description of Artificial Sequence: Synthetic oligonucleotide
  Target: COL7A1; (-) strand; PAM type: NRG; PAM sequence: CAG
agtctctcctcagggtgctg

SEQ ID NO: 11432 - DNA, 20 bp, Artificial Sequence
  Description of Artificial Sequence: Synthetic oligonucleotide
  Target: COL7A1; (-) strand; PAM type: NRG; PAM sequence: GGG
tgactttgagtctctcctca

SEQ ID NO: 11433 - DNA, 20 bp, Artificial Sequence
  Description of Artificial Sequence: Synthetic oligonucleotide
  Target: COL7A1; (-) strand; PAM type: NRG; PAM sequence: AGG
ctgactttgagtctctcctc

SEQ ID NO: 11434 - DNA, 20 bp, Artificial Sequence
  Description of Artificial Sequence: Synthetic oligonucleotide
  Target: COL7A1; (-) strand; PAM type: NRG; PAM sequence: CAG
actgactttgagtctctcct

SEQ ID NO: 11435 - DNA, 20 bp, Artificial Sequence
  Description of Artificial Sequence: Synthetic oligonucleotide
  Target: COL7A1; (-) strand; PAM type: NRG; PAM sequence: GAG
gaccatgatgaactgacttt

SEQ ID NO: 11436 - DNA, 20 bp, Artificial Sequence
  Description of Artificial Sequence: Synthetic oligonucleotide
  Target: COL7A1; (-) strand; PAM type: NRG; PAM sequence: GAG
ccttaggctcacagggacta

SEQ ID NO: 11437 - DNA, 20 bp, Artificial Sequence
  Description of Artificial Sequence: Synthetic oligonucleotide
  Target: COL7A1; (-) strand; PAM type: NRG; PAM sequence: TAG
ggccttaggctcacagggac

SEQ ID NO: 11438 - DNA, 20 bp, Artificial Sequence
  Description of Artificial Sequence: Synthetic oligonucleotide
  Target: COL7A1; (-) strand; PAM type: NRG; PAM sequence: GGG
atgcaggccttaggctcaca

SEQ ID NO: 11439 - DNA, 20 bp, Artificial Sequence
  Description of Artificial Sequence: Synthetic oligonucleotide
  Target: COL7A1; (-) strand; PAM type: NRG; PAM sequence: AGG
catgcaggccttaggctcac

SEQ ID NO: 11440 - DNA, 20 bp, Artificial Sequence
  Description of Artificial Sequence: Synthetic oligonucleotide
  Target: COL7A1; (-) strand; PAM type: NRG; PAM sequence: CAG
ccatgcaggccttaggctca

SEQ ID NO: 11441 - DNA, 20 bp, Artificial Sequence
  Description of Artificial Sequence: Synthetic oligonucleotide
  Target: COL7A1; (-) strand; PAM type: NRG; PAM sequence: AGG
gttcttgccatgcaggcctt

SEQ ID NO: 11442 - DNA, 20 bp, Artificial Sequence
  Description of Artificial Sequence: Synthetic oligonucleotide
  Target: COL7A1; (-) strand; PAM type: NRG; PAM sequence: TAG
tgttcttgccatgcaggcct

SEQ ID NO: 11443 - DNA, 20 bp, Artificial Sequence
  Description of Artificial Sequence: Synthetic oligonucleotide
  Target: COL7A1; (-) strand; PAM type: NRG; PAM sequence: AGG
ggggcatgttcttgccatgc

SEQ ID NO: 11444 - DNA, 20 bp, Artificial Sequence
  Description of Artificial Sequence: Synthetic oligonucleotide
  Target: COL7A1; (-) strand; PAM type: NRG; PAM sequence: CAG
tggggcatgttcttgccatg

SEQ ID NO: 11445 - DNA, 20 bp, Artificial Sequence
  Description of Artificial Sequence: Synthetic oligonucleotide
  Target: COL7A1; (-) strand; PAM type: NRG; PAM sequence: GGG
cccagagccctgcctgggtg

SEQ ID NO: 11446 - DNA, 20 bp, Artificial Sequence
  Description of Artificial Sequence: Synthetic oligonucleotide
  Target: COL7A1; (-) strand; PAM type: NRG; PAM sequence: GGG
tcccagagccctgcctgggt

SEQ ID NO: 11447 - DNA, 20 bp, Artificial Sequence
  Description of Artificial Sequence: Synthetic oligonucleotide
  Target: COL7A1; (-) strand; PAM type: NRG; PAM sequence: TGG
ctcccagagccctgcctggg

SEQ ID NO: 11448 - DNA, 20 bp, Artificial Sequence
  Description of Artificial Sequence: Synthetic oligonucleotide
  Target: COL7A1; (-) strand; PAM type: NRG; PAM sequence: GGG
cttctcccagagccctgcct

SEQ ID NO: 11449 - DNA, 20 bp, Artificial Sequence
  Description of Artificial Sequence: Synthetic oligonucleotide
  Target: COL7A1; (-) strand; PAM type: NRG; PAM sequence: TGG
tcttctcccagagccctgcc

SEQ ID NO: 11450 - DNA, 20 bp, Artificial Sequence
  Description of Artificial Sequence: Synthetic oligonucleotide
  Target: COL7A1; (-) strand; PAM type: NRG; PAM sequence: GAG
gttgtctgtgtcttctccca

SEQ ID NO: 11451 - DNA, 20 bp, Artificial Sequence
  Description of Artificial Sequence: Synthetic oligonucleotide
  Target: COL7A1; (-) strand; PAM type: NRG; PAM sequence: CAG
ctgttgtctgtgtcttctcc

SEQ ID NO: 11452 - DNA, 20 bp, Artificial Sequence
  Description of Artificial Sequence: Synthetic oligonucleotide
  Target: COL7A1; (-) strand; PAM type: NRG; PAM sequence: GAG
gccttgacgagctctggggc

SEQ ID NO: 11453 - DNA, 20 bp, Artificial Sequence
  Description of Artificial Sequence: Synthetic oligonucleotide
  Target: COL7A1; (-) strand; PAM type: NRG; PAM sequence: GGG
cttggccttgacgagctctg

SEQ ID NO: 11454 - DNA, 20 bp, Artificial Sequence
  Description of Artificial Sequence: Synthetic oligonucleotide
  Target: COL7A1; (-) strand; PAM type: NRG; PAM sequence: GGG
tcttggccttgacgagctct

SEQ ID NO: 11455 - DNA, 20 bp, Artificial Sequence
  Description of Artificial Sequence: Synthetic oligonucleotide
  Target: COL7A1; (-) strand; PAM type: NRG; PAM sequence: TGG
gtcttggccttgacgagctc

SEQ ID NO: 11456 - DNA, 20 bp, Artificial Sequence
  Description of Artificial Sequence: Synthetic oligonucleotide
  Target: COL7A1; (-) strand; PAM type: NRG; PAM sequence: GAG
tggttggtcttggccttgac

SEQ ID NO: 11457 - DNA, 20 bp, Artificial Sequence
  Description of Artificial Sequence: Synthetic oligonucleotide
  Target: COL7A1; (-) strand; PAM type: NRG; PAM sequence: TGG
ccagcctcattggttggtct

SEQ ID NO: 11458 - DNA, 20 bp, Artificial Sequence
  Description of Artificial Sequence: Synthetic oligonucleotide
  Target: COL7A1; (-) strand; PAM type: NRG; PAM sequence: TGG
tagaccccagcctcattggt

SEQ ID NO: 11459 - DNA, 20 bp, Artificial Sequence
  Description of Artificial Sequence: Synthetic oligonucleotide
  Target: COL7A1; (-) strand; PAM type: NRG; PAM sequence: TGG
accctagaccccagcctcat

SEQ ID NO: 11460 - DNA, 20 bp, Artificial Sequence
  Description of Artificial Sequence: Synthetic oligonucleotide
  Target: COL7A1; (-) strand; PAM type: NRG; PAM sequence: CAG
cacatgaggaccctagaccc

SEQ ID NO: 11461 - DNA, 20 bp, Artificial Sequence
  Description of Artificial Sequence: Synthetic oligonucleotide
  Target: COL7A1; (-) strand; PAM type: NRG; PAM sequence: TAG
accccttcacatgaggaccc

SEQ ID NO: 11462 - DNA, 20 bp, Artificial Sequence
  Description of Artificial Sequence: Synthetic oligonucleotide
  Target: COL7A1; (-) strand; PAM type: NRG; PAM sequence: AGG
ttcccctaccccttcacatg

SEQ ID NO: 11463 - DNA, 20 bp, Artificial Sequence
  Description of Artificial Sequence: Synthetic oligonucleotide
  Target: COL7A1; (-) strand; PAM type: NRG; PAM sequence: GAG
cttcccctaccccttcacat

SEQ ID NO: 11464 - DNA, 20 bp, Artificial Sequence
  Description of Artificial Sequence: Synthetic oligonucleotide
  Target: COL7A1; (-) strand; PAM type: NRG; PAM sequence: TGG
tgagtcttggtagtcctgcc

SEQ ID NO: 11465 - DNA, 20 bp, Artificial Sequence
  Description of Artificial Sequence: Synthetic oligonucleotide
  Target: COL7A1; (-) strand; PAM type: NRG; PAM sequence: TAG
gggccgaatgtgagtcttgg

SEQ ID NO: 11466 - DNA, 20 bp, Artificial Sequence
  Description of Artificial Sequence: Synthetic oligonucleotide
  Target: COL7A1; (-) strand; PAM type: NRG; PAM sequence: TGG
tctgggccgaatgtgagtct

SEQ ID NO: 11467 - DNA, 20 bp, Artificial Sequence
  Description of Artificial Sequence: Synthetic oligonucleotide
  Target: COL7A1; (-) strand; PAM type: NRG; PAM sequence: GAG
gggccctctgggccgaatgt

SEQ ID NO: 11468 - DNA, 20 bp, Artificial Sequence
  Description of Artificial Sequence: Synthetic oligonucleotide
  Target: COL7A1; (-) strand; PAM type: NRG; PAM sequence: GGG
caggagccgctgggccctct

SEQ ID NO: 11469 - DNA, 20 bp, Artificial Sequence
  Description of Artificial Sequence: Synthetic oligonucleotide
  Target: COL7A1; (-) strand; PAM type: NRG; PAM sequence: TGG
ccaggagccgctgggccctc

SEQ ID NO: 11470 - DNA, 20 bp, Artificial Sequence
  Description of Artificial Sequence: Synthetic oligonucleotide
  Target: COL7A1; (-) strand; PAM type: NRG; PAM sequence: GGG
atgggaaaccaggagccgct

SEQ ID NO: 11471 - DNA, 20 bp, Artificial Sequence
  Description of Artificial Sequence: Synthetic oligonucleotide
  Target: COL7A1; (-) strand; PAM type: NRG; PAM sequence: TGG
gatgggaaaccaggagccgc

SEQ ID NO: 11472 - DNA, 20 bp, Artificial Sequence
  Description of Artificial Sequence: Synthetic oligonucleotide
  Target: COL7A1; (-) strand; PAM type: NRG; PAM sequence: GAG
cggactggatgggaaaccag

SEQ ID NO: 11473 - DNA, 20 bp, Artificial Sequence
  Description of Artificial Sequence: Synthetic oligonucleotide
  Target: COL7A1; (-) strand; PAM type: NRG; PAM sequence: AGG
agcggactggatgggaaacc

SEQ ID NO: 11474 - DNA, 20 bp, Artificial Sequence
  Description of Artificial Sequence: Synthetic oligonucleotide
  Target: COL7A1; (-) strand; PAM type: NRG; PAM sequence: CAG
gagcggactggatgggaaac

SEQ ID NO: 11475 - DNA, 20 bp, Artificial Sequence
  Description of Artificial Sequence: Synthetic oligonucleotide
  Target: COL7A1; (-) strand; PAM type: NRG; PAM sequence: GGG
atggccggagcggactggat

SEQ ID NO: 11476 - DNA, 20 bp, Artificial Sequence
  Description of Artificial Sequence: Synthetic oligonucleotide
  Target: COL7A1; (-) strand; PAM type: NRG; PAM sequence: TGG
gatggccggagcggactgga

SEQ ID NO: 11477 - DNA, 20 bp, Artificial Sequence
  Description of Artificial Sequence: Synthetic oligonucleotide
  Target: COL7A1; (-) strand; PAM type: NRG; PAM sequence: TGG
gctggatggccggagcggac

SEQ ID NO: 11478 - DNA, 20 bp, Artificial Sequence
  Description of Artificial Sequence: Synthetic oligonucleotide
  Target: COL7A1; (-) strand; PAM type: NRG; PAM sequence: CGG
cctgggctggatggccggag

SEQ ID NO: 11479 - DNA, 20 bp, Artificial Sequence
  Description of Artificial Sequence: Synthetic oligonucleotide
  Target: COL7A1; (-) strand; PAM type: NRG; PAM sequence: GAG
ccccctgggctggatggccg

SEQ ID NO: 11480 - DNA, 20 bp, Artificial Sequence
  Description of Artificial Sequence: Synthetic oligonucleotide
  Target: COL7A1; (-) strand; PAM type: NRG; PAM sequence: CGG
gtccccctgggctggatggc

SEQ ID NO: 11481 - DNA, 20 bp, Artificial Sequence
  Description of Artificial Sequence: Synthetic oligonucleotide
  Target: COL7A1; (-) strand; PAM type: NRG; PAM sequence: TGG
cggggtccccctgggctgga

SEQ ID NO: 11482 - DNA, 20 bp, Artificial Sequence
  Description of Artificial Sequence: Synthetic oligonucleotide
  Target: COL7A1; (-) strand; PAM type: NRG; PAM sequence: TGG
tgaccggggtccccctgggc

SEQ ID NO: 11483 - DNA, 20 bp, Artificial Sequence
  Description of Artificial Sequence: Synthetic oligonucleotide
  Target: COL7A1; (-) strand; PAM type: NRG; PAM sequence: GGG
agggtgaccggggtccccct

SEQ ID NO: 11484 - DNA, 20 bp, Artificial Sequence
  Description of Artificial Sequence: Synthetic oligonucleotide
  Target: COL7A1; (-) strand; PAM type: NRG; PAM sequence: TGG
cagggtgaccggggtccccc

SEQ ID NO: 11485 - DNA, 20 bp, Artificial Sequence
  Description of Artificial Sequence: Synthetic oligonucleotide
  Target: COL7A1; (-) strand; PAM type: NRG; PAM sequence: GGG
tattttccacagggtgaccg

SEQ ID NO: 11486 - DNA, 20 bp, Artificial Sequence
  Description of Artificial Sequence: Synthetic oligonucleotide
  Target: COL7A1; (-) strand; PAM type: NRG; PAM sequence: GGG
ctattttccacagggtgacc

SEQ ID NO: 11487 - DNA, 20 bp, Artificial Sequence
  Description of Artificial Sequence: Synthetic oligonucleotide
  Target: COL7A1; (-) strand; PAM type: NRG; PAM sequence: CGG
tctattttccacagggtgac

SEQ ID NO: 11488 - DNA, 20 bp, Artificial Sequence
  Description of Artificial Sequence: Synthetic oligonucleotide
  Target: COL7A1; (-) strand; PAM type: NRG; PAM sequence: GGG
ttaccactctattttccaca

SEQ ID NO: 11489 - DNA, 20 bp, Artificial Sequence
  Description of Artificial Sequence: Synthetic oligonucleotide
  Target: COL7A1; (-) strand; PAM type: NRG; PAM sequence: AGG
cttaccactctattttccac

SEQ ID NO: 11490 - DNA, 20 bp, Artificial Sequence
  Description of Artificial Sequence: Synthetic oligonucleotide
  Target: COL7A1; (-) strand; PAM type: NRG; PAM sequence: CAG
tcttaccactctattttcca

SEQ ID NO: 11491 - DNA, 20 bp, Artificial Sequence
  Description of Artificial Sequence: Synthetic oligonucleotide
  Target: COL7A1; (-) strand; PAM type: NRG; PAM sequence: TGG
cagatccacctcagccttgg

SEQ ID NO: 11492 - DNA, 20 bp, Artificial Sequence
  Description of Artificial Sequence: Synthetic oligonucleotide
  Target: COL7A1; (-) strand; PAM type: NRG; PAM sequence: TGG
tatcagatccacctcagcct

SEQ ID NO: 11493 - DNA, 20 bp, Artificial Sequence
  Description of Artificial Sequence: Synthetic oligonucleotide
  Target: COL7A1; (-) strand; PAM type: NRG; PAM sequence: CAG
ctgggttatcagatccacct

SEQ ID NO: 11494 - DNA, 20 bp, Artificial Sequence
  Description of Artificial Sequence: Synthetic oligonucleotide
  Target: COL7A1; (-) strand; PAM type: NRG; PAM sequence: CAG
aggacatgagcctgggttat

SEQ ID NO: 11495 - DNA, 20 bp, Artificial Sequence
  Description of Artificial Sequence: Synthetic oligonucleotide
  Target: COL7A1; (-) strand; PAM type: NRG; PAM sequence: GGG
gtttctcaggacatgagcct

SEQ ID NO: 11496 - DNA, 20 bp, Artificial Sequence
  Description of Artificial Sequence: Synthetic oligonucleotide
  Target: COL7A1; (-) strand; PAM type: NRG; PAM sequence: TGG
ggtttctcaggacatgagcc

SEQ ID NO: 11497 - DNA, 20 bp, Artificial Sequence
  Description of Artificial Sequence: Synthetic oligonucleotide
  Target: COL7A1; (-) strand; PAM type: NRG; PAM sequence: GAG
gtgggggtttctcaggacat

SEQ ID NO: 11498 - DNA, 20 bp, Artificial Sequence
  Description of Artificial Sequence: Synthetic oligonucleotide
  Target: COL7A1; (-) strand; PAM type: NRG; PAM sequence: AGG
agagggtgtgggggtttctc

SEQ ID NO: 11499 - DNA, 20 bp, Artificial Sequence
  Description of Artificial Sequence: Synthetic oligonucleotide
  Target: COL7A1; (-) strand; PAM type: NRG; PAM sequence: CAG
gagagggtgtgggggtttct

SEQ ID NO: 11500 - DNA, 20 bp, Artificial Sequence
  Description of Artificial Sequence: Synthetic oligonucleotide
  Target: COL7A1; (-) strand; PAM type: NRG; PAM sequence: GGG
gaaaaggtgagagggtgtgg

SEQ ID NO: 11501 - DNA, 20 bp, Artificial Sequence
  Description of Artificial Sequence: Synthetic oligonucleotide
  Target: COL7A1; (-) strand; PAM type: NRG; PAM sequence: GGG
agaaaaggtgagagggtgtg

SEQ ID NO: 11502 - DNA, 20 bp, Artificial Sequence
  Description of Artificial Sequence: Synthetic oligonucleotide
  Target: COL7A1; (-) strand; PAM type: NRG; PAM sequence: GGG
gagaaaaggtgagagggtgt

SEQ ID NO: 11503 - DNA, 20 bp, Artificial Sequence
  Description of Artificial Sequence: Synthetic oligonucleotide
  Target: COL7A1; (-) strand; PAM type: NRG; PAM sequence: TGG
ggagaaaaggtgagagggtg

SEQ ID NO: 11504 - DNA, 20 bp, Artificial Sequence
  Description of Artificial Sequence: Synthetic oligonucleotide
  Target: COL7A1; (-) strand; PAM type: NRG; PAM sequence: GGG
cagcaggagaaaaggtgaga

SEQ ID NO: 11505 - DNA, 20 bp, Artificial Sequence
  Description of Artificial Sequence: Synthetic oligonucleotide
  Target: COL7A1; (-) strand; PAM type: NRG; PAM sequence: AGG
ccagcaggagaaaaggtgag

SEQ ID NO: 11506 - DNA, 20 bp, Artificial Sequence
  Description of Artificial Sequence: Synthetic oligonucleotide
  Target: COL7A1; (-) strand; PAM type: NRG; PAM sequence: GAG
cccagcaggagaaaaggtga

SEQ ID NO: 11507 - DNA, 20 bp, Artificial Sequence
  Description of Artificial Sequence: Synthetic oligonucleotide
  Target: COL7A1; (-) strand; PAM type: NRG; PAM sequence: GAG
ggcccagcaggagaaaaggt

SEQ ID NO: 11508 - DNA, 20 bp, Artificial Sequence
  Description of Artificial Sequence: Synthetic oligonucleotide
  Target: COL7A1; (-) strand; PAM type: NRG; PAM sequence: AGG
ccgaggcccagcaggagaaa

SEQ ID NO: 11509 - DNA, 20 bp, Artificial Sequence
  Description of Artificial Sequence: Synthetic oligonucleotide
  Target: COL7A1; (-) strand; PAM type: NRG; PAM sequence: AAG
tccgaggcccagcaggagaa

SEQ ID NO: 11510 - DNA, 20 bp, Artificial Sequence
  Description of Artificial Sequence: Synthetic oligonucleotide
  Target: COL7A1; (-) strand; PAM type: NRG; PAM sequence: GAG
aggtgtccgaggcccagcag

SEQ ID NO: 11511 - DNA, 20 bp, Artificial Sequence
  Description of Artificial Sequence: Synthetic oligonucleotide
  Target: COL7A1; (-) strand; PAM type: NRG; PAM sequence: AGG
ccaggtgtccgaggcccagc

SEQ ID NO: 11512 - DNA, 20 bp, Artificial Sequence
  Description of Artificial Sequence: Synthetic oligonucleotide
  Target: COL7A1; (-) strand; PAM type: NRG; PAM sequence: CAG
cccaggtgtccgaggcccag

SEQ ID NO: 11513 - DNA, 20 bp, Artificial Sequence
  Description of Artificial Sequence: Synthetic oligonucleotide
  Target: COL7A1; (-) strand; PAM type: NRG; PAM sequence: CAG
ggacccaggtgtccgaggcc

SEQ ID NO: 11514 - DNA, 20 bp, Artificial Sequence
  Description of Artificial Sequence: Synthetic oligonucleotide
  Target: COL7A1; (-) strand; PAM type: NRG; PAM sequence: AGG
cagggggacccaggtgtccg

SEQ ID NO: 11515 - DNA, 20 bp, Artificial Sequence
  Description of Artificial Sequence: Synthetic oligonucleotide
  Target: COL7A1; (-) strand; PAM type: NRG; PAM sequence: GAG
ccagggggacccaggtgtcc

SEQ ID NO: 11516 - DNA, 20 bp, Artificial Sequence
  Description of Artificial Sequence: Synthetic oligonucleotide
  Target: COL7A1; (-) strand; PAM type: NRG; PAM sequence: AGG
tgttccctccagggggaccc

SEQ ID NO: 11517 - DNA, 20 bp, Artificial Sequence
  Description of Artificial Sequence: Synthetic oligonucleotide
  Target: COL7A1; (-) strand; PAM type: NRG; PAM sequence: CAG
ctgttccctccagggggacc

SEQ ID NO: 11518 - DNA, 20 bp, Artificial Sequence
  Description of Artificial Sequence: Synthetic oligonucleotide
  Target: COL7A1; (-) strand; PAM type: NRG; PAM sequence: GGG
ctgaccctgttccctccagg

SEQ ID NO: 11519 - DNA, 20 bp, Artificial Sequence
  Description of Artificial Sequence: Synthetic oligonucleotide
  Target: COL7A1; (-) strand; PAM type: NRG; PAM sequence: GGG
tctgaccctgttccctccag

SEQ ID NO: 11520 - DNA, 20 bp, Artificial Sequence
  Description of Artificial Sequence: Synthetic oligonucleotide
  Target: COL7A1; (-) strand; PAM type: NRG; PAM sequence: GGG
atctgaccctgttccctcca

SEQ ID NO: 11521 - DNA, 20 bp, Artificial Sequence
  Description of Artificial Sequence: Synthetic oligonucleotide
  Target: COL7A1; (-) strand; PAM type: NRG; PAM sequence: AGG
tatctgaccctgttccctcc

SEQ ID NO: 11522 - DNA, 20 bp, Artificial Sequence
  Description of Artificial Sequence: Synthetic oligonucleotide
  Target: COL7A1; (-) strand; PAM type: NRG; PAM sequence: CAG
ttatctgaccctgttccctc

SEQ ID NO: 11523 - DNA, 20 bp, Artificial Sequence
  Description of Artificial Sequence: Synthetic oligonucleotide
  Target: COL7A1; (-) strand; PAM type: NRG; PAM sequence: AAG
tgcactttgccccgtctgcc

SEQ ID NO: 11524 - DNA, 20 bp, Artificial Sequence
  Description of Artificial Sequence: Synthetic oligonucleotide
  Target: COL7A1; (-) strand; PAM type: NRG; PAM sequence: GAG
ggacccccaggcccacaggt

SEQ ID NO: 11525 - DNA, 20 bp, Artificial Sequence
  Description of Artificial Sequence: Synthetic oligonucleotide
  Target: COL7A1; (-) strand; PAM type: NRG; PAM sequence: AGG
tcggggacccccaggcccac

SEQ ID NO: 11526 - DNA, 20 bp, Artificial Sequence
  Description of Artificial Sequence: Synthetic oligonucleotide
  Target: COL7A1; (-) strand; PAM type: NRG; PAM sequence: CAG
ttcggggacccccaggccca

SEQ ID NO: 11527 - DNA, 20 bp, Artificial Sequence
  Description of Artificial Sequence: Synthetic oligonucleotide
  Target: COL7A1; (-) strand; PAM type: NRG; PAM sequence: AGG
gaagggtttcggggaccccc

SEQ ID NO: 11528 - DNA, 20 bp, Artificial Sequence
  Description of Artificial Sequence: Synthetic oligonucleotide
  Target: COL7A1; (-) strand; PAM type: NRG; PAM sequence: CAG
tgaagggtttcggggacccc

SEQ ID NO: 11529 - DNA, 20 bp, Artificial Sequence
  Description of Artificial Sequence: Synthetic oligonucleotide
  Target: COL7A1; (-) strand; PAM type: NRG; PAM sequence: GGG
cagggcattgaagggtttcg

SEQ ID NO: 11530 - DNA, 20 bp, Artificial Sequence
  Description of Artificial Sequence: Synthetic oligonucleotide
  Target: COL7A1; (-) strand; PAM type: NRG; PAM sequence: GGG
tcagggcattgaagggtttc

SEQ ID NO: 11531 - DNA, 20 bp, Artificial Sequence
  Description of Artificial Sequence: Synthetic oligonucleotide
  Target: COL7A1; (-) strand; PAM type: NRG; PAM sequence: CGG
ctcagggcattgaagggttt

SEQ ID NO: 11532 - DNA, 20 bp, Artificial Sequence
  Description of Artificial Sequence: Synthetic oligonucleotide
  Target: COL7A1; (-) strand; PAM type: NRG; PAM sequence: GGG
cctatcctcagggcattgaa

SEQ ID NO: 11533 - DNA, 20 bp, Artificial Sequence
  Description of Artificial Sequence: Synthetic oligonucleotide
  Target: COL7A1; (-) strand; PAM type: NRG; PAM sequence: AGG
ccctatcctcagggcattga

SEQ ID NO: 11534 - DNA, 20 bp, Artificial Sequence
  Description of Artificial Sequence: Synthetic oligonucleotide
  Target: COL7A1; (-) strand; PAM type: NRG; PAM sequence: AAG
cccctatcctcagggcattg

SEQ ID NO: 11535 - DNA, 20 bp, Artificial Sequence
  Description of Artificial Sequence: Synthetic oligonucleotide
  Target: COL7A1; (-) strand; PAM type: NRG; PAM sequence: GGG
ttcttcctcccctatcctca

SEQ ID NO: 11536 - DNA, 20 bp, Artificial Sequence
  Description of Artificial Sequence: Synthetic oligonucleotide
  Target: COL7A1; (-) strand; PAM type: NRG; PAM sequence: AGG
tttcttcctcccctatcctc

SEQ ID NO: 11537 - DNA, 20 bp, Artificial Sequence
  Description of Artificial Sequence: Synthetic oligonucleotide
  Target: COL7A1; (-) strand; PAM type: NRG; PAM sequence: CAG
atttcttcctcccctatcct

SEQ ID NO: 11538 - DNA, 20 bp, Artificial Sequence
  Description of Artificial Sequence: Synthetic oligonucleotide
  Target: COL7A1; (-) strand; PAM type: NRG; PAM sequence: GGG
tcgggggtgcaggcatggga

SEQ ID NO: 11539 - DNA, 20 bp, Artificial Sequence
  Description of Artificial Sequence: Synthetic oligonucleotide
  Target: COL7A1; (-) strand; PAM type: NRG; PAM sequence: AGG
ctcgggggtgcaggcatggg

SEQ ID NO: 11540 - DNA, 20 bp, Artificial Sequence
  Description of Artificial Sequence: Synthetic oligonucleotide
  Target: COL7A1; (-) strand; PAM type: NRG; PAM sequence: GAG
cctcgggggtgcaggcatgg

SEQ ID NO: 11541 - DNA, 20 bp, Artificial Sequence
  Description of Artificial Sequence: Synthetic oligonucleotide
  Target: COL7A1; (-) strand; PAM type: NRG; PAM sequence: GGG
gtcctcgggggtgcaggcat

SEQ ID NO: 11542 - DNA, 20 bp, Artificial Sequence
  Description of Artificial Sequence: Synthetic oligonucleotide
  Target: COL7A1; (-) strand; PAM type: NRG; PAM sequence: TGG
ggtcctcgggggtgcaggca

SEQ ID NO: 11543 - DNA, 20 bp, Artificial Sequence
  Description of Artificial Sequence: Synthetic oligonucleotide
  Target: COL7A1; (-) strand; PAM type: NRG; PAM sequence: AGG
tgattggtcctcgggggtgc

SEQ ID NO: 11544 - DNA, 20 bp, Artificial Sequence
  Description of Artificial Sequence: Synthetic oligonucleotide
  Target: COL7A1; (-) strand; PAM type: NRG; PAM sequence: CAG
gtgattggtcctcgggggtg

SEQ ID NO: 11545 - DNA, 20 bp, Artificial Sequence
  Description of Artificial Sequence: Synthetic oligonucleotide
  Target: COL7A1; (-) strand; PAM type: NRG; PAM sequence: GGG
tgagtgtgattggtcctcgg

SEQ ID NO: 11546 - DNA, 20 bp, Artificial Sequence
  Description of Artificial Sequence: Synthetic oligonucleotide
  Target: COL7A1; (-) strand; PAM type: NRG; PAM sequence: GGG
gtgagtgtgattggtcctcg

SEQ ID NO: 11547 - DNA, 20 bp, Artificial Sequence
  Description of Artificial Sequence: Synthetic oligonucleotide
  Target: COL7A1; (-) strand; PAM type: NRG; PAM sequence: GGG
ggtgagtgtgattggtcctc

SEQ ID NO: 11548 - DNA, 20 bp, Artificial Sequence
  Description of Artificial Sequence: Synthetic oligonucleotide
  Target: COL7A1; (-) strand; PAM type: NRG; PAM sequence: CGG
gggtgagtgtgattggtcct

SEQ ID NO: 11549 - DNA, 20 bp, Artificial Sequence
  Description of Artificial Sequence: Synthetic oligonucleotide
  Target: COL7A1; (-) strand; PAM type: NRG; PAM sequence: TGG
ggggaaagggtgagtgtgat

SEQ ID NO: 11550 - DNA, 20 bp, Artificial Sequence
  Description of Artificial Sequence: Synthetic oligonucleotide
  Target: COL7A1; (-) strand; PAM type: NRG; PAM sequence: GAG
ggagcccctggggaaagggt

SEQ ID NO: 11551 - DNA, 20 bp, Artificial Sequence
  Description of Artificial Sequence: Synthetic oligonucleotide
  Target: COL7A1; (-) strand; PAM type: NRG; PAM sequence: GGG
ccctggagcccctggggaaa

SEQ ID NO: 11552 - DNA, 20 bp, Artificial Sequence
  Description of Artificial Sequence: Synthetic oligonucleotide
  Target: COL7A1; (-) strand; PAM type: NRG; PAM sequence: AGG
tccctggagcccctggggaa

SEQ ID NO: 11553 - DNA, 20 bp, Artificial Sequence
  Description of Artificial Sequence: Synthetic oligonucleotide
  Target: COL7A1; (-) strand; PAM type: NRG; PAM sequence: AAG
ctccctggagcccctgggga

SEQ ID NO: 11554 - DNA, 20 bp, Artificial Sequence
  Description of Artificial Sequence: Synthetic oligonucleotide
  Target: COL7A1; (-) strand; PAM type: NRG; PAM sequence: GGG
tggcctccctggagcccctg

SEQ ID NO: 11555 - DNA, 20 bp, Artificial Sequence
  Description of Artificial Sequence: Synthetic oligonucleotide
  Target: COL7A1; (-) strand; PAM type: NRG; PAM sequence: GGG
ctggcctccctggagcccct

SEQ ID NO: 11556 - DNA, 20 bp, Artificial Sequence
  Description of Artificial Sequence: Synthetic oligonucleotide
  Target: COL7A1; (-) strand; PAM type: NRG; PAM sequence: TGG
cctggcctccctggagcccc

SEQ ID NO: 11557 - DNA, 20 bp, Artificial Sequence
  Description of Artificial Sequence: Synthetic oligonucleotide
  Target: COL7A1; (-) strand; PAM type: NRG; PAM sequence: GAG
gggtgatcctggcctccctg

SEQ ID NO: 11558 - DNA, 20 bp, Artificial Sequence
  Description of Artificial Sequence: Synthetic oligonucleotide
  Target: COL7A1; (-) strand; PAM type: NRG; PAM sequence: TGG
aagggtgatcctggcctccc

SEQ ID NO: 11559 - DNA, 20 bp, Artificial Sequence
  Description of Artificial Sequence: Synthetic oligonucleotide
  Target: COL7A1; (-) strand; PAM type: NRG; PAM sequence: TGG
cgagggcccaagggtgatcc

SEQ ID NO: 11560 - DNA, 20 bp, Artificial Sequence
  Description of Artificial Sequence: Synthetic oligonucleotide
  Target: COL7A1; (-) strand; PAM type: NRG; PAM sequence: GGG
gagggtcctcgagggcccaa

SEQ ID NO: 11561 - DNA, 20 bp, Artificial Sequence
  Description of Artificial Sequence: Synthetic oligonucleotide
  Target: COL7A1; (-) strand; PAM type: NRG; PAM sequence: AGG
agagggtcctcgagggccca

SEQ ID NO: 11562 - DNA, 20 bp, Artificial Sequence
  Description of Artificial Sequence: Synthetic oligonucleotide
  Target: COL7A1; (-) strand; PAM type: NRG; PAM sequence: AAG
aagagggtcctcgagggccc

SEQ ID NO: 11563 - DNA, 20 bp, Artificial Sequence
  Description of Artificial Sequence: Synthetic oligonucleotide
  Target: COL7A1; (-) strand; PAM type: NRG; PAM sequence: GGG
gcggacaagagggtcctcga

SEQ ID NO: 11564 - DNA, 20 bp, Artificial Sequence
  Description of Artificial Sequence: Synthetic oligonucleotide
  Target: COL7A1; (-) strand; PAM type: NRG; PAM sequence: AGG
cgcggacaagagggtcctcg

SEQ ID NO: 11565 - DNA, 20 bp, Artificial Sequence
  Description of Artificial Sequence: Synthetic oligonucleotide
  Target: COL7A1; (-) strand; PAM type: NRG; PAM sequence: GAG
ccgcggacaagagggtcctc

SEQ ID NO: 11566 - DNA, 20 bp, Artificial Sequence
  Description of Artificial Sequence: Synthetic oligonucleotide
  Target: COL7A1; (-) strand; PAM type: NRG; PAM sequence: GGG
cctggggaccgcggacaaga

SEQ ID NO: 11567 - DNA, 20 bp, Artificial Sequence
  Description of Artificial Sequence: Synthetic oligonucleotide
  Target: COL7A1; (-) strand; PAM type: NRG; PAM sequence: AGG
gcctggggaccgcggacaag

SEQ ID NO: 11568 - DNA, 20 bp, Artificial Sequence
  Description of Artificial Sequence: Synthetic oligonucleotide
  Target: COL7A1; (-) strand; PAM type: NRG; PAM sequence: GAG
agcctggggaccgcggacaa

SEQ ID NO: 11569 - DNA, 20 bp, Artificial Sequence
  Description of Artificial Sequence: Synthetic oligonucleotide
  Target: COL7A1; (-) strand; PAM type: NRG; PAM sequence: AAG
agagcctggggaccgcggac

SEQ ID NO: 11570 - DNA, 20 bp, Artificial Sequence
  Description of Artificial Sequence: Synthetic oligonucleotide
  Target: COL7A1; (-) strand; PAM type: NRG; PAM sequence: CGG
cagggagagcctggggaccg

SEQ ID NO: 11571 - DNA, 20 bp, Artificial Sequence
  Description of Artificial Sequence: Synthetic oligonucleotide
  Target: COL7A1; (-) strand; PAM type: NRG; PAM sequence: GGG
tctgccacagggagagcctg

SEQ ID NO: 11572 - DNA, 20 bp, Artificial Sequence
  Description of Artificial Sequence: Synthetic oligonucleotide
  Target: COL7A1; (-) strand; PAM type: NRG; PAM sequence: GGG
ctctgccacagggagagcct

SEQ ID NO: 11573 - DNA, 20 bp, Artificial Sequence
  Description of Artificial Sequence: Synthetic oligonucleotide
  Target: COL7A1; (-) strand; PAM type: NRG; PAM sequence: TGG
tctctgccacagggagagcc

SEQ ID NO: 11574 - DNA, 20 bp, Artificial Sequence
  Description of Artificial Sequence: Synthetic oligonucleotide
  Target: COL7A1; (-) strand; PAM type: NRG; PAM sequence: GAG
gcttatctctgccacaggga

SEQ ID NO: 11575 - DNA, 20 bp, Artificial Sequence
  Description of Artificial Sequence: Synthetic oligonucleotide
  Target: COL7A1; (-) strand; PAM type: NRG; PAM sequence: GAG
aagcttatctctgccacagg

SEQ ID NO: 11576 - DNA, 20 bp, Artificial Sequence
  Description of Artificial Sequence: Synthetic oligonucleotide
  Target: COL7A1; (-) strand; PAM type: NRG; PAM sequence: GGG
gcaagcttatctctgccaca

SEQ ID NO: 11577 - DNA, 20 bp, Artificial Sequence
  Description of Artificial Sequence: Synthetic oligonucleotide
  Target: COL7A1; (-) strand; PAM type: NRG; PAM sequence: AGG
agcaagcttatctctgccac

SEQ ID NO: 11578 - DNA, 20 bp, Artificial Sequence
  Description of Artificial Sequence: Synthetic oligonucleotide
  Target: COL7A1; (-) strand; PAM type: NRG; PAM sequence: CAG
cagcaagcttatctctgcca

SEQ ID NO: 11579 - DNA, 20 bp, Artificial Sequence
  Description of Artificial Sequence: Synthetic oligonucleotide
  Target: COL7A1; (-) strand; PAM type: NRG; PAM sequence: AAG
cttcaaggctgttcctcagc

SEQ ID NO: 11580 - DNA, 20 bp, Artificial Sequence
  Description of Artificial Sequence: Synthetic oligonucleotide
  Target: COL7A1; (-) strand; PAM type: NRG; PAM sequence: CAG
ttggcttcaaggctgttcct

SEQ ID NO: 11581 - DNA, 20 bp, Artificial Sequence
  Description of Artificial Sequence: Synthetic oligonucleotide
  Target: COL7A1; (-) strand; PAM type: NRG; PAM sequence: AGG
ttgggcatggcttggcttca

SEQ ID NO: 11582 - DNA, 20 bp, Artificial Sequence
  Description of Artificial Sequence: Synthetic oligonucleotide
  Target: COL7A1; (-) strand; PAM type: NRG; PAM sequence: AAG
cttgggcatggcttggcttc

SEQ ID NO: 11583 - DNA, 20 bp, Artificial Sequence
  Description of Artificial Sequence: Synthetic oligonucleotide
  Target: COL7A1; (-) strand; PAM type: NRG; PAM sequence: TGG
gttctaccttgggcatggct

SEQ ID NO: 11584 - DNA, 20 bp, Artificial Sequence
  Description of Artificial Sequence: Synthetic oligonucleotide
  Target: COL7A1; (-) strand; PAM type: NRG; PAM sequence: TGG
agcaggttctaccttgggca

SEQ ID NO: 11585 - DNA, 20 bp, Artificial Sequence
  Description of Artificial Sequence: Synthetic oligonucleotide
  Target: COL7A1; (-) strand; PAM type: NRG; PAM sequence: GGG
ctcccagcaggttctacctt

SEQ ID NO: 11586 - DNA, 20 bp, Artificial Sequence
  Description of Artificial Sequence: Synthetic oligonucleotide
  Target: COL7A1; (-) strand; PAM type: NRG; PAM sequence: TGG
cctcccagcaggttctacct

SEQ ID NO: 11587 - DNA, 20 bp, Artificial Sequence
  Description of Artificial Sequence: Synthetic oligonucleotide
  Target: COL7A1; (-) strand; PAM type: NRG; PAM sequence: AGG
accccagtgcccctcccagc

SEQ ID NO: 11588 - DNA, 20 bp, Artificial Sequence
  Description of Artificial Sequence: Synthetic oligonucleotide
  Target: COL7A1; (-) strand; PAM type: NRG; PAM sequence: CAG
gaccccagtgcccctcccag

SEQ ID NO: 11589 - DNA, 20 bp, Artificial Sequence
  Description of Artificial Sequence: Synthetic oligonucleotide
  Target: COL7A1; (-) strand; PAM type: NRG; PAM sequence: CAG
aaagaccccagtgcccctcc

SEQ ID NO: 11590 - DNA, 20 bp, Artificial Sequence
  Description of Artificial Sequence: Synthetic oligonucleotide
  Target: COL7A1; (-) strand; PAM type: NRG; PAM sequence: CAG
gtggagggtaagaaagaccc

SEQ ID NO: 11591 - DNA, 20 bp, Artificial Sequence
  Description of Artificial Sequence: Synthetic oligonucleotide
  Target: COL7A1; (-) strand; PAM type: NRG; PAM sequence: AAG
tctgtgggtggagggtaaga

SEQ ID NO: 11592 - DNA, 20 bp, Artificial Sequence
  Description of Artificial Sequence: Synthetic oligonucleotide
  Target: COL7A1; (-) strand; PAM type: NRG; PAM sequence: AAG
agggtctgtgggtggagggt

SEQ ID NO: 11593 - DNA, 20 bp, Artificial Sequence
  Description of Artificial Sequence: Synthetic oligonucleotide
  Target: COL7A1; (-) strand; PAM type: NRG; PAM sequence: GGG
tattagggtctgtgggtgga

SEQ ID NO: 11594 - DNA, 20 bp, Artificial Sequence
  Description of Artificial Sequence: Synthetic oligonucleotide
  Target: COL7A1; (-) strand; PAM type: NRG; PAM sequence: AGG
gtattagggtctgtgggtgg

SEQ ID NO: 11595 - DNA, 20 bp, Artificial Sequence
  Description of Artificial Sequence: Synthetic oligonucleotide
  Target: COL7A1; (-) strand; PAM type: NRG; PAM sequence: GAG
ggtattagggtctgtgggtg

SEQ ID NO: 11596 - DNA, 20 bp, Artificial Sequence
  Description of Artificial Sequence: Synthetic oligonucleotide
  Target: COL7A1; (-) strand; PAM type: NRG; PAM sequence: TGG
aaggtattagggtctgtggg

SEQ ID NO: 11597 - DNA, 20 bp, Artificial Sequence
  Description of Artificial Sequence: Synthetic oligonucleotide
  Target: COL7A1; (-) strand; PAM type: NRG; PAM sequence: GGG
gagaaggtattagggtctgt

SEQ ID NO: 11598 - DNA, 20 bp, Artificial Sequence
  Description of Artificial Sequence: Synthetic oligonucleotide
  Target: COL7A1; (-) strand; PAM type: NRG; PAM sequence: TGG
agagaaggtattagggtctg

SEQ ID NO: 11599 - DNA, 20 bp, Artificial Sequence
  Description of Artificial Sequence: Synthetic oligonucleotide
  Target: COL7A1; (-) strand; PAM type: NRG; PAM sequence: GGG
gagccagagagaaggtatta

SEQ ID NO: 11600 - DNA, 20 bp, Artificial Sequence
  Description of Artificial Sequence: Synthetic oligonucleotide
  Target: COL7A1; (-) strand; PAM type: NRG; PAM sequence: AGG
ggagccagagagaaggtatt

SEQ ID NO: 11601 - DNA, 20 bp, Artificial Sequence
  Description of Artificial Sequence: Synthetic oligonucleotide
  Target: COL7A1; (-) strand; PAM type: NRG; PAM sequence: TAG
tggagccagagagaaggtat

SEQ ID NO: 11602 - DNA, 20 bp, Artificial Sequence
  Description of Artificial Sequence: Synthetic oligonucleotide
  Target: COL7A1; (-) strand; PAM type: NRG; PAM sequence: AGG
aggacctggagccagagaga

SEQ ID NO: 11603 - DNA, 20 bp, Artificial Sequence
  Description of Artificial Sequence: Synthetic oligonucleotide
  Target: COL7A1; (-) strand; PAM type: NRG; PAM sequence: AAG
caggacctggagccagagag

SEQ ID NO: 11604 - DNA, 20 bp, Artificial Sequence
  Description of Artificial Sequence: Synthetic oligonucleotide
  Target: COL7A1; (-) strand; PAM type: NRG; PAM sequence: GAG
acacaggacctggagccaga

SEQ ID NO: 11605 - DNA, 20 bp, Artificial Sequence
  Description of Artificial Sequence: Synthetic oligonucleotide
  Target: COL7A1; (-) strand; PAM type: NRG; PAM sequence: GAG
agacacaggacctggagcca

SEQ ID NO: 11606 - DNA, 20 bp, Artificial Sequence
  Description of Artificial Sequence: Synthetic oligonucleotide
  Target: COL7A1; (-) strand; PAM type: NRG; PAM sequence: CAG
gtagacacaggacctggagc

SEQ ID NO: 11607 - DNA, 20 bp, Artificial Sequence
  Description of Artificial Sequence: Synthetic oligonucleotide
  Target: COL7A1; (-) strand; PAM type: NRG; PAM sequence: GAG
acaggtagacacaggacctg

SEQ ID NO: 11608 - DNA, 20 bp, Artificial Sequence
  Description of Artificial Sequence: Synthetic oligonucleotide
  Target: COL7A1; (-) strand; PAM type: NRG; PAM sequence: TGG
ccacaggtagacacaggacc

SEQ ID NO: 11609 - DNA, 20 bp, Artificial Sequence
  Description of Artificial Sequence: Synthetic oligonucleotide
  Target: COL7A1; (-) strand; PAM type: NRG; PAM sequence: AGG
ttccccccacaggtagacac

SEQ ID NO: 11610 - DNA, 20 bp, Artificial Sequence
  Description of Artificial Sequence: Synthetic oligonucleotide
  Target: COL7A1; (-) strand; PAM type: NRG; PAM sequence: CAG
attccccccacaggtagaca

SEQ ID NO: 11611 - DNA, 20 bp, Artificial Sequence
  Description of Artificial Sequence: Synthetic oligonucleotide
  Target: COL7A1; (-) strand; PAM type: NRG; PAM sequence: TAG
ctggtcattccccccacagg

SEQ ID NO: 11612 - DNA, 20 bp, Artificial Sequence
  Description of Artificial Sequence: Synthetic oligonucleotide
  Target: COL7A1; (-) strand; PAM type: NRG; PAM sequence: AGG
tcactggtcattccccccac

SEQ ID NO: 11613 - DNA, 20 bp, Artificial Sequence
  Description of Artificial Sequence: Synthetic oligonucleotide
  Target: COL7A1; (-) strand; PAM type: NRG; PAM sequence: CAG
ctcactggtcattcccccca

SEQ ID NO: 11614 - DNA, 20 bp, Artificial Sequence
  Description of Artificial Sequence: Synthetic oligonucleotide
  Target: COL7A1; (-) strand; PAM type: NRG; PAM sequence: TGG
tgttgagccattcttctcac

SEQ ID NO: 11615 - DNA, 20 bp, Artificial Sequence
  Description of Artificial Sequence: Synthetic oligonucleotide
  Target: COL7A1; (-) strand; PAM type: NRG; PAM sequence: GAG
caactcctcttccccttgtt

SEQ ID NO: 11616 - DNA, 20 bp, Artificial Sequence
  Description of Artificial Sequence: Synthetic oligonucleotide
  Target: COL7A1; (-) strand; PAM type: NRG; PAM sequence: CAG
cggatccctggagcccctca

SEQ ID NO: 11617 - DNA, 20 bp, Artificial Sequence
  Description of Artificial Sequence: Synthetic oligonucleotide
  Target: COL7A1; (-) strand; PAM type: NRG; PAM sequence: GAG
gaaacctccgcggatccctg

SEQ ID NO: 11618 - DNA, 20 bp, Artificial Sequence
  Description of Artificial Sequence: Synthetic oligonucleotide
  Target: COL7A1; (-) strand; PAM type: NRG; PAM sequence: TGG
ctgaaacctccgcggatccc

SEQ ID NO: 11619 - DNA, 20 bp, Artificial Sequence
  Description of Artificial Sequence: Synthetic oligonucleotide
  Target: COL7A1; (-) strand; PAM type: NRG; PAM sequence: CGG
ctgtccctctgaaacctccg

SEQ ID NO: 11620 - DNA, 20 bp, Artificial Sequence
  Description of Artificial Sequence: Synthetic oligonucleotide
  Target: COL7A1; (-) strand; PAM type: NRG; PAM sequence: TGG
attgttctcacttgcccctt

SEQ ID NO: 11621 - DNA, 20 bp, Artificial Sequence
  Description of Artificial Sequence: Synthetic oligonucleotide
  Target: COL7A1; (-) strand; PAM type: NRG; PAM sequence: TGG
ggtaagggctgcgctgggtc

SEQ ID NO: 11622 - DNA, 20 bp, Artificial Sequence
  Description of Artificial Sequence: Synthetic oligonucleotide
  Target: COL7A1; (-) strand; PAM type: NRG; PAM sequence: GGG
cggctggtaagggctgcgct

SEQ ID NO: 11623 - DNA, 20 bp, Artificial Sequence
  Description of Artificial Sequence: Synthetic oligonucleotide
  Target: COL7A1; (-) strand; PAM type: NRG; PAM sequence: TGG
acggctggtaagggctgcgc

SEQ ID NO: 11624 - DNA, 20 bp, Artificial Sequence
  Description of Artificial Sequence: Synthetic oligonucleotide
  Target: COL7A1; (-) strand; PAM type: NRG; PAM sequence: GGG
acccccgggacggctggtaa

SEQ ID NO: 11625 - DNA, 20 bp, Artificial Sequence
  Description of Artificial Sequence: Synthetic oligonucleotide
  Target: COL7A1; (-) strand; PAM type: NRG; PAM sequence: AGG
gacccccgggacggctggta

SEQ ID NO: 11626 - DNA, 20 bp, Artificial Sequence
  Description of Artificial Sequence: Synthetic oligonucleotide
  Target: COL7A1; (-) strand; PAM type: NRG; PAM sequence: AAG
ggacccccgggacggctggt

SEQ ID NO: 11627 - DNA, 20 bp, Artificial Sequence
  Description of Artificial Sequence: Synthetic oligonucleotide
  Target: COL7A1; (-) strand; PAM type: NRG; PAM sequence: TGG
cccaggacccccgggacggc

SEQ ID NO: 11628 - DNA, 20 bp, Artificial Sequence
  Description of Artificial Sequence: Synthetic oligonucleotide
  Target: COL7A1; (-) strand; PAM type: NRG; PAM sequence: CGG
gtcccccaggacccccggga

SEQ ID NO: 11629 - DNA, 20 bp, Artificial Sequence
  Description of Artificial Sequence: Synthetic oligonucleotide
  Target: COL7A1; (-) strand; PAM type: NRG; PAM sequence: GGG
cagggtcccccaggaccccc

SEQ ID NO: 11630 - DNA, 20 bp, Artificial Sequence
  Description of Artificial Sequence: Synthetic oligonucleotide
  Target: COL7A1; (-) strand; PAM type: NRG; PAM sequence: CGG
ccagggtcccccaggacccc

SEQ ID NO: 11631 - DNA, 20 bp, Artificial Sequence
  Description of Artificial Sequence: Synthetic oligonucleotide
  Target: COL7A1; (-) strand; PAM type: NRG; PAM sequence: AGG
ttcctttcccagggtccccc

SEQ ID NO: 11632 - DNA, 20 bp, Artificial Sequence
  Description of Artificial Sequence: Synthetic oligonucleotide
  Target: COL7A1; (-) strand; PAM type: NRG; PAM sequence: CAG
tttcctttcccagggtcccc

SEQ ID NO: 11633 - DNA, 20 bp, Artificial Sequence
  Description of Artificial Sequence: Synthetic oligonucleotide
  Target: COL7A1; (-) strand; PAM type: NRG; PAM sequence: GGG
tataatcatttcctttccca

SEQ ID NO: 11634 - DNA, 20 bp, Artificial Sequence
  Description of Artificial Sequence: Synthetic oligonucleotide
  Target: COL7A1; (-) strand; PAM type: NRG; PAM sequence: AGG
ctataatcatttcctttccc

SEQ ID NO: 11635 - DNA, 20 bp, Artificial Sequence
  Description of Artificial Sequence: Synthetic oligonucleotide
  Target: COL7A1; (-) strand; PAM type: NRG; PAM sequence: CAG
actataatcatttcctttcc

SEQ ID NO: 11636 - DNA, 20 bp, Artificial Sequence
  Description of Artificial Sequence: Synthetic oligonucleotide
  Target: COL7A1; (-) strand; PAM type: NRG; PAM sequence: GGG
agccatggcctgggacctga

SEQ ID NO: 11637 - DNA, 20 bp, Artificial Sequence
  Description of Artificial Sequence: Synthetic oligonucleotide
  Target: COL7A1; (-) strand; PAM type: NRG; PAM sequence: AGG
gagccatggcctgggacctg

SEQ ID NO: 11638 - DNA, 20 bp, Artificial Sequence
  Description of Artificial Sequence: Synthetic oligonucleotide
  Target: COL7A1; (-) strand; PAM type: NRG; PAM sequence: GAG
agagccatggcctgggacct

SEQ ID NO: 11639 - DNA, 20 bp, Artificial Sequence
  Description of Artificial Sequence: Synthetic oligonucleotide
  Target: COL7A1; (-) strand; PAM type: NRG; PAM sequence: GGG
gcaaaccagagccatggcct

SEQ ID NO: 11640 - DNA, 20 bp, Artificial Sequence
  Description of Artificial Sequence: Synthetic oligonucleotide
  Target: COL7A1; (-) strand; PAM type: NRG; PAM sequence: TGG
ggcaaaccagagccatggcc

SEQ ID NO: 11641 - DNA, 20 bp, Artificial Sequence
  Description of Artificial Sequence: Synthetic oligonucleotide
  Target: COL7A1; (-) strand; PAM type: NRG; PAM sequence: TGG
cctggggcaaaccagagcca

SEQ ID NO: 11642 - DNA, 20 bp, Artificial Sequence
  Description of Artificial Sequence: Synthetic oligonucleotide
  Target: COL7A1; (-) strand; PAM type: NRG; PAM sequence: GAG
gttgagcctggggcaaacca

SEQ ID NO: 11643 - DNA, 20 bp, Artificial Sequence
  Description of Artificial Sequence: Synthetic oligonucleotide
  Target: COL7A1; (-) strand; PAM type: NRG; PAM sequence: CAG
gagttgagcctggggcaaac

SEQ ID NO: 11644 - DNA, 20 bp, Artificial Sequence
  Description of Artificial Sequence: Synthetic oligonucleotide
  Target: COL7A1; (-) strand; PAM type: NRG; PAM sequence: GGG
tgggggcagagttgagcctg

SEQ ID NO: 11645 - DNA, 20 bp, Artificial Sequence
  Description of Artificial Sequence: Synthetic oligonucleotide
  Target: COL7A1; (-) strand; PAM type: NRG; PAM sequence: GGG
ttgggggcagagttgagcct

SEQ ID NO: 11646 - DNA, 20 bp, Artificial Sequence
  Description of Artificial Sequence: Synthetic oligonucleotide
  Target: COL7A1; (-) strand; PAM type: NRG; PAM sequence: TGG
cttgggggcagagttgagcc

SEQ ID NO: 11647 - DNA, 20 bp, Artificial Sequence
  Description of Artificial Sequence: Synthetic oligonucleotide
  Target: COL7A1; (-) strand; PAM type: NRG; PAM sequence: GAG
gggaacttgggggcagagtt

SEQ ID NO: 11648 - DNA, 20 bp, Artificial Sequence
  Description of Artificial Sequence: Synthetic oligonucleotide
  Target: COL7A1; (-) strand; PAM type: NRG; PAM sequence: GAG
cttcggggaacttgggggca

SEQ ID NO: 11649 - DNA, 20 bp, Artificial Sequence
  Description of Artificial Sequence: Synthetic oligonucleotide
  Target: COL7A1; (-) strand; PAM type: NRG; PAM sequence: CAG
tgcttcggggaacttggggg

SEQ ID NO: 11650 - DNA, 20 bp, Artificial Sequence
  Description of Artificial Sequence: Synthetic oligonucleotide
  Target: COL7A1; (-) strand; PAM type: NRG; PAM sequence: GGG
gggtgcttcggggaacttgg

SEQ ID NO: 11651 - DNA, 20 bp, Artificial Sequence
  Description of Artificial Sequence: Synthetic oligonucleotide
  Target: COL7A1; (-) strand; PAM type: NRG; PAM sequence: GGG
ggggtgcttcggggaacttg

SEQ ID NO: 11652 - DNA, 20 bp, Artificial Sequence
  Description of Artificial Sequence: Synthetic oligonucleotide
  Target: COL7A1; (-) strand; PAM type: NRG; PAM sequence: GGG
tggggtgcttcggggaactt

SEQ ID NO: 11653 - DNA, 20 bp, Artificial Sequence
  Description of Artificial Sequence: Synthetic oligonucleotide
  Target: COL7A1; (-) strand; PAM type: NRG; PAM sequence: TGG
ttggggtgcttcggggaact

SEQ ID NO: 11654 - DNA, 20 bp, Artificial Sequence
  Description of Artificial Sequence: Synthetic oligonucleotide
  Target: COL7A1; (-) strand; PAM type: NRG; PAM sequence: GGG
gctggcattggggtgcttcg

SEQ ID NO: 11655 - DNA, 20 bp, Artificial Sequence
  Description of Artificial Sequence: Synthetic oligonucleotide
  Target: COL7A1; (-) strand; PAM type: NRG; PAM sequence: GGG
ggctggcattggggtgcttc

SEQ ID NO: 11656 - DNA, 20 bp, Artificial Sequence
  Description of Artificial Sequence: Synthetic oligonucleotide
  Target: COL7A1; (-) strand; PAM type: NRG; PAM sequence: CGG
gggctggcattggggtgctt

SEQ ID NO: 11657 - DNA, 20 bp, Artificial Sequence
  Description of Artificial Sequence: Synthetic oligonucleotide
  Target: COL7A1; (-) strand; PAM type: NRG; PAM sequence: GGG
cctgctgggggctggcattg

SEQ ID NO: 11658 - DNA, 20 bp, Artificial Sequence
  Description of Artificial Sequence: Synthetic oligonucleotide
  Target: COL7A1; (-) strand; PAM type: NRG; PAM sequence: GGG
gcctgctgggggctggcatt

SEQ ID NO: 11659 - DNA, 20 bp, Artificial Sequence
  Description of Artificial Sequence: Synthetic oligonucleotide
  Target: COL7A1; (-) strand; PAM type: NRG; PAM sequence: TGG
tgcctgctgggggctggcat

SEQ ID NO: 11660 - DNA, 20 bp, Artificial Sequence
  Description of Artificial Sequence: Synthetic oligonucleotide
  Target: COL7A1; (-) strand; PAM type: NRG; PAM sequence: TGG
cacccatgcctgctgggggc

SEQ ID NO: 11661 - DNA, 20 bp, Artificial Sequence
  Description of Artificial Sequence: Synthetic oligonucleotide
  Target: COL7A1; (-) strand; PAM type: NRG; PAM sequence: GGG
tggccacccatgcctgctgg

SEQ ID NO: 11662 - DNA, 20 bp, Artificial Sequence
  Description of Artificial Sequence: Synthetic oligonucleotide
  Target: COL7A1; (-) strand; PAM type: NRG; PAM sequence: GGG
atggccacccatgcctgctg

SEQ ID NO: 11663 - DNA, 20 bp, Artificial Sequence
  Description of Artificial Sequence: Synthetic oligonucleotide
  Target: COL7A1; (-) strand; PAM type: NRG; PAM sequence: GGG
gatggccacccatgcctgct

SEQ ID NO: 11664 - DNA, 20 bp, Artificial Sequence
  Description of Artificial Sequence: Synthetic oligonucleotide
  Target: COL7A1; (-) strand; PAM type: NRG; PAM sequence: TGG
ggatggccacccatgcctgc

SEQ ID NO: 11665 - DNA, 20 bp, Artificial Sequence
  Description of Artificial Sequence: Synthetic oligonucleotide
  Target: COL7A1; (-) strand; PAM type: NRG; PAM sequence: TGG
gtccaggtgggaagcatgga

SEQ ID NO: 11666 - DNA, 20 bp, Artificial Sequence
  Description of Artificial Sequence: Synthetic oligonucleotide
  Target: COL7A1; (-) strand; PAM type: NRG; PAM sequence: TGG
ggaggtccaggtgggaagca

SEQ ID NO: 11667 - DNA, 20 bp, Artificial Sequence
  Description of Artificial Sequence: Synthetic oligonucleotide
  Target: COL7A1; (-) strand; PAM type: NRG; PAM sequence: AAG
ggtctggaggtccaggtggg

SEQ ID NO: 11668 - DNA, 20 bp, Artificial Sequence
  Description of Artificial Sequence: Synthetic oligonucleotide
  Target: COL7A1; (-) strand; PAM type: NRG; PAM sequence: GGG
aggggtctggaggtccaggt

SEQ ID NO: 11669 - DNA, 20 bp, Artificial Sequence
  Description of Artificial Sequence: Synthetic oligonucleotide
  Target: COL7A1; (-) strand; PAM type: NRG; PAM sequence: TGG
aaggggtctggaggtccagg

SEQ ID NO: 11670 - DNA, 20 bp, Artificial Sequence
  Description of Artificial Sequence: Synthetic oligonucleotide
  Target: COL7A1; (-) strand; PAM type: NRG; PAM sequence: AGG
cacaaggggtctggaggtcc

SEQ ID NO: 11671 - DNA, 20 bp, Artificial Sequence
  Description of Artificial Sequence: Synthetic oligonucleotide
  Target: COL7A1; (-) strand; PAM type: NRG; PAM sequence: CAG
acacaaggggtctggaggtc

SEQ ID NO: 11672 - DNA, 20 bp, Artificial Sequence
  Description of Artificial Sequence: Synthetic oligonucleotide
  Target: COL7A1; (-) strand; PAM type: NRG; PAM sequence: AGG
ccttcacacaaggggtctgg

SEQ ID NO: 11673 - DNA, 20 bp, Artificial Sequence
  Description of Artificial Sequence: Synthetic oligonucleotide
  Target: COL7A1; (-) strand; PAM type: NRG; PAM sequence: GAG
gccttcacacaaggggtctg

SEQ ID NO: 11674 - DNA, 20 bp, Artificial Sequence
  Description of Artificial Sequence: Synthetic oligonucleotide
  Target: COL7A1; (-) strand; PAM type: NRG; PAM sequence: TGG
gtgccttcacacaaggggtc

SEQ ID NO: 11675 - DNA, 20 bp, Artificial Sequence
  Description of Artificial Sequence: Synthetic oligonucleotide
  Target: COL7A1; (-) strand; PAM type: NRG; PAM sequence: GGG
ccagtgtgccttcacacaag

SEQ ID NO: 11676 - DNA, 20 bp, Artificial Sequence
  Description of Artificial Sequence: Synthetic oligonucleotide
  Target: COL7A1; (-) strand; PAM type: NRG; PAM sequence: GGG
gccagtgtgccttcacacaa

SEQ ID NO: 11677 - DNA, 20 bp, Artificial Sequence
  Description of Artificial Sequence: Synthetic oligonucleotide
  Target: COL7A1; (-) strand; PAM type: NRG; PAM sequence: AGG
tgccagtgtgccttcacaca

SEQ ID NO: 11678 - DNA, 20 bp, Artificial Sequence
  Description of Artificial Sequence: Synthetic oligonucleotide
  Target: COL7A1; (-) strand; PAM type: NRG; PAM sequence: AAG
ctgccagtgtgccttcacac

SEQ ID NO: 11679 - DNA, 20 bp, Artificial Sequence
  Description of Artificial Sequence: Synthetic oligonucleotide
  Target: COL7A1; (-) strand; PAM type: NRG; PAM sequence: CAG
gggtcccctggcgctgctgc

SEQ ID NO: 11680 - DNA, 20 bp, Artificial Sequence
  Description of Artificial Sequence: Synthetic oligonucleotide
  Target: COL7A1; (-) strand; PAM type: NRG; PAM sequence: TGG
agaagggatggagggtcccc

SEQ ID NO: 11681 - DNA, 20 bp, Artificial Sequence
  Description of Artificial Sequence: Synthetic oligonucleotide
  Target: COL7A1; (-) strand; PAM type: NRG; PAM sequence: GGG
ctgggctcagaagggatgga

SEQ ID NO: 11682 - DNA, 20 bp, Artificial Sequence
  Description of Artificial Sequence: Synthetic oligonucleotide
  Target: COL7A1; (-) strand; PAM type: NRG; PAM sequence: AGG
cctgggctcagaagggatgg

SEQ ID NO: 11683 - DNA, 20 bp, Artificial Sequence
  Description of Artificial Sequence: Synthetic oligonucleotide
  Target: COL7A1; (-) strand; PAM type: NRG; PAM sequence: GAG
tcctgggctcagaagggatg

SEQ ID NO: 11684 - DNA, 20 bp, Artificial Sequence
  Description of Artificial Sequence: Synthetic oligonucleotide
  Target: COL7A1; (-) strand; PAM type: NRG; PAM sequence: TGG
tgtcctgggctcagaaggga

SEQ ID NO: 11685 - DNA, 20 bp, Artificial Sequence
  Description of Artificial Sequence: Synthetic oligonucleotide
  Target: COL7A1; (-) strand; PAM type: NRG; PAM sequence: GGG
ctggtgtcctgggctcagaa

SEQ ID NO: 11686 - DNA, 20 bp, Artificial Sequence
  Description of Artificial Sequence: Synthetic oligonucleotide
  Target: COL7A1; (-) strand; PAM type: NRG; PAM sequence: AGG
gctggtgtcctgggctcaga

SEQ ID NO: 11687 - DNA, 20 bp, Artificial Sequence
  Description of Artificial Sequence: Synthetic oligonucleotide
  Target: COL7A1; (-) strand; PAM type: NRG; PAM sequence: AAG
ggctggtgtcctgggctcag

SEQ ID NO: 11688 - DNA, 20 bp, Artificial Sequence
  Description of Artificial Sequence: Synthetic oligonucleotide
  Target: COL7A1; (-) strand; PAM type: NRG; PAM sequence: CAG
tagggctggtgtcctgggct

SEQ ID NO: 11689 - DNA, 20 bp, Artificial Sequence
  Description of Artificial Sequence: Synthetic oligonucleotide
  Target: COL7A1; (-) strand; PAM type: NRG; PAM sequence: GGG
gtgagtagggctggtgtcct

SEQ ID NO: 11690 - DNA, 20 bp, Artificial Sequence
  Description of Artificial Sequence: Synthetic oligonucleotide
  Target: COL7A1; (-) strand; PAM type: NRG; PAM sequence: TGG
ggtgagtagggctggtgtcc

SEQ ID NO: 11691 - DNA, 20 bp, Artificial Sequence
  Description of Artificial Sequence: Synthetic oligonucleotide
  Target: COL7A1; (-) strand; PAM type: NRG; PAM sequence: TGG
ggggagccggtgagtagggc

SEQ ID NO: 11692 - DNA, 20 bp, Artificial Sequence
  Description of Artificial Sequence: Synthetic oligonucleotide
  Target: COL7A1; (-) strand; PAM type: NRG; PAM sequence: GGG
ccgtggggagccggtgagta

SEQ ID NO: 11693 - DNA, 20 bp, Artificial Sequence
  Description of Artificial Sequence: Synthetic oligonucleotide
  Target: COL7A1; (-) strand; PAM type: NRG; PAM sequence: AGG
accgtggggagccggtgagt

SEQ ID NO: 11694 - DNA, 20 bp, Artificial Sequence
  Description of Artificial Sequence: Synthetic oligonucleotide
  Target: COL7A1; (-) strand; PAM type: NRG; PAM sequence: TAG
gaccgtggggagccggtgag

SEQ ID NO: 11695 - DNA, 20 bp, Artificial Sequence
  Description of Artificial Sequence: Synthetic oligonucleotide
  Target: COL7A1; (-) strand; PAM type: NRG; PAM sequence: GAG
ggtgaccgtggggagccggt

SEQ ID NO: 11696 - DNA, 20 bp, Artificial Sequence
  Description of Artificial Sequence: Synthetic oligonucleotide
  Target: COL7A1; (-) strand; PAM type: NRG; PAM sequence: CGG
caagggtgaccgtggggagc

SEQ ID NO: 11697 - DNA, 20 bp, Artificial Sequence
  Description of Artificial Sequence: Synthetic oligonucleotide
  Target: COL7A1; (-) strand; PAM type: NRG; PAM sequence: GAG
gacccaagggtgaccgtggg

SEQ ID NO: 11698 - DNA, 20 bp, Artificial Sequence
  Description of Artificial Sequence: Synthetic oligonucleotide
  Target: COL7A1; (-) strand; PAM type: NRG; PAM sequence: GGG
tggacccaagggtgaccgtg

SEQ ID NO: 11699 - DNA, 20 bp, Artificial Sequence
  Description of Artificial Sequence: Synthetic oligonucleotide
  Target: COL7A1; (-) strand; PAM type: NRG; PAM sequence: GGG
ctggacccaagggtgaccgt

SEQ ID NO: 11700 - DNA, 20 bp, Artificial Sequence
  Description of Artificial Sequence: Synthetic oligonucleotide
  Target: COL7A1; (-) strand; PAM type: NRG; PAM sequence: TGG
tctggacccaagggtgaccg

SEQ ID NO: 11701 - DNA, 20 bp, Artificial Sequence
  Description of Artificial Sequence: Synthetic oligonucleotide
  Target: COL7A1; (-) strand; PAM type: NRG; PAM sequence: GGG
cctggatcatctggacccaa

SEQ ID NO: 11702 - DNA, 20 bp, Artificial Sequence
  Description of Artificial Sequence: Synthetic oligonucleotide
  Target: COL7A1; (-) strand; PAM type: NRG; PAM sequence: AGG
ccctggatcatctggaccca

SEQ ID NO: 11703 - DNA, 20 bp, Artificial Sequence
  Description of Artificial Sequence: Synthetic oligonucleotide
  Target: COL7A1; (-) strand; PAM type: NRG; PAM sequence: AAG
gccctggatcatctggaccc

SEQ ID NO: 11704 - DNA, 20 bp, Artificial Sequence
  Description of Artificial Sequence: Synthetic oligonucleotide
  Target: COL7A1; (-) strand; PAM type: NRG; PAM sequence: TGG
cagggcagccctggatcatc

SEQ ID NO: 11705 - DNA, 20 bp, Artificial Sequence
  Description of Artificial Sequence: Synthetic oligonucleotide
  Target: COL7A1; (-) strand; PAM type: NRG; PAM sequence: TGG
gcctttctgcagggcagccc

SEQ ID NO: 11706 - DNA, 20 bp, Artificial Sequence
  Description of Artificial Sequence: Synthetic oligonucleotide
  Target: COL7A1; (-) strand; PAM type: NRG; PAM sequence: CAG
acccctgcctttctgcaggg

SEQ ID NO: 11707 - DNA, 20 bp, Artificial Sequence
  Description of Artificial Sequence: Synthetic oligonucleotide
  Target: COL7A1; (-) strand; PAM type: NRG; PAM sequence: GGG
ctgacccctgcctttctgca

SEQ ID NO: 11708 - DNA, 20 bp, Artificial Sequence
  Description of Artificial Sequence: Synthetic oligonucleotide
  Target: COL7A1; (-) strand; PAM type: NRG; PAM sequence: AGG
cctgacccctgcctttctgc

SEQ ID NO: 11709 - DNA, 20 bp, Artificial Sequence
  Description of Artificial Sequence: Synthetic oligonucleotide
  Target: COL7A1; (-) strand; PAM type: NRG; PAM sequence: CAG
ccctgacccctgcctttctg

SEQ ID NO: 11710 - DNA, 20 bp, Artificial Sequence
  Description of Artificial Sequence: Synthetic oligonucleotide
  Target: COL7A1; (-) strand; PAM type: NRG; PAM sequence: TGG
aaactgctgcctaccttgag

SEQ ID NO: 11711 - DNA, 20 bp, Artificial Sequence
  Description of Artificial Sequence: Synthetic oligonucleotide
  Target: COL7A1; (-) strand; PAM type: NRG; PAM sequence: GAG
cccaaactgctgcctacctt

SEQ ID NO: 11712 - DNA, 20 bp, Artificial Sequence
  Description of Artificial Sequence: Synthetic oligonucleotide
  Target: COL7A1; (-) strand; PAM type: NRG; PAM sequence: AAG
gagtcctcatggtgcttcca

SEQ ID NO: 11713 - DNA, 20 bp, Artificial Sequence
  Description of Artificial Sequence: Synthetic oligonucleotide
  Target: COL7A1; (-) strand; PAM type: NRG; PAM sequence: TGG
aacattcccatgagtcctca

SEQ ID NO: 11714 - DNA, 20 bp, Artificial Sequence
  Description of Artificial Sequence: Synthetic oligonucleotide
  Target: COL7A1; (-) strand; PAM type: NRG; PAM sequence: GAG
aaggctaccaacattcccat

SEQ ID NO: 11715 - DNA, 20 bp, Artificial Sequence
  Description of Artificial Sequence: Synthetic oligonucleotide
  Target: COL7A1; (-) strand; PAM type: NRG; PAM sequence: AGG
ccctgcacacacgcatctga

SEQ ID NO: 11716 - DNA, 20 bp, Artificial Sequence
  Description of Artificial Sequence: Synthetic oligonucleotide
  Target: COL7A1; (-) strand; PAM type: NRG; PAM sequence: AAG
cccctgcacacacgcatctg

SEQ ID NO: 11717 - DNA, 20 bp, Artificial Sequence
  Description of Artificial Sequence: Synthetic oligonucleotide
  Target: COL7A1; (-) strand; PAM type: NRG; PAM sequence: CAG
cccaaccttaaccctccaac

SEQ ID NO: 11718 - DNA, 20 bp, Artificial Sequence
  Description of Artificial Sequence: Synthetic oligonucleotide
  Target: COL7A1; (-) strand; PAM type: NRG; PAM sequence: CAG
gatggacgaaatgtgagtcc

SEQ ID NO: 11719 - DNA, 20 bp, Artificial Sequence
  Description of Artificial Sequence: Synthetic oligonucleotide
  Target: COL7A1; (-) strand; PAM type: NRG; PAM sequence: GAG
ggagaggatggacgaaatgt

SEQ ID NO: 11720 - DNA, 20 bp, Artificial Sequence
  Description of Artificial Sequence: Synthetic oligonucleotide
  Target: COL7A1; (-) strand; PAM type: NRG; PAM sequence: TGG
cagggagatcctggagagga

SEQ ID NO: 11721 - DNA, 20 bp, Artificial Sequence
  Description of Artificial Sequence: Synthetic oligonucleotide
  Target: COL7A1; (-) strand; PAM type: NRG; PAM sequence: AGG
agaccagggagatcctggag

SEQ ID NO: 11722 - DNA, 20 bp, Artificial Sequence
  Description of Artificial Sequence: Synthetic oligonucleotide
  Target: COL7A1; (-) strand; PAM type: NRG; PAM sequence: GAG
gagaccagggagatcctgga

SEQ ID NO: 11723 - DNA, 20 bp, Artificial Sequence
  Description of Artificial Sequence: Synthetic oligonucleotide
  Target: COL7A1; (-) strand; PAM type: NRG; PAM sequence: GAG
gggagaccagggagatcctg

SEQ ID NO: 11724 - DNA, 20 bp, Artificial Sequence
  Description of Artificial Sequence: Synthetic oligonucleotide
  Target: COL7A1; (-) strand; PAM type: NRG; PAM sequence: TGG
aagggagaccagggagatcc

SEQ ID NO: 11725 - DNA, 20 bp, Artificial Sequence
  Description of Artificial Sequence: Synthetic oligonucleotide
  Target: COL7A1; (-) strand; PAM type: NRG; PAM sequence: GAG
gggtgaaaagggagaccagg

SEQ ID NO: 11726 - DNA, 20 bp, Artificial Sequence
  Description of Artificial Sequence: Synthetic oligonucleotide
  Target: COL7A1; (-) strand; PAM type: NRG; PAM sequence: GGG
gtgggtgaaaagggagacca

SEQ ID NO: 11727 - DNA, 20 bp, Artificial Sequence
  Description of Artificial Sequence: Synthetic oligonucleotide
  Target: COL7A1; (-) strand; PAM type: NRG; PAM sequence: AGG
tgtgggtgaaaagggagacc

SEQ ID NO: 11728 - DNA, 20 bp, Artificial Sequence
  Description of Artificial Sequence: Synthetic oligonucleotide
  Target: COL7A1; (-) strand; PAM type: NRG; PAM sequence: CAG
ctgtgggtgaaaagggagac

SEQ ID NO: 11729 - DNA, 20 bp, Artificial Sequence
  Description of Artificial Sequence: Synthetic oligonucleotide
  Target: COL7A1; (-) strand; PAM type: NRG; PAM sequence: GAG
ggggcctgtgggtgaaaagg

SEQ ID NO: 11730 - DNA, 20 bp, Artificial Sequence
  Description of Artificial Sequence: Synthetic oligonucleotide
  Target: COL7A1; (-) strand; PAM type: NRG; PAM sequence: GGG
cgggggcctgtgggtgaaaa

SEQ ID NO: 11731 - DNA, 20 bp, Artificial Sequence
  Description of Artificial Sequence: Synthetic oligonucleotide
  Target: COL7A1; (-) strand; PAM type: NRG; PAM sequence: AGG
tcgggggcctgtgggtgaaa

SEQ ID NO: 11732 - DNA, 20 bp, Artificial Sequence
  Description of Artificial Sequence: Synthetic oligonucleotide
  Target: COL7A1; (-) strand; PAM type: NRG; PAM sequence: AAG
ttcgggggcctgtgggtgaa

SEQ ID NO: 11733 - DNA, 20 bp, Artificial Sequence
  Description of Artificial Sequence: Synthetic oligonucleotide
  Target: COL7A1; (-) strand; PAM type: NRG; PAM sequence: GGG
cctggagttcgggggcctgt

SEQ ID NO: 11734 - DNA, 20 bp, Artificial Sequence
  Description of Artificial Sequence: Synthetic oligonucleotide
  Target: COL7A1; (-) strand; PAM type: NRG; PAM sequence: TGG
acctggagttcgggggcctg

SEQ ID NO: 11735 - DNA, 20 bp, Artificial Sequence
  Description of Artificial Sequence: Synthetic oligonucleotide
  Target: COL7A1; (-) strand; PAM type: NRG; PAM sequence: GGG
agggggcacctggagttcgg

SEQ ID NO: 11736 - DNA, 20 bp, Artificial Sequence
  Description of Artificial Sequence: Synthetic oligonucleotide
  Target: COL7A1; (-) strand; PAM type: NRG; PAM sequence: GGG
tagggggcacctggagttcg

SEQ ID NO: 11737 - DNA, 20 bp, Artificial Sequence
  Description of Artificial Sequence: Synthetic oligonucleotide
  Target: COL7A1; (-) strand; PAM type: NRG; PAM sequence: GGG
ttagggggcacctggagttc

SEQ ID NO: 11738 - DNA, 20 bp, Artificial Sequence
  Description of Artificial Sequence: Synthetic oligonucleotide
  Target: COL7A1; (-) strand; PAM type: NRG; PAM sequence: CGG
cttagggggcacctggagtt

SEQ ID NO: 11739 - DNA, 20 bp, Artificial Sequence
  Description of Artificial Sequence: Synthetic oligonucleotide
  Target: COL7A1; (-) strand; PAM type: NRG; PAM sequence: GAG
ctcttcttagggggcacctg

SEQ ID NO: 11740 - DNA, 20 bp, Artificial Sequence
  Description of Artificial Sequence: Synthetic oligonucleotide
  Target: COL7A1; (-) strand; PAM type: NRG; PAM sequence: TGG
tgctcttcttagggggcacc

SEQ ID NO: 11741 - DNA, 20 bp, Artificial Sequence
  Description of Artificial Sequence: Synthetic oligonucleotide
  Target: COL7A1; (-) strand; PAM type: NRG; PAM sequence: GGG
ggccagctgctcttcttagg

SEQ ID NO: 11742 - DNA, 20 bp, Artificial Sequence
  Description of Artificial Sequence: Synthetic oligonucleotide
  Target: COL7A1; (-) strand; PAM type: NRG; PAM sequence: GGG
aggccagctgctcttcttag

SEQ ID NO: 11743 - DNA, 20 bp, Artificial Sequence
  Description of Artificial Sequence: Synthetic oligonucleotide
  Target: COL7A1; (-) strand; PAM type: NRG; PAM sequence: GGG
caggccagctgctcttctta

SEQ ID NO: 11744 - DNA, 20 bp, Artificial Sequence
  Description of Artificial Sequence: Synthetic oligonucleotide
  Target: COL7A1; (-) strand; PAM type: NRG; PAM sequence: AGG
tcaggccagctgctcttctt

SEQ ID NO: 11745 - DNA, 20 bp, Artificial Sequence
  Description of Artificial Sequence: Synthetic oligonucleotide
  Target: COL7A1; (-) strand; PAM type: NRG; PAM sequence: TAG
ctcaggccagctgctcttct

SEQ ID NO: 11746 - DNA, 20 bp, Artificial Sequence
  Description of Artificial Sequence: Synthetic oligonucleotide
  Target: COL7A1; (-) strand; PAM type: NRG; PAM sequence: CAG
tgggagggtctgtctcaggc

SEQ ID NO: 11747 - DNA, 20 bp, Artificial Sequence
  Description of Artificial Sequence: Synthetic oligonucleotide
  Target: COL7A1; (-) strand; PAM type: NRG; PAM sequence: AGG
atattgggagggtctgtctc

SEQ ID NO: 11748 - DNA, 20 bp, Artificial Sequence
  Description of Artificial Sequence: Synthetic oligonucleotide
  Target: COL7A1; (-) strand; PAM type: NRG; PAM sequence: CAG
aatattgggagggtctgtct

SEQ ID NO: 11749 - DNA, 20 bp, Artificial Sequence
  Description of Artificial Sequence: Synthetic oligonucleotide
  Target: COL7A1; (-) strand; PAM type: NRG; PAM sequence: GGG
gcacctgcaaaatattggga

SEQ ID NO: 11750 - DNA, 20 bp, Artificial Sequence
  Description of Artificial Sequence: Synthetic oligonucleotide
  Target: COL7A1; (-) strand; PAM type: NRG; PAM sequence: AGG
ggcacctgcaaaatattggg

SEQ ID NO: 11751 - DNA, 20 bp, Artificial Sequence
  Description of Artificial Sequence: Synthetic oligonucleotide
  Target: COL7A1; (-) strand; PAM type: NRG; PAM sequence: GAG
gggcacctgcaaaatattgg

SEQ ID NO: 11752 - DNA, 20 bp, Artificial Sequence
  Description of Artificial Sequence: Synthetic oligonucleotide
  Target: COL7A1; (-) strand; PAM type: NRG; PAM sequence: GGG
aggggcacctgcaaaatatt

SEQ ID NO: 11753 - DNA, 20 bp, Artificial Sequence
  Description of Artificial Sequence: Synthetic oligonucleotide
  Target: COL7A1; (-) strand; PAM type: NRG; PAM sequence: TGG
taggggcacctgcaaaatat

SEQ ID NO: 11754 - DNA, 20 bp, Artificial Sequence
  Description of Artificial Sequence: Synthetic oligonucleotide
  Target: COL7A1; (-) strand; PAM type: NRG; PAM sequence: GGG
ggcagtgtagcgggtcatag

SEQ ID NO: 11755 - DNA, 20 bp, Artificial Sequence
  Description of Artificial Sequence: Synthetic oligonucleotide
  Target: COL7A1; (-) strand; PAM type: NRG; PAM sequence: GGG
gggcagtgtagcgggtcata

SEQ ID NO: 11756 - DNA, 20 bp, Artificial Sequence
  Description of Artificial Sequence: Synthetic oligonucleotide
  Target: COL7A1; (-) strand; PAM type: NRG; PAM sequence: AGG
ggggcagtgtagcgggtcat

SEQ ID NO: 11757 - DNA, 20 bp, Artificial Sequence
  Description of Artificial Sequence: Synthetic oligonucleotide
  Target: COL7A1; (-) strand; PAM type: NRG; PAM sequence: TAG
tggggcagtgtagcgggtca

SEQ ID NO: 11758 - DNA, 20 bp, Artificial Sequence
  Description of Artificial Sequence: Synthetic oligonucleotide
  Target: COL7A1; (-) strand; PAM type: NRG; PAM sequence: GGG
ggaacctggggcagtgtagc

SEQ ID NO: 11759 - DNA, 20 bp, Artificial Sequence
  Description of Artificial Sequence: Synthetic oligonucleotide
  Target: COL7A1; (-) strand; PAM type: NRG; PAM sequence: CGG
gggaacctggggcagtgtag

SEQ ID NO: 11760 - DNA, 20 bp, Artificial Sequence
  Description of Artificial Sequence: Synthetic oligonucleotide
  Target: COL7A1; (-) strand; PAM type: NRG; PAM sequence: TAG
atggggaacctggggcagtg

SEQ ID NO: 11761 - DNA, 20 bp, Artificial Sequence
  Description of Artificial Sequence: Synthetic oligonucleotide
  Target: COL7A1; (-) strand; PAM type: NRG; PAM sequence: CAG
gagtaatggggaacctgggg

SEQ ID NO: 11762 - DNA, 20 bp, Artificial Sequence
  Description of Artificial Sequence: Synthetic oligonucleotide
  Target: COL7A1; (-) strand; PAM type: NRG; PAM sequence: GGG
ttggagtaatggggaacctg

SEQ ID NO: 11763 - DNA, 20 bp, Artificial Sequence
  Description of Artificial Sequence: Synthetic oligonucleotide
  Target: COL7A1; (-) strand; PAM type: NRG; PAM sequence: GGG
tttggagtaatggggaacct

SEQ ID NO: 11764 - DNA, 20 bp, Artificial Sequence
  Description of Artificial Sequence: Synthetic oligonucleotide
  Target: COL7A1; (-) strand; PAM type: NRG; PAM sequence: TGG
ttttggagtaatggggaacc

SEQ ID NO: 11765 - DNA, 20 bp, Artificial Sequence
  Description of Artificial Sequence: Synthetic oligonucleotide
  Target: COL7A1; (-) strand; PAM type: NRG; PAM sequence: GGG
atgtggattttggagtaatg

SEQ ID NO: 11766 - DNA, 20 bp, Artificial Sequence
  Description of Artificial Sequence: Synthetic oligonucleotide
  Target: COL7A1; (-) strand; PAM type: NRG; PAM sequence: GGG
gatgtggattttggagtaat

SEQ ID NO: 11767 - DNA, 20 bp, Artificial Sequence
  Description of Artificial Sequence: Synthetic oligonucleotide
  Target: COL7A1; (-) strand; PAM type: NRG; PAM sequence: TGG
tgatgtggattttggagtaa

SEQ ID NO: 11768 - DNA, 20 bp, Artificial Sequence
  Description of Artificial Sequence: Synthetic oligonucleotide
  Target: COL7A1; (-) strand; PAM type: NRG; PAM sequence: GAG
aacctctgatgtggattttg

SEQ ID NO: 11769 - DNA, 20 bp, Artificial Sequence
  Description of Artificial Sequence: Synthetic oligonucleotide
  Target: COL7A1; (-) strand; PAM type: NRG; PAM sequence: TGG
ggaacctctgatgtggattt

SEQ ID NO: 11770 - DNA, 20 bp, Artificial Sequence
  Description of Artificial Sequence: Synthetic oligonucleotide
  Target: COL7A1; (-) strand; PAM type: NRG; PAM sequence: TGG
ggtgatgggaacctctgatg

SEQ ID NO: 11771 - DNA, 20 bp, Artificial Sequence
  Description of Artificial Sequence: Synthetic oligonucleotide
  Target: COL7A1; (-) strand; PAM type: NRG; PAM sequence: GGG
gcagggaggcatggggtgat

SEQ ID NO: 11772 - DNA, 20 bp, Artificial Sequence
  Description of Artificial Sequence: Synthetic oligonucleotide
  Target: COL7A1; (-) strand; PAM type: NRG; PAM sequence: TGG
tgcagggaggcatggggtga

SEQ ID NO: 11773 - DNA, 20 bp, Artificial Sequence
  Description of Artificial Sequence: Synthetic oligonucleotide
  Target: COL7A1; (-) strand; PAM type: NRG; PAM sequence: GGG
agtccctgcagggaggcatg

SEQ ID NO: 11774 - DNA, 20 bp, Artificial Sequence
  Description of Artificial Sequence: Synthetic oligonucleotide
  Target: COL7A1; (-) strand; PAM type: NRG; PAM sequence: GGG
gagtccctgcagggaggcat

SEQ ID NO: 11775 - DNA, 20 bp, Artificial Sequence
  Description of Artificial Sequence: Synthetic oligonucleotide
  Target: COL7A1; (-) strand; PAM type: NRG; PAM sequence: TGG
ggagtccctgcagggaggca

SEQ ID NO: 11776 - DNA, 20 bp, Artificial Sequence
  Description of Artificial Sequence: Synthetic oligonucleotide
  Target: COL7A1; (-) strand; PAM type: NRG; PAM sequence: AGG
tgatgggagtccctgcaggg

SEQ ID NO: 11777 - DNA, 20 bp, Artificial Sequence
  Description of Artificial Sequence: Synthetic oligonucleotide
  Target: COL7A1; (-) strand; PAM type: NRG; PAM sequence: GAG
gtgatgggagtccctgcagg

SEQ ID NO: 11778 - DNA, 20 bp, Artificial Sequence
  Description of Artificial Sequence: Synthetic oligonucleotide
  Target: COL7A1; (-) strand; PAM type: NRG; PAM sequence: GGG
gggtgatgggagtccctgca

SEQ ID NO: 11779 - DNA, 20 bp, Artificial Sequence
  Description of Artificial Sequence: Synthetic oligonucleotide
  Target: COL7A1; (-) strand; PAM type: NRG; PAM sequence: AGG
ggggtgatgggagtccctgc

SEQ ID NO: 11780 - DNA, 20 bp, Artificial Sequence
  Description of Artificial Sequence: Synthetic oligonucleotide
  Target: COL7A1; (-) strand; PAM type: NRG; PAM sequence: CAG
aggggtgatgggagtccctg

SEQ ID NO: 11781 - DNA, 20 bp, Artificial Sequence
  Description of Artificial Sequence: Synthetic oligonucleotide
  Target: COL7A1; (-) strand; PAM type: NRG; PAM sequence: GAG
aggggggtaaggggtgatgg

SEQ ID NO: 11782 - DNA, 20 bp, Artificial Sequence
  Description of Artificial Sequence: Synthetic oligonucleotide
  Target: COL7A1; (-) strand; PAM type: NRG; PAM sequence: GGG
tgaggggggtaaggggtgat

SEQ ID NO: 11783 - DNA, 20 bp, Artificial Sequence
  Description of Artificial Sequence: Synthetic oligonucleotide
  Target: COL7A1; (-) strand; PAM type: NRG; PAM sequence: TGG
ctgaggggggtaaggggtga

SEQ ID NO: 11784 - DNA, 20 bp, Artificial Sequence
  Description of Artificial Sequence: Synthetic oligonucleotide
  Target: COL7A1; (-) strand; PAM type: NRG; PAM sequence: GGG
gaaaggctgaggggggtaag

SEQ ID NO: 11785 - DNA, 20 bp, Artificial Sequence
  Description of Artificial Sequence: Synthetic oligonucleotide
  Target: COL7A1; (-) strand; PAM type: NRG; PAM sequence: GGG
ggaaaggctgaggggggtaa

SEQ ID NO: 11786 - DNA, 20 bp, Artificial Sequence
  Description of Artificial Sequence: Synthetic oligonucleotide
  Target: COL7A1; (-) strand; PAM type: NRG; PAM sequence: AGG
aggaaaggctgaggggggta

SEQ ID NO: 11787 - DNA, 20 bp, Artificial Sequence
  Description of Artificial Sequence: Synthetic oligonucleotide
  Target: COL7A1; (-) strand; PAM type: NRG; PAM sequence: AAG
taggaaaggctgaggggggt

SEQ ID NO: 11788 - DNA, 20 bp, Artificial Sequence
  Description of Artificial Sequence: Synthetic oligonucleotide
  Target: COL7A1; (-) strand; PAM type: NRG; PAM sequence: GGG
gtgataggaaaggctgaggg

SEQ ID NO: 11789 - DNA, 20 bp, Artificial Sequence
  Description of Artificial Sequence: Synthetic oligonucleotide
  Target: COL7A1; (-) strand; PAM type: NRG; PAM sequence: GGG
ggtgataggaaaggctgagg

SEQ ID NO: 11790 - DNA, 20 bp, Artificial Sequence
  Description of Artificial Sequence: Synthetic oligonucleotide
  Target: COL7A1; (-) strand; PAM type: NRG; PAM sequence: GGG
aggtgataggaaaggctgag

SEQ ID NO: 11791 - DNA, 20 bp, Artificial Sequence
  Description of Artificial Sequence: Synthetic oligonucleotide
  Target: COL7A1; (-) strand; PAM type: NRG; PAM sequence: GGG
aaggtgataggaaaggctga

SEQ ID NO: 11792 - DNA, 20 bp, Artificial Sequence
  Description of Artificial Sequence: Synthetic oligonucleotide
  Target: COL7A1; (-) strand; PAM type: NRG; PAM sequence: AGG
gaaggtgataggaaaggctg

SEQ ID NO: 11793 - DNA, 20 bp, Artificial Sequence
  Description of Artificial Sequence: Synthetic oligonucleotide
  Target: COL7A1; (-) strand; PAM type: NRG; PAM sequence: GAG
tgaaggtgataggaaaggct

SEQ ID NO: 11794 - DNA, 20 bp, Artificial Sequence
  Description of Artificial Sequence: Synthetic oligonucleotide
  Target: COL7A1; (-) strand; PAM type: NRG; PAM sequence: AGG
gggcatgaaggtgataggaa

SEQ ID NO: 11795 - DNA, 20 bp, Artificial Sequence
  Description of Artificial Sequence: Synthetic oligonucleotide
  Target: COL7A1; (-) strand; PAM type: NRG; PAM sequence: AAG
tgggcatgaaggtgatagga

SEQ ID NO: 11796 - DNA, 20 bp, Artificial Sequence
  Description of Artificial Sequence: Synthetic oligonucleotide
  Target: COL7A1; (-) strand; PAM type: NRG; PAM sequence: AGG
gaggtgggcatgaaggtgat

SEQ ID NO: 11797 - DNA, 20 bp, Artificial Sequence
  Description of Artificial Sequence: Synthetic oligonucleotide
  Target: COL7A1; (-) strand; PAM type: NRG; PAM sequence: TAG
ggaggtgggcatgaaggtga

SEQ ID NO: 11798 - DNA, 20 bp, Artificial Sequence
  Description of Artificial Sequence: Synthetic oligonucleotide
  Target: COL7A1; (-) strand; PAM type: NRG; PAM sequence: AGG
gtgatgggaggtgggcatga

SEQ ID NO: 11799 - DNA, 20 bp, Artificial Sequence
  Description of Artificial Sequence: Synthetic oligonucleotide
  Target: COL7A1; (-) strand; PAM type: NRG; PAM sequence: AAG
ggtgatgggaggtgggcatg

SEQ ID NO: 11800 - DNA, 20 bp, Artificial Sequence
  Description of Artificial Sequence: Synthetic oligonucleotide
  Target: COL7A1; (-) strand; PAM type: NRG; PAM sequence: GGG
taacaggggtgatgggaggt

SEQ ID NO: 11801 - DNA, 20 bp, Artificial Sequence
  Description of Artificial Sequence: Synthetic oligonucleotide
  Target: COL7A1; (-) strand; PAM type: NRG; PAM sequence: TGG
gtaacaggggtgatgggagg

SEQ ID NO: 11802 - DNA, 20 bp, Artificial Sequence
  Description of Artificial Sequence: Synthetic oligonucleotide
  Target: COL7A1; (-) strand; PAM type: NRG; PAM sequence: AGG
gaagtaacaggggtgatggg

SEQ ID NO: 11803 - DNA, 20 bp, Artificial Sequence
  Description of Artificial Sequence: Synthetic oligonucleotide
  Target: COL7A1; (-) strand; PAM type: NRG; PAM sequence: GAG
agaagtaacaggggtgatgg

SEQ ID NO: 11804 - DNA, 20 bp, Artificial Sequence
  Description of Artificial Sequence: Synthetic oligonucleotide
  Target: COL7A1; (-) strand; PAM type: NRG; PAM sequence: GGG
agagaagtaacaggggtgat

SEQ ID NO: 11805 - DNA, 20 bp, Artificial Sequence
  Description of Artificial Sequence: Synthetic oligonucleotide
  Target: COL7A1; (-) strand; PAM type: NRG; PAM sequence: TGG
gagagaagtaacaggggtga

SEQ ID NO: 11806 - DNA, 20 bp, Artificial Sequence
  Description of Artificial Sequence: Synthetic oligonucleotide
  Target: COL7A1; (-) strand; PAM type: NRG; PAM sequence: GGG
ttggcagagagaagtaacag

SEQ ID NO: 11807 - DNA, 20 bp, Artificial Sequence
  Description of Artificial Sequence: Synthetic oligonucleotide
  Target: COL7A1; (-) strand; PAM type: NRG; PAM sequence: GGG
cttggcagagagaagtaaca

SEQ ID NO: 11808 - DNA, 20 bp, Artificial Sequence
  Description of Artificial Sequence: Synthetic oligonucleotide
  Target: COL7A1; (-) strand; PAM type: NRG; PAM sequence: AGG
tcttggcagagagaagtaac

SEQ ID NO: 11809 - DNA, 20 bp, Artificial Sequence
  Description of Artificial Sequence: Synthetic oligonucleotide
  Target: COL7A1; (-) strand; PAM type: NRG; PAM sequence: CAG
gtcttggcagagagaagtaa

SEQ ID NO: 11810 - DNA, 20 bp, Artificial Sequence
  Description of Artificial Sequence: Synthetic oligonucleotide
  Target: COL7A1; (-) strand; PAM type: NRG; PAM sequence: AAG
gggtgagtcttggcagagag

SEQ ID NO: 11811 - DNA, 20 bp, Artificial Sequence
  Description of Artificial Sequence: Synthetic oligonucleotide
  Target: COL7A1; (-) strand; PAM type: NRG; PAM sequence: GAG
ttcgggtgagtcttggcaga

SEQ ID NO: 11812 - DNA, 20 bp, Artificial Sequence
  Description of Artificial Sequence: Synthetic oligonucleotide
  Target: COL7A1; (-) strand; PAM type: NRG; PAM sequence: GAG
ccttcgggtgagtcttggca

SEQ ID NO: 11813 - DNA, 20 bp, Artificial Sequence
  Description of Artificial Sequence: Synthetic oligonucleotide
  Target: COL7A1; (-) strand; PAM type: NRG; PAM sequence: CAG
ggccttcgggtgagtcttgg

SEQ ID NO: 11814 - DNA, 20 bp, Artificial Sequence
  Description of Artificial Sequence: Synthetic oligonucleotide
  Target: COL7A1; (-) strand; PAM type: NRG; PAM sequence: TGG
cgtggccttcgggtgagtct

SEQ ID NO: 11815 - DNA, 20 bp, Artificial Sequence
  Description of Artificial Sequence: Synthetic oligonucleotide
  Target: COL7A1; (-) strand; PAM type: NRG; PAM sequence: GAG
ggcgagcgtggccttcgggt

SEQ ID NO: 11816 - DNA, 20 bp, Artificial Sequence
  Description of Artificial Sequence: Synthetic oligonucleotide
  Target: COL7A1; (-) strand; PAM type: NRG; PAM sequence: GGG
agcaggcgagcgtggccttc

SEQ ID NO: 11817 - DNA, 20 bp, Artificial Sequence
  Description of Artificial Sequence: Synthetic oligonucleotide
  Target: COL7A1; (-) strand; PAM type: NRG; PAM sequence: CGG
aagcaggcgagcgtggcctt

SEQ ID NO: 11818 - DNA, 20 bp, Artificial Sequence
  Description of Artificial Sequence: Synthetic oligonucleotide
  Target: COL7A1; (-) strand; PAM type: NRG; PAM sequence: TGG
cctggaaaagcaggcgagcg

SEQ ID NO: 11819 - DNA, 20 bp, Artificial Sequence
  Description of Artificial Sequence: Synthetic oligonucleotide
  Target: COL7A1; (-) strand; PAM type: NRG; PAM sequence: GAG
gtttgcctggaaaagcaggc

SEQ ID NO: 11820 - DNA, 20 bp, Artificial Sequence
  Description of Artificial Sequence: Synthetic oligonucleotide
  Target: COL7A1; (-) strand; PAM type: NRG; PAM sequence: AGG
ccgggtttgcctggaaaagc

SEQ ID NO: 11821 - DNA, 20 bp, Artificial Sequence
  Description of Artificial Sequence: Synthetic oligonucleotide
  Target: COL7A1; (-) strand; PAM type: NRG; PAM sequence: CAG
cccgggtttgcctggaaaag

SEQ ID NO: 11822 - DNA, 20 bp, Artificial Sequence
  Description of Artificial Sequence: Synthetic oligonucleotide
  Target: COL7A1; (-) strand; PAM type: NRG; PAM sequence: AAG
tgacccgggtttgcctggaa

SEQ ID NO: 11823 - DNA, 20 bp, Artificial Sequence
  Description of Artificial Sequence: Synthetic oligonucleotide
  Target: COL7A1; (-) strand; PAM type: NRG; PAM sequence: TGG
cagggtgacccgggtttgcc

SEQ ID NO: 11824 - DNA, 20 bp, Artificial Sequence
  Description of Artificial Sequence: Synthetic oligonucleotide
  Target: COL7A1; (-) strand; PAM type: NRG; PAM sequence: GGG
ctctatcaccagggtgaccc

SEQ ID NO: 11825 - DNA, 20 bp, Artificial Sequence
  Description of Artificial Sequence: Synthetic oligonucleotide
  Target: COL7A1; (-) strand; PAM type: NRG; PAM sequence: CGG
tctctatcaccagggtgacc

SEQ ID NO: 11826 - DNA, 20 bp, Artificial Sequence
  Description of Artificial Sequence: Synthetic oligonucleotide
  Target: COL7A1; (-) strand; PAM type: NRG; PAM sequence: GGG
gacttttctctctatcacca

SEQ ID NO: 11827 - DNA, 20 bp, Artificial Sequence
  Description of Artificial Sequence: Synthetic oligonucleotide
  Target: COL7A1; (-) strand; PAM type: NRG; PAM sequence: AGG
tgacttttctctctatcacc

SEQ ID NO: 11828 - DNA, 20 bp, Artificial Sequence
  Description of Artificial Sequence: Synthetic oligonucleotide
  Target: COL7A1; (-) strand; PAM type: NRG; PAM sequence: CAG
atgacttttctctctatcac

SEQ ID NO: 11829 - DNA, 20 bp, Artificial Sequence
  Description of Artificial Sequence: Synthetic oligonucleotide
  Target: COL7A1; (-) strand; PAM type: NRG; PAM sequence: CAG
tagatcctgactgccctgtg

SEQ ID NO: 11830 - DNA, 20 bp, Artificial Sequence
  Description of Artificial Sequence: Synthetic oligonucleotide
  Target: COL7A1; (-) strand; PAM type: NRG; PAM sequence: TAG
tcccctctccctgagtgagt

SEQ ID NO: 11831 - DNA, 20 bp, Artificial Sequence
  Description of Artificial Sequence: Synthetic oligonucleotide
  Target: COL7A1; (-) strand; PAM type: NRG; PAM sequence: GAG
tctgtcccctctccctgagt

SEQ ID NO: 11832 - DNA, 20 bp, Artificial Sequence
  Description of Artificial Sequence: Synthetic oligonucleotide
  Target: COL7A1; (-) strand; PAM type: NRG; PAM sequence: GAG
cttctctgtcccctctccct

SEQ ID NO: 11833 - DNA, 20 bp, Artificial Sequence
  Description of Artificial Sequence: Synthetic oligonucleotide
  Target: COL7A1; (-) strand; PAM type: NRG; PAM sequence: CAG
cctcctgtccagctgctgct

SEQ ID NO: 11834 - DNA, 20 bp, Artificial Sequence
  Description of Artificial Sequence: Synthetic oligonucleotide
  Target: COL7A1; (-) strand; PAM type: NRG; PAM sequence: CAG
tccactccctgcctcctgtc

SEQ ID NO: 11835 - DNA, 20 bp, Artificial Sequence
  Description of Artificial Sequence: Synthetic oligonucleotide
  Target: COL7A1; (-) strand; PAM type: NRG; PAM sequence: CAG
ccagtaggctggtgctccac

SEQ ID NO: 11836 - DNA, 20 bp, Artificial Sequence
  Description of Artificial Sequence: Synthetic oligonucleotide
  Target: COL7A1; (-) strand; PAM type: NRG; PAM sequence: TGG
gaactaggatcccagtaggc

SEQ ID NO: 11837 - DNA, 20 bp, Artificial Sequence
  Description of Artificial Sequence: Synthetic oligonucleotide
  Target: COL7A1; (-) strand; PAM type: NRG; PAM sequence: AGG
ccttgaactaggatcccagt

SEQ ID NO: 11838 - DNA, 20 bp, Artificial Sequence
  Description of Artificial Sequence: Synthetic oligonucleotide
  Target: COL7A1; (-) strand; PAM type: NRG; PAM sequence: TAG
cccttgaactaggatcccag

SEQ ID NO: 11839 - DNA, 20 bp, Artificial Sequence
  Description of Artificial Sequence: Synthetic oligonucleotide
  Target: COL7A1; (-) strand; PAM type: NRG; PAM sequence: CAG
ttacccttgaactaggatcc

SEQ ID NO: 11840 - DNA, 20 bp, Artificial Sequence
  Description of Artificial Sequence: Synthetic oligonucleotide
  Target: COL7A1; (-) strand; PAM type: NRG; PAM sequence: AGG
tgatcctttacccttgaact

SEQ ID NO: 11841 - DNA, 20 bp, Artificial Sequence
  Description of Artificial Sequence: Synthetic oligonucleotide
  Target: COL7A1; (-) strand; PAM type: NRG; PAM sequence: TAG
ctgatcctttacccttgaac

SEQ ID NO: 11842 - DNA, 20 bp, Artificial Sequence
  Description of Artificial Sequence: Synthetic oligonucleotide
  Target: COL7A1; (-) strand; PAM type: NRG; PAM sequence: TGG
ggtgagactccttcccactg

SEQ ID NO: 11843 - DNA, 20 bp, Artificial Sequence
  Description of Artificial Sequence: Synthetic oligonucleotide
  Target: COL7A1; (-) strand; PAM type: NRG; PAM sequence: GAG
ggtgacgagggtcctccggt

SEQ ID NO: 11844 - DNA, 20 bp, Artificial Sequence
  Description of Artificial Sequence: Synthetic oligonucleotide
  Target: COL7A1; (-) strand; PAM type: NRG; PAM sequence: CGG
gaaaggtgacgagggtcctc

SEQ ID NO: 11845 - DNA, 20 bp, Artificial Sequence
  Description of Artificial Sequence: Synthetic oligonucleotide
  Target: COL7A1; (-) strand; PAM type: NRG; PAM sequence: GGG
gttggagagaaaggtgacga

SEQ ID NO: 11846 - DNA, 20 bp, Artificial Sequence
  Description of Artificial Sequence: Synthetic oligonucleotide
  Target: COL7A1; (-) strand; PAM type: NRG; PAM sequence: AGG
agttggagagaaaggtgacg

SEQ ID NO: 11847 - DNA, 20 bp, Artificial Sequence
  Description of Artificial Sequence: Synthetic oligonucleotide
  Target: COL7A1; (-) strand; PAM type: NRG; PAM sequence: GAG
aagttggagagaaaggtgac

SEQ ID NO: 11848 - DNA, 20 bp, Artificial Sequence
  Description of Artificial Sequence: Synthetic oligonucleotide
  Target: COL7A1; (-) strand; PAM type: NRG; PAM sequence: AGG
cagggtgaagttggagagaa

SEQ ID NO: 11849 - DNA, 20 bp, Artificial Sequence
  Description of Artificial Sequence: Synthetic oligonucleotide
  Target: COL7A1; (-) strand; PAM type: NRG; PAM sequence: AAG
acagggtgaagttggagaga

SEQ ID NO: 11850 - DNA, 20 bp, Artificial Sequence
  Description of Artificial Sequence: Synthetic oligonucleotide
  Target: COL7A1; (-) strand; PAM type: NRG; PAM sequence: GAG
tttcacagggtgaagttgga

SEQ ID NO: 11851 - DNA, 20 bp, Artificial Sequence
  Description of Artificial Sequence: Synthetic oligonucleotide
  Target: COL7A1; (-) strand; PAM type: NRG; PAM sequence: GAG
tgtttcacagggtgaagttg

SEQ ID NO: 11852 - DNA, 20 bp, Artificial Sequence
  Description of Artificial Sequence: Synthetic oligonucleotide
  Target: COL7A1; (-) strand; PAM type: NRG; PAM sequence: TGG
catgtttcacagggtgaagt

SEQ ID NO: 11853 - DNA, 20 bp, Artificial Sequence
  Description of Artificial Sequence: Synthetic oligonucleotide
  Target: COL7A1; (-) strand; PAM type: NRG; PAM sequence: AAG
ctctcatgtttcacagggtg

SEQ ID NO: 11854 - DNA, 20 bp, Artificial Sequence
  Description of Artificial Sequence: Synthetic oligonucleotide
  Target: COL7A1; (-) strand; PAM type: NRG; PAM sequence: GGG
gctgactctcatgtttcaca

SEQ ID NO: 11855 - DNA, 20 bp, Artificial Sequence
  Description of Artificial Sequence: Synthetic oligonucleotide
  Target: COL7A1; (-) strand; PAM type: NRG; PAM sequence: AGG
ggctgactctcatgtttcac

SEQ ID NO: 11856 - DNA, 20 bp, Artificial Sequence
  Description of Artificial Sequence: Synthetic oligonucleotide
  Target: COL7A1; (-) strand; PAM type: NRG; PAM sequence: CAG
gggctgactctcatgtttca

SEQ ID NO: 11857 - DNA, 20 bp, Artificial Sequence
  Description of Artificial Sequence: Synthetic oligonucleotide
  Target: COL7A1; (-) strand; PAM type: NRG; PAM sequence: GGG
catgggggttcttggaacca

SEQ ID NO: 11858 - DNA, 20 bp, Artificial Sequence
  Description of Artificial Sequence: Synthetic oligonucleotide
  Target: COL7A1; (-) strand; PAM type: NRG; PAM sequence: AGG
tcatgggggttcttggaacc

SEQ ID NO: 11859 - DNA, 20 bp, Artificial Sequence
  Description of Artificial Sequence: Synthetic oligonucleotide
  Target: COL7A1; (-) strand; PAM type: NRG; PAM sequence: CAG
atcatgggggttcttggaac

SEQ ID NO: 11860 - DNA, 20 bp, Artificial Sequence
  Description of Artificial Sequence: Synthetic oligonucleotide
  Target: COL7A1; (-) strand; PAM type: NRG; PAM sequence: TGG
gccagcatcatgggggttct

SEQ ID NO: 11861 - DNA, 20 bp, Artificial Sequence
  Description of Artificial Sequence: Synthetic oligonucleotide
  Target: COL7A1; (-) strand; PAM type: NRG; PAM sequence: GGG
ggctgttgccagcatcatgg

SEQ ID NO: 11862 - DNA, 20 bp, Artificial Sequence
  Description of Artificial Sequence: Synthetic oligonucleotide
  Target: COL7A1; (-) strand; PAM type: NRG; PAM sequence: GGG
gggctgttgccagcatcatg

SEQ ID NO: 11863 - DNA, 20 bp, Artificial Sequence
  Description of Artificial Sequence: Synthetic oligonucleotide
  Target: COL7A1; (-) strand; PAM type: NRG; PAM sequence: GGG
agggctgttgccagcatcat

SEQ ID NO: 11864 - DNA, 20 bp, Artificial Sequence
  Description of Artificial Sequence: Synthetic oligonucleotide
  Target: COL7A1; (-) strand; PAM type: NRG; PAM sequence: TGG
tagggctgttgccagcatca

SEQ ID NO: 11865 - DNA, 20 bp, Artificial Sequence
  Description of Artificial Sequence: Synthetic oligonucleotide
  Target: COL7A1; (-) strand; PAM type: NRG; PAM sequence: CAG
taagggagtagggctgttgc

SEQ ID NO: 11866 - DNA, 20 bp, Artificial Sequence
  Description of Artificial Sequence: Synthetic oligonucleotide
  Target: COL7A1; (-) strand; PAM type: NRG; PAM sequence: GGG
tcatggcgggtaagggagta

SEQ ID NO: 11867 - DNA, 20 bp, Artificial Sequence
  Description of Artificial Sequence: Synthetic oligonucleotide
  Target: COL7A1; (-) strand; PAM type: NRG; PAM sequence: AGG
gtcatggcgggtaagggagt

SEQ ID NO: 11868 - DNA, 20 bp, Artificial Sequence
  Description of Artificial Sequence: Synthetic oligonucleotide
  Target: COL7A1; (-) strand; PAM type: NRG; PAM sequence: TAG
agtcatggcgggtaagggag

SEQ ID NO: 11869 - DNA, 20 bp, Artificial Sequence
  Description of Artificial Sequence: Synthetic oligonucleotide
  Target: COL7A1; (-) strand; PAM type: NRG; PAM sequence: GAG
gggagtcatggcgggtaagg

SEQ ID NO: 11870 - DNA, 20 bp, Artificial Sequence
  Description of Artificial Sequence: Synthetic oligonucleotide
  Target: COL7A1; (-) strand; PAM type: NRG; PAM sequence: GGG
gggggagtcatggcgggtaa

SEQ ID NO: 11871 - DNA, 20 bp, Artificial Sequence
  Description of Artificial Sequence: Synthetic oligonucleotide
  Target: COL7A1; (-) strand; PAM type: NRG; PAM sequence: AGG
cgggggagtcatggcgggta

SEQ ID NO: 11872 - DNA, 20 bp, Artificial Sequence
  Description of Artificial Sequence: Synthetic oligonucleotide
  Target: COL7A1; (-) strand; PAM type: NRG; PAM sequence: AAG
tcgggggagtcatggcgggt

SEQ ID NO: 11873 - DNA, 20 bp, Artificial Sequence
  Description of Artificial Sequence: Synthetic oligonucleotide
  Target: COL7A1; (-) strand; PAM type: NRG; PAM sequence: GGG
ggagtcgggggagtcatggc

SEQ ID NO: 11874 - DNA, 20 bp, Artificial Sequence
  Description of Artificial Sequence: Synthetic oligonucleotide
  Target: COL7A1; (-) strand; PAM type: NRG; PAM sequence: CGG
tggagtcgggggagtcatgg

SEQ ID NO: 11875 - DNA, 20 bp, Artificial Sequence
  Description of Artificial Sequence: Synthetic oligonucleotide
  Target: COL7A1; (-) strand; PAM type: NRG; PAM sequence: TGG
ggctggagtcgggggagtca

SEQ ID NO: 11876 - DNA, 20 bp, Artificial Sequence
  Description of Artificial Sequence: Synthetic oligonucleotide
  Target: COL7A1; (-) strand; PAM type: NRG; PAM sequence: GAG
gtaagaggctggagtcgggg

SEQ ID NO: 11877 - DNA, 20 bp, Artificial Sequence
  Description of Artificial Sequence: Synthetic oligonucleotide
  Target: COL7A1; (-) strand; PAM type: NRG; PAM sequence: GGG
atgtaagaggctggagtcgg

SEQ ID NO: 11878 - DNA, 20 bp, Artificial Sequence
  Description of Artificial Sequence: Synthetic oligonucleotide
  Target: COL7A1; (-) strand; PAM type: NRG; PAM sequence: GGG
gatgtaagaggctggagtcg

SEQ ID NO: 11879 - DNA, 20 bp, Artificial Sequence
  Description of Artificial Sequence: Synthetic oligonucleotide
  Target: COL7A1; (-) strand; PAM type: NRG; PAM sequence: GGG
agatgtaagaggctggagtc

SEQ ID NO: 11880 - DNA, 20 bp, Artificial Sequence
  Description of Artificial Sequence: Synthetic oligonucleotide
  Target: COL7A1; (-) strand; PAM type: NRG; PAM sequence: CGG
gagatgtaagaggctggagt

SEQ ID NO: 11881 - DNA, 20 bp, Artificial Sequence
  Description of Artificial Sequence: Synthetic oligonucleotide
  Target: COL7A1; (-) strand; PAM type: NRG; PAM sequence: GAG
ggacgagatgtaagaggctg

SEQ ID NO: 11882 - DNA, 20 bp, Artificial Sequence
  Description of Artificial Sequence: Synthetic oligonucleotide
  Target: COL7A1; (-) strand; PAM type: NRG; PAM sequence: TGG
gaggacgagatgtaagaggc

SEQ ID NO: 11883 - DNA, 20 bp, Artificial Sequence
  Description of Artificial Sequence: Synthetic oligonucleotide
  Target: COL7A1; (-) strand; PAM type: NRG; PAM sequence: AGG
ccccgaggacgagatgtaag

SEQ ID NO: 11884 - DNA, 20 bp, Artificial Sequence
  Description of Artificial Sequence: Synthetic oligonucleotide
  Target: COL7A1; (-) strand; PAM type: NRG; PAM sequence: GAG
cccccgaggacgagatgtaa

SEQ ID NO: 11885 - DNA, 20 bp, Artificial Sequence
  Description of Artificial Sequence: Synthetic oligonucleotide
  Target: COL7A1; (-) strand; PAM type: NRG; PAM sequence: AAG
ggcccccgaggacgagatgt

SEQ ID NO: 11886 - DNA, 20 bp, Artificial Sequence
  Description of Artificial Sequence: Synthetic oligonucleotide
  Target: COL7A1; (-) strand; PAM type: NRG; PAM sequence: GAG
acctgttggcccccgaggac

SEQ ID NO: 11887 - DNA, 20 bp, Artificial Sequence
  Description of Artificial Sequence: Synthetic oligonucleotide
  Target: COL7A1; (-) strand; PAM type: NRG; PAM sequence: AGG
ccaggacctgttggcccccg

SEQ ID NO: 11888 - DNA, 20 bp, Artificial Sequence
  Description of Artificial Sequence: Synthetic oligonucleotide
  Target: COL7A1; (-) strand; PAM type: NRG; PAM sequence: GAG
cccaggacctgttggccccc

SEQ ID NO: 11889 - DNA, 20 bp, Artificial Sequence
  Description of Artificial Sequence: Synthetic oligonucleotide
  Target: COL7A1; (-) strand; PAM type: NRG; PAM sequence: TGG
cctggccccccaggacctgt

SEQ ID NO: 11890 - DNA, 20 bp, Artificial Sequence
  Description of Artificial Sequence: Synthetic oligonucleotide
  Target: COL7A1; (-) strand; PAM type: NRG; PAM sequence: AGG
cctgggcggcctggcccccc

SEQ ID NO: 11891 - DNA, 20 bp, Artificial Sequence
  Description of Artificial Sequence: Synthetic oligonucleotide
  Target: COL7A1; (-) strand; PAM type: NRG; PAM sequence: CAG
ccctgggcggcctggccccc

SEQ ID NO: 11892 - DNA, 20 bp, Artificial Sequence
  Description of Artificial Sequence: Synthetic oligonucleotide
  Target: COL7A1; (-) strand; PAM type: NRG; PAM sequence: TGG
aagggagaccctgggcggcc

SEQ ID NO: 11893 - DNA, 20 bp, Artificial Sequence
  Description of Artificial Sequence: Synthetic oligonucleotide
  Target: COL7A1; (-) strand; PAM type: NRG; PAM sequence: CGG
gagagaagggagaccctggg

SEQ ID NO: 11894 - DNA, 20 bp, Artificial Sequence
  Description of Artificial Sequence: Synthetic oligonucleotide
  Target: COL7A1; (-) strand; PAM type: NRG; PAM sequence: GGG
ctggagagaagggagaccct

SEQ ID NO: 11895 - DNA, 20 bp, Artificial Sequence
  Description of Artificial Sequence: Synthetic oligonucleotide
  Target: COL7A1; (-) strand; PAM type: NRG; PAM sequence: TGG
cctggagagaagggagaccc

SEQ ID NO: 11896 - DNA, 20 bp, Artificial Sequence
  Description of Artificial Sequence: Synthetic oligonucleotide
  Target: COL7A1; (-) strand; PAM type: NRG; PAM sequence: GAG
agggcctcctggagagaagg

SEQ ID NO: 11897 - DNA, 20 bp, Artificial Sequence
  Description of Artificial Sequence: Synthetic oligonucleotide
  Target: COL7A1; (-) strand; PAM type: NRG; PAM sequence: GGG
tcagggcctcctggagagaa

SEQ ID NO: 11898 - DNA, 20 bp, Artificial Sequence
  Description of Artificial Sequence: Synthetic oligonucleotide
  Target: COL7A1; (-) strand; PAM type: NRG; PAM sequence: AGG
ctcagggcctcctggagaga

SEQ ID NO: 11899 - DNA, 20 bp, Artificial Sequence
  Description of Artificial Sequence: Synthetic oligonucleotide
  Target: COL7A1; (-) strand; PAM type: NRG; PAM sequence: AAG
actcagggcctcctggagag

SEQ ID NO: 11900 - DNA, 20 bp, Artificial Sequence
  Description of Artificial Sequence: Synthetic oligonucleotide
  Target: COL7A1; (-) strand; PAM type: NRG; PAM sequence: GAG
gtgactcagggcctcctgga

SEQ ID NO: 11901 - DNA, 20 bp, Artificial Sequence
  Description of Artificial Sequence: Synthetic oligonucleotide
  Target: COL7A1; (-) strand; PAM type: NRG; PAM sequence: GAG
gggtgactcagggcctcctg

SEQ ID NO: 11902 - DNA, 20 bp, Artificial Sequence
  Description of Artificial Sequence: Synthetic oligonucleotide
  Target: COL7A1; (-) strand; PAM type: NRG; PAM sequence: TGG
cagggtgactcagggcctcc

SEQ ID NO: 11903 - DNA, 20 bp, Artificial Sequence
  Description of Artificial Sequence: Synthetic oligonucleotide
  Target: COL7A1; (-) strand; PAM type: NRG; PAM sequence: GGG
ctcctccacagggtgactca

SEQ ID NO: 11904 - DNA, 20 bp, Artificial Sequence
  Description of Artificial Sequence: Synthetic oligonucleotide
  Target: COL7A1; (-) strand; PAM type: NRG; PAM sequence: AGG
cctcctccacagggtgactc

SEQ ID NO: 11905 - DNA, 20 bp, Artificial Sequence
  Description of Artificial Sequence: Synthetic oligonucleotide
  Target: COL7A1; (-) strand; PAM type: NRG; PAM sequence: CAG
gcctcctccacagggtgact

SEQ ID NO: 11906 - DNA, 20 bp, Artificial Sequence
  Description of Artificial Sequence: Synthetic oligonucleotide
  Target: COL7A1; (-) strand; PAM type: NRG; PAM sequence: GGG
tccctcttgcctcctccaca

SEQ ID NO: 11907 - DNA, 20 bp, Artificial Sequence
  Description of Artificial Sequence: Synthetic oligonucleotide
  Target: COL7A1; (-) strand; PAM type: NRG; PAM sequence: AGG
ctccctcttgcctcctccac

SEQ ID NO: 11908 - DNA, 20 bp, Artificial Sequence
  Description of Artificial Sequence: Synthetic oligonucleotide
  Target: COL7A1; (-) strand; PAM type: NRG; PAM sequence: CAG
cctccctcttgcctcctcca

SEQ ID NO: 11909 - DNA, 20 bp, Artificial Sequence
  Description of Artificial Sequence: Synthetic oligonucleotide
  Target: COL7A1; (-) strand; PAM type: NRG; PAM sequence: GAG
ccttgagaactgcttgcttc

SEQ ID NO: 11910 - DNA, 20 bp, Artificial Sequence
  Description of Artificial Sequence: Synthetic oligonucleotide
  Target: COL7A1; (-) strand; PAM type: NRG; PAM sequence: GAG
ttctggggtcccctcccctt

SEQ ID NO: 11911 - DNA, 20 bp, Artificial Sequence
  Description of Artificial Sequence: Synthetic oligonucleotide
  Target: COL7A1; (-) strand; PAM type: NRG; PAM sequence: GGG
gggcaacctcaaggcttctg

SEQ ID NO: 11912 - DNA, 20 bp, Artificial Sequence
  Description of Artificial Sequence: Synthetic oligonucleotide
  Target: COL7A1; (-) strand; PAM type: NRG; PAM sequence: GGG
tgggcaacctcaaggcttct

SEQ ID NO: 11913 - DNA, 20 bp, Artificial Sequence
  Description of Artificial Sequence: Synthetic oligonucleotide
  Target: COL7A1; (-) strand; PAM type: NRG; PAM sequence: TGG
ctgggcaacctcaaggcttc

SEQ ID NO: 11914 - DNA, 20 bp, Artificial Sequence
  Description of Artificial Sequence: Synthetic oligonucleotide
  Target: COL7A1; (-) strand; PAM type: NRG; PAM sequence: AGG
cgttaccctgggcaacctca

SEQ ID NO: 11915 - DNA, 20 bp, Artificial Sequence
  Description of Artificial Sequence: Synthetic oligonucleotide
  Target: COL7A1; (-) strand; PAM type: NRG; PAM sequence: AAG
ccgttaccctgggcaacctc

SEQ ID NO: 11916 - DNA, 20 bp, Artificial Sequence
  Description of Artificial Sequence: Synthetic oligonucleotide
  Target: COL7A1; (-) strand; PAM type: NRG; PAM sequence: GGG
cagtgagtacccgttaccct

SEQ ID NO: 11917 - DNA, 20 bp, Artificial Sequence
  Description of Artificial Sequence: Synthetic oligonucleotide
  Target: COL7A1; (-) strand; PAM type: NRG; PAM sequence: TGG
ccagtgagtacccgttaccc

SEQ ID NO: 11918 - DNA, 20 bp, Artificial Sequence
  Description of Artificial Sequence: Synthetic oligonucleotide
  Target: COL7A1; (-) strand; PAM type: NRG; PAM sequence: GAG
ggcagagcaggacccccagt

SEQ ID NO: 11919 - DNA, 20 bp, Artificial Sequence
  Description of Artificial Sequence: Synthetic oligonucleotide
  Target: COL7A1; (-) strand; PAM type: NRG; PAM sequence: CAG
tactggcagagcaggacccc

SEQ ID NO: 11920 - DNA, 20 bp, Artificial Sequence
  Description of Artificial Sequence: Synthetic oligonucleotide
  Target: COL7A1; (-) strand; PAM type: NRG; PAM sequence: AGG
attggccttactggcagagc

SEQ ID NO: 11921 - DNA, 20 bp, Artificial Sequence
  Description of Artificial Sequence: Synthetic oligonucleotide
  Target: COL7A1; (-) strand; PAM type: NRG; PAM sequence: CAG
cattggccttactggcagag

SEQ ID NO: 11922 - DNA, 20 bp, Artificial Sequence
  Description of Artificial Sequence: Synthetic oligonucleotide
  Target: COL7A1; (-) strand; PAM type: NRG; PAM sequence: GAG
tcccattggccttactggca

SEQ ID NO: 11923 - DNA, 20 bp, Artificial Sequence
  Description of Artificial Sequence: Synthetic oligonucleotide
  Target: COL7A1; (-) strand; PAM type: NRG; PAM sequence: CAG
ggtcccattggccttactgg

SEQ ID NO: 11924 - DNA, 20 bp, Artificial Sequence
  Description of Artificial Sequence: Synthetic oligonucleotide
  Target: COL7A1; (-) strand; PAM type: NRG; PAM sequence: TGG
cagggtcccattggccttac

SEQ ID NO: 11925 - DNA, 20 bp, Artificial Sequence
  Description of Artificial Sequence: Synthetic oligonucleotide
  Target: COL7A1; (-) strand; PAM type: NRG; PAM sequence: TGG
tgtccccttcagggtcccat

SEQ ID NO: 11926 - DNA, 20 bp, Artificial Sequence
  Description of Artificial Sequence: Synthetic oligonucleotide
  Target: COL7A1; (-) strand; PAM type: NRG; PAM sequence: GGG
ccccccttctgtccccttca

SEQ ID NO: 11927 - DNA, 20 bp, Artificial Sequence
  Description of Artificial Sequence: Synthetic oligonucleotide
  Target: COL7A1; (-) strand; PAM type: NRG; PAM sequence: AGG
gccccccttctgtccccttc

SEQ ID NO: 11928 - DNA, 20 bp, Artificial Sequence
  Description of Artificial Sequence: Synthetic oligonucleotide
  Target: COL7A1; (-) strand; PAM type: NRG; PAM sequence: CAG
tgccccccttctgtcccctt

SEQ ID NO: 11929 - DNA, 20 bp, Artificial Sequence
  Description of Artificial Sequence: Synthetic oligonucleotide
  Target: COL7A1; (-) strand; PAM type: NRG; PAM sequence: AAG
gaggtggtgggaccctgact

SEQ ID NO: 11930 - DNA, 20 bp, Artificial Sequence
  Description of Artificial Sequence: Synthetic oligonucleotide
  Target: COL7A1; (-) strand; PAM type: NRG; PAM sequence: GGG
acagagggagatgaggtggt

SEQ ID NO: 11931 - DNA, 20 bp, Artificial Sequence
  Description of Artificial Sequence: Synthetic oligonucleotide
  Target: COL7A1; (-) strand; PAM type: NRG; PAM sequence: TGG
gacagagggagatgaggtgg

SEQ ID NO: 11932 - DNA, 20 bp, Artificial Sequence
  Description of Artificial Sequence: Synthetic oligonucleotide
  Target: COL7A1; (-) strand; PAM type: NRG; PAM sequence: TGG
tgtgacagagggagatgagg

SEQ ID NO: 11933 - DNA, 20 bp, Artificial Sequence
  Description of Artificial Sequence: Synthetic oligonucleotide
  Target: COL7A1; (-) strand; PAM type: NRG; PAM sequence: AGG
gagtgtgacagagggagatg

SEQ ID NO: 11934 - DNA, 20 bp, Artificial Sequence
  Description of Artificial Sequence: Synthetic oligonucleotide
  Target: COL7A1; (-) strand; PAM type: NRG; PAM sequence: GAG
ggagtgtgacagagggagat

SEQ ID NO: 11935 - DNA, 20 bp, Artificial Sequence
  Description of Artificial Sequence: Synthetic oligonucleotide
  Target: COL7A1; (-) strand; PAM type: NRG; PAM sequence: GAG
aatggggagtgtgacagagg

SEQ ID NO: 11936 - DNA, 20 bp, Artificial Sequence
  Description of Artificial Sequence: Synthetic oligonucleotide
  Target: COL7A1; (-) strand; PAM type: NRG; PAM sequence: GGG
ggaatggggagtgtgacaga

SEQ ID NO: 11937 - DNA, 20 bp, Artificial Sequence
  Description of Artificial Sequence: Synthetic oligonucleotide
  Target: COL7A1; (-) strand; PAM type: NRG; PAM sequence: AGG
gggaatggggagtgtgacag

SEQ ID NO: 11938 - DNA, 20 bp, Artificial Sequence
  Description of Artificial Sequence: Synthetic oligonucleotide
  Target: COL7A1; (-) strand; PAM type: NRG; PAM sequence: GAG
tgggaatggggagtgtgaca

SEQ ID NO: 11939 - DNA, 20 bp, Artificial Sequence
  Description of Artificial Sequence: Synthetic oligonucleotide
  Target: COL7A1; (-) strand; PAM type: NRG; PAM sequence: CAG
tgtgggaatggggagtgtga

SEQ ID NO: 11940 - DNA, 20 bp, Artificial Sequence
  Description of Artificial Sequence: Synthetic oligonucleotide
  Target: COL7A1; (-) strand; PAM type: NRG; PAM sequence: GAG
tgaatcaatgtgggaatggg

SEQ ID NO: 11941 - DNA, 20 bp, Artificial Sequence
  Description of Artificial Sequence: Synthetic oligonucleotide
  Target: COL7A1; (-) strand; PAM type: NRG; PAM sequence: GGG
ggtgaatcaatgtgggaatg

SEQ ID NO: 11942 - DNA, 20 bp, Artificial Sequence
  Description of Artificial Sequence: Synthetic oligonucleotide
  Target: COL7A1; (-) strand; PAM type: NRG; PAM sequence: GGG
gggtgaatcaatgtgggaat

SEQ ID NO: 11943 - DNA, 20 bp, Artificial Sequence
  Description of Artificial Sequence: Synthetic oligonucleotide
  Target: COL7A1; (-) strand; PAM type: NRG; PAM sequence: TGG
cgggtgaatcaatgtgggaa

SEQ ID NO: 11944 - DNA, 20 bp, Artificial Sequence
  Description of Artificial Sequence: Synthetic oligonucleotide
  Target: COL7A1; (-) strand; PAM type: NRG; PAM sequence: GGG
gagaccgggtgaatcaatgt

SEQ ID NO: 11945 - DNA, 20 bp, Artificial Sequence
  Description of Artificial Sequence: Synthetic oligonucleotide
  Target: COL7A1; (-) strand; PAM type: NRG; PAM sequence: TGG
ggagaccgggtgaatcaatg

SEQ ID NO: 11946 - DNA, 20 bp, Artificial Sequence
  Description of Artificial Sequence: Synthetic oligonucleotide
  Target: COL7A1; (-) strand; PAM type: NRG; PAM sequence: GGG
caagggagaccctggagacc

SEQ ID NO: 11947 - DNA, 20 bp, Artificial Sequence
  Description of Artificial Sequence: Synthetic oligonucleotide
  Target: COL7A1; (-) strand; PAM type: NRG; PAM sequence: CGG
ccaagggagaccctggagac

SEQ ID NO: 11948 - DNA, 20 bp, Artificial Sequence
  Description of Artificial Sequence: Synthetic oligonucleotide
  Target: COL7A1; (-) strand; PAM type: NRG; PAM sequence: GAG
tggccccaagggagaccctg

SEQ ID NO: 11949 - DNA, 20 bp, Artificial Sequence
  Description of Artificial Sequence: Synthetic oligonucleotide
  Target: COL7A1; (-) strand; PAM type: NRG; PAM sequence: TGG
cctggccccaagggagaccc

SEQ ID NO: 11950 - DNA, 20 bp, Artificial Sequence
  Description of Artificial Sequence: Synthetic oligonucleotide
  Target: COL7A1; (-) strand; PAM type: NRG; PAM sequence: GAG
tggagaccctggccccaagg

SEQ ID NO: 11951 - DNA, 20 bp, Artificial Sequence
  Description of Artificial Sequence: Synthetic oligonucleotide
  Target: COL7A1; (-) strand; PAM type: NRG; PAM sequence: GGG
cctggagaccctggccccaa

SEQ ID NO: 11952 - DNA, 20 bp, Artificial Sequence
  Description of Artificial Sequence: Synthetic oligonucleotide
  Target: COL7A1; (-) strand; PAM type: NRG; PAM sequence: AGG
tcctggagaccctggcccca

SEQ ID NO: 11953 - DNA, 20 bp, Artificial Sequence
  Description of Artificial Sequence: Synthetic oligonucleotide
  Target: COL7A1; (-) strand; PAM type: NRG; PAM sequence: AAG
ttcctggagaccctggcccc

SEQ ID NO: 11954 - DNA, 20 bp, Artificial Sequence
  Description of Artificial Sequence: Synthetic oligonucleotide
  Target: COL7A1; (-) strand; PAM type: NRG; PAM sequence: TGG
ttggttcttcctggagaccc

SEQ ID NO: 11955 - DNA, 20 bp, Artificial Sequence
  Description of Artificial Sequence: Synthetic oligonucleotide
  Target: COL7A1; (-) strand; PAM type: NRG; PAM sequence: GAG
acccggcttggttcttcctg

SEQ ID NO: 11956 - DNA, 20 bp, Artificial Sequence
  Description of Artificial Sequence: Synthetic oligonucleotide
  Target: COL7A1; (-) strand; PAM type: NRG; PAM sequence: TGG
ccacccggcttggttcttcc

SEQ ID NO: 11957 - DNA, 20 bp, Artificial Sequence
  Description of Artificial Sequence: Synthetic oligonucleotide
  Target: COL7A1; (-) strand; PAM type: NRG; PAM sequence: TGG
tccacagggcccacccggct

SEQ ID NO: 11958 - DNA, 20 bp, Artificial Sequence
  Description of Artificial Sequence: Synthetic oligonucleotide
  Target: COL7A1; (-) strand; PAM type: NRG; PAM sequence: CGG
ttccatccacagggcccacc

SEQ ID NO: 11959 - DNA, 20 bp, Artificial Sequence
  Description of Artificial Sequence: Synthetic oligonucleotide
  Target: COL7A1; (-) strand; PAM type: NRG; PAM sequence: GGG
ttcttatccttccatccaca

SEQ ID NO: 11960 - DNA, 20 bp, Artificial Sequence
  Description of Artificial Sequence: Synthetic oligonucleotide
  Target: COL7A1; (-) strand; PAM type: NRG; PAM sequence: AGG
cttcttatccttccatccac

SEQ ID NO: 11961 - DNA, 20 bp, Artificial Sequence
  Description of Artificial Sequence: Synthetic oligonucleotide
  Target: COL7A1; (-) strand; PAM type: NRG; PAM sequence: CAG
acttcttatccttccatcca

SEQ ID NO: 11962 - DNA, 20 bp, Artificial Sequence
  Description of Artificial Sequence: Synthetic oligonucleotide
  Target: COL7A1; (-) strand; PAM type: NRG; PAM sequence: AGG
gtttagggggcagttggtga

SEQ ID NO: 11963 - DNA, 20 bp, Artificial Sequence
  Description of Artificial Sequence: Synthetic oligonucleotide
  Target: COL7A1; (-) strand; PAM type: NRG; PAM sequence: AAG
tgtttagggggcagttggtg

SEQ ID NO: 11964 - DNA, 20 bp, Artificial Sequence
  Description of Artificial Sequence: Synthetic oligonucleotide
  Target: COL7A1; (-) strand; PAM type: NRG; PAM sequence: TGG
cgaagtgtttagggggcagt

SEQ ID NO: 11965 - DNA, 20 bp, Artificial Sequence
  Description of Artificial Sequence: Synthetic oligonucleotide
  Target: COL7A1; (-) strand; PAM type: NRG; PAM sequence: CAG
gaagcgaagtgtttaggggg

SEQ ID NO: 11966 - DNA, 20 bp, Artificial Sequence
  Description of Artificial Sequence: Synthetic oligonucleotide
  Target: COL7A1; (-) strand; PAM type: NRG; PAM sequence: GGG
agtgaagcgaagtgtttagg

SEQ ID NO: 11967 - DNA, 20 bp, Artificial Sequence
  Description of Artificial Sequence: Synthetic oligonucleotide
  Target: COL7A1; (-) strand; PAM type: NRG; PAM sequence: GGG
aagtgaagcgaagtgtttag

SEQ ID NO: 11968 - DNA, 20 bp, Artificial Sequence
  Description of Artificial Sequence: Synthetic oligonucleotide
  Target: COL7A1; (-) strand; PAM type: NRG; PAM sequence: GGG
taagtgaagcgaagtgttta

SEQ ID NO: 11969 - DNA, 20 bp, Artificial Sequence
  Description of Artificial Sequence: Synthetic oligonucleotide
  Target: COL7A1; (-) strand; PAM type: NRG; PAM sequence: AGG
gtaagtgaagcgaagtgttt

SEQ ID NO: 11970 - DNA, 20 bp, Artificial Sequence
  Description of Artificial Sequence: Synthetic oligonucleotide
  Target: COL7A1; (-) strand; PAM type: NRG; PAM sequence: TAG
ggtaagtgaagcgaagtgtt

SEQ ID NO: 11971 - DNA, 20 bp, Artificial Sequence
  Description of Artificial Sequence: Synthetic oligonucleotide
  Target: COL7A1; (-) strand; PAM type: NRG; PAM sequence: AAG
gggaacgggtaagtgaagcg

SEQ ID NO: 11972 - DNA, 20 bp, Artificial Sequence
  Description of Artificial Sequence: Synthetic oligonucleotide
  Target: COL7A1; (-) strand; PAM type: NRG; PAM sequence: AAG
ccaaggggaacgggtaagtg

SEQ ID NO: 11973 - DNA, 20 bp, Artificial Sequence
  Description of Artificial Sequence: Synthetic oligonucleotide
  Target: COL7A1; (-) strand; PAM type: NRG; PAM sequence: AAG
ggagtccaaggggaacgggt

SEQ ID NO: 11974 - DNA, 20 bp, Artificial Sequence
  Description of Artificial Sequence: Synthetic oligonucleotide
  Target: COL7A1; (-) strand; PAM type: NRG; PAM sequence: GGG
taccggagtccaaggggaac

SEQ ID NO: 11975 - DNA, 20 bp, Artificial Sequence
  Description of Artificial Sequence: Synthetic oligonucleotide
  Target: COL7A1; (-) strand; PAM type: NRG; PAM sequence: CGG
ctaccggagtccaaggggaa

SEQ ID NO: 11976 - DNA, 20 bp, Artificial Sequence
  Description of Artificial Sequence: Synthetic oligonucleotide
  Target: COL7A1; (-) strand; PAM type: NRG; PAM sequence: GGG
aggagctaccggagtccaag

SEQ ID NO: 11977 - DNA, 20 bp, Artificial Sequence
  Description of Artificial Sequence: Synthetic oligonucleotide
  Target: COL7A1; (-) strand; PAM type: NRG; PAM sequence: GGG
gaggagctaccggagtccaa

SEQ ID NO: 11978 - DNA, 20 bp, Artificial Sequence
  Description of Artificial Sequence: Synthetic oligonucleotide
  Target: COL7A1; (-) strand; PAM type: NRG; PAM sequence: AGG
agaggagctaccggagtcca

SEQ ID NO: 11979 - DNA, 20 bp, Artificial Sequence
  Description of Artificial Sequence: Synthetic oligonucleotide
  Target: COL7A1; (-) strand; PAM type: NRG; PAM sequence: AAG
cagaggagctaccggagtcc

SEQ ID NO: 11980 - DNA, 20 bp, Artificial Sequence
  Description of Artificial Sequence: Synthetic oligonucleotide
  Target: COL7A1; (-) strand; PAM type: NRG; PAM sequence: GAG
tgggcccagaggagctaccg

SEQ ID NO: 11981 - DNA, 20 bp, Artificial Sequence
  Description of Artificial Sequence: Synthetic oligonucleotide
  Target: COL7A1; (-) strand; PAM type: NRG; PAM sequence: CGG
gctgggcccagaggagctac

SEQ ID NO: 11982 - DNA, 20 bp, Artificial Sequence
  Description of Artificial Sequence: Synthetic oligonucleotide
  Target: COL7A1; (-) strand; PAM type: NRG; PAM sequence: GAG
ggggcccgctgggcccagag

SEQ ID NO: 11983 - DNA, 20 bp, Artificial Sequence
  Description of Artificial Sequence: Synthetic oligonucleotide
  Target: COL7A1; (-) strand; PAM type: NRG; PAM sequence: AGG
gtggggcccgctgggcccag

SEQ ID NO: 11984 - DNA, 20 bp, Artificial Sequence
  Description of Artificial Sequence: Synthetic oligonucleotide
  Target: COL7A1; (-) strand; PAM type: NRG; PAM sequence: GAG
tgtggggcccgctgggccca

SEQ ID NO: 11985 - DNA, 20 bp, Artificial Sequence
  Description of Artificial Sequence: Synthetic oligonucleotide
  Target: COL7A1; (-) strand; PAM type: NRG; PAM sequence: CAG
gatgtggggcccgctgggcc

SEQ ID NO: 11986 - DNA, 20 bp, Artificial Sequence
  Description of Artificial Sequence: Synthetic oligonucleotide
  Target: COL7A1; (-) strand; PAM type: NRG; PAM sequence: GGG
agggagatgtggggcccgct

SEQ ID NO: 11987 - DNA, 20 bp, Artificial Sequence
  Description of Artificial Sequence: Synthetic oligonucleotide
  Target: COL7A1; (-) strand; PAM type: NRG; PAM sequence: TGG
cagggagatgtggggcccgc

SEQ ID NO: 11988 - DNA, 20 bp, Artificial Sequence
  Description of Artificial Sequence: Synthetic oligonucleotide
  Target: COL7A1; (-) strand; PAM type: NRG; PAM sequence: GGG
gtcacctccagggagatgtg

SEQ ID NO: 11989 - DNA, 20 bp, Artificial Sequence
  Description of Artificial Sequence: Synthetic oligonucleotide
  Target: COL7A1; (-) strand; PAM type: NRG; PAM sequence: GGG
tgtcacctccagggagatgt

SEQ ID NO: 11990 - DNA, 20 bp, Artificial Sequence
  Description of Artificial Sequence: Synthetic oligonucleotide
  Target: COL7A1; (-) strand; PAM type: NRG; PAM sequence: TGG
ttgtcacctccagggagatg

SEQ ID NO: 11991 - DNA, 20 bp, Artificial Sequence
  Description of Artificial Sequence: Synthetic oligonucleotide
  Target: COL7A1; (-) strand; PAM type: NRG; PAM sequence: GAG
tggtctttgtcacctccagg

SEQ ID NO: 11992 - DNA, 20 bp, Artificial Sequence
  Description of Artificial Sequence: Synthetic oligonucleotide
  Target: COL7A1; (-) strand; PAM type: NRG; PAM sequence: GGG
gatggtctttgtcacctcca

SEQ ID NO: 11993 - DNA, 20 bp, Artificial Sequence
  Description of Artificial Sequence: Synthetic oligonucleotide
  Target: COL7A1; (-) strand; PAM type: NRG; PAM sequence: AGG
tgatggtctttgtcacctcc

SEQ ID NO: 11994 - DNA, 20 bp, Artificial Sequence
  Description of Artificial Sequence: Synthetic oligonucleotide
  Target: COL7A1; (-) strand; PAM type: NRG; PAM sequence: CAG
ctgatggtctttgtcacctc

SEQ ID NO: 11995 - DNA, 20 bp, Artificial Sequence
  Description of Artificial Sequence: Synthetic oligonucleotide
  Target: COL7A1; (-) strand; PAM type: NRG; PAM sequence: TGG
gagcctgggactagcactga

SEQ ID NO: 11996 - DNA, 20 bp, Artificial Sequence
  Description of Artificial Sequence: Synthetic oligonucleotide
  Target: COL7A1; (-) strand; PAM type: NRG; PAM sequence: TAG
ggttaactggagcctgggac

SEQ ID NO: 11997 - DNA, 20 bp, Artificial Sequence
  Description of Artificial Sequence: Synthetic oligonucleotide
  Target: COL7A1; (-) strand; PAM type: NRG; PAM sequence: GGG
cagggggttaactggagcct

SEQ ID NO: 11998 - DNA, 20 bp, Artificial Sequence
  Description of Artificial Sequence: Synthetic oligonucleotide
  Target: COL7A1; (-) strand; PAM type: NRG; PAM sequence: TGG
tcagggggttaactggagcc

SEQ ID NO: 11999 - DNA, 20 bp, Artificial Sequence
  Description of Artificial Sequence: Synthetic oligonucleotide
  Target: COL7A1; (-) strand; PAM type: NRG; PAM sequence: GAG
ctgggtcagggggttaactg

SEQ ID NO: 12000 - DNA, 20 bp, Artificial Sequence
  Description of Artificial Sequence: Synthetic oligonucleotide
  Target: COL7A1; (-) strand; PAM type: NRG; PAM sequence: TGG
tgctgggtcagggggttaac

SEQ ID NO: 12001 - DNA, 20 bp, Artificial Sequence
  Description of Artificial Sequence: Synthetic oligonucleotide
  Target: COL7A1; (-) strand; PAM type: NRG; PAM sequence: GGG
acaggacttgctgggtcagg

SEQ ID NO: 12002 - DNA, 20 bp, Artificial Sequence
  Description of Artificial Sequence: Synthetic oligonucleotide
  Target: COL7A1; (-) strand; PAM type: NRG; PAM sequence: GGG
cacaggacttgctgggtcag

SEQ ID NO: 12003 - DNA, 20 bp, Artificial Sequence
  Description of Artificial Sequence: Synthetic oligonucleotide
  Target: COL7A1; (-) strand; PAM type: NRG; PAM sequence: GGG
tcacaggacttgctgggtca

SEQ ID NO: 12004 - DNA, 20 bp, Artificial Sequence
  Description of Artificial Sequence: Synthetic oligonucleotide
  Target: COL7A1; (-) strand; PAM type: NRG; PAM sequence: AGG
gtcacaggacttgctgggtc

SEQ ID NO: 12005 - DNA, 20 bp, Artificial Sequence
  Description of Artificial Sequence: Synthetic oligonucleotide
  Target: COL7A1; (-) strand; PAM type: NRG; PAM sequence: CAG
ggtcacaggacttgctgggt

SEQ ID NO: 12006 - DNA, 20 bp, Artificial Sequence
  Description of Artificial Sequence: Synthetic oligonucleotide
  Target: COL7A1; (-) strand; PAM type: NRG; PAM sequence: GGG
ggggggtcacaggacttgct

SEQ ID NO: 12007 - DNA, 20 bp, Artificial Sequence
  Description of Artificial Sequence: Synthetic oligonucleotide
  Target: COL7A1; (-) strand; PAM type: NRG; PAM sequence: TGG
tggggggtcacaggacttgc

SEQ ID NO: 12008 - DNA, 20 bp, Artificial Sequence
  Description of Artificial Sequence: Synthetic oligonucleotide
  Target: COL7A1; (-) strand; PAM type: NRG; PAM sequence: AGG
tatgggacttggggggtcac

SEQ ID NO: 12009 - DNA, 20 bp, Artificial Sequence
  Description of Artificial Sequence: Synthetic oligonucleotide
  Target: COL7A1; (-) strand; PAM type: NRG; PAM sequence: CAG
ctatgggacttggggggtca

SEQ ID NO: 12010 - DNA, 20 bp, Artificial Sequence
  Description of Artificial Sequence: Synthetic oligonucleotide
  Target: COL7A1; (-) strand; PAM type: NRG; PAM sequence: GGG
gcctatctatgggacttggg

SEQ ID NO: 12011 - DNA, 20 bp, Artificial Sequence
  Description of Artificial Sequence: Synthetic oligonucleotide
  Target: COL7A1; (-) strand; PAM type: NRG; PAM sequence: GGG
ggcctatctatgggacttgg

SEQ ID NO: 12012 - DNA, 20 bp, Artificial Sequence
  Description of Artificial Sequence: Synthetic oligonucleotide
  Target: COL7A1; (-) strand; PAM type: NRG; PAM sequence: GGG
gggcctatctatgggacttg

SEQ ID NO: 12013 - DNA, 20 bp, Artificial Sequence
  Description of Artificial Sequence: Synthetic oligonucleotide
  Target: COL7A1; (-) strand; PAM type: NRG; PAM sequence: GGG
agggcctatctatgggactt

SEQ ID NO: 12014 - DNA, 20 bp, Artificial Sequence
  Description of Artificial Sequence: Synthetic oligonucleotide
  Target: COL7A1; (-) strand; PAM type: NRG; PAM sequence: TGG
tagggcctatctatgggact

SEQ ID NO: 12015 - DNA, 20 bp, Artificial Sequence
  Description of Artificial Sequence: Synthetic oligonucleotide
  Target: COL7A1; (-) strand; PAM type: NRG; PAM sequence: GGG
aggtcatagggcctatctat

SEQ ID NO: 12016 - DNA, 20 bp, Artificial Sequence
  Description of Artificial Sequence: Synthetic oligonucleotide
  Target: COL7A1; (-) strand; PAM type: NRG; PAM sequence: TGG
taggtcatagggcctatcta

SEQ ID NO: 12017 - DNA, 20 bp, Artificial Sequence
  Description of Artificial Sequence: Synthetic oligonucleotide
  Target: COL7A1; (-) strand; PAM type: NRG; PAM sequence: GGG
gggttgaggtctaggtcata

SEQ ID NO: 12018 - DNA, 20 bp, Artificial Sequence
  Description of Artificial Sequence: Synthetic oligonucleotide
  Target: COL7A1; (-) strand; PAM type: NRG; PAM sequence: AGG
agggttgaggtctaggtcat

SEQ ID NO: 12019 - DNA, 20 bp, Artificial Sequence
  Description of Artificial Sequence: Synthetic oligonucleotide
  Target: COL7A1; (-) strand; PAM type: NRG; PAM sequence: TAG
cagggttgaggtctaggtca

SEQ ID NO: 12020 - DNA, 20 bp, Artificial Sequence
  Description of Artificial Sequence: Synthetic oligonucleotide
  Target: COL7A1; (-) strand; PAM type: NRG; PAM sequence: AGG
tttctacagggttgaggtct

SEQ ID NO: 12021 - DNA, 20 bp, Artificial Sequence
  Description of Artificial Sequence: Synthetic oligonucleotide
  Target: COL7A1; (-) strand; PAM type: NRG; PAM sequence: TAG
gtttctacagggttgaggtc

SEQ ID NO: 12022 - DNA, 20 bp, Artificial Sequence
  Description of Artificial Sequence: Synthetic oligonucleotide
  Target: COL7A1; (-) strand; PAM type: NRG; PAM sequence: AGG
gggaggtttctacagggttg

SEQ ID NO: 12023 - DNA, 20 bp, Artificial Sequence
  Description of Artificial Sequence: Synthetic oligonucleotide
  Target: COL7A1; (-) strand; PAM type: NRG; PAM sequence: GAG
ggggaggtttctacagggtt

SEQ ID NO: 12024 - DNA, 20 bp, Artificial Sequence
  Description of Artificial Sequence: Synthetic oligonucleotide
  Target: COL7A1; (-) strand; PAM type: NRG; PAM sequence: GGG
ggcaaggggaggtttctaca

SEQ ID NO: 12025 - DNA, 20 bp, Artificial Sequence
  Description of Artificial Sequence: Synthetic oligonucleotide
  Target: COL7A1; (-) strand; PAM type: NRG; PAM sequence: AGG
gggcaaggggaggtttctac

SEQ ID NO: 12026 - DNA, 20 bp, Artificial Sequence
  Description of Artificial Sequence: Synthetic oligonucleotide
  Target: COL7A1; (-) strand; PAM type: NRG; PAM sequence: CAG
ggggcaaggggaggtttcta

SEQ ID NO: 12027 - DNA, 20 bp, Artificial Sequence
  Description of Artificial Sequence: Synthetic oligonucleotide
  Target: COL7A1; (-) strand; PAM type: NRG; PAM sequence: AGG
gcctggtatggggcaagggg

SEQ ID NO: 12028 - DNA, 20 bp, Artificial Sequence
  Description of Artificial Sequence: Synthetic oligonucleotide
  Target: COL7A1; (-) strand; PAM type: NRG; PAM sequence: GAG
agcctggtatggggcaaggg

SEQ ID NO: 12029 - DNA, 20 bp, Artificial Sequence
  Description of Artificial Sequence: Synthetic oligonucleotide
  Target: COL7A1; (-) strand; PAM type: NRG; PAM sequence: GGG
taagcctggtatggggcaag

SEQ ID NO: 12030 - DNA, 20 bp, Artificial Sequence
  Description of Artificial Sequence: Synthetic oligonucleotide
  Target: COL7A1; (-) strand; PAM type: NRG; PAM sequence: GGG
gtaagcctggtatggggcaa

SEQ ID NO: 12031 - DNA, 20 bp, Artificial Sequence
  Description of Artificial Sequence: Synthetic oligonucleotide
  Target: COL7A1; (-) strand; PAM type: NRG; PAM sequence: AGG
ggtaagcctggtatggggca

SEQ ID NO: 12032 - DNA, 20 bp, Artificial Sequence
  Description of Artificial Sequence: Synthetic oligonucleotide
  Target: COL7A1; (-) strand; PAM type: NRG; PAM sequence: AAG
aggtaagcctggtatggggc

SEQ ID NO: 12033 - DNA, 20 bp, Artificial Sequence
  Description of Artificial Sequence: Synthetic oligonucleotide
  Target: COL7A1; (-) strand; PAM type: NRG; PAM sequence: GGG
gaaaaggtaagcctggtatg

SEQ ID NO: 12034 - DNA, 20 bp, Artificial Sequence
  Description of Artificial Sequence: Synthetic oligonucleotide
  Target: COL7A1; (-) strand; PAM type: NRG; PAM sequence: GGG
agaaaaggtaagcctggtat

SEQ ID NO: 12035 - DNA, 20 bp, Artificial Sequence
  Description of Artificial Sequence: Synthetic oligonucleotide
  Target: COL7A1; (-) strand; PAM type: NRG; PAM sequence: TGG
gagaaaaggtaagcctggta

SEQ ID NO: 12036 - DNA, 20 bp, Artificial Sequence
  Description of Artificial Sequence: Synthetic oligonucleotide
  Target: COL7A1; (-) strand; PAM type: NRG; PAM sequence: TGG
caaaggagaaaaggtaagcc

SEQ ID NO: 12037 - DNA, 20 bp, Artificial Sequence
  Description of Artificial Sequence: Synthetic oligonucleotide
  Target: COL7A1; (-) strand; PAM type: NRG; PAM sequence: AAG
ggacccaaaggagaaaaggt

SEQ ID NO: 12038 - DNA, 20 bp, Artificial Sequence
  Description of Artificial Sequence: Synthetic oligonucleotide
  Target: COL7A1; (-) strand; PAM type: NRG; PAM sequence: AGG
tgctggacccaaaggagaaa

SEQ ID NO: 12039 - DNA, 20 bp, Artificial Sequence
  Description of Artificial Sequence: Synthetic oligonucleotide
  Target: COL7A1; (-) strand; PAM type: NRG; PAM sequence: AAG
ttgctggacccaaaggagaa

SEQ ID NO: 12040 - DNA, 20 bp, Artificial Sequence
  Description of Artificial Sequence: Synthetic oligonucleotide
  Target: COL7A1; (-) strand; PAM type: NRG; PAM sequence: GAG
tgctgttgctggacccaaag

SEQ ID NO: 12041 - DNA, 20 bp, Artificial Sequence
  Description of Artificial Sequence: Synthetic oligonucleotide
  Target: COL7A1; (-) strand; PAM type: NRG; PAM sequence: AGG
cctgctgttgctggacccaa

SEQ ID NO: 12042 - DNA, 20 bp, Artificial Sequence
  Description of Artificial Sequence: Synthetic oligonucleotide
  Target: COL7A1; (-) strand; PAM type: NRG; PAM sequence: AAG
acctgctgttgctggaccca

SEQ ID NO: 12043 - DNA, 20 bp, Artificial Sequence
  Description of Artificial Sequence: Synthetic oligonucleotide
  Target: COL7A1; (-) strand; PAM type: NRG; PAM sequence: TGG
tttcagggacctgctgttgc

SEQ ID NO: 12044 - DNA, 20 bp, Artificial Sequence
  Description of Artificial Sequence: Synthetic oligonucleotide
  Target: COL7A1; (-) strand; PAM type: NRG; PAM sequence: GGG
atctgtcctgtttgttttca

SEQ ID NO: 12045 - DNA, 20 bp, Artificial Sequence
  Description of Artificial Sequence: Synthetic oligonucleotide
  Target: COL7A1; (-) strand; PAM type: NRG; PAM sequence: AGG
tatctgtcctgtttgttttc

SEQ ID NO: 12046 - DNA, 20 bp, Artificial Sequence
  Description of Artificial Sequence: Synthetic oligonucleotide
  Target: COL7A1; (-) strand; PAM type: NRG; PAM sequence: CAG
gtatctgtcctgtttgtttt

SEQ ID NO: 12047 - DNA, 20 bp, Artificial Sequence
  Description of Artificial Sequence: Synthetic oligonucleotide
  Target: COL7A1; (-) strand; PAM type: NRG; PAM sequence: AAG
tacaaccccaaggcagggcc

SEQ ID NO: 12048 - DNA, 20 bp, Artificial Sequence
  Description of Artificial Sequence: Synthetic oligonucleotide
  Target: COL7A1; (-) strand; PAM type: NRG; PAM sequence: GGG
gatcatacaaccccaaggca

SEQ ID NO: 12049 - DNA, 20 bp, Artificial Sequence
  Description of Artificial Sequence: Synthetic oligonucleotide
  Target: COL7A1; (-) strand; PAM type: NRG; PAM sequence: AGG
tgatcatacaaccccaaggc

SEQ ID NO: 12050 - DNA, 20 bp, Artificial Sequence
  Description of Artificial Sequence: Synthetic oligonucleotide
  Target: COL7A1; (-) strand; PAM type: NRG; PAM sequence: CAG
ttgatcatacaaccccaagg

SEQ ID NO: 12051 - DNA, 20 bp, Artificial Sequence
  Description of Artificial Sequence: Synthetic oligonucleotide
  Target: COL7A1; (-) strand; PAM type: NRG; PAM sequence: AGG
actttgatcatacaacccca

SEQ ID NO: 12052 - DNA, 20 bp, Artificial Sequence
  Description of Artificial Sequence: Synthetic oligonucleotide
  Target: COL7A1; (-) strand; PAM type: NRG; PAM sequence: AAG
gactttgatcatacaacccc

SEQ ID NO: 12053 - DNA, 20 bp, Artificial Sequence
  Description of Artificial Sequence: Synthetic oligonucleotide
  Target: COL7A1; (-) strand; PAM type: NRG; PAM sequence: AAG
atgtgacctccattccaatg

SEQ ID NO: 12054 - DNA, 20 bp, Artificial Sequence
  Description of Artificial Sequence: Synthetic oligonucleotide
  Target: COL7A1; (-) strand; PAM type: NRG; PAM sequence: GAG
gtgacttctgggcggggact

SEQ ID NO: 12055 - DNA, 20 bp, Artificial Sequence
  Description of Artificial Sequence: Synthetic oligonucleotide
  Target: COL7A1; (-) strand; PAM type: NRG; PAM sequence: GGG
gactctgtgacttctgggcg

SEQ ID NO: 12056 - DNA, 20 bp, Artificial Sequence
  Description of Artificial Sequence: Synthetic oligonucleotide
  Target: COL7A1; (-) strand; PAM type: NRG; PAM sequence: GGG
tgactctgtgacttctgggc

SEQ ID NO: 12057 - DNA, 20 bp, Artificial Sequence
  Description of Artificial Sequence: Synthetic oligonucleotide
  Target: COL7A1; (-) strand; PAM type: NRG; PAM sequence: CGG
gtgactctgtgacttctggg

SEQ ID NO: 12058 - DNA, 20 bp, Artificial Sequence
  Description of Artificial Sequence: Synthetic oligonucleotide
  Target: COL7A1; (-) strand; PAM type: NRG; PAM sequence: GGG
gcggtgactctgtgacttct

SEQ ID NO: 12059 - DNA, 20 bp, Artificial Sequence
  Description of Artificial Sequence: Synthetic oligonucleotide
  Target: COL7A1; (-) strand; PAM type: NRG; PAM sequence: TGG
agcggtgactctgtgacttc

SEQ ID NO: 12060 - DNA, 20 bp, Artificial Sequence
  Description of Artificial Sequence: Synthetic oligonucleotide
  Target: COL7A1; (-) strand; PAM type: NRG; PAM sequence: CGG
aaccccttccctgctgtcag

SEQ ID NO: 12061 - DNA, 20 bp, Artificial Sequence
  Description of Artificial Sequence: Synthetic oligonucleotide
  Target: COL7A1; (-) strand; PAM type: NRG; PAM sequence: CAG
tataaccccttccctgctgt

SEQ ID NO: 12062 - DNA, 20 bp, Artificial Sequence
  Description of Artificial Sequence: Synthetic oligonucleotide
  Target: COL7A1; (-) strand; PAM type: NRG; PAM sequence: CAG
aggtcatgagctctttgtgt

SEQ ID NO: 12063 - DNA, 20 bp, Artificial Sequence
  Description of Artificial Sequence: Synthetic oligonucleotide
  Target: COL7A1; (-) strand; PAM type: NRG; PAM sequence: GAG
aagaccgccatgcaggtcat

SEQ ID NO: 12064 - DNA, 20 bp, Artificial Sequence
  Description of Artificial Sequence: Synthetic oligonucleotide
  Target: COL7A1; (-) strand; PAM type: NRG; PAM sequence: AGG
tgaccccaagaccgccatgc

SEQ ID NO: 12065 - DNA, 20 bp, Artificial Sequence
  Description of Artificial Sequence: Synthetic oligonucleotide
  Target: COL7A1; (-) strand; PAM type: NRG; PAM sequence: CAG
gtgaccccaagaccgccatg

SEQ ID NO: 12066 - DNA, 20 bp, Artificial Sequence
  Description of Artificial Sequence: Synthetic oligonucleotide
  Target: COL7A1; (-) strand; PAM type: NRG; PAM sequence: AAG
ggctatgatcctgtgacccc

SEQ ID NO: 12067 - DNA, 20 bp, Artificial Sequence
  Description of Artificial Sequence: Synthetic oligonucleotide
  Target: COL7A1; (-) strand; PAM type: NRG; PAM sequence: TGG
agaacctgcccccagactct

SEQ ID NO: 12068 - DNA, 20 bp, Artificial Sequence
  Description of Artificial Sequence: Synthetic oligonucleotide
  Target: COL7A1; (-) strand; PAM type: NRG; PAM sequence: CAG
cttctgctagaacctgcccc

SEQ ID NO: 12069 - DNA, 20 bp, Artificial Sequence
  Description of Artificial Sequence: Synthetic oligonucleotide
  Target: COL7A1; (-) strand; PAM type: NRG; PAM sequence: TAG
ctctgcggctctccttctgc

SEQ ID NO: 12070 - DNA, 20 bp, Artificial Sequence
  Description of Artificial Sequence: Synthetic oligonucleotide
  Target: COL7A1; (-) strand; PAM type: NRG; PAM sequence: CGG
tgagcaggctgggagctctg

SEQ ID NO: 12071 - DNA, 20 bp, Artificial Sequence
  Description of Artificial Sequence: Synthetic oligonucleotide
  Target: COL7A1; (-) strand; PAM type: NRG; PAM sequence: GAG
tgggcccgtgagcaggctgg

SEQ ID NO: 12072 - DNA, 20 bp, Artificial Sequence
  Description of Artificial Sequence: Synthetic oligonucleotide
  Target: COL7A1; (-) strand; PAM type: NRG; PAM sequence: GGG
gctgggcccgtgagcaggct

SEQ ID NO: 12073 - DNA, 20 bp, Artificial Sequence
  Description of Artificial Sequence: Synthetic oligonucleotide
  Target: COL7A1; (-) strand; PAM type: NRG; PAM sequence: TGG
tgctgggcccgtgagcaggc

SEQ ID NO: 12074 - DNA, 20 bp, Artificial Sequence
  Description of Artificial Sequence: Synthetic oligonucleotide
  Target: COL7A1; (-) strand; PAM type: NRG; PAM sequence: AGG
acagtgctgggcccgtgagc

SEQ ID NO: 12075 - DNA, 20 bp, Artificial Sequence
  Description of Artificial Sequence: Synthetic oligonucleotide
  Target: COL7A1; (-) strand; PAM type: NRG; PAM sequence: CAG
cacagtgctgggcccgtgag

SEQ ID NO: 12076 - DNA, 20 bp, Artificial Sequence
  Description of Artificial Sequence: Synthetic oligonucleotide
  Target: COL7A1; (-) strand; PAM type: NRG; PAM sequence: GAG
ttccacagtgctgggcccgt

SEQ ID NO: 12077 - DNA, 20 bp, Artificial Sequence
  Description of Artificial Sequence: Synthetic oligonucleotide
  Target: COL7A1; (-) strand; PAM type: NRG; PAM sequence: GGG
ggctgtgattccacagtgct

SEQ ID NO: 12078 - DNA, 20 bp, Artificial Sequence
  Description of Artificial Sequence: Synthetic oligonucleotide
  Target: COL7A1; (-) strand; PAM type: NRG; PAM sequence: TGG
gggctgtgattccacagtgc

SEQ ID NO: 12079 - DNA, 20 bp, Artificial Sequence
  Description of Artificial Sequence: Synthetic oligonucleotide
  Target: COL7A1; (-) strand; PAM type: NRG; PAM sequence: CAG
ctatctgggctgtgattcca

SEQ ID NO: 12080 - DNA, 20 bp, Artificial Sequence
  Description of Artificial Sequence: Synthetic oligonucleotide
  Target: COL7A1; (-) strand; PAM type: NRG; PAM sequence: GGG
cctcctatagaacactatct

SEQ ID NO: 12081 - DNA, 20 bp, Artificial Sequence
  Description of Artificial Sequence: Synthetic oligonucleotide
  Target: COL7A1; (-) strand; PAM type: NRG; PAM sequence: TGG
ccctcctatagaacactatc

SEQ ID NO: 12082 - DNA, 20 bp, Artificial Sequence
  Description of Artificial Sequence: Synthetic oligonucleotide
  Target: COL7A1; (-) strand; PAM type: NRG; PAM sequence: TAG
cttgagcagtgaccctccta

SEQ ID NO: 12083 - DNA, 20 bp, Artificial Sequence
  Description of Artificial Sequence: Synthetic oligonucleotide
  Target: COL7A1; (-) strand; PAM type: NRG; PAM sequence: CAG
agcacagcacagcccttgag

SEQ ID NO: 12084 - DNA, 20 bp, Artificial Sequence
  Description of Artificial Sequence: Synthetic oligonucleotide
  Target: COL7A1; (-) strand; PAM type: NRG; PAM sequence: GAG
ctgagcacagcacagccctt

SEQ ID NO: 12085 - DNA, 20 bp, Artificial Sequence
  Description of Artificial Sequence: Synthetic oligonucleotide
  Target: COL7A1; (-) strand; PAM type: NRG; PAM sequence: CAG
atggcgctctgagcacagca

SEQ ID NO: 12086 - DNA, 20 bp, Artificial Sequence
  Description of Artificial Sequence: Synthetic oligonucleotide
  Target: COL7A1; (-) strand; PAM type: NRG; PAM sequence: CAG
ggaggatggcgctctgagca

SEQ ID NO: 12087 - DNA, 20 bp, Artificial Sequence
  Description of Artificial Sequence: Synthetic oligonucleotide
  Target: COL7A1; (-) strand; PAM type: NRG; PAM sequence: GAG
tgacgggaggatggcgctct

SEQ ID NO: 12088 - DNA, 20 bp, Artificial Sequence
  Description of Artificial Sequence: Synthetic oligonucleotide
  Target: COL7A1; (-) strand; PAM type: NRG; PAM sequence: TGG
ggtggtgagtgacgggagga

SEQ ID NO: 12089 - DNA, 20 bp, Artificial Sequence
  Description of Artificial Sequence: Synthetic oligonucleotide
  Target: COL7A1; (-) strand; PAM type: NRG; PAM sequence: AGG
cagtggtggtgagtgacggg

SEQ ID NO: 12090 - DNA, 20 bp, Artificial Sequence
  Description of Artificial Sequence: Synthetic oligonucleotide
  Target: COL7A1; (-) strand; PAM type: NRG; PAM sequence: GAG
gcagtggtggtgagtgacgg

SEQ ID NO: 12091 - DNA, 20 bp, Artificial Sequence
  Description of Artificial Sequence: Synthetic oligonucleotide
  Target: COL7A1; (-) strand; PAM type: NRG; PAM sequence: GGG
ctgcagtggtggtgagtgac

SEQ ID NO: 12092 - DNA, 20 bp, Artificial Sequence
  Description of Artificial Sequence: Synthetic oligonucleotide
  Target: COL7A1; (-) strand; PAM type: NRG; PAM sequence: CGG
cctgcagtggtggtgagtga

SEQ ID NO: 12093 - DNA, 20 bp, Artificial Sequence
  Description of Artificial Sequence: Synthetic oligonucleotide
  Target: COL7A1; (-) strand; PAM type: NRG; PAM sequence: GAG
ggggaccctgcagtggtggt

SEQ ID NO: 12094 - DNA, 20 bp, Artificial Sequence
  Description of Artificial Sequence: Synthetic oligonucleotide
  Target: COL7A1; (-) strand; PAM type: NRG; PAM sequence: TGG
ccctggggaccctgcagtgg

SEQ ID NO: 12095 - DNA, 20 bp, Artificial Sequence
  Description of Artificial Sequence: Synthetic oligonucleotide
  Target: COL7A1; (-) strand; PAM type: NRG; PAM sequence: TGG
tcgccctggggaccctgcag

SEQ ID NO: 12096 - DNA, 20 bp, Artificial Sequence
  Description of Artificial Sequence: Synthetic oligonucleotide
  Target: COL7A1; (-) strand; PAM type: NRG; PAM sequence: CAG
tggtcgccctggggaccctg

SEQ ID NO: 12097 - DNA, 20 bp, Artificial Sequence
  Description of Artificial Sequence: Synthetic oligonucleotide
  Target: COL7A1; (-) strand; PAM type: NRG; PAM sequence: GGG
gggggagcctggtcgccctg

SEQ ID NO: 12098 - DNA, 20 bp, Artificial Sequence
  Description of Artificial Sequence: Synthetic oligonucleotide
  Target: COL7A1; (-) strand; PAM type: NRG; PAM sequence: GGG
agggggagcctggtcgccct

SEQ ID NO: 12099 - DNA, 20 bp, Artificial Sequence
  Description of Artificial Sequence: Synthetic oligonucleotide
  Target: COL7A1; (-) strand; PAM type: NRG; PAM sequence: TGG
cagggggagcctggtcgccc

SEQ ID NO: 12100 - DNA, 20 bp, Artificial Sequence
  Description of Artificial Sequence: Synthetic oligonucleotide
  Target: COL7A1; (-) strand; PAM type: NRG; PAM sequence: TGG
ctctctccacagggggagcc

SEQ ID NO: 12101 - DNA, 20 bp, Artificial Sequence
  Description of Artificial Sequence: Synthetic oligonucleotide
  Target: COL7A1; (-) strand; PAM type: NRG; PAM sequence: GAG
ctatcctctctccacagggg

SEQ ID NO: 12102 - DNA, 20 bp, Artificial Sequence
  Description of Artificial Sequence: Synthetic oligonucleotide
  Target: COL7A1; (-) strand; PAM type: NRG; PAM sequence: GGG
tcctatcctctctccacagg

SEQ ID NO: 12103 - DNA, 20 bp, Artificial Sequence
  Description of Artificial Sequence: Synthetic oligonucleotide
  Target: COL7A1; (-) strand; PAM type: NRG; PAM sequence: GGG
ctcctatcctctctccacag

SEQ ID NO: 12104 - DNA, 20 bp, Artificial Sequence
  Description of Artificial Sequence: Synthetic oligonucleotide
  Target: COL7A1; (-) strand; PAM type: NRG; PAM sequence: GGG
gctcctatcctctctccaca

SEQ ID NO: 12105 - DNA, 20 bp, Artificial Sequence
  Description of Artificial Sequence: Synthetic oligonucleotide
  Target: COL7A1; (-) strand; PAM type: NRG; PAM sequence: AGG
tgctcctatcctctctccac

SEQ ID NO: 12106 - DNA, 20 bp, Artificial Sequence
  Description of Artificial Sequence: Synthetic oligonucleotide
  Target: COL7A1; (-) strand; PAM type: NRG; PAM sequence: CAG
ctgctcctatcctctctcca

SEQ ID NO: 12107 - DNA, 20 bp, Artificial Sequence
  Description of Artificial Sequence: Synthetic oligonucleotide
  Target: COL7A1; (-) strand; PAM type: NRG; PAM sequence: AGG
cactgggattttgggctcct

SEQ ID NO: 12108 - DNA, 20 bp, Artificial Sequence
  Description of Artificial Sequence: Synthetic oligonucleotide
  Target: COL7A1; (-) strand; PAM type: NRG; PAM sequence: TAG
acactgggattttgggctcc

SEQ ID NO: 12109 - DNA, 20 bp, Artificial Sequence
  Description of Artificial Sequence: Synthetic oligonucleotide
  Target: COL7A1; (-) strand; PAM type: NRG; PAM sequence: GGG
agatgggacactgggatttt

SEQ ID NO: 12110 - DNA, 20 bp, Artificial Sequence
  Description of Artificial Sequence: Synthetic oligonucleotide
  Target: COL7A1; (-) strand; PAM type: NRG; PAM sequence: TGG
cagatgggacactgggattt

SEQ ID NO: 12111 - DNA, 20 bp, Artificial Sequence
  Description of Artificial Sequence: Synthetic oligonucleotide
  Target: COL7A1; (-) strand; PAM type: NRG; PAM sequence: GGG
gatgtggcagatgggacact

SEQ ID NO: 12112 - DNA, 20 bp, Artificial Sequence
  Description of Artificial Sequence: Synthetic oligonucleotide
  Target: COL7A1; (-) strand; PAM type: NRG; PAM sequence: TGG
ggatgtggcagatgggacac

SEQ ID NO: 12113 - DNA, 20 bp, Artificial Sequence
  Description of Artificial Sequence: Synthetic oligonucleotide
  Target: COL7A1; (-) strand; PAM type: NRG; PAM sequence: GGG
gtactagggatgtggcagat

SEQ ID NO: 12114 - DNA, 20 bp, Artificial Sequence
  Description of Artificial Sequence: Synthetic oligonucleotide
  Target: COL7A1; (-) strand; PAM type: NRG; PAM sequence: TGG
ggtactagggatgtggcaga

SEQ ID NO: 12115 - DNA, 20 bp, Artificial Sequence
  Description of Artificial Sequence: Synthetic oligonucleotide
  Target: COL7A1; (-) strand; PAM type: NRG; PAM sequence: CAG
gtctggtactagggatgtgg

SEQ ID NO: 12116 - DNA, 20 bp, Artificial Sequence
  Description of Artificial Sequence: Synthetic oligonucleotide
  Target: COL7A1; (-) strand; PAM type: NRG; PAM sequence: TGG
actgtctggtactagggatg

SEQ ID NO: 12117 - DNA, 20 bp, Artificial Sequence
  Description of Artificial Sequence: Synthetic oligonucleotide
  Target: COL7A1; (-) strand; PAM type: NRG; PAM sequence: GGG
ggtggcactgtctggtacta

SEQ ID NO: 12118 - DNA, 20 bp, Artificial Sequence
  Description of Artificial Sequence: Synthetic oligonucleotide
  Target: COL7A1; (-) strand; PAM type: NRG; PAM sequence: AGG
gggtggcactgtctggtact

SEQ ID NO: 12119 - DNA, 20 bp, Artificial Sequence
  Description of Artificial Sequence: Synthetic oligonucleotide
  Target: COL7A1; (-) strand; PAM type: NRG; PAM sequence: TAG
ggggtggcactgtctggtac

SEQ ID NO: 12120 - DNA, 20 bp, Artificial Sequence
  Description of Artificial Sequence: Synthetic oligonucleotide
  Target: COL7A1; (-) strand; PAM type: NRG; PAM sequence: TGG
cggctgggggtggcactgtc

SEQ ID NO: 12121 - DNA, 20 bp, Artificial Sequence
  Description of Artificial Sequence: Synthetic oligonucleotide
  Target: COL7A1; (-) strand; PAM type: NRG; PAM sequence: TGG
ggtgggtcctcggctggggg

SEQ ID NO: 12122 - DNA, 20 bp, Artificial Sequence
  Description of Artificial Sequence: Synthetic oligonucleotide
  Target: COL7A1; (-) strand; PAM type: NRG; PAM sequence: GGG
gaaggtgggtcctcggctgg

SEQ ID NO: 12123 - DNA, 20 bp, Artificial Sequence
  Description of Artificial Sequence: Synthetic oligonucleotide
  Target: COL7A1; (-) strand; PAM type: NRG; PAM sequence: GGG
agaaggtgggtcctcggctg

SEQ ID NO: 12124 - DNA, 20 bp, Artificial Sequence
  Description of Artificial Sequence: Synthetic oligonucleotide
  Target: COL7A1; (-) strand; PAM type: NRG; PAM sequence: GGG
gagaaggtgggtcctcggct

SEQ ID NO: 12125 - DNA, 20 bp, Artificial Sequence
  Description of Artificial Sequence: Synthetic oligonucleotide
  Target: COL7A1; (-) strand; PAM type: NRG; PAM sequence: TGG
agagaaggtgggtcctcggc

SEQ ID NO: 12126 - DNA, 20 bp, Artificial Sequence
  Description of Artificial Sequence: Synthetic oligonucleotide
  Target: COL7A1; (-) strand; PAM type: NRG; PAM sequence: CGG
aaggagagaaggtgggtcct

SEQ ID NO: 12127 - DNA, 20 bp, Artificial Sequence
  Description of Artificial Sequence: Synthetic oligonucleotide
  Target: COL7A1; (-) strand; PAM type: NRG; PAM sequence: GGG
ggccgccaaggagagaaggt

SEQ ID NO: 12128 - DNA, 20 bp, Artificial Sequence
  Description of Artificial Sequence: Synthetic oligonucleotide
  Target: COL7A1; (-) strand; PAM type: NRG; PAM sequence: TGG
tggccgccaaggagagaagg

SEQ ID NO: 12129 - DNA, 20 bp, Artificial Sequence
  Description of Artificial Sequence: Synthetic oligonucleotide
  Target: COL7A1; (-) strand; PAM type: NRG; PAM sequence: AGG
cactggccgccaaggagaga

SEQ ID NO: 12130 - DNA, 20 bp, Artificial Sequence
  Description of Artificial Sequence: Synthetic oligonucleotide
  Target: COL7A1; (-) strand; PAM type: NRG; PAM sequence: AAG
ccactggccgccaaggagag

SEQ ID NO: 12131 - DNA, 20 bp, Artificial Sequence
  Description of Artificial Sequence: Synthetic oligonucleotide
  Target: COL7A1; (-) strand; PAM type: NRG; PAM sequence: GAG
gacccactggccgccaagga

SEQ ID NO: 12132 - DNA, 20 bp, Artificial Sequence
  Description of Artificial Sequence: Synthetic oligonucleotide
  Target: COL7A1; (-) strand; PAM type: NRG; PAM sequence: GAG
aggacccactggccgccaag

SEQ ID NO: 12133 - DNA, 20 bp, Artificial Sequence
  Description of Artificial Sequence: Synthetic oligonucleotide
  Target: COL7A1; (-) strand; PAM type: NRG; PAM sequence: AGG
ccaggacccactggccgcca

SEQ ID NO: 12134 - DNA, 20 bp, Artificial Sequence
  Description of Artificial Sequence: Synthetic oligonucleotide
  Target: COL7A1; (-) strand; PAM type: NRG; PAM sequence: AAG
accaggacccactggccgcc

SEQ ID NO: 12135 - DNA, 20 bp, Artificial Sequence
  Description of Artificial Sequence: Synthetic oligonucleotide
  Target: COL7A1; (-) strand; PAM type: NRG; PAM sequence: TGG
caggggccaccaggacccac

SEQ ID NO: 12136 - DNA, 20 bp, Artificial Sequence
  Description of Artificial Sequence: Synthetic oligonucleotide
  Target: COL7A1; (-) strand; PAM type: NRG; PAM sequence: AGG
ctctacattcaggggccacc

SEQ ID NO: 12137 - DNA, 20 bp, Artificial Sequence
  Description of Artificial Sequence: Synthetic oligonucleotide
  Target: COL7A1; (-) strand; PAM type: NRG; PAM sequence: CAG
tctctacattcaggggccac

SEQ ID NO: 12138 - DNA, 20 bp, Artificial Sequence
  Description of Artificial Sequence: Synthetic oligonucleotide
  Target: COL7A1; (-) strand; PAM type: NRG; PAM sequence: GGG
cacactttctctacattcag

SEQ ID NO: 12139 - DNA, 20 bp, Artificial Sequence
  Description of Artificial Sequence: Synthetic oligonucleotide
  Target: COL7A1; (-) strand; PAM type: NRG; PAM sequence: GGG
tcacactttctctacattca

SEQ ID NO: 12140 - DNA, 20 bp, Artificial Sequence
  Description of Artificial Sequence: Synthetic oligonucleotide
  Target: COL7A1; (-) strand; PAM type: NRG; PAM sequence: AGG
ctcacactttctctacattc

SEQ ID NO: 12141 - DNA, 20 bp, Artificial Sequence
  Description of Artificial Sequence: Synthetic oligonucleotide
  Target: COL7A1; (-) strand; PAM type: NRG; PAM sequence: CAG
gctcacactttctctacatt

SEQ ID NO: 12142 - DNA, 20 bp, Artificial Sequence
  Description of Artificial Sequence: Synthetic oligonucleotide
  Target: COL7A1; (-) strand; PAM type: NRG; PAM sequence: GGG
cccctttcccttcccctcct

SEQ ID NO: 12143 - DNA, 20 bp, Artificial Sequence
  Description of Artificial Sequence: Synthetic oligonucleotide
  Target: COL7A1; (-) strand; PAM type: NRG; PAM sequence: TGG
tcccctttcccttcccctcc

SEQ ID NO: 12144 - DNA, 20 bp, Artificial Sequence
  Description of Artificial Sequence: Synthetic oligonucleotide
  Target: COL7A1; (-) strand; PAM type: NRG; PAM sequence: GGG
actgtggtgggaccaggagt

SEQ ID NO: 12145 - DNA, 20 bp, Artificial Sequence
  Description of Artificial Sequence: Synthetic oligonucleotide
  Target: COL7A1; (-) strand; PAM type: NRG; PAM sequence: TGG
gactgtggtgggaccaggag

SEQ ID NO: 12146 - DNA, 20 bp, Artificial Sequence
  Description of Artificial Sequence: Synthetic oligonucleotide
  Target: COL7A1; (-) strand; PAM type: NRG; PAM sequence: GAG
tgtgactgtggtgggaccag

SEQ ID NO: 12147 - DNA, 20 bp, Artificial Sequence
  Description of Artificial Sequence: Synthetic oligonucleotide
  Target: COL7A1; (-) strand; PAM type: NRG; PAM sequence: AGG
tctgtgactgtggtgggacc

SEQ ID NO: 12148 - DNA, 20 bp, Artificial Sequence
  Description of Artificial Sequence: Synthetic oligonucleotide
  Target: COL7A1; (-) strand; PAM type: NRG; PAM sequence: CAG
gtctgtgactgtggtgggac

SEQ ID NO: 12149 - DNA, 20 bp, Artificial Sequence
  Description of Artificial Sequence: Synthetic oligonucleotide
  Target: COL7A1; (-) strand; PAM type: NRG; PAM sequence: GGG
agtgagtctgtgactgtggt

SEQ ID NO: 12150 - DNA, 20 bp, Artificial Sequence
  Description of Artificial Sequence: Synthetic oligonucleotide
  Target: COL7A1; (-) strand; PAM type: NRG; PAM sequence: TGG
aagtgagtctgtgactgtgg

SEQ ID NO: 12151 - DNA, 20 bp, Artificial Sequence
  Description of Artificial Sequence: Synthetic oligonucleotide
  Target: COL7A1; (-) strand; PAM type: NRG; PAM sequence: TGG
ctgaagtgagtctgtgactg

SEQ ID NO: 12152 - DNA, 20 bp, Artificial Sequence
  Description of Artificial Sequence: Synthetic oligonucleotide
  Target: COL7A1; (-) strand; PAM type: NRG; PAM sequence: GAG
ggagccaagggtcctgaagt

SEQ ID NO: 12153 - DNA, 20 bp, Artificial Sequence
  Description of Artificial Sequence: Synthetic oligonucleotide
  Target: COL7A1; (-) strand; PAM type: NRG; PAM sequence: AAG
tcctggagccaagggtcctg

SEQ ID NO: 12154 - DNA, 20 bp, Artificial Sequence
  Description of Artificial Sequence: Synthetic oligonucleotide
  Target: COL7A1; (-) strand; PAM type: NRG; PAM sequence: GGG
gctggacgtcctggagccaa

SEQ ID NO: 12155 - DNA, 20 bp, Artificial Sequence
  Description of Artificial Sequence: Synthetic oligonucleotide
  Target: COL7A1; (-) strand; PAM type: NRG; PAM sequence: AGG
tgctggacgtcctggagcca

SEQ ID NO: 12156 - DNA, 20 bp, Artificial Sequence
  Description of Artificial Sequence: Synthetic oligonucleotide
  Target: COL7A1; (-) strand; PAM type: NRG; PAM sequence: AAG
ttgctggacgtcctggagcc

SEQ ID NO: 12157 - DNA, 20 bp, Artificial Sequence
  Description of Artificial Sequence: Synthetic oligonucleotide
  Target: COL7A1; (-) strand; PAM type: NRG; PAM sequence: GAG
aggggttgctggacgtcctg

SEQ ID NO: 12158 - DNA, 20 bp, Artificial Sequence
  Description of Artificial Sequence: Synthetic oligonucleotide
  Target: COL7A1; (-) strand; PAM type: NRG; PAM sequence: TGG
ccaggggttgctggacgtcc

SEQ ID NO: 12159 - DNA, 20 bp, Artificial Sequence
  Description of Artificial Sequence: Synthetic oligonucleotide
  Target: COL7A1; (-) strand; PAM type: NRG; PAM sequence: TGG
caggggctgccaggggttgc

SEQ ID NO: 12160 - DNA, 20 bp, Artificial Sequence
  Description of Artificial Sequence: Synthetic oligonucleotide
  Target: COL7A1; (-) strand; PAM type: NRG; PAM sequence: GGG
tctcctccaggggctgccag

SEQ ID NO: 12161 - DNA, 20 bp, Artificial Sequence
  Description of Artificial Sequence: Synthetic oligonucleotide
  Target: COL7A1; (-) strand; PAM type: NRG; PAM sequence: GGG
ctctcctccaggggctgcca

SEQ ID NO: 12162 - DNA, 20 bp, Artificial Sequence
  Description of Artificial Sequence: Synthetic oligonucleotide
  Target: COL7A1; (-) strand; PAM type: NRG; PAM sequence: AGG
cctctcctccaggggctgcc

SEQ ID NO: 12163 - DNA, 20 bp, Artificial Sequence
  Description of Artificial Sequence: Synthetic oligonucleotide
  Target: COL7A1; (-) strand; PAM type: NRG; PAM sequence: CAG
tcctctcctccaggggctgc

SEQ ID NO: 12164 - DNA, 20 bp, Artificial Sequence
  Description of Artificial Sequence: Synthetic oligonucleotide
  Target: COL7A1; (-) strand; PAM type: NRG; PAM sequence: GGG
cttcccttcctctcctccag

SEQ ID NO: 12165 - DNA, 20 bp, Artificial Sequence
  Description of Artificial Sequence: Synthetic oligonucleotide
  Target: COL7A1; (-) strand; PAM type: NRG; PAM sequence: GGG
tcttcccttcctctcctcca

SEQ ID NO: 12166 - DNA, 20 bp, Artificial Sequence
  Description of Artificial Sequence: Synthetic oligonucleotide
  Target: COL7A1; (-) strand; PAM type: NRG; PAM sequence: AGG
ctcttcccttcctctcctcc

SEQ ID NO: 12167 - DNA, 20 bp, Artificial Sequence
  Description of Artificial Sequence: Synthetic oligonucleotide
  Target: COL7A1; (-) strand; PAM type: NRG; PAM sequence: CAG
gctcttcccttcctctcctc

SEQ ID NO: 12168 - DNA, 20 bp, Artificial Sequence
  Description of Artificial Sequence: Synthetic oligonucleotide
  Target: COL7A1; (-) strand; PAM type: NRG; PAM sequence: CAG
cccgtccccacccacctgca

SEQ ID NO: 12169 - DNA, 20 bp, Artificial Sequence
  Description of Artificial Sequence: Synthetic oligonucleotide
  Target: COL7A1; (-) strand; PAM type: NRG; PAM sequence: TAG
ccagcccccaccccagcctc

SEQ ID NO: 12170 - DNA, 20 bp, Artificial Sequence
  Description of Artificial Sequence: Synthetic oligonucleotide
  Target: COL7A1; (-) strand; PAM type: NRG; PAM sequence: CAG
cccctctccagcccccaccc

SEQ ID NO: 12171 - DNA, 20 bp, Artificial Sequence
  Description of Artificial Sequence: Synthetic oligonucleotide
  Target: COL7A1; (-) strand; PAM type: NRG; PAM sequence: CAG
aatcttccctgacccctctc

SEQ ID NO: 12172 - DNA, 20 bp, Artificial Sequence
  Description of Artificial Sequence: Synthetic oligonucleotide
  Target: COL7A1; (-) strand; PAM type: NRG; PAM sequence: AAG
ctggtctctgttctcctgcc

SEQ ID NO: 12173 - DNA, 20 bp, Artificial Sequence
  Description of Artificial Sequence: Synthetic oligonucleotide
  Target: COL7A1; (-) strand; PAM type: NRG; PAM sequence: TGG
gaccttgattttcactgacc

SEQ ID NO: 12174 - DNA, 20 bp, Artificial Sequence
  Description of Artificial Sequence: Synthetic oligonucleotide
  Target: COL7A1; (-) strand; PAM type: NRG; PAM sequence: TGG
aaccctcagccccagggacc

SEQ ID NO: 12175 - DNA, 20 bp, Artificial Sequence
  Description of Artificial Sequence: Synthetic oligonucleotide
  Target: COL7A1; (-) strand; PAM type: NRG; PAM sequence: GGG
ggctctaaccctcagcccca

SEQ ID NO: 12176 - DNA, 20 bp, Artificial Sequence
  Description of Artificial Sequence: Synthetic oligonucleotide
  Target: COL7A1; (-) strand; PAM type: NRG; PAM sequence: AGG
aggctctaaccctcagcccc

SEQ ID NO: 12177 - DNA, 20 bp, Artificial Sequence
  Description of Artificial Sequence: Synthetic oligonucleotide
  Target: COL7A1; (-) strand; PAM type: NRG; PAM sequence: CAG
caggctctaaccctcagccc

SEQ ID NO: 12178 - DNA, 20 bp, Artificial Sequence
  Description of Artificial Sequence: Synthetic oligonucleotide
  Target: COL7A1; (-) strand; PAM type: NRG; PAM sequence: CAG
ctgatacaggctctaaccct

SEQ ID NO: 12179 - DNA, 20 bp, Artificial Sequence
  Description of Artificial Sequence: Synthetic oligonucleotide
  Target: COL7A1; (-) strand; PAM type: NRG; PAM sequence: AGG
ccacttatccctgctgatac

SEQ ID NO: 12180 - DNA, 20 bp, Artificial Sequence
  Description of Artificial Sequence: Synthetic oligonucleotide
  Target: COL7A1; (-) strand; PAM type: NRG; PAM sequence: CAG
accacttatccctgctgata

SEQ ID NO: 12181 - DNA, 20 bp, Artificial Sequence
  Description of Artificial Sequence: Synthetic oligonucleotide
  Target: COL7A1; (-) strand; PAM type: NRG; PAM sequence: TGG
tgacctggctgtgccctttc

SEQ ID NO: 12182 - DNA, 20 bp, Artificial Sequence
  Description of Artificial Sequence: Synthetic oligonucleotide
  Target: COL7A1; (-) strand; PAM type: NRG; PAM sequence: TGG
aatgctcataccagctgacc

SEQ ID NO: 12183 - DNA, 20 bp, Artificial Sequence
  Description of Artificial Sequence: Synthetic oligonucleotide
  Target: COL7A1; (-) strand; PAM type: NRG; PAM sequence: CAG
actggctgcaatgctcatac

SEQ ID NO: 12184 - DNA, 20 bp, Artificial Sequence
  Description of Artificial Sequence: Synthetic oligonucleotide
  Target: COL7A1; (-) strand; PAM type: NRG; PAM sequence: TGG
gggatcccgggtaaacccac

SEQ ID NO: 12185 - DNA, 20 bp, Artificial Sequence
  Description of Artificial Sequence: Synthetic oligonucleotide
  Target: COL7A1; (-) strand; PAM type: NRG; PAM sequence: GGG
cccaggcccagcgggatccc

SEQ ID NO: 12186 - DNA, 20 bp, Artificial Sequence
  Description of Artificial Sequence: Synthetic oligonucleotide
  Target: COL7A1; (-) strand; PAM type: NRG; PAM sequence: CGG
ccccaggcccagcgggatcc

SEQ ID NO: 12187 - DNA, 20 bp, Artificial Sequence
  Description of Artificial Sequence: Synthetic oligonucleotide
  Target: COL7A1; (-) strand; PAM type: NRG; PAM sequence: GGG
cgtggacccccaggcccagc

SEQ ID NO: 12188 - DNA, 20 bp, Artificial Sequence
  Description of Artificial Sequence: Synthetic oligonucleotide
  Target: COL7A1; (-) strand; PAM type: NRG; PAM sequence: CGG
acgtggacccccaggcccag

SEQ ID NO: 12189 - DNA, 20 bp, Artificial Sequence
  Description of Artificial Sequence: Synthetic oligonucleotide
  Target: COL7A1; (-) strand; PAM type: NRG; PAM sequence: CAG
cgaacgtggacccccaggcc

SEQ ID NO: 12190 - DNA, 20 bp, Artificial Sequence
  Description of Artificial Sequence: Synthetic oligonucleotide
  Target: COL7A1; (-) strand; PAM type: NRG; PAM sequence: AGG
cagggcgaacgtggaccccc

SEQ ID NO: 12191 - DNA, 20 bp, Artificial Sequence
  Description of Artificial Sequence: Synthetic oligonucleotide
  Target: COL7A1; (-) strand; PAM type: NRG; PAM sequence: CAG
tcagggcgaacgtggacccc

SEQ ID NO: 12192 - DNA, 20 bp, Artificial Sequence
  Description of Artificial Sequence: Synthetic oligonucleotide
  Target: COL7A1; (-) strand; PAM type: NRG; PAM sequence: TGG
cttttccatcagggcgaacg

SEQ ID NO: 12193 - DNA, 20 bp, Artificial Sequence
  Description of Artificial Sequence: Synthetic oligonucleotide
  Target: COL7A1; (-) strand; PAM type: NRG; PAM sequence: GGG
tgacctcttcttttccatca

SEQ ID NO: 12194 - DNA, 20 bp, Artificial Sequence
  Description of Artificial Sequence: Synthetic oligonucleotide
  Target: COL7A1; (-) strand; PAM type: NRG; PAM sequence: AGG
ctgacctcttcttttccatc

SEQ ID NO: 12195 - DNA, 20 bp, Artificial Sequence
  Description of Artificial Sequence: Synthetic oligonucleotide
  Target: COL7A1; (-) strand; PAM type: NRG; PAM sequence: CAG
tctgacctcttcttttccat

SEQ ID NO: 12196 - DNA, 20 bp, Artificial Sequence
  Description of Artificial Sequence: Synthetic oligonucleotide
  Target: COL7A1; (-) strand; PAM type: NRG; PAM sequence: CAG
tggaggatctgggcccaact

SEQ ID NO: 12197 - DNA, 20 bp, Artificial Sequence
  Description of Artificial Sequence: Synthetic oligonucleotide
  Target: COL7A1; (-) strand; PAM type: NRG; PAM sequence: GGG
ccaagggccctggaggatct

SEQ ID NO: 12198 - DNA, 20 bp, Artificial Sequence
  Description of Artificial Sequence: Synthetic oligonucleotide
  Target: COL7A1; (-) strand; PAM type: NRG; PAM sequence: TGG
gccaagggccctggaggatc

SEQ ID NO: 12199 - DNA, 20 bp, Artificial Sequence
  Description of Artificial Sequence: Synthetic oligonucleotide
  Target: COL7A1; (-) strand; PAM type: NRG; PAM sequence: AGG
gggggtgccaagggccctgg

SEQ ID NO: 12200 - DNA, 20 bp, Artificial Sequence
  Description of Artificial Sequence: Synthetic oligonucleotide
  Target: COL7A1; (-) strand; PAM type: NRG; PAM sequence: GAG
ggggggtgccaagggccctg

SEQ ID NO: 12201 - DNA, 20 bp, Artificial Sequence
  Description of Artificial Sequence: Synthetic oligonucleotide
  Target: COL7A1; (-) strand; PAM type: NRG; PAM sequence: TGG
ctggggggtgccaagggccc

SEQ ID NO: 12202 - DNA, 20 bp, Artificial Sequence
  Description of Artificial Sequence: Synthetic oligonucleotide
  Target: COL7A1; (-) strand; PAM type: NRG; PAM sequence: GGG
tgcaacctggggggtgccaa

SEQ ID NO: 12203 - DNA, 20 bp, Artificial Sequence
  Description of Artificial Sequence: Synthetic oligonucleotide
  Target: COL7A1; (-) strand; PAM type: NRG; PAM sequence: AGG
gtgcaacctggggggtgcca

SEQ ID NO: 12204 - DNA, 20 bp, Artificial Sequence
  Description of Artificial Sequence: Synthetic oligonucleotide
  Target: COL7A1; (-) strand; PAM type: NRG; PAM sequence: AAG
agtgcaacctggggggtgcc

SEQ ID NO: 12205 - DNA, 20 bp, Artificial Sequence
  Description of Artificial Sequence: Synthetic oligonucleotide
  Target: COL7A1; (-) strand; PAM type: NRG; PAM sequence: GGG
gaaggtaagtgcaacctggg

SEQ ID NO: 12206 - DNA, 20 bp, Artificial Sequence
  Description of Artificial Sequence: Synthetic oligonucleotide
  Target: COL7A1; (-) strand; PAM type: NRG; PAM sequence: GGG
agaaggtaagtgcaacctgg

SEQ ID NO: 12207 - DNA, 20 bp, Artificial Sequence
  Description of Artificial Sequence: Synthetic oligonucleotide
  Target: COL7A1; (-) strand; PAM type: NRG; PAM sequence: GGG
gagaaggtaagtgcaacctg

SEQ ID NO: 12208 - DNA, 20 bp, Artificial Sequence
  Description of Artificial Sequence: Synthetic oligonucleotide
  Target: COL7A1; (-) strand; PAM type: NRG; PAM sequence: GGG
agagaaggtaagtgcaacct

SEQ ID NO: 12209 - DNA, 20 bp, Artificial Sequence
  Description of Artificial Sequence: Synthetic oligonucleotide
  Target: COL7A1; (-) strand; PAM type: NRG; PAM sequence: TGG
gagagaaggtaagtgcaacc

SEQ ID NO: 12210 - DNA, 20 bp, Artificial Sequence
  Description of Artificial Sequence: Synthetic oligonucleotide
  Target: COL7A1; (-) strand; PAM type: NRG; PAM sequence: AAG
ggtgaggctggagagaaggt

SEQ ID NO: 12211 - DNA, 20 bp, Artificial Sequence
  Description of Artificial Sequence: Synthetic oligonucleotide
  Target: COL7A1; (-) strand; PAM type: NRG; PAM sequence: AGG
cctgggtgaggctggagaga

SEQ ID NO: 12212 - DNA, 20 bp, Artificial Sequence
  Description of Artificial Sequence: Synthetic oligonucleotide
  Target: COL7A1; (-) strand; PAM type: NRG; PAM sequence: AAG
ccctgggtgaggctggagag

SEQ ID NO: 12213 - DNA, 20 bp, Artificial Sequence
  Description of Artificial Sequence: Synthetic oligonucleotide
  Target: COL7A1; (-) strand; PAM type: NRG; PAM sequence: GAG
ggcccctgggtgaggctgga

SEQ ID NO: 12214 - DNA, 20 bp, Artificial Sequence
  Description of Artificial Sequence: Synthetic oligonucleotide
  Target: COL7A1; (-) strand; PAM type: NRG; PAM sequence: GAG
agggcccctgggtgaggctg

SEQ ID NO: 12215 - DNA, 20 bp, Artificial Sequence
  Description of Artificial Sequence: Synthetic oligonucleotide
  Target: COL7A1; (-) strand; PAM type: NRG; PAM sequence: TGG
ccagggcccctgggtgaggc

SEQ ID NO: 12216 - DNA, 20 bp, Artificial Sequence
  Description of Artificial Sequence: Synthetic oligonucleotide
  Target: COL7A1; (-) strand; PAM type: NRG; PAM sequence: AGG
ctttccagggcccctgggtg

SEQ ID NO: 12217 - DNA, 20 bp, Artificial Sequence
  Description of Artificial Sequence: Synthetic oligonucleotide
  Target: COL7A1; (-) strand; PAM type: NRG; PAM sequence: GAG
gctttccagggcccctgggt

SEQ ID NO: 12218 - DNA, 20 bp, Artificial Sequence
  Description of Artificial Sequence: Synthetic oligonucleotide
  Target: COL7A1; (-) strand; PAM type: NRG; PAM sequence: GGG
cggggctttccagggcccct

SEQ ID NO: 12219 - DNA, 20 bp, Artificial Sequence
  Description of Artificial Sequence: Synthetic oligonucleotide
  Target: COL7A1; (-) strand; PAM type: NRG; PAM sequence: TGG
ccggggctttccagggcccc

SEQ ID NO: 12220 - DNA, 20 bp, Artificial Sequence
  Description of Artificial Sequence: Synthetic oligonucleotide
  Target: COL7A1; (-) strand; PAM type: NRG; PAM sequence: GGG
agggtgaccggggctttcca

SEQ ID NO: 12221 - DNA, 20 bp, Artificial Sequence
  Description of Artificial Sequence: Synthetic oligonucleotide
  Target: COL7A1; (-) strand; PAM type: NRG; PAM sequence: AGG
cagggtgaccggggctttcc

SEQ ID NO: 12222 - DNA, 20 bp, Artificial Sequence
  Description of Artificial Sequence: Synthetic oligonucleotide
  Target: COL7A1; (-) strand; PAM type: NRG; PAM sequence: CAG
tcagggtgaccggggctttc

SEQ ID NO: 12223 - DNA, 20 bp, Artificial Sequence
  Description of Artificial Sequence: Synthetic oligonucleotide
  Target: COL7A1; (-) strand; PAM type: NRG; PAM sequence: GGG
ctctctcttcagggtgaccg

SEQ ID NO: 12224 - DNA, 20 bp, Artificial Sequence
  Description of Artificial Sequence: Synthetic oligonucleotide
  Target: COL7A1; (-) strand; PAM type: NRG; PAM sequence: GGG
cctctctcttcagggtgacc

SEQ ID NO: 12225 - DNA, 20 bp, Artificial Sequence
  Description of Artificial Sequence: Synthetic oligonucleotide
  Target: COL7A1; (-) strand; PAM type: NRG; PAM sequence: CGG
ccctctctcttcagggtgac

SEQ ID NO: 12226 - DNA, 20 bp, Artificial Sequence
  Description of Artificial Sequence: Synthetic oligonucleotide
  Target: COL7A1; (-) strand; PAM type: NRG; PAM sequence: GGG
tctctcaccctctctcttca

SEQ ID NO: 12227 - DNA, 20 bp, Artificial Sequence
  Description of Artificial Sequence: Synthetic oligonucleotide
  Target: COL7A1; (-) strand; PAM type: NRG; PAM sequence: AGG
ttctctcaccctctctcttc

SEQ ID NO: 12228 - DNA, 20 bp, Artificial Sequence
  Description of Artificial Sequence: Synthetic oligonucleotide
  Target: COL7A1; (-) strand; PAM type: NRG; PAM sequence: CAG
tttctctcaccctctctctt

SEQ ID NO: 12229 - DNA, 20 bp, Artificial Sequence
  Description of Artificial Sequence: Synthetic oligonucleotide
  Target: COL7A1; (-) strand; PAM type: NRG; PAM sequence: AAG
ttgtctggggtttgacgttc

SEQ ID NO: 12230 - DNA, 20 bp, Artificial Sequence
  Description of Artificial Sequence: Synthetic oligonucleotide
  Target: COL7A1; (-) strand; PAM type: NRG; PAM sequence: GGG
agtttgggaccccttgtctg

SEQ ID NO: 12231 - DNA, 20 bp, Artificial Sequence
  Description of Artificial Sequence: Synthetic oligonucleotide
  Target: COL7A1; (-) strand; PAM type: NRG; PAM sequence: GGG
gagtttgggaccccttgtct

SEQ ID NO: 12232 - DNA, 20 bp, Artificial Sequence
  Description of Artificial Sequence: Synthetic oligonucleotide
  Target: COL7A1; (-) strand; PAM type: NRG; PAM sequence: TGG
ggagtttgggaccccttgtc

SEQ ID NO: 12233 - DNA, 20 bp, Artificial Sequence
  Description of Artificial Sequence: Synthetic oligonucleotide
  Target: COL7A1; (-) strand; PAM type: NRG; PAM sequence: GGG
ggagggggtggttggagttt

SEQ ID NO: 12234 - DNA, 20 bp, Artificial Sequence
  Description of Artificial Sequence: Synthetic oligonucleotide
  Target: COL7A1; (-) strand; PAM type: NRG; PAM sequence: TGG
tggagggggtggttggagtt

SEQ ID NO: 12235 - DNA, 20 bp, Artificial Sequence
  Description of Artificial Sequence: Synthetic oligonucleotide
  Target: COL7A1; (-) strand; PAM type: NRG; PAM sequence: GAG
ggttttggagggggtggttg

SEQ ID NO: 12236 - DNA, 20 bp, Artificial Sequence
  Description of Artificial Sequence: Synthetic oligonucleotide
  Target: COL7A1; (-) strand; PAM type: NRG; PAM sequence: TGG
gtggttttggagggggtggt

SEQ ID NO: 12237 - DNA, 20 bp, Artificial Sequence
  Description of Artificial Sequence: Synthetic oligonucleotide
  Target: COL7A1; (-) strand; PAM type: NRG; PAM sequence: TGG
ggtcgtggttttggaggggg

SEQ ID NO: 12238 - DNA, 20 bp, Artificial Sequence
  Description of Artificial Sequence: Synthetic oligonucleotide
  Target: COL7A1; (-) strand; PAM type: NRG; PAM sequence: GGG
agaggtcgtggttttggagg

SEQ ID NO: 12239 - DNA, 20 bp, Artificial Sequence
  Description of Artificial Sequence: Synthetic oligonucleotide
  Target: COL7A1; (-) strand; PAM type: NRG; PAM sequence: GGG
cagaggtcgtggttttggag

SEQ ID NO: 12240 - DNA, 20 bp, Artificial Sequence
  Description of Artificial Sequence: Synthetic oligonucleotide
  Target: COL7A1; (-) strand; PAM type: NRG; PAM sequence: GGG
tcagaggtcgtggttttgga

SEQ ID NO: 12241 - DNA, 20 bp, Artificial Sequence
  Description of Artificial Sequence: Synthetic oligonucleotide
  Target: COL7A1; (-) strand; PAM type: NRG; PAM sequence: AGG
gtcagaggtcgtggttttgg

SEQ ID NO: 12242 - DNA, 20 bp, Artificial Sequence
  Description of Artificial Sequence: Synthetic oligonucleotide
  Target: COL7A1; (-) strand; PAM type: NRG; PAM sequence: GAG
ggtcagaggtcgtggttttg

SEQ ID NO: 12243 - DNA, 20 bp, Artificial Sequence
  Description of Artificial Sequence: Synthetic oligonucleotide
  Target: COL7A1; (-) strand; PAM type: NRG; PAM sequence: TGG
caggtcagaggtcgtggttt

SEQ ID NO: 12244 - DNA, 20 bp, Artificial Sequence
  Description of Artificial Sequence: Synthetic oligonucleotide
  Target: COL7A1; (-) strand; PAM type: NRG; PAM sequence: TGG
tccctccaggtcagaggtcg

SEQ ID NO: 12245 - DNA, 20 bp, Artificial Sequence
  Description of Artificial Sequence: Synthetic oligonucleotide
  Target: COL7A1; (-) strand; PAM type: NRG; PAM sequence: AGG
aagagttccctccaggtcag

SEQ ID NO: 12246 - DNA, 20 bp, Artificial Sequence
  Description of Artificial Sequence: Synthetic oligonucleotide
  Target: COL7A1; (-) strand; PAM type: NRG; PAM sequence: GAG
taagagttccctccaggtca

SEQ ID NO: 12247 - DNA, 20 bp, Artificial Sequence
  Description of Artificial Sequence: Synthetic oligonucleotide
  Target: COL7A1; (-) strand; PAM type: NRG; PAM sequence: CAG
gataagagttccctccaggt

SEQ ID NO: 12248 - DNA, 20 bp, Artificial Sequence
  Description of Artificial Sequence: Synthetic oligonucleotide
  Target: COL7A1; (-) strand; PAM type: NRG; PAM sequence: AGG
aggagataagagttccctcc

SEQ ID NO: 12249 - DNA, 20 bp, Artificial Sequence
  Description of Artificial Sequence: Synthetic oligonucleotide
  Target: COL7A1; (-) strand; PAM type: NRG; PAM sequence: CAG
aaggagataagagttccctc

SEQ ID NO: 12250 - DNA, 20 bp, Artificial Sequence
  Description of Artificial Sequence: Synthetic oligonucleotide
  Target: COL7A1; (-) strand; PAM type: NRG; PAM sequence: GAG
gctggaagataaggagataa

SEQ ID NO: 12251 - DNA, 20 bp, Artificial Sequence
  Description of Artificial Sequence: Synthetic oligonucleotide
  Target: COL7A1; (-) strand; PAM type: NRG; PAM sequence: AAG
aggctggaagataaggagat

SEQ ID NO: 12252 - DNA, 20 bp, Artificial Sequence
  Description of Artificial Sequence: Synthetic oligonucleotide
  Target: COL7A1; (-) strand; PAM type: NRG; PAM sequence: GAG
aggggaggctggaagataag

SEQ ID NO: 12253 - DNA, 20 bp, Artificial Sequence
  Description of Artificial Sequence: Synthetic oligonucleotide
  Target: COL7A1; (-) strand; PAM type: NRG; PAM sequence: AGG
ttaggggaggctggaagata

SEQ ID NO: 12254 - DNA, 20 bp, Artificial Sequence
  Description of Artificial Sequence: Synthetic oligonucleotide
  Target: COL7A1; (-) strand; PAM type: NRG; PAM sequence: AAG
gttaggggaggctggaagat

SEQ ID NO: 12255 - DNA, 20 bp, Artificial Sequence
  Description of Artificial Sequence: Synthetic oligonucleotide
  Target: COL7A1; (-) strand; PAM type: NRG; PAM sequence: AAG
atggtgttaggggaggctgg

SEQ ID NO: 12256 - DNA, 20 bp, Artificial Sequence
  Description of Artificial Sequence: Synthetic oligonucleotide
  Target: COL7A1; (-) strand; PAM type: NRG; PAM sequence: TGG
cccatggtgttaggggaggc

SEQ ID NO: 12257 - DNA, 20 bp, Artificial Sequence
  Description of Artificial Sequence: Synthetic oligonucleotide
  Target: COL7A1; (-) strand; PAM type: NRG; PAM sequence: AGG
gctccccatggtgttagggg

SEQ ID NO: 12258 - DNA, 20 bp, Artificial Sequence
  Description of Artificial Sequence: Synthetic oligonucleotide
  Target: COL7A1; (-) strand; PAM type: NRG; PAM sequence: GAG
ggctccccatggtgttaggg

SEQ ID NO: 12259 - DNA, 20 bp, Artificial Sequence
  Description of Artificial Sequence: Synthetic oligonucleotide
  Target: COL7A1; (-) strand; PAM type: NRG; PAM sequence: GGG
tgggctccccatggtgttag

SEQ ID NO: 12260 - DNA, 20 bp, Artificial Sequence
  Description of Artificial Sequence: Synthetic oligonucleotide
  Target: COL7A1; (-) strand; PAM type: NRG; PAM sequence: GGG
ctgggctccccatggtgtta

SEQ ID NO: 12261 - DNA, 20 bp, Artificial Sequence
  Description of Artificial Sequence: Synthetic oligonucleotide
  Target: COL7A1; (-) strand; PAM type: NRG; PAM sequence: AGG
tctgggctccccatggtgtt

SEQ ID NO: 12262 - DNA, 20 bp, Artificial Sequence
  Description of Artificial Sequence: Synthetic oligonucleotide
  Target: COL7A1; (-) strand; PAM type: NRG; PAM sequence: TAG
ctctgggctccccatggtgt

SEQ ID NO: 12263 - DNA, 20 bp, Artificial Sequence
  Description of Artificial Sequence: Synthetic oligonucleotide
  Target: COL7A1; (-) strand; PAM type: NRG; PAM sequence: TGG
gtgctactctgggctcccca

SEQ ID NO: 12264 - DNA, 20 bp, Artificial Sequence
  Description of Artificial Sequence: Synthetic oligonucleotide
  Target: COL7A1; (-) strand; PAM type: NRG; PAM sequence: GGG
ggtgtgaggggtgctactct

SEQ ID NO: 12265 - DNA, 20 bp, Artificial Sequence
  Description of Artificial Sequence: Synthetic oligonucleotide
  Target: COL7A1; (-) strand; PAM type: NRG; PAM sequence: TGG
aggtgtgaggggtgctactc

SEQ ID NO: 12266 - DNA, 20 bp, Artificial Sequence
  Description of Artificial Sequence: Synthetic oligonucleotide
  Target: COL7A1; (-) strand; PAM type: NRG; PAM sequence: GGG
ttgggggattcaggtgtgag

SEQ ID NO: 12267 - DNA, 20 bp, Artificial Sequence
  Description of Artificial Sequence: Synthetic oligonucleotide
  Target: COL7A1; (-) strand; PAM type: NRG; PAM sequence: GGG
gttgggggattcaggtgtga

SEQ ID NO: 12268 - DNA, 20 bp, Artificial Sequence
  Description of Artificial Sequence: Synthetic oligonucleotide
  Target: COL7A1; (-) strand; PAM type: NRG; PAM sequence: AGG
agttgggggattcaggtgtg

SEQ ID NO: 12269 - DNA, 20 bp, Artificial Sequence
  Description of Artificial Sequence: Synthetic oligonucleotide
  Target: COL7A1; (-) strand; PAM type: NRG; PAM sequence: GAG
cagttgggggattcaggtgt

SEQ ID NO: 12270 - DNA, 20 bp, Artificial Sequence
  Description of Artificial Sequence: Synthetic oligonucleotide
  Target: COL7A1; (-) strand; PAM type: NRG; PAM sequence: AGG
gagtaccagttgggggattc

SEQ ID NO: 12271 - DNA, 20 bp, Artificial Sequence
  Description of Artificial Sequence: Synthetic oligonucleotide
  Target: COL7A1; (-) strand; PAM type: NRG; PAM sequence: CAG
tgagtaccagttgggggatt

SEQ ID NO: 12272 - DNA, 20 bp, Artificial Sequence
  Description of Artificial Sequence: Synthetic oligonucleotide
  Target: COL7A1; (-) strand; PAM type: NRG; PAM sequence: GGG
ccaaagtgagtaccagttgg

SEQ ID NO: 12273 - DNA, 20 bp, Artificial Sequence
  Description of Artificial Sequence: Synthetic oligonucleotide
  Target: COL7A1; (-) strand; PAM type: NRG; PAM sequence: GGG
cccaaagtgagtaccagttg

SEQ ID NO: 12274 - DNA, 20 bp, Artificial Sequence
  Description of Artificial Sequence: Synthetic oligonucleotide
  Target: COL7A1; (-) strand; PAM type: NRG; PAM sequence: GGG
ccccaaagtgagtaccagtt

SEQ ID NO: 12275 - DNA, 20 bp, Artificial Sequence
  Description of Artificial Sequence: Synthetic oligonucleotide
  Target: COL7A1; (-) strand; PAM type: NRG; PAM sequence: TGG
gccccaaagtgagtaccagt

SEQ ID NO: 12276 - DNA, 20 bp, Artificial Sequence
  Description of Artificial Sequence: Synthetic oligonucleotide
  Target: COL7A1; (-) strand; PAM type: NRG; PAM sequence: CAG
attggccccaaagtgagtac

SEQ ID NO: 12277 - DNA, 20 bp, Artificial Sequence
  Description of Artificial Sequence: Synthetic oligonucleotide
  Target: COL7A1; (-) strand; PAM type: NRG; PAM sequence: GAG
ggagctattggccccaaagt

SEQ ID NO: 12278 - DNA, 20 bp, Artificial Sequence
  Description of Artificial Sequence: Synthetic oligonucleotide
  Target: COL7A1; (-) strand; PAM type: NRG; PAM sequence: AAG
tcctggagctattggcccca

SEQ ID NO: 12279 - DNA, 20 bp, Artificial Sequence
  Description of Artificial Sequence: Synthetic oligonucleotide
  Target: COL7A1; (-) strand; PAM type: NRG; PAM sequence: TGG
cggggacctcctggagctat

SEQ ID NO: 12280 - DNA, 20 bp, Artificial Sequence
  Description of Artificial Sequence: Synthetic oligonucleotide
  Target: COL7A1; (-) strand; PAM type: NRG; PAM sequence: GAG
gggcccacggggacctcctg

SEQ ID NO: 12281 - DNA, 20 bp, Artificial Sequence
  Description of Artificial Sequence: Synthetic oligonucleotide
  Target: COL7A1; (-) strand; PAM type: NRG; PAM sequence: TGG
cagggcccacggggacctcc

SEQ ID NO: 12282 - DNA, 20 bp, Artificial Sequence
  Description of Artificial Sequence: Synthetic oligonucleotide
  Target: COL7A1; (-) strand; PAM type: NRG; PAM sequence: GGG
catcccttccagggcccacg

SEQ ID NO: 12283 - DNA, 20 bp, Artificial Sequence
  Description of Artificial Sequence: Synthetic oligonucleotide
  Target: COL7A1; (-) strand; PAM type: NRG; PAM sequence: GGG
tcatcccttccagggcccac

SEQ ID NO: 12284 - DNA, 20 bp, Artificial Sequence
  Description of Artificial Sequence: Synthetic oligonucleotide
  Target: COL7A1; (-) strand; PAM type: NRG; PAM sequence: CGG
ttcatcccttccagggccca

SEQ ID NO: 12285 - DNA, 20 bp, Artificial Sequence
  Description of Artificial Sequence: Synthetic oligonucleotide
  Target: COL7A1; (-) strand; PAM type: NRG; PAM sequence: GGG
ccccaaattcatcccttcca

SEQ ID NO: 12286 - DNA, 20 bp, Artificial Sequence
  Description of Artificial Sequence: Synthetic oligonucleotide
  Target: COL7A1; (-) strand; PAM type: NRG; PAM sequence: AGG
cccccaaattcatcccttcc

SEQ ID NO: 12287 - DNA, 20 bp, Artificial Sequence
  Description of Artificial Sequence: Synthetic oligonucleotide
  Target: COL7A1; (-) strand; PAM type: NRG; PAM sequence: CAG
acccccaaattcatcccttc

SEQ ID NO: 12288 - DNA, 20 bp, Artificial Sequence
  Description of Artificial Sequence: Synthetic oligonucleotide
  Target: COL7A1; (-) strand; PAM type: NRG; PAM sequence: CAG
gaatatggtgggcacagctc

SEQ ID NO: 12289 - DNA, 20 bp, Artificial Sequence
  Description of Artificial Sequence: Synthetic oligonucleotide
  Target: COL7A1; (-) strand; PAM type: NRG; PAM sequence: CAG
gattctgaatatggtgggca

SEQ ID NO: 12290 - DNA, 20 bp, Artificial Sequence
  Description of Artificial Sequence: Synthetic oligonucleotide
  Target: COL7A1; (-) strand; PAM type: NRG; PAM sequence: GGG
ccagggattctgaatatggt

SEQ ID NO: 12291 - DNA, 20 bp, Artificial Sequence
  Description of Artificial Sequence: Synthetic oligonucleotide
  Target: COL7A1; (-) strand; PAM type: NRG; PAM sequence: TGG
gccagggattctgaatatgg

SEQ ID NO: 12292 - DNA, 20 bp, Artificial Sequence
  Description of Artificial Sequence: Synthetic oligonucleotide
  Target: COL7A1; (-) strand; PAM type: NRG; PAM sequence: TGG
ggggccagggattctgaata

SEQ ID NO: 12293 - DNA, 20 bp, Artificial Sequence
  Description of Artificial Sequence: Synthetic oligonucleotide
  Target: COL7A1; (-) strand; PAM type: NRG; PAM sequence: GGG
gcaggtgagtggaggggcca

SEQ ID NO: 12294 - DNA, 20 bp, Artificial Sequence
  Description of Artificial Sequence: Synthetic oligonucleotide
  Target: COL7A1; (-) strand; PAM type: NRG; PAM sequence: AGG
agcaggtgagtggaggggcc

SEQ ID NO: 12295 - DNA, 20 bp, Artificial Sequence
  Description of Artificial Sequence: Synthetic oligonucleotide
  Target: COL7A1; (-) strand; PAM type: NRG; PAM sequence: CAG
gagcaggtgagtggaggggc

SEQ ID NO: 12296 - DNA, 20 bp, Artificial Sequence
  Description of Artificial Sequence: Synthetic oligonucleotide
  Target: COL7A1; (-) strand; PAM type: NRG; PAM sequence: GGG
gggtgagcaggtgagtggag

SEQ ID NO: 12297 - DNA, 20 bp, Artificial Sequence
  Description of Artificial Sequence: Synthetic oligonucleotide
  Target: COL7A1; (-) strand; PAM type: NRG; PAM sequence: GGG
cgggtgagcaggtgagtgga

SEQ ID NO: 12298 - DNA, 20 bp, Artificial Sequence
  Description of Artificial Sequence: Synthetic oligonucleotide
  Target: COL7A1; (-) strand; PAM type: NRG; PAM sequence: AGG
ccgggtgagcaggtgagtgg

SEQ ID NO: 12299 - DNA, 20 bp, Artificial Sequence
  Description of Artificial Sequence: Synthetic oligonucleotide
  Target: COL7A1; (-) strand; PAM type: NRG; PAM sequence: GAG
tccgggtgagcaggtgagtg

SEQ ID NO: 12300 - DNA, 20 bp, Artificial Sequence
  Description of Artificial Sequence: Synthetic oligonucleotide
  Target: COL7A1; (-) strand; PAM type: NRG; PAM sequence: TGG
tctccgggtgagcaggtgag

SEQ ID NO: 12301 - DNA, 20 bp, Artificial Sequence
  Description of Artificial Sequence: Synthetic oligonucleotide
  Target: COL7A1; (-) strand; PAM type: NRG; PAM sequence: GAG
gggtctccgggtgagcaggt

SEQ ID NO: 12302 - DNA, 20 bp, Artificial Sequence
  Description of Artificial Sequence: Synthetic oligonucleotide
  Target: COL7A1; (-) strand; PAM type: NRG; PAM sequence: AGG
acctgggtctccgggtgagc

SEQ ID NO: 12303 - DNA, 20 bp, Artificial Sequence
  Description of Artificial Sequence: Synthetic oligonucleotide
  Target: COL7A1; (-) strand; PAM type: NRG; PAM sequence: CAG
aacctgggtctccgggtgag

SEQ ID NO: 12304 - DNA, 20 bp, Artificial Sequence
  Description of Artificial Sequence: Synthetic oligonucleotide
  Target: COL7A1; (-) strand; PAM type: NRG; PAM sequence: GAG
gacaacctgggtctccgggt

SEQ ID NO: 12305 - DNA, 20 bp, Artificial Sequence
  Description of Artificial Sequence: Synthetic oligonucleotide
  Target: COL7A1; (-) strand; PAM type: NRG; PAM sequence: GGG
ccaggacaacctgggtctcc

SEQ ID NO: 12306 - DNA, 20 bp, Artificial Sequence
  Description of Artificial Sequence: Synthetic oligonucleotide
  Target: COL7A1; (-) strand; PAM type: NRG; PAM sequence: CGG
cccaggacaacctgggtctc

SEQ ID NO: 12307 - DNA, 20 bp, Artificial Sequence
  Description of Artificial Sequence: Synthetic oligonucleotide
  Target: COL7A1; (-) strand; PAM type: NRG; PAM sequence: GGG
caggcctcccaggacaacct

SEQ ID NO: 12308 - DNA, 20 bp, Artificial Sequence
  Description of Artificial Sequence: Synthetic oligonucleotide
  Target: COL7A1; (-) strand; PAM type: NRG; PAM sequence: TGG
ccaggcctcccaggacaacc

SEQ ID NO: 12309 - DNA, 20 bp, Artificial Sequence
  Description of Artificial Sequence: Synthetic oligonucleotide
  Target: COL7A1; (-) strand; PAM type: NRG; PAM sequence: AGG
gatggagctccaggcctccc

SEQ ID NO: 12310 - DNA, 20 bp, Artificial Sequence
  Description of Artificial Sequence: Synthetic oligonucleotide
  Target: COL7A1; (-) strand; PAM type: NRG; PAM sequence: CAG
ggatggagctccaggcctcc

SEQ ID NO: 12311 - DNA, 20 bp, Artificial Sequence
  Description of Artificial Sequence: Synthetic oligonucleotide
  Target: COL7A1; (-) strand; PAM type: NRG; PAM sequence: AGG
gactctgaggatggagctcc

SEQ ID NO: 12312 - DNA, 20 bp, Artificial Sequence
  Description of Artificial Sequence: Synthetic oligonucleotide
  Target: COL7A1; (-) strand; PAM type: NRG; PAM sequence: CAG
tgactctgaggatggagctc

SEQ ID NO: 12313 - DNA, 20 bp, Artificial Sequence
  Description of Artificial Sequence: Synthetic oligonucleotide
  Target: COL7A1; (-) strand; PAM type: NRG; PAM sequence: GAG
tcagggtgactctgaggatg

SEQ ID NO: 12314 - DNA, 20 bp, Artificial Sequence
  Description of Artificial Sequence: Synthetic oligonucleotide
  Target: COL7A1; (-) strand; PAM type: NRG; PAM sequence: TGG
cttcagggtgactctgagga

SEQ ID NO: 12315 - DNA, 20 bp, Artificial Sequence
  Description of Artificial Sequence: Synthetic oligonucleotide
  Target: COL7A1; (-) strand; PAM type: NRG; PAM sequence: AGG
tctccttcagggtgactctg

SEQ ID NO: 12316 - DNA, 20 bp, Artificial Sequence
  Description of Artificial Sequence: Synthetic oligonucleotide
  Target: COL7A1; (-) strand; PAM type: NRG; PAM sequence: GAG
ttctccttcagggtgactct

SEQ ID NO: 12317 - DNA, 20 bp, Artificial Sequence
  Description of Artificial Sequence: Synthetic oligonucleotide
  Target: COL7A1; (-) strand; PAM type: NRG; PAM sequence: GGG
acccgtgtgtttctccttca

SEQ ID NO: 12318 - DNA, 20 bp, Artificial Sequence
  Description of Artificial Sequence: Synthetic oligonucleotide
  Target: COL7A1; (-) strand; PAM type: NRG; PAM sequence: AGG
cacccgtgtgtttctccttc

SEQ ID NO: 12319 - DNA, 20 bp, Artificial Sequence
  Description of Artificial Sequence: Synthetic oligonucleotide
  Target: COL7A1; (-) strand; PAM type: NRG; PAM sequence: CAG
ccacccgtgtgtttctcctt

SEQ ID NO: 12320 - DNA, 20 bp, Artificial Sequence
  Description of Artificial Sequence: Synthetic oligonucleotide
  Target: COL7A1; (-) strand; PAM type: NRG; PAM sequence: CGG
ctgggggcagggcctccctt

SEQ ID NO: 12321 - DNA, 20 bp, Artificial Sequence
  Description of Artificial Sequence: Synthetic oligonucleotide
  Target: COL7A1; (-) strand; PAM type: NRG; PAM sequence: GGG
gaggctgcgtgctgggggca

SEQ ID NO: 12322 - DNA, 20 bp, Artificial Sequence
  Description of Artificial Sequence: Synthetic oligonucleotide
  Target: COL7A1; (-) strand; PAM type: NRG; PAM sequence: AGG
ggaggctgcgtgctgggggc

SEQ ID NO: 12323 - DNA, 20 bp, Artificial Sequence
  Description of Artificial Sequence: Synthetic oligonucleotide
  Target: COL7A1; (-) strand; PAM type: NRG; PAM sequence: CAG
gggaggctgcgtgctggggg

SEQ ID NO: 12324 - DNA, 20 bp, Artificial Sequence
  Description of Artificial Sequence: Synthetic oligonucleotide
  Target: COL7A1; (-) strand; PAM type: NRG; PAM sequence: GGG
ggtgggaggctgcgtgctgg

SEQ ID NO: 12325 - DNA, 20 bp, Artificial Sequence
  Description of Artificial Sequence: Synthetic oligonucleotide
  Target: COL7A1; (-) strand; PAM type: NRG; PAM sequence: GGG
gggtgggaggctgcgtgctg

SEQ ID NO: 12326 - DNA, 20 bp, Artificial Sequence
  Description of Artificial Sequence: Synthetic oligonucleotide
  Target: COL7A1; (-) strand; PAM type: NRG; PAM sequence: GGG
ggggtgggaggctgcgtgct

SEQ ID NO: 12327 - DNA, 20 bp, Artificial Sequence
  Description of Artificial Sequence: Synthetic oligonucleotide
  Target: COL7A1; (-) strand; PAM type: NRG; PAM sequence: TGG
tggggtgggaggctgcgtgc

SEQ ID NO: 12328 - DNA, 20 bp, Artificial Sequence
  Description of Artificial Sequence: Synthetic oligonucleotide
  Target: COL7A1; (-) strand; PAM type: NRG; PAM sequence: AGG
tgtcccagttctggggtggg

SEQ ID NO: 12329 - DNA, 20 bp, Artificial Sequence
  Description of Artificial Sequence: Synthetic oligonucleotide
  Target: COL7A1; (-) strand; PAM type: NRG; PAM sequence: GAG
atgtcccagttctggggtgg

SEQ ID NO: 12330 - DNA, 20 bp, Artificial Sequence
  Description of Artificial Sequence: Synthetic oligonucleotide
  Target: COL7A1; (-) strand; PAM type: NRG; PAM sequence: GGG
tgatgtcccagttctggggt

SEQ ID NO: 12331 - DNA, 20 bp, Artificial Sequence
  Description of Artificial Sequence: Synthetic oligonucleotide
  Target: COL7A1; (-) strand; PAM type: NRG; PAM sequence: TGG
atgatgtcccagttctgggg

SEQ ID NO: 12332 - DNA, 20 bp, Artificial Sequence
  Description of Artificial Sequence: Synthetic oligonucleotide
  Target: COL7A1; (-) strand; PAM type: NRG; PAM sequence: GGG
ttgatgatgtcccagttctg

SEQ ID NO: 12333 - DNA, 20 bp, Artificial Sequence
  Description of Artificial Sequence: Synthetic oligonucleotide
  Target: COL7A1; (-) strand; PAM type: NRG; PAM sequence: GGG
cttgatgatgtcccagttct

SEQ ID NO: 12334 - DNA, 20 bp, Artificial Sequence
  Description of Artificial Sequence: Synthetic oligonucleotide
  Target: COL7A1; (-) strand; PAM type: NRG; PAM sequence: TGG
acttgatgatgtcccagttc

SEQ ID NO: 12335 - DNA, 20 bp, Artificial Sequence
  Description of Artificial Sequence: Synthetic oligonucleotide
  Target: COL7A1; (-) strand; PAM type: NRG; PAM sequence: CAG
aggctgacttgatgatgtcc

SEQ ID NO: 12336 - DNA, 20 bp, Artificial Sequence
  Description of Artificial Sequence: Synthetic oligonucleotide
  Target: COL7A1; (-) strand; PAM type: NRG; PAM sequence: AGG
agaaaggagaaaaagtagga

SEQ ID NO: 12337 - DNA, 20 bp, Artificial Sequence
  Description of Artificial Sequence: Synthetic oligonucleotide
  Target: COL7A1; (-) strand; PAM type: NRG; PAM sequence: AAG
aagaaaggagaaaaagtagg

SEQ ID NO: 12338 - DNA, 20 bp, Artificial Sequence
  Description of Artificial Sequence: Synthetic oligonucleotide
  Target: COL7A1; (-) strand; PAM type: NRG; PAM sequence: AGG
ggaaagaaaggagaaaaagt

SEQ ID NO: 12339 - DNA, 20 bp, Artificial Sequence
  Description of Artificial Sequence: Synthetic oligonucleotide
  Target: COL7A1; (-) strand; PAM type: NRG; PAM sequence: TAG
tggaaagaaaggagaaaaag

SEQ ID NO: 12340 - DNA, 20 bp, Artificial Sequence
  Description of Artificial Sequence: Synthetic oligonucleotide
  Target: COL7A1; (-) strand; PAM type: NRG; PAM sequence: AAG
ccctggaaagaaaggagaaa

SEQ ID NO: 12341 - DNA, 20 bp, Artificial Sequence
  Description of Artificial Sequence: Synthetic oligonucleotide
  Target: COL7A1; (-) strand; PAM type: NRG; PAM sequence: GAG
tggcccccctggaaagaaag

SEQ ID NO: 12342 - DNA, 20 bp, Artificial Sequence
  Description of Artificial Sequence: Synthetic oligonucleotide
  Target: COL7A1; (-) strand; PAM type: NRG; PAM sequence: AGG
gttggcccccctggaaagaa

SEQ ID NO: 12343 - DNA, 20 bp, Artificial Sequence
  Description of Artificial Sequence: Synthetic oligonucleotide
  Target: COL7A1; (-) strand; PAM type: NRG; PAM sequence: AAG
cgttggcccccctggaaaga

SEQ ID NO: 12344 - DNA, 20 bp, Artificial Sequence
  Description of Artificial Sequence: Synthetic oligonucleotide
  Target: COL7A1; (-) strand; PAM type: NRG; PAM sequence: AAG
gccccgttggcccccctgga

SEQ ID NO: 12345 - DNA, 20 bp, Artificial Sequence
  Description of Artificial Sequence: Synthetic oligonucleotide
  Target: COL7A1; (-) strand; PAM type: NRG; PAM sequence: TGG
caaggccccgttggcccccc

SEQ ID NO: 12346 - DNA, 20 bp, Artificial Sequence
  Description of Artificial Sequence: Synthetic oligonucleotide
  Target: COL7A1; (-) strand; PAM type: NRG; PAM sequence: TGG
cctggaccccaaggccccgt

SEQ ID NO: 12347 - DNA, 20 bp, Artificial Sequence
  Description of Artificial Sequence: Synthetic oligonucleotide
  Target: COL7A1; (-) strand; PAM type: NRG; PAM sequence: AGG
cccggaagccctggacccca

SEQ ID NO: 12348 - DNA, 20 bp, Artificial Sequence
  Description of Artificial Sequence: Synthetic oligonucleotide
  Target: COL7A1; (-) strand; PAM type: NRG; PAM sequence: AAG
tcccggaagccctggacccc

SEQ ID NO: 12349 - DNA, 20 bp, Artificial Sequence
  Description of Artificial Sequence: Synthetic oligonucleotide
  Target: COL7A1; (-) strand; PAM type: NRG; PAM sequence: TGG
tagggtcttcccggaagccc

SEQ ID NO: 12350 - DNA, 20 bp, Artificial Sequence
  Description of Artificial Sequence: Synthetic oligonucleotide
  Target: COL7A1; (-) strand; PAM type: NRG; PAM sequence: AAG
tcttcctagggtcttcccgg

SEQ ID NO: 12351 - DNA, 20 bp, Artificial Sequence
  Description of Artificial Sequence: Synthetic oligonucleotide
  Target: COL7A1; (-) strand; PAM type: NRG; PAM sequence: CGG
acttcttcctagggtcttcc

SEQ ID NO: 12352 - DNA, 20 bp, Artificial Sequence
  Description of Artificial Sequence: Synthetic oligonucleotide
  Target: COL7A1; (-) strand; PAM type: NRG; PAM sequence: GGG
tttttactcacttcttccta

SEQ ID NO: 12353 - DNA, 20 bp, Artificial Sequence
  Description of Artificial Sequence: Synthetic oligonucleotide
  Target: COL7A1; (-) strand; PAM type: NRG; PAM sequence: AGG
atttttactcacttcttcct

SEQ ID NO: 12354 - DNA, 20 bp, Artificial Sequence
  Description of Artificial Sequence: Synthetic oligonucleotide
  Target: COL7A1; (-) strand; PAM type: NRG; PAM sequence: TAG
tatttttactcacttcttcc

SEQ ID NO: 12355 - DNA, 20 bp, Artificial Sequence
  Description of Artificial Sequence: Synthetic oligonucleotide
  Target: COL7A1; (-) strand; PAM type: NRG; PAM sequence: TGG
gtgctgggcttcatagttct

SEQ ID NO: 12356 - DNA, 20 bp, Artificial Sequence
  Description of Artificial Sequence: Synthetic oligonucleotide
  Target: COL7A1; (-) strand; PAM type: NRG; PAM sequence: TAG
tggttgggtgctgggcttca

SEQ ID NO: 12357 - DNA, 20 bp, Artificial Sequence
  Description of Artificial Sequence: Synthetic oligonucleotide
  Target: COL7A1; (-) strand; PAM type: NRG; PAM sequence: GGG
tggggcagtggttgggtgct

SEQ ID NO: 12358 - DNA, 20 bp, Artificial Sequence
  Description of Artificial Sequence: Synthetic oligonucleotide
  Target: COL7A1; (-) strand; PAM type: NRG; PAM sequence: TGG
ctggggcagtggttgggtgc

SEQ ID NO: 12359 - DNA, 20 bp, Artificial Sequence
  Description of Artificial Sequence: Synthetic oligonucleotide
  Target: COL7A1; (-) strand; PAM type: NRG; PAM sequence: GGG
tctctcctggggcagtggtt

SEQ ID NO: 12360 - DNA, 20 bp, Artificial Sequence
  Description of Artificial Sequence: Synthetic oligonucleotide
  Target: COL7A1; (-) strand; PAM type: NRG; PAM sequence: TGG
gtctctcctggggcagtggt

SEQ ID NO: 12361 - DNA, 20 bp, Artificial Sequence
  Description of Artificial Sequence: Synthetic oligonucleotide
  Target: COL7A1; (-) strand; PAM type: NRG; PAM sequence: TGG
gtgggtctctcctggggcag

SEQ ID NO: 12362 - DNA, 20 bp, Artificial Sequence
  Description of Artificial Sequence: Synthetic oligonucleotide
  Target: COL7A1; (-) strand; PAM type: NRG; PAM sequence: CAG
ggtgtgggtctctcctgggg

SEQ ID NO: 12363 - DNA, 20 bp, Artificial Sequence
  Description of Artificial Sequence: Synthetic oligonucleotide
  Target: COL7A1; (-) strand; PAM type: NRG; PAM sequence: GGG
aggggtgtgggtctctcctg

SEQ ID NO: 12364 - DNA, 20 bp, Artificial Sequence
  Description of Artificial Sequence: Synthetic oligonucleotide
  Target: COL7A1; (-) strand; PAM type: NRG; PAM sequence: GGG
caggggtgtgggtctctcct

SEQ ID NO: 12365 - DNA, 20 bp, Artificial Sequence
  Description of Artificial Sequence: Synthetic oligonucleotide
  Target: COL7A1; (-) strand; PAM type: NRG; PAM sequence: TGG
tcaggggtgtgggtctctcc

SEQ ID NO: 12366 - DNA, 20 bp, Artificial Sequence
  Description of Artificial Sequence: Synthetic oligonucleotide
  Target: COL7A1; (-) strand; PAM type: NRG; PAM sequence: GGG
ggggccctgctcaggggtgt

SEQ ID NO: 12367 - DNA, 20 bp, Artificial Sequence
  Description of Artificial Sequence: Synthetic oligonucleotide
  Target: COL7A1; (-) strand; PAM type: NRG; PAM sequence: TGG
gggggccctgctcaggggtg

SEQ ID NO: 12368 - DNA, 20 bp, Artificial Sequence
  Description of Artificial Sequence: Synthetic oligonucleotide
  Target: COL7A1; (-) strand; PAM type: NRG; PAM sequence: GGG
ctgctgggggccctgctcag

SEQ ID NO: 12369 - DNA, 20 bp, Artificial Sequence
  Description of Artificial Sequence: Synthetic oligonucleotide
  Target: COL7A1; (-) strand; PAM type: NRG; PAM sequence: GGG
tctgctgggggccctgctca

SEQ ID NO: 12370 - DNA, 20 bp, Artificial Sequence
  Description of Artificial Sequence: Synthetic oligonucleotide
  Target: COL7A1; (-) strand; PAM type: NRG; PAM sequence: AGG
ctctgctgggggccctgctc

SEQ ID NO: 12371 - DNA, 20 bp, Artificial Sequence
  Description of Artificial Sequence: Synthetic oligonucleotide
  Target: COL7A1; (-) strand; PAM type: NRG; PAM sequence: CAG
gctctgctgggggccctgct

SEQ ID NO: 12372 - DNA, 20 bp, Artificial Sequence
  Description of Artificial Sequence: Synthetic oligonucleotide
  Target: COL7A1; (-) strand; PAM type: NRG; PAM sequence: GGG
gggccttgaggctctgctgg

SEQ ID NO: 12373 - DNA, 20 bp, Artificial Sequence
  Description of Artificial Sequence: Synthetic oligonucleotide
  Target: COL7A1; (-) strand; PAM type: NRG; PAM sequence: GGG
ggggccttgaggctctgctg

SEQ ID NO: 12374 - DNA, 20 bp, Artificial Sequence
  Description of Artificial Sequence: Synthetic oligonucleotide
  Target: COL7A1; (-) strand; PAM type: NRG; PAM sequence: GGG
aggggccttgaggctctgct

SEQ ID NO: 12375 - DNA, 20 bp, Artificial Sequence
  Description of Artificial Sequence: Synthetic oligonucleotide
  Target: COL7A1; (-) strand; PAM type: NRG; PAM sequence: TGG
gaggggccttgaggctctgc

SEQ ID NO: 12376 - DNA, 20 bp, Artificial Sequence
  Description of Artificial Sequence: Synthetic oligonucleotide
  Target: COL7A1; (-) strand; PAM type: NRG; PAM sequence: AGG
gctgccggtgaggggccttg

SEQ ID NO: 12377 - DNA, 20 bp, Artificial Sequence
  Description of Artificial Sequence: Synthetic oligonucleotide
  Target: COL7A1; (-) strand; PAM type: NRG; PAM sequence: GAG
ggctgccggtgaggggcctt

SEQ ID NO: 12378 - DNA, 20 bp, Artificial Sequence
  Description of Artificial Sequence: Synthetic oligonucleotide
  Target: COL7A1; (-) strand; PAM type: NRG; PAM sequence: GGG
gagcctgggctgccggtgag

SEQ ID NO: 12379 - DNA, 20 bp, Artificial Sequence
  Description of Artificial Sequence: Synthetic oligonucleotide
  Target: COL7A1; (-) strand; PAM type: NRG; PAM sequence: GGG
ggagcctgggctgccggtga

SEQ ID NO: 12380 - DNA, 20 bp, Artificial Sequence
  Description of Artificial Sequence: Synthetic oligonucleotide
  Target: COL7A1; (-) strand; PAM type: NRG; PAM sequence: AGG
gggagcctgggctgccggtg

SEQ ID NO: 12381 - DNA, 20 bp, Artificial Sequence
  Description of Artificial Sequence: Synthetic oligonucleotide
  Target: COL7A1; (-) strand; PAM type: NRG; PAM sequence: GAG
ggggagcctgggctgccggt

SEQ ID NO: 12382 - DNA, 20 bp, Artificial Sequence
  Description of Artificial Sequence: Synthetic oligonucleotide
  Target: COL7A1; (-) strand; PAM type: NRG; PAM sequence: CGG
tcctggggagcctgggctgc

SEQ ID NO: 12383 - DNA, 20 bp, Artificial Sequence
  Description of Artificial Sequence: Synthetic oligonucleotide
  Target: COL7A1; (-) strand; PAM type: NRG; PAM sequence: GGG
gcattgctcctggggagcct

SEQ ID NO: 12384 - DNA, 20 bp, Artificial Sequence
  Description of Artificial Sequence: Synthetic oligonucleotide
  Target: COL7A1; (-) strand; PAM type: NRG; PAM sequence: TGG
ggcattgctcctggggagcc

SEQ ID NO: 12385 - DNA, 20 bp, Artificial Sequence
  Description of Artificial Sequence: Synthetic oligonucleotide
  Target: COL7A1; (-) strand; PAM type: NRG; PAM sequence: GAG
aaggtggcattgctcctggg

SEQ ID NO: 12386 - DNA, 20 bp, Artificial Sequence
  Description of Artificial Sequence: Synthetic oligonucleotide
  Target: COL7A1; (-) strand; PAM type: NRG; PAM sequence: GGG
tgaaggtggcattgctcctg

SEQ ID NO: 12387 - DNA, 20 bp, Artificial Sequence
  Description of Artificial Sequence: Synthetic oligonucleotide
  Target: COL7A1; (-) strand; PAM type: NRG; PAM sequence: GGG
gtgaaggtggcattgctcct

SEQ ID NO: 12388 - DNA, 20 bp, Artificial Sequence
  Description of Artificial Sequence: Synthetic oligonucleotide
  Target: COL7A1; (-) strand; PAM type: NRG; PAM sequence: TGG
ggtgaaggtggcattgctcc

SEQ ID NO: 12389 - DNA, 20 bp, Artificial Sequence
  Description of Artificial Sequence: Synthetic oligonucleotide
  Target: COL7A1; (-) strand; PAM type: NRG; PAM sequence: TGG
ccccctggaccaggtgaagg

SEQ ID NO: 12390 - DNA, 20 bp, Artificial Sequence
  Description of Artificial Sequence: Synthetic oligonucleotide
  Target: COL7A1; (-) strand; PAM type: NRG; PAM sequence: AGG
ggtccccctggaccaggtga

SEQ ID NO: 12391 - DNA, 20 bp, Artificial Sequence
  Description of Artificial Sequence: Synthetic oligonucleotide
  Target: COL7A1; (-) strand; PAM type: NRG; PAM sequence: AAG
gggtccccctggaccaggtg

SEQ ID NO: 12392 - DNA, 20 bp, Artificial Sequence
  Description of Artificial Sequence: Synthetic oligonucleotide
  Target: COL7A1; (-) strand; PAM type: NRG; PAM sequence: AGG
tcccagggtccccctggacc

SEQ ID NO: 12393 - DNA, 20 bp, Artificial Sequence
  Description of Artificial Sequence: Synthetic oligonucleotide
  Target: COL7A1; (-) strand; PAM type: NRG; PAM sequence: CAG
ctcccagggtccccctggac

SEQ ID NO: 12394 - DNA, 20 bp, Artificial Sequence
  Description of Artificial Sequence: Synthetic oligonucleotide
  Target: COL7A1; (-) strand; PAM type: NRG; PAM sequence: TGG
gttctctcccagggtccccc

SEQ ID NO: 12395 - DNA, 20 bp, Artificial Sequence
  Description of Artificial Sequence: Synthetic oligonucleotide
  Target: COL7A1; (-) strand; PAM type: NRG; PAM sequence: GGG
tgacctgctgttctctccca

SEQ ID NO: 12396 - DNA, 20 bp, Artificial Sequence
  Description of Artificial Sequence: Synthetic oligonucleotide
  Target: COL7A1; (-) strand; PAM type: NRG; PAM sequence: AGG
ctgacctgctgttctctccc

SEQ ID NO: 12397 - DNA, 20 bp, Artificial Sequence
  Description of Artificial Sequence: Synthetic oligonucleotide
  Target: COL7A1; (-) strand; PAM type: NRG; PAM sequence: CAG
cctgacctgctgttctctcc

SEQ ID NO: 12398 - DNA, 20 bp, Artificial Sequence
  Description of Artificial Sequence: Synthetic oligonucleotide
  Target: COL7A1; (-) strand; PAM type: NRG; PAM sequence: GAG
gttgtgctaggggtggcttg

SEQ ID NO: 12399 - DNA, 20 bp, Artificial Sequence
  Description of Artificial Sequence: Synthetic oligonucleotide
  Target: COL7A1; (-) strand; PAM type: NRG; PAM sequence: TGG
aggttgtgctaggggtggct

SEQ ID NO: 12400 - DNA, 20 bp, Artificial Sequence
  Description of Artificial Sequence: Synthetic oligonucleotide
  Target: COL7A1; (-) strand; PAM type: NRG; PAM sequence: TGG
gggacaggttgtgctagggg

SEQ ID NO: 12401 - DNA, 20 bp, Artificial Sequence
  Description of Artificial Sequence: Synthetic oligonucleotide
  Target: COL7A1; (-) strand; PAM type: NRG; PAM sequence: GGG
tgagggacaggttgtgctag

SEQ ID NO: 12402 - DNA, 20 bp, Artificial Sequence
  Description of Artificial Sequence: Synthetic oligonucleotide
  Target: COL7A1; (-) strand; PAM type: NRG; PAM sequence: GGG
gtgagggacaggttgtgcta

SEQ ID NO: 12403 - DNA, 20 bp, Artificial Sequence
  Description of Artificial Sequence: Synthetic oligonucleotide
  Target: COL7A1; (-) strand; PAM type: NRG; PAM sequence: AGG
agtgagggacaggttgtgct

SEQ ID NO: 12404 - DNA, 20 bp, Artificial Sequence
  Description of Artificial Sequence: Synthetic oligonucleotide
  Target: COL7A1; (-) strand; PAM type: NRG; PAM sequence: TAG
aagtgagggacaggttgtgc

SEQ ID NO: 12405 - DNA, 20 bp, Artificial Sequence
  Description of Artificial Sequence: Synthetic oligonucleotide
  Target: COL7A1; (-) strand; PAM type: NRG; PAM sequence: AGG
ggagcgggtaagtgagggac

SEQ ID NO: 12406 - DNA, 20 bp, Artificial Sequence
  Description of Artificial Sequence: Synthetic oligonucleotide
  Target: COL7A1; (-) strand; PAM type: NRG; PAM sequence: CAG
gggagcgggtaagtgaggga

SEQ ID NO: 12407 - DNA, 20 bp, Artificial Sequence
  Description of Artificial Sequence: Synthetic oligonucleotide
  Target: COL7A1; (-) strand; PAM type: NRG; PAM sequence: GGG
cgtggggagcgggtaagtga

SEQ ID NO: 12408 - DNA, 20 bp, Artificial Sequence
  Description of Artificial Sequence: Synthetic oligonucleotide
  Target: COL7A1; (-) strand; PAM type: NRG; PAM sequence: AGG
tcgtggggagcgggtaagtg

SEQ ID NO: 12409 - DNA, 20 bp, Artificial Sequence
  Description of Artificial Sequence: Synthetic oligonucleotide
  Target: COL7A1; (-) strand; PAM type: NRG; PAM sequence: GAG
atcgtggggagcgggtaagt

SEQ ID NO: 12410 - DNA, 20 bp, Artificial Sequence
  Description of Artificial Sequence: Synthetic oligonucleotide
  Target: COL7A1; (-) strand; PAM type: NRG; PAM sequence: AAG
ggcgatcgtggggagcgggt

SEQ ID NO: 12411 - DNA, 20 bp, Artificial Sequence
  Description of Artificial Sequence: Synthetic oligonucleotide
  Target: COL7A1; (-) strand; PAM type: NRG; PAM sequence: GGG
caaaggcgatcgtggggagc

SEQ ID NO: 12412 - DNA, 20 bp, Artificial Sequence
  Description of Artificial Sequence: Synthetic oligonucleotide
  Target: COL7A1; (-) strand; PAM type: NRG; PAM sequence: CGG
acaaaggcgatcgtggggag

SEQ ID NO: 12413 - DNA, 20 bp, Artificial Sequence
  Description of Artificial Sequence: Synthetic oligonucleotide
  Target: COL7A1; (-) strand; PAM type: NRG; PAM sequence: GAG
gtgacaaaggcgatcgtggg

SEQ ID NO: 12414 - DNA, 20 bp, Artificial Sequence
  Description of Artificial Sequence: Synthetic oligonucleotide
  Target: COL7A1; (-) strand; PAM type: NRG; PAM sequence: GGG
gggtgacaaaggcgatcgtg

SEQ ID NO: 12415 - DNA, 20 bp, Artificial Sequence
  Description of Artificial Sequence: Synthetic oligonucleotide
  Target: COL7A1; (-) strand; PAM type: NRG; PAM sequence: GGG
agggtgacaaaggcgatcgt

SEQ ID NO: 12416 - DNA, 20 bp, Artificial Sequence
  Description of Artificial Sequence: Synthetic oligonucleotide
  Target: COL7A1; (-) strand; PAM type: NRG; PAM sequence: TGG
tagggtgacaaaggcgatcg

SEQ ID NO: 12417 - DNA, 20 bp, Artificial Sequence
  Description of Artificial Sequence: Synthetic oligonucleotide
  Target: COL7A1; (-) strand; PAM type: NRG; PAM sequence: AGG
tctgttttctagggtgacaa

SEQ ID NO: 12418 - DNA, 20 bp, Artificial Sequence
  Description of Artificial Sequence: Synthetic oligonucleotide
  Target: COL7A1; (-) strand; PAM type: NRG; PAM sequence: AAG
atctgttttctagggtgaca

SEQ ID NO: 12419 - DNA, 20 bp, Artificial Sequence
  Description of Artificial Sequence: Synthetic oligonucleotide
  Target: COL7A1; (-) strand; PAM type: NRG; PAM sequence: GGG
gggtcgtcatctgttttcta

SEQ ID NO: 12420 - DNA, 20 bp, Artificial Sequence
  Description of Artificial Sequence: Synthetic oligonucleotide
  Target: COL7A1; (-) strand; PAM type: NRG; PAM sequence: AGG
ggggtcgtcatctgttttct

SEQ ID NO: 12421 - DNA, 20 bp, Artificial Sequence
  Description of Artificial Sequence: Synthetic oligonucleotide
  Target: COL7A1; (-) strand; PAM type: NRG; PAM sequence: TAG
tggggtcgtcatctgttttc

SEQ ID NO: 12422 - DNA, 20 bp, Artificial Sequence
  Description of Artificial Sequence: Synthetic oligonucleotide
  Target: COL7A1; (-) strand; PAM type: NRG; PAM sequence: GGG
aggtgtggcccagggtcatg

SEQ ID NO: 12423 - DNA, 20 bp, Artificial Sequence
  Description of Artificial Sequence: Synthetic oligonucleotide
  Target: COL7A1; (-) strand; PAM type: NRG; PAM sequence: GGG
gaggtgtggcccagggtcat

SEQ ID NO: 12424 - DNA, 20 bp, Artificial Sequence
  Description of Artificial Sequence: Synthetic oligonucleotide
  Target: COL7A1; (-) strand; PAM type: NRG; PAM sequence: TGG
tgaggtgtggcccagggtca

SEQ ID NO: 12425 - DNA, 20 bp, Artificial Sequence
  Description of Artificial Sequence: Synthetic oligonucleotide
  Target: COL7A1; (-) strand; PAM type: NRG; PAM sequence: GGG
tgggagtgaggtgtggccca

SEQ ID NO: 12426 - DNA, 20 bp, Artificial Sequence
  Description of Artificial Sequence: Synthetic oligonucleotide
  Target: COL7A1; (-) strand; PAM type: NRG; PAM sequence: AGG
ttgggagtgaggtgtggccc

SEQ ID NO: 12427 - DNA, 20 bp, Artificial Sequence
  Description of Artificial Sequence: Synthetic oligonucleotide
  Target: COL7A1; (-) strand; PAM type: NRG; PAM sequence: CAG
tttgggagtgaggtgtggcc

SEQ ID NO: 12428 - DNA, 20 bp, Artificial Sequence
  Description of Artificial Sequence: Synthetic oligonucleotide
  Target: COL7A1; (-) strand; PAM type: NRG; PAM sequence: TGG
gtatctttgggagtgaggtg

SEQ ID NO: 12429 - DNA, 20 bp, Artificial Sequence
  Description of Artificial Sequence: Synthetic oligonucleotide
  Target: COL7A1; (-) strand; PAM type: NRG; PAM sequence: AGG
tcctggtatctttgggagtg

SEQ ID NO: 12430 - DNA, 20 bp, Artificial Sequence
  Description of Artificial Sequence: Synthetic oligonucleotide
  Target: COL7A1; (-) strand; PAM type: NRG; PAM sequence: GAG
ctcctggtatctttgggagt

SEQ ID NO: 12431 - DNA, 20 bp, Artificial Sequence
  Description of Artificial Sequence: Synthetic oligonucleotide
  Target: COL7A1; (-) strand; PAM type: NRG; PAM sequence: GAG
atcactcctggtatctttgg

SEQ ID NO: 12432 - DNA, 20 bp, Artificial Sequence
  Description of Artificial Sequence: Synthetic oligonucleotide
  Target: COL7A1; (-) strand; PAM type: NRG; PAM sequence: GGG
tcatcactcctggtatcttt

SEQ ID NO: 12433 - DNA, 20 bp, Artificial Sequence
  Description of Artificial Sequence: Synthetic oligonucleotide
  Target: COL7A1; (-) strand; PAM type: NRG; PAM sequence: TGG
ctcatcactcctggtatctt

SEQ ID NO: 12434 - DNA, 20 bp, Artificial Sequence
  Description of Artificial Sequence: Synthetic oligonucleotide
  Target: COL7A1; (-) strand; PAM type: NRG; PAM sequence: TGG
cccatgaccctcatcactcc

SEQ ID NO: 12435 - DNA, 20 bp, Artificial Sequence
  Description of Artificial Sequence: Synthetic oligonucleotide
  Target: COL7A1; (-) strand; PAM type: NRG; PAM sequence: TGG
caaaatccttgaaatccaat

SEQ ID NO: 12436 - DNA, 20 bp, Artificial Sequence
  Description of Artificial Sequence: Synthetic oligonucleotide
  Target: COL7A1; (-) strand; PAM type: NRG; PAM sequence: CAG
ccatcctcaccatgacgcct

SEQ ID NO: 12437 - DNA, 20 bp, Artificial Sequence
  Description of Artificial Sequence: Synthetic oligonucleotide
  Target: COL7A1; (-) strand; PAM type: NRG; PAM sequence: TGG
ataacccctgccagttactc

SEQ ID NO: 12438 - DNA, 20 bp, Artificial Sequence
  Description of Artificial Sequence: Synthetic oligonucleotide
  Target: COL7A1; (-) strand; PAM type: NRG; PAM sequence: CAG
tgaacccacataacccctgc

SEQ ID NO: 12439 - DNA, 20 bp, Artificial Sequence
  Description of Artificial Sequence: Synthetic oligonucleotide
  Target: COL7A1; (-) strand; PAM type: NRG; PAM sequence: TGG
tgccatgtgatgcagagacc

SEQ ID NO: 12440 - DNA, 20 bp, Artificial Sequence
  Description of Artificial Sequence: Synthetic oligonucleotide
  Target: COL7A1; (-) strand; PAM type: NRG; PAM sequence: GAG
catgagtgccatgtgatgca

SEQ ID NO: 12441 - DNA, 20 bp, Artificial Sequence
  Description of Artificial Sequence: Synthetic oligonucleotide
  Target: COL7A1; (-) strand; PAM type: NRG; PAM sequence: CAG
ctcatgagtgccatgtgatg

SEQ ID NO: 12442 - DNA, 20 bp, Artificial Sequence
  Description of Artificial Sequence: Synthetic oligonucleotide
  Target: COL7A1; (-) strand; PAM type: NRG; PAM sequence: GAG
catgaaggtgacagcctcat

SEQ ID NO: 12443 - DNA, 20 bp, Artificial Sequence
  Description of Artificial Sequence: Synthetic oligonucleotide
  Target: COL7A1; (-) strand; PAM type: NRG; PAM sequence: CAG
tggaacagccatgaaggtga

SEQ ID NO: 12444 - DNA, 20 bp, Artificial Sequence
  Description of Artificial Sequence: Synthetic oligonucleotide
  Target: COL7A1; (-) strand; PAM type: NRG; PAM sequence: AGG
gcttcctggaacagccatga

SEQ ID NO: 12445 - DNA, 20 bp, Artificial Sequence
  Description of Artificial Sequence: Synthetic oligonucleotide
  Target: COL7A1; (-) strand; PAM type: NRG; PAM sequence: AAG
ggcttcctggaacagccatg

SEQ ID NO: 12446 - DNA, 20 bp, Artificial Sequence
  Description of Artificial Sequence: Synthetic oligonucleotide
  Target: COL7A1; (-) strand; PAM type: NRG; PAM sequence: CAG
ccccccagggcttcctggaa

SEQ ID NO: 12447 - DNA, 20 bp, Artificial Sequence
  Description of Artificial Sequence: Synthetic oligonucleotide
  Target: COL7A1; (-) strand; PAM type: NRG; PAM sequence: TGG
cgtggccccccagggcttcc

SEQ ID NO: 12448 - DNA, 20 bp, Artificial Sequence
  Description of Artificial Sequence: Synthetic oligonucleotide
  Target: COL7A1; (-) strand; PAM type: NRG; PAM sequence: GGG
caggaccccgtggcccccca

SEQ ID NO: 12449 - DNA, 20 bp, Artificial Sequence
  Description of Artificial Sequence: Synthetic oligonucleotide
  Target: COL7A1; (-) strand; PAM type: NRG; PAM sequence: AGG
ccaggaccccgtggcccccc

SEQ ID NO: 12450 - DNA, 20 bp, Artificial Sequence
  Description of Artificial Sequence: Synthetic oligonucleotide
  Target: COL7A1; (-) strand; PAM type: NRG; PAM sequence: CAG
cccaggaccccgtggccccc

SEQ ID NO: 12451 - DNA, 20 bp, Artificial Sequence
  Description of Artificial Sequence: Synthetic oligonucleotide
  Target: COL7A1; (-) strand; PAM type: NRG; PAM sequence: TGG
ctgggggacccaggaccccg

SEQ ID NO: 12452 - DNA, 20 bp, Artificial Sequence
  Description of Artificial Sequence: Synthetic oligonucleotide
  Target: COL7A1; (-) strand; PAM type: NRG; PAM sequence: AGG
cgtggaccactgggggaccc

SEQ ID NO: 12453 - DNA, 20 bp, Artificial Sequence
  Description of Artificial Sequence: Synthetic oligonucleotide
  Target: COL7A1; (-) strand; PAM type: NRG; PAM sequence: CAG
tcgtggaccactgggggacc

SEQ ID NO: 12454 - DNA, 20 bp, Artificial Sequence
  Description of Artificial Sequence: Synthetic oligonucleotide
  Target: COL7A1; (-) strand; PAM type: NRG; PAM sequence: GGG
tggacctcgtggaccactgg

SEQ ID NO: 12455 - DNA, 20 bp, Artificial Sequence
  Description of Artificial Sequence: Synthetic oligonucleotide
  Target: COL7A1; (-) strand; PAM type: NRG; PAM sequence: GGG
ctggacctcgtggaccactg

SEQ ID NO: 12456 - DNA, 20 bp, Artificial Sequence
  Description of Artificial Sequence: Synthetic oligonucleotide
  Target: COL7A1; (-) strand; PAM type: NRG; PAM sequence: GGG
cctggacctcgtggaccact

SEQ ID NO: 12457 - DNA, 20 bp, Artificial Sequence
  Description of Artificial Sequence: Synthetic oligonucleotide
  Target: COL7A1; (-) strand; PAM type: NRG; PAM sequence: TGG
ccctggacctcgtggaccac

SEQ ID NO: 12458 - DNA, 20 bp, Artificial Sequence
  Description of Artificial Sequence: Synthetic oligonucleotide
  Target: COL7A1; (-) strand; PAM type: NRG; PAM sequence: TGG
cagggcccccctggacctcg

SEQ ID NO: 12459 - DNA, 20 bp, Artificial Sequence
  Description of Artificial Sequence: Synthetic oligonucleotide
  Target: COL7A1; (-) strand; PAM type: NRG; PAM sequence: TGG
ctcctccatcagggcccccc

SEQ ID NO: 12460 - DNA, 20 bp, Artificial Sequence
  Description of Artificial Sequence: Synthetic oligonucleotide
  Target: COL7A1; (-) strand; PAM type: NRG; PAM sequence: GGG
atactttgtctcctccatca

SEQ ID NO: 12461 - DNA, 20 bp, Artificial Sequence
  Description of Artificial Sequence: Synthetic oligonucleotide
  Target: COL7A1; (-) strand; PAM type: NRG; PAM sequence: AGG
tatactttgtctcctccatc

SEQ ID NO: 12462 - DNA, 20 bp, Artificial Sequence
  Description of Artificial Sequence: Synthetic oligonucleotide
  Target: COL7A1; (-) strand; PAM type: NRG; PAM sequence: CAG
ttatactttgtctcctccat

SEQ ID NO: 12463 - DNA, 20 bp, Artificial Sequence
  Description of Artificial Sequence: Synthetic oligonucleotide
  Target: COL7A1; (-) strand; PAM type: NRG; PAM sequence: GGG
gggcgagagtgaggtctgtg

SEQ ID NO: 12464 - DNA, 20 bp, Artificial Sequence
  Description of Artificial Sequence: Synthetic oligonucleotide
  Target: COL7A1; (-) strand; PAM type: NRG; PAM sequence: GGG
ggggcgagagtgaggtctgt

SEQ ID NO: 12465 - DNA, 20 bp, Artificial Sequence
  Description of Artificial Sequence: Synthetic oligonucleotide
  Target: COL7A1; (-) strand; PAM type: NRG; PAM sequence: TGG
gggggcgagagtgaggtctg

SEQ ID NO: 12466 - DNA, 20 bp, Artificial Sequence
  Description of Artificial Sequence: Synthetic oligonucleotide
  Target: COL7A1; (-) strand; PAM type: NRG; PAM sequence: AGG
acacgaggggggcgagagtg

SEQ ID NO: 12467 - DNA, 20 bp, Artificial Sequence
  Description of Artificial Sequence: Synthetic oligonucleotide
  Target: COL7A1; (-) strand; PAM type: NRG; PAM sequence: GAG
aacacgaggggggcgagagt

SEQ ID NO: 12468 - DNA, 20 bp, Artificial Sequence
  Description of Artificial Sequence: Synthetic oligonucleotide
  Target: COL7A1; (-) strand; PAM type: NRG; PAM sequence: GAG
gaccaacacgaggggggcga

SEQ ID NO: 12469 - DNA, 20 bp, Artificial Sequence
  Description of Artificial Sequence: Synthetic oligonucleotide
  Target: COL7A1; (-) strand; PAM type: NRG; PAM sequence: GAG
gggaccaacacgaggggggc

SEQ ID NO: 12470 - DNA, 20 bp, Artificial Sequence
  Description of Artificial Sequence: Synthetic oligonucleotide
  Target: COL7A1; (-) strand; PAM type: NRG; PAM sequence: GGG
tggggggaccaacacgaggg

SEQ ID NO: 12471 - DNA, 20 bp, Artificial Sequence
  Description of Artificial Sequence: Synthetic oligonucleotide
  Target: COL7A1; (-) strand; PAM type: NRG; PAM sequence: GGG
gtggggggaccaacacgagg

SEQ ID NO: 12472 - DNA, 20 bp, Artificial Sequence
  Description of Artificial Sequence: Synthetic oligonucleotide
  Target: COL7A1; (-) strand; PAM type: NRG; PAM sequence: GGG
agtggggggaccaacacgag

SEQ ID NO: 12473 - DNA, 20 bp, Artificial Sequence
  Description of Artificial Sequence: Synthetic oligonucleotide
  Target: COL7A1; (-) strand; PAM type: NRG; PAM sequence: GGG
tagtggggggaccaacacga

SEQ ID NO: 12474 - DNA, 20 bp, Artificial Sequence
  Description of Artificial Sequence: Synthetic oligonucleotide
  Target: COL7A1; (-) strand; PAM type: NRG; PAM sequence: AGG
gtagtggggggaccaacacg

SEQ ID NO: 12475 - DNA, 20 bp, Artificial Sequence
  Description of Artificial Sequence: Synthetic oligonucleotide
  Target: COL7A1; (-) strand; PAM type: NRG; PAM sequence: GAG
tgtagtggggggaccaacac

SEQ ID NO: 12476 - DNA, 20 bp, Artificial Sequence
  Description of Artificial Sequence: Synthetic oligonucleotide
  Target: COL7A1; (-) strand; PAM type: NRG; PAM sequence: GGG
ggcaagtgatgtgtagtggg

SEQ ID NO: 12477 - DNA, 20 bp, Artificial Sequence
  Description of Artificial Sequence: Synthetic oligonucleotide
  Target: COL7A1; (-) strand; PAM type: NRG; PAM sequence: GGG
aggcaagtgatgtgtagtgg

SEQ ID NO: 12478 - DNA, 20 bp, Artificial Sequence
  Description of Artificial Sequence: Synthetic oligonucleotide
  Target: COL7A1; (-) strand; PAM type: NRG; PAM sequence: GGG
gaggcaagtgatgtgtagtg

SEQ ID NO: 12479 - DNA, 20 bp, Artificial Sequence
  Description of Artificial Sequence: Synthetic oligonucleotide
  Target: COL7A1; (-) strand; PAM type: NRG; PAM sequence: GGG
ggaggcaagtgatgtgtagt

SEQ ID NO: 12480 - DNA, 20 bp, Artificial Sequence
  Description of Artificial Sequence: Synthetic oligonucleotide
  Target: COL7A1; (-) strand; PAM type: NRG; PAM sequence: TGG
tggaggcaagtgatgtgtag

SEQ ID NO: 12481 - DNA, 20 bp, Artificial Sequence
  Description of Artificial Sequence: Synthetic oligonucleotide
  Target: COL7A1; (-) strand; PAM type: NRG; PAM sequence: TAG
atgtggaggcaagtgatgtg

SEQ ID NO: 12482 - DNA, 20 bp, Artificial Sequence
  Description of Artificial Sequence: Synthetic oligonucleotide
  Target: COL7A1; (-) strand; PAM type: NRG; PAM sequence: AAG
agtgcagggtatgtggaggc

SEQ ID NO: 12483 - DNA, 20 bp, Artificial Sequence
  Description of Artificial Sequence: Synthetic oligonucleotide
  Target: COL7A1; (-) strand; PAM type: NRG; PAM sequence: AGG
ggtaagtgcagggtatgtgg

SEQ ID NO: 12484 - DNA, 20 bp, Artificial Sequence
  Description of Artificial Sequence: Synthetic oligonucleotide
  Target: COL7A1; (-) strand; PAM type: NRG; PAM sequence: GAG
cggtaagtgcagggtatgtg

SEQ ID NO: 12485 - DNA, 20 bp, Artificial Sequence
  Description of Artificial Sequence: Synthetic oligonucleotide
  Target: COL7A1; (-) strand; PAM type: NRG; PAM sequence: TGG
atcggtaagtgcagggtatg

SEQ ID NO: 12486 - DNA, 20 bp, Artificial Sequence
  Description of Artificial Sequence: Synthetic oligonucleotide
  Target: COL7A1; (-) strand; PAM type: NRG; PAM sequence: GGG
ctggaccatcggtaagtgca

SEQ ID NO: 12487 - DNA, 20 bp, Artificial Sequence
  Description of Artificial Sequence: Synthetic oligonucleotide
  Target: COL7A1; (-) strand; PAM type: NRG; PAM sequence: AGG
cctggaccatcggtaagtgc

SEQ ID NO: 12488 - DNA, 20 bp, Artificial Sequence
  Description of Artificial Sequence: Synthetic oligonucleotide
  Target: COL7A1; (-) strand; PAM type: NRG; PAM sequence: CAG
ccctggaccatcggtaagtg

SEQ ID NO: 12489 - DNA, 20 bp, Artificial Sequence
  Description of Artificial Sequence: Synthetic oligonucleotide
  Target: COL7A1; (-) strand; PAM type: NRG; PAM sequence: AAG
ggggaccctggaccatcggt

SEQ ID NO: 12490 - DNA, 20 bp, Artificial Sequence
  Description of Artificial Sequence: Synthetic oligonucleotide
  Target: COL7A1; (-) strand; PAM type: NRG; PAM sequence: CGG
gaaaggggaccctggaccat

SEQ ID NO: 12491 - DNA, 20 bp, Artificial Sequence
  Description of Artificial Sequence: Synthetic oligonucleotide
  Target: COL7A1; (-) strand; PAM type: NRG; PAM sequence: TGG
cctgggcggaaaggggaccc

SEQ ID NO: 12492 - DNA, 20 bp, Artificial Sequence
  Description of Artificial Sequence: Synthetic oligonucleotide
  Target: COL7A1; (-) strand; PAM type: NRG; PAM sequence: GGG
tgggcttcctgggcggaaag

SEQ ID NO: 12493 - DNA, 20 bp, Artificial Sequence
  Description of Artificial Sequence: Synthetic oligonucleotide
  Target: COL7A1; (-) strand; PAM type: NRG; PAM sequence: GGG
ctgggcttcctgggcggaaa

SEQ ID NO: 12494 - DNA, 20 bp, Artificial Sequence
  Description of Artificial Sequence: Synthetic oligonucleotide
  Target: COL7A1; (-) strand; PAM type: NRG; PAM sequence: AGG
cctgggcttcctgggcggaa

SEQ ID NO: 12495 - DNA, 20 bp, Artificial Sequence
  Description of Artificial Sequence: Synthetic oligonucleotide
  Target: COL7A1; (-) strand; PAM type: NRG; PAM sequence: AAG
acctgggcttcctgggcgga

SEQ ID NO: 12496 - DNA, 20 bp, Artificial Sequence
  Description of Artificial Sequence: Synthetic oligonucleotide
  Target: COL7A1; (-) strand; PAM type: NRG; PAM sequence: CGG
aaggacctgggcttcctggg

SEQ ID NO: 12497 - DNA, 20 bp, Artificial Sequence
  Description of Artificial Sequence: Synthetic oligonucleotide
  Target: COL7A1; (-) strand; PAM type: NRG; PAM sequence: GGG
gtgaaggacctgggcttcct

SEQ ID NO: 12498 - DNA, 20 bp, Artificial Sequence
  Description of Artificial Sequence: Synthetic oligonucleotide
  Target: COL7A1; (-) strand; PAM type: NRG; PAM sequence: TGG
ggtgaaggacctgggcttcc

SEQ ID NO: 12499 - DNA, 20 bp, Artificial Sequence
  Description of Artificial Sequence: Synthetic oligonucleotide
  Target: COL7A1; (-) strand; PAM type: NRG; PAM sequence: GGG
tcatcggaggtgaaggacct

SEQ ID NO: 12500 - DNA, 20 bp, Artificial Sequence
  Description of Artificial Sequence: Synthetic oligonucleotide
  Target: COL7A1; (-) strand; PAM type: NRG; PAM sequence: TGG
gtcatcggaggtgaaggacc

SEQ ID NO: 12501 - DNA, 20 bp, Artificial Sequence
  Description of Artificial Sequence: Synthetic oligonucleotide
  Target: COL7A1; (-) strand; PAM type: NRG; PAM sequence: AGG
ggacaagtcatcggaggtga

SEQ ID NO: 12502 - DNA, 20 bp, Artificial Sequence
  Description of Artificial Sequence: Synthetic oligonucleotide
  Target: COL7A1; (-) strand; PAM type: NRG; PAM sequence: AAG
cggacaagtcatcggaggtg

SEQ ID NO: 12503 - DNA, 20 bp, Artificial Sequence
  Description of Artificial Sequence: Synthetic oligonucleotide
  Target: COL7A1; (-) strand; PAM type: NRG; PAM sequence: AGG
gctcccggacaagtcatcgg

SEQ ID NO: 12504 - DNA, 20 bp, Artificial Sequence
  Description of Artificial Sequence: Synthetic oligonucleotide
  Target: COL7A1; (-) strand; PAM type: NRG; PAM sequence: GAG
ggctcccggacaagtcatcg

SEQ ID NO: 12505 - DNA, 20 bp, Artificial Sequence
  Description of Artificial Sequence: Synthetic oligonucleotide
  Target: COL7A1; (-) strand; PAM type: NRG; PAM sequence: CGG
ggggctcccggacaagtcat

SEQ ID NO: 12506 - DNA, 20 bp, Artificial Sequence
  Description of Artificial Sequence: Synthetic oligonucleotide
  Target: COL7A1; (-) strand; PAM type: NRG; PAM sequence: AAG
cttacagggggctcccggac

SEQ ID NO: 12507 - DNA, 20 bp, Artificial Sequence
  Description of Artificial Sequence: Synthetic oligonucleotide
  Target: COL7A1; (-) strand; PAM type: NRG; PAM sequence: CGG
ctgtccttacagggggctcc

SEQ ID NO: 12508 - DNA, 20 bp, Artificial Sequence
  Description of Artificial Sequence: Synthetic oligonucleotide
  Target: COL7A1; (-) strand; PAM type: NRG; PAM sequence: GGG
ctgctctctgtccttacagg

SEQ ID NO: 12509 - DNA, 20 bp, Artificial Sequence
  Description of Artificial Sequence: Synthetic oligonucleotide
  Target: COL7A1; (-) strand; PAM type: NRG; PAM sequence: GGG
actgctctctgtccttacag

SEQ ID NO: 12510 - DNA, 20 bp, Artificial Sequence
  Description of Artificial Sequence: Synthetic oligonucleotide
  Target: COL7A1; (-) strand; PAM type: NRG; PAM sequence: GGG
cactgctctctgtccttaca

SEQ ID NO: 12511 - DNA, 20 bp, Artificial Sequence
  Description of Artificial Sequence: Synthetic oligonucleotide
  Target: COL7A1; (-) strand; PAM type: NRG; PAM sequence: AGG
ccactgctctctgtccttac

SEQ ID NO: 12512 - DNA, 20 bp, Artificial Sequence
  Description of Artificial Sequence: Synthetic oligonucleotide
  Target: COL7A1; (-) strand; PAM type: NRG; PAM sequence: CAG
cccactgctctctgtcctta

SEQ ID NO: 12513 - DNA, 20 bp, Artificial Sequence
  Description of Artificial Sequence: Synthetic oligonucleotide
  Target: COL7A1; (-) strand; PAM type: NRG; PAM sequence: TAG
cttccagctcaaggccccca

SEQ ID NO: 12514 - DNA, 20 bp, Artificial Sequence
  Description of Artificial Sequence: Synthetic oligonucleotide
  Target: COL7A1; (-) strand; PAM type: NRG; PAM sequence: AGG
taggggcttcttccagctca

SEQ ID NO: 12515 - DNA, 20 bp, Artificial Sequence
  Description of Artificial Sequence: Synthetic oligonucleotide
  Target: COL7A1; (-) strand; PAM type: NRG; PAM sequence: AAG
ctaggggcttcttccagctc

SEQ ID NO: 12516 - DNA, 20 bp, Artificial Sequence
  Description of Artificial Sequence: Synthetic oligonucleotide
  Target: COL7A1; (-) strand; PAM type: NRG; PAM sequence: CAG
acatgtctaggggcttcttc

SEQ ID NO: 12517 - DNA, 20 bp, Artificial Sequence
  Description of Artificial Sequence: Synthetic oligonucleotide
  Target: COL7A1; (-) strand; PAM type: NRG; PAM sequence: GGG
gaatagctggacatgtctag

SEQ ID NO: 12518 - DNA, 20 bp, Artificial Sequence
  Description of Artificial Sequence: Synthetic oligonucleotide
  Target: COL7A1; (-) strand; PAM type: NRG; PAM sequence: GGG
ggaatagctggacatgtcta

SEQ ID NO: 12519 - DNA, 20 bp, Artificial Sequence
  Description of Artificial Sequence: Synthetic oligonucleotide
  Target: COL7A1; (-) strand; PAM type: NRG; PAM sequence: AGG
aggaatagctggacatgtct

SEQ ID NO: 12520 - DNA, 20 bp, Artificial Sequence
  Description of Artificial Sequence: Synthetic oligonucleotide
  Target: COL7A1; (-) strand; PAM type: NRG; PAM sequence: TAG
taggaatagctggacatgtc

SEQ ID NO: 12521 - DNA, 20 bp, Artificial Sequence
  Description of Artificial Sequence: Synthetic oligonucleotide
  Target: COL7A1; (-) strand; PAM type: NRG; PAM sequence: TGG
aaggcgcgaataggaatagc

SEQ ID NO: 12522 - DNA, 20 bp, Artificial Sequence
  Description of Artificial Sequence: Synthetic oligonucleotide
  Target: COL7A1; (-) strand; PAM type: NRG; PAM sequence: TAG
gcctaaggcgcgaataggaa

SEQ ID NO: 12523 - DNA, 20 bp, Artificial Sequence
  Description of Artificial Sequence: Synthetic oligonucleotide
  Target: COL7A1; (-) strand; PAM type: NRG; PAM sequence: AGG
gcagggcctaaggcgcgaat

SEQ ID NO: 12524 - DNA, 20 bp, Artificial Sequence
  Description of Artificial Sequence: Synthetic oligonucleotide
  Target: COL7A1; (-) strand; PAM type: NRG; PAM sequence: TAG
tgcagggcctaaggcgcgaa

SEQ ID NO: 12525 - DNA, 20 bp, Artificial Sequence
  Description of Artificial Sequence: Synthetic oligonucleotide
  Target: COL7A1; (-) strand; PAM type: NRG; PAM sequence: AGG
cagaccctgtgcagggccta

SEQ ID NO: 12526 - DNA, 20 bp, Artificial Sequence
  Description of Artificial Sequence: Synthetic oligonucleotide
  Target: COL7A1; (-) strand; PAM type: NRG; PAM sequence: AAG
ccagaccctgtgcagggcct

SEQ ID NO: 12527 - DNA, 20 bp, Artificial Sequence
  Description of Artificial Sequence: Synthetic oligonucleotide
  Target: COL7A1; (-) strand; PAM type: NRG; PAM sequence: GGG
cccacaccagaccctgtgca

SEQ ID NO: 12528 - DNA, 20 bp, Artificial Sequence
  Description of Artificial Sequence: Synthetic oligonucleotide
  Target: COL7A1; (-) strand; PAM type: NRG; PAM sequence: AGG
ccccacaccagaccctgtgc

SEQ ID NO: 12529 - DNA, 20 bp, Artificial Sequence
  Description of Artificial Sequence: Synthetic oligonucleotide
  Target: COL7A1; (-) strand; PAM type: NRG; PAM sequence: CAG
gccccacaccagaccctgtg

SEQ ID NO: 12530 - DNA, 20 bp, Artificial Sequence
  Description of Artificial Sequence: Synthetic oligonucleotide
  Target: COL7A1; (-) strand; PAM type: NRG; PAM sequence: CAG
ggagcaggactgccccacac

SEQ ID NO: 12531 - DNA, 20 bp, Artificial Sequence
  Description of Artificial Sequence: Synthetic oligonucleotide
  Target: COL7A1; (-) strand; PAM type: NRG; PAM sequence: AGG
gggatgtcccagggaggagc

SEQ ID NO: 12532 - DNA, 20 bp, Artificial Sequence
  Description of Artificial Sequence: Synthetic oligonucleotide
  Target: COL7A1; (-) strand; PAM type: NRG; PAM sequence: CAG
cgggatgtcccagggaggag

SEQ ID NO: 12533 - DNA, 20 bp, Artificial Sequence
  Description of Artificial Sequence: Synthetic oligonucleotide
  Target: COL7A1; (-) strand; PAM type: NRG; PAM sequence: GAG
ggccgggatgtcccagggag

SEQ ID NO: 12534 - DNA, 20 bp, Artificial Sequence
  Description of Artificial Sequence: Synthetic oligonucleotide
  Target: COL7A1; (-) strand; PAM type: NRG; PAM sequence: AGG
gcggccgggatgtcccaggg

SEQ ID NO: 12535 - DNA, 20 bp, Artificial Sequence
  Description of Artificial Sequence: Synthetic oligonucleotide
  Target: COL7A1; (-) strand; PAM type: NRG; PAM sequence: GAG
ggcggccgggatgtcccagg

SEQ ID NO: 12536 - DNA, 20 bp, Artificial Sequence
  Description of Artificial Sequence: Synthetic oligonucleotide
  Target: COL7A1; (-) strand; PAM type: NRG; PAM sequence: GGG
gaggcggccgggatgtccca

SEQ ID NO: 12537 - DNA, 20 bp, Artificial Sequence
  Description of Artificial Sequence: Synthetic oligonucleotide
  Target: COL7A1; (-) strand; PAM type: NRG; PAM sequence: AGG
ggaggcggccgggatgtccc

SEQ ID NO: 12538 - DNA, 20 bp, Artificial Sequence
  Description of Artificial Sequence: Synthetic oligonucleotide
  Target: COL7A1; (-) strand; PAM type: NRG; PAM sequence: CAG
gggaggcggccgggatgtcc

SEQ ID NO: 12539 - DNA, 20 bp, Artificial Sequence
  Description of Artificial Sequence: Synthetic oligonucleotide
  Target: COL7A1; (-) strand; PAM type: NRG; PAM sequence: GGG
aagggggaagggaggcggcc

SEQ ID NO: 12540 - DNA, 20 bp, Artificial Sequence
  Description of Artificial Sequence: Synthetic oligonucleotide
  Target: COL7A1; (-) strand; PAM type: NRG; PAM sequence: CGG
gaagggggaagggaggcggc

SEQ ID NO: 12541 - DNA, 20 bp, Artificial Sequence
  Description of Artificial Sequence: Synthetic oligonucleotide
  Target: COL7A1; (-) strand; PAM type: NRG; PAM sequence: CGG
aggtgaagggggaagggagg

SEQ ID NO: 12542 - DNA, 20 bp, Artificial Sequence
  Description of Artificial Sequence: Synthetic oligonucleotide
  Target: COL7A1; (-) strand; PAM type: NRG; PAM sequence: AGG
ggtaggtgaagggggaaggg

SEQ ID NO: 12543 - DNA, 20 bp, Artificial Sequence
  Description of Artificial Sequence: Synthetic oligonucleotide
  Target: COL7A1; (-) strand; PAM type: NRG; PAM sequence: GAG
cggtaggtgaagggggaagg

SEQ ID NO: 12544 - DNA, 20 bp, Artificial Sequence
  Description of Artificial Sequence: Synthetic oligonucleotide
  Target: COL7A1; (-) strand; PAM type: NRG; PAM sequence: GGG
gccggtaggtgaagggggaa

SEQ ID NO: 12545 - DNA, 20 bp, Artificial Sequence
  Description of Artificial Sequence: Synthetic oligonucleotide
  Target: COL7A1; (-) strand; PAM type: NRG; PAM sequence: AGG
agccggtaggtgaaggggga

SEQ ID NO: 12546 - DNA, 20 bp, Artificial Sequence
  Description of Artificial Sequence: Synthetic oligonucleotide
  Target: COL7A1; (-) strand; PAM type: NRG; PAM sequence: AAG
gagccggtaggtgaaggggg

SEQ ID NO: 12547 - DNA, 20 bp, Artificial Sequence
  Description of Artificial Sequence: Synthetic oligonucleotide
  Target: COL7A1; (-) strand; PAM type: NRG; PAM sequence: GGG
ggggagccggtaggtgaagg

SEQ ID NO: 12548 - DNA, 20 bp, Artificial Sequence
  Description of Artificial Sequence: Synthetic oligonucleotide
  Target: COL7A1; (-) strand; PAM type: NRG; PAM sequence: GGG
gggggagccggtaggtgaag

SEQ ID NO: 12549 - DNA, 20 bp, Artificial Sequence
  Description of Artificial Sequence: Synthetic oligonucleotide
  Target: COL7A1; (-) strand; PAM type: NRG; PAM sequence: GGG
agggggagccggtaggtgaa

SEQ ID NO: 12550 - DNA, 20 bp, Artificial Sequence
  Description of Artificial Sequence: Synthetic oligonucleotide
  Target: COL7A1; (-) strand; PAM type: NRG; PAM sequence: AGG
aagggggagccggtaggtga

SEQ ID NO: 12551 - DNA, 20 bp, Artificial Sequence
  Description of Artificial Sequence: Synthetic oligonucleotide
  Target: COL7A1; (-) strand; PAM type: NRG; PAM sequence: AAG
aaagggggagccggtaggtg

SEQ ID NO: 12552 - DNA, 20 bp, Artificial Sequence
  Description of Artificial Sequence: Synthetic oligonucleotide
  Target: COL7A1; (-) strand; PAM type: NRG; PAM sequence: AGG
ggcccaaagggggagccggt

SEQ ID NO: 12553 - DNA, 20 bp, Artificial Sequence
  Description of Artificial Sequence: Synthetic oligonucleotide
  Target: COL7A1; (-) strand; PAM type: NRG; PAM sequence: TAG
aggcccaaagggggagccgg

SEQ ID NO: 12554 - DNA, 20 bp, Artificial Sequence
  Description of Artificial Sequence: Synthetic oligonucleotide
  Target: COL7A1; (-) strand; PAM type: NRG; PAM sequence: CGG
tcgaggcccaaagggggagc

SEQ ID NO: 12555 - DNA, 20 bp, Artificial Sequence
  Description of Artificial Sequence: Synthetic oligonucleotide
  Target: COL7A1; (-) strand; PAM type: NRG; PAM sequence: GAG
gacctcgaggcccaaagggg

SEQ ID NO: 12556 - DNA, 20 bp, Artificial Sequence
  Description of Artificial Sequence: Synthetic oligonucleotide
  Target: COL7A1; (-) strand; PAM type: NRG; PAM sequence: GGG
aggacctcgaggcccaaagg

SEQ ID NO: 12557 - DNA, 20 bp, Artificial Sequence
  Description of Artificial Sequence: Synthetic oligonucleotide
  Target: COL7A1; (-) strand; PAM type: NRG; PAM sequence: GGG
gaggacctcgaggcccaaag

SEQ ID NO: 12558 - DNA, 20 bp, Artificial Sequence
  Description of Artificial Sequence: Synthetic oligonucleotide
  Target: COL7A1; (-) strand; PAM type: NRG; PAM sequence: GGG
cgaggacctcgaggcccaaa

SEQ ID NO: 12559 - DNA, 20 bp, Artificial Sequence
  Description of Artificial Sequence: Synthetic oligonucleotide
  Target: COL7A1; (-) strand; PAM type: NRG; PAM sequence: AGG
gcgaggacctcgaggcccaa

SEQ ID NO: 12560 - DNA, 20 bp, Artificial Sequence
  Description of Artificial Sequence: Synthetic oligonucleotide
  Target: COL7A1; (-) strand; PAM type: NRG; PAM sequence: AAG
agcgaggacctcgaggccca

SEQ ID NO: 12561 - DNA, 20 bp, Artificial Sequence
  Description of Artificial Sequence: Synthetic oligonucleotide
  Target: COL7A1; (-) strand; PAM type: NRG; PAM sequence: AGG
cagggagagcgaggacctcg

SEQ ID NO: 12562 - DNA, 20 bp, Artificial Sequence
  Description of Artificial Sequence: Synthetic oligonucleotide
  Target: COL7A1; (-) strand; PAM type: NRG; PAM sequence: GAG
tcagggagagcgaggacctc

SEQ ID NO: 12563 - DNA, 20 bp, Artificial Sequence
  Description of Artificial Sequence: Synthetic oligonucleotide
  Target: COL7A1; (-) strand; PAM type: NRG; PAM sequence: AGG
tttcgtcctcagggagagcg

SEQ ID NO: 12564 - DNA, 20 bp, Artificial Sequence
  Description of Artificial Sequence: Synthetic oligonucleotide
  Target: COL7A1; (-) strand; PAM type: NRG; PAM sequence: GAG
gtttcgtcctcagggagagc

SEQ ID NO: 12565 - DNA, 20 bp, Artificial Sequence
  Description of Artificial Sequence: Synthetic oligonucleotide
  Target: COL7A1; (-) strand; PAM type: NRG; PAM sequence: GAG
ctctgtttcgtcctcaggga

SEQ ID NO: 12566 - DNA, 20 bp, Artificial Sequence
  Description of Artificial Sequence: Synthetic oligonucleotide
  Target: COL7A1; (-) strand; PAM type: NRG; PAM sequence: GAG
tgctctgtttcgtcctcagg

SEQ ID NO: 12567 - DNA, 20 bp, Artificial Sequence
  Description of Artificial Sequence: Synthetic oligonucleotide
  Target: COL7A1; (-) strand; PAM type: NRG; PAM sequence: GGG
tctgctctgtttcgtcctca

SEQ ID NO: 12568 - DNA, 20 bp, Artificial Sequence
  Description of Artificial Sequence: Synthetic oligonucleotide
  Target: COL7A1; (-) strand; PAM type: NRG; PAM sequence: AGG
ctctgctctgtttcgtcctc

SEQ ID NO: 12569 - DNA, 20 bp, Artificial Sequence
  Description of Artificial Sequence: Synthetic oligonucleotide
  Target: COL7A1; (-) strand; PAM type: NRG; PAM sequence: CAG
cctctgctctgtttcgtcct

SEQ ID NO: 12570 - DNA, 20 bp, Artificial Sequence
  Description of Artificial Sequence: Synthetic oligonucleotide
  Target: COL7A1; (-) strand; PAM type: NRG; PAM sequence: AAG
gttgacattcgcctgagccc

SEQ ID NO: 12571 - DNA, 20 bp, Artificial Sequence
  Description of Artificial Sequence: Synthetic oligonucleotide
  Target: COL7A1; (-) strand; PAM type: NRG; PAM sequence: GAG
gcccacgttgacattcgcct

SEQ ID NO: 12572 - DNA, 20 bp, Artificial Sequence
  Description of Artificial Sequence: Synthetic oligonucleotide
  Target: COL7A1; (-) strand; PAM type: NRG; PAM sequence: CAG
gggagcctggggtggtggtg

SEQ ID NO: 12573 - DNA, 20 bp, Artificial Sequence
  Description of Artificial Sequence: Synthetic oligonucleotide
  Target: COL7A1; (-) strand; PAM type: NRG; PAM sequence: TGG
agggtgggagcctggggtgg

SEQ ID NO: 12574 - DNA, 20 bp, Artificial Sequence
  Description of Artificial Sequence: Synthetic oligonucleotide
  Target: COL7A1; (-) strand; PAM type: NRG; PAM sequence: TGG
cacagggtgggagcctgggg

SEQ ID NO: 12575 - DNA, 20 bp, Artificial Sequence
  Description of Artificial Sequence: Synthetic oligonucleotide
  Target: COL7A1; (-) strand; PAM type: NRG; PAM sequence: GGG
ttccacagggtgggagcctg

SEQ ID NO: 12576 - DNA, 20 bp, Artificial Sequence
  Description of Artificial Sequence: Synthetic oligonucleotide
  Target: COL7A1; (-) strand; PAM type: NRG; PAM sequence: GGG
cttccacagggtgggagcct

SEQ ID NO: 12577 - DNA, 20 bp, Artificial Sequence
  Description of Artificial Sequence: Synthetic oligonucleotide
  Target: COL7A1; (-) strand; PAM type: NRG; PAM sequence: TGG
tcttccacagggtgggagcc

SEQ ID NO: 12578 - DNA, 20 bp, Artificial Sequence
  Description of Artificial Sequence: Synthetic oligonucleotide
  Target: COL7A1; (-) strand; PAM type: NRG; PAM sequence: GAG
agggttcttccacagggtgg

SEQ ID NO: 12579 - DNA, 20 bp, Artificial Sequence
  Description of Artificial Sequence: Synthetic oligonucleotide
  Target: COL7A1; (-) strand; PAM type: NRG; PAM sequence: GGG
ccagggttcttccacagggt

SEQ ID NO: 12580 - DNA, 20 bp, Artificial Sequence
  Description of Artificial Sequence: Synthetic oligonucleotide
  Target: COL7A1; (-) strand; PAM type: NRG; PAM sequence: TGG
cccagggttcttccacaggg

SEQ ID NO: 12581 - DNA, 20 bp, Artificial Sequence
  Description of Artificial Sequence: Synthetic oligonucleotide
  Target: COL7A1; (-) strand; PAM type: NRG; PAM sequence: GGG
cttcccagggttcttccaca

SEQ ID NO: 12582 - DNA, 20 bp, Artificial Sequence
  Description of Artificial Sequence: Synthetic oligonucleotide
  Target: COL7A1; (-) strand; PAM type: NRG; PAM sequence: AGG
tcttcccagggttcttccac

SEQ ID NO: 12583 - DNA, 20 bp, Artificial Sequence
  Description of Artificial Sequence: Synthetic oligonucleotide
  Target: COL7A1; (-) strand; PAM type: NRG; PAM sequence: CAG
gtcttcccagggttcttcca

SEQ ID NO: 12584 - DNA, 20 bp, Artificial Sequence
  Description of Artificial Sequence: Synthetic oligonucleotide
  Target: COL7A1; (-) strand; PAM type: NRG; PAM sequence: GGG
gctctctaagtgtcttccca

SEQ ID NO: 12585 - DNA, 20 bp, Artificial Sequence
  Description of Artificial Sequence: Synthetic oligonucleotide
  Target: COL7A1; (-) strand; PAM type: NRG; PAM sequence: AGG
tgctctctaagtgtcttccc

SEQ ID NO: 12586 - DNA, 20 bp, Artificial Sequence
  Description of Artificial Sequence: Synthetic oligonucleotide
  Target: COL7A1; (-) strand; PAM type: NRG; PAM sequence: CAG
ttgctctctaagtgtcttcc

SEQ ID NO: 12587 - DNA, 20 bp, Artificial Sequence
  Description of Artificial Sequence: Synthetic oligonucleotide
  Target: COL7A1; (-) strand; PAM type: NRG; PAM sequence: AAG
ccttcccttctttgctctct

SEQ ID NO: 12588 - DNA, 20 bp, Artificial Sequence
  Description of Artificial Sequence: Synthetic oligonucleotide
  Target: COL7A1; (-) strand; PAM type: NRG; PAM sequence: AGG
gccctcgtggggacccggta

SEQ ID NO: 12589 - DNA, 20 bp, Artificial Sequence
  Description of Artificial Sequence: Synthetic oligonucleotide
  Target: COL7A1; (-) strand; PAM type: NRG; PAM sequence: AAG
ggccctcgtggggacccggt

SEQ ID NO: 12590 - DNA, 20 bp, Artificial Sequence
  Description of Artificial Sequence: Synthetic oligonucleotide
  Target: COL7A1; (-) strand; PAM type: NRG; PAM sequence: CGG
gcctggccctcgtggggacc

SEQ ID NO: 12591 - DNA, 20 bp, Artificial Sequence
  Description of Artificial Sequence: Synthetic oligonucleotide
  Target: COL7A1; (-) strand; PAM type: NRG; PAM sequence: GGG
agggttgcctggccctcgtg

SEQ ID NO: 12592 - DNA, 20 bp, Artificial Sequence
  Description of Artificial Sequence: Synthetic oligonucleotide
  Target: COL7A1; (-) strand; PAM type: NRG; PAM sequence: GGG
cagggttgcctggccctcgt

SEQ ID NO: 12593 - DNA, 20 bp, Artificial Sequence
  Description of Artificial Sequence: Synthetic oligonucleotide
  Target: COL7A1; (-) strand; PAM type: NRG; PAM sequence: TGG
ccagggttgcctggccctcg

SEQ ID NO: 12594 - DNA, 20 bp, Artificial Sequence
  Description of Artificial Sequence: Synthetic oligonucleotide
  Target: COL7A1; (-) strand; PAM type: NRG; PAM sequence: TGG
cagggctctccagggttgcc

SEQ ID NO: 12595 - DNA, 20 bp, Artificial Sequence
  Description of Artificial Sequence: Synthetic oligonucleotide
  Target: COL7A1; (-) strand; PAM type: NRG; PAM sequence: GGG
tccatttgcagggctctcca

SEQ ID NO: 12596 - DNA, 20 bp, Artificial Sequence
  Description of Artificial Sequence: Synthetic oligonucleotide
  Target: COL7A1; (-) strand; PAM type: NRG; PAM sequence: AGG
ctccatttgcagggctctcc

SEQ ID NO: 12597 - DNA, 20 bp, Artificial Sequence
  Description of Artificial Sequence: Synthetic oligonucleotide
  Target: COL7A1; (-) strand; PAM type: NRG; PAM sequence: CAG
cctccatttgcagggctctc

SEQ ID NO: 12598 - DNA, 20 bp, Artificial Sequence
  Description of Artificial Sequence: Synthetic oligonucleotide
  Target: COL7A1; (-) strand; PAM type: NRG; PAM sequence: GGG
gcctctggcctccatttgca

SEQ ID NO: 12599 - DNA, 20 bp, Artificial Sequence
  Description of Artificial Sequence: Synthetic oligonucleotide
  Target: COL7A1; (-) strand; PAM type: NRG; PAM sequence: AGG
tgcctctggcctccatttgc

SEQ ID NO: 12600 - DNA, 20 bp, Artificial Sequence
  Description of Artificial Sequence: Synthetic oligonucleotide
  Target: COL7A1; (-) strand; PAM type: NRG; PAM sequence: CAG
ctgcctctggcctccatttg

SEQ ID NO: 12601 - DNA, 20 bp, Artificial Sequence
  Description of Artificial Sequence: Synthetic oligonucleotide
  Target: COL7A1; (-) strand; PAM type: NRG; PAM sequence: TGG
ggctccgactgttctgcctc

SEQ ID NO: 12602 - DNA, 20 bp, Artificial Sequence
  Description of Artificial Sequence: Synthetic oligonucleotide
  Target: COL7A1; (-) strand; PAM type: NRG; PAM sequence: TGG
cgctgcctgagtgggtgggg

SEQ ID NO: 12603 - DNA, 20 bp, Artificial Sequence
  Description of Artificial Sequence: Synthetic oligonucleotide
  Target: COL7A1; (-) strand; PAM type: NRG; PAM sequence: GGG
gggcgctgcctgagtgggtg

SEQ ID NO: 12604 - DNA, 20 bp, Artificial Sequence
  Description of Artificial Sequence: Synthetic oligonucleotide
  Target: COL7A1; (-) strand; PAM type: NRG; PAM sequence: GGG
tgggcgctgcctgagtgggt

SEQ ID NO: 12605 - DNA, 20 bp, Artificial Sequence
  Description of Artificial Sequence: Synthetic oligonucleotide
  Target: COL7A1; (-) strand; PAM type: NRG; PAM sequence: TGG
gtgggcgctgcctgagtggg

SEQ ID NO: 12606 - DNA, 20 bp, Artificial Sequence
  Description of Artificial Sequence: Synthetic oligonucleotide
  Target: COL7A1; (-) strand; PAM type: NRG; PAM sequence: GGG
agggtgggcgctgcctgagt

SEQ ID NO: 12607 - DNA, 20 bp, Artificial Sequence
  Description of Artificial Sequence: Synthetic oligonucleotide
  Target: COL7A1; (-) strand; PAM type: NRG; PAM sequence: TGG
cagggtgggcgctgcctgag

SEQ ID NO: 12608 - DNA, 20 bp, Artificial Sequence
  Description of Artificial Sequence: Synthetic oligonucleotide
  Target: COL7A1; (-) strand; PAM type: NRG; PAM sequence: GAG
ggtcagggtgggcgctgcct

SEQ ID NO: 12609 - DNA, 20 bp, Artificial Sequence
  Description of Artificial Sequence: Synthetic oligonucleotide
  Target: COL7A1; (-) strand; PAM type: NRG; PAM sequence: GGG
cttgtcctgcaggtcagggt

SEQ ID NO: 12610 - DNA, 20 bp, Artificial Sequence
  Description of Artificial Sequence: Synthetic oligonucleotide
  Target: COL7A1; (-) strand; PAM type: NRG; PAM sequence: TGG
ccttgtcctgcaggtcaggg

SEQ ID NO: 12611 - DNA, 20 bp, Artificial Sequence
  Description of Artificial Sequence: Synthetic oligonucleotide
  Target: COL7A1; (-) strand; PAM type: NRG; PAM sequence: GGG
aagccttgtcctgcaggtca

SEQ ID NO: 12612 - DNA, 20 bp, Artificial Sequence
  Description of Artificial Sequence: Synthetic oligonucleotide
  Target: COL7A1; (-) strand; PAM type: NRG; PAM sequence: AGG
caagccttgtcctgcaggtc

SEQ ID NO: 12613 - DNA, 20 bp, Artificial Sequence
  Description of Artificial Sequence: Synthetic oligonucleotide
  Target: COL7A1; (-) strand; PAM type: NRG; PAM sequence: CAG
gcaagccttgtcctgcaggt

SEQ ID NO: 12614 - DNA, 20 bp, Artificial Sequence
  Description of Artificial Sequence: Synthetic oligonucleotide
  Target: COL7A1; (-) strand; PAM type: NRG; PAM sequence: AGG
gtgagcaagccttgtcctgc

SEQ ID NO: 12615 - DNA, 20 bp, Artificial Sequence
  Description of Artificial Sequence: Synthetic oligonucleotide
  Target: COL7A1; (-) strand; PAM type: NRG; PAM sequence: CAG
ggtgagcaagccttgtcctg

SEQ ID NO: 12616 - DNA, 20 bp, Artificial Sequence
  Description of Artificial Sequence: Synthetic oligonucleotide
  Target: COL7A1; (-) strand; PAM type: NRG; PAM sequence: AAG
cccctggcctaaaggtgagc

SEQ ID NO: 12617 - DNA, 20 bp, Artificial Sequence
  Description of Artificial Sequence: Synthetic oligonucleotide
  Target: COL7A1; (-) strand; PAM type: NRG; PAM sequence: GAG
ggagcccctggcctaaaggt

SEQ ID NO: 12618 - DNA, 20 bp, Artificial Sequence
  Description of Artificial Sequence: Synthetic oligonucleotide
  Target: COL7A1; (-) strand; PAM type: NRG; PAM sequence: AGG
ccctggagcccctggcctaa

SEQ ID NO: 12619 - DNA, 20 bp, Artificial Sequence
  Description of Artificial Sequence: Synthetic oligonucleotide
  Target: COL7A1; (-) strand; PAM type: NRG; PAM sequence: AAG
cccctggagcccctggccta

SEQ ID NO: 12620 - DNA, 20 bp, Artificial Sequence
  Description of Artificial Sequence: Synthetic oligonucleotide
  Target: COL7A1; (-) strand; PAM type: NRG; PAM sequence: TGG
cctgggacccctggagcccc

SEQ ID NO: 12621 - DNA, 20 bp, Artificial Sequence
  Description of Artificial Sequence: Synthetic oligonucleotide
  Target: COL7A1; (-) strand; PAM type: NRG; PAM sequence: GAG
cgggaatcctgggacccctg

SEQ ID NO: 12622 - DNA, 20 bp, Artificial Sequence
  Description of Artificial Sequence: Synthetic oligonucleotide
  Target: COL7A1; (-) strand; PAM type: NRG; PAM sequence: TGG
gccgggaatcctgggacccc

SEQ ID NO: 12623 - DNA, 20 bp, Artificial Sequence
  Description of Artificial Sequence: Synthetic oligonucleotide
  Target: COL7A1; (-) strand; PAM type: NRG; PAM sequence: GGG
ctggccgcgccgggaatcct

SEQ ID NO: 12624 - DNA, 20 bp, Artificial Sequence
  Description of Artificial Sequence: Synthetic oligonucleotide
  Target: COL7A1; (-) strand; PAM type: NRG; PAM sequence: TGG
cctggccgcgccgggaatcc

SEQ ID NO: 12625 - DNA, 20 bp, Artificial Sequence
  Description of Artificial Sequence: Synthetic oligonucleotide
  Target: COL7A1; (-) strand; PAM type: NRG; PAM sequence: GGG
caggcagccctggccgcgcc

SEQ ID NO: 12626 - DNA, 20 bp, Artificial Sequence
  Description of Artificial Sequence: Synthetic oligonucleotide
  Target: COL7A1; (-) strand; PAM type: NRG; PAM sequence: CGG
ccaggcagccctggccgcgc

SEQ ID NO: 12627 - DNA, 20 bp, Artificial Sequence
  Description of Artificial Sequence: Synthetic oligonucleotide
  Target: COL7A1; (-) strand; PAM type: NRG; PAM sequence: TGG
gatgggcgtccaggcagccc

SEQ ID NO: 12628 - DNA, 20 bp, Artificial Sequence
  Description of Artificial Sequence: Synthetic oligonucleotide
  Target: COL7A1; (-) strand; PAM type: NRG; PAM sequence: CAG
ggagcagatgggcgtccagg

SEQ ID NO: 12629 - DNA, 20 bp, Artificial Sequence
  Description of Artificial Sequence: Synthetic oligonucleotide
  Target: COL7A1; (-) strand; PAM type: NRG; PAM sequence: AGG
cctggagcagatgggcgtcc

SEQ ID NO: 12630 - DNA, 20 bp, Artificial Sequence
  Description of Artificial Sequence: Synthetic oligonucleotide
  Target: COL7A1; (-) strand; PAM type: NRG; PAM sequence: CAG
ccctggagcagatgggcgtc

SEQ ID NO: 12631 - DNA, 20 bp, Artificial Sequence
  Description of Artificial Sequence: Synthetic oligonucleotide
  Target: COL7A1; (-) strand; PAM type: NRG; PAM sequence: GGG
agggcttccctggagcagat

SEQ ID NO: 12632 - DNA, 20 bp, Artificial Sequence
  Description of Artificial Sequence: Synthetic oligonucleotide
  Target: COL7A1; (-) strand; PAM type: NRG; PAM sequence: TGG
cagggcttccctggagcaga

SEQ ID NO: 12633 - DNA, 20 bp, Artificial Sequence
  Description of Artificial Sequence: Synthetic oligonucleotide
  Target: COL7A1; (-) strand; PAM type: NRG; PAM sequence: CAG
tcctcagggcttccctggag

SEQ ID NO: 12634 - DNA, 20 bp, Artificial Sequence
  Description of Artificial Sequence: Synthetic oligonucleotide
  Target: COL7A1; (-) strand; PAM type: NRG; PAM sequence: GAG
acctcctcagggcttccctg

SEQ ID NO: 12635 - DNA, 20 bp, Artificial Sequence
  Description of Artificial Sequence: Synthetic oligonucleotide
  Target: COL7A1; (-) strand; PAM type: NRG; PAM sequence: TGG
tcacctcctcagggcttccc

SEQ ID NO: 12636 - DNA, 20 bp, Artificial Sequence
  Description of Artificial Sequence: Synthetic oligonucleotide
  Target: COL7A1; (-) strand; PAM type: NRG; PAM sequence: GGG
ctgacctcttcacctcctca

SEQ ID NO: 12637 - DNA, 20 bp, Artificial Sequence
  Description of Artificial Sequence: Synthetic oligonucleotide
  Target: COL7A1; (-) strand; PAM type: NRG; PAM sequence: AGG
cctgacctcttcacctcctc

SEQ ID NO: 12638 - DNA, 20 bp, Artificial Sequence
  Description of Artificial Sequence: Synthetic oligonucleotide
  Target: COL7A1; (-) strand; PAM type: NRG; PAM sequence: CAG
tcctgacctcttcacctcct

SEQ ID NO: 12639 - DNA, 20 bp, Artificial Sequence
  Description of Artificial Sequence: Synthetic oligonucleotide
  Target: COL7A1; (-) strand; PAM type: NRG; PAM sequence: GGG
aaaccaggggccttggggga

SEQ ID NO: 12640 - DNA, 20 bp, Artificial Sequence
  Description of Artificial Sequence: Synthetic oligonucleotide
  Target: COL7A1; (-) strand; PAM type: NRG; PAM sequence: AGG
caaaccaggggccttggggg

SEQ ID NO: 12641 - DNA, 20 bp, Artificial Sequence
  Description of Artificial Sequence: Synthetic oligonucleotide
  Target: COL7A1; (-) strand; PAM type: NRG; PAM sequence: GAG
gcaaaccaggggccttgggg

SEQ ID NO: 12642 - DNA, 20 bp, Artificial Sequence
  Description of Artificial Sequence: Synthetic oligonucleotide
  Target: COL7A1; (-) strand; PAM type: NRG; PAM sequence: GGG
cagcaaaccaggggccttgg

SEQ ID NO: 12643 - DNA, 20 bp, Artificial Sequence
  Description of Artificial Sequence: Synthetic oligonucleotide
  Target: COL7A1; (-) strand; PAM type: NRG; PAM sequence: GGG
ccagcaaaccaggggccttg

SEQ ID NO: 12644 - DNA, 20 bp, Artificial Sequence
  Description of Artificial Sequence: Synthetic oligonucleotide
  Target: COL7A1; (-) strand; PAM type: NRG; PAM sequence: GGG
tccagcaaaccaggggcctt

SEQ ID NO: 12645 - DNA, 20 bp, Artificial Sequence
  Description of Artificial Sequence: Synthetic oligonucleotide
  Target: COL7A1; (-) strand; PAM type: NRG; PAM sequence: TGG
ctccagcaaaccaggggcct

SEQ ID NO: 12646 - DNA, 20 bp, Artificial Sequence
  Description of Artificial Sequence: Synthetic oligonucleotide
  Target: COL7A1; (-) strand; PAM type: NRG; PAM sequence: GGG
aggcccctccagcaaaccag

SEQ ID NO: 12647 - DNA, 20 bp, Artificial Sequence
  Description of Artificial Sequence: Synthetic oligonucleotide
  Target: COL7A1; (-) strand; PAM type: NRG; PAM sequence: GGG
gaggcccctccagcaaacca

SEQ ID NO: 12648 - DNA, 20 bp, Artificial Sequence
  Description of Artificial Sequence: Synthetic oligonucleotide
  Target: COL7A1; (-) strand; PAM type: NRG; PAM sequence: AGG
tgaggcccctccagcaaacc

SEQ ID NO: 12649 - DNA, 20 bp, Artificial Sequence
  Description of Artificial Sequence: Synthetic oligonucleotide
  Target: COL7A1; (-) strand; PAM type: NRG; PAM sequence: CAG
gtgaggcccctccagcaaac

SEQ ID NO: 12650 - DNA, 20 bp, Artificial Sequence
  Description of Artificial Sequence: Synthetic oligonucleotide
  Target: COL7A1; (-) strand; PAM type: NRG; PAM sequence: CAG
ttgatggggtgaggcccctc

SEQ ID NO: 12651 - DNA, 20 bp, Artificial Sequence
  Description of Artificial Sequence: Synthetic oligonucleotide
  Target: COL7A1; (-) strand; PAM type: NRG; PAM sequence: AGG
gaccccttgttgatggggtg

SEQ ID NO: 12652 - DNA, 20 bp, Artificial Sequence
  Description of Artificial Sequence: Synthetic oligonucleotide
  Target: COL7A1; (-) strand; PAM type: NRG; PAM sequence: GAG
cgaccccttgttgatggggt

SEQ ID NO: 12653 - DNA, 20 bp, Artificial Sequence
  Description of Artificial Sequence: Synthetic oligonucleotide
  Target: COL7A1; (-) strand; PAM type: NRG; PAM sequence: GGG
taggcgaccccttgttgatg

SEQ ID NO: 12654 - DNA, 20 bp, Artificial Sequence
  Description of Artificial Sequence: Synthetic oligonucleotide
  Target: COL7A1; (-) strand; PAM type: NRG; PAM sequence: GGG
gtaggcgaccccttgttgat

SEQ ID NO: 12655 - DNA, 20 bp, Artificial Sequence
  Description of Artificial Sequence: Synthetic oligonucleotide
  Target: COL7A1; (-) strand; PAM type: NRG; PAM sequence: TGG
ggtaggcgaccccttgttga

SEQ ID NO: 12656 - DNA, 20 bp, Artificial Sequence
  Description of Artificial Sequence: Synthetic oligonucleotide
  Target: COL7A1; (-) strand; PAM type: NRG; PAM sequence: AGG
cacttgggggtcagtggggt

SEQ ID NO: 12657 - DNA, 20 bp, Artificial Sequence
  Description of Artificial Sequence: Synthetic oligonucleotide
  Target: COL7A1; (-) strand; PAM type: NRG; PAM sequence: TAG
acacttgggggtcagtgggg

SEQ ID NO: 12658 - DNA, 20 bp, Artificial Sequence
  Description of Artificial Sequence: Synthetic oligonucleotide
  Target: COL7A1; (-) strand; PAM type: NRG; PAM sequence: GGG
ataacacttgggggtcagtg

SEQ ID NO: 12659 - DNA, 20 bp, Artificial Sequence
  Description of Artificial Sequence: Synthetic oligonucleotide
  Target: COL7A1; (-) strand; PAM type: NRG; PAM sequence: GGG
aataacacttgggggtcagt

SEQ ID NO: 12660 - DNA, 20 bp, Artificial Sequence
  Description of Artificial Sequence: Synthetic oligonucleotide
  Target: COL7A1; (-) strand; PAM type: NRG; PAM sequence: TGG
caataacacttgggggtcag

SEQ ID NO: 12661 - DNA, 20 bp, Artificial Sequence
  Description of Artificial Sequence: Synthetic oligonucleotide
  Target: COL7A1; (-) strand; PAM type: NRG; PAM sequence: CAG
ccccaataacacttgggggt

SEQ ID NO: 12662 - DNA, 20 bp, Artificial Sequence
  Description of Artificial Sequence: Synthetic oligonucleotide
  Target: COL7A1; (-) strand; PAM type: NRG; PAM sequence: GGG
ccacccccaataacacttgg

SEQ ID NO: 12663 - DNA, 20 bp, Artificial Sequence
  Description of Artificial Sequence: Synthetic oligonucleotide
  Target: COL7A1; (-) strand; PAM type: NRG; PAM sequence: GGG
tccacccccaataacacttg

SEQ ID NO: 12664 - DNA, 20 bp, Artificial Sequence
  Description of Artificial Sequence: Synthetic oligonucleotide
  Target: COL7A1; (-) strand; PAM type: NRG; PAM sequence: GGG
ttccacccccaataacactt

SEQ ID NO: 12665 - DNA, 20 bp, Artificial Sequence
  Description of Artificial Sequence: Synthetic oligonucleotide
  Target: COL7A1; (-) strand; PAM type: NRG; PAM sequence: TGG
gttccacccccaataacact

SEQ ID NO: 12666 - DNA, 20 bp, Artificial Sequence
  Description of Artificial Sequence: Synthetic oligonucleotide
  Target: COL7A1; (-) strand; PAM type: NRG; PAM sequence: GGG
gggctctgtgaagctctgag

SEQ ID NO: 12667 - DNA, 20 bp, Artificial Sequence
  Description of Artificial Sequence: Synthetic oligonucleotide
  Target: COL7A1; (-) strand; PAM type: NRG; PAM sequence: GGG
tgggctctgtgaagctctga

SEQ ID NO: 12668 - DNA, 20 bp, Artificial Sequence
  Description of Artificial Sequence: Synthetic oligonucleotide
  Target: COL7A1; (-) strand; PAM type: NRG; PAM sequence: AGG
ttgggctctgtgaagctctg

SEQ ID NO: 12669 - DNA, 20 bp, Artificial Sequence
  Description of Artificial Sequence: Synthetic oligonucleotide
  Target: COL7A1; (-) strand; PAM type: NRG; PAM sequence: GAG
attgggctctgtgaagctct

SEQ ID NO: 12670 - DNA, 20 bp, Artificial Sequence
  Description of Artificial Sequence: Synthetic oligonucleotide
  Target: COL7A1; (-) strand; PAM type: NRG; PAM sequence: AAG
gcctggaattgggctctgtg

SEQ ID NO: 12671 - DNA, 20 bp, Artificial Sequence
  Description of Artificial Sequence: Synthetic oligonucleotide
  Target: COL7A1; (-) strand; PAM type: NRG; PAM sequence: GGG
ctgcccttgtgcctggaatt

SEQ ID NO: 12672 - DNA, 20 bp, Artificial Sequence
  Description of Artificial Sequence: Synthetic oligonucleotide
  Target: COL7A1; (-) strand; PAM type: NRG; PAM sequence: TGG
gctgcccttgtgcctggaat

SEQ ID NO: 12673 - DNA, 20 bp, Artificial Sequence
  Description of Artificial Sequence: Synthetic oligonucleotide
  Target: COL7A1; (-) strand; PAM type: NRG; PAM sequence: TGG
cttgtcgctgcccttgtgcc

SEQ ID NO: 12674 - DNA, 20 bp, Artificial Sequence
  Description of Artificial Sequence: Synthetic oligonucleotide
  Target: COL7A1; (-) strand; PAM type: NRG; PAM sequence: AAG
tccaagtcccagaggcaggg

SEQ ID NO: 12675 - DNA, 20 bp, Artificial Sequence
  Description of Artificial Sequence: Synthetic oligonucleotide
  Target: COL7A1; (-) strand; PAM type: NRG; PAM sequence: GGG
agctccaagtcccagaggca

SEQ ID NO: 12676 - DNA, 20 bp, Artificial Sequence
  Description of Artificial Sequence: Synthetic oligonucleotide
  Target: COL7A1; (-) strand; PAM type: NRG; PAM sequence: AGG
cagctccaagtcccagaggc

SEQ ID NO: 12677 - DNA, 20 bp, Artificial Sequence
  Description of Artificial Sequence: Synthetic oligonucleotide
  Target: COL7A1; (-) strand; PAM type: NRG; PAM sequence: CAG
gcagctccaagtcccagagg

SEQ ID NO: 12678 - DNA, 20 bp, Artificial Sequence
  Description of Artificial Sequence: Synthetic oligonucleotide
  Target: COL7A1; (-) strand; PAM type: NRG; PAM sequence: AGG
gcagcagctccaagtcccag

SEQ ID NO: 12679 - DNA, 20 bp, Artificial Sequence
  Description of Artificial Sequence: Synthetic oligonucleotide
  Target: COL7A1; (-) strand; PAM type: NRG; PAM sequence: GAG
agcagcagctccaagtccca

SEQ ID NO: 12680 - DNA, 20 bp, Artificial Sequence
  Description of Artificial Sequence: Synthetic oligonucleotide
  Target: COL7A1; (-) strand; PAM type: NRG; PAM sequence: CAG
tgagcagcagctccaagtcc

SEQ ID NO: 12681 - DNA, 20 bp, Artificial Sequence
  Description of Artificial Sequence: Synthetic oligonucleotide
  Target: COL7A1; (-) strand; PAM type: NRG; PAM sequence: AAG
agagcctgagcagcagctcc

SEQ ID NO: 12682 - DNA, 20 bp, Artificial Sequence
  Description of Artificial Sequence: Synthetic oligonucleotide
  Target: COL7A1; (-) strand; PAM type: NRG; PAM sequence: CAG
ccgctgcagagcctgagcag

SEQ ID NO: 12683 - DNA, 20 bp, Artificial Sequence
  Description of Artificial Sequence: Synthetic oligonucleotide
  Target: COL7A1; (-) strand; PAM type: NRG; PAM sequence: CAG
gccccgctgcagagcctgag

SEQ ID NO: 12684 - DNA, 20 bp, Artificial Sequence
  Description of Artificial Sequence: Synthetic oligonucleotide
  Target: COL7A1; (-) strand; PAM type: NRG; PAM sequence: GAG
ctagccccgctgcagagcct

SEQ ID NO: 12685 - DNA, 20 bp, Artificial Sequence
  Description of Artificial Sequence: Synthetic oligonucleotide
  Target: COL7A1; (-) strand; PAM type: NRG; PAM sequence: GAG
gggcctctagccccgctgca

SEQ ID NO: 12686 - DNA, 20 bp, Artificial Sequence
  Description of Artificial Sequence: Synthetic oligonucleotide
  Target: COL7A1; (-) strand; PAM type: NRG; PAM sequence: CAG
tggggcctctagccccgctg

SEQ ID NO: 12687 - DNA, 20 bp, Artificial Sequence
  Description of Artificial Sequence: Synthetic oligonucleotide
  Target: COL7A1; (-) strand; PAM type: NRG; PAM sequence: TAG
agaagggccagtggggcctc

SEQ ID NO: 12688 - DNA, 20 bp, Artificial Sequence
  Description of Artificial Sequence: Synthetic oligonucleotide
  Target: COL7A1; (-) strand; PAM type: NRG; PAM sequence: GGG
ctgaaatagaagggccagtg

SEQ ID NO: 12689 - DNA, 20 bp, Artificial Sequence
  Description of Artificial Sequence: Synthetic oligonucleotide
  Target: COL7A1; (-) strand; PAM type: NRG; PAM sequence: GGG
tctgaaatagaagggccagt

SEQ ID NO: 12690 - DNA, 20 bp, Artificial Sequence
  Description of Artificial Sequence: Synthetic oligonucleotide
  Target: COL7A1; (-) strand; PAM type: NRG; PAM sequence: TGG
ctctgaaatagaagggccag

SEQ ID NO: 12691 - DNA, 20 bp, Artificial Sequence
  Description of Artificial Sequence: Synthetic oligonucleotide
  Target: COL7A1; (-) strand; PAM type: NRG; PAM sequence: CAG
acactctgaaatagaagggc

SEQ ID NO: 12692 - DNA, 20 bp, Artificial Sequence
  Description of Artificial Sequence: Synthetic oligonucleotide
  Target: COL7A1; (-) strand; PAM type: NRG; PAM sequence: GGG
ggggacactctgaaatagaa

SEQ ID NO: 12693 - DNA, 20 bp, Artificial Sequence
  Description of Artificial Sequence: Synthetic oligonucleotide
  Target: COL7A1; (-) strand; PAM type: NRG; PAM sequence: AGG
gggggacactctgaaataga

SEQ ID NO: 12694 - DNA, 20 bp, Artificial Sequence
  Description of Artificial Sequence: Synthetic oligonucleotide
  Target: COL7A1; (-) strand; PAM type: NRG; PAM sequence: AAG
tgggggacactctgaaatag

SEQ ID NO: 12695 - DNA, 20 bp, Artificial Sequence
  Description of Artificial Sequence: Synthetic oligonucleotide
  Target: COL7A1; (-) strand; PAM type: NRG; PAM sequence: TAG
ctttgggggacactctgaaa

SEQ ID NO: 12696 - DNA, 20 bp, Artificial Sequence
  Description of Artificial Sequence: Synthetic oligonucleotide
  Target: COL7A1; (-) strand; PAM type: NRG; PAM sequence: GGG
aaccaccacagagactttgg

SEQ ID NO: 12697 - DNA, 20 bp, Artificial Sequence
  Description of Artificial Sequence: Synthetic oligonucleotide
  Target: COL7A1; (-) strand; PAM type: NRG; PAM sequence: GGG
aaaccaccacagagactttg

SEQ ID NO: 12698 - DNA, 20 bp, Artificial Sequence
  Description of Artificial Sequence: Synthetic oligonucleotide
  Target: COL7A1; (-) strand; PAM type: NRG; PAM sequence: GGG
taaaccaccacagagacttt

SEQ ID NO: 12699 - DNA, 20 bp, Artificial Sequence
  Description of Artificial Sequence: Synthetic oligonucleotide
  Target: COL7A1; (-) strand; PAM type: NRG; PAM sequence: TGG
ataaaccaccacagagactt

SEQ ID NO: 12700 - DNA, 20 bp, Artificial Sequence
  Description of Artificial Sequence: Synthetic oligonucleotide
  Target: COL7A1; (-) strand; PAM type: NRG; PAM sequence: GAG
ggaggttataaaccaccaca

SEQ ID NO: 12701 - DNA, 20 bp, Artificial Sequence
  Description of Artificial Sequence: Synthetic oligonucleotide
  Target: COL7A1; (-) strand; PAM type: NRG; PAM sequence: CAG
ctggaggttataaaccacca

SEQ ID NO: 12702 - DNA, 20 bp, Artificial Sequence
  Description of Artificial Sequence: Synthetic oligonucleotide
  Target: COL7A1; (-) strand; PAM type: NRG; PAM sequence: AGG
attcctagaagcccagctgg

SEQ ID NO: 12703 - DNA, 20 bp, Artificial Sequence
  Description of Artificial Sequence: Synthetic oligonucleotide
  Target: COL7A1; (-) strand; PAM type: NRG; PAM sequence: GAG
aattcctagaagcccagctg

SEQ ID NO: 12704 - DNA, 20 bp, Artificial Sequence
  Description of Artificial Sequence: Synthetic oligonucleotide
  Target: COL7A1; (-) strand; PAM type: NRG; PAM sequence: TGG
ggaattcctagaagcccagc

SEQ ID NO: 12705 - DNA, 20 bp, Artificial Sequence
  Description of Artificial Sequence: Synthetic oligonucleotide
  Target: COL7A1; (-) strand; PAM type: NRG; PAM sequence: CAG
atcgggaattcctagaagcc

SEQ ID NO: 12706 - DNA, 20 bp, Artificial Sequence
  Description of Artificial Sequence: Synthetic oligonucleotide
  Target: COL7A1; (-) strand; PAM type: NRG; PAM sequence: AAG
gaatcatcgggaattcctag

SEQ ID NO: 12707 - DNA, 20 bp, Artificial Sequence
  Description of Artificial Sequence: Synthetic oligonucleotide
  Target: COL7A1; (-) strand; PAM type: NRG; PAM sequence: TAG
ttagaatcatcgggaattcc

SEQ ID NO: 12708 - DNA, 20 bp, Artificial Sequence
  Description of Artificial Sequence: Synthetic oligonucleotide
  Target: COL7A1; (-) strand; PAM type: NRG; PAM sequence: GGG
gaagcagagttagaatcatc

SEQ ID NO: 12709 - DNA, 20 bp, Artificial Sequence
  Description of Artificial Sequence: Synthetic oligonucleotide
  Target: COL7A1; (-) strand; PAM type: NRG; PAM sequence: CGG
agaagcagagttagaatcat

SEQ ID NO: 12710 - DNA, 20 bp, Artificial Sequence
  Description of Artificial Sequence: Synthetic oligonucleotide
  Target: COL7A1; (-) strand; PAM type: NRG; PAM sequence: TAG
agagaaggaagaagcagagt

SEQ ID NO: 12711 - DNA, 20 bp, Artificial Sequence
  Description of Artificial Sequence: Synthetic oligonucleotide
  Target: COL7A1; (-) strand; PAM type: NRG; PAM sequence: GAG
caagagagaaggaagaagca

SEQ ID NO: 12712 - DNA, 20 bp, Artificial Sequence
  Description of Artificial Sequence: Synthetic oligonucleotide
  Target: COL7A1; (-) strand; PAM type: NRG; PAM sequence: CAG
tacaagagagaaggaagaag

SEQ ID NO: 12713 - DNA, 20 bp, Artificial Sequence
  Description of Artificial Sequence: Synthetic oligonucleotide
  Target: COL7A1; (-) strand; PAM type: NRG; PAM sequence: AAG
ttttacaagagagaaggaag

SEQ ID NO: 12714 - DNA, 20 bp, Artificial Sequence
  Description of Artificial Sequence: Synthetic oligonucleotide
  Target: COL7A1; (-) strand; PAM type: NRG; PAM sequence: AAG
ggtttttacaagagagaagg

SEQ ID NO: 12715 - DNA, 20 bp, Artificial Sequence
  Description of Artificial Sequence: Synthetic oligonucleotide
  Target: COL7A1; (-) strand; PAM type: NRG; PAM sequence: AGG
cggggtttttacaagagaga

SEQ ID NO: 12716 - DNA, 20 bp, Artificial Sequence
  Description of Artificial Sequence: Synthetic oligonucleotide
  Target: COL7A1; (-) strand; PAM type: NRG; PAM sequence: AAG
tcggggtttttacaagagag

SEQ ID NO: 12717 - DNA, 20 bp, Artificial Sequence
  Description of Artificial Sequence: Synthetic oligonucleotide
  Target: COL7A1; (-) strand; PAM type: NRG; PAM sequence: GAG
gtctcggggtttttacaaga

SEQ ID NO: 12718 - DNA, 20 bp, Artificial Sequence
  Description of Artificial Sequence: Synthetic oligonucleotide
  Target: COL7A1; (-) strand; PAM type: NRG; PAM sequence: GAG
ctgtctcggggtttttacaa

SEQ ID NO: 12719 - DNA, 20 bp, Artificial Sequence
  Description of Artificial Sequence: Synthetic oligonucleotide
  Target: COL7A1; (-) strand; PAM type: NRG; PAM sequence: AAG
agctgtctcggggtttttac

SEQ ID NO: 12720 - DNA, 20 bp, Artificial Sequence
  Description of Artificial Sequence: Synthetic oligonucleotide
  Target: COL7A1; (-) strand; PAM type: NRG; PAM sequence: GGG
cactcctcaaagctgtctcg

SEQ ID NO: 12721 - DNA, 20 bp, Artificial Sequence
  Description of Artificial Sequence: Synthetic oligonucleotide
  Target: COL7A1; (-) strand; PAM type: NRG; PAM sequence: GGG
gcactcctcaaagctgtctc

SEQ ID NO: 12722 - DNA, 20 bp, Artificial Sequence
  Description of Artificial Sequence: Synthetic oligonucleotide
  Target: COL7A1; (-) strand; PAM type: NRG; PAM sequence: CGG
ggcactcctcaaagctgtct

SEQ ID NO: 12723 - DNA, 20 bp, Artificial Sequence
  Description of Artificial Sequence: Synthetic oligonucleotide
  Target: COL7A1; (-) strand; PAM type: NRG; PAM sequence: AAG
tttctctgaggcactcctca

SEQ ID NO: 12724 - DNA, 20 bp, Artificial Sequence
  Description of Artificial Sequence: Synthetic oligonucleotide
  Target: COL7A1; (-) strand; PAM type: NRG; PAM sequence: AGG
agaccatcgaggtttctctg

SEQ ID NO: 12725 - DNA, 20 bp, Artificial Sequence
  Description of Artificial Sequence: Synthetic oligonucleotide
  Target: COL7A1; (-) strand; PAM type: NRG; PAM sequence: GAG
gagaccatcgaggtttctct

SEQ ID NO: 12726 - DNA, 20 bp, Artificial Sequence
  Description of Artificial Sequence: Synthetic oligonucleotide
  Target: COL7A1; (-) strand; PAM type: NRG; PAM sequence: AGG
ggtgagtgtggagaccatcg

SEQ ID NO: 12727 - DNA, 20 bp, Artificial Sequence
  Description of Artificial Sequence: Synthetic oligonucleotide
  Target: COL7A1; (-) strand; PAM type: NRG; PAM sequence: GAG
gggtgagtgtggagaccatc

SEQ ID NO: 12728 - DNA, 20 bp, Artificial Sequence
  Description of Artificial Sequence: Synthetic oligonucleotide
  Target: COL7A1; (-) strand; PAM type: NRG; PAM sequence: GAG
agggcgagagggtgagtgtg

SEQ ID NO: 12729 - DNA, 20 bp, Artificial Sequence
  Description of Artificial Sequence: Synthetic oligonucleotide
  Target: COL7A1; (-) strand; PAM type: NRG; PAM sequence: TGG
caagggcgagagggtgagtg

SEQ ID NO: 12730 - DNA, 20 bp, Artificial Sequence
  Description of Artificial Sequence: Synthetic oligonucleotide
  Target: COL7A1; (-) strand; PAM type: NRG; PAM sequence: GAG
actgccaagggcgagagggt

SEQ ID NO: 12731 - DNA, 20 bp, Artificial Sequence
  Description of Artificial Sequence: Synthetic oligonucleotide
  Target: COL7A1; (-) strand; PAM type: NRG; PAM sequence: GGG
tgccactgccaagggcgaga

SEQ ID NO: 12732 - DNA, 20 bp, Artificial Sequence
  Description of Artificial Sequence: Synthetic oligonucleotide
  Target: COL7A1; (-) strand; PAM type: NRG; PAM sequence: AGG
gtgccactgccaagggcgag

SEQ ID NO: 12733 - DNA, 20 bp, Artificial Sequence
  Description of Artificial Sequence: Synthetic oligonucleotide
  Target: COL7A1; (-) strand; PAM type: NRG; PAM sequence: GAG
agtgccactgccaagggcga

SEQ ID NO: 12734 - DNA, 20 bp, Artificial Sequence
  Description of Artificial Sequence: Synthetic oligonucleotide
  Target: COL7A1; (-) strand; PAM type: NRG; PAM sequence: GAG
gaagtgccactgccaagggc

SEQ ID NO: 12735 - DNA, 20 bp, Artificial Sequence
  Description of Artificial Sequence: Synthetic oligonucleotide
  Target: COL7A1; (-) strand; PAM type: NRG; PAM sequence: GGG
cctggaagtgccactgccaa

SEQ ID NO: 12736 - DNA, 20 bp, Artificial Sequence
  Description of Artificial Sequence: Synthetic oligonucleotide
  Target: COL7A1; (-) strand; PAM type: NRG; PAM sequence: AGG
ccctggaagtgccactgcca

SEQ ID NO: 12737 - DNA, 20 bp, Artificial Sequence
  Description of Artificial Sequence: Synthetic oligonucleotide
  Target: COL7A1; (-) strand; PAM type: NRG; PAM sequence: AAG
cccctggaagtgccactgcc

SEQ ID NO: 12738 - DNA, 20 bp, Artificial Sequence
  Description of Artificial Sequence: Synthetic oligonucleotide
  Target: COL7A1; (-) strand; PAM type: NRG; PAM sequence: AAG
ggcccccaggggccccctgg

SEQ ID NO: 12739 - DNA, 20 bp, Artificial Sequence
  Description of Artificial Sequence: Synthetic oligonucleotide
  Target: COL7A1; (-) strand; PAM type: NRG; PAM sequence: TGG
cccggcccccaggggccccc

SEQ ID NO: 12740 - DNA, 20 bp, Artificial Sequence
  Description of Artificial Sequence: Synthetic oligonucleotide
  Target: COL7A1; (-) strand; PAM type: NRG; PAM sequence: GGG
ccggtgctcccggcccccag

SEQ ID NO: 12741 - DNA, 20 bp, Artificial Sequence
  Description of Artificial Sequence: Synthetic oligonucleotide
  Target: COL7A1; (-) strand; PAM type: NRG; PAM sequence: GGG
accggtgctcccggccccca

SEQ ID NO: 12742 - DNA, 20 bp, Artificial Sequence
  Description of Artificial Sequence: Synthetic oligonucleotide
  Target: COL7A1; (-) strand; PAM type: NRG; PAM sequence: AGG
gaccggtgctcccggccccc

SEQ ID NO: 12743 - DNA, 20 bp, Artificial Sequence
  Description of Artificial Sequence: Synthetic oligonucleotide
  Target: COL7A1; (-) strand; PAM type: NRG; PAM sequence: CAG
ggaccggtgctcccggcccc

SEQ ID NO: 12744 - DNA, 20 bp, Artificial Sequence
  Description of Artificial Sequence: Synthetic oligonucleotide
  Target: COL7A1; (-) strand; PAM type: NRG; PAM sequence: CGG
cagggcaggaccggtgctcc

SEQ ID NO: 12745 - DNA, 20 bp, Artificial Sequence
  Description of Artificial Sequence: Synthetic oligonucleotide
  Target: COL7A1; (-) strand; PAM type: NRG; PAM sequence: CGG
atcttctttcagggcaggac

SEQ ID NO: 12746 - DNA, 20 bp, Artificial Sequence
  Description of Artificial Sequence: Synthetic oligonucleotide
  Target: COL7A1; (-) strand; PAM type: NRG; PAM sequence: AGG
ctgctatcttctttcagggc

SEQ ID NO: 12747 - DNA, 20 bp, Artificial Sequence
  Description of Artificial Sequence: Synthetic oligonucleotide
  Target: COL7A1; (-) strand; PAM type: NRG; PAM sequence: CAG
actgctatcttctttcaggg

SEQ ID NO: 12748 - DNA, 20 bp, Artificial Sequence
  Description of Artificial Sequence: Synthetic oligonucleotide
  Target: COL7A1; (-) strand; PAM type: NRG; PAM sequence: GGG
ctaactgctatcttctttca

SEQ ID NO: 12749 - DNA, 20 bp, Artificial Sequence
  Description of Artificial Sequence: Synthetic oligonucleotide
  Target: COL7A1; (-) strand; PAM type: NRG; PAM sequence: AGG
cctaactgctatcttctttc

SEQ ID NO: 12750 - DNA, 20 bp, Artificial Sequence
  Description of Artificial Sequence: Synthetic oligonucleotide
  Target: COL7A1; (-) strand; PAM type: NRG; PAM sequence: CAG
acctaactgctatcttcttt

SEQ ID NO: 12751 - DNA, 20 bp, Artificial Sequence
  Description of Artificial Sequence: Synthetic oligonucleotide
  Target: COL7A1; (-) strand; PAM type: NRG; PAM sequence: TGG
atctgtccctgcaccctgac

SEQ ID NO: 12752 - DNA, 20 bp, Artificial Sequence
  Description of Artificial Sequence: Synthetic oligonucleotide
  Target: COL7A1; (-) strand; PAM type: NRG; PAM sequence: GAG
ggcgaccctggcctcccggt

SEQ ID NO: 12753 - DNA, 20 bp, Artificial Sequence
  Description of Artificial Sequence: Synthetic oligonucleotide
  Target: COL7A1; (-) strand; PAM type: NRG; PAM sequence: CGG
tcctggcgaccctggcctcc

SEQ ID NO: 12754 - DNA, 20 bp, Artificial Sequence
  Description of Artificial Sequence: Synthetic oligonucleotide
  Target: COL7A1; (-) strand; PAM type: NRG; PAM sequence: TGG
gttgggcctcctggcgaccc

SEQ ID NO: 12755 - DNA, 20 bp, Artificial Sequence
  Description of Artificial Sequence: Synthetic oligonucleotide
  Target: COL7A1; (-) strand; PAM type: NRG; PAM sequence: TGG
agaggacaagttgggcctcc

SEQ ID NO: 12756 - DNA, 20 bp, Artificial Sequence
  Description of Artificial Sequence: Synthetic oligonucleotide
  Target: COL7A1; (-) strand; PAM type: NRG; PAM sequence: GGG
agggcctgagaggacaagtt

SEQ ID NO: 12757 - DNA, 20 bp, Artificial Sequence
  Description of Artificial Sequence: Synthetic oligonucleotide
  Target: COL7A1; (-) strand; PAM type: NRG; PAM sequence: TGG
tagggcctgagaggacaagt

SEQ ID NO: 12758 - DNA, 20 bp, Artificial Sequence
  Description of Artificial Sequence: Synthetic oligonucleotide
  Target: COL7A1; (-) strand; PAM type: NRG; PAM sequence: AAG
ttcctagggcctgagaggac

SEQ ID NO: 12759 - DNA, 20 bp, Artificial Sequence
  Description of Artificial Sequence: Synthetic oligonucleotide
  Target: COL7A1; (-) strand; PAM type: NRG; PAM sequence: AGG
tacccttcctagggcctgag

SEQ ID NO: 12760 - DNA, 20 bp, Artificial Sequence
  Description of Artificial Sequence: Synthetic oligonucleotide
  Target: COL7A1; (-) strand; PAM type: NRG; PAM sequence: GAG
ttacccttcctagggcctga

SEQ ID NO: 12761 - DNA, 20 bp, Artificial Sequence
  Description of Artificial Sequence: Synthetic oligonucleotide
  Target: COL7A1; (-) strand; PAM type: NRG; PAM sequence: GAG
gattacccttcctagggcct

SEQ ID NO: 12762 - DNA, 20 bp, Artificial Sequence
  Description of Artificial Sequence: Synthetic oligonucleotide
  Target: COL7A1; (-) strand; PAM type: NRG; PAM sequence: GGG
ctcactgattacccttccta

SEQ ID NO: 12763 - DNA, 20 bp, Artificial Sequence
  Description of Artificial Sequence: Synthetic oligonucleotide
  Target: COL7A1; (-) strand; PAM type: NRG; PAM sequence: AGG
tctcactgattacccttcct

SEQ ID NO: 12764 - DNA, 20 bp, Artificial Sequence
  Description of Artificial Sequence: Synthetic oligonucleotide
  Target: COL7A1; (-) strand; PAM type: NRG; PAM sequence: TAG
gtctcactgattacccttcc

SEQ ID NO: 12765 - DNA, 20 bp, Artificial Sequence
  Description of Artificial Sequence: Synthetic oligonucleotide
  Target: COL7A1; (-) strand; PAM type: NRG; PAM sequence: AGG
gcaggagaggttggcagcac

SEQ ID NO: 12766 - DNA, 20 bp, Artificial Sequence
  Description of Artificial Sequence: Synthetic oligonucleotide
  Target: COL7A1; (-) strand; PAM type: NRG; PAM sequence: CAG
ggcaggagaggttggcagca

SEQ ID NO: 12767 - DNA, 20 bp, Artificial Sequence
  Description of Artificial Sequence: Synthetic oligonucleotide
  Target: COL7A1; (-) strand; PAM type: NRG; PAM sequence: CAG
agtggggcaggagaggttgg

SEQ ID NO: 12768 - DNA, 20 bp, Artificial Sequence
  Description of Artificial Sequence: Synthetic oligonucleotide
  Target: COL7A1; (-) strand; PAM type: NRG; PAM sequence: TGG
gtcagtggggcaggagaggt

SEQ ID NO: 12769 - DNA, 20 bp, Artificial Sequence
  Description of Artificial Sequence: Synthetic oligonucleotide
  Target: COL7A1; (-) strand; PAM type: NRG; PAM sequence: AGG
gagtgtcagtggggcaggag

SEQ ID NO: 12770 - DNA, 20 bp, Artificial Sequence
  Description of Artificial Sequence: Synthetic oligonucleotide
  Target: COL7A1; (-) strand; PAM type: NRG; PAM sequence: GAG
tgagtgtcagtggggcagga

SEQ ID NO: 12771 - DNA, 20 bp, Artificial Sequence
  Description of Artificial Sequence: Synthetic oligonucleotide
  Target: COL7A1; (-) strand; PAM type: NRG; PAM sequence: GAG
gttgagtgtcagtggggcag

SEQ ID NO: 12772 - DNA, 20 bp, Artificial Sequence
  Description of Artificial Sequence: Synthetic oligonucleotide
  Target: COL7A1; (-) strand; PAM type: NRG; PAM sequence: AGG
gggttgagtgtcagtggggc

SEQ ID NO: 12773 - DNA, 20 bp, Artificial Sequence
  Description of Artificial Sequence: Synthetic oligonucleotide
  Target: COL7A1; (-) strand; PAM type: NRG; PAM sequence: CAG
tgggttgagtgtcagtgggg

SEQ ID NO: 12774 - DNA, 20 bp, Artificial Sequence
  Description of Artificial Sequence: Synthetic oligonucleotide
  Target: COL7A1; (-) strand; PAM type: NRG; PAM sequence: GGG
gaatgggttgagtgtcagtg

SEQ ID NO: 12775 - DNA, 20 bp, Artificial Sequence
  Description of Artificial Sequence: Synthetic oligonucleotide
  Target: COL7A1; (-) strand; PAM type: NRG; PAM sequence: GGG
agaatgggttgagtgtcagt

SEQ ID NO: 12776 - DNA, 20 bp, Artificial Sequence
  Description of Artificial Sequence: Synthetic oligonucleotide
  Target: COL7A1; (-) strand; PAM type: NRG; PAM sequence: TGG
gagaatgggttgagtgtcag

SEQ ID NO: 12777 - DNA, 20 bp, Artificial Sequence
  Description of Artificial Sequence: Synthetic oligonucleotide
  Target: COL7A1; (-) strand; PAM type: NRG; PAM sequence: CAG
atagagaatgggttgagtgt

SEQ ID NO: 12778 - DNA, 20 bp, Artificial Sequence
  Description of Artificial Sequence: Synthetic oligonucleotide
  Target: COL7A1; (-) strand; PAM type: NRG; PAM sequence: GAG
cggggaatagagaatgggtt

SEQ ID NO: 12779 - DNA, 20 bp, Artificial Sequence
  Description of Artificial Sequence: Synthetic oligonucleotide
  Target: COL7A1; (-) strand; PAM type: NRG; PAM sequence: GGG
gcgggcggggaatagagaat

SEQ ID NO: 12780 - DNA, 20 bp, Artificial Sequence
  Description of Artificial Sequence: Synthetic oligonucleotide
  Target: COL7A1; (-) strand; PAM type: NRG; PAM sequence: TGG
tgcgggcggggaatagagaa

SEQ ID NO: 12781 - DNA, 20 bp, Artificial Sequence
  Description of Artificial Sequence: Synthetic oligonucleotide
  Target: COL7A1; (-) strand; PAM type: NRG; PAM sequence: GAG
gcccctgcgggcggggaata

SEQ ID NO: 12782 - DNA, 20 bp, Artificial Sequence
  Description of Artificial Sequence: Synthetic oligonucleotide
  Target: COL7A1; (-) strand; PAM type: NRG; PAM sequence: TAG
gtgcccctgcgggcggggaa

SEQ ID NO: 12783 - DNA, 20 bp, Artificial Sequence
  Description of Artificial Sequence: Synthetic oligonucleotide
  Target: COL7A1; (-) strand; PAM type: NRG; PAM sequence: GGG
ggtgagtgcccctgcgggcg

SEQ ID NO: 12784 - DNA, 20 bp, Artificial Sequence
  Description of Artificial Sequence: Synthetic oligonucleotide
  Target: COL7A1; (-) strand; PAM type: NRG; PAM sequence: GGG
tggtgagtgcccctgcgggc

SEQ ID NO: 12785 - DNA, 20 bp, Artificial Sequence
  Description of Artificial Sequence: Synthetic oligonucleotide
  Target: COL7A1; (-) strand; PAM type: NRG; PAM sequence: CGG
atggtgagtgcccctgcggg

SEQ ID NO: 12786 - DNA, 20 bp, Artificial Sequence
  Description of Artificial Sequence: Synthetic oligonucleotide
  Target: COL7A1; (-) strand; PAM type: NRG; PAM sequence: GGG
gagatggtgagtgcccctgc

SEQ ID NO: 12787 - DNA, 20 bp, Artificial Sequence
  Description of Artificial Sequence: Synthetic oligonucleotide
  Target: COL7A1; (-) strand; PAM type: NRG; PAM sequence: CGG
agagatggtgagtgcccctg

SEQ ID NO: 12788 - DNA, 20 bp, Artificial Sequence
  Description of Artificial Sequence: Synthetic oligonucleotide
  Target: COL7A1; (-) strand; PAM type: NRG; PAM sequence: GAG
ggggaacctggagagatggt

SEQ ID NO: 12789 - DNA, 20 bp, Artificial Sequence
  Description of Artificial Sequence: Synthetic oligonucleotide
  Target: COL7A1; (-) strand; PAM type: NRG; PAM sequence: TGG
gaagggggaacctggagaga

SEQ ID NO: 12790 - DNA, 20 bp, Artificial Sequence
  Description of Artificial Sequence: Synthetic oligonucleotide
  Target: COL7A1; (-) strand; PAM type: NRG; PAM sequence: GAG
gccagaagggggaacctgga

SEQ ID NO: 12791 - DNA, 20 bp, Artificial Sequence
  Description of Artificial Sequence: Synthetic oligonucleotide
  Target: COL7A1; (-) strand; PAM type: NRG; PAM sequence: GAG
gggccagaagggggaacctg

SEQ ID NO: 12792 - DNA, 20 bp, Artificial Sequence
  Description of Artificial Sequence: Synthetic oligonucleotide
  Target: COL7A1; (-) strand; PAM type: NRG; PAM sequence: TGG
cagggccagaagggggaacc

SEQ ID NO: 12793 - DNA, 20 bp, Artificial Sequence
  Description of Artificial Sequence: Synthetic oligonucleotide
  Target: COL7A1; (-) strand; PAM type: NRG; PAM sequence: GGG
ctttccccagggccagaagg

SEQ ID NO: 12794 - DNA, 20 bp, Artificial Sequence
  Description of Artificial Sequence: Synthetic oligonucleotide
  Target: COL7A1; (-) strand; PAM type: NRG; PAM sequence: GGG
tctttccccagggccagaag

SEQ ID NO: 12795 - DNA, 20 bp, Artificial Sequence
  Description of Artificial Sequence: Synthetic oligonucleotide
  Target: COL7A1; (-) strand; PAM type: NRG; PAM sequence: GGG
gtctttccccagggccagaa

SEQ ID NO: 12796 - DNA, 20 bp, Artificial Sequence
  Description of Artificial Sequence: Synthetic oligonucleotide
  Target: COL7A1; (-) strand; PAM type: NRG; PAM sequence: AGG
tgtctttccccagggccaga

SEQ ID NO: 12797 - DNA, 20 bp, Artificial Sequence
  Description of Artificial Sequence: Synthetic oligonucleotide
  Target: COL7A1; (-) strand; PAM type: NRG; PAM sequence: AAG
atgtctttccccagggccag

SEQ ID NO: 12798 - DNA, 20 bp, Artificial Sequence
  Description of Artificial Sequence: Synthetic oligonucleotide
  Target: COL7A1; (-) strand; PAM type: NRG; PAM sequence: CAG
gacatgtctttccccagggc

SEQ ID NO: 12799 - DNA, 20 bp, Artificial Sequence
  Description of Artificial Sequence: Synthetic oligonucleotide
  Target: COL7A1; (-) strand; PAM type: NRG; PAM sequence: GGG
atctgacatgtctttcccca

SEQ ID NO: 12800 - DNA, 20 bp, Artificial Sequence
  Description of Artificial Sequence: Synthetic oligonucleotide
  Target: COL7A1; (-) strand; PAM type: NRG; PAM sequence: AGG
catctgacatgtctttcccc

SEQ ID NO: 12801 - DNA, 20 bp, Artificial Sequence
  Description of Artificial Sequence: Synthetic oligonucleotide
  Target: COL7A1; (-) strand; PAM type: NRG; PAM sequence: CAG
acatctgacatgtctttccc

SEQ ID NO: 12802 - DNA, 20 bp, Artificial Sequence
  Description of Artificial Sequence: Synthetic oligonucleotide
  Target: COL7A1; (-) strand; PAM type: NRG; PAM sequence: TAG
acagaggctgcacctggggc

SEQ ID NO: 12803 - DNA, 20 bp, Artificial Sequence
  Description of Artificial Sequence: Synthetic oligonucleotide
  Target: COL7A1; (-) strand; PAM type: NRG; PAM sequence: GGG
gtgaacagaggctgcacctg

SEQ ID NO: 12804 - DNA, 20 bp, Artificial Sequence
  Description of Artificial Sequence: Synthetic oligonucleotide
  Target: COL7A1; (-) strand; PAM type: NRG; PAM sequence: GGG
ggtgaacagaggctgcacct

SEQ ID NO: 12805 - DNA, 20 bp, Artificial Sequence
  Description of Artificial Sequence: Synthetic oligonucleotide
  Target: COL7A1; (-) strand; PAM type: NRG; PAM sequence: TGG
aggtgaacagaggctgcacc

SEQ ID NO: 12806 - DNA, 20 bp, Artificial Sequence
  Description of Artificial Sequence: Synthetic oligonucleotide
  Target: COL7A1; (-) strand; PAM type: NRG; PAM sequence: AGG
cctcatcgagaggtgaacag

SEQ ID NO: 12807 - DNA, 20 bp, Artificial Sequence
  Description of Artificial Sequence: Synthetic oligonucleotide
  Target: COL7A1; (-) strand; PAM type: NRG; PAM sequence: GAG
ccctcatcgagaggtgaaca

SEQ ID NO: 12808 - DNA, 20 bp, Artificial Sequence
  Description of Artificial Sequence: Synthetic oligonucleotide
  Target: COL7A1; (-) strand; PAM type: NRG; PAM sequence: CAG
gtccctcatcgagaggtgaa

SEQ ID NO: 12809 - DNA, 20 bp, Artificial Sequence
  Description of Artificial Sequence: Synthetic oligonucleotide
  Target: COL7A1; (-) strand; PAM type: NRG; PAM sequence: AGG
ggtaagagtccctcatcgag

SEQ ID NO: 12810 - DNA, 20 bp, Artificial Sequence
  Description of Artificial Sequence: Synthetic oligonucleotide
  Target: COL7A1; (-) strand; PAM type: NRG; PAM sequence: GAG
aggtaagagtccctcatcga

SEQ ID NO: 12811 - DNA, 20 bp, Artificial Sequence
  Description of Artificial Sequence: Synthetic oligonucleotide
  Target: COL7A1; (-) strand; PAM type: NRG; PAM sequence: GAG
aaaggtaagagtccctcatc

SEQ ID NO: 12812 - DNA, 20 bp, Artificial Sequence
  Description of Artificial Sequence: Synthetic oligonucleotide
  Target: COL7A1; (-) strand; PAM type: NRG; PAM sequence: GAG
agtgtattgtccaaaggtaa

SEQ ID NO: 12813 - DNA, 20 bp, Artificial Sequence
  Description of Artificial Sequence: Synthetic oligonucleotide
  Target: COL7A1; (-) strand; PAM type: NRG; PAM sequence: AAG
ccagtgtattgtccaaaggt

SEQ ID NO: 12814 - DNA, 20 bp, Artificial Sequence
  Description of Artificial Sequence: Synthetic oligonucleotide
  Target: COL7A1; (-) strand; PAM type: NRG; PAM sequence: AGG
ctgcccagtgtattgtccaa

SEQ ID NO: 12815 - DNA, 20 bp, Artificial Sequence
  Description of Artificial Sequence: Synthetic oligonucleotide
  Target: COL7A1; (-) strand; PAM type: NRG; PAM sequence: AAG
cctgcccagtgtattgtcca

SEQ ID NO: 12816 - DNA, 20 bp, Artificial Sequence
  Description of Artificial Sequence: Synthetic oligonucleotide
  Target: COL7A1; (-) strand; PAM type: NRG; PAM sequence: CAG
gccccggccagagccctgcc

SEQ ID NO: 12817 - DNA, 20 bp, Artificial Sequence
  Description of Artificial Sequence: Synthetic oligonucleotide
  Target: COL7A1; (-) strand; PAM type: NRG; PAM sequence: GAG
tatgtccgcagccccggcca

SEQ ID NO: 12818 - DNA, 20 bp, Artificial Sequence
  Description of Artificial Sequence: Synthetic oligonucleotide
  Target: COL7A1; (-) strand; PAM type: NRG; PAM sequence: CAG
cctatgtccgcagccccggc

SEQ ID NO: 12819 - DNA, 20 bp, Artificial Sequence
  Description of Artificial Sequence: Synthetic oligonucleotide
  Target: COL7A1; (-) strand; PAM type: NRG; PAM sequence: CGG
agaccctatgtccgcagccc

SEQ ID NO: 12820 - DNA, 20 bp, Artificial Sequence
  Description of Artificial Sequence: Synthetic oligonucleotide
  Target: COL7A1; (-) strand; PAM type: NRG; PAM sequence: CAG
tcaaagagaccctatgtccg

SEQ ID NO: 12821 - DNA, 20 bp, Artificial Sequence
  Description of Artificial Sequence: Synthetic oligonucleotide
  Target: COL7A1; (-) strand; PAM type: NRG; PAM sequence: GAG
tagaaatgttcaacctcaaa

SEQ ID NO: 12822 - DNA, 20 bp, Artificial Sequence
  Description of Artificial Sequence: Synthetic oligonucleotide
  Target: COL7A1; (-) strand; PAM type: NRG; PAM sequence: AAG
ggtagaaatgttcaacctca

SEQ ID NO: 12823 - DNA, 20 bp, Artificial Sequence
  Description of Artificial Sequence: Synthetic oligonucleotide
  Target: COL7A1; (-) strand; PAM type: NRG; PAM sequence: TAG
aggggtctgggggttcttgg

SEQ ID NO: 12824 - DNA, 20 bp, Artificial Sequence
  Description of Artificial Sequence: Synthetic oligonucleotide
  Target: COL7A1; (-) strand; PAM type: NRG; PAM sequence: TGG
ataaggggtctgggggttct

SEQ ID NO: 12825 - DNA, 20 bp, Artificial Sequence
  Description of Artificial Sequence: Synthetic oligonucleotide
  Target: COL7A1; (-) strand; PAM type: NRG; PAM sequence: GGG
gtagaatataaggggtctgg

SEQ ID NO: 12826 - DNA, 20 bp, Artificial Sequence
  Description of Artificial Sequence: Synthetic oligonucleotide
  Target: COL7A1; (-) strand; PAM type: NRG; PAM sequence: GGG
ggtagaatataaggggtctg

SEQ ID NO: 12827 - DNA, 20 bp, Artificial Sequence
  Description of Artificial Sequence: Synthetic oligonucleotide
  Target: COL7A1; (-) strand; PAM type: NRG; PAM sequence: GGG
tggtagaatataaggggtct

SEQ ID NO: 12828 - DNA, 20 bp, Artificial Sequence
  Description of Artificial Sequence: Synthetic oligonucleotide
  Target: COL7A1; (-) strand; PAM type: NRG; PAM sequence: TGG
gtggtagaatataaggggtc

SEQ ID NO: 12829 - DNA, 20 bp, Artificial Sequence
  Description of Artificial Sequence: Synthetic oligonucleotide
  Target: COL7A1; (-) strand; PAM type: NRG; PAM sequence: GGG
actgggtggtagaatataag

SEQ ID NO: 12830 - DNA, 20 bp, Artificial Sequence
  Description of Artificial Sequence: Synthetic oligonucleotide
  Target: COL7A1; (-) strand; PAM type: NRG; PAM sequence: GGG
gactgggtggtagaatataa

SEQ ID NO: 12831 - DNA, 20 bp, Artificial Sequence
  Description of Artificial Sequence: Synthetic oligonucleotide
  Target: COL7A1; (-) strand; PAM type: NRG; PAM sequence: AGG
ggactgggtggtagaatata

SEQ ID NO: 12832 - DNA, 20 bp, Artificial Sequence
  Description of Artificial Sequence: Synthetic oligonucleotide
  Target: COL7A1; (-) strand; PAM type: NRG; PAM sequence: AAG
gggactgggtggtagaatat

SEQ ID NO: 12833 - DNA, 20 bp, Artificial Sequence
  Description of Artificial Sequence: Synthetic oligonucleotide
  Target: COL7A1; (-) strand; PAM type: NRG; PAM sequence: TAG
gcctctgggggactgggtgg

SEQ ID NO: 12834 - DNA, 20 bp, Artificial Sequence
  Description of Artificial Sequence: Synthetic oligonucleotide
  Target: COL7A1; (-) strand; PAM type: NRG; PAM sequence: TGG
gaggcctctgggggactggg

SEQ ID NO: 12835 - DNA, 20 bp, Artificial Sequence
  Description of Artificial Sequence: Synthetic oligonucleotide
  Target: COL7A1; (-) strand; PAM type: NRG; PAM sequence: GGG
gaagaggcctctgggggact

SEQ ID NO: 12836 - DNA, 20 bp, Artificial Sequence
  Description of Artificial Sequence: Synthetic oligonucleotide
  Target: COL7A1; (-) strand; PAM type: NRG; PAM sequence: TGG
ggaagaggcctctgggggac

SEQ ID NO: 12837 - DNA, 20 bp, Artificial Sequence
  Description of Artificial Sequence: Synthetic oligonucleotide
  Target: COL7A1; (-) strand; PAM type: NRG; PAM sequence: GGG
ggtttggaagaggcctctgg

SEQ ID NO: 12838 - DNA, 20 bp, Artificial Sequence
  Description of Artificial Sequence: Synthetic oligonucleotide
  Target: COL7A1; (-) strand; PAM type: NRG; PAM sequence: GGG
aggtttggaagaggcctctg

SEQ ID NO: 12839 - DNA, 20 bp, Artificial Sequence
  Description of Artificial Sequence: Synthetic oligonucleotide
  Target: COL7A1; (-) strand; PAM type: NRG; PAM sequence: GGG
caggtttggaagaggcctct

SEQ ID NO: 12840 - DNA, 20 bp, Artificial Sequence
  Description of Artificial Sequence: Synthetic oligonucleotide
  Target: COL7A1; (-) strand; PAM type: NRG; PAM sequence: TGG
tcaggtttggaagaggcctc

SEQ ID NO: 12841 - DNA, 20 bp, Artificial Sequence
  Description of Artificial Sequence: Synthetic oligonucleotide
  Target: COL7A1; (-) strand; PAM type: NRG; PAM sequence: AGG
tcactactcaggtttggaag

SEQ ID NO: 12842 - DNA, 20 bp, Artificial Sequence
  Description of Artificial Sequence: Synthetic oligonucleotide
  Target: COL7A1; (-) strand; PAM type: NRG; PAM sequence: GAG
ttcactactcaggtttggaa

SEQ ID NO: 12843 - DNA, 20 bp, Artificial Sequence
  Description of Artificial Sequence: Synthetic oligonucleotide
  Target: COL7A1; (-) strand; PAM type: NRG; PAM sequence: AAG
ccttcactactcaggtttgg

SEQ ID NO: 12844 - DNA, 20 bp, Artificial Sequence
  Description of Artificial Sequence: Synthetic oligonucleotide
  Target: COL7A1; (-) strand; PAM type: NRG; PAM sequence: TGG
catccttcactactcaggtt

SEQ ID NO: 12845 - DNA, 20 bp, Artificial Sequence
  Description of Artificial Sequence: Synthetic oligonucleotide
  Target: COL7A1; (-) strand; PAM type: NRG; PAM sequence: AGG
tcaggcatccttcactactc

SEQ ID NO: 12846 - DNA, 20 bp, Artificial Sequence
  Description of Artificial Sequence: Synthetic oligonucleotide
  Target: COL7A1; (-) strand; PAM type: NRG; PAM sequence: CAG
gtcaggcatccttcactact

SEQ ID NO: 12847 - DNA, 20 bp, Artificial Sequence
  Description of Artificial Sequence: Synthetic oligonucleotide
  Target: COL7A1; (-) strand; PAM type: NRG; PAM sequence: AGG
tctggccacagccctgtgtc

SEQ ID NO: 12848 - DNA, 20 bp, Artificial Sequence
  Description of Artificial Sequence: Synthetic oligonucleotide
  Target: COL7A1; (-) strand; PAM type: NRG; PAM sequence: CAG
gtctggccacagccctgtgt

SEQ ID NO: 12849 - DNA, 20 bp, Artificial Sequence
  Description of Artificial Sequence: Synthetic oligonucleotide
  Target: COL7A1; (-) strand; PAM type: NRG; PAM sequence: CAG
ggcagtcagtggtctggcca

SEQ ID NO: 12850 - DNA, 20 bp, Artificial Sequence
  Description of Artificial Sequence: Synthetic oligonucleotide
  Target: COL7A1; (-) strand; PAM type: NRG; PAM sequence: TGG
ggaccaggcagtcagtggtc

SEQ ID NO: 12851 - DNA, 20 bp, Artificial Sequence
  Description of Artificial Sequence: Synthetic oligonucleotide
  Target: COL7A1; (-) strand; PAM type: NRG; PAM sequence: TGG
agcctggaccaggcagtcag

SEQ ID NO: 12852 - DNA, 20 bp, Artificial Sequence
  Description of Artificial Sequence: Synthetic oligonucleotide
  Target: COL7A1; (-) strand; PAM type: NRG; PAM sequence: CAG
ccaagcctggaccaggcagt

SEQ ID NO: 12853 - DNA, 20 bp, Artificial Sequence
  Description of Artificial Sequence: Synthetic oligonucleotide
  Target: COL7A1; (-) strand; PAM type: NRG; PAM sequence: CAG
tgggccaagcctggaccagg

SEQ ID NO: 12854 - DNA, 20 bp, Artificial Sequence
  Description of Artificial Sequence: Synthetic oligonucleotide
  Target: COL7A1; (-) strand; PAM type: NRG; PAM sequence: AGG
tgatgggccaagcctggacc

SEQ ID NO: 12855 - DNA, 20 bp, Artificial Sequence
  Description of Artificial Sequence: Synthetic oligonucleotide
  Target: COL7A1; (-) strand; PAM type: NRG; PAM sequence: CAG
atgatgggccaagcctggac

SEQ ID NO: 12856 - DNA, 20 bp, Artificial Sequence
  Description of Artificial Sequence: Synthetic oligonucleotide
  Target: COL7A1; (-) strand; PAM type: NRG; PAM sequence: TGG
cgtggatgatgggccaagcc

SEQ ID NO: 12857 - DNA, 20 bp, Artificial Sequence
  Description of Artificial Sequence: Synthetic oligonucleotide
  Target: COL7A1; (-) strand; PAM type: NRG; PAM sequence: AAG
ttcgccgtggatgatgggcc

SEQ ID NO: 12858 - DNA, 20 bp, Artificial Sequence
  Description of Artificial Sequence: Synthetic oligonucleotide
  Target: COL7A1; (-) strand; PAM type: NRG; PAM sequence: GGG
ccttcttcgccgtggatgat

SEQ ID NO: 12859 - DNA, 20 bp, Artificial Sequence
  Description of Artificial Sequence: Synthetic oligonucleotide
  Target: COL7A1; (-) strand; PAM type: NRG; PAM sequence: TGG
accttcttcgccgtggatga

SEQ ID NO: 12860 - DNA, 20 bp, Artificial Sequence
  Description of Artificial Sequence: Synthetic oligonucleotide
  Target: COL7A1; (-) strand; PAM type: NRG; PAM sequence: TGG
tgtccagaccttcttcgccg

SEQ ID NO: 12861 - DNA, 20 bp, Artificial Sequence
  Description of Artificial Sequence: Synthetic oligonucleotide
  Target: COL7A1; (-) strand; PAM type: NRG; PAM sequence: CAG
cgccgggtatggactctgtc

SEQ ID NO: 12862 - DNA, 20 bp, Artificial Sequence
  Description of Artificial Sequence: Synthetic oligonucleotide
  Target: COL7A1; (-) strand; PAM type: NRG; PAM sequence: TGG
gcgtcgcttggcgccgggta

SEQ ID NO: 12863 - DNA, 20 bp, Artificial Sequence
  Description of Artificial Sequence: Synthetic oligonucleotide
  Target: COL7A1; (-) strand; PAM type: NRG; PAM sequence: GGG
cagctgcgtcgcttggcgcc

SEQ ID NO: 12864 - DNA, 20 bp, Artificial Sequence
  Description of Artificial Sequence: Synthetic oligonucleotide
  Target: COL7A1; (-) strand; PAM type: NRG; PAM sequence: CGG
gcagctgcgtcgcttggcgc

SEQ ID NO: 12865 - DNA, 20 bp, Artificial Sequence
  Description of Artificial Sequence: Synthetic oligonucleotide
  Target: COL7A1; (-) strand; PAM type: NRG; PAM sequence: TGG
cccagagcagctgcgtcgct

SEQ ID NO: 12866 - DNA, 20 bp, Artificial Sequence
  Description of Artificial Sequence: Synthetic oligonucleotide
  Target: COL7A1; (-) strand; PAM type: NRG; PAM sequence: CAG
tggctggagcggacccagag

SEQ ID NO: 12867 - DNA, 20 bp, Artificial Sequence
  Description of Artificial Sequence: Synthetic oligonucleotide
  Target: COL7A1; (-) strand; PAM type: NRG; PAM sequence: GAG
gaatggctggagcggaccca

SEQ ID NO: 12868 - DNA, 20 bp, Artificial Sequence
  Description of Artificial Sequence: Synthetic oligonucleotide
  Target: COL7A1; (-) strand; PAM type: NRG; PAM sequence: CAG
gggaatggctggagcggacc

SEQ ID NO: 12869 - DNA, 20 bp, Artificial Sequence
  Description of Artificial Sequence: Synthetic oligonucleotide
  Target: COL7A1; (-) strand; PAM type: NRG; PAM sequence: CGG
gatgttgggaatggctggag

SEQ ID NO: 12870 - DNA, 20 bp, Artificial Sequence
  Description of Artificial Sequence: Synthetic oligonucleotide
  Target: COL7A1; (-) strand; PAM type: NRG; PAM sequence: GAG
ggtgatgttgggaatggctg

SEQ ID NO: 12871 - DNA, 20 bp, Artificial Sequence
  Description of Artificial Sequence: Synthetic oligonucleotide
  Target: COL7A1; (-) strand; PAM type: NRG; PAM sequence: TGG
gtggtgatgttgggaatggc

SEQ ID NO: 12872 - DNA, 20 bp, Artificial Sequence
  Description of Artificial Sequence: Synthetic oligonucleotide
  Target: COL7A1; (-) strand; PAM type: NRG; PAM sequence: TGG
taatgtggtgatgttgggaa

SEQ ID NO: 12873 - DNA, 20 bp, Artificial Sequence
  Description of Artificial Sequence: Synthetic oligonucleotide
  Target: COL7A1; (-) strand; PAM type: NRG; PAM sequence: GGG
gggcttaatgtggtgatgtt

SEQ ID NO: 12874 - DNA, 20 bp, Artificial Sequence
  Description of Artificial Sequence: Synthetic oligonucleotide
  Target: COL7A1; (-) strand; PAM type: NRG; PAM sequence: TGG
agggcttaatgtggtgatgt

SEQ ID NO: 12875 - DNA, 20 bp, Artificial Sequence
  Description of Artificial Sequence: Synthetic oligonucleotide
  Target: COL7A1; (-) strand; PAM type: NRG; PAM sequence: TGG
ccccaccttagggcttaatg

SEQ ID NO: 12876 - DNA, 20 bp, Artificial Sequence
  Description of Artificial Sequence: Synthetic oligonucleotide
  Target: COL7A1; (-) strand; PAM type: NRG; PAM sequence: GGG
agccactggaccccacctta

SEQ ID NO: 12877 - DNA, 20 bp, Artificial Sequence
  Description of Artificial Sequence: Synthetic oligonucleotide
  Target: COL7A1; (-) strand; PAM type: NRG; PAM sequence: AGG
cagccactggaccccacctt

SEQ ID NO: 12878 - DNA, 20 bp, Artificial Sequence
  Description of Artificial Sequence: Synthetic oligonucleotide
  Target: COL7A1; (-) strand; PAM type: NRG; PAM sequence: TAG
gcagccactggaccccacct

SEQ ID NO: 12879 - DNA, 20 bp, Artificial Sequence
  Description of Artificial Sequence: Synthetic oligonucleotide
  Target: COL7A1; (-) strand; PAM type: NRG; PAM sequence: TGG
aaaggctatcatgcagccac

SEQ ID NO: 12880 - DNA, 20 bp, Artificial Sequence
  Description of Artificial Sequence: Synthetic oligonucleotide
  Target: COL7A1; (-) strand; PAM type: NRG; PAM sequence: CAG
gccctgaaaaggctatcatg

SEQ ID NO: 12881 - DNA, 20 bp, Artificial Sequence
  Description of Artificial Sequence: Synthetic oligonucleotide
  Target: COL7A1; (-) strand; PAM type: NRG; PAM sequence: AGG
gaataggggtggccctgaaa

SEQ ID NO: 12882 - DNA, 20 bp, Artificial Sequence
  Description of Artificial Sequence: Synthetic oligonucleotide
  Target: COL7A1; (-) strand; PAM type: NRG; PAM sequence: AAG
ggaataggggtggccctgaa

SEQ ID NO: 12883 - DNA, 20 bp, Artificial Sequence
  Description of Artificial Sequence: Synthetic oligonucleotide
  Target: COL7A1; (-) strand; PAM type: NRG; PAM sequence: TGG
aaggggtctgggaatagggg

SEQ ID NO: 12884 - DNA, 20 bp, Artificial Sequence
  Description of Artificial Sequence: Synthetic oligonucleotide
  Target: COL7A1; (-) strand; PAM type: NRG; PAM sequence: GGG
gggaaggggtctgggaatag

SEQ ID NO: 12885 - DNA, 20 bp, Artificial Sequence
  Description of Artificial Sequence: Synthetic oligonucleotide
  Target: COL7A1; (-) strand; PAM type: NRG; PAM sequence: GGG
ggggaaggggtctgggaata

SEQ ID NO: 12886 - DNA, 20 bp, Artificial Sequence
  Description of Artificial Sequence: Synthetic oligonucleotide
  Target: COL7A1; (-) strand; PAM type: NRG; PAM sequence: AGG
tggggaaggggtctgggaat

SEQ ID NO: 12887 - DNA, 20 bp, Artificial Sequence
  Description of Artificial Sequence: Synthetic oligonucleotide
  Target: COL7A1; (-) strand; PAM type: NRG; PAM sequence: TAG
atggggaaggggtctgggaa

SEQ ID NO: 12888 - DNA, 20 bp, Artificial Sequence
  Description of Artificial Sequence: Synthetic oligonucleotide
  Target: COL7A1; (-) strand; PAM type: NRG; PAM sequence: GGG
ggctgatggggaaggggtct

SEQ ID NO: 12889 - DNA, 20 bp, Artificial Sequence
  Description of Artificial Sequence: Synthetic oligonucleotide
  Target: COL7A1; (-) strand; PAM type: NRG; PAM sequence: TGG
aggctgatggggaaggggtc

SEQ ID NO: 12890 - DNA, 20 bp, Artificial Sequence
  Description of Artificial Sequence: Synthetic oligonucleotide
  Target: COL7A1; (-) strand; PAM type: NRG; PAM sequence: GGG
ggagtaggctgatggggaag

SEQ ID NO: 12891 - DNA, 20 bp, Artificial Sequence
  Description of Artificial Sequence: Synthetic oligonucleotide
  Target: COL7A1; (-) strand; PAM type: NRG; PAM sequence: GGG
aggagtaggctgatggggaa

SEQ ID NO: 12892 - DNA, 20 bp, Artificial Sequence
  Description of Artificial Sequence: Synthetic oligonucleotide
  Target: COL7A1; (-) strand; PAM type: NRG; PAM sequence: AGG
aaggagtaggctgatgggga

SEQ ID NO: 12893 - DNA, 20 bp, Artificial Sequence
  Description of Artificial Sequence: Synthetic oligonucleotide
  Target: COL7A1; (-) strand; PAM type: NRG; PAM sequence: AAG
taaggagtaggctgatgggg

SEQ ID NO: 12894 - DNA, 20 bp, Artificial Sequence
  Description of Artificial Sequence: Synthetic oligonucleotide
  Target: COL7A1; (-) strand; PAM type: NRG; PAM sequence: GGG
tggtaaggagtaggctgatg

SEQ ID NO: 12895 - DNA, 20 bp, Artificial Sequence
  Description of Artificial Sequence: Synthetic oligonucleotide
  Target: COL7A1; (-) strand; PAM type: NRG; PAM sequence: GGG
ctggtaaggagtaggctgat

SEQ ID NO: 12896 - DNA, 20 bp, Artificial Sequence
  Description of Artificial Sequence: Synthetic oligonucleotide
  Target: COL7A1; (-) strand; PAM type: NRG; PAM sequence: TGG
tctggtaaggagtaggctga

SEQ ID NO: 12897 - DNA, 20 bp, Artificial Sequence
  Description of Artificial Sequence: Synthetic oligonucleotide
  Target: COL7A1; (-) strand; PAM type: NRG; PAM sequence: AGG
ccaggcttctggtaaggagt

SEQ ID NO: 12898 - DNA, 20 bp, Artificial Sequence
  Description of Artificial Sequence: Synthetic oligonucleotide
  Target: COL7A1; (-) strand; PAM type: NRG; PAM sequence: TAG
cccaggcttctggtaaggag

SEQ ID NO: 12899 - DNA, 20 bp, Artificial Sequence
  Description of Artificial Sequence: Synthetic oligonucleotide
  Target: COL7A1; (-) strand; PAM type: NRG; PAM sequence: GAG
aggcccaggcttctggtaag

SEQ ID NO: 12900 - DNA, 20 bp, Artificial Sequence
  Description of Artificial Sequence: Synthetic oligonucleotide
  Target: COL7A1; (-) strand; PAM type: NRG; PAM sequence: AGG
tgaggcccaggcttctggta

SEQ ID NO: 12901 - DNA, 20 bp, Artificial Sequence
  Description of Artificial Sequence: Synthetic oligonucleotide
  Target: COL7A1; (-) strand; PAM type: NRG; PAM sequence: AAG
gtgaggcccaggcttctggt

SEQ ID NO: 12902 - DNA, 20 bp, Artificial Sequence
  Description of Artificial Sequence: Synthetic oligonucleotide
  Target: COL7A1; (-) strand; PAM type: NRG; PAM sequence: TGG
atccgtgaggcccaggcttc

SEQ ID NO: 12903 - DNA, 20 bp, Artificial Sequence
  Description of Artificial Sequence: Synthetic oligonucleotide
  Target: COL7A1; (-) strand; PAM type: NRG; PAM sequence: AGG
cagccccatccgtgaggccc

SEQ ID NO: 12904 - DNA, 20 bp, Artificial Sequence
  Description of Artificial Sequence: Synthetic oligonucleotide
  Target: COL7A1; (-) strand; PAM type: NRG; PAM sequence: CAG
tcagccccatccgtgaggcc

SEQ ID NO: 12905 - DNA, 20 bp, Artificial Sequence
  Description of Artificial Sequence: Synthetic oligonucleotide
  Target: COL7A1; (-) strand; PAM type: NRG; PAM sequence: AGG
catattcagccccatccgtg

SEQ ID NO: 12906 - DNA, 20 bp, Artificial Sequence
  Description of Artificial Sequence: Synthetic oligonucleotide
  Target: COL7A1; (-) strand; PAM type: NRG; PAM sequence: GAG
acatattcagccccatccgt

SEQ ID NO: 12907 - DNA, 20 bp, Artificial Sequence
  Description of Artificial Sequence: Synthetic oligonucleotide
  Target: COL7A1; (-) strand; PAM type: NRG; PAM sequence: CAG
cccttgagaggtgacatatt

SEQ ID NO: 12908 - DNA, 20 bp, Artificial Sequence
  Description of Artificial Sequence: Synthetic oligonucleotide
  Target: COL7A1; (-) strand; PAM type: NRG; PAM sequence: AGG
ctagtggatgaacccttgag

SEQ ID NO: 12909 - DNA, 20 bp, Artificial Sequence
  Description of Artificial Sequence: Synthetic oligonucleotide
  Target: COL7A1; (-) strand; PAM type: NRG; PAM sequence: GAG
gctagtggatgaacccttga

SEQ ID NO: 12910 - DNA, 20 bp, Artificial Sequence
  Description of Artificial Sequence: Synthetic oligonucleotide
  Target: COL7A1; (-) strand; PAM type: NRG; PAM sequence: GAG
ctgctagtggatgaaccctt

SEQ ID NO: 12911 - DNA, 20 bp, Artificial Sequence
  Description of Artificial Sequence: Synthetic oligonucleotide
  Target: COL7A1; (-) strand; PAM type: NRG; PAM sequence: TGG
aggggtgatggttctgctag

SEQ ID NO: 12912 - DNA, 20 bp, Artificial Sequence
  Description of Artificial Sequence: Synthetic oligonucleotide
  Target: COL7A1; (-) strand; PAM type: NRG; PAM sequence: TAG
accaggggtgatggttctgc

SEQ ID NO: 12913 - DNA, 20 bp, Artificial Sequence
  Description of Artificial Sequence: Synthetic oligonucleotide
  Target: COL7A1; (-) strand; PAM type: NRG; PAM sequence: TGG
ccagcacgtaccaggggtga

SEQ ID NO: 12914 - DNA, 20 bp, Artificial Sequence
  Description of Artificial Sequence: Synthetic oligonucleotide
  Target: COL7A1; (-) strand; PAM type: NRG; PAM sequence: GGG
gcgccgccagcacgtaccag

SEQ ID NO: 12915 - DNA, 20 bp, Artificial Sequence
  Description of Artificial Sequence: Synthetic oligonucleotide
  Target: COL7A1; (-) strand; PAM type: NRG; PAM sequence: GGG
ggcgccgccagcacgtacca

SEQ ID NO: 12916 - DNA, 20 bp, Artificial Sequence
  Description of Artificial Sequence: Synthetic oligonucleotide
  Target: COL7A1; (-) strand; PAM type: NRG; PAM sequence: AGG
gggcgccgccagcacgtacc

SEQ ID NO: 12917 - DNA, 20 bp, Artificial Sequence
  Description of Artificial Sequence: Synthetic oligonucleotide
  Target: COL7A1; (-) strand; PAM type: NRG; PAM sequence: CAG
tgggcgccgccagcacgtac

SEQ ID NO: 12918 - DNA, 20 bp, Artificial Sequence
  Description of Artificial Sequence: Synthetic oligonucleotide
  Target: COL7A1; (-) strand; PAM type: NRG; PAM sequence: CAG
cagatgctcctgggcgccgc

SEQ ID NO: 12919 - DNA, 20 bp, Artificial Sequence
  Description of Artificial Sequence: Synthetic oligonucleotide
  Target: COL7A1; (-) strand; PAM type: NRG; PAM sequence: GGG
tgttggcaccagatgctcct

SEQ ID NO: 12920 - DNA, 20 bp, Artificial Sequence
  Description of Artificial Sequence: Synthetic oligonucleotide
  Target: COL7A1; (-) strand; PAM type: NRG; PAM sequence: TGG
atgttggcaccagatgctcc

SEQ ID NO: 12921 - DNA, 20 bp, Artificial Sequence
  Description of Artificial Sequence: Synthetic oligonucleotide
  Target: COL7A1; (-) strand; PAM type: NRG; PAM sequence: CAG
tcacagatacatgttggcac

SEQ ID NO: 12922 - DNA, 20 bp, Artificial Sequence
  Description of Artificial Sequence: Synthetic oligonucleotide
  Target: COL7A1; (-) strand; PAM type: NRG; PAM sequence: TGG
cacagctcacagatacatgt

SEQ ID NO: 12923 - DNA, 20 bp, Artificial Sequence
  Description of Artificial Sequence: Synthetic oligonucleotide
  Target: COL7A1; (-) strand; PAM type: NRG; PAM sequence: CAG
acagccgtggtcacagctca

SEQ ID NO: 12924 - DNA, 20 bp, Artificial Sequence
  Description of Artificial Sequence: Synthetic oligonucleotide
  Target: COL7A1; (-) strand; PAM type: NRG; PAM sequence: CAG
tccaggcacagccgtggtca

SEQ ID NO: 12925 - DNA, 20 bp, Artificial Sequence
  Description of Artificial Sequence: Synthetic oligonucleotide
  Target: COL7A1; (-) strand; PAM type: NRG; PAM sequence: TGG
cttccttccaggcacagccg

SEQ ID NO: 12926 - DNA, 20 bp, Artificial Sequence
  Description of Artificial Sequence: Synthetic oligonucleotide
  Target: COL7A1; (-) strand; PAM type: NRG; PAM sequence: CAG
catgtccttccttccaggca

SEQ ID NO: 12927 - DNA, 20 bp, Artificial Sequence
  Description of Artificial Sequence: Synthetic oligonucleotide
  Target: COL7A1; (-) strand; PAM type: NRG; PAM sequence: AGG
tctgacatgtccttccttcc

SEQ ID NO: 12928 - DNA, 20 bp, Artificial Sequence
  Description of Artificial Sequence: Synthetic oligonucleotide
  Target: COL7A1; (-) strand; PAM type: NRG; PAM sequence: CAG
ttctgacatgtccttccttc

SEQ ID NO: 12929 - DNA, 20 bp, Artificial Sequence
  Description of Artificial Sequence: Synthetic oligonucleotide
  Target: COL7A1; (-) strand; PAM type: NRG; PAM sequence: GGG
actgggagcttggtgcccca

SEQ ID NO: 12930 - DNA, 20 bp, Artificial Sequence
  Description of Artificial Sequence: Synthetic oligonucleotide
  Target: COL7A1; (-) strand; PAM type: NRG; PAM sequence: AGG
cactgggagcttggtgcccc

SEQ ID NO: 12931 - DNA, 20 bp, Artificial Sequence
  Description of Artificial Sequence: Synthetic oligonucleotide
  Target: COL7A1; (-) strand; PAM type: NRG; PAM sequence: CAG
ccactgggagcttggtgccc

SEQ ID NO: 12932 - DNA, 20 bp, Artificial Sequence
  Description of Artificial Sequence: Synthetic oligonucleotide
  Target: COL7A1; (-) strand; PAM type: NRG; PAM sequence: TGG
ggggctatccactgggagct

SEQ ID NO: 12933 - DNA, 20 bp, Artificial Sequence
  Description of Artificial Sequence: Synthetic oligonucleotide
  Target: COL7A1; (-) strand; PAM type: NRG; PAM sequence: GAG
ctcctggggctatccactgg

SEQ ID NO: 12934 - DNA, 20 bp, Artificial Sequence
  Description of Artificial Sequence: Synthetic oligonucleotide
  Target: COL7A1; (-) strand; PAM type: NRG; PAM sequence: GGG
gactcctggggctatccact

SEQ ID NO: 12935 - DNA, 20 bp, Artificial Sequence
  Description of Artificial Sequence: Synthetic oligonucleotide
  Target: COL7A1; (-) strand; PAM type: NRG; PAM sequence: TGG
ggactcctggggctatccac

SEQ ID NO: 12936 - DNA, 20 bp, Artificial Sequence
  Description of Artificial Sequence: Synthetic oligonucleotide
  Target: COL7A1; (-) strand; PAM type: NRG; PAM sequence: GGG
gcagcaggcatggactcctg

SEQ ID NO: 12937 - DNA, 20 bp, Artificial Sequence
  Description of Artificial Sequence: Synthetic oligonucleotide
  Target: COL7A1; (-) strand; PAM type: NRG; PAM sequence: GGG
tgcagcaggcatggactcct

SEQ ID NO: 12938 - DNA, 20 bp, Artificial Sequence
  Description of Artificial Sequence: Synthetic oligonucleotide
  Target: COL7A1; (-) strand; PAM type: NRG; PAM sequence: TGG
ctgcagcaggcatggactcc

SEQ ID NO: 12939 - DNA, 20 bp, Artificial Sequence
  Description of Artificial Sequence: Synthetic oligonucleotide
  Target: COL7A1; (-) strand; PAM type: NRG; PAM sequence: TGG
ggtgaggactgcagcaggca

SEQ ID NO: 12940 - DNA, 20 bp, Artificial Sequence
  Description of Artificial Sequence: Synthetic oligonucleotide
  Target: COL7A1; (-) strand; PAM type: NRG; PAM sequence: AGG
acctgggtgaggactgcagc

SEQ ID NO: 12941 - DNA, 20 bp, Artificial Sequence
  Description of Artificial Sequence: Synthetic oligonucleotide
  Target: COL7A1; (-) strand; PAM type: NRG; PAM sequence: CAG
aacctgggtgaggactgcag

SEQ ID NO: 12942 - DNA, 20 bp, Artificial Sequence
  Description of Artificial Sequence: Synthetic oligonucleotide
  Target: COL7A1; (-) strand; PAM type: NRG; PAM sequence: CAG
aacaacctgggtgaggactg

SEQ ID NO: 12943 - DNA, 20 bp, Artificial Sequence
  Description of Artificial Sequence: Synthetic oligonucleotide
  Target: COL7A1; (-) strand; PAM type: NRG; PAM sequence: AGG
aagtgggaacaacctgggtg

SEQ ID NO: 12944 - DNA, 20 bp, Artificial Sequence
  Description of Artificial Sequence: Synthetic oligonucleotide
  Target: COL7A1; (-) strand; PAM type: NRG; PAM sequence: GAG
caagtgggaacaacctgggt

SEQ ID NO: 12945 - DNA, 20 bp, Artificial Sequence
  Description of Artificial Sequence: Synthetic oligonucleotide
  Target: COL7A1; (-) strand; PAM type: NRG; PAM sequence: GGG
gacccaagtgggaacaacct

SEQ ID NO: 12946 - DNA, 20 bp, Artificial Sequence
  Description of Artificial Sequence: Synthetic oligonucleotide
  Target: COL7A1; (-) strand; PAM type: NRG; PAM sequence: TGG
ggacccaagtgggaacaacc

SEQ ID NO: 12947 - DNA, 20 bp, Artificial Sequence
  Description of Artificial Sequence: Synthetic oligonucleotide
  Target: COL7A1; (-) strand; PAM type: NRG; PAM sequence: GGG
tgccctacatggacccaagt

SEQ ID NO: 12948 - DNA, 20 bp, Artificial Sequence
  Description of Artificial Sequence: Synthetic oligonucleotide
  Target: COL7A1; (-) strand; PAM type: NRG; PAM sequence: TGG
atgccctacatggacccaag

SEQ ID NO: 12949 - DNA, 20 bp, Artificial Sequence
  Description of Artificial Sequence: Synthetic oligonucleotide
  Target: COL7A1; (-) strand; PAM type: NRG; PAM sequence: AAG
gacatgccctacatggaccc

SEQ ID NO: 12950 - DNA, 20 bp, Artificial Sequence
  Description of Artificial Sequence: Synthetic oligonucleotide
  Target: COL7A1; (-) strand; PAM type: NRG; PAM sequence: TGG
gatccgtgacatgccctaca

SEQ ID NO: 12951 - DNA, 20 bp, Artificial Sequence
  Description of Artificial Sequence: Synthetic oligonucleotide
  Target: COL7A1; (-) strand; PAM type: NRG; PAM sequence: AGG
accttggcattatcttgcaa

SEQ ID NO: 12952 - DNA, 20 bp, Artificial Sequence
  Description of Artificial Sequence: Synthetic oligonucleotide
  Target: COL7A1; (-) strand; PAM type: NRG; PAM sequence: AAG
gaccttggcattatcttgca

SEQ ID NO: 12953 - DNA, 20 bp, Artificial Sequence
  Description of Artificial Sequence: Synthetic oligonucleotide
  Target: COL7A1; (-) strand; PAM type: NRG; PAM sequence: TGG
ctgaatggctcccatgacct

SEQ ID NO: 12954 - DNA, 20 bp, Artificial Sequence
  Description of Artificial Sequence: Synthetic oligonucleotide
  Target: COL7A1; (-) strand; PAM type: NRG; PAM sequence: TGG
tccccactgttcccactgaa

SEQ ID NO: 12955 - DNA, 20 bp, Artificial Sequence
  Description of Artificial Sequence: Synthetic oligonucleotide
  Target: COL7A1; (-) strand; PAM type: NRG; PAM sequence: CGG
gcctgctgtcttacagtcat

SEQ ID NO: 12956 - DNA, 20 bp, Artificial Sequence
  Description of Artificial Sequence: Synthetic oligonucleotide
  Target: COL7A1; (-) strand; PAM type: NRG; PAM sequence: CAG
caggttggcctgctgtctta

SEQ ID NO: 12957 - DNA, 20 bp, Artificial Sequence
  Description of Artificial Sequence: Synthetic oligonucleotide
  Target: COL7A1; (-) strand; PAM type: NRG; PAM sequence: TGG
tgtttccttccaccccaggt

SEQ ID NO: 12958 - DNA, 20 bp, Artificial Sequence
  Description of Artificial Sequence: Synthetic oligonucleotide
  Target: COL7A1; (-) strand; PAM type: NRG; PAM sequence: AGG
tctgtgtttccttccacccc

SEQ ID NO: 12959 - DNA, 20 bp, Artificial Sequence
  Description of Artificial Sequence: Synthetic oligonucleotide
  Target: COL7A1; (-) strand; PAM type: NRG; PAM sequence: CAG
ctctgtgtttccttccaccc

SEQ ID NO: 12960 - DNA, 20 bp, Artificial Sequence
  Description of Artificial Sequence: Synthetic oligonucleotide
  Target: COL7A1; (-) strand; PAM type: NRG; PAM sequence: AGG
cctgctctgtcatcctcctc

SEQ ID NO: 12961 - DNA, 20 bp, Artificial Sequence
  Description of Artificial Sequence: Synthetic oligonucleotide
  Target: COL7A1; (-) strand; PAM type: NRG; PAM sequence: CAG
ccctgctctgtcatcctcct

SEQ ID NO: 12962 - DNA, 20 bp, Artificial Sequence
  Description of Artificial Sequence: Synthetic oligonucleotide
  Target: COL7A1; (-) strand; PAM type: NRG; PAM sequence: AGG
acaccctgatgtgtttctcc

SEQ ID NO: 12963 - DNA, 20 bp, Artificial Sequence
  Description of Artificial Sequence: Synthetic oligonucleotide
  Target: COL7A1; (-) strand; PAM type: NRG; PAM sequence: CAG
cacaccctgatgtgtttctc

SEQ ID NO: 12964 - DNA, 20 bp, Artificial Sequence
  Description of Artificial Sequence: Synthetic oligonucleotide
  Target: COL7A1; (-) strand; PAM type: NRG; PAM sequence: TGG
actccctaatagatagggtt

SEQ ID NO: 12965 - DNA, 20 bp, Artificial Sequence
  Description of Artificial Sequence: Synthetic oligonucleotide
  Target: COL7A1; (-) strand; PAM type: NRG; PAM sequence: GGG
tgctgactccctaatagata

SEQ ID NO: 12966 - DNA, 20 bp, Artificial Sequence
  Description of Artificial Sequence: Synthetic oligonucleotide
  Target: COL7A1; (-) strand; PAM type: NRG; PAM sequence: AGG
ctgctgactccctaatagat

SEQ ID NO: 12967 - DNA, 20 bp, Artificial Sequence
  Description of Artificial Sequence: Synthetic oligonucleotide
  Target: COL7A1; (-) strand; PAM type: NRG; PAM sequence: TAG
actgctgactccctaataga

SEQ ID NO: 12968 - DNA, 20 bp, Artificial Sequence
  Description of Artificial Sequence: Synthetic oligonucleotide
  Target: COL7A1; (-) strand; PAM type: NRG; PAM sequence: TAG
catcactgctgactccctaa

SEQ ID NO: 12969 - DNA, 20 bp, Artificial Sequence
  Description of Artificial Sequence: Synthetic oligonucleotide
  Target: COL7A1; (-) strand; PAM type: NRG; PAM sequence: TGG
tccagacctcacctactgcc

SEQ ID NO: 12970 - DNA, 20 bp, Artificial Sequence
  Description of Artificial Sequence: Synthetic oligonucleotide
  Target: COL7A1; (-) strand; PAM type: NRG; PAM sequence: CAG
cccagctctctcacaggctc

SEQ ID NO: 12971 - DNA, 20 bp, Artificial Sequence
  Description of Artificial Sequence: Synthetic oligonucleotide
  Target: COL7A1; (-) strand; PAM type: NRG; PAM sequence: AGG
cattctcccagctctctcac

SEQ ID NO: 12972 - DNA, 20 bp, Artificial Sequence
  Description of Artificial Sequence: Synthetic oligonucleotide
  Target: COL7A1; (-) strand; PAM type: NRG; PAM sequence: CAG
gcattctcccagctctctca

SEQ ID NO: 12973 - DNA, 20 bp, Artificial Sequence
  Description of Artificial Sequence: Synthetic oligonucleotide
  Target: COL7A1; (-) strand; PAM type: NRG; PAM sequence: CAG
aataggttcaggcattctcc

SEQ ID NO: 12974 - DNA, 20 bp, Artificial Sequence
  Description of Artificial Sequence: Synthetic oligonucleotide
  Target: COL7A1; (-) strand; PAM type: NRG; PAM sequence: AGG
cctgaccacccaataggttc

SEQ ID NO: 12975 - DNA, 20 bp, Artificial Sequence
  Description of Artificial Sequence: Synthetic oligonucleotide
  Target: COL7A1; (-) strand; PAM type: NRG; PAM sequence: CAG
tcctgaccacccaataggtt

SEQ ID NO: 12976 - DNA, 20 bp, Artificial Sequence
  Description of Artificial Sequence: Synthetic oligonucleotide
  Target: COL7A1; (-) strand; PAM type: NRG; PAM sequence: AGG
ccatctcctgaccacccaat

SEQ ID NO: 12977 - DNA, 20 bp, Artificial Sequence
  Description of Artificial Sequence: Synthetic oligonucleotide
  Target: COL7A1; (-) strand; PAM type: NRG; PAM sequence: TAG
accatctcctgaccacccaa

SEQ ID NO: 12978 - DNA, 20 bp, Artificial Sequence
  Description of Artificial Sequence: Synthetic oligonucleotide
  Target: COL7A1; (-) strand; PAM type: NRG; PAM sequence: CAG
cccccacccaggctccatac

SEQ ID NO: 12979 - DNA, 20 bp, Artificial Sequence
  Description of Artificial Sequence: Synthetic oligonucleotide
  Target: COL7A1; (-) strand; PAM type: NRG; PAM sequence: AGG
ctccctgaggccccccaccc

SEQ ID NO: 12980 - DNA, 20 bp, Artificial Sequence
  Description of Artificial Sequence: Synthetic oligonucleotide
  Target: COL7A1; (-) strand; PAM type: NRG; PAM sequence: CAG
tctccctgaggccccccacc

SEQ ID NO: 12981 - DNA, 20 bp, Artificial Sequence
  Description of Artificial Sequence: Synthetic oligonucleotide
  Target: COL7A1; (-) strand; PAM type: NRG; PAM sequence: AGG
ccagattctacctctccctg

SEQ ID NO: 12982 - DNA, 20 bp, Artificial Sequence
  Description of Artificial Sequence: Synthetic oligonucleotide
  Target: COL7A1; (-) strand; PAM type: NRG; PAM sequence: GAG
gccagattctacctctccct

SEQ ID NO: 12983 - DNA, 20 bp, Artificial Sequence
  Description of Artificial Sequence: Synthetic oligonucleotide
  Target: COL7A1; (-) strand; PAM type: NRG; PAM sequence: CAG
aggtttggccctggggcagc

SEQ ID NO: 12984 - DNA, 20 bp, Artificial Sequence
  Description of Artificial Sequence: Synthetic oligonucleotide
  Target: COL7A1; (-) strand; PAM type: NRG; PAM sequence: CAG
gttcaggtttggccctgggg

SEQ ID NO: 12985 - DNA, 20 bp, Artificial Sequence
  Description of Artificial Sequence: Synthetic oligonucleotide
  Target: COL7A1; (-) strand; PAM type: NRG; PAM sequence: GGG
gcagttcaggtttggccctg

SEQ ID NO: 12986 - DNA, 20 bp, Artificial Sequence
  Description of Artificial Sequence: Synthetic oligonucleotide
  Target: COL7A1; (-) strand; PAM type: NRG; PAM sequence: GGG
ggcagttcaggtttggccct

SEQ ID NO: 12987 - DNA, 20 bp, Artificial Sequence
  Description of Artificial Sequence: Synthetic oligonucleotide
  Target: COL7A1; (-) strand; PAM type: NRG; PAM sequence: TGG
aggcagttcaggtttggccc

SEQ ID NO: 12988 - DNA, 20 bp, Artificial Sequence
  Description of Artificial Sequence: Synthetic oligonucleotide
  Target: COL7A1; (-) strand; PAM type: NRG; PAM sequence: TGG
ggccacaggcagttcaggtt

SEQ ID NO: 12989 - DNA, 20 bp, Artificial Sequence
  Description of Artificial Sequence: Synthetic oligonucleotide
  Target: COL7A1; (-) strand; PAM type: NRG; PAM sequence: AGG
tcttgggccacaggcagttc

SEQ ID NO: 12990 - DNA, 20 bp, Artificial Sequence
  Description of Artificial Sequence: Synthetic oligonucleotide
  Target: COL7A1; (-) strand; PAM type: NRG; PAM sequence: CAG
ctcttgggccacaggcagtt

SEQ ID NO: 12991 - DNA, 20 bp, Artificial Sequence
  Description of Artificial Sequence: Synthetic oligonucleotide
  Target: COL7A1; (-) strand; PAM type: NRG; PAM sequence: CAG
tgggcctcttgggccacagg

SEQ ID NO: 12992 - DNA, 20 bp, Artificial Sequence
  Description of Artificial Sequence: Synthetic oligonucleotide
  Target: COL7A1; (-) strand; PAM type: NRG; PAM sequence: AGG
acttgggcctcttgggccac

SEQ ID NO: 12993 - DNA, 20 bp, Artificial Sequence
  Description of Artificial Sequence: Synthetic oligonucleotide
  Target: COL7A1; (-) strand; PAM type: NRG; PAM sequence: CAG
cacttgggcctcttgggcca

SEQ ID NO: 12994 - DNA, 20 bp, Artificial Sequence
  Description of Artificial Sequence: Synthetic oligonucleotide
  Target: COL7A1; (-) strand; PAM type: NRG; PAM sequence: GGG
tgttggcacttgggcctctt

SEQ ID NO: 12995 - DNA, 20 bp, Artificial Sequence
  Description of Artificial Sequence: Synthetic oligonucleotide
  Target: COL7A1; (-) strand; PAM type: NRG; PAM sequence: TGG
gtgttggcacttgggcctct

SEQ ID NO: 12996 - DNA, 20 bp, Artificial Sequence
  Description of Artificial Sequence: Synthetic oligonucleotide
  Target: COL7A1; (-) strand; PAM type: NRG; PAM sequence: GGG
agcgtctggtgttggcactt

SEQ ID NO: 12997 - DNA, 20 bp, Artificial Sequence
  Description of Artificial Sequence: Synthetic oligonucleotide
  Target: COL7A1; (-) strand; PAM type: NRG; PAM sequence: TGG
gagcgtctggtgttggcact

SEQ ID NO: 12998 - DNA, 20 bp, Artificial Sequence
  Description of Artificial Sequence: Synthetic oligonucleotide
  Target: COL7A1; (-) strand; PAM type: NRG; PAM sequence: TGG
ggtcctggagcgtctggtgt

SEQ ID NO: 12999 - DNA, 20 bp, Artificial Sequence
  Description of Artificial Sequence: Synthetic oligonucleotide
  Target: COL7A1; (-) strand; PAM type: NRG; PAM sequence: TGG
gaggagggtcctggagcgtc

SEQ ID NO: 13000 - DNA, 20 bp, Artificial Sequence
  Description of Artificial Sequence: Synthetic oligonucleotide
  Target: COL7A1; (-) strand; PAM type: NRG; PAM sequence: GAG
aggctacgaggagggtcctg

SEQ ID NO: 13001 - DNA, 20 bp, Artificial Sequence
  Description of Artificial Sequence: Synthetic oligonucleotide
  Target: COL7A1; (-) strand; PAM type: NRG; PAM sequence: TGG
ggaggctacgaggagggtcc

SEQ ID NO: 13002 - DNA, 20 bp, Artificial Sequence
  Description of Artificial Sequence: Synthetic oligonucleotide
  Target: COL7A1; (-) strand; PAM type: NRG; PAM sequence: GGG
ccgtgcggaggctacgagga

SEQ ID NO: 13003 - DNA, 20 bp, Artificial Sequence
  Description of Artificial Sequence: Synthetic oligonucleotide
  Target: COL7A1; (-) strand; PAM type: NRG; PAM sequence: AGG
accgtgcggaggctacgagg

SEQ ID NO: 13004 - DNA, 20 bp, Artificial Sequence
  Description of Artificial Sequence: Synthetic oligonucleotide
  Target: COL7A1; (-) strand; PAM type: NRG; PAM sequence: GAG
caccgtgcggaggctacgag

SEQ ID NO: 13005 - DNA, 20 bp, Artificial Sequence
  Description of Artificial Sequence: Synthetic oligonucleotide
  Target: COL7A1; (-) strand; PAM type: NRG; PAM sequence: AGG
ctcaccgtgcggaggctacg

SEQ ID NO: 13006 - DNA, 20 bp, Artificial Sequence
  Description of Artificial Sequence: Synthetic oligonucleotide
  Target: COL7A1; (-) strand; PAM type: NRG; PAM sequence: GAG
gctcaccgtgcggaggctac

SEQ ID NO: 13007 - DNA, 20 bp, Artificial Sequence
  Description of Artificial Sequence: Synthetic oligonucleotide
  Target: COL7A1; (-) strand; PAM type: NRG; PAM sequence: AGG
agacaatgctcaccgtgcgg

SEQ ID NO: 13008 - DNA, 20 bp, Artificial Sequence
  Description of Artificial Sequence: Synthetic oligonucleotide
  Target: COL7A1; (-) strand; PAM type: NRG; PAM sequence: GAG
aagacaatgctcaccgtgcg

SEQ ID NO: 13009 - DNA, 20 bp, Artificial Sequence
  Description of Artificial Sequence: Synthetic oligonucleotide
  Target: COL7A1; (-) strand; PAM type: NRG; PAM sequence: CGG
tcaagacaatgctcaccgtg

SEQ ID NO: 13010 - DNA, 20 bp, Artificial Sequence
  Description of Artificial Sequence: Synthetic oligonucleotide
  Target: COL7A1; (-) strand; PAM type: NRG; PAM sequence: AAG
gttcctaccacatgccactc

SEQ ID NO: 13011 - DNA, 20 bp, Artificial Sequence
  Description of Artificial Sequence: Synthetic oligonucleotide
  Target: COL7A1; (-) strand; PAM type: NRG; PAM sequence: TGG
cccccgtggcctggcggatg

SEQ ID NO: 13012 - DNA, 20 bp, Artificial Sequence
  Description of Artificial Sequence: Synthetic oligonucleotide
  Target: COL7A1; (-) strand; PAM type: NRG; PAM sequence: CGG
agtgtgcccccgtggcctgg

SEQ ID NO: 13013 - DNA, 20 bp, Artificial Sequence
  Description of Artificial Sequence: Synthetic oligonucleotide
  Target: COL7A1; (-) strand; PAM type: NRG; PAM sequence: TGG
tacagtgtgcccccgtggcc

SEQ ID NO: 13014 - DNA, 20 bp, Artificial Sequence
  Description of Artificial Sequence: Synthetic oligonucleotide
  Target: COL7A1; (-) strand; PAM type: NRG; PAM sequence: TGG
cttcctacagtgtgcccccg

SEQ ID NO: 13015 - DNA, 20 bp, Artificial Sequence
  Description of Artificial Sequence: Synthetic oligonucleotide
  Target: COL7A1; (-) strand; PAM type: NRG; PAM sequence: CAG
gtaacttgttccccttccta

SEQ ID NO: 13016 - DNA, 20 bp, Artificial Sequence
  Description of Artificial Sequence: Synthetic oligonucleotide
  Target: COL7A1; (-) strand; PAM type: NRG; PAM sequence: CAG
tctgggtgggctgcccgctt

SEQ ID NO: 13017 - DNA, 20 bp, Artificial Sequence
  Description of Artificial Sequence: Synthetic oligonucleotide
  Target: COL7A1; (-) strand; PAM type: NRG; PAM sequence: GGG
gcagaaaggtgtgtctgggt

SEQ ID NO: 13018 - DNA, 20 bp, Artificial Sequence
  Description of Artificial Sequence: Synthetic oligonucleotide
  Target: COL7A1; (-) strand; PAM type: NRG; PAM sequence: TGG
ggcagaaaggtgtgtctggg

SEQ ID NO: 13019 - DNA, 20 bp, Artificial Sequence
  Description of Artificial Sequence: Synthetic oligonucleotide
  Target: COL7A1; (-) strand; PAM type: NRG; PAM sequence: GGG
aagggcagaaaggtgtgtct

SEQ ID NO: 13020 - DNA, 20 bp, Artificial Sequence
  Description of Artificial Sequence: Synthetic oligonucleotide
  Target: COL7A1; (-) strand; PAM type: NRG; PAM sequence: TGG
gaagggcagaaaggtgtgtc

SEQ ID NO: 13021 - DNA, 20 bp, Artificial Sequence
  Description of Artificial Sequence: Synthetic oligonucleotide
  Target: COL7A1; (-) strand; PAM type: NRG; PAM sequence: AGG
gcgtagtgggaagggcagaa

SEQ ID NO: 13022 - DNA, 20 bp, Artificial Sequence
  Description of Artificial Sequence: Synthetic oligonucleotide
  Target: COL7A1; (-) strand; PAM type: NRG; PAM sequence: AAG
ggcgtagtgggaagggcaga

SEQ ID NO: 13023 - DNA, 20 bp, Artificial Sequence
  Description of Artificial Sequence: Synthetic oligonucleotide
  Target: COL7A1; (-) strand; PAM type: NRG; PAM sequence: CAG
agtgggcgtagtgggaaggg

SEQ ID NO: 13024 - DNA, 20 bp, Artificial Sequence
  Description of Artificial Sequence: Synthetic oligonucleotide
  Target: COL7A1; (-) strand; PAM type: NRG; PAM sequence: GGG
tatagtgggcgtagtgggaa

SEQ ID NO: 13025 - DNA, 20 bp, Artificial Sequence
  Description of Artificial Sequence: Synthetic oligonucleotide
  Target: COL7A1; (-) strand; PAM type: NRG; PAM sequence: AGG
gtatagtgggcgtagtggga

SEQ ID NO: 13026 - DNA, 20 bp, Artificial Sequence
  Description of Artificial Sequence: Synthetic oligonucleotide
  Target: COL7A1; (-) strand; PAM type: NRG; PAM sequence: AAG
ggtatagtgggcgtagtggg

SEQ ID NO: 13027 - DNA, 20 bp, Artificial Sequence
  Description of Artificial Sequence: Synthetic oligonucleotide
  Target: COL7A1; (-) strand; PAM type: NRG; PAM sequence: GGG
ccaggtatagtgggcgtagt

SEQ ID NO: 13028 - DNA, 20 bp, Artificial Sequence
  Description of Artificial Sequence: Synthetic oligonucleotide
  Target: COL7A1; (-) strand; PAM type: NRG; PAM sequence: TGG
gccaggtatagtgggcgtag

SEQ ID NO: 13029 - DNA, 20 bp, Artificial Sequence
  Description of Artificial Sequence: Synthetic oligonucleotide
  Target: COL7A1; (-) strand; PAM type: NRG; PAM sequence: TAG
gacgccaggtatagtgggcg

SEQ ID NO: 13030 - DNA, 20 bp, Artificial Sequence
  Description of Artificial Sequence: Synthetic oligonucleotide
  Target: COL7A1; (-) strand; PAM type: NRG; PAM sequence: GGG
acacagacgccaggtatagt

SEQ ID NO: 13031 - DNA, 20 bp, Artificial Sequence
  Description of Artificial Sequence: Synthetic oligonucleotide
  Target: COL7A1; (-) strand; PAM type: NRG; PAM sequence: TGG
cacacagacgccaggtatag

SEQ ID NO: 13032 - DNA, 20 bp, Artificial Sequence
  Description of Artificial Sequence: Synthetic oligonucleotide
  Target: COL7A1; (-) strand; PAM type: NRG; PAM sequence: TAG
tgtcacacagacgccaggta

SEQ ID NO: 13033 - DNA, 20 bp, Artificial Sequence
  Description of Artificial Sequence: Synthetic oligonucleotide
  Target: COL7A1; (-) strand; PAM type: NRG; PAM sequence: AGG
gcatctgtcacacagacgcc

SEQ ID NO: 13034 - DNA, 20 bp, Artificial Sequence
  Description of Artificial Sequence: Synthetic oligonucleotide
  Target: COL7A1; (-) strand; PAM type: NRG; PAM sequence: CAG
ggcatctgtcacacagacgc

SEQ ID NO: 13035 - DNA, 20 bp, Artificial Sequence
  Description of Artificial Sequence: Synthetic oligonucleotide
  Target: COL7A1; (-) strand; PAM type: NRG; PAM sequence: CAG
gtcctgaggcatctgtcaca

SEQ ID NO: 13036 - DNA, 20 bp, Artificial Sequence
  Description of Artificial Sequence: Synthetic oligonucleotide
  Target: COL7A1; (-) strand; PAM type: NRG; PAM sequence: AGG
ggatggtgtgcggggtcctg

SEQ ID NO: 13037 - DNA, 20 bp, Artificial Sequence
  Description of Artificial Sequence: Synthetic oligonucleotide
  Target: COL7A1; (-) strand; PAM type: NRG; PAM sequence: GAG
tggatggtgtgcggggtcct

SEQ ID NO: 13038 - DNA, 20 bp, Artificial Sequence
  Description of Artificial Sequence: Synthetic oligonucleotide
  Target: COL7A1; (-) strand; PAM type: NRG; PAM sequence: GGG
cctgtcctggatggtgtgcg

SEQ ID NO: 13039 - DNA, 20 bp, Artificial Sequence
  Description of Artificial Sequence: Synthetic oligonucleotide
  Target: COL7A1; (-) strand; PAM type: NRG; PAM sequence: GGG
gcctgtcctggatggtgtgc

SEQ ID NO: 13040 - DNA, 20 bp, Artificial Sequence
  Description of Artificial Sequence: Synthetic oligonucleotide
  Target: COL7A1; (-) strand; PAM type: NRG; PAM sequence: CGG
cgcctgtcctggatggtgtg

SEQ ID NO: 13041 - DNA, 20 bp, Artificial Sequence
  Description of Artificial Sequence: Synthetic oligonucleotide
  Target: COL7A1; (-) strand; PAM type: NRG; PAM sequence: TGG
tccctgacgcctgtcctgga

SEQ ID NO: 13042 - DNA, 20 bp, Artificial Sequence
  Description of Artificial Sequence: Synthetic oligonucleotide
  Target: COL7A1; (-) strand; PAM type: NRG; PAM sequence: TGG
cttctccctgacgcctgtcc

SEQ ID NO: 13043 - DNA, 20 bp, Artificial Sequence
  Description of Artificial Sequence: Synthetic oligonucleotide
  Target: COL7A1; (-) strand; PAM type: NRG; PAM sequence: TGG
cgggtgacagggctagagcc

SEQ ID NO: 13044 - DNA, 20 bp, Artificial Sequence
  Description of Artificial Sequence: Synthetic oligonucleotide
  Target: COL7A1; (-) strand; PAM type: NRG; PAM sequence: GAG
cccagcgggtgacagggcta

SEQ ID NO: 13045 - DNA, 20 bp, Artificial Sequence
  Description of Artificial Sequence: Synthetic oligonucleotide
  Target: COL7A1; (-) strand; PAM type: NRG; PAM sequence: TAG
ctcccagcgggtgacagggc

SEQ ID NO: 13046 - DNA, 20 bp, Artificial Sequence
  Description of Artificial Sequence: Synthetic oligonucleotide
  Target: COL7A1; (-) strand; PAM type: NRG; PAM sequence: GGG
caagctcccagcgggtgaca

SEQ ID NO: 13047 - DNA, 20 bp, Artificial Sequence
  Description of Artificial Sequence: Synthetic oligonucleotide
  Target: COL7A1; (-) strand; PAM type: NRG; PAM sequence: AGG
tcaagctcccagcgggtgac

SEQ ID NO: 13048 - DNA, 20 bp, Artificial Sequence
  Description of Artificial Sequence: Synthetic oligonucleotide
  Target: COL7A1; (-) strand; PAM type: NRG; PAM sequence: CAG
ctcaagctcccagcgggtga

SEQ ID NO: 13049 - DNA, 20 bp, Artificial Sequence
  Description of Artificial Sequence: Synthetic oligonucleotide
  Target: COL7A1; (-) strand; PAM type: NRG; PAM sequence: GGG
agggatctcaagctcccagc

SEQ ID NO: 13050 - DNA, 20 bp, Artificial Sequence
  Description of Artificial Sequence: Synthetic oligonucleotide
  Target: COL7A1; (-) strand; PAM type: NRG; PAM sequence: CGG
cagggatctcaagctcccag

SEQ ID NO: 13051 - DNA, 20 bp, Artificial Sequence
  Description of Artificial Sequence: Synthetic oligonucleotide
  Target: COL7A1; (-) strand; PAM type: NRG; PAM sequence: CAG
ttccagggatctcaagctcc

SEQ ID NO: 13052 - DNA, 20 bp, Artificial Sequence
  Description of Artificial Sequence: Synthetic oligonucleotide
  Target: COL7A1; (-) strand; PAM type: NRG; PAM sequence: AAG
cagacacttccagggatctc

SEQ ID NO: 13053 - DNA, 20 bp, Artificial Sequence
  Description of Artificial Sequence: Synthetic oligonucleotide
  Target: COL7A1; (-) strand; PAM type: NRG; PAM sequence: GGG
ggtccccgcagacacttcca

SEQ ID NO: 13054 - DNA, 20 bp, Artificial Sequence
  Description of Artificial Sequence: Synthetic oligonucleotide
  Target: COL7A1; (-) strand; PAM type: NRG; PAM sequence: AGG
gggtccccgcagacacttcc

SEQ ID NO: 13055 - DNA, 20 bp, Artificial Sequence
  Description of Artificial Sequence: Synthetic oligonucleotide
  Target: COL7A1; (-) strand; PAM type: NRG; PAM sequence: CAG
tgggtccccgcagacacttc

SEQ ID NO: 13056 - DNA, 20 bp, Artificial Sequence
  Description of Artificial Sequence: Synthetic oligonucleotide
  Target: COL7A1; (-) strand; PAM type: NRG; PAM sequence: CAG
cagaagtgcctgggtccccg

SEQ ID NO: 13057 - DNA, 20 bp, Artificial Sequence
  Description of Artificial Sequence: Synthetic oligonucleotide
  Target: COL7A1; (-) strand; PAM type: NRG; PAM sequence: GGG
tgtctcctgcagaagtgcct

SEQ ID NO: 13058 - DNA, 20 bp, Artificial Sequence
  Description of Artificial Sequence: Synthetic oligonucleotide
  Target: COL7A1; (-) strand; PAM type: NRG; PAM sequence: TGG
ctgtctcctgcagaagtgcc

SEQ ID NO: 13059 - DNA, 20 bp, Artificial Sequence
  Description of Artificial Sequence: Synthetic oligonucleotide
  Target: COL7A1; (-) strand; PAM type: NRG; PAM sequence: AAG
tcaagttctgtctcctgcag

SEQ ID NO: 13060 - DNA, 20 bp, Artificial Sequence
  Description of Artificial Sequence: Synthetic oligonucleotide
  Target: COL7A1; (-) strand; PAM type: NRG; PAM sequence: CAG
taatcaagttctgtctcctg

SEQ ID NO: 13061 - DNA, 20 bp, Artificial Sequence
  Description of Artificial Sequence: Synthetic oligonucleotide
  Target: COL7A1; (-) strand; PAM type: NRG; PAM sequence: AAG
gtggagacagctttttaatc

SEQ ID NO: 13062 - DNA, 20 bp, Artificial Sequence
  Description of Artificial Sequence: Synthetic oligonucleotide
  Target: COL7A1; (-) strand; PAM type: NRG; PAM sequence: CAG
cagttggggctctgtggaga

SEQ ID NO: 13063 - DNA, 20 bp, Artificial Sequence
  Description of Artificial Sequence: Synthetic oligonucleotide
  Target: COL7A1; (-) strand; PAM type: NRG; PAM sequence: GAG
ctggcagttggggctctgtg

SEQ ID NO: 13064 - DNA, 20 bp, Artificial Sequence
  Description of Artificial Sequence: Synthetic oligonucleotide
  Target: COL7A1; (-) strand; PAM type: NRG; PAM sequence: TGG
ggctggcagttggggctctg

SEQ ID NO: 13065 - DNA, 20 bp, Artificial Sequence
  Description of Artificial Sequence: Synthetic oligonucleotide
  Target: COL7A1; (-) strand; PAM type: NRG; PAM sequence: GGG
tttgggtgggctggcagttg

SEQ ID NO: 13066 - DNA, 20 bp, Artificial Sequence
  Description of Artificial Sequence: Synthetic oligonucleotide
  Target: COL7A1; (-) strand; PAM type: NRG; PAM sequence: GGG
atttgggtgggctggcagtt

SEQ ID NO: 13067 - DNA, 20 bp, Artificial Sequence
  Description of Artificial Sequence: Synthetic oligonucleotide
  Target: COL7A1; (-) strand; PAM type: NRG; PAM sequence: TGG
gatttgggtgggctggcagt

SEQ ID NO: 13068 - DNA, 20 bp, Artificial Sequence
  Description of Artificial Sequence: Synthetic oligonucleotide
  Target: COL7A1; (-) strand; PAM type: NRG; PAM sequence: CAG
ccaggatttgggtgggctgg

SEQ ID NO: 13069 - DNA, 20 bp, Artificial Sequence
  Description of Artificial Sequence: Synthetic oligonucleotide
  Target: COL7A1; (-) strand; PAM type: NRG; PAM sequence: TGG
aggccaggatttgggtgggc

SEQ ID NO: 13070 - DNA, 20 bp, Artificial Sequence
  Description of Artificial Sequence: Synthetic oligonucleotide
  Target: COL7A1; (-) strand; PAM type: NRG; PAM sequence: GGG
ggggaggccaggatttgggt

SEQ ID NO: 13071 - DNA, 20 bp, Artificial Sequence
  Description of Artificial Sequence: Synthetic oligonucleotide
  Target: COL7A1; (-) strand; PAM type: NRG; PAM sequence: TGG
gggggaggccaggatttggg

SEQ ID NO: 13072 - DNA, 20 bp, Artificial Sequence
  Description of Artificial Sequence: Synthetic oligonucleotide
  Target: COL7A1; (-) strand; PAM type: NRG; PAM sequence: GGG
tgagggggaggccaggattt

SEQ ID NO: 13073 - DNA, 20 bp, Artificial Sequence
  Description of Artificial Sequence: Synthetic oligonucleotide
  Target: COL7A1; (-) strand; PAM type: NRG; PAM sequence: TGG
gtgagggggaggccaggatt

SEQ ID NO: 13074 - DNA, 20 bp, Artificial Sequence
  Description of Artificial Sequence: Synthetic oligonucleotide
  Target: COL7A1; (-) strand; PAM type: NRG; PAM sequence: AGG
gccagggtgagggggaggcc

SEQ ID NO: 13075 - DNA, 20 bp, Artificial Sequence
  Description of Artificial Sequence: Synthetic oligonucleotide
  Target: COL7A1; (-) strand; PAM type: NRG; PAM sequence: CAG
ggccagggtgagggggaggc

SEQ ID NO: 13076 - DNA, 20 bp, Artificial Sequence
  Description of Artificial Sequence: Synthetic oligonucleotide
  Target: COL7A1; (-) strand; PAM type: NRG; PAM sequence: AGG
ccctggccagggtgaggggg

SEQ ID NO: 13077 - DNA, 20 bp, Artificial Sequence
  Description of Artificial Sequence: Synthetic oligonucleotide
  Target: COL7A1; (-) strand; PAM type: NRG; PAM sequence: GAG
gccctggccagggtgagggg

SEQ ID NO: 13078 - DNA, 20 bp, Artificial Sequence
  Description of Artificial Sequence: Synthetic oligonucleotide
  Target: COL7A1; (-) strand; PAM type: NRG; PAM sequence: GGG
aggccctggccagggtgagg

SEQ ID NO: 13079 - DNA, 20 bp, Artificial Sequence
  Description of Artificial Sequence: Synthetic oligonucleotide
  Target: COL7A1; (-) strand; PAM type: NRG; PAM sequence: GGG
gaggccctggccagggtgag

SEQ ID NO: 13080 - DNA, 20 bp, Artificial Sequence
  Description of Artificial Sequence: Synthetic oligonucleotide
  Target: COL7A1; (-) strand; PAM type: NRG; PAM sequence: GGG
agaggccctggccagggtga

SEQ ID NO: 13081 - DNA, 20 bp, Artificial Sequence
  Description of Artificial Sequence: Synthetic oligonucleotide
  Target: COL7A1; (-) strand; PAM type: NRG; PAM sequence: AGG
cagaggccctggccagggtg

SEQ ID NO: 13082 - DNA, 20 bp, Artificial Sequence
  Description of Artificial Sequence: Synthetic oligonucleotide
  Target: COL7A1; (-) strand; PAM type: NRG; PAM sequence: GAG
tcagaggccctggccagggt

SEQ ID NO: 13083 - DNA, 20 bp, Artificial Sequence
  Description of Artificial Sequence: Synthetic oligonucleotide
  Target: COL7A1; (-) strand; PAM type: NRG; PAM sequence: GGG
ccactcagaggccctggcca

SEQ ID NO: 13084 - DNA, 20 bp, Artificial Sequence
  Description of Artificial Sequence: Synthetic oligonucleotide
  Target: COL7A1; (-) strand; PAM type: NRG; PAM sequence: AGG
gccactcagaggccctggcc

SEQ ID NO: 13085 - DNA, 20 bp, Artificial Sequence
  Description of Artificial Sequence: Synthetic oligonucleotide
  Target: COL7A1; (-) strand; PAM type: NRG; PAM sequence: CAG
ggccactcagaggccctggc

SEQ ID NO: 13086 - DNA, 20 bp, Artificial Sequence
  Description of Artificial Sequence: Synthetic oligonucleotide
  Target: COL7A1; (-) strand; PAM type: NRG; PAM sequence: TGG
tggcggccactcagaggccc

SEQ ID NO: 13087 - DNA, 20 bp, Artificial Sequence
  Description of Artificial Sequence: Synthetic oligonucleotide
  Target: COL7A1; (-) strand; PAM type: NRG; PAM sequence: AGG
ctatcctggcggccactcag

SEQ ID NO: 13088 - DNA, 20 bp, Artificial Sequence
  Description of Artificial Sequence: Synthetic oligonucleotide
  Target: COL7A1; (-) strand; PAM type: NRG; PAM sequence: GAG
cctatcctggcggccactca

SEQ ID NO: 13089 - DNA, 20 bp, Artificial Sequence
  Description of Artificial Sequence: Synthetic oligonucleotide
  Target: COL7A1; (-) strand; PAM type: NRG; PAM sequence: CAG
atcctatcctggcggccact

SEQ ID NO: 13090 - DNA, 20 bp, Artificial Sequence
  Description of Artificial Sequence: Synthetic oligonucleotide
  Target: COL7A1; (-) strand; PAM type: NRG; PAM sequence: CGG
ccagctacatcctatcctgg

SEQ ID NO: 13091 - DNA, 20 bp, Artificial Sequence
  Description of Artificial Sequence: Synthetic oligonucleotide
  Target: COL7A1; (-) strand; PAM type: NRG; PAM sequence: TGG
catccagctacatcctatcc

SEQ ID NO: 13092 - DNA, 20 bp, Artificial Sequence
  Description of Artificial Sequence: Synthetic oligonucleotide
  Target: COL7A1; (-) strand; PAM type: NRG; PAM sequence: CAG
actccagtgtccagggcatc

SEQ ID NO: 13093 - DNA, 20 bp, Artificial Sequence
  Description of Artificial Sequence: Synthetic oligonucleotide
  Target: COL7A1; (-) strand; PAM type: NRG; PAM sequence: GGG
ggcctggactccagtgtcca

SEQ ID NO: 13094 - DNA, 20 bp, Artificial Sequence
  Description of Artificial Sequence: Synthetic oligonucleotide
  Target: COL7A1; (-) strand; PAM type: NRG; PAM sequence: AGG
tggcctggactccagtgtcc

SEQ ID NO: 13095 - DNA, 20 bp, Artificial Sequence
  Description of Artificial Sequence: Synthetic oligonucleotide
  Target: COL7A1; (-) strand; PAM type: NRG; PAM sequence: CAG
ttggcctggactccagtgtc

SEQ ID NO: 13096 - DNA, 20 bp, Artificial Sequence
  Description of Artificial Sequence: Synthetic oligonucleotide
  Target: COL7A1; (-) strand; PAM type: NRG; PAM sequence: CAG
ggtgactttggcctggactc

SEQ ID NO: 13097 - DNA, 20 bp, Artificial Sequence
  Description of Artificial Sequence: Synthetic oligonucleotide
  Target: COL7A1; (-) strand; PAM type: NRG; PAM sequence: TGG
tcgactcggtgactttggcc

SEQ ID NO: 13098 - DNA, 20 bp, Artificial Sequence
  Description of Artificial Sequence: Synthetic oligonucleotide
  Target: COL7A1; (-) strand; PAM type: NRG; PAM sequence: TGG
ctcgatcgactcggtgactt

SEQ ID NO: 13099 - DNA, 20 bp, Artificial Sequence
  Description of Artificial Sequence: Synthetic oligonucleotide
  Target: COL7A1; (-) strand; PAM type: NRG; PAM sequence: CGG
ggtggacacctcgatcgact

SEQ ID NO: 13100 - DNA, 20 bp, Artificial Sequence
  Description of Artificial Sequence: Synthetic oligonucleotide
  Target: COL7A1; (-) strand; PAM type: NRG; PAM sequence: TGG
aagcattgaactacgtgtgg

SEQ ID NO: 13101 - DNA, 20 bp, Artificial Sequence
  Description of Artificial Sequence: Synthetic oligonucleotide
  Target: COL7A1; (-) strand; PAM type: NRG; PAM sequence: TGG
tccaagcattgaactacgtg

SEQ ID NO: 13102 - DNA, 20 bp, Artificial Sequence
  Description of Artificial Sequence: Synthetic oligonucleotide
  Target: COL7A1; (-) strand; PAM type: NRG; PAM sequence: AAG
tcagagtcacctcgtgttcc

SEQ ID NO: 13103 - DNA, 20 bp, Artificial Sequence
  Description of Artificial Sequence: Synthetic oligonucleotide
  Target: COL7A1; (-) strand; PAM type: NRG; PAM sequence: GAG
gatctttcattcctccttca

SEQ ID NO: 13104 - DNA, 20 bp, Artificial Sequence
  Description of Artificial Sequence: Synthetic oligonucleotide
  Target: COL7A1; (-) strand; PAM type: NRG; PAM sequence: CAG
tcgatctttcattcctcctt

SEQ ID NO: 13105 - DNA, 20 bp, Artificial Sequence
  Description of Artificial Sequence: Synthetic oligonucleotide
  Target: COL7A1; (-) strand; PAM type: NRG; PAM sequence: CAG
ccttctgggttctcaggact

SEQ ID NO: 13106 - DNA, 20 bp, Artificial Sequence
  Description of Artificial Sequence: Synthetic oligonucleotide
  Target: COL7A1; (-) strand; PAM type: NRG; PAM sequence: AGG
tctctcccttctgggttctc

SEQ ID NO: 13107 - DNA, 20 bp, Artificial Sequence
  Description of Artificial Sequence: Synthetic oligonucleotide
  Target: COL7A1; (-) strand; PAM type: NRG; PAM sequence: CAG
atctctcccttctgggttct

SEQ ID NO: 13108 - DNA, 20 bp, Artificial Sequence
  Description of Artificial Sequence: Synthetic oligonucleotide
  Target: COL7A1; (-) strand; PAM type: NRG; PAM sequence: GGG
atctcagatctctcccttct

SEQ ID NO: 13109 - DNA, 20 bp, Artificial Sequence
  Description of Artificial Sequence: Synthetic oligonucleotide
  Target: COL7A1; (-) strand; PAM type: NRG; PAM sequence: TGG
gatctcagatctctcccttc

SEQ ID NO: 13110 - DNA, 20 bp, Artificial Sequence
  Description of Artificial Sequence: Synthetic oligonucleotide
  Target: COL7A1; (-) strand; PAM type: NRG; PAM sequence: CAG
acaaaccggacccaggatct

SEQ ID NO: 13111 - DNA, 20 bp, Artificial Sequence
  Description of Artificial Sequence: Synthetic oligonucleotide
  Target: COL7A1; (-) strand; PAM type: NRG; PAM sequence: AGG
caataagacaaaccggaccc

SEQ ID NO: 13112 - DNA, 20 bp, Artificial Sequence
  Description of Artificial Sequence: Synthetic oligonucleotide
  Target: COL7A1; (-) strand; PAM type: NRG; PAM sequence: CAG
tcaataagacaaaccggacc

SEQ ID NO: 13113 - DNA, 20 bp, Artificial Sequence
  Description of Artificial Sequence: Synthetic oligonucleotide
  Target: COL7A1; (-) strand; PAM type: NRG; PAM sequence: CGG
gatgcttcaataagacaaac

SEQ ID NO: 13114 - DNA, 20 bp, Artificial Sequence
  Description of Artificial Sequence: Synthetic oligonucleotide
  Target: COL7A1; (-) strand; PAM type: NRG; PAM sequence: AAG
acctcccatgatgcttcaat

SEQ ID NO: 13115 - DNA, 20 bp, Artificial Sequence
  Description of Artificial Sequence: Synthetic oligonucleotide
  Target: COL7A1; (-) strand; PAM type: NRG; PAM sequence: CAG
cctctgaccctgggtgaccc

SEQ ID NO: 13116 - DNA, 20 bp, Artificial Sequence
  Description of Artificial Sequence: Synthetic oligonucleotide
  Target: COL7A1; (-) strand; PAM type: NRG; PAM sequence: GGG
acccctcaccctctgaccct

SEQ ID NO: 13117 - DNA, 20 bp, Artificial Sequence
  Description of Artificial Sequence: Synthetic oligonucleotide
  Target: COL7A1; (-) strand; PAM type: NRG; PAM sequence: TGG
tacccctcaccctctgaccc

SEQ ID NO: 13118 - DNA, 20 bp, Artificial Sequence
  Description of Artificial Sequence: Synthetic oligonucleotide
  Target: COL7A1; (-) strand; PAM type: NRG; PAM sequence: GAG
acttcctgcaccccgactct

SEQ ID NO: 13119 - DNA, 20 bp, Artificial Sequence
  Description of Artificial Sequence: Synthetic oligonucleotide
  Target: COL7A1; (-) strand; PAM type: NRG; PAM sequence: TGG
ctggtaagcctgcctcacct

SEQ ID NO: 13120 - DNA, 20 bp, Artificial Sequence
  Description of Artificial Sequence: Synthetic oligonucleotide
  Target: COL7A1; (-) strand; PAM type: NRG; PAM sequence: AAG
aggtgactgcgcgcactggt

SEQ ID NO: 13121 - DNA, 20 bp, Artificial Sequence
  Description of Artificial Sequence: Synthetic oligonucleotide
  Target: COL7A1; (-) strand; PAM type: NRG; PAM sequence: TGG
gcagaggtgactgcgcgcac

SEQ ID NO: 13122 - DNA, 20 bp, Artificial Sequence
  Description of Artificial Sequence: Synthetic oligonucleotide
  Target: COL7A1; (-) strand; PAM type: NRG; PAM sequence: AGG
tggagaagggccctctgcag

SEQ ID NO: 13123 - DNA, 20 bp, Artificial Sequence
  Description of Artificial Sequence: Synthetic oligonucleotide
  Target: COL7A1; (-) strand; PAM type: NRG; PAM sequence: GAG
ctggagaagggccctctgca

SEQ ID NO: 13124 - DNA, 20 bp, Artificial Sequence
  Description of Artificial Sequence: Synthetic oligonucleotide
  Target: COL7A1; (-) strand; PAM type: NRG; PAM sequence: CAG
agctggagaagggccctctg

SEQ ID NO: 13125 - DNA, 20 bp, Artificial Sequence
  Description of Artificial Sequence: Synthetic oligonucleotide
  Target: COL7A1; (-) strand; PAM type: NRG; PAM sequence: GGG
tcctagggccagctggagaa

SEQ ID NO: 13126 - DNA, 20 bp, Artificial Sequence
  Description of Artificial Sequence: Synthetic oligonucleotide
  Target: COL7A1; (-) strand; PAM type: NRG; PAM sequence: AGG
gtcctagggccagctggaga

SEQ ID NO: 13127 - DNA, 20 bp, Artificial Sequence
  Description of Artificial Sequence: Synthetic oligonucleotide
  Target: COL7A1; (-) strand; PAM type: NRG; PAM sequence: AAG
tgtcctagggccagctggag

SEQ ID NO: 13128 - DNA, 20 bp, Artificial Sequence
  Description of Artificial Sequence: Synthetic oligonucleotide
  Target: COL7A1; (-) strand; PAM type: NRG; PAM sequence: GAG
gagtgtcctagggccagctg

SEQ ID NO: 13129 - DNA, 20 bp, Artificial Sequence
  Description of Artificial Sequence: Synthetic oligonucleotide
  Target: COL7A1; (-) strand; PAM type: NRG; PAM sequence: TGG
ctgagtgtcctagggccagc

SEQ ID NO: 13130 - DNA, 20 bp, Artificial Sequence
  Description of Artificial Sequence: Synthetic oligonucleotide
  Target: COL7A1; (-) strand; PAM type: NRG; PAM sequence: CAG
gaggctgagtgtcctagggc

SEQ ID NO: 13131 - DNA, 20 bp, Artificial Sequence
  Description of Artificial Sequence: Synthetic oligonucleotide
  Target: COL7A1; (-) strand; PAM type: NRG; PAM sequence: GGG
gcgtgaggctgagtgtccta

SEQ ID NO: 13132 - DNA, 20 bp, Artificial Sequence
  Description of Artificial Sequence: Synthetic oligonucleotide
  Target: COL7A1; (-) strand; PAM type: NRG; PAM sequence: AGG
cgcgtgaggctgagtgtcct

SEQ ID NO: 13133 - DNA, 20 bp, Artificial Sequence
  Description of Artificial Sequence: Synthetic oligonucleotide
  Target: COL7A1; (-) strand; PAM type: NRG; PAM sequence: TAG
ccgcgtgaggctgagtgtcc

SEQ ID NO: 13134 - DNA, 20 bp, Artificial Sequence
  Description of Artificial Sequence: Synthetic oligonucleotide
  Target: COL7A1; (-) strand; PAM type: NRG; PAM sequence: GAG
acacagtaccgcgtgaggct

SEQ ID NO: 13135 - DNA, 20 bp, Artificial Sequence
  Description of Artificial Sequence: Synthetic oligonucleotide
  Target: COL7A1; (-) strand; PAM type: NRG; PAM sequence: AGG
cagcgacacagtaccgcgtg

SEQ ID NO: 13136 - DNA, 20 bp, Artificial Sequence
  Description of Artificial Sequence: Synthetic oligonucleotide
  Target: COL7A1; (-) strand; PAM type: NRG; PAM sequence: GAG
ccagcgacacagtaccgcgt

SEQ ID NO: 13137 - DNA, 20 bp, Artificial Sequence
  Description of Artificial Sequence: Synthetic oligonucleotide
  Target: COL7A1; (-) strand; PAM type: NRG; PAM sequence: CAG
acgggctggagccagcgaca

SEQ ID NO: 13138 - DNA, 20 bp, Artificial Sequence
  Description of Artificial Sequence: Synthetic oligonucleotide
  Target: COL7A1; (-) strand; PAM type: NRG; PAM sequence: CAG
tcacctggacgggctggagc

SEQ ID NO: 13139 - DNA, 20 bp, Artificial Sequence
  Description of Artificial Sequence: Synthetic oligonucleotide
  Target: COL7A1; (-) strand; PAM type: NRG; PAM sequence: GAG
gctatcacctggacgggctg

SEQ ID NO: 13140 - DNA, 20 bp, Artificial Sequence
  Description of Artificial Sequence: Synthetic oligonucleotide
  Target: COL7A1; (-) strand; PAM type: NRG; PAM sequence: TGG
cagctatcacctggacgggc

SEQ ID NO: 13141 - DNA, 20 bp, Artificial Sequence
  Description of Artificial Sequence: Synthetic oligonucleotide
  Target: COL7A1; (-) strand; PAM type: NRG; PAM sequence: GGG
tcagcagctatcacctggac

SEQ ID NO: 13142 - DNA, 20 bp, Artificial Sequence
  Description of Artificial Sequence: Synthetic oligonucleotide
  Target: COL7A1; (-) strand; PAM type: NRG; PAM sequence: CGG
ctcagcagctatcacctgga

SEQ ID NO: 13143 - DNA, 20 bp, Artificial Sequence
  Description of Artificial Sequence: Synthetic oligonucleotide
  Target: COL7A1; (-) strand; PAM type: NRG; PAM sequence: TGG
cgagctcagcagctatcacc

SEQ ID NO: 13144 - DNA, 20 bp, Artificial Sequence
  Description of Artificial Sequence: Synthetic oligonucleotide
  Target: COL7A1; (-) strand; PAM type: NRG; PAM sequence: CAG
gtcctggggcccgagctcag

SEQ ID NO: 13145 - DNA, 20 bp, Artificial Sequence
  Description of Artificial Sequence: Synthetic oligonucleotide
  Target: COL7A1; (-) strand; PAM type: NRG; PAM sequence: CAG
cgggtcctggggcccgagct

SEQ ID NO: 13146 - DNA, 20 bp, Artificial Sequence
  Description of Artificial Sequence: Synthetic oligonucleotide
  Target: COL7A1; (-) strand; PAM type: NRG; PAM sequence: GAG
agtcccgggtcctggggccc

SEQ ID NO: 13147 - DNA, 20 bp, Artificial Sequence
  Description of Artificial Sequence: Synthetic oligonucleotide
  Target: COL7A1; (-) strand; PAM type: NRG; PAM sequence: GGG
aggaacagtcccgggtcctg

SEQ ID NO: 13148 - DNA, 20 bp, Artificial Sequence
  Description of Artificial Sequence: Synthetic oligonucleotide
  Target: COL7A1; (-) strand; PAM type: NRG; PAM sequence: GGG
caggaacagtcccgggtcct

SEQ ID NO: 13149 - DNA, 20 bp, Artificial Sequence
  Description of Artificial Sequence: Synthetic oligonucleotide
  Target: COL7A1; (-) strand; PAM type: NRG; PAM sequence: TGG
ccaggaacagtcccgggtcc

SEQ ID NO: 13150 - DNA, 20 bp, Artificial Sequence
  Description of Artificial Sequence: Synthetic oligonucleotide
  Target: COL7A1; (-) strand; PAM type: NRG; PAM sequence: GGG
aggtggccaggaacagtccc

SEQ ID NO: 13151 - DNA, 20 bp, Artificial Sequence
  Description of Artificial Sequence: Synthetic oligonucleotide
  Target: COL7A1; (-) strand; PAM type: NRG; PAM sequence: CGG
caggtggccaggaacagtcc

SEQ ID NO: 13152 - DNA, 20 bp, Artificial Sequence
  Description of Artificial Sequence: Synthetic oligonucleotide
  Target: COL7A1; (-) strand; PAM type: NRG; PAM sequence: CAG
ctgccccaggtggccaggaa

SEQ ID NO: 13153 - DNA, 20 bp, Artificial Sequence
  Description of Artificial Sequence: Synthetic oligonucleotide
  Target: COL7A1; (-) strand; PAM type: NRG; PAM sequence: AGG
cacgcctgccccaggtggcc

SEQ ID NO: 13154 - DNA, 20 bp, Artificial Sequence
  Description of Artificial Sequence: Synthetic oligonucleotide
  Target: COL7A1; (-) strand; PAM type: NRG; PAM sequence: CAG
tcacgcctgccccaggtggc

SEQ ID NO: 13155 - DNA, 20 bp, Artificial Sequence
  Description of Artificial Sequence: Synthetic oligonucleotide
  Target: COL7A1; (-) strand; PAM type: NRG; PAM sequence: TGG
accctcacgcctgccccagg

SEQ ID NO: 13156 - DNA, 20 bp, Artificial Sequence
  Description of Artificial Sequence: Synthetic oligonucleotide
  Target: COL7A1; (-) strand; PAM type: NRG; PAM sequence: AGG
cccaccctcacgcctgcccc

SEQ ID NO: 13157 - DNA, 20 bp, Artificial Sequence
  Description of Artificial Sequence: Synthetic oligonucleotide
  Target: COL7A1; (-) strand; PAM type: NRG; PAM sequence: CAG
ccccaccctcacgcctgccc

SEQ ID NO: 13158 - DNA, 20 bp, Artificial Sequence
  Description of Artificial Sequence: Synthetic oligonucleotide
  Target: COL7A1; (-) strand; PAM type: NRG; PAM sequence: TGG
gtcactatcccacatgctct

SEQ ID NO: 13159 - DNA, 20 bp, Artificial Sequence
  Description of Artificial Sequence: Synthetic oligonucleotide
  Target: COL7A1; (-) strand; PAM type: NRG; PAM sequence: AGG
gcaggccctttaatgccccc

SEQ ID NO: 13160 - DNA, 20 bp, Artificial Sequence
  Description of Artificial Sequence: Synthetic oligonucleotide
  Target: COL7A1; (-) strand; PAM type: NRG; PAM sequence: CAG
ggcaggccctttaatgcccc

SEQ ID NO: 13161 - DNA, 20 bp, Artificial Sequence
  Description of Artificial Sequence: Synthetic oligonucleotide
  Target: COL7A1; (-) strand; PAM type: NRG; PAM sequence: AGG
acagagccagtgaagtgggc

SEQ ID NO: 13162 - DNA, 20 bp, Artificial Sequence
  Description of Artificial Sequence: Synthetic oligonucleotide
  Target: COL7A1; (-) strand; PAM type: NRG; PAM sequence: CAG
aacagagccagtgaagtggg

SEQ ID NO: 13163 - DNA, 20 bp, Artificial Sequence
  Description of Artificial Sequence: Synthetic oligonucleotide
  Target: COL7A1; (-) strand; PAM type: NRG; PAM sequence: GGG
gttaacagagccagtgaagt

SEQ ID NO: 13164 - DNA, 20 bp, Artificial Sequence
  Description of Artificial Sequence: Synthetic oligonucleotide
  Target: COL7A1; (-) strand; PAM type: NRG; PAM sequence: TGG
agttaacagagccagtgaag

SEQ ID NO: 13165 - DNA, 20 bp, Artificial Sequence
  Description of Artificial Sequence: Synthetic oligonucleotide
  Target: COL7A1; (-) strand; PAM type: NRG; PAM sequence: AAG
cccagttaacagagccagtg

SEQ ID NO: 13166 - DNA, 20 bp, Artificial Sequence
  Description of Artificial Sequence: Synthetic oligonucleotide
  Target: COL7A1; (-) strand; PAM type: NRG; PAM sequence: CAG
gtgaacccagttaacagagc

SEQ ID NO: 13167 - DNA, 20 bp, Artificial Sequence
  Description of Artificial Sequence: Synthetic oligonucleotide
  Target: COL7A1; (-) strand; PAM type: NRG; PAM sequence: GAG
gagggtgaacccagttaaca

SEQ ID NO: 13168 - DNA, 20 bp, Artificial Sequence
  Description of Artificial Sequence: Synthetic oligonucleotide
  Target: COL7A1; (-) strand; PAM type: NRG; PAM sequence: CAG
aggagggtgaacccagttaa

SEQ ID NO: 13169 - DNA, 20 bp, Artificial Sequence
  Description of Artificial Sequence: Synthetic oligonucleotide
  Target: COL7A1; (-) strand; PAM type: NRG; PAM sequence: CAG
atcagtcaggagggtgaacc

SEQ ID NO: 13170 - DNA, 20 bp, Artificial Sequence
  Description of Artificial Sequence: Synthetic oligonucleotide
  Target: COL7A1; (-) strand; PAM type: NRG; PAM sequence: GGG
atgaggaagatcagtcagga

SEQ ID NO: 13171 - DNA, 20 bp, Artificial Sequence
  Description of Artificial Sequence: Synthetic oligonucleotide
  Target: COL7A1; (-) strand; PAM type: NRG; PAM sequence: AGG
gatgaggaagatcagtcagg

SEQ ID NO: 13172 - DNA, 20 bp, Artificial Sequence
  Description of Artificial Sequence: Synthetic oligonucleotide
  Target: COL7A1; (-) strand; PAM type: NRG; PAM sequence: GAG
ggatgaggaagatcagtcag

SEQ ID NO: 13173 - DNA, 20 bp, Artificial Sequence
  Description of Artificial Sequence: Synthetic oligonucleotide
  Target: COL7A1; (-) strand; PAM type: NRG; PAM sequence: AGG
gaggatgaggaagatcagtc

SEQ ID NO: 13174 - DNA, 20 bp, Artificial Sequence
  Description of Artificial Sequence: Synthetic oligonucleotide
  Target: COL7A1; (-) strand; PAM type: NRG; PAM sequence: CAG
tgaggatgaggaagatcagt

SEQ ID NO: 13175 - DNA, 20 bp, Artificial Sequence
  Description of Artificial Sequence: Synthetic oligonucleotide
  Target: COL7A1; (-) strand; PAM type: NRG; PAM sequence: CAG
tcagtgaggatgaggaagat

SEQ ID NO: 13176 - DNA, 20 bp, Artificial Sequence
  Description of Artificial Sequence: Synthetic oligonucleotide
  Target: COL7A1; (-) strand; PAM type: NRG; PAM sequence: AAG
cagggtcagtgaggatgagg

SEQ ID NO: 13177 - DNA, 20 bp, Artificial Sequence
  Description of Artificial Sequence: Synthetic oligonucleotide
  Target: COL7A1; (-) strand; PAM type: NRG; PAM sequence: AGG
gggcagggtcagtgaggatg

SEQ ID NO: 13178 - DNA, 20 bp, Artificial Sequence
  Description of Artificial Sequence: Synthetic oligonucleotide
  Target: COL7A1; (-) strand; PAM type: NRG; PAM sequence: GAG
tgggcagggtcagtgaggat

SEQ ID NO: 13179 - DNA, 20 bp, Artificial Sequence
  Description of Artificial Sequence: Synthetic oligonucleotide
  Target: COL7A1; (-) strand; PAM type: NRG; PAM sequence: AGG
taaagtgggcagggtcagtg

SEQ ID NO: 13180 - DNA, 20 bp, Artificial Sequence
  Description of Artificial Sequence: Synthetic oligonucleotide
  Target: COL7A1; (-) strand; PAM type: NRG; PAM sequence: GAG
gtaaagtgggcagggtcagt

SEQ ID NO: 13181 - DNA, 20 bp, Artificial Sequence
  Description of Artificial Sequence: Synthetic oligonucleotide
  Target: COL7A1; (-) strand; PAM type: NRG; PAM sequence: CAG
gtccgtaaagtgggcagggt

SEQ ID NO: 13182 - DNA, 20 bp, Artificial Sequence
  Description of Artificial Sequence: Synthetic oligonucleotide
  Target: COL7A1; (-) strand; PAM type: NRG; PAM sequence: GGG
cagggtccgtaaagtgggca

SEQ ID NO: 13183 - DNA, 20 bp, Artificial Sequence
  Description of Artificial Sequence: Synthetic oligonucleotide
  Target: COL7A1; (-) strand; PAM type: NRG; PAM sequence: AGG
gcagggtccgtaaagtgggc

SEQ ID NO: 13184 - DNA, 20 bp, Artificial Sequence
  Description of Artificial Sequence: Synthetic oligonucleotide
  Target: COL7A1; (-) strand; PAM type: NRG; PAM sequence: CAG
ggcagggtccgtaaagtggg

SEQ ID NO: 13185 - DNA, 20 bp, Artificial Sequence
  Description of Artificial Sequence: Synthetic oligonucleotide
  Target: COL7A1; (-) strand; PAM type: NRG; PAM sequence: GGG
tctggcagggtccgtaaagt

SEQ ID NO: 13186 - DNA, 20 bp, Artificial Sequence
  Description of Artificial Sequence: Synthetic oligonucleotide
  Target: COL7A1; (-) strand; PAM type: NRG; PAM sequence: TGG
gtctggcagggtccgtaaag

SEQ ID NO: 13187 - DNA, 20 bp, Artificial Sequence
  Description of Artificial Sequence: Synthetic oligonucleotide
  Target: COL7A1; (-) strand; PAM type: NRG; PAM sequence: AAG
tcagtctggcagggtccgta

SEQ ID NO: 13188 - DNA, 20 bp, Artificial Sequence
  Description of Artificial Sequence: Synthetic oligonucleotide
  Target: COL7A1; (-) strand; PAM type: NRG; PAM sequence: GGG
catggagggtcagtctggca

SEQ ID NO: 13189 - DNA, 20 bp, Artificial Sequence
  Description of Artificial Sequence: Synthetic oligonucleotide
  Target: COL7A1; (-) strand; PAM type: NRG; PAM sequence: AGG
tcatggagggtcagtctggc

SEQ ID NO: 13190 - DNA, 20 bp, Artificial Sequence
  Description of Artificial Sequence: Synthetic oligonucleotide
  Target: COL7A1; (-) strand; PAM type: NRG; PAM sequence: CAG
ttcatggagggtcagtctgg

SEQ ID NO: 13191 - DNA, 20 bp, Artificial Sequence
  Description of Artificial Sequence: Synthetic oligonucleotide
  Target: COL7A1; (-) strand; PAM type: NRG; PAM sequence: TGG
gagttcatggagggtcagtc

SEQ ID NO: 13192 - DNA, 20 bp, Artificial Sequence
  Description of Artificial Sequence: Synthetic oligonucleotide
  Target: COL7A1; (-) strand; PAM type: NRG; PAM sequence: CAG
tcaatgagttcatggagggt

SEQ ID NO: 13193 - DNA, 20 bp, Artificial Sequence
  Description of Artificial Sequence: Synthetic oligonucleotide
  Target: COL7A1; (-) strand; PAM type: NRG; PAM sequence: GGG
gggatcaatgagttcatgga

SEQ ID NO: 13194 - DNA, 20 bp, Artificial Sequence
  Description of Artificial Sequence: Synthetic oligonucleotide
  Target: COL7A1; (-) strand; PAM type: NRG; PAM sequence: AGG
tgggatcaatgagttcatgg

SEQ ID NO: 13195 - DNA, 20 bp, Artificial Sequence
  Description of Artificial Sequence: Synthetic oligonucleotide
  Target: COL7A1; (-) strand; PAM type: NRG; PAM sequence: GAG
gtgggatcaatgagttcatg

SEQ ID NO: 13196 - DNA, 20 bp, Artificial Sequence
  Description of Artificial Sequence: Synthetic oligonucleotide
  Target: COL7A1; (-) strand; PAM type: NRG; PAM sequence: TGG
gggtgggatcaatgagttca

SEQ ID NO: 13197 - DNA, 20 bp, Artificial Sequence
  Description of Artificial Sequence: Synthetic oligonucleotide
  Target: COL7A1; (-) strand; PAM type: NRG; PAM sequence: GAG
atgaagtgggtgggatcaat

SEQ ID NO: 13198 - DNA, 20 bp, Artificial Sequence
  Description of Artificial Sequence: Synthetic oligonucleotide
  Target: COL7A1; (-) strand; PAM type: NRG; PAM sequence: GGG
gatcaatcaatgaagtgggt

SEQ ID NO: 13199 - DNA, 20 bp, Artificial Sequence
  Description of Artificial Sequence: Synthetic oligonucleotide
  Target: COL7A1; (-) strand; PAM type: NRG; PAM sequence: TGG
agatcaatcaatgaagtggg

SEQ ID NO: 13200 - DNA, 20 bp, Artificial Sequence
  Description of Artificial Sequence: Synthetic oligonucleotide
  Target: COL7A1; (-) strand; PAM type: NRG; PAM sequence: GGG
gtaagatcaatcaatgaagt

SEQ ID NO: 13201 - DNA, 20 bp, Artificial Sequence
  Description of Artificial Sequence: Synthetic oligonucleotide
  Target: COL7A1; (-) strand; PAM type: NRG; PAM sequence: TGG
ggtaagatcaatcaatgaag

SEQ ID NO: 13202 - DNA, 20 bp, Artificial Sequence
  Description of Artificial Sequence: Synthetic oligonucleotide
  Target: COL7A1; (-) strand; PAM type: NRG; PAM sequence: AAG
gtaggtaagatcaatcaatg

SEQ ID NO: 13203 - DNA, 20 bp, Artificial Sequence
  Description of Artificial Sequence: Synthetic oligonucleotide
  Target: COL7A1; (-) strand; PAM type: NRG; PAM sequence: AAG
cgggatccgtgacagtaggt

SEQ ID NO: 13204 - DNA, 20 bp, Artificial Sequence
  Description of Artificial Sequence: Synthetic oligonucleotide
  Target: COL7A1; (-) strand; PAM type: NRG; PAM sequence: AGG
tctgcgggatccgtgacagt

SEQ ID NO: 13205 - DNA, 20 bp, Artificial Sequence
  Description of Artificial Sequence: Synthetic oligonucleotide
  Target: COL7A1; (-) strand; PAM type: NRG; PAM sequence: TAG
gtctgcgggatccgtgacag

SEQ ID NO: 13206 - DNA, 20 bp, Artificial Sequence
  Description of Artificial Sequence: Synthetic oligonucleotide
  Target: COL7A1; (-) strand; PAM type: NRG; PAM sequence: CAG
ggggtctgcgggatccgtga

SEQ ID NO: 13207 - DNA, 20 bp, Artificial Sequence
  Description of Artificial Sequence: Synthetic oligonucleotide
  Target: COL7A1; (-) strand; PAM type: NRG; PAM sequence: GGG
gtctgtcactgggggtctgc

SEQ ID NO: 13208 - DNA, 20 bp, Artificial Sequence
  Description of Artificial Sequence: Synthetic oligonucleotide
  Target: COL7A1; (-) strand; PAM type: NRG; PAM sequence: CGG
ggtctgtcactgggggtctg

SEQ ID NO: 13209 - DNA, 20 bp, Artificial Sequence
  Description of Artificial Sequence: Synthetic oligonucleotide
  Target: COL7A1; (-) strand; PAM type: NRG; PAM sequence: GGG
tgggcggggtctgtcactgg

SEQ ID NO: 13210 - DNA, 20 bp, Artificial Sequence
  Description of Artificial Sequence: Synthetic oligonucleotide
  Target: COL7A1; (-) strand; PAM type: NRG; PAM sequence: GGG
gtgggcggggtctgtcactg

SEQ ID NO: 13211 - DNA, 20 bp, Artificial Sequence
  Description of Artificial Sequence: Synthetic oligonucleotide
  Target: COL7A1; (-) strand; PAM type: NRG; PAM sequence: GGG
ggtgggcggggtctgtcact

SEQ ID NO: 13212 - DNA, 20 bp, Artificial Sequence
  Description of Artificial Sequence: Synthetic oligonucleotide
  Target: COL7A1; (-) strand; PAM type: NRG; PAM sequence: TGG
tggtgggcggggtctgtcac

SEQ ID NO: 13213 - DNA, 20 bp, Artificial Sequence
  Description of Artificial Sequence: Synthetic oligonucleotide
  Target: COL7A1; (-) strand; PAM type: NRG; PAM sequence: GGG
gaggacagtgatggtgggcg

SEQ ID NO: 13214 - DNA, 20 bp, Artificial Sequence
  Description of Artificial Sequence: Synthetic oligonucleotide
  Target: COL7A1; (-) strand; PAM type: NRG; PAM sequence: GGG
cgaggacagtgatggtgggc

SEQ ID NO: 13215 - DNA, 20 bp, Artificial Sequence
  Description of Artificial Sequence: Synthetic oligonucleotide
  Target: COL7A1; (-) strand; PAM type: NRG; PAM sequence: CGG
gcgaggacagtgatggtggg

SEQ ID NO: 13216 - DNA, 20 bp, Artificial Sequence
  Description of Artificial Sequence: Synthetic oligonucleotide
  Target: COL7A1; (-) strand; PAM type: NRG; PAM sequence: GGG
taggcgaggacagtgatggt

SEQ ID NO: 13217 - DNA, 20 bp, Artificial Sequence
  Description of Artificial Sequence: Synthetic oligonucleotide
  Target: COL7A1; (-) strand; PAM type: NRG; PAM sequence: TGG
gtaggcgaggacagtgatgg

SEQ ID NO: 13218 - DNA, 20 bp, Artificial Sequence
  Description of Artificial Sequence: Synthetic oligonucleotide
  Target: COL7A1; (-) strand; PAM type: NRG; PAM sequence: TGG
aaggtaggcgaggacagtga

SEQ ID NO: 13219 - DNA, 20 bp, Artificial Sequence
  Description of Artificial Sequence: Synthetic oligonucleotide
  Target: COL7A1; (-) strand; PAM type: NRG; PAM sequence: CAG
ctccgcaaggtaggcgagga

SEQ ID NO: 13220 - DNA, 20 bp, Artificial Sequence
  Description of Artificial Sequence: Synthetic oligonucleotide
  Target: COL7A1; (-) strand; PAM type: NRG; PAM sequence: AGG
cagactccgcaaggtaggcg

SEQ ID NO: 13221 - DNA, 20 bp, Artificial Sequence
  Description of Artificial Sequence: Synthetic oligonucleotide
  Target: COL7A1; (-) strand; PAM type: NRG; PAM sequence: GAG
gcagactccgcaaggtaggc

SEQ ID NO: 13222 - DNA, 20 bp, Artificial Sequence
  Description of Artificial Sequence: Synthetic oligonucleotide
  Target: COL7A1; (-) strand; PAM type: NRG; PAM sequence: AGG
tgtggcagactccgcaaggt

SEQ ID NO: 13223 - DNA, 20 bp, Artificial Sequence
  Description of Artificial Sequence: Synthetic oligonucleotide
  Target: COL7A1; (-) strand; PAM type: NRG; PAM sequence: TAG
ctgtggcagactccgcaagg

SEQ ID NO: 13224 - DNA, 20 bp, Artificial Sequence
  Description of Artificial Sequence: Synthetic oligonucleotide
  Target: COL7A1; (-) strand; PAM type: NRG; PAM sequence: AGG
gggctgtggcagactccgca

SEQ ID NO: 13225 - DNA, 20 bp, Artificial Sequence
  Description of Artificial Sequence: Synthetic oligonucleotide
  Target: COL7A1; (-) strand; PAM type: NRG; PAM sequence: AAG
agggctgtggcagactccgc

SEQ ID NO: 13226 - DNA, 20 bp, Artificial Sequence
  Description of Artificial Sequence: Synthetic oligonucleotide
  Target: COL7A1; (-) strand; PAM type: NRG; PAM sequence: CAG
cattgggggcagggctgtgg

SEQ ID NO: 13227 - DNA, 20 bp, Artificial Sequence
  Description of Artificial Sequence: Synthetic oligonucleotide
  Target: COL7A1; (-) strand; PAM type: NRG; PAM sequence: TGG
gaccattgggggcagggctg

SEQ ID NO: 13228 - DNA, 20 bp, Artificial Sequence
  Description of Artificial Sequence: Synthetic oligonucleotide
  Target: COL7A1; (-) strand; PAM type: NRG; PAM sequence: GGG
gttagggaccattgggggca

SEQ ID NO: 13229 - DNA, 20 bp, Artificial Sequence
  Description of Artificial Sequence: Synthetic oligonucleotide
  Target: COL7A1; (-) strand; PAM type: NRG; PAM sequence: AGG
agttagggaccattgggggc

SEQ ID NO: 13230 - DNA, 20 bp, Artificial Sequence
  Description of Artificial Sequence: Synthetic oligonucleotide
  Target: COL7A1; (-) strand; PAM type: NRG; PAM sequence: CAG
aagttagggaccattggggg

SEQ ID NO: 13231 - DNA, 20 bp, Artificial Sequence
  Description of Artificial Sequence: Synthetic oligonucleotide
  Target: COL7A1; (-) strand; PAM type: NRG; PAM sequence: GGG
aggaagttagggaccattgg

SEQ ID NO: 13232 - DNA, 20 bp, Artificial Sequence
  Description of Artificial Sequence: Synthetic oligonucleotide
  Target: COL7A1; (-) strand; PAM type: NRG; PAM sequence: GGG
gaggaagttagggaccattg

SEQ ID NO: 13233 - DNA, 20 bp, Artificial Sequence
  Description of Artificial Sequence: Synthetic oligonucleotide
  Target: COL7A1; (-) strand; PAM type: NRG; PAM sequence: GGG
ggaggaagttagggaccatt

SEQ ID NO: 13234 - DNA, 20 bp, Artificial Sequence
  Description of Artificial Sequence: Synthetic oligonucleotide
  Target: COL7A1; (-) strand; PAM type: NRG; PAM sequence: TGG
aggaggaagttagggaccat

SEQ ID NO: 13235 - DNA, 20 bp, Artificial Sequence
  Description of Artificial Sequence: Synthetic oligonucleotide
  Target: COL7A1; (-) strand; PAM type: NRG; PAM sequence: GGG
gtgtccccaggaggaagtta

SEQ ID NO: 13236 - DNA, 20 bp, Artificial Sequence
  Description of Artificial Sequence: Synthetic oligonucleotide
  Target: COL7A1; (-) strand; PAM type: NRG; PAM sequence: AGG
ggtgtccccaggaggaagtt

SEQ ID NO: 13237 - DNA, 20 bp, Artificial Sequence
  Description of Artificial Sequence: Synthetic oligonucleotide
  Target: COL7A1; (-) strand; PAM type: NRG; PAM sequence: TAG
aggtgtccccaggaggaagt

SEQ ID NO: 13238 - DNA, 20 bp, Artificial Sequence
  Description of Artificial Sequence: Synthetic oligonucleotide
  Target: COL7A1; (-) strand; PAM type: NRG; PAM sequence: AAG
tgagaggtgtccccaggagg

SEQ ID NO: 13239 - DNA, 20 bp, Artificial Sequence
  Description of Artificial Sequence: Synthetic oligonucleotide
  Target: COL7A1; (-) strand; PAM type: NRG; PAM sequence: AGG
gggtgagaggtgtccccagg

SEQ ID NO: 13240 - DNA, 20 bp, Artificial Sequence
  Description of Artificial Sequence: Synthetic oligonucleotide
  Target: COL7A1; (-) strand; PAM type: NRG; PAM sequence: GAG
agggtgagaggtgtccccag

SEQ ID NO: 13241 - DNA, 20 bp, Artificial Sequence
  Description of Artificial Sequence: Synthetic oligonucleotide
  Target: COL7A1; (-) strand; PAM type: NRG; PAM sequence: AGG
tgagggtgagaggtgtcccc

SEQ ID NO: 13242 - DNA, 20 bp, Artificial Sequence
  Description of Artificial Sequence: Synthetic oligonucleotide
  Target: COL7A1; (-) strand; PAM type: NRG; PAM sequence: CAG
ctgagggtgagaggtgtccc

SEQ ID NO: 13243 - DNA, 20 bp, Artificial Sequence
  Description of Artificial Sequence: Synthetic oligonucleotide
  Target: COL7A1; (-) strand; PAM type: NRG; PAM sequence: AGG
actggcaacctgagggtgag

SEQ ID NO: 13244 - DNA, 20 bp, Artificial Sequence
  Description of Artificial Sequence: Synthetic oligonucleotide
  Target: COL7A1; (-) strand; PAM type: NRG; PAM sequence: GAG
cactggcaacctgagggtga

SEQ ID NO: 13245 - DNA, 20 bp, Artificial Sequence
  Description of Artificial Sequence: Synthetic oligonucleotide
  Target: COL7A1; (-) strand; PAM type: NRG; PAM sequence: GAG
tgcactggcaacctgagggt

SEQ ID NO: 13246 - DNA, 20 bp, Artificial Sequence
  Description of Artificial Sequence: Synthetic oligonucleotide
  Target: COL7A1; (-) strand; PAM type: NRG; PAM sequence: GGG
cttctgcactggcaacctga

SEQ ID NO: 13247 - DNA, 20 bp, Artificial Sequence
  Description of Artificial Sequence: Synthetic oligonucleotide
  Target: COL7A1; (-) strand; PAM type: NRG; PAM sequence: AGG
ccttctgcactggcaacctg

SEQ ID NO: 13248 - DNA, 20 bp, Artificial Sequence
  Description of Artificial Sequence: Synthetic oligonucleotide
  Target: COL7A1; (-) strand; PAM type: NRG; PAM sequence: GAG
tccttctgcactggcaacct

SEQ ID NO: 13249 - DNA, 20 bp, Artificial Sequence
  Description of Artificial Sequence: Synthetic oligonucleotide
  Target: COL7A1; (-) strand; PAM type: NRG; PAM sequence: TGG
cgcagggcttccttctgcac

SEQ ID NO: 13250 - DNA, 20 bp, Artificial Sequence
  Description of Artificial Sequence: Synthetic oligonucleotide
  Target: COL7A1; (-) strand; PAM type: NRG; PAM sequence: GGG
gagccggtgcccagagcgca

SEQ ID NO: 13251 - DNA, 20 bp, Artificial Sequence
  Description of Artificial Sequence: Synthetic oligonucleotide
  Target: COL7A1; (-) strand; PAM type: NRG; PAM sequence: AGG
ggagccggtgcccagagcgc

SEQ ID NO: 13252 - DNA, 20 bp, Artificial Sequence
  Description of Artificial Sequence: Synthetic oligonucleotide
  Target: COL7A1; (-) strand; PAM type: NRG; PAM sequence: CAG
gggagccggtgcccagagcg

SEQ ID NO: 13253 - DNA, 20 bp, Artificial Sequence
  Description of Artificial Sequence: Synthetic oligonucleotide
  Target: COL7A1; (-) strand; PAM type: NRG; PAM sequence: GAG
gcgctgggagccggtgccca

SEQ ID NO: 13254 - DNA, 20 bp, Artificial Sequence
  Description of Artificial Sequence: Synthetic oligonucleotide
  Target: COL7A1; (-) strand; PAM type: NRG; PAM sequence: CAG
ctgcgctgggagccggtgcc

SEQ ID NO: 13255 - DNA, 20 bp, Artificial Sequence
  Description of Artificial Sequence: Synthetic oligonucleotide
  Target: COL7A1; (-) strand; PAM type: NRG; PAM sequence: CGG
gctgaggctgcgctgggagc

SEQ ID NO: 13256 - DNA, 20 bp, Artificial Sequence
  Description of Artificial Sequence: Synthetic oligonucleotide
  Target: COL7A1; (-) strand; PAM type: NRG; PAM sequence: GAG
actcgctgaggctgcgctgg

SEQ ID NO: 13257 - DNA, 20 bp, Artificial Sequence
  Description of Artificial Sequence: Synthetic oligonucleotide
  Target: COL7A1; (-) strand; PAM type: NRG; PAM sequence: GGG
gcactcgctgaggctgcgct

SEQ ID NO: 13258 - DNA, 20 bp, Artificial Sequence
  Description of Artificial Sequence: Synthetic oligonucleotide
  Target: COL7A1; (-) strand; PAM type: NRG; PAM sequence: TGG
agcactcgctgaggctgcgc

SEQ ID NO: 13259 - DNA, 20 bp, Artificial Sequence
  Description of Artificial Sequence: Synthetic oligonucleotide
  Target: COL7A1; (-) strand; PAM type: NRG; PAM sequence: AGG
agcgcggggagcactcgctg

SEQ ID NO: 13260 - DNA, 20 bp, Artificial Sequence
  Description of Artificial Sequence: Synthetic oligonucleotide
  Target: COL7A1; (-) strand; PAM type: NRG; PAM sequence: GAG
cagcgcggggagcactcgct

SEQ ID NO: 13261 - DNA, 20 bp, Artificial Sequence
  Description of Artificial Sequence: Synthetic oligonucleotide
  Target: COL7A1; (-) strand; PAM type: NRG; PAM sequence: GAG
ttcacgtggtgcagcgcggg

SEQ ID NO: 13262 - DNA, 20 bp, Artificial Sequence
  Description of Artificial Sequence: Synthetic oligonucleotide
  Target: COL7A1; (-) strand; PAM type: NRG; PAM sequence: GGG
gcttcacgtggtgcagcgcg

SEQ ID NO: 13263 - DNA, 20 bp, Artificial Sequence
  Description of Artificial Sequence: Synthetic oligonucleotide
  Target: COL7A1; (-) strand; PAM type: NRG; PAM sequence: GGG
cgcttcacgtggtgcagcgc

SEQ ID NO: 13264 - DNA, 20 bp, Artificial Sequence
  Description of Artificial Sequence: Synthetic oligonucleotide
  Target: COL7A1; (-) strand; PAM type: NRG; PAM sequence: CGG
acgcttcacgtggtgcagcg

SEQ ID NO: 13265 - DNA, 20 bp, Artificial Sequence
  Description of Artificial Sequence: Synthetic oligonucleotide
  Target: COL7A1; (-) strand; PAM type: NRG; PAM sequence: CAG
tggggacgcttcacgtggtg

SEQ ID NO: 13266 - DNA, 20 bp, Artificial Sequence
  Description of Artificial Sequence: Synthetic oligonucleotide
  Target: COL7A1; (-) strand; PAM type: NRG; PAM sequence: TGG
agccctggggacgcttcacg

SEQ ID NO: 13267 - DNA, 20 bp, Artificial Sequence
  Description of Artificial Sequence: Synthetic oligonucleotide
  Target: COL7A1; (-) strand; PAM type: NRG; PAM sequence: GGG
ctgaggctccgccagccctg

SEQ ID NO: 13268 - DNA, 20 bp, Artificial Sequence
  Description of Artificial Sequence: Synthetic oligonucleotide
  Target: COL7A1; (-) strand; PAM type: NRG; PAM sequence: GGG
cctgaggctccgccagccct

SEQ ID NO: 13269 - DNA, 20 bp, Artificial Sequence
  Description of Artificial Sequence: Synthetic oligonucleotide
  Target: COL7A1; (-) strand; PAM type: NRG; PAM sequence: TGG
gcctgaggctccgccagccc

SEQ ID NO: 13270 - DNA, 20 bp, Artificial Sequence
  Description of Artificial Sequence: Synthetic oligonucleotide
  Target: COL7A1; (-) strand; PAM type: NRG; PAM sequence: CAG
tccagcgcctgaggctccgc

SEQ ID NO: 13271 - DNA, 20 bp, Artificial Sequence
  Description of Artificial Sequence: Synthetic oligonucleotide
  Target: COL7A1; (-) strand; PAM type: NRG; PAM sequence: AGG
agctttctctccagcgcctg

SEQ ID NO: 13272 - DNA, 20 bp, Artificial Sequence
  Description of Artificial Sequence: Synthetic oligonucleotide
  Target: COL7A1; (-) strand; PAM type: NRG; PAM sequence: GAG
gagctttctctccagcgcct

SEQ ID NO: 13273 - DNA, 20 bp, Artificial Sequence
  Description of Artificial Sequence: Synthetic oligonucleotide
  Target: COL7A1; (-) strand; PAM type: NRG; PAM sequence: CAG
tgattcctgagctttctctc

SEQ ID NO: 13274 - DNA, 20 bp, Artificial Sequence
  Description of Artificial Sequence: Synthetic oligonucleotide
  Target: COL7A1; (-) strand; PAM type: NRG; PAM sequence: GAG
gcagagcctccctgattcct

SEQ ID NO: 13275 - DNA, 20 bp, Artificial Sequence
  Description of Artificial Sequence: Synthetic oligonucleotide
  Target: COL7A1; (-) strand; PAM type: NRG; PAM sequence: GAG
gtgcaggggccatgggggca

SEQ ID NO: 13276 - DNA, 20 bp, Artificial Sequence
  Description of Artificial Sequence: Synthetic oligonucleotide
  Target: COL7A1; (-) strand; PAM type: NRG; PAM sequence: CAG
tggtgcaggggccatggggg

SEQ ID NO: 13277 - DNA, 20 bp, Artificial Sequence
  Description of Artificial Sequence: Synthetic oligonucleotide
  Target: COL7A1; (-) strand; PAM type: NRG; PAM sequence: GGG
gattggtgcaggggccatgg

SEQ ID NO: 13278 - DNA, 20 bp, Artificial Sequence
  Description of Artificial Sequence: Synthetic oligonucleotide
  Target: COL7A1; (-) strand; PAM type: NRG; PAM sequence: GGG
ggattggtgcaggggccatg

SEQ ID NO: 13279 - DNA, 20 bp, Artificial Sequence
  Description of Artificial Sequence: Synthetic oligonucleotide
  Target: COL7A1; (-) strand; PAM type: NRG; PAM sequence: GGG
gggattggtgcaggggccat

SEQ ID NO: 13280 - DNA, 20 bp, Artificial Sequence
  Description of Artificial Sequence: Synthetic oligonucleotide
  Target: COL7A1; (-) strand; PAM type: NRG; PAM sequence: TGG
tgggattggtgcaggggcca

SEQ ID NO: 13281 - DNA, 20 bp, Artificial Sequence
  Description of Artificial Sequence: Synthetic oligonucleotide
  Target: COL7A1; (-) strand; PAM type: NRG; PAM sequence: GGG
tgggcctgggattggtgcag

SEQ ID NO: 13282 - DNA, 20 bp, Artificial Sequence
  Description of Artificial Sequence: Synthetic oligonucleotide
  Target: COL7A1; (-) strand; PAM type: NRG; PAM sequence: GGG
gtgggcctgggattggtgca

SEQ ID NO: 13283 - DNA, 20 bp, Artificial Sequence
  Description of Artificial Sequence: Synthetic oligonucleotide
  Target: COL7A1; (-) strand; PAM type: NRG; PAM sequence: AGG
ggtgggcctgggattggtgc

SEQ ID NO: 13284 - DNA, 20 bp, Artificial Sequence
  Description of Artificial Sequence: Synthetic oligonucleotide
  Target: COL7A1; (-) strand; PAM type: NRG; PAM sequence: CAG
gggtgggcctgggattggtg

SEQ ID NO: 13285 - DNA, 20 bp, Artificial Sequence
  Description of Artificial Sequence: Synthetic oligonucleotide
  Target: COL7A1; (-) strand; PAM type: NRG; PAM sequence: TGG
tgccagggtgggcctgggat

SEQ ID NO: 13286 - DNA, 20 bp, Artificial Sequence
  Description of Artificial Sequence: Synthetic oligonucleotide
  Target: COL7A1; (-) strand; PAM type: NRG; PAM sequence: GGG
gcgtgtgccagggtgggcct

SEQ ID NO: 13287 - DNA, 20 bp, Artificial Sequence
  Description of Artificial Sequence: Synthetic oligonucleotide
  Target: COL7A1; (-) strand; PAM type: NRG; PAM sequence: TGG
tgcgtgtgccagggtgggcc

SEQ ID NO: 13288 - DNA, 20 bp, Artificial Sequence
  Description of Artificial Sequence: Synthetic oligonucleotide
  Target: COL7A1; (-) strand; PAM type: NRG; PAM sequence: GGG
cggggtgcgtgtgccagggt

SEQ ID NO: 13289 - DNA, 20 bp, Artificial Sequence
  Description of Artificial Sequence: Synthetic oligonucleotide
  Target: COL7A1; (-) strand; PAM type: NRG; PAM sequence: TGG
gcggggtgcgtgtgccaggg

SEQ ID NO: 13290 - DNA, 20 bp, Artificial Sequence
  Description of Artificial Sequence: Synthetic oligonucleotide
  Target: COL7A1; (-) strand; PAM type: NRG; PAM sequence: GGG
tgggcggggtgcgtgtgcca

SEQ ID NO: 13291 - DNA, 20 bp, Artificial Sequence
  Description of Artificial Sequence: Synthetic oligonucleotide
  Target: COL7A1; (-) strand; PAM type: NRG; PAM sequence: AGG
ctgggcggggtgcgtgtgcc

SEQ ID NO: 13292 - DNA, 20 bp, Artificial Sequence
  Description of Artificial Sequence: Synthetic oligonucleotide
  Target: COL7A1; (-) strand; PAM type: NRG; PAM sequence: CAG
gctgggcggggtgcgtgtgc

SEQ ID NO: 13293 - DNA, 20 bp, Artificial Sequence
  Description of Artificial Sequence: Synthetic oligonucleotide
  Target: COL7A1; (-) strand; PAM type: NRG; PAM sequence: GGG
ggggtctgagaggctgggcg

SEQ ID NO: 13294 - DNA, 20 bp, Artificial Sequence
  Description of Artificial Sequence: Synthetic oligonucleotide
  Target: COL7A1; (-) strand; PAM type: NRG; PAM sequence: GGG
aggggtctgagaggctgggc

SEQ ID NO: 13295 - DNA, 20 bp, Artificial Sequence
  Description of Artificial Sequence: Synthetic oligonucleotide
  Target: COL7A1; (-) strand; PAM type: NRG; PAM sequence: CGG
gaggggtctgagaggctggg

SEQ ID NO: 13296 - DNA, 20 bp, Artificial Sequence
  Description of Artificial Sequence: Synthetic oligonucleotide
  Target: COL7A1; (-) strand; PAM type: NRG; PAM sequence: GGG
ggagaggggtctgagaggct

SEQ ID NO: 13297 - DNA, 20 bp, Artificial Sequence
  Description of Artificial Sequence: Synthetic oligonucleotide
  Target: COL7A1; (-) strand; PAM type: NRG; PAM sequence: TGG
gggagaggggtctgagaggc

SEQ ID NO: 13298 - DNA, 20 bp, Artificial Sequence
  Description of Artificial Sequence: Synthetic oligonucleotide
  Target: COL7A1; (-) strand; PAM type: NRG; PAM sequence: AGG
aggagggagaggggtctgag

SEQ ID NO: 13299 - DNA, 20 bp, Artificial Sequence
  Description of Artificial Sequence: Synthetic oligonucleotide
  Target: COL7A1; (-) strand; PAM type: NRG; PAM sequence: GAG
gaggagggagaggggtctga

SEQ ID NO: 13300 - DNA, 20 bp, Artificial Sequence
  Description of Artificial Sequence: Synthetic oligonucleotide
  Target: COL7A1; (-) strand; PAM type: NRG; PAM sequence: GAG
gagaggagggagaggggtct

SEQ ID NO: 13301 - DNA, 20 bp, Artificial Sequence
  Description of Artificial Sequence: Synthetic oligonucleotide
  Target: COL7A1; (-) strand; PAM type: NRG; PAM sequence: GGG
gggtctgagaggagggagag

SEQ ID NO: 13302 - DNA, 20 bp, Artificial Sequence
  Description of Artificial Sequence: Synthetic oligonucleotide
  Target: COL7A1; (-) strand; PAM type: NRG; PAM sequence: GGG
agggtctgagaggagggaga

SEQ ID NO: 13303 - DNA, 20 bp, Artificial Sequence
  Description of Artificial Sequence: Synthetic oligonucleotide
  Target: COL7A1; (-) strand; PAM type: NRG; PAM sequence: AGG
cagggtctgagaggagggag

SEQ ID NO: 13304 - DNA, 20 bp, Artificial Sequence
  Description of Artificial Sequence: Synthetic oligonucleotide
  Target: COL7A1; (-) strand; PAM type: NRG; PAM sequence: GAG
gcagggtctgagaggaggga

SEQ ID NO: 13305 - DNA, 20 bp, Artificial Sequence
  Description of Artificial Sequence: Synthetic oligonucleotide
  Target: COL7A1; (-) strand; PAM type: NRG; PAM sequence: GAG
gggcagggtctgagaggagg

SEQ ID NO: 13306 - DNA, 20 bp, Artificial Sequence
  Description of Artificial Sequence: Synthetic oligonucleotide
  Target: COL7A1; (-) strand; PAM type: NRG; PAM sequence: GGG
gggggcagggtctgagagga

SEQ ID NO: 13307 - DNA, 20 bp, Artificial Sequence
  Description of Artificial Sequence: Synthetic oligonucleotide
  Target: COL7A1; (-) strand; PAM type: NRG; PAM sequence: AGG
tgggggcagggtctgagagg

SEQ ID NO: 13308 - DNA, 20 bp, Artificial Sequence
  Description of Artificial Sequence: Synthetic oligonucleotide
  Target: COL7A1; (-) strand; PAM type: NRG; PAM sequence: GAG
ttgggggcagggtctgagag

SEQ ID NO: 13309 - DNA, 20 bp, Artificial Sequence
  Description of Artificial Sequence: Synthetic oligonucleotide
  Target: COL7A1; (-) strand; PAM type: NRG; PAM sequence: AGG
ctttgggggcagggtctgag

SEQ ID NO: 13310 - DNA, 20 bp, Artificial Sequence
  Description of Artificial Sequence: Synthetic oligonucleotide
  Target: COL7A1; (-) strand; PAM type: NRG; PAM sequence: GAG
cctttgggggcagggtctga

SEQ ID NO: 13311 - DNA, 20 bp, Artificial Sequence
  Description of Artificial Sequence: Synthetic oligonucleotide
  Target: COL7A1; (-) strand; PAM type: NRG; PAM sequence: GAG
agcctttgggggcagggtct

SEQ ID NO: 13312 - DNA, 20 bp, Artificial Sequence
  Description of Artificial Sequence: Synthetic oligonucleotide
  Target: COL7A1; (-) strand; PAM type: NRG; PAM sequence: GGG
gtagtgagcctttgggggca

SEQ ID NO: 13313 - DNA, 20 bp, Artificial Sequence
  Description of Artificial Sequence: Synthetic oligonucleotide
  Target: COL7A1; (-) strand; PAM type: NRG; PAM sequence: AGG
ggtagtgagcctttgggggc

SEQ ID NO: 13314 - DNA, 20 bp, Artificial Sequence
  Description of Artificial Sequence: Synthetic oligonucleotide
  Target: COL7A1; (-) strand; PAM type: NRG; PAM sequence: CAG
tggtagtgagcctttggggg

SEQ ID NO: 13315 - DNA, 20 bp, Artificial Sequence
  Description of Artificial Sequence: Synthetic oligonucleotide
  Target: COL7A1; (-) strand; PAM type: NRG; PAM sequence: GGG
gattggtagtgagcctttgg

SEQ ID NO: 13316 - DNA, 20 bp, Artificial Sequence
  Description of Artificial Sequence: Synthetic oligonucleotide
  Target: COL7A1; (-) strand; PAM type: NRG; PAM sequence: GGG
ggattggtagtgagcctttg

SEQ ID NO: 13317 - DNA, 20 bp, Artificial Sequence
  Description of Artificial Sequence: Synthetic oligonucleotide
  Target: COL7A1; (-) strand; PAM type: NRG; PAM sequence: GGG
aggattggtagtgagccttt

SEQ ID NO: 13318 - DNA, 20 bp, Artificial Sequence
  Description of Artificial Sequence: Synthetic oligonucleotide
  Target: COL7A1; (-) strand; PAM type: NRG; PAM sequence: TGG
caggattggtagtgagcctt

SEQ ID NO: 13319 - DNA, 20 bp, Artificial Sequence
  Description of Artificial Sequence: Synthetic oligonucleotide
  Target: COL7A1; (-) strand; PAM type: NRG; PAM sequence: GAG
aaaggaccaggattggtagt

SEQ ID NO: 13320 - DNA, 20 bp, Artificial Sequence
  Description of Artificial Sequence: Synthetic oligonucleotide
  Target: COL7A1; (-) strand; PAM type: NRG; PAM sequence: TAG
ggagaaaggaccaggattgg

SEQ ID NO: 13321 - DNA, 20 bp, Artificial Sequence
  Description of Artificial Sequence: Synthetic oligonucleotide
  Target: COL7A1; (-) strand; PAM type: NRG; PAM sequence: TGG
attggagaaaggaccaggat

SEQ ID NO: 13322 - DNA, 20 bp, Artificial Sequence
  Description of Artificial Sequence: Synthetic oligonucleotide
  Target: COL7A1; (-) strand; PAM type: NRG; PAM sequence: AGG
tctggattggagaaaggacc

SEQ ID NO: 13323 - DNA, 20 bp, Artificial Sequence
  Description of Artificial Sequence: Synthetic oligonucleotide
  Target: COL7A1; (-) strand; PAM type: NRG; PAM sequence: CAG
ctctggattggagaaaggac

SEQ ID NO: 13324 - DNA, 20 bp, Artificial Sequence
  Description of Artificial Sequence: Synthetic oligonucleotide
  Target: COL7A1; (-) strand; PAM type: NRG; PAM sequence: AGG
ttgtgctctggattggagaa

SEQ ID NO: 13325 - DNA, 20 bp, Artificial Sequence
  Description of Artificial Sequence: Synthetic oligonucleotide
  Target: COL7A1; (-) strand; PAM type: NRG; PAM sequence: AAG
cttgtgctctggattggaga

SEQ ID NO: 13326 - DNA, 20 bp, Artificial Sequence
  Description of Artificial Sequence: Synthetic oligonucleotide
  Target: COL7A1; (-) strand; PAM type: NRG; PAM sequence: GAG
cgggcttgtgctctggattg

SEQ ID NO: 13327 - DNA, 20 bp, Artificial Sequence
  Description of Artificial Sequence: Synthetic oligonucleotide
  Target: COL7A1; (-) strand; PAM type: NRG; PAM sequence: TGG
tccgggcttgtgctctggat

SEQ ID NO: 13328 - DNA, 20 bp, Artificial Sequence
  Description of Artificial Sequence: Synthetic oligonucleotide
  Target: COL7A1; (-) strand; PAM type: NRG; PAM sequence: TGG
ggggatccgggcttgtgctc

SEQ ID NO: 13329 - DNA, 20 bp, Artificial Sequence
  Description of Artificial Sequence: Synthetic oligonucleotide
  Target: COL7A1; (-) strand; PAM type: NRG; PAM sequence: GGG
tgtggatggtttggggatcc

SEQ ID NO: 13330 - DNA, 20 bp, Artificial Sequence
  Description of Artificial Sequence: Synthetic oligonucleotide
  Target: COL7A1; (-) strand; PAM type: NRG; PAM sequence: CGG
gtgtggatggtttggggatc

SEQ ID NO: 13331 - DNA, 20 bp, Artificial Sequence
  Description of Artificial Sequence: Synthetic oligonucleotide
  Target: COL7A1; (-) strand; PAM type: NRG; PAM sequence: GGG
tgggtggtgtggatggtttg

SEQ ID NO: 13332 - DNA, 20 bp, Artificial Sequence
  Description of Artificial Sequence: Synthetic oligonucleotide
  Target: COL7A1; (-) strand; PAM type: NRG; PAM sequence: GGG
atgggtggtgtggatggttt

SEQ ID NO: 13333 - DNA, 20 bp, Artificial Sequence
  Description of Artificial Sequence: Synthetic oligonucleotide
  Target: COL7A1; (-) strand; PAM type: NRG; PAM sequence: TGG
gatgggtggtgtggatggtt

SEQ ID NO: 13334 - DNA, 20 bp, Artificial Sequence
  Description of Artificial Sequence: Synthetic oligonucleotide
  Target: COL7A1; (-) strand; PAM type: NRG; PAM sequence: TGG
cttcggatgggtggtgtgga

SEQ ID NO: 13335 - DNA, 20 bp, Artificial Sequence
  Description of Artificial Sequence: Synthetic oligonucleotide
  Target: COL7A1; (-) strand; PAM type: NRG; PAM sequence: TGG
agagcttcggatgggtggtg

SEQ ID NO: 13336 - DNA, 20 bp, Artificial Sequence
  Description of Artificial Sequence: Synthetic oligonucleotide
  Target: COL7A1; (-) strand; PAM type: NRG; PAM sequence: TGG
gctggagagcttcggatggg

SEQ ID NO: 13337 - DNA, 20 bp, Artificial Sequence
  Description of Artificial Sequence: Synthetic oligonucleotide
  Target: COL7A1; (-) strand; PAM type: NRG; PAM sequence: GGG
tgcgctggagagcttcggat

SEQ ID NO: 13338 - DNA, 20 bp, Artificial Sequence
  Description of Artificial Sequence: Synthetic oligonucleotide
  Target: COL7A1; (-) strand; PAM type: NRG; PAM sequence: TGG
atgcgctggagagcttcgga

SEQ ID NO: 13339 - DNA, 20 bp, Artificial Sequence
  Description of Artificial Sequence: Synthetic oligonucleotide
  Target: COL7A1; (-) strand; PAM type: NRG; PAM sequence: CGG
gagcatgcgctggagagctt

SEQ ID NO: 13340 - DNA, 20 bp, Artificial Sequence
  Description of Artificial Sequence: Synthetic oligonucleotide
  Target: COL7A1; (-) strand; PAM type: NRG; PAM sequence: GAG
taggcagagcatgcgctgga

SEQ ID NO: 13341 - DNA, 20 bp, Artificial Sequence
  Description of Artificial Sequence: Synthetic oligonucleotide
  Target: COL7A1; (-) strand; PAM type: NRG; PAM sequence: GAG
cgtaggcagagcatgcgctg

SEQ ID NO: 13342 - DNA, 20 bp, Artificial Sequence
  Description of Artificial Sequence: Synthetic oligonucleotide
  Target: COL7A1; (-) strand; PAM type: NRG; PAM sequence: TGG
cgcgtaggcagagcatgcgc

SEQ ID NO: 13343 - DNA, 20 bp, Artificial Sequence
  Description of Artificial Sequence: Synthetic oligonucleotide
  Target: COL7A1; (-) strand; PAM type: NRG; PAM sequence: GAG
gttgtcactacgcgtaggca

SEQ ID NO: 13344 - DNA, 20 bp, Artificial Sequence
  Description of Artificial Sequence: Synthetic oligonucleotide
  Target: COL7A1; (-) strand; PAM type: NRG; PAM sequence: CAG
ttgttgtcactacgcgtagg

SEQ ID NO: 13345 - DNA, 20 bp, Artificial Sequence
  Description of Artificial Sequence: Synthetic oligonucleotide
  Target: COL7A1; (-) strand; PAM type: NRG; PAM sequence: AGG
ccattgttgtcactacgcgt

SEQ ID NO: 13346 - DNA, 20 bp, Artificial Sequence
  Description of Artificial Sequence: Synthetic oligonucleotide
  Target: COL7A1; (-) strand; PAM type: NRG; PAM sequence: TAG
tccattgttgtcactacgcg

SEQ ID NO: 13347 - DNA, 20 bp, Artificial Sequence
  Description of Artificial Sequence: Synthetic oligonucleotide
  Target: COL7A1; (-) strand; PAM type: NRG; PAM sequence: GGG
gcacttgtcggggaccgcga

SEQ ID NO: 13348 - DNA, 20 bp, Artificial Sequence
  Description of Artificial Sequence: Synthetic oligonucleotide
  Target: COL7A1; (-) strand; PAM type: NRG; PAM sequence: AGG
tgcacttgtcggggaccgcg

SEQ ID NO: 13349 - DNA, 20 bp, Artificial Sequence
  Description of Artificial Sequence: Synthetic oligonucleotide
  Target: COL7A1; (-) strand; PAM type: NRG; PAM sequence: GAG
ctgcacttgtcggggaccgc

SEQ ID NO: 13350 - DNA, 20 bp, Artificial Sequence
  Description of Artificial Sequence: Synthetic oligonucleotide
  Target: COL7A1; (-) strand; PAM type: NRG; PAM sequence: GGG
gcgagtgactgcacttgtcg

SEQ ID NO: 13351 - DNA, 20 bp, Artificial Sequence
  Description of Artificial Sequence: Synthetic oligonucleotide
  Target: COL7A1; (-) strand; PAM type: NRG; PAM sequence: GGG
tgcgagtgactgcacttgtc

SEQ ID NO: 13352 - DNA, 20 bp, Artificial Sequence
  Description of Artificial Sequence: Synthetic oligonucleotide
  Target: COL7A1; (-) strand; PAM type: NRG; PAM sequence: CGG
gtgcgagtgactgcacttgt

SEQ ID NO: 13353 - DNA, 20 bp, Artificial Sequence
  Description of Artificial Sequence: Synthetic oligonucleotide
  Target: COL7A1; (-) strand; PAM type: NRG; PAM sequence: GAG
tggagtcagctactcagtgc

SEQ ID NO: 13354 - DNA, 20 bp, Artificial Sequence
  Description of Artificial Sequence: Synthetic oligonucleotide
  Target: COL7A1; (-) strand; PAM type: NRG; PAM sequence: CAG
cgaaggtggagtcagctact

SEQ ID NO: 13355 - DNA, 20 bp, Artificial Sequence
  Description of Artificial Sequence: Synthetic oligonucleotide
  Target: COL7A1; (-) strand; PAM type: NRG; PAM sequence: CAG
cggggtctcgaaggtggagt

SEQ ID NO: 13356 - DNA, 20 bp, Artificial Sequence
  Description of Artificial Sequence: Synthetic oligonucleotide
  Target: COL7A1; (-) strand; PAM type: NRG; PAM sequence: GAG
gatccggggtctcgaaggtg

SEQ ID NO: 13357 - DNA, 20 bp, Artificial Sequence
  Description of Artificial Sequence: Synthetic oligonucleotide
  Target: COL7A1; (-) strand; PAM type: NRG; PAM sequence: TGG
gagatccggggtctcgaagg

SEQ ID NO: 13358 - DNA, 20 bp, Artificial Sequence
  Description of Artificial Sequence: Synthetic oligonucleotide
  Target: COL7A1; (-) strand; PAM type: NRG; PAM sequence: AGG
gcagagatccggggtctcga

SEQ ID NO: 13359 - DNA, 20 bp, Artificial Sequence
  Description of Artificial Sequence: Synthetic oligonucleotide
  Target: COL7A1; (-) strand; PAM type: NRG; PAM sequence: AAG
tgcagagatccggggtctcg

SEQ ID NO: 13360 - DNA, 20 bp, Artificial Sequence
  Description of Artificial Sequence: Synthetic oligonucleotide
  Target: COL7A1; (-) strand; PAM type: NRG; PAM sequence: GGG
acagactctgcagagatccg

SEQ ID NO: 13361 - DNA, 20 bp, Artificial Sequence
  Description of Artificial Sequence: Synthetic oligonucleotide
  Target: COL7A1; (-) strand; PAM type: NRG; PAM sequence: GGG
cacagactctgcagagatcc

SEQ ID NO: 13362 - DNA, 20 bp, Artificial Sequence
  Description of Artificial Sequence: Synthetic oligonucleotide
  Target: COL7A1; (-) strand; PAM type: NRG; PAM sequence: CGG
acacagactctgcagagatc

SEQ ID NO: 13363 - DNA, 20 bp, Artificial Sequence
  Description of Artificial Sequence: Synthetic oligonucleotide
  Target: COL7A1; (-) strand; PAM type: NRG; PAM sequence: GAG
caggaaacacagactctgca

SEQ ID NO: 13364 - DNA, 20 bp, Artificial Sequence
  Description of Artificial Sequence: Synthetic oligonucleotide
  Target: COL7A1; (-) strand; PAM type: NRG; PAM sequence: CAG
cccaggaaacacagactctg

SEQ ID NO: 13365 - DNA, 20 bp, Artificial Sequence
  Description of Artificial Sequence: Synthetic oligonucleotide
  Target: COL7A1; (-) strand; PAM type: NRG; PAM sequence: CAG
ccagatactcccaggaaaca

SEQ ID NO: 13366 - DNA, 20 bp, Artificial Sequence
  Description of Artificial Sequence: Synthetic oligonucleotide
  Target: COL7A1; (-) strand; PAM type: NRG; PAM sequence: AGG
atgaggcaccagatactccc

SEQ ID NO: 13367 - DNA, 20 bp, Artificial Sequence
  Description of Artificial Sequence: Synthetic oligonucleotide
  Target: COL7A1; (-) strand; PAM type: NRG; PAM sequence: CAG
catgaggcaccagatactcc

SEQ ID NO: 13368 - DNA, 20 bp, Artificial Sequence
  Description of Artificial Sequence: Synthetic oligonucleotide
  Target: COL7A1; (-) strand; PAM type: NRG; PAM sequence: CAG
caggcggccccatgaggcac

SEQ ID NO: 13369 - DNA, 20 bp, Artificial Sequence
  Description of Artificial Sequence: Synthetic oligonucleotide
  Target: COL7A1; (-) strand; PAM type: NRG; PAM sequence: AGG
cctggccaggcggccccatg

SEQ ID NO: 13370 - DNA, 20 bp, Artificial Sequence
  Description of Artificial Sequence: Synthetic oligonucleotide
  Target: COL7A1; (-) strand; PAM type: NRG; PAM sequence: GAG
acctggccaggcggccccat

SEQ ID NO: 13371 - DNA, 20 bp, Artificial Sequence
  Description of Artificial Sequence: Synthetic oligonucleotide
  Target: COL7A1; (-) strand; PAM type: NRG; PAM sequence: CGG
tgtatgcccacctggccagg

SEQ ID NO: 13372 - DNA, 20 bp, Artificial Sequence
  Description of Artificial Sequence: Synthetic oligonucleotide
  Target: COL7A1; (-) strand; PAM type: NRG; PAM sequence: AGG
tgctgtatgcccacctggcc

SEQ ID NO: 13373 - DNA, 20 bp, Artificial Sequence
  Description of Artificial Sequence: Synthetic oligonucleotide
  Target: COL7A1; (-) strand; PAM type: NRG; PAM sequence: CAG
ttgctgtatgcccacctggc

SEQ ID NO: 13374 - DNA, 20 bp, Artificial Sequence
  Description of Artificial Sequence: Synthetic oligonucleotide
  Target: COL7A1; (-) strand; PAM type: NRG; PAM sequence: TGG
accattgctgtatgcccacc

SEQ ID NO: 13375 - DNA, 20 bp, Artificial Sequence
  Description of Artificial Sequence: Synthetic oligonucleotide
  Target: COL7A1; (-) strand; PAM type: NRG; PAM sequence: GGG
cacccctgtccttcctggct

SEQ ID NO: 13376 - DNA, 20 bp, Artificial Sequence
  Description of Artificial Sequence: Synthetic oligonucleotide
  Target: COL7A1; (-) strand; PAM type: NRG; PAM sequence: TGG
ccacccctgtccttcctggc

SEQ ID NO: 13377 - DNA, 20 bp, Artificial Sequence
  Description of Artificial Sequence: Synthetic oligonucleotide
  Target: COL7A1; (-) strand; PAM type: NRG; PAM sequence: TGG
gacgccacccctgtccttcc

SEQ ID NO: 13378 - DNA, 20 bp, Artificial Sequence
  Description of Artificial Sequence: Synthetic oligonucleotide
  Target: COL7A1; (-) strand; PAM type: NRG; PAM sequence: TGG
ctggggccggagtgaaggta

SEQ ID NO: 13379 - DNA, 20 bp, Artificial Sequence
  Description of Artificial Sequence: Synthetic oligonucleotide
  Target: COL7A1; (-) strand; PAM type: NRG; PAM sequence: AGG
ctggcctggggccggagtga

SEQ ID NO: 13380 - DNA, 20 bp, Artificial Sequence
  Description of Artificial Sequence: Synthetic oligonucleotide
  Target: COL7A1; (-) strand; PAM type: NRG; PAM sequence: AAG
actggcctggggccggagtg

SEQ ID NO: 13381 - DNA, 20 bp, Artificial Sequence
  Description of Artificial Sequence: Synthetic oligonucleotide
  Target: COL7A1; (-) strand; PAM type: NRG; PAM sequence: GAG
tacagactggcctggggccg

SEQ ID NO: 13382 - DNA, 20 bp, Artificial Sequence
  Description of Artificial Sequence: Synthetic oligonucleotide
  Target: COL7A1; (-) strand; PAM type: NRG; PAM sequence: CGG
cttacagactggcctggggc

SEQ ID NO: 13383 - DNA, 20 bp, Artificial Sequence
  Description of Artificial Sequence: Synthetic oligonucleotide
  Target: COL7A1; (-) strand; PAM type: NRG; PAM sequence: GGG
acagcttacagactggcctg

SEQ ID NO: 13384 - DNA, 20 bp, Artificial Sequence
  Description of Artificial Sequence: Synthetic oligonucleotide
  Target: COL7A1; (-) strand; PAM type: NRG; PAM sequence: GGG
cacagcttacagactggcct

SEQ ID NO: 13385 - DNA, 20 bp, Artificial Sequence
  Description of Artificial Sequence: Synthetic oligonucleotide
  Target: COL7A1; (-) strand; PAM type: NRG; PAM sequence: TGG
ccacagcttacagactggcc

SEQ ID NO: 13386 - DNA, 20 bp, Artificial Sequence
  Description of Artificial Sequence: Synthetic oligonucleotide
  Target: COL7A1; (-) strand; PAM type: NRG; PAM sequence: TGG
tggagccacagcttacagac

SEQ ID NO: 13387 - DNA, 20 bp, Artificial Sequence
  Description of Artificial Sequence: Synthetic oligonucleotide
  Target: COL7A1; (-) strand; PAM type: NRG; PAM sequence: CAG
gtcactggagccacagctta

SEQ ID NO: 13388 - DNA, 20 bp, Artificial Sequence
  Description of Artificial Sequence: Synthetic oligonucleotide
  Target: COL7A1; (-) strand; PAM type: NRG; PAM sequence: CAG
ggtaggggtcactggagcca

SEQ ID NO: 13389 - DNA, 20 bp, Artificial Sequence
  Description of Artificial Sequence: Synthetic oligonucleotide
  Target: COL7A1; (-) strand; PAM type: NRG; PAM sequence: GAG
cacctgggtaggggtcactg

SEQ ID NO: 13390 - DNA, 20 bp, Artificial Sequence
  Description of Artificial Sequence: Synthetic oligonucleotide
  Target: COL7A1; (-) strand; PAM type: NRG; PAM sequence: TGG
atcacctgggtaggggtcac

SEQ ID NO: 13391 - DNA, 20 bp, Artificial Sequence
  Description of Artificial Sequence: Synthetic oligonucleotide
  Target: COL7A1; (-) strand; PAM type: NRG; PAM sequence: GGG
tctacggatcacctgggtag

SEQ ID NO: 13392 - DNA, 20 bp, Artificial Sequence
  Description of Artificial Sequence: Synthetic oligonucleotide
  Target: COL7A1; (-) strand; PAM type: NRG; PAM sequence: GGG
ttctacggatcacctgggta

SEQ ID NO: 13393 - DNA, 20 bp, Artificial Sequence
  Description of Artificial Sequence: Synthetic oligonucleotide
  Target: COL7A1; (-) strand; PAM type: NRG; PAM sequence: AGG
gttctacggatcacctgggt

SEQ ID NO: 13394 - DNA, 20 bp, Artificial Sequence
  Description of Artificial Sequence: Synthetic oligonucleotide
  Target: COL7A1; (-) strand; PAM type: NRG; PAM sequence: TAG
cgttctacggatcacctggg

SEQ ID NO: 13395 - DNA, 20 bp, Artificial Sequence
  Description of Artificial Sequence: Synthetic oligonucleotide
  Target: COL7A1; (-) strand; PAM type: NRG; PAM sequence: GGG
cgacgttctacggatcacct

SEQ ID NO: 13396 - DNA, 20 bp, Artificial Sequence
  Description of Artificial Sequence: Synthetic oligonucleotide
  Target: COL7A1; (-) strand; PAM type: NRG; PAM sequence: TGG
gcgacgttctacggatcacc

SEQ ID NO: 13397 - DNA, 20 bp, Artificial Sequence
  Description of Artificial Sequence: Synthetic oligonucleotide
  Target: COL7A1; (-) strand; PAM type: NRG; PAM sequence: CGG
atgcttccagcgacgttcta

SEQ ID NO: 13398 - DNA, 20 bp, Artificial Sequence
  Description of Artificial Sequence: Synthetic oligonucleotide
  Target: COL7A1; (-) strand; PAM type: NRG; PAM sequence: CAG
ctgcagatcctcaatgcttc

SEQ ID NO: 13399 - DNA, 20 bp, Artificial Sequence
  Description of Artificial Sequence: Synthetic oligonucleotide
  Target: COL7A1; (-) strand; PAM type: NRG; PAM sequence: CAG
tgggtcgtgtgtcgaggctg

SEQ ID NO: 13400 - DNA, 20 bp, Artificial Sequence
  Description of Artificial Sequence: Synthetic oligonucleotide
  Target: COL7A1; (-) strand; PAM type: NRG; PAM sequence: AGG
agcctgtgggtcgtgtgtcg

SEQ ID NO: 13401 - DNA, 20 bp, Artificial Sequence
  Description of Artificial Sequence: Synthetic oligonucleotide
  Target: COL7A1; (-) strand; PAM type: NRG; PAM sequence: GAG
gagcctgtgggtcgtgtgtc

SEQ ID NO: 13402 - DNA, 20 bp, Artificial Sequence
  Description of Artificial Sequence: Synthetic oligonucleotide
  Target: COL7A1; (-) strand; PAM type: NRG; PAM sequence: GGG
tccccagcccctgagcctgt

SEQ ID NO: 13403 - DNA, 20 bp, Artificial Sequence
  Description of Artificial Sequence: Synthetic oligonucleotide
  Target: COL7A1; (-) strand; PAM type: NRG; PAM sequence: TGG
gtccccagcccctgagcctg

SEQ ID NO: 13404 - DNA, 20 bp, Artificial Sequence
  Description of Artificial Sequence: Synthetic oligonucleotide
  Target: COL7A1; (-) strand; PAM type: NRG; PAM sequence: GAG
tgcctctgtccccagcccct

SEQ ID NO: 13405 - DNA, 20 bp, Artificial Sequence
  Description of Artificial Sequence: Synthetic oligonucleotide
  Target: COL7A1; (-) strand; PAM type: NRG; PAM sequence: CAG
ccttaccttgcctctgtccc

SEQ ID NO: 13406 - DNA, 20 bp, Artificial Sequence
  Description of Artificial Sequence: Synthetic oligonucleotide
  Target: COL7A1; (-) strand; PAM type: NRG; PAM sequence: AGG
ctgcctctctgttctctacc

SEQ ID NO: 13407 - DNA, 20 bp, Artificial Sequence
  Description of Artificial Sequence: Synthetic oligonucleotide
  Target: COL7A1; (-) strand; PAM type: NRG; PAM sequence: CAG
actgcctctctgttctctac

SEQ ID NO: 13408 - DNA, 20 bp, Artificial Sequence
  Description of Artificial Sequence: Synthetic oligonucleotide
  Target: COL7A1; (-) strand; PAM type: NRG; PAM sequence: CAG
actaacctcacactgacttt

SEQ ID NO: 13409 - DNA, 20 bp, Artificial Sequence
  Description of Artificial Sequence: Synthetic oligonucleotide
  Target: COL7A1; (-) strand; PAM type: NRG; PAM sequence: AAG
ctcctcctcagggctgccta

SEQ ID NO: 13410 - DNA, 20 bp, Artificial Sequence
  Description of Artificial Sequence: Synthetic oligonucleotide
  Target: COL7A1; (-) strand; PAM type: NRG; PAM sequence: GGG
cactgacctcctcctcctca

SEQ ID NO: 13411 - DNA, 20 bp, Artificial Sequence
  Description of Artificial Sequence: Synthetic oligonucleotide
  Target: COL7A1; (-) strand; PAM type: NRG; PAM sequence: AGG
gcactgacctcctcctcctc

SEQ ID NO: 13412 - DNA, 20 bp, Artificial Sequence
  Description of Artificial Sequence: Synthetic oligonucleotide
  Target: COL7A1; (-) strand; PAM type: NRG; PAM sequence: CAG
ggcactgacctcctcctcct

SEQ ID NO: 13413 - DNA, 20 bp, Artificial Sequence
  Description of Artificial Sequence: Synthetic oligonucleotide
  Target: COL7A1; (-) strand; PAM type: NRG; PAM sequence: AGG
gccccacactgcccacccca

SEQ ID NO: 13414 - DNA, 20 bp, Artificial Sequence
  Description of Artificial Sequence: Synthetic oligonucleotide
  Target: COL7A1; (-) strand; PAM type: NRG; PAM sequence: AAG
ggccccacactgcccacccc

SEQ ID NO: 13415 - DNA, 20 bp, Artificial Sequence
  Description of Artificial Sequence: Synthetic oligonucleotide
  Target: COL7A1; (-) strand; PAM type: NRG; PAM sequence: TGG
cacccacggtgacctcctgg

SEQ ID NO: 13416 - DNA, 20 bp, Artificial Sequence
  Description of Artificial Sequence: Synthetic oligonucleotide
  Target: COL7A1; (-) strand; PAM type: NRG; PAM sequence: TGG
gtccacccacggtgacctcc

SEQ ID NO: 13417 - DNA, 20 bp, Artificial Sequence
  Description of Artificial Sequence: Synthetic oligonucleotide
  Target: COL7A1; (-) strand; PAM type: NRG; PAM sequence: CGG
actgattaagtgtccaccca

SEQ ID NO: 13418 - DNA, 20 bp, Artificial Sequence
  Description of Artificial Sequence: Synthetic oligonucleotide
  Target: COL7A1; (-) strand; PAM type: NRG; PAM sequence: AAG
tgacccaccccacactgatt

SEQ ID NO: 13419 - DNA, 20 bp, Artificial Sequence
  Description of Artificial Sequence: Synthetic oligonucleotide
  Target: COL7A1; (-) strand; PAM type: NRG; PAM sequence: CAG
gctgcctccacccccctgct

SEQ ID NO: 13420 - DNA, 20 bp, Artificial Sequence
  Description of Artificial Sequence: Synthetic oligonucleotide
  Target: COL7A1; (-) strand; PAM type: NRG; PAM sequence: CAG
gctgtgtgttcctgattgcc

SEQ ID NO: 13421 - DNA, 20 bp, Artificial Sequence
  Description of Artificial Sequence: Synthetic oligonucleotide
  Target: COL7A1; (-) strand; PAM type: NRG; PAM sequence: TAG
agctactagccacaccgcat

SEQ ID NO: 13422 - DNA, 20 bp, Artificial Sequence
  Description of Artificial Sequence: Synthetic oligonucleotide
  Target: COL7A1; (-) strand; PAM type: NRG; PAM sequence: TAG
agtggaccctggccagctac

SEQ ID NO: 13423 - DNA, 20 bp, Artificial Sequence
  Description of Artificial Sequence: Synthetic oligonucleotide
  Target: COL7A1; (-) strand; PAM type: NRG; PAM sequence: CAG
actggtgagtggaccctggc

SEQ ID NO: 13424 - DNA, 20 bp, Artificial Sequence
  Description of Artificial Sequence: Synthetic oligonucleotide
  Target: COL7A1; (-) strand; PAM type: NRG; PAM sequence: TGG
gaggactggtgagtggaccc

SEQ ID NO: 13425 - DNA, 20 bp, Artificial Sequence
  Description of Artificial Sequence: Synthetic oligonucleotide
  Target: COL7A1; (-) strand; PAM type: NRG; PAM sequence: TGG
tggttgtgaggactggtgag

SEQ ID NO: 13426 - DNA, 20 bp, Artificial Sequence
  Description of Artificial Sequence: Synthetic oligonucleotide
  Target: COL7A1; (-) strand; PAM type: NRG; PAM sequence: GAG
ctgtggttgtgaggactggt

SEQ ID NO: 13427 - DNA, 20 bp, Artificial Sequence
  Description of Artificial Sequence: Synthetic oligonucleotide
  Target: COL7A1; (-) strand; PAM type: NRG; PAM sequence: TGG
gcctctgtggttgtgaggac

SEQ ID NO: 13428 - DNA, 20 bp, Artificial Sequence
  Description of Artificial Sequence: Synthetic oligonucleotide
  Target: COL7A1; (-) strand; PAM type: NRG; PAM sequence: AGG
cccctgcctctgtggttgtg

SEQ ID NO: 13429 - DNA, 20 bp, Artificial Sequence
  Description of Artificial Sequence: Synthetic oligonucleotide
  Target: COL7A1; (-) strand; PAM type: NRG; PAM sequence: GAG
ccccctgcctctgtggttgt

SEQ ID NO: 13430 - DNA, 20 bp, Artificial Sequence
  Description of Artificial Sequence: Synthetic oligonucleotide
  Target: COL7A1; (-) strand; PAM type: NRG; PAM sequence: TGG
ggatgggccccctgcctctg

SEQ ID NO: 13431 - DNA, 20 bp, Artificial Sequence
  Description of Artificial Sequence: Synthetic oligonucleotide
  Target: COL7A1; (-) strand; PAM type: NRG; PAM sequence: GGG
cccatgtggctggcgtggat

SEQ ID NO: 13432 - DNA, 20 bp, Artificial Sequence
  Description of Artificial Sequence: Synthetic oligonucleotide
  Target: COL7A1; (-) strand; PAM type: NRG; PAM sequence: TGG
gcccatgtggctggcgtgga

SEQ ID NO: 13433 - DNA, 20 bp, Artificial Sequence
  Description of Artificial Sequence: Synthetic oligonucleotide
  Target: COL7A1; (-) strand; PAM type: NRG; PAM sequence: TGG
gagggcccatgtggctggcg

SEQ ID NO: 13434 - DNA, 20 bp, Artificial Sequence
  Description of Artificial Sequence: Synthetic oligonucleotide
  Target: COL7A1; (-) strand; PAM type: NRG; PAM sequence: TGG
catgtgagggcccatgtggc

SEQ ID NO: 13435 - DNA, 20 bp, Artificial Sequence
  Description of Artificial Sequence: Synthetic oligonucleotide
  Target: COL7A1; (-) strand; PAM type: NRG; PAM sequence: TGG
ggtgcatgtgagggcccatg

SEQ ID NO: 13436 - DNA, 20 bp, Artificial Sequence
  Description of Artificial Sequence: Synthetic oligonucleotide
  Target: COL7A1; (-) strand; PAM type: NRG; PAM sequence: GGG
tgagtatacggtgcatgtga

SEQ ID NO: 13437 - DNA, 20 bp, Artificial Sequence
  Description of Artificial Sequence: Synthetic oligonucleotide
  Target: COL7A1; (-) strand; PAM type: NRG; PAM sequence: AGG
ctgagtatacggtgcatgtg

SEQ ID NO: 13438 - DNA, 20 bp, Artificial Sequence
  Description of Artificial Sequence: Synthetic oligonucleotide
  Target: COL7A1; (-) strand; PAM type: NRG; PAM sequence: GAG
actgagtatacggtgcatgt

SEQ ID NO: 13439 - DNA, 20 bp, Artificial Sequence
  Description of Artificial Sequence: Synthetic oligonucleotide
  Target: COL7A1; (-) strand; PAM type: NRG; PAM sequence: CGG
ggagccagatactgagtata

SEQ ID NO: 13440 - DNA, 20 bp, Artificial Sequence
  Description of Artificial Sequence: Synthetic oligonucleotide
  Target: COL7A1; (-) strand; PAM type: NRG; PAM sequence: GAG
atggactggagccagatact

SEQ ID NO: 13441 - DNA, 20 bp, Artificial Sequence
  Description of Artificial Sequence: Synthetic oligonucleotide
  Target: COL7A1; (-) strand; PAM type: NRG; PAM sequence: CAG
tgagctggatggactggagc

SEQ ID NO: 13442 - DNA, 20 bp, Artificial Sequence
  Description of Artificial Sequence: Synthetic oligonucleotide
  Target: COL7A1; (-) strand; PAM type: NRG; PAM sequence: GAG
tggctgagctggatggactg

SEQ ID NO: 13443 - DNA, 20 bp, Artificial Sequence
  Description of Artificial Sequence: Synthetic oligonucleotide
  Target: COL7A1; (-) strand; PAM type: NRG; PAM sequence: TGG
ggtggctgagctggatggac

SEQ ID NO: 13444 - DNA, 20 bp, Artificial Sequence
  Description of Artificial Sequence: Synthetic oligonucleotide
  Target: COL7A1; (-) strand; PAM type: NRG; PAM sequence: TGG
gccacggtggctgagctgga

SEQ ID NO: 13445 - DNA, 20 bp, Artificial Sequence
  Description of Artificial Sequence: Synthetic oligonucleotide
  Target: COL7A1; (-) strand; PAM type: NRG; PAM sequence: TGG
ggaggccacggtggctgagc

SEQ ID NO: 13446 - DNA, 20 bp, Artificial Sequence
  Description of Artificial Sequence: Synthetic oligonucleotide
  Target: COL7A1; (-) strand; PAM type: NRG; PAM sequence: GAG
ctggggaggccacggtggct

SEQ ID NO: 13447 - DNA, 20 bp, Artificial Sequence
  Description of Artificial Sequence: Synthetic oligonucleotide
  Target: COL7A1; (-) strand; PAM type: NRG; PAM sequence: TGG
ggtttctggggaggccacgg

SEQ ID NO: 13448 - DNA, 20 bp, Artificial Sequence
  Description of Artificial Sequence: Synthetic oligonucleotide
  Target: COL7A1; (-) strand; PAM type: NRG; PAM sequence: CGG
gttggtttctggggaggcca

SEQ ID NO: 13449 - DNA, 20 bp, Artificial Sequence
  Description of Artificial Sequence: Synthetic oligonucleotide
  Target: COL7A1; (-) strand; PAM type: NRG; PAM sequence: AGG
atcccagttggtttctgggg

SEQ ID NO: 13450 - DNA, 20 bp, Artificial Sequence
  Description of Artificial Sequence: Synthetic oligonucleotide
  Target: COL7A1; (-) strand; PAM type: NRG; PAM sequence: GAG
aatcccagttggtttctggg

SEQ ID NO: 13451 - DNA, 20 bp, Artificial Sequence
  Description of Artificial Sequence: Synthetic oligonucleotide
  Target: COL7A1; (-) strand; PAM type: NRG; PAM sequence: GGG
gaaatcccagttggtttctg

SEQ ID NO: 13452 - DNA, 20 bp, Artificial Sequence
  Description of Artificial Sequence: Synthetic oligonucleotide
  Target: COL7A1; (-) strand; PAM type: NRG; PAM sequence: GGG
agaaatcccagttggtttct

SEQ ID NO: 13453 - DNA, 20 bp, Artificial Sequence
  Description of Artificial Sequence: Synthetic oligonucleotide
  Target: COL7A1; (-) strand; PAM type: NRG; PAM sequence: TGG
gagaaatcccagttggtttc

SEQ ID NO: 13454 - DNA, 20 bp, Artificial Sequence
  Description of Artificial Sequence: Synthetic oligonucleotide
  Target: COL7A1; (-) strand; PAM type: NRG; PAM sequence: TGG
aggcccagagaaatcccagt

SEQ ID NO: 13455 - DNA, 20 bp, Artificial Sequence
  Description of Artificial Sequence: Synthetic oligonucleotide
  Target: COL7A1; (-) strand; PAM type: NRG; PAM sequence: CAG
tcccaggcccagagaaatcc

SEQ ID NO: 13456 - DNA, 20 bp, Artificial Sequence
  Description of Artificial Sequence: Synthetic oligonucleotide
  Target: COL7A1; (-) strand; PAM type: NRG; PAM sequence: GAG
catccctgttcccaggccca

SEQ ID NO: 13457 - DNA, 20 bp, Artificial Sequence
  Description of Artificial Sequence: Synthetic oligonucleotide
  Target: COL7A1; (-) strand; PAM type: NRG; PAM sequence: CAG
tccatccctgttcccaggcc

SEQ ID NO: 13458 - DNA, 20 bp, Artificial Sequence
  Description of Artificial Sequence: Synthetic oligonucleotide
  Target: COL7A1; (-) strand; PAM type: NRG; PAM sequence: AGG
ctgcctccatccctgttccc

SEQ ID NO: 13459 - DNA, 20 bp, Artificial Sequence
  Description of Artificial Sequence: Synthetic oligonucleotide
  Target: COL7A1; (-) strand; PAM type: NRG; PAM sequence: CAG
gctgcctccatccctgttcc

SEQ ID NO: 13460 - DNA, 20 bp, Artificial Sequence
  Description of Artificial Sequence: Synthetic oligonucleotide
  Target: COL7A1; (-) strand; PAM type: NRG; PAM sequence: GAG
cacagagtttgctagccctg

SEQ ID NO: 13461 - DNA, 20 bp, Artificial Sequence
  Description of Artificial Sequence: Synthetic oligonucleotide
  Target: COL7A1; (-) strand; PAM type: NRG; PAM sequence: TGG
ggcacagagtttgctagccc

SEQ ID NO: 13462 - DNA, 20 bp, Artificial Sequence
  Description of Artificial Sequence: Synthetic oligonucleotide
  Target: COL7A1; (-) strand; PAM type: NRG; PAM sequence: TAG
ctctggggcacagagtttgc

SEQ ID NO: 13463 - DNA, 20 bp, Artificial Sequence
  Description of Artificial Sequence: Synthetic oligonucleotide
  Target: COL7A1; (-) strand; PAM type: NRG; PAM sequence: GAG
aggtggggctctggggcaca

SEQ ID NO: 13464 - DNA, 20 bp, Artificial Sequence
  Description of Artificial Sequence: Synthetic oligonucleotide
  Target: COL7A1; (-) strand; PAM type: NRG; PAM sequence: CAG
ccaggtggggctctggggca

SEQ ID NO: 13465 - DNA, 20 bp, Artificial Sequence
  Description of Artificial Sequence: Synthetic oligonucleotide
  Target: COL7A1; (-) strand; PAM type: NRG; PAM sequence: GGG
ggggtccaggtggggctctg

SEQ ID NO: 13466 - DNA, 20 bp, Artificial Sequence
  Description of Artificial Sequence: Synthetic oligonucleotide
  Target: COL7A1; (-) strand; PAM type: NRG; PAM sequence: GGG
gggggtccaggtggggctct

SEQ ID NO: 13467 - DNA, 20 bp, Artificial Sequence
  Description of Artificial Sequence: Synthetic oligonucleotide
  Target: COL7A1; (-) strand; PAM type: NRG; PAM sequence: TGG
tgggggtccaggtggggctc

SEQ ID NO: 13468 - DNA, 20 bp, Artificial Sequence
  Description of Artificial Sequence: Synthetic oligonucleotide
  Target: COL7A1; (-) strand; PAM type: NRG; PAM sequence: GGG
gtttattgggggtccaggtg

SEQ ID NO: 13469 - DNA, 20 bp, Artificial Sequence
  Description of Artificial Sequence: Synthetic oligonucleotide
  Target: COL7A1; (-) strand; PAM type: NRG; PAM sequence: GGG
ggtttattgggggtccaggt

SEQ ID NO: 13470 - DNA, 20 bp, Artificial Sequence
  Description of Artificial Sequence: Synthetic oligonucleotide
  Target: COL7A1; (-) strand; PAM type: NRG; PAM sequence: TGG
gggtttattgggggtccagg

SEQ ID NO: 13471 - DNA, 20 bp, Artificial Sequence
  Description of Artificial Sequence: Synthetic oligonucleotide
  Target: COL7A1; (-) strand; PAM type: NRG; PAM sequence: AGG
tgggggtttattgggggtcc

SEQ ID NO: 13472 - DNA, 20 bp, Artificial Sequence
  Description of Artificial Sequence: Synthetic oligonucleotide
  Target: COL7A1; (-) strand; PAM type: NRG; PAM sequence: CAG
ctgggggtttattgggggtc

SEQ ID NO: 13473 - DNA, 20 bp, Artificial Sequence
  Description of Artificial Sequence: Synthetic oligonucleotide
  Target: COL7A1; (-) strand; PAM type: NRG; PAM sequence: GGG
gggggctgggggtttattgg

SEQ ID NO: 13474 - DNA, 20 bp, Artificial Sequence
  Description of Artificial Sequence: Synthetic oligonucleotide
  Target: COL7A1; (-) strand; PAM type: NRG; PAM sequence: GGG
tgggggctgggggtttattg

SEQ ID NO: 13475 - DNA, 20 bp, Artificial Sequence
  Description of Artificial Sequence: Synthetic oligonucleotide
  Target: COL7A1; (-) strand; PAM type: NRG; PAM sequence: GGG
atgggggctgggggtttatt

SEQ ID NO: 13476 - DNA, 20 bp, Artificial Sequence
  Description of Artificial Sequence: Synthetic oligonucleotide
  Target: COL7A1; (-) strand; PAM type: NRG; PAM sequence: TGG
aatgggggctgggggtttat

SEQ ID NO: 13477 - DNA, 20 bp, Artificial Sequence
  Description of Artificial Sequence: Synthetic oligonucleotide
  Target: COL7A1; (-) strand; PAM type: NRG; PAM sequence: GGG
cagggtggaatgggggctgg

SEQ ID NO: 13478 - DNA, 20 bp, Artificial Sequence
  Description of Artificial Sequence: Synthetic oligonucleotide
  Target: COL7A1; (-) strand; PAM type: NRG; PAM sequence: GGG
tcagggtggaatgggggctg

SEQ ID NO: 13479 - DNA, 20 bp, Artificial Sequence
  Description of Artificial Sequence: Synthetic oligonucleotide
  Target: COL7A1; (-) strand; PAM type: NRG; PAM sequence: GGG
gtcagggtggaatgggggct

SEQ ID NO: 13480 - DNA, 20 bp, Artificial Sequence
  Description of Artificial Sequence: Synthetic oligonucleotide
  Target: COL7A1; (-) strand; PAM type: NRG; PAM sequence: TGG
ggtcagggtggaatgggggc

SEQ ID NO: 13481 - DNA, 20 bp, Artificial Sequence
  Description of Artificial Sequence: Synthetic oligonucleotide
  Target: COL7A1; (-) strand; PAM type: NRG; PAM sequence: GGG
ggcaggtcagggtggaatgg

SEQ ID NO: 13482 - DNA, 20 bp, Artificial Sequence
  Description of Artificial Sequence: Synthetic oligonucleotide
  Target: COL7A1; (-) strand; PAM type: NRG; PAM sequence: GGG
gggcaggtcagggtggaatg

SEQ ID NO: 13483 - DNA, 20 bp, Artificial Sequence
  Description of Artificial Sequence: Synthetic oligonucleotide
  Target: COL7A1; (-) strand; PAM type: NRG; PAM sequence: GGG
ggggcaggtcagggtggaat

SEQ ID NO: 13484 - DNA, 20 bp, Artificial Sequence
  Description of Artificial Sequence: Synthetic oligonucleotide
  Target: COL7A1; (-) strand; PAM type: NRG; PAM sequence: TGG
gggggcaggtcagggtggaa

SEQ ID NO: 13485 - DNA, 20 bp, Artificial Sequence
  Description of Artificial Sequence: Synthetic oligonucleotide
  Target: COL7A1; (-) strand; PAM type: NRG; PAM sequence: TGG
tgggagggggcaggtcaggg

SEQ ID NO: 13486 - DNA, 20 bp, Artificial Sequence
  Description of Artificial Sequence: Synthetic oligonucleotide
  Target: COL7A1; (-) strand; PAM type: NRG; PAM sequence: GGG
gtttgggagggggcaggtca

SEQ ID NO: 13487 - DNA, 20 bp, Artificial Sequence
  Description of Artificial Sequence: Synthetic oligonucleotide
  Target: COL7A1; (-) strand; PAM type: NRG; PAM sequence: AGG
ggtttgggagggggcaggtc

SEQ ID NO: 13488 - DNA, 20 bp, Artificial Sequence
  Description of Artificial Sequence: Synthetic oligonucleotide
  Target: COL7A1; (-) strand; PAM type: NRG; PAM sequence: CAG
gggtttgggagggggcaggt

SEQ ID NO: 13489 - DNA, 20 bp, Artificial Sequence
  Description of Artificial Sequence: Synthetic oligonucleotide
  Target: COL7A1; (-) strand; PAM type: NRG; PAM sequence: AGG
actggggtttgggagggggc

SEQ ID NO: 13490 - DNA, 20 bp, Artificial Sequence
  Description of Artificial Sequence: Synthetic oligonucleotide
  Target: COL7A1; (-) strand; PAM type: NRG; PAM sequence: CAG
gactggggtttgggaggggg

SEQ ID NO: 13491 - DNA, 20 bp, Artificial Sequence
  Description of Artificial Sequence: Synthetic oligonucleotide
  Target: COL7A1; (-) strand; PAM type: NRG; PAM sequence: GGG
ggggactggggtttgggagg

SEQ ID NO: 13492 - DNA, 20 bp, Artificial Sequence
  Description of Artificial Sequence: Synthetic oligonucleotide
  Target: COL7A1; (-) strand; PAM type: NRG; PAM sequence: GGG
tggggactggggtttgggag

SEQ ID NO: 13493 - DNA, 20 bp, Artificial Sequence
  Description of Artificial Sequence: Synthetic oligonucleotide
  Target: COL7A1; (-) strand; PAM type: NRG; PAM sequence: GGG
gtggggactggggtttggga

SEQ ID NO: 13494 - DNA, 20 bp, Artificial Sequence
  Description of Artificial Sequence: Synthetic oligonucleotide
  Target: COL7A1; (-) strand; PAM type: NRG; PAM sequence: AGG
ggtggggactggggtttggg

SEQ ID NO: 13495 - DNA, 20 bp, Artificial Sequence
  Description of Artificial Sequence: Synthetic oligonucleotide
  Target: COL7A1; (-) strand; PAM type: NRG; PAM sequence: GAG
cggtggggactggggtttgg

SEQ ID NO: 13496 - DNA, 20 bp, Artificial Sequence
  Description of Artificial Sequence: Synthetic oligonucleotide
  Target: COL7A1; (-) strand; PAM type: NRG; PAM sequence: GGG
cacggtggggactggggttt

SEQ ID NO: 13497 - DNA, 20 bp, Artificial Sequence
  Description of Artificial Sequence: Synthetic oligonucleotide
  Target: COL7A1; (-) strand; PAM type: NRG; PAM sequence: TGG
ccacggtggggactggggtt

SEQ ID NO: 13498 - DNA, 20 bp, Artificial Sequence
  Description of Artificial Sequence: Synthetic oligonucleotide
  Target: COL7A1; (-) strand; PAM type: NRG; PAM sequence: GGG
tcagcccacggtggggactg

SEQ ID NO: 13499 - DNA, 20 bp, Artificial Sequence
  Description of Artificial Sequence: Synthetic oligonucleotide
  Target: COL7A1; (-) strand; PAM type: NRG; PAM sequence: GGG
ctcagcccacggtggggact

SEQ ID NO: 13500 - DNA, 20 bp, Artificial Sequence
  Description of Artificial Sequence: Synthetic oligonucleotide
  Target: COL7A1; (-) strand; PAM type: NRG; PAM sequence: TGG
actcagcccacggtggggac

SEQ ID NO: 13501 - DNA, 20 bp, Artificial Sequence
  Description of Artificial Sequence: Synthetic oligonucleotide
  Target: COL7A1; (-) strand; PAM type: NRG; PAM sequence: GGG
ctggcactcagcccacggtg

SEQ ID NO: 13502 - DNA, 20 bp, Artificial Sequence
  Description of Artificial Sequence: Synthetic oligonucleotide
  Target: COL7A1; (-) strand; PAM type: NRG; PAM sequence: GGG
cctggcactcagcccacggt

SEQ ID NO: 13503 - DNA, 20 bp, Artificial Sequence
  Description of Artificial Sequence: Synthetic oligonucleotide
  Target: COL7A1; (-) strand; PAM type: NRG; PAM sequence: TGG
tcctggcactcagcccacgg

SEQ ID NO: 13504 - DNA, 20 bp, Artificial Sequence
  Description of Artificial Sequence: Synthetic oligonucleotide
  Target: COL7A1; (-) strand; PAM type: NRG; PAM sequence: CGG
gtttcctggcactcagccca

SEQ ID NO: 13505 - DNA, 20 bp, Artificial Sequence
  Description of Artificial Sequence: Synthetic oligonucleotide
  Target: COL7A1; (-) strand; PAM type: NRG; PAM sequence: CAG
atacagggtttcctggcact

SEQ ID NO: 13506 - DNA, 20 bp, Artificial Sequence
  Description of Artificial Sequence: Synthetic oligonucleotide
  Target: COL7A1; (-) strand; PAM type: NRG; PAM sequence: TGG
ccacaggatacagggtttcc

SEQ ID NO: 13507 - DNA, 20 bp, Artificial Sequence
  Description of Artificial Sequence: Synthetic oligonucleotide
  Target: COL7A1; (-) strand; PAM type: NRG; PAM sequence: GGG
tcctggcgccacaggataca

SEQ ID NO: 13508 - DNA, 20 bp, Artificial Sequence
  Description of Artificial Sequence: Synthetic oligonucleotide
  Target: COL7A1; (-) strand; PAM type: NRG; PAM sequence: AGG
ttcctggcgccacaggatac

SEQ ID NO: 13509 - DNA, 20 bp, Artificial Sequence
  Description of Artificial Sequence: Synthetic oligonucleotide
  Target: COL7A1; (-) strand; PAM type: NRG; PAM sequence: CAG
gttcctggcgccacaggata

SEQ ID NO: 13510 - DNA, 20 bp, Artificial Sequence
  Description of Artificial Sequence: Synthetic oligonucleotide
  Target: COL7A1; (-) strand; PAM type: NRG; PAM sequence: AGG
accagggttcctggcgccac

SEQ ID NO: 13511 - DNA, 20 bp, Artificial Sequence
  Description of Artificial Sequence: Synthetic oligonucleotide
  Target: COL7A1; (-) strand; PAM type: NRG; PAM sequence: CAG
gaccagggttcctggcgcca

SEQ ID NO: 13512 - DNA, 20 bp, Artificial Sequence
  Description of Artificial Sequence: Synthetic oligonucleotide
  Target: COL7A1; (-) strand; PAM type: NRG; PAM sequence: TGG
attacctggaccagggttcc

SEQ ID NO: 13513 - DNA, 20 bp, Artificial Sequence
  Description of Artificial Sequence: Synthetic oligonucleotide
  Target: COL7A1; (-) strand; PAM type: NRG; PAM sequence: GGG
tgtcaccattacctggacca

SEQ ID NO: 13514 - DNA, 20 bp, Artificial Sequence
  Description of Artificial Sequence: Synthetic oligonucleotide
  Target: COL7A1; (-) strand; PAM type: NRG; PAM sequence: AGG
ctgtcaccattacctggacc

SEQ ID NO: 13515 - DNA, 20 bp, Artificial Sequence
  Description of Artificial Sequence: Synthetic oligonucleotide
  Target: COL7A1; (-) strand; PAM type: NRG; PAM sequence: CAG
tctgtcaccattacctggac

SEQ ID NO: 13516 - DNA, 20 bp, Artificial Sequence
  Description of Artificial Sequence: Synthetic oligonucleotide
  Target: COL7A1; (-) strand; PAM type: NRG; PAM sequence: TGG
gctcatctgtcaccattacc

SEQ ID NO: 13517 - DNA, 20 bp, Artificial Sequence
  Description of Artificial Sequence: Synthetic oligonucleotide
  Target: COL7A1; (-) strand; PAM type: NRG; PAM sequence: CAG
gtccatgtgactcaggccag

SEQ ID NO: 13518 - DNA, 20 bp, Artificial Sequence
  Description of Artificial Sequence: Synthetic oligonucleotide
  Target: COL7A1; (-) strand; PAM type: NRG; PAM sequence: CAG
acggtccatgtgactcaggc

SEQ ID NO: 13519 - DNA, 20 bp, Artificial Sequence
  Description of Artificial Sequence: Synthetic oligonucleotide
  Target: COL7A1; (-) strand; PAM type: NRG; PAM sequence: AGG
gaggacggtccatgtgactc

SEQ ID NO: 13520 - DNA, 20 bp, Artificial Sequence
  Description of Artificial Sequence: Synthetic oligonucleotide
  Target: COL7A1; (-) strand; PAM type: NRG; PAM sequence: CAG
tgaggacggtccatgtgact

SEQ ID NO: 13521 - DNA, 20 bp, Artificial Sequence
  Description of Artificial Sequence: Synthetic oligonucleotide
  Target: COL7A1; (-) strand; PAM type: NRG; PAM sequence: CGG
cccactgggcccagtgagga

SEQ ID NO: 13522 - DNA, 20 bp, Artificial Sequence
  Description of Artificial Sequence: Synthetic oligonucleotide
  Target: COL7A1; (-) strand; PAM type: NRG; PAM sequence: AGG
tagacccactgggcccagtg

SEQ ID NO: 13523 - DNA, 20 bp, Artificial Sequence
  Description of Artificial Sequence: Synthetic oligonucleotide
  Target: COL7A1; (-) strand; PAM type: NRG; PAM sequence: GAG
ctagacccactgggcccagt

SEQ ID NO: 13524 - DNA, 20 bp, Artificial Sequence
  Description of Artificial Sequence: Synthetic oligonucleotide
  Target: COL7A1; (-) strand; PAM type: NRG; PAM sequence: CAG
cccactagacccactgggcc

SEQ ID NO: 13525 - DNA, 20 bp, Artificial Sequence
  Description of Artificial Sequence: Synthetic oligonucleotide
  Target: COL7A1; (-) strand; PAM type: NRG; PAM sequence: GGG
ctctccccactagacccact

SEQ ID NO: 13526 - DNA, 20 bp, Artificial Sequence
  Description of Artificial Sequence: Synthetic oligonucleotide
  Target: COL7A1; (-) strand; PAM type: NRG; PAM sequence: TGG
cctctccccactagacccac

SEQ ID NO: 13527 - DNA, 20 bp, Artificial Sequence
  Description of Artificial Sequence: Synthetic oligonucleotide
  Target: COL7A1; (-) strand; PAM type: NRG; PAM sequence: TAG
tccccattgcctctccccac

SEQ ID NO: 13528 - DNA, 20 bp, Artificial Sequence
  Description of Artificial Sequence: Synthetic oligonucleotide
  Target: COL7A1; (-) strand; PAM type: NRG; PAM sequence: CAG
ctccttcctgcctgttccag

SEQ ID NO: 13529 - DNA, 20 bp, Artificial Sequence
  Description of Artificial Sequence: Synthetic oligonucleotide
  Target: COL7A1; (-) strand; PAM type: NRG; PAM sequence: CAG
ccactccttcctgcctgttc

SEQ ID NO: 13530 - DNA, 20 bp, Artificial Sequence
  Description of Artificial Sequence: Synthetic oligonucleotide
  Target: COL7A1; (-) strand; PAM type: NRG; PAM sequence: TAG
catcatcttcccctatcaga

SEQ ID NO: 13531 - DNA, 20 bp, Artificial Sequence
  Description of Artificial Sequence: Synthetic oligonucleotide
  Target: COL7A1; (-) strand; PAM type: NRG; PAM sequence: CAG
ctcccatcatcttcccctat

SEQ ID NO: 13532 - DNA, 20 bp, Artificial Sequence
  Description of Artificial Sequence: Synthetic oligonucleotide
  Target: COL7A1; (-) strand; PAM type: NRG; PAM sequence: TAG
atcaaattcccgtctcctgt

SEQ ID NO: 13533 - DNA, 20 bp, Artificial Sequence
  Description of Artificial Sequence: Synthetic oligonucleotide
  Target: COL7A1; (-) strand; PAM type: NRG; PAM sequence: TGG
ccacctccccactcctccac

SEQ ID NO: 13534 - DNA, 20 bp, Artificial Sequence
  Description of Artificial Sequence: Synthetic oligonucleotide
  Target: COL7A1; (-) strand; PAM type: NRG; PAM sequence: CAG
atttacactttctcctccat

SEQ ID NO: 13535 - DNA, 20 bp, Artificial Sequence
  Description of Artificial Sequence: Synthetic oligonucleotide
  Target: COL7A1; (-) strand; PAM type: NRG; PAM sequence: GAG
gctggacccaaatctcctct

SEQ ID NO: 13536 - DNA, 20 bp, Artificial Sequence
  Description of Artificial Sequence: Synthetic oligonucleotide
  Target: COL7A1; (-) strand; PAM type: NRG; PAM sequence: TGG
gacccccatcccttttttgc

SEQ ID NO: 13537 - DNA, 20 bp, Artificial Sequence
  Description of Artificial Sequence: Synthetic oligonucleotide
  Target: COL7A1; (-) strand; PAM type: NRG; PAM sequence: CAG
atatccaccacttcaaccct

SEQ ID NO: 13538 - DNA, 20 bp, Artificial Sequence
  Description of Artificial Sequence: Synthetic oligonucleotide
  Target: COL7A1; (-) strand; PAM type: NRG; PAM sequence: CAG
cttctctcctaagactccca

SEQ ID NO: 13539 - DNA, 20 bp, Artificial Sequence
  Description of Artificial Sequence: Synthetic oligonucleotide
  Target: COL7A1; (-) strand; PAM type: NRG; PAM sequence: AAG
gattcctccgcttctctcct

SEQ ID NO: 13540 - DNA, 20 bp, Artificial Sequence
  Description of Artificial Sequence: Synthetic oligonucleotide
  Target: COL7A1; (-) strand; PAM type: NRG; PAM sequence: CAG
ccttaagccctccccgtatt

SEQ ID NO: 13541 - DNA, 20 bp, Artificial Sequence
  Description of Artificial Sequence: Synthetic oligonucleotide
  Target: COL7A1; (-) strand; PAM type: NRG; PAM sequence: AAG
agtttcagctgtctcccctt

SEQ ID NO: 13542 - DNA, 20 bp, Artificial Sequence
  Description of Artificial Sequence: Synthetic oligonucleotide
  Target: COL7A1; (-) strand; PAM type: NRG; PAM sequence: CAG
cgctgcttcctcttcagttt

SEQ ID NO: 13543 - DNA, 20 bp, Artificial Sequence
  Description of Artificial Sequence: Synthetic oligonucleotide
  Target: COL7A1; (-) strand; PAM type: NRG; PAM sequence: CAG
cagagacgctgcttcctctt

SEQ ID NO: 13544 - DNA, 20 bp, Artificial Sequence
  Description of Artificial Sequence: Synthetic oligonucleotide
  Target: COL7A1; (-) strand; PAM type: NRG; PAM sequence: GAG
tcccactccctcctccctca

SEQ ID NO: 13545 - DNA, 20 bp, Artificial Sequence
  Description of Artificial Sequence: Synthetic oligonucleotide
  Target: COL7A1; (-) strand; PAM type: NRG; PAM sequence: CAG
aatcccactccctcctccct

SEQ ID NO: 13546 - DNA, 20 bp, Artificial Sequence
  Description of Artificial Sequence: Synthetic oligonucleotide
  Target: COL7A1; (-) strand; PAM type: NRG; PAM sequence: CAG
agaactcctgcctccccctt

SEQ ID NO: 13547 - DNA, 20 bp, Artificial Sequence
  Description of Artificial Sequence: Synthetic oligonucleotide
  Target: COL7A1; (-) strand; PAM type: NRG; PAM sequence: CAG
tgcagacccttgcttctccc

SEQ ID NO: 13548 - DNA, 20 bp, Artificial Sequence
  Description of Artificial Sequence: Synthetic oligonucleotide
  Target: COL7A1; (-) strand; PAM type: NRG; PAM sequence: CAG
gacccccatgccttcccttg

SEQ ID NO: 13549 - DNA, 20 bp, Artificial Sequence
  Description of Artificial Sequence: Synthetic oligonucleotide
  Target: COL7A1; (-) strand; PAM type: NRG; PAM sequence: CAG
ctctgcctccattgctcttt

SEQ ID NO: 13550 - DNA, 20 bp, Artificial Sequence
  Description of Artificial Sequence: Synthetic oligonucleotide
  Target: COL7A1; (-) strand; PAM type: NRG; PAM sequence: TGG
caggccctgcccccgtccct

SEQ ID NO: 13551 - DNA, 20 bp, Artificial Sequence
  Description of Artificial Sequence: Synthetic oligonucleotide
  Target: COL7A1; (-) strand; PAM type: NRG; PAM sequence: AGG
catcgtggctcgaacgggtc

SEQ ID NO: 13552 - DNA, 20 bp, Artificial Sequence
  Description of Artificial Sequence: Synthetic oligonucleotide
  Target: COL7A1; (-) strand; PAM type: NRG; PAM sequence: CAG
tcatcgtggctcgaacgggt

SEQ ID NO: 13553 - DNA, 20 bp, Artificial Sequence
  Description of Artificial Sequence: Synthetic oligonucleotide
  Target: COL7A1; (-) strand; PAM type: NRG; PAM sequence: GGG
gcagtcatcgtggctcgaac

SEQ ID NO: 13554 - DNA, 20 bp, Artificial Sequence
  Description of Artificial Sequence: Synthetic oligonucleotide
  Target: COL7A1; (-) strand; PAM type: NRG; PAM sequence: CGG
tgcagtcatcgtggctcgaa

SEQ ID NO: 13555 - DNA, 20 bp, Artificial Sequence
  Description of Artificial Sequence: Synthetic oligonucleotide
  Target: COL7A1; (-) strand; PAM type: NRG; PAM sequence: TGG
gggccctgctgcagtcatcg

SEQ ID NO: 13556 - DNA, 20 bp, Artificial Sequence
  Description of Artificial Sequence: Synthetic oligonucleotide
  Target: COL7A1; (-) strand; PAM type: NRG; PAM sequence: CAG
cagagaggagggccctgctg

SEQ ID NO: 13557 - DNA, 20 bp, Artificial Sequence
  Description of Artificial Sequence: Synthetic oligonucleotide
  Target: COL7A1; (-) strand; PAM type: NRG; PAM sequence: GGG
gtactgcgaggcagagagga

SEQ ID NO: 13558 - DNA, 20 bp, Artificial Sequence
  Description of Artificial Sequence: Synthetic oligonucleotide
  Target: COL7A1; (-) strand; PAM type: NRG; PAM sequence: AGG
ggtactgcgaggcagagagg

SEQ ID NO: 13559 - DNA, 20 bp, Artificial Sequence
  Description of Artificial Sequence: Synthetic oligonucleotide
  Target: COL7A1; (-) strand; PAM type: NRG; PAM sequence: GAG
cggtactgcgaggcagagag

SEQ ID NO: 13560 - DNA, 20 bp, Artificial Sequence
  Description of Artificial Sequence: Synthetic oligonucleotide
  Target: COL7A1; (-) strand; PAM type: NRG; PAM sequence: AGG
gtcggtactgcgaggcagag

SEQ ID NO: 13561 - DNA, 20 bp, Artificial Sequence
  Description of Artificial Sequence: Synthetic oligonucleotide
  Target: COL7A1; (-) strand; PAM type: NRG; PAM sequence: GAG
tgtcggtactgcgaggcaga

SEQ ID NO: 13562 - DNA, 20 bp, Artificial Sequence
  Description of Artificial Sequence: Synthetic oligonucleotide
  Target: COL7A1; (-) strand; PAM type: NRG; PAM sequence: GAG
tgtgtcggtactgcgaggca

SEQ ID NO: 13563 - DNA, 20 bp, Artificial Sequence
  Description of Artificial Sequence: Synthetic oligonucleotide
  Target: COL7A1; (-) strand; PAM type: NRG; PAM sequence: CAG
gctgtgtcggtactgcgagg

SEQ ID NO: 13564 - DNA, 20 bp, Artificial Sequence
  Description of Artificial Sequence: Synthetic oligonucleotide
  Target: COL7A1; (-) strand; PAM type: NRG; PAM sequence: AGG
gtggctgtgtcggtactgcg

SEQ ID NO: 13565 - DNA, 20 bp, Artificial Sequence
  Description of Artificial Sequence: Synthetic oligonucleotide
  Target: COL7A1; (-) strand; PAM type: NRG; PAM sequence: GAG
ggtggctgtgtcggtactgc

SEQ ID NO: 13566 - DNA, 20 bp, Artificial Sequence
  Description of Artificial Sequence: Synthetic oligonucleotide
  Target: COL7A1; (-) strand; PAM type: NRG; PAM sequence: CGG
cacctaccaggtggctgtgt

SEQ ID NO: 13567 - DNA, 20 bp, Artificial Sequence
  Description of Artificial Sequence: Synthetic oligonucleotide
  Target: COL7A1; (-) strand; PAM type: NRG; PAM sequence: TGG
gcctggaaccacctaccagg

SEQ ID NO: 13568 - DNA, 20 bp, Artificial Sequence
  Description of Artificial Sequence: Synthetic oligonucleotide
  Target: COL7A1; (-) strand; PAM type: NRG; PAM sequence: AGG
gcagcctggaaccacctacc

SEQ ID NO: 13569 - DNA, 20 bp, Artificial Sequence
  Description of Artificial Sequence: Synthetic oligonucleotide
  Target: COL7A1; (-) strand; PAM type: NRG; PAM sequence: CAG
tgcagcctggaaccacctac

SEQ ID NO: 13570 - DNA, 20 bp, Artificial Sequence
  Description of Artificial Sequence: Synthetic oligonucleotide
  Target: COL7A1; (-) strand; PAM type: NRG; PAM sequence: TGG
gacatcacagggctgcagcc

SEQ ID NO: 13571 - DNA, 20 bp, Artificial Sequence
  Description of Artificial Sequence: Synthetic oligonucleotide
  Target: COL7A1; (-) strand; PAM type: NRG; PAM sequence: CAG
ccacagacatcacagggctg

SEQ ID NO: 13572 - DNA, 20 bp, Artificial Sequence
  Description of Artificial Sequence: Synthetic oligonucleotide
  Target: COL7A1; (-) strand; PAM type: NRG; PAM sequence: GGG
ctactgccacagacatcaca

SEQ ID NO: 13573 - DNA, 20 bp, Artificial Sequence
  Description of Artificial Sequence: Synthetic oligonucleotide
  Target: COL7A1; (-) strand; PAM type: NRG; PAM sequence: AGG
tctactgccacagacatcac

SEQ ID NO: 13574 - DNA, 20 bp, Artificial Sequence
  Description of Artificial Sequence: Synthetic oligonucleotide
  Target: COL7A1; (-) strand; PAM type: NRG; PAM sequence: CAG
ctctactgccacagacatca

SEQ ID NO: 13575 - DNA, 20 bp, Artificial Sequence
  Description of Artificial Sequence: Synthetic oligonucleotide
  Target: COL7A1; (-) strand; PAM type: NRG; PAM sequence: CAG
gcccccagactctactgcca

SEQ ID NO: 13576 - DNA, 20 bp, Artificial Sequence
  Description of Artificial Sequence: Synthetic oligonucleotide
  Target: COL7A1; (-) strand; PAM type: NRG; PAM sequence: CAG
gtccagccagacactgcccc

SEQ ID NO: 13577 - DNA, 20 bp, Artificial Sequence
  Description of Artificial Sequence: Synthetic oligonucleotide
  Target: COL7A1; (-) strand; PAM type: NRG; PAM sequence: CAG
cctcaggtccggagtccagc

SEQ ID NO: 13578 - DNA, 20 bp, Artificial Sequence
  Description of Artificial Sequence: Synthetic oligonucleotide
  Target: COL7A1; (-) strand; PAM type: NRG; PAM sequence: CAG
ctgacctcaggtccggagtc

SEQ ID NO: 13579 - DNA, 20 bp, Artificial Sequence
  Description of Artificial Sequence: Synthetic oligonucleotide
  Target: COL7A1; (-) strand; PAM type: NRG; PAM sequence: GAG
tccctctgacctcaggtccg

SEQ ID NO: 13580 - DNA, 20 bp, Artificial Sequence
  Description of Artificial Sequence: Synthetic oligonucleotide
  Target: COL7A1; (-) strand; PAM type: NRG; PAM sequence: CGG
tttccctctgacctcaggtc

SEQ ID NO: 13581 - DNA, 20 bp, Artificial Sequence
  Description of Artificial Sequence: Synthetic oligonucleotide
  Target: COL7A1; (-) strand; PAM type: NRG; PAM sequence: AGG
cagcatttccctctgacctc

SEQ ID NO: 13582 - DNA, 20 bp, Artificial Sequence
  Description of Artificial Sequence: Synthetic oligonucleotide
  Target: COL7A1; (-) strand; PAM type: NRG; PAM sequence: CAG
ccagcatttccctctgacct

SEQ ID NO: 13583 - DNA, 20 bp, Artificial Sequence
  Description of Artificial Sequence: Synthetic oligonucleotide
  Target: COL7A1; (-) strand; PAM type: NRG; PAM sequence: CAG
gggacaggcaggagccatgc

SEQ ID NO: 13584 - DNA, 20 bp, Artificial Sequence
  Description of Artificial Sequence: Synthetic oligonucleotide
  Target: COL7A1; (-) strand; PAM type: NRG; PAM sequence: GAG
gtgccagaggggacaggcag

SEQ ID NO: 13585 - DNA, 20 bp, Artificial Sequence
  Description of Artificial Sequence: Synthetic oligonucleotide
  Target: COL7A1; (-) strand; PAM type: NRG; PAM sequence: AGG
gggtgccagaggggacaggc

SEQ ID NO: 13586 - DNA, 20 bp, Artificial Sequence
  Description of Artificial Sequence: Synthetic oligonucleotide
  Target: COL7A1; (-) strand; PAM type: NRG; PAM sequence: CAG
tgggtgccagaggggacagg

SEQ ID NO: 13587 - DNA, 20 bp, Artificial Sequence
  Description of Artificial Sequence: Synthetic oligonucleotide
  Target: COL7A1; (-) strand; PAM type: NRG; PAM sequence: AGG
gtatgggtgccagaggggac

SEQ ID NO: 13588 - DNA, 20 bp, Artificial Sequence
  Description of Artificial Sequence: Synthetic oligonucleotide
  Target: COL7A1; (-) strand; PAM type: NRG; PAM sequence: CAG
ggtatgggtgccagagggga

SEQ ID NO: 13589 - DNA, 20 bp, Artificial Sequence
  Description of Artificial Sequence: Synthetic oligonucleotide
  Target: COL7A1; (-) strand; PAM type: NRG; PAM sequence: GGG
tgagggtatgggtgccagag

SEQ ID NO: 13590 - DNA, 20 bp, Artificial Sequence
  Description of Artificial Sequence: Synthetic oligonucleotide
  Target: COL7A1; (-) strand; PAM type: NRG; PAM sequence: GGG
atgagggtatgggtgccaga

SEQ ID NO: 13591 - DNA, 20 bp, Artificial Sequence
  Description of Artificial Sequence: Synthetic oligonucleotide
  Target: COL7A1; (-) strand; PAM type: NRG; PAM sequence: AGG
aatgagggtatgggtgccag

SEQ ID NO: 13592 - DNA, 20 bp, Artificial Sequence
  Description of Artificial Sequence: Synthetic oligonucleotide
  Target: COL7A1; (-) strand; PAM type: NRG; PAM sequence: GAG
caatgagggtatgggtgcca

SEQ ID NO: 13593 - DNA, 20 bp, Artificial Sequence
  Description of Artificial Sequence: Synthetic oligonucleotide
  Target: COL7A1; (-) strand; PAM type: NRG; PAM sequence: CAG
accaatgagggtatgggtgc

SEQ ID NO: 13594 - DNA, 20 bp, Artificial Sequence
  Description of Artificial Sequence: Synthetic oligonucleotide
  Target: COL7A1; (-) strand; PAM type: NRG; PAM sequence: GGG
aaagggaccaatgagggtat

SEQ ID NO: 13595 - DNA, 20 bp, Artificial Sequence
  Description of Artificial Sequence: Synthetic oligonucleotide
  Target: COL7A1; (-) strand; PAM type: NRG; PAM sequence: TGG
caaagggaccaatgagggta

SEQ ID NO: 13596 - DNA, 20 bp, Artificial Sequence
  Description of Artificial Sequence: Synthetic oligonucleotide
  Target: COL7A1; (-) strand; PAM type: NRG; PAM sequence: GGG
actgccaaagggaccaatga

SEQ ID NO: 13597 - DNA, 20 bp, Artificial Sequence
  Description of Artificial Sequence: Synthetic oligonucleotide
  Target: COL7A1; (-) strand; PAM type: NRG; PAM sequence: AGG
gactgccaaagggaccaatg

SEQ ID NO: 13598 - DNA, 20 bp, Artificial Sequence
  Description of Artificial Sequence: Synthetic oligonucleotide
  Target: COL7A1; (-) strand; PAM type: NRG; PAM sequence: GAG
ggactgccaaagggaccaat

SEQ ID NO: 13599 - DNA, 20 bp, Artificial Sequence
  Description of Artificial Sequence: Synthetic oligonucleotide
  Target: COL7A1; (-) strand; PAM type: NRG; PAM sequence: GGG
tgtgtggggggactgccaaa

SEQ ID NO: 13600 - DNA, 20 bp, Artificial Sequence
  Description of Artificial Sequence: Synthetic oligonucleotide
  Target: COL7A1; (-) strand; PAM type: NRG; PAM sequence: AGG
gtgtgtggggggactgccaa

SEQ ID NO: 13601 - DNA, 20 bp, Artificial Sequence
  Description of Artificial Sequence: Synthetic oligonucleotide
  Target: COL7A1; (-) strand; PAM type: NRG; PAM sequence: AAG
ggtgtgtggggggactgcca

SEQ ID NO: 13602 - DNA, 20 bp, Artificial Sequence
  Description of Artificial Sequence: Synthetic oligonucleotide
  Target: COL7A1; (-) strand; PAM type: NRG; PAM sequence: GGG
gtcagtgtggggtgtgtggg

SEQ ID NO: 13603 - DNA, 20 bp, Artificial Sequence
  Description of Artificial Sequence: Synthetic oligonucleotide
  Target: COL7A1; (-) strand; PAM type: NRG; PAM sequence: GGG
ggtcagtgtggggtgtgtgg

SEQ ID NO: 13604 - DNA, 20 bp, Artificial Sequence
  Description of Artificial Sequence: Synthetic oligonucleotide
  Target: COL7A1; (-) strand; PAM type: NRG; PAM sequence: GGG
tggtcagtgtggggtgtgtg

SEQ ID NO: 13605 - DNA, 20 bp, Artificial Sequence
  Description of Artificial Sequence: Synthetic oligonucleotide
  Target: COL7A1; (-) strand; PAM type: NRG; PAM sequence: GGG
gtggtcagtgtggggtgtgt

SEQ ID NO: 13606 - DNA, 20 bp, Artificial Sequence
  Description of Artificial Sequence: Synthetic oligonucleotide
  Target: COL7A1; (-) strand; PAM type: NRG; PAM sequence: TGG
agtggtcagtgtggggtgtg

SEQ ID NO: 13607 - DNA, 20 bp, Artificial Sequence
  Description of Artificial Sequence: Synthetic oligonucleotide
  Target: COL7A1; (-) strand; PAM type: NRG; PAM sequence: GGG
cacaggcagtggtcagtgtg

SEQ ID NO: 13608 - DNA, 20 bp, Artificial Sequence
  Description of Artificial Sequence: Synthetic oligonucleotide
  Target: COL7A1; (-) strand; PAM type: NRG; PAM sequence: GGG
gcacaggcagtggtcagtgt

SEQ ID NO: 13609 - DNA, 20 bp, Artificial Sequence
  Description of Artificial Sequence: Synthetic oligonucleotide
  Target: COL7A1; (-) strand; PAM type: NRG; PAM sequence: TGG
agcacaggcagtggtcagtg

SEQ ID NO: 13610 - DNA, 20 bp, Artificial Sequence
  Description of Artificial Sequence: Synthetic oligonucleotide
  Target: COL7A1; (-) strand; PAM type: NRG; PAM sequence: CAG
gctggagcacaggcagtggt

SEQ ID NO: 13611 - DNA, 20 bp, Artificial Sequence
  Description of Artificial Sequence: Synthetic oligonucleotide
  Target: COL7A1; (-) strand; PAM type: NRG; PAM sequence: TGG
attagctggagcacaggcag

SEQ ID NO: 13612 - DNA, 20 bp, Artificial Sequence
  Description of Artificial Sequence: Synthetic oligonucleotide
  Target: COL7A1; (-) strand; PAM type: NRG; PAM sequence: CAG
cggattagctggagcacagg

SEQ ID NO: 13613 - DNA, 20 bp, Artificial Sequence
  Description of Artificial Sequence: Synthetic oligonucleotide
  Target: COL7A1; (-) strand; PAM type: NRG; PAM sequence: AGG
tttcggattagctggagcac

SEQ ID NO: 13614 - DNA, 20 bp, Artificial Sequence
  Description of Artificial Sequence: Synthetic oligonucleotide
  Target: COL7A1; (-) strand; PAM type: NRG; PAM sequence: CAG
atttcggattagctggagca

SEQ ID NO: 13615 - DNA, 20 bp, Artificial Sequence
  Description of Artificial Sequence: Synthetic oligonucleotide
  Target: COL7A1; (-) strand; PAM type: NRG; PAM sequence: GAG
agtggatttcggattagctg

SEQ ID NO: 13616 - DNA, 20 bp, Artificial Sequence
  Description of Artificial Sequence: Synthetic oligonucleotide
  Target: COL7A1; (-) strand; PAM type: NRG; PAM sequence: TGG
ccagtggatttcggattagc

SEQ ID NO: 13617 - DNA, 20 bp, Artificial Sequence
  Description of Artificial Sequence: Synthetic oligonucleotide
  Target: COL7A1; (-) strand; PAM type: NRG; PAM sequence: TAG
ggagccagtggatttcggat

SEQ ID NO: 13618 - DNA, 20 bp, Artificial Sequence
  Description of Artificial Sequence: Synthetic oligonucleotide
  Target: COL7A1; (-) strand; PAM type: NRG; PAM sequence: CGG
tccctggagccagtggattt

SEQ ID NO: 13619 - DNA, 20 bp, Artificial Sequence
  Description of Artificial Sequence: Synthetic oligonucleotide
  Target: COL7A1; (-) strand; PAM type: NRG; PAM sequence: TGG
ggacccgtccctggagccag

SEQ ID NO: 13620 - DNA, 20 bp, Artificial Sequence
  Description of Artificial Sequence: Synthetic oligonucleotide
  Target: COL7A1; (-) strand; PAM type: NRG; PAM sequence: CAG
tggggacccgtccctggagc

SEQ ID NO: 13621 - DNA, 20 bp, Artificial Sequence
  Description of Artificial Sequence: Synthetic oligonucleotide
  Target: COL7A1; (-) strand; PAM type: NRG; PAM sequence: GAG
ggcctggggacccgtccctg

SEQ ID NO: 13622 - DNA, 20 bp, Artificial Sequence
  Description of Artificial Sequence: Synthetic oligonucleotide
  Target: COL7A1; (-) strand; PAM type: NRG; PAM sequence: TGG
gtggcctggggacccgtccc

SEQ ID NO: 13623 - DNA, 20 bp, Artificial Sequence
  Description of Artificial Sequence: Synthetic oligonucleotide
  Target: COL7A1; (-) strand; PAM type: NRG; PAM sequence: GGG
acgcgagtgagggtggcctg

SEQ ID NO: 13624 - DNA, 20 bp, Artificial Sequence
  Description of Artificial Sequence: Synthetic oligonucleotide
  Target: COL7A1; (-) strand; PAM type: NRG; PAM sequence: GGG
aacgcgagtgagggtggcct

SEQ ID NO: 13625 - DNA, 20 bp, Artificial Sequence
  Description of Artificial Sequence: Synthetic oligonucleotide
  Target: COL7A1; (-) strand; PAM type: NRG; PAM sequence: TGG
caacgcgagtgagggtggcc

SEQ ID NO: 13626 - DNA, 20 bp, Artificial Sequence
  Description of Artificial Sequence: Synthetic oligonucleotide
  Target: COL7A1; (-) strand; PAM type: NRG; PAM sequence: TGG
agatgcaacgcgagtgaggg

SEQ ID NO: 13627 - DNA, 20 bp, Artificial Sequence
  Description of Artificial Sequence: Synthetic oligonucleotide
  Target: COL7A1; (-) strand; PAM type: NRG; PAM sequence: GGG
gtcagatgcaacgcgagtga

SEQ ID NO: 13628 - DNA, 20 bp, Artificial Sequence
  Description of Artificial Sequence: Synthetic oligonucleotide
  Target: COL7A1; (-) strand; PAM type: NRG; PAM sequence: AGG
tgtcagatgcaacgcgagtg

SEQ ID NO: 13629 - DNA, 20 bp, Artificial Sequence
  Description of Artificial Sequence: Synthetic oligonucleotide
  Target: COL7A1; (-) strand; PAM type: NRG; PAM sequence: GAG
gtgtcagatgcaacgcgagt

SEQ ID NO: 13630 - DNA, 20 bp, Artificial Sequence
  Description of Artificial Sequence: Synthetic oligonucleotide
  Target: COL7A1; (-) strand; PAM type: NRG; PAM sequence: GAG
tgtggtgtcagatgcaacgc

SEQ ID NO: 13631 - DNA, 20 bp, Artificial Sequence
  Description of Artificial Sequence: Synthetic oligonucleotide
  Target: COL7A1; (-) strand; PAM type: NRG; PAM sequence: CAG
agggctgcgggttgtggtgt

SEQ ID NO: 13632 - DNA, 20 bp, Artificial Sequence
  Description of Artificial Sequence: Synthetic oligonucleotide
  Target: COL7A1; (-) strand; PAM type: NRG; PAM sequence: TGG
tgttccagggctgcgggttg

SEQ ID NO: 13633 - DNA, 20 bp, Artificial Sequence
  Description of Artificial Sequence: Synthetic oligonucleotide
  Target: COL7A1; (-) strand; PAM type: NRG; PAM sequence: GGG
acttgctgttccagggctgc

SEQ ID NO: 13634 - DNA, 20 bp, Artificial Sequence
  Description of Artificial Sequence: Synthetic oligonucleotide
  Target: COL7A1; (-) strand; PAM type: NRG; PAM sequence: CGG
cacttgctgttccagggctg

SEQ ID NO: 13635 - DNA, 20 bp, Artificial Sequence
  Description of Artificial Sequence: Synthetic oligonucleotide
  Target: COL7A1; (-) strand; PAM type: NRG; PAM sequence: GGG
aaactccacttgctgttcca

SEQ ID NO: 13636 - DNA, 20 bp, Artificial Sequence
  Description of Artificial Sequence: Synthetic oligonucleotide
  Target: COL7A1; (-) strand; PAM type: NRG; PAM sequence: AGG
gaaactccacttgctgttcc

SEQ ID NO: 13637 - DNA, 20 bp, Artificial Sequence
  Description of Artificial Sequence: Synthetic oligonucleotide
  Target: COL7A1; (-) strand; PAM type: NRG; PAM sequence: CAG
ggaaactccacttgctgttc

SEQ ID NO: 13638 - DNA, 20 bp, Artificial Sequence
  Description of Artificial Sequence: Synthetic oligonucleotide
  Target: COL7A1; (-) strand; PAM type: NRG; PAM sequence: CGG
ctgtctgtaactcctagagc

SEQ ID NO: 13639 - DNA, 20 bp, Artificial Sequence
  Description of Artificial Sequence: Synthetic oligonucleotide
  Target: COL7A1; (-) strand; PAM type: NRG; PAM sequence: GAG
acttctgtctgtaactccta

SEQ ID NO: 13640 - DNA, 20 bp, Artificial Sequence
  Description of Artificial Sequence: Synthetic oligonucleotide
  Target: COL7A1; (-) strand; PAM type: NRG; PAM sequence: TAG
tgacttctgtctgtaactcc

SEQ ID NO: 13641 - DNA, 20 bp, Artificial Sequence
  Description of Artificial Sequence: Synthetic oligonucleotide
  Target: COL7A1; (-) strand; PAM type: NRG; PAM sequence: TGG
tgcctgcctcactctggtcc

SEQ ID NO: 13642 - DNA, 20 bp, Artificial Sequence
  Description of Artificial Sequence: Synthetic oligonucleotide
  Target: COL7A1; (-) strand; PAM type: NRG; PAM sequence: TGG
gacagctgcctgcctcactc

SEQ ID NO: 13643 - DNA, 20 bp, Artificial Sequence
  Description of Artificial Sequence: Synthetic oligonucleotide
  Target: COL7A1; (-) strand; PAM type: NRG; PAM sequence: CAG
tgcaggaggcttgtggagga

SEQ ID NO: 13644 - DNA, 20 bp, Artificial Sequence
  Description of Artificial Sequence: Synthetic oligonucleotide
  Target: COL7A1; (-) strand; PAM type: NRG; PAM sequence: AGG
gtactgcaggaggcttgtgg

SEQ ID NO: 13645 - DNA, 20 bp, Artificial Sequence
  Description of Artificial Sequence: Synthetic oligonucleotide
  Target: COL7A1; (-) strand; PAM type: NRG; PAM sequence: GAG
agtactgcaggaggcttgtg

SEQ ID NO: 13646 - DNA, 20 bp, Artificial Sequence
  Description of Artificial Sequence: Synthetic oligonucleotide
  Target: COL7A1; (-) strand; PAM type: NRG; PAM sequence: TGG
tgagtactgcaggaggcttg

SEQ ID NO: 13647 - DNA, 20 bp, Artificial Sequence
  Description of Artificial Sequence: Synthetic oligonucleotide
  Target: COL7A1; (-) strand; PAM type: NRG; PAM sequence: AGG
gccggggtgagtactgcagg

SEQ ID NO: 13648 - DNA, 20 bp, Artificial Sequence
  Description of Artificial Sequence: Synthetic oligonucleotide
  Target: COL7A1; (-) strand; PAM type: NRG; PAM sequence: GAG
cgccggggtgagtactgcag

SEQ ID NO: 13649 - DNA, 20 bp, Artificial Sequence
  Description of Artificial Sequence: Synthetic oligonucleotide
  Target: COL7A1; (-) strand; PAM type: NRG; PAM sequence: AGG
tccgccggggtgagtactgc

SEQ ID NO: 13650 - DNA, 20 bp, Artificial Sequence
  Description of Artificial Sequence: Synthetic oligonucleotide
  Target: COL7A1; (-) strand; PAM type: NRG; PAM sequence: CAG
gtccgccggggtgagtactg

SEQ ID NO: 13651 - DNA, 20 bp, Artificial Sequence
  Description of Artificial Sequence: Synthetic oligonucleotide
  Target: COL7A1; (-) strand; PAM type: NRG; PAM sequence: GAG
tcctcactgtccgccggggt

SEQ ID NO: 13652 - DNA, 20 bp, Artificial Sequence
  Description of Artificial Sequence: Synthetic oligonucleotide
  Target: COL7A1; (-) strand; PAM type: NRG; PAM sequence: GGG
agtgtcctcactgtccgccg

SEQ ID NO: 13653 - DNA, 20 bp, Artificial Sequence
  Description of Artificial Sequence: Synthetic oligonucleotide
  Target: COL7A1; (-) strand; PAM type: NRG; PAM sequence: GGG
cagtgtcctcactgtccgcc

SEQ ID NO: 13654 - DNA, 20 bp, Artificial Sequence
  Description of Artificial Sequence: Synthetic oligonucleotide
  Target: COL7A1; (-) strand; PAM type: NRG; PAM sequence: CGG
ccagtgtcctcactgtccgc

SEQ ID NO: 13655 - DNA, 20 bp, Artificial Sequence
  Description of Artificial Sequence: Synthetic oligonucleotide
  Target: COL7A1; (-) strand; PAM type: NRG; PAM sequence: CAG
ggtccccgtgagggcagtgc

SEQ ID NO: 13656 - DNA, 20 bp, Artificial Sequence
  Description of Artificial Sequence: Synthetic oligonucleotide
  Target: COL7A1; (-) strand; PAM type: NRG; PAM sequence: CAG
cgagtgggtccccgtgaggg

SEQ ID NO: 13657 - DNA, 20 bp, Artificial Sequence
  Description of Artificial Sequence: Synthetic oligonucleotide
  Target: COL7A1; (-) strand; PAM type: NRG; PAM sequence: GGG
gctcgagtgggtccccgtga

SEQ ID NO: 13658 - DNA, 20 bp, Artificial Sequence
  Description of Artificial Sequence: Synthetic oligonucleotide
  Target: COL7A1; (-) strand; PAM type: NRG; PAM sequence: AGG
tgctcgagtgggtccccgtg

SEQ ID NO: 13659 - DNA, 20 bp, Artificial Sequence
  Description of Artificial Sequence: Synthetic oligonucleotide
  Target: COL7A1; (-) strand; PAM type: NRG; PAM sequence: GAG
ctgctcgagtgggtccccgt

SEQ ID NO: 13660 - DNA, 20 bp, Artificial Sequence
  Description of Artificial Sequence: Synthetic oligonucleotide
  Target: COL7A1; (-) strand; PAM type: NRG; PAM sequence: GGG
gtgcgggtgtctgctcgagt

SEQ ID NO: 13661 - DNA, 20 bp, Artificial Sequence
  Description of Artificial Sequence: Synthetic oligonucleotide
  Target: COL7A1; (-) strand; PAM type: NRG; PAM sequence: TGG
tgtgcgggtgtctgctcgag

SEQ ID NO: 13662 - DNA, 20 bp, Artificial Sequence
  Description of Artificial Sequence: Synthetic oligonucleotide
  Target: COL7A1; (-) strand; PAM type: NRG; PAM sequence: GAG
cactgtgcgggtgtctgctc

SEQ ID NO: 13663 - DNA, 20 bp, Artificial Sequence
  Description of Artificial Sequence: Synthetic oligonucleotide
  Target: COL7A1; (-) strand; PAM type: NRG; PAM sequence: GGG
tgggcttagctacactgtgc

SEQ ID NO: 13664 - DNA, 20 bp, Artificial Sequence
  Description of Artificial Sequence: Synthetic oligonucleotide
  Target: COL7A1; (-) strand; PAM type: NRG; PAM sequence: CGG
ctgggcttagctacactgtg

SEQ ID NO: 13665 - DNA, 20 bp, Artificial Sequence
  Description of Artificial Sequence: Synthetic oligonucleotide
  Target: COL7A1; (-) strand; PAM type: NRG; PAM sequence: TAG
gatgacgttcaggctgggct

SEQ ID NO: 13666 - DNA, 20 bp, Artificial Sequence
  Description of Artificial Sequence: Synthetic oligonucleotide
  Target: COL7A1; (-) strand; PAM type: NRG; PAM sequence: GGG
acttggatgacgttcaggct

SEQ ID NO: 13667 - DNA, 20 bp, Artificial Sequence
  Description of Artificial Sequence: Synthetic oligonucleotide
  Target: COL7A1; (-) strand; PAM type: NRG; PAM sequence: TGG
gacttggatgacgttcaggc

SEQ ID NO: 13668 - DNA, 20 bp, Artificial Sequence
  Description of Artificial Sequence: Synthetic oligonucleotide
  Target: COL7A1; (-) strand; PAM type: NRG; PAM sequence: AGG
attcgacttggatgacgttc

SEQ ID NO: 13669 - DNA, 20 bp, Artificial Sequence
  Description of Artificial Sequence: Synthetic oligonucleotide
  Target: COL7A1; (-) strand; PAM type: NRG; PAM sequence: CAG
cattcgacttggatgacgtt

SEQ ID NO: 13670 - DNA, 20 bp, Artificial Sequence
  Description of Artificial Sequence: Synthetic oligonucleotide
  Target: COL7A1; (-) strand; PAM type: NRG; PAM sequence: TGG
gagtcagacagcattcgact

SEQ ID NO: 13671 - DNA, 20 bp, Artificial Sequence
  Description of Artificial Sequence: Synthetic oligonucleotide
  Target: COL7A1; (-) strand; PAM type: NRG; PAM sequence: CAG
ggtgcttcctgggagtcaga

SEQ ID NO: 13672 - DNA, 20 bp, Artificial Sequence
  Description of Artificial Sequence: Synthetic oligonucleotide
  Target: COL7A1; (-) strand; PAM type: NRG; PAM sequence: CAG
ccctggtgcttcctgggagt

SEQ ID NO: 13673 - DNA, 20 bp, Artificial Sequence
  Description of Artificial Sequence: Synthetic oligonucleotide
  Target: COL7A1; (-) strand; PAM type: NRG; PAM sequence: GAG
cggaccctggtgcttcctgg

SEQ ID NO: 13674 - DNA, 20 bp, Artificial Sequence
  Description of Artificial Sequence: Synthetic oligonucleotide
  Target: COL7A1; (-) strand; PAM type: NRG; PAM sequence: GGG
agcggaccctggtgcttcct

SEQ ID NO: 13675 - DNA, 20 bp, Artificial Sequence
  Description of Artificial Sequence: Synthetic oligonucleotide
  Target: COL7A1; (-) strand; PAM type: NRG; PAM sequence: TGG
gagcggaccctggtgcttcc

SEQ ID NO: 13676 - DNA, 20 bp, Artificial Sequence
  Description of Artificial Sequence: Synthetic oligonucleotide
  Target: COL7A1; (-) strand; PAM type: NRG; PAM sequence: TGG
cttaggggttgagcggaccc

SEQ ID NO: 13677 - DNA, 20 bp, Artificial Sequence
  Description of Artificial Sequence: Synthetic oligonucleotide
  Target: COL7A1; (-) strand; PAM type: NRG; PAM sequence: CGG
cttctctcttaggggttgag

SEQ ID NO: 13678 - DNA, 20 bp, Artificial Sequence
  Description of Artificial Sequence: Synthetic oligonucleotide
  Target: COL7A1; (-) strand; PAM type: NRG; PAM sequence: GAG
tgacttctctcttaggggtt

SEQ ID NO: 13679 - DNA, 20 bp, Artificial Sequence
  Description of Artificial Sequence: Synthetic oligonucleotide
  Target: COL7A1; (-) strand; PAM type: NRG; PAM sequence: GGG
taccctgacttctctcttag

SEQ ID NO: 13680 - DNA, 20 bp, Artificial Sequence
  Description of Artificial Sequence: Synthetic oligonucleotide
  Target: COL7A1; (-) strand; PAM type: NRG; PAM sequence: GGG
ctaccctgacttctctctta

SEQ ID NO: 13681 - DNA, 20 bp, Artificial Sequence
  Description of Artificial Sequence: Synthetic oligonucleotide
  Target: COL7A1; (-) strand; PAM type: NRG; PAM sequence: AGG
cctaccctgacttctctctt

SEQ ID NO: 13682 - DNA, 20 bp, Artificial Sequence
  Description of Artificial Sequence: Synthetic oligonucleotide
  Target: COL7A1; (-) strand; PAM type: NRG; PAM sequence: TAG
acctaccctgacttctctct

SEQ ID NO: 13683 - DNA, 20 bp, Artificial Sequence
  Description of Artificial Sequence: Synthetic oligonucleotide
  Target: COL7A1; (-) strand; PAM type: NRG; PAM sequence: TGG
accccacatccccaccccca

SEQ ID NO: 13684 - DNA, 20 bp, Artificial Sequence
  Description of Artificial Sequence: Synthetic oligonucleotide
  Target: COL7A1; (-) strand; PAM type: NRG; PAM sequence: TGG
tcagccatatcccagctctc

SEQ ID NO: 13685 - DNA, 20 bp, Artificial Sequence
  Description of Artificial Sequence: Synthetic oligonucleotide
  Target: COL7A1; (-) strand; PAM type: NRG; PAM sequence: CAG
cacttttttcagccatatcc

SEQ ID NO: 13686 - DNA, 20 bp, Artificial Sequence
  Description of Artificial Sequence: Synthetic oligonucleotide
  Target: COL7A1; (-) strand; PAM type: NRG; PAM sequence: CAG
tgtcttgcactcactttttt

SEQ ID NO: 13687 - DNA, 20 bp, Artificial Sequence
  Description of Artificial Sequence: Synthetic oligonucleotide
  Target: COL7A1; (-) strand; PAM type: NRG; PAM sequence: TGG
ccagtgtccctgaccatcac

SEQ ID NO: 13688 - DNA, 20 bp, Artificial Sequence
  Description of Artificial Sequence: Synthetic oligonucleotide
  Target: COL7A1; (-) strand; PAM type: NRG; PAM sequence: CAG
tcccacagactcctgtcctc

SEQ ID NO: 13689 - DNA, 20 bp, Artificial Sequence
  Description of Artificial Sequence: Synthetic oligonucleotide
  Target: COL7A1; (-) strand; PAM type: NRG; PAM sequence: CAG
tcctacatgctaagatccca

SEQ ID NO: 13690 - DNA, 20 bp, Artificial Sequence
  Description of Artificial Sequence: Synthetic oligonucleotide
  Target: COL7A1; (-) strand; PAM type: NRG; PAM sequence: AAG
ctcctgtcatcctacatgct

SEQ ID NO: 13691 - DNA, 20 bp, Artificial Sequence
  Description of Artificial Sequence: Synthetic oligonucleotide
  Target: COL7A1; (-) strand; PAM type: NRG; PAM sequence: CAG
tggctcatcagttctcactg

SEQ ID NO: 13692 - DNA, 20 bp, Artificial Sequence
  Description of Artificial Sequence: Synthetic oligonucleotide
  Target: COL7A1; (-) strand; PAM type: NRG; PAM sequence: CAG
agtgtctgtcaatggctcat

SEQ ID NO: 13693 - DNA, 20 bp, Artificial Sequence
  Description of Artificial Sequence: Synthetic oligonucleotide
  Target: COL7A1; (-) strand; PAM type: NRG; PAM sequence: TGG
cccacatcagtgtctgtcaa

SEQ ID NO: 13694 - DNA, 20 bp, Artificial Sequence
  Description of Artificial Sequence: Synthetic oligonucleotide
  Target: COL7A1; (-) strand; PAM type: NRG; PAM sequence: CAG
tgacctctgccatcccacat

SEQ ID NO: 13695 - DNA, 20 bp, Artificial Sequence
  Description of Artificial Sequence: Synthetic oligonucleotide
  Target: COL7A1; (-) strand; PAM type: NRG; PAM sequence: CAG
tctcattgcatgtccccatc

SEQ ID NO: 13696 - DNA, 20 bp, Artificial Sequence
  Description of Artificial Sequence: Synthetic oligonucleotide
  Target: COL7A1; (-) strand; PAM type: NRG; PAM sequence: TGG
ctgtctttctgttaccctag

SEQ ID NO: 13697 - DNA, 20 bp, Artificial Sequence
  Description of Artificial Sequence: Synthetic oligonucleotide
  Target: COL7A1; (-) strand; PAM type: NRG; PAM sequence: TAG
cacctgtctttctgttaccc

SEQ ID NO: 13698 - DNA, 20 bp, Artificial Sequence
  Description of Artificial Sequence: Synthetic oligonucleotide
  Target: COL7A1; (-) strand; PAM type: NRG; PAM sequence: AAG
tttcacctctgcacagccac

SEQ ID NO: 13699 - DNA, 20 bp, Artificial Sequence
  Description of Artificial Sequence: Synthetic oligonucleotide
  Target: COL7A1; (-) strand; PAM type: NRG; PAM sequence: CAG
ccacggctttcacctctgca

SEQ ID NO: 13700 - DNA, 20 bp, Artificial Sequence
  Description of Artificial Sequence: Synthetic oligonucleotide
  Target: COL7A1; (-) strand; PAM type: NRG; PAM sequence: CGG
cctgccccacaccccatcca

SEQ ID NO: 13701 - DNA, 20 bp, Artificial Sequence
  Description of Artificial Sequence: Synthetic oligonucleotide
  Target: COL7A1; (-) strand; PAM type: NRG; PAM sequence: GGG
tgagccctgaactgtcaaca

SEQ ID NO: 13702 - DNA, 20 bp, Artificial Sequence
  Description of Artificial Sequence: Synthetic oligonucleotide
  Target: COL7A1; (-) strand; PAM type: NRG; PAM sequence: AGG
ctgagccctgaactgtcaac

SEQ ID NO: 13703 - DNA, 20 bp, Artificial Sequence
  Description of Artificial Sequence: Synthetic oligonucleotide
  Target: COL7A1; (-) strand; PAM type: NRG; PAM sequence: CAG
actgagccctgaactgtcaa

SEQ ID NO: 13704 - DNA, 20 bp, Artificial Sequence
  Description of Artificial Sequence: Synthetic oligonucleotide
  Target: COL7A1; (-) strand; PAM type: NRG; PAM sequence: GAG
ctgcttcccaagatggcact

SEQ ID NO: 13705 - DNA, 20 bp, Artificial Sequence
  Description of Artificial Sequence: Synthetic oligonucleotide
  Target: COL7A1; (-) strand; PAM type: NRG; PAM sequence: TGG
tatccatctgcttcccaaga

SEQ ID NO: 13706 - DNA, 20 bp, Artificial Sequence
  Description of Artificial Sequence: Synthetic oligonucleotide
  Target: COL7A1; (-) strand; PAM type: NRG; PAM sequence: AAG
tcgttatccatctgcttccc

SEQ ID NO: 13707 - DNA, 20 bp, Artificial Sequence
  Description of Artificial Sequence: Synthetic oligonucleotide
  Target: COL7A1; (-) strand; PAM type: NRG; PAM sequence: TAG
cttccacacctgggtcccta

SEQ ID NO: 13708 - DNA, 20 bp, Artificial Sequence
  Description of Artificial Sequence: Synthetic oligonucleotide
  Target: COL7A1; (-) strand; PAM type: NRG; PAM sequence: GGG
agccctctccttccacacct

SEQ ID NO: 13709 - DNA, 20 bp, Artificial Sequence
  Description of Artificial Sequence: Synthetic oligonucleotide
  Target: COL7A1; (-) strand; PAM type: NRG; PAM sequence: TGG
cagccctctccttccacacc

SEQ ID NO: 13710 - DNA, 20 bp, Artificial Sequence
  Description of Artificial Sequence: Synthetic oligonucleotide
  Target: COL7A1; (-) strand; PAM type: NRG; PAM sequence: CAG
gaggggtctgagtgtacctc

SEQ ID NO: 13711 - DNA, 20 bp, Artificial Sequence
  Description of Artificial Sequence: Synthetic oligonucleotide
  Target: COL7A1; (-) strand; PAM type: NRG; PAM sequence: GAG
agttccagcctgaggggtct

SEQ ID NO: 13712 - DNA, 20 bp, Artificial Sequence
  Description of Artificial Sequence: Synthetic oligonucleotide
  Target: COL7A1; (-) strand; PAM type: NRG; PAM sequence: GGG
cactgaagttccagcctgag

SEQ ID NO: 13713 - DNA, 20 bp, Artificial Sequence
  Description of Artificial Sequence: Synthetic oligonucleotide
  Target: COL7A1; (-) strand; PAM type: NRG; PAM sequence: GGG
acactgaagttccagcctga

SEQ ID NO: 13714 - DNA, 20 bp, Artificial Sequence
  Description of Artificial Sequence: Synthetic oligonucleotide
  Target: COL7A1; (-) strand; PAM type: NRG; PAM sequence: AGG
cacactgaagttccagcctg

SEQ ID NO: 13715 - DNA, 20 bp, Artificial Sequence
  Description of Artificial Sequence: Synthetic oligonucleotide
  Target: COL7A1; (-) strand; PAM type: NRG; PAM sequence: GAG
acacactgaagttccagcct

SEQ ID NO: 13716 - DNA, 20 bp, Artificial Sequence
  Description of Artificial Sequence: Synthetic oligonucleotide
  Target: COL7A1; (-) strand; PAM type: NRG; PAM sequence: CAG
caccacacacactgaagttc

SEQ ID NO: 13717 - DNA, 20 bp, Artificial Sequence
  Description of Artificial Sequence: Synthetic oligonucleotide
  Target: COL7A1; (-) strand; PAM type: NRG; PAM sequence: AAG
cacccccaccacacacactg

SEQ ID NO: 13718 - DNA, 20 bp, Artificial Sequence
  Description of Artificial Sequence: Synthetic oligonucleotide
  Target: COL7A1; (-) strand; PAM type: NRG; PAM sequence: CAG
cagggtgaggtggacgcagc

SEQ ID NO: 13719 - DNA, 20 bp, Artificial Sequence
  Description of Artificial Sequence: Synthetic oligonucleotide
  Target: COL7A1; (-) strand; PAM type: NRG; PAM sequence: CAG
cacccagggtgaggtggacg

SEQ ID NO: 13720 - DNA, 20 bp, Artificial Sequence
  Description of Artificial Sequence: Synthetic oligonucleotide
  Target: COL7A1; (-) strand; PAM type: NRG; PAM sequence: TGG
gcgcagcacccagggtgagg

SEQ ID NO: 13721 - DNA, 20 bp, Artificial Sequence
  Description of Artificial Sequence: Synthetic oligonucleotide
  Target: COL7A1; (-) strand; PAM type: NRG; PAM sequence: AGG
tgtgcgcagcacccagggtg

SEQ ID NO: 13722 - DNA, 20 bp, Artificial Sequence
  Description of Artificial Sequence: Synthetic oligonucleotide
  Target: COL7A1; (-) strand; PAM type: NRG; PAM sequence: GAG
ttgtgcgcagcacccagggt

SEQ ID NO: 13723 - DNA, 20 bp, Artificial Sequence
  Description of Artificial Sequence: Synthetic oligonucleotide
  Target: COL7A1; (-) strand; PAM type: NRG; PAM sequence: GGG
atcattgtgcgcagcaccca

SEQ ID NO: 13724 - DNA, 20 bp, Artificial Sequence
  Description of Artificial Sequence: Synthetic oligonucleotide
  Target: COL7A1; (-) strand; PAM type: NRG; PAM sequence: AGG
catcattgtgcgcagcaccc

SEQ ID NO: 13725 - DNA, 20 bp, Artificial Sequence
  Description of Artificial Sequence: Synthetic oligonucleotide
  Target: COL7A1; (-) strand; PAM type: NRG; PAM sequence: CAG
gcatcattgtgcgcagcacc

SEQ ID NO: 13726 - DNA, 20 bp, Artificial Sequence
  Description of Artificial Sequence: Synthetic oligonucleotide
  Target: COL7A1; (-) strand; PAM type: NRG; PAM sequence: CAG
cagtaccgcatcattgtgcg

SEQ ID NO: 13727 - DNA, 20 bp, Artificial Sequence
  Description of Artificial Sequence: Synthetic oligonucleotide
  Target: COL7A1; (-) strand; PAM type: NRG; PAM sequence: CAG
gcccagtccctggtgccacc

SEQ ID NO: 13728 - DNA, 20 bp, Artificial Sequence
  Description of Artificial Sequence: Synthetic oligonucleotide
  Target: COL7A1; (-) strand; PAM type: NRG; PAM sequence: TGG
gtgtcctggagcccagtccc

SEQ ID NO: 13729 - DNA, 20 bp, Artificial Sequence
  Description of Artificial Sequence: Synthetic oligonucleotide
  Target: COL7A1; (-) strand; PAM type: NRG; PAM sequence: CAG
ggtgcgagtgtcctggagcc

SEQ ID NO: 13730 - DNA, 20 bp, Artificial Sequence
  Description of Artificial Sequence: Synthetic oligonucleotide
  Target: COL7A1; (-) strand; PAM type: NRG; PAM sequence: GAG
cagcgggtgcgagtgtcctg

SEQ ID NO: 13731 - DNA, 20 bp, Artificial Sequence
  Description of Artificial Sequence: Synthetic oligonucleotide
  Target: COL7A1; (-) strand; PAM type: NRG; PAM sequence: TGG
ggcagcgggtgcgagtgtcc

SEQ ID NO: 13732 - DNA, 20 bp, Artificial Sequence
  Description of Artificial Sequence: Synthetic oligonucleotide
  Target: COL7A1; (-) strand; PAM type: NRG; PAM sequence: GAG
gctgcccgggcagcgggtgc

SEQ ID NO: 13733 - DNA, 20 bp, Artificial Sequence
  Description of Artificial Sequence: Synthetic oligonucleotide
  Target: COL7A1; (-) strand; PAM type: NRG; PAM sequence: GGG
caccgagctgcccgggcagc

SEQ ID NO: 13734 - DNA, 20 bp, Artificial Sequence
  Description of Artificial Sequence: Synthetic oligonucleotide
  Target: COL7A1; (-) strand; PAM type: NRG; PAM sequence: CGG
ccaccgagctgcccgggcag

SEQ ID NO: 13735 - DNA, 20 bp, Artificial Sequence
  Description of Artificial Sequence: Synthetic oligonucleotide
  Target: COL7A1; (-) strand; PAM type: NRG; PAM sequence: CAG
aagccaccgagctgcccggg

SEQ ID NO: 13736 - DNA, 20 bp, Artificial Sequence
  Description of Artificial Sequence: Synthetic oligonucleotide
  Target: COL7A1; (-) strand; PAM type: NRG; PAM sequence: GGG
tgcaagccaccgagctgccc

SEQ ID NO: 13737 - DNA, 20 bp, Artificial Sequence
  Description of Artificial Sequence: Synthetic oligonucleotide
  Target: COL7A1; (-) strand; PAM type: NRG; PAM sequence: CGG
ctgcaagccaccgagctgcc

SEQ ID NO: 13738 - DNA, 20 bp, Artificial Sequence
  Description of Artificial Sequence: Synthetic oligonucleotide
  Target: COL7A1; (-) strand; PAM type: NRG; PAM sequence: GAG
taacagacctgcaagccacc

SEQ ID NO: 13739 - DNA, 20 bp, Artificial Sequence
  Description of Artificial Sequence: Synthetic oligonucleotide
  Target: COL7A1; (-) strand; PAM type: NRG; PAM sequence: AAG
gagccctgtaacagacctgc

SEQ ID NO: 13740 - DNA, 20 bp, Artificial Sequence
  Description of Artificial Sequence: Synthetic oligonucleotide
  Target: COL7A1; (-) strand; PAM type: NRG; PAM sequence: CAG
gctgcctgtgagccctgtaa

SEQ ID NO: 13741 - DNA, 20 bp, Artificial Sequence
  Description of Artificial Sequence: Synthetic oligonucleotide
  Target: COL7A1; (-) strand; PAM type: NRG; PAM sequence: GAG
acaggaccagagctgcctgt

SEQ ID NO: 13742 - DNA, 20 bp, Artificial Sequence
  Description of Artificial Sequence: Synthetic oligonucleotide
  Target: COL7A1; (-) strand; PAM type: NRG; PAM sequence: GAG
tgtgctctccaacaggacca

SEQ ID NO: 13743 - DNA, 20 bp, Artificial Sequence
  Description of Artificial Sequence: Synthetic oligonucleotide
  Target: COL7A1; (-) strand; PAM type: NRG; PAM sequence: CAG
gctgtgctctccaacaggac

SEQ ID NO: 13744 - DNA, 20 bp, Artificial Sequence
  Description of Artificial Sequence: Synthetic oligonucleotide
  Target: COL7A1; (-) strand; PAM type: NRG; PAM sequence: AGG
tctatgctgtgctctccaac

SEQ ID NO: 13745 - DNA, 20 bp, Artificial Sequence
  Description of Artificial Sequence: Synthetic oligonucleotide
  Target: COL7A1; (-) strand; PAM type: NRG; PAM sequence: CAG
ctctatgctgtgctctccaa

SEQ ID NO: 13746 - DNA, 20 bp, Artificial Sequence
  Description of Artificial Sequence: Synthetic oligonucleotide
  Target: COL7A1; (-) strand; PAM type: NRG; PAM sequence: AGG
gggggaggtgtcggagcccc

SEQ ID NO: 13747 - DNA, 20 bp, Artificial Sequence
  Description of Artificial Sequence: Synthetic oligonucleotide
  Target: COL7A1; (-) strand; PAM type: NRG; PAM sequence: CAG
tgggggaggtgtcggagccc

SEQ ID NO: 13748 - DNA, 20 bp, Artificial Sequence
  Description of Artificial Sequence: Synthetic oligonucleotide
  Target: COL7A1; (-) strand; PAM type: NRG; PAM sequence: GAG
agtgagtgggggaggtgtcg

SEQ ID NO: 13749 - DNA, 20 bp, Artificial Sequence
  Description of Artificial Sequence: Synthetic oligonucleotide
  Target: COL7A1; (-) strand; PAM type: NRG; PAM sequence: CGG
ccagtgagtgggggaggtgt

SEQ ID NO: 13750 - DNA, 20 bp, Artificial Sequence
  Description of Artificial Sequence: Synthetic oligonucleotide
  Target: COL7A1; (-) strand; PAM type: NRG; PAM sequence: AGG
gctgggccagtgagtggggg

SEQ ID NO: 13751 - DNA, 20 bp, Artificial Sequence
  Description of Artificial Sequence: Synthetic oligonucleotide
  Target: COL7A1; (-) strand; PAM type: NRG; PAM sequence: GAG
ggctgggccagtgagtgggg

SEQ ID NO: 13752 - DNA, 20 bp, Artificial Sequence
  Description of Artificial Sequence: Synthetic oligonucleotide
  Target: COL7A1; (-) strand; PAM type: NRG; PAM sequence: GGG
tgggctgggccagtgagtgg

SEQ ID NO: 13753 - DNA, 20 bp, Artificial Sequence
  Description of Artificial Sequence: Synthetic oligonucleotide
  Target: COL7A1; (-) strand; PAM type: NRG; PAM sequence: GGG
gtgggctgggccagtgagtg

SEQ ID NO: 13754 - DNA, 20 bp, Artificial Sequence
  Description of Artificial Sequence: Synthetic oligonucleotide
  Target: COL7A1; (-) strand; PAM type: NRG; PAM sequence: GGG
tgtgggctgggccagtgagt

SEQ ID NO: 13755 - DNA, 20 bp, Artificial Sequence
  Description of Artificial Sequence: Synthetic oligonucleotide
  Target: COL7A1; (-) strand; PAM type: NRG; PAM sequence: TGG
ctgtgggctgggccagtgag

SEQ ID NO: 13756 - DNA, 20 bp, Artificial Sequence
  Description of Artificial Sequence: Synthetic oligonucleotide
  Target: COL7A1; (-) strand; PAM type: NRG; PAM sequence: GAG
gctctgtgggctgggccagt

SEQ ID NO: 13757 - DNA, 20 bp, Artificial Sequence
  Description of Artificial Sequence: Synthetic oligonucleotide
  Target: COL7A1; (-) strand; PAM type: NRG; PAM sequence: CAG
gagggctctgtgggctgggc

SEQ ID NO: 13758 - DNA, 20 bp, Artificial Sequence
  Description of Artificial Sequence: Synthetic oligonucleotide
  Target: COL7A1; (-) strand; PAM type: NRG; PAM sequence: GGG
tggtgagggctctgtgggct

SEQ ID NO: 13759 - DNA, 20 bp, Artificial Sequence
  Description of Artificial Sequence: Synthetic oligonucleotide
  Target: COL7A1; (-) strand; PAM type: NRG; PAM sequence: TGG
ctggtgagggctctgtgggc

SEQ ID NO: 13760 - DNA, 20 bp, Artificial Sequence
  Description of Artificial Sequence: Synthetic oligonucleotide
  Target: COL7A1; (-) strand; PAM type: NRG; PAM sequence: GGG
cccactggtgagggctctgt

SEQ ID NO: 13761 - DNA, 20 bp, Artificial Sequence
  Description of Artificial Sequence: Synthetic oligonucleotide
  Target: COL7A1; (-) strand; PAM type: NRG; PAM sequence: TGG
tcccactggtgagggctctg

SEQ ID NO: 13762 - DNA, 20 bp, Artificial Sequence
  Description of Artificial Sequence: Synthetic oligonucleotide
  Target: COL7A1; (-) strand; PAM type: NRG; PAM sequence: GGG
accgtggttcccactggtga

SEQ ID NO: 13763 - DNA, 20 bp, Artificial Sequence
  Description of Artificial Sequence: Synthetic oligonucleotide
  Target: COL7A1; (-) strand; PAM type: NRG; PAM sequence: AGG
aaccgtggttcccactggtg

SEQ ID NO: 13764 - DNA, 20 bp, Artificial Sequence
  Description of Artificial Sequence: Synthetic oligonucleotide
  Target: COL7A1; (-) strand; PAM type: NRG; PAM sequence: GAG
caaccgtggttcccactggt

SEQ ID NO: 13765 - DNA, 20 bp, Artificial Sequence
  Description of Artificial Sequence: Synthetic oligonucleotide
  Target: COL7A1; (-) strand; PAM type: NRG; PAM sequence: TGG
cctgcaaccgtggttcccac

SEQ ID NO: 13766 - DNA, 20 bp, Artificial Sequence
  Description of Artificial Sequence: Synthetic oligonucleotide
  Target: COL7A1; (-) strand; PAM type: NRG; PAM sequence: TGG
ggtggccacccctgcaaccg

SEQ ID NO: 13767 - DNA, 20 bp, Artificial Sequence
  Description of Artificial Sequence: Synthetic oligonucleotide
  Target: COL7A1; (-) strand; PAM type: NRG; PAM sequence: TGG
tctgctggagggccacgagg

SEQ ID NO: 13768 - DNA, 20 bp, Artificial Sequence
  Description of Artificial Sequence: Synthetic oligonucleotide
  Target: COL7A1; (-) strand; PAM type: NRG; PAM sequence: AGG
cactctgctggagggccacg

SEQ ID NO: 13769 - DNA, 20 bp, Artificial Sequence
  Description of Artificial Sequence: Synthetic oligonucleotide
  Target: COL7A1; (-) strand; PAM type: NRG; PAM sequence: GAG
acactctgctggagggccac

SEQ ID NO: 13770 - DNA, 20 bp, Artificial Sequence
  Description of Artificial Sequence: Synthetic oligonucleotide
  Target: COL7A1; (-) strand; PAM type: NRG; PAM sequence: GGG
acactctacactctgctgga

SEQ ID NO: 13771 - DNA, 20 bp, Artificial Sequence
  Description of Artificial Sequence: Synthetic oligonucleotide
  Target: COL7A1; (-) strand; PAM type: NRG; PAM sequence: AGG
cacactctacactctgctgg

SEQ ID NO: 13772 - DNA, 20 bp, Artificial Sequence
  Description of Artificial Sequence: Synthetic oligonucleotide
  Target: COL7A1; (-) strand; PAM type: NRG; PAM sequence: GAG
tcacactctacactctgctg

SEQ ID NO: 13773 - DNA, 20 bp, Artificial Sequence
  Description of Artificial Sequence: Synthetic oligonucleotide
  Target: COL7A1; (-) strand; PAM type: NRG; PAM sequence: TGG
cctcacactctacactctgc

SEQ ID NO: 13774 - DNA, 20 bp, Artificial Sequence
  Description of Artificial Sequence: Synthetic oligonucleotide
  Target: COL7A1; (-) strand; PAM type: NRG; PAM sequence: GAG
atgggctgcagccgggcact

SEQ ID NO: 13775 - DNA, 20 bp, Artificial Sequence
  Description of Artificial Sequence: Synthetic oligonucleotide
  Target: COL7A1; (-) strand; PAM type: NRG; PAM sequence: GGG
cagttggatgggctgcagcc

SEQ ID NO: 13776 - DNA, 20 bp, Artificial Sequence
  Description of Artificial Sequence: Synthetic oligonucleotide
  Target: COL7A1; (-) strand; PAM type: NRG; PAM sequence: CGG
ccagttggatgggctgcagc

SEQ ID NO: 13777 - DNA, 20 bp, Artificial Sequence
  Description of Artificial Sequence: Synthetic oligonucleotide
  Target: COL7A1; (-) strand; PAM type: NRG; PAM sequence: CAG
gctaccagttggatgggctg

SEQ ID NO: 13778 - DNA, 20 bp, Artificial Sequence
  Description of Artificial Sequence: Synthetic oligonucleotide
  Target: COL7A1; (-) strand; PAM type: NRG; PAM sequence: GGG
tgacccgctaccagttggat

SEQ ID NO: 13779 - DNA, 20 bp, Artificial Sequence
  Description of Artificial Sequence: Synthetic oligonucleotide
  Target: COL7A1; (-) strand; PAM type: NRG; PAM sequence: TGG
gtgacccgctaccagttgga

SEQ ID NO: 13780 - DNA, 20 bp, Artificial Sequence
  Description of Artificial Sequence: Synthetic oligonucleotide
  Target: COL7A1; (-) strand; PAM type: NRG; PAM sequence: TGG
tgatgtgacccgctaccagt

SEQ ID NO: 13781 - DNA, 20 bp, Artificial Sequence
  Description of Artificial Sequence: Synthetic oligonucleotide
  Target: COL7A1; (-) strand; PAM type: NRG; PAM sequence: CAG
cctctgatgtgacccgctac

SEQ ID NO: 13782 - DNA, 20 bp, Artificial Sequence
  Description of Artificial Sequence: Synthetic oligonucleotide
  Target: COL7A1; (-) strand; PAM type: NRG; PAM sequence: TGG
cttggagccaccgcagaagg

SEQ ID NO: 13783 - DNA, 20 bp, Artificial Sequence
  Description of Artificial Sequence: Synthetic oligonucleotide
  Target: COL7A1; (-) strand; PAM type: NRG; PAM sequence: AGG
aggcttggagccaccgcaga

SEQ ID NO: 13784 - DNA, 20 bp, Artificial Sequence
  Description of Artificial Sequence: Synthetic oligonucleotide
  Target: COL7A1; (-) strand; PAM type: NRG; PAM sequence: AAG
caggcttggagccaccgcag

SEQ ID NO: 13785 - DNA, 20 bp, Artificial Sequence
  Description of Artificial Sequence: Synthetic oligonucleotide
  Target: COL7A1; (-) strand; PAM type: NRG; PAM sequence: CAG
ttgcaggcttggagccaccg

SEQ ID NO: 13786 - DNA, 20 bp, Artificial Sequence
  Description of Artificial Sequence: Synthetic oligonucleotide
  Target: COL7A1; (-) strand; PAM type: NRG; PAM sequence: GAG
cctgttatcttgcaggcttg

SEQ ID NO: 13787 - DNA, 20 bp, Artificial Sequence
  Description of Artificial Sequence: Synthetic oligonucleotide
  Target: COL7A1; (-) strand; PAM type: NRG; PAM sequence: TGG
accctgttatcttgcaggct

SEQ ID NO: 13788 - DNA, 20 bp, Artificial Sequence
  Description of Artificial Sequence: Synthetic oligonucleotide
  Target: COL7A1; (-) strand; PAM type: NRG; PAM sequence: AGG
gtctgaccctgttatcttgc

SEQ ID NO: 13789 - DNA, 20 bp, Artificial Sequence
  Description of Artificial Sequence: Synthetic oligonucleotide
  Target: COL7A1; (-) strand; PAM type: NRG; PAM sequence: CAG
ggtctgaccctgttatcttg

SEQ ID NO: 13790 - DNA, 20 bp, Artificial Sequence
  Description of Artificial Sequence: Synthetic oligonucleotide
  Target: COL7A1; (-) strand; PAM type: NRG; PAM sequence: TGG
ggtcagggcatggcctctgc

SEQ ID NO: 13791 - DNA, 20 bp, Artificial Sequence
  Description of Artificial Sequence: Synthetic oligonucleotide
  Target: COL7A1; (-) strand; PAM type: NRG; PAM sequence: TGG
gacaggcaagggtcagggca

SEQ ID NO: 13792 - DNA, 20 bp, Artificial Sequence
  Description of Artificial Sequence: Synthetic oligonucleotide
  Target: COL7A1; (-) strand; PAM type: NRG; PAM sequence: GGG
ggatggacaggcaagggtca

SEQ ID NO: 13793 - DNA, 20 bp, Artificial Sequence
  Description of Artificial Sequence: Synthetic oligonucleotide
  Target: COL7A1; (-) strand; PAM type: NRG; PAM sequence: AGG
gggatggacaggcaagggtc

SEQ ID NO: 13794 - DNA, 20 bp, Artificial Sequence
  Description of Artificial Sequence: Synthetic oligonucleotide
  Target: COL7A1; (-) strand; PAM type: NRG; PAM sequence: CAG
agggatggacaggcaagggt

SEQ ID NO: 13795 - DNA, 20 bp, Artificial Sequence
  Description of Artificial Sequence: Synthetic oligonucleotide
  Target: COL7A1; (-) strand; PAM type: NRG; PAM sequence: GGG
gggaagggatggacaggcaa

SEQ ID NO: 13796 - DNA, 20 bp, Artificial Sequence
  Description of Artificial Sequence: Synthetic oligonucleotide
  Target: COL7A1; (-) strand; PAM type: NRG; PAM sequence: AGG
ggggaagggatggacaggca

SEQ ID NO: 13797 - DNA, 20 bp, Artificial Sequence
  Description of Artificial Sequence: Synthetic oligonucleotide
  Target: COL7A1; (-) strand; PAM type: NRG; PAM sequence: AAG
gggggaagggatggacaggc

SEQ ID NO: 13798 - DNA, 20 bp, Artificial Sequence
  Description of Artificial Sequence: Synthetic oligonucleotide
  Target: COL7A1; (-) strand; PAM type: NRG; PAM sequence: AGG
gtgcgggggaagggatggac

SEQ ID NO: 13799 - DNA, 20 bp, Artificial Sequence
  Description of Artificial Sequence: Synthetic oligonucleotide
  Target: COL7A1; (-) strand; PAM type: NRG; PAM sequence: CAG
agtgcgggggaagggatgga

SEQ ID NO: 13800 - DNA, 20 bp, Artificial Sequence
  Description of Artificial Sequence: Synthetic oligonucleotide
  Target: COL7A1; (-) strand; PAM type: NRG; PAM sequence: TGG
ggtcagtgcgggggaaggga

SEQ ID NO: 13801 - DNA, 20 bp, Artificial Sequence
  Description of Artificial Sequence: Synthetic oligonucleotide
  Target: COL7A1; (-) strand; PAM type: NRG; PAM sequence: GGG
gactggtcagtgcgggggaa

SEQ ID NO: 13802 - DNA, 20 bp, Artificial Sequence
  Description of Artificial Sequence: Synthetic oligonucleotide
  Target: COL7A1; (-) strand; PAM type: NRG; PAM sequence: AGG
agactggtcagtgcggggga

SEQ ID NO: 13803 - DNA, 20 bp, Artificial Sequence
  Description of Artificial Sequence: Synthetic oligonucleotide
  Target: COL7A1; (-) strand; PAM type: NRG; PAM sequence: AAG
gagactggtcagtgcggggg

SEQ ID NO: 13804 - DNA, 20 bp, Artificial Sequence
  Description of Artificial Sequence: Synthetic oligonucleotide
  Target: COL7A1; (-) strand; PAM type: NRG; PAM sequence: GGG
cgtgagactggtcagtgcgg

SEQ ID NO: 13805 - DNA, 20 bp, Artificial Sequence
  Description of Artificial Sequence: Synthetic oligonucleotide
  Target: COL7A1; (-) strand; PAM type: NRG; PAM sequence: GGG
gcgtgagactggtcagtgcg

SEQ ID NO: 13806 - DNA, 20 bp, Artificial Sequence
  Description of Artificial Sequence: Synthetic oligonucleotide
  Target: COL7A1; (-) strand; PAM type: NRG; PAM sequence: GGG
ggcgtgagactggtcagtgc

SEQ ID NO: 13807 - DNA, 20 bp, Artificial Sequence
  Description of Artificial Sequence: Synthetic oligonucleotide
  Target: COL7A1; (-) strand; PAM type: NRG; PAM sequence: CGG
cggcgtgagactggtcagtg

SEQ ID NO: 13808 - DNA, 20 bp, Artificial Sequence
  Description of Artificial Sequence: Synthetic oligonucleotide
  Target: COL7A1; (-) strand; PAM type: NRG; PAM sequence: CAG
aatggcggcgtgagactggt

SEQ ID NO: 13809 - DNA, 20 bp, Artificial Sequence
  Description of Artificial Sequence: Synthetic oligonucleotide
  Target: COL7A1; (-) strand; PAM type: NRG; PAM sequence: TGG
ttggaatggcggcgtgagac

SEQ ID NO: 13810 - DNA, 20 bp, Artificial Sequence
  Description of Artificial Sequence: Synthetic oligonucleotide
  Target: COL7A1; (-) strand; PAM type: NRG; PAM sequence: GAG
accggttggaatggcggcgt

SEQ ID NO: 13811 - DNA, 20 bp, Artificial Sequence
  Description of Artificial Sequence: Synthetic oligonucleotide
  Target: COL7A1; (-) strand; PAM type: NRG; PAM sequence: CGG
gtggctaccggttggaatgg

SEQ ID NO: 13812 - DNA, 20 bp, Artificial Sequence
  Description of Artificial Sequence: Synthetic oligonucleotide
  Target: COL7A1; (-) strand; PAM type: NRG; PAM sequence: TGG
cccgtggctaccggttggaa

SEQ ID NO: 13813 - DNA, 20 bp, Artificial Sequence
  Description of Artificial Sequence: Synthetic oligonucleotide
  Target: COL7A1; (-) strand; PAM type: NRG; PAM sequence: TGG
tgaggcccgtggctaccggt

SEQ ID NO: 13814 - DNA, 20 bp, Artificial Sequence
  Description of Artificial Sequence: Synthetic oligonucleotide
  Target: COL7A1; (-) strand; PAM type: NRG; PAM sequence: CGG
tgcctgaggcccgtggctac

SEQ ID NO: 13815 - DNA, 20 bp, Artificial Sequence
  Description of Artificial Sequence: Synthetic oligonucleotide
  Target: COL7A1; (-) strand; PAM type: NRG; PAM sequence: TGG
aacttggtgcctgaggcccg

SEQ ID NO: 13816 - DNA, 20 bp, Artificial Sequence
  Description of Artificial Sequence: Synthetic oligonucleotide
  Target: COL7A1; (-) strand; PAM type: NRG; PAM sequence: AGG
ttcctggaacttggtgcctg

SEQ ID NO: 13817 - DNA, 20 bp, Artificial Sequence
  Description of Artificial Sequence: Synthetic oligonucleotide
  Target: COL7A1; (-) strand; PAM type: NRG; PAM sequence: GAG
tttcctggaacttggtgcct

SEQ ID NO: 13818 - DNA, 20 bp, Artificial Sequence
  Description of Artificial Sequence: Synthetic oligonucleotide
  Target: COL7A1; (-) strand; PAM type: NRG; PAM sequence: TGG
catcctcctttcctggaact

SEQ ID NO: 13819 - DNA, 20 bp, Artificial Sequence
  Description of Artificial Sequence: Synthetic oligonucleotide
  Target: COL7A1; (-) strand; PAM type: NRG; PAM sequence: TGG
ccacatccatcctcctttcc

SEQ ID NO: 13820 - DNA, 20 bp, Artificial Sequence
  Description of Artificial Sequence: Synthetic oligonucleotide
  Target: COL7A1; (-) strand; PAM type: NRG; PAM sequence: GGG
accctgcgcccggtcatcct

SEQ ID NO: 13821 - DNA, 20 bp, Artificial Sequence
  Description of Artificial Sequence: Synthetic oligonucleotide
  Target: COL7A1; (-) strand; PAM type: NRG; PAM sequence: TGG
gaccctgcgcccggtcatcc

SEQ ID NO: 13822 - DNA, 20 bp, Artificial Sequence
  Description of Artificial Sequence: Synthetic oligonucleotide
  Target: COL7A1; (-) strand; PAM type: NRG; PAM sequence: CGG
tgttgagcagaccctgcgcc

SEQ ID NO: 13823 - DNA, 20 bp, Artificial Sequence
  Description of Artificial Sequence: Synthetic oligonucleotide
  Target: COL7A1; (-) strand; PAM type: NRG; PAM sequence: CAG
gggcagacgcttctgttgag

SEQ ID NO: 13824 - DNA, 20 bp, Artificial Sequence
  Description of Artificial Sequence: Synthetic oligonucleotide
  Target: COL7A1; (-) strand; PAM type: NRG; PAM sequence: GAG
cctgggcagacgcttctgtt

SEQ ID NO: 13825 - DNA, 20 bp, Artificial Sequence
  Description of Artificial Sequence: Synthetic oligonucleotide
  Target: COL7A1; (-) strand; PAM type: NRG; PAM sequence: CAG
gacatcccatgtgccctggg

SEQ ID NO: 13826 - DNA, 20 bp, Artificial Sequence
  Description of Artificial Sequence: Synthetic oligonucleotide
  Target: COL7A1; (-) strand; PAM type: NRG; PAM sequence: GGG
actgacatcccatgtgccct

SEQ ID NO: 13827 - DNA, 20 bp, Artificial Sequence
  Description of Artificial Sequence: Synthetic oligonucleotide
  Target: COL7A1; (-) strand; PAM type: NRG; PAM sequence: TGG
cactgacatcccatgtgccc

SEQ ID NO: 13828 - DNA, 20 bp, Artificial Sequence
  Description of Artificial Sequence: Synthetic oligonucleotide
  Target: COL7A1; (-) strand; PAM type: NRG; PAM sequence: AGG
gcaggcagggcaaggcccgg

SEQ ID NO: 13829 - DNA, 20 bp, Artificial Sequence
  Description of Artificial Sequence: Synthetic oligonucleotide
  Target: COL7A1; (-) strand; PAM type: NRG; PAM sequence: GAG
ggcaggcagggcaaggcccg

SEQ ID NO: 13830 - DNA, 20 bp, Artificial Sequence
  Description of Artificial Sequence: Synthetic oligonucleotide
  Target: COL7A1; (-) strand; PAM type: NRG; PAM sequence: CGG
cgggcaggcagggcaaggcc

SEQ ID NO: 13831 - DNA, 20 bp, Artificial Sequence
  Description of Artificial Sequence: Synthetic oligonucleotide
  Target: COL7A1; (-) strand; PAM type: NRG; PAM sequence: AGG
tgggacgggcaggcagggca

SEQ ID NO: 13832 - DNA, 20 bp, Artificial Sequence
  Description of Artificial Sequence: Synthetic oligonucleotide
  Target: COL7A1; (-) strand; PAM type: NRG; PAM sequence: AAG
ctgggacgggcaggcagggc

SEQ ID NO: 13833 - DNA, 20 bp, Artificial Sequence
  Description of Artificial Sequence: Synthetic oligonucleotide
  Target: COL7A1; (-) strand; PAM type: NRG; PAM sequence: GGG
caggctgggacgggcaggca

SEQ ID NO: 13834 - DNA, 20 bp, Artificial Sequence
  Description of Artificial Sequence: Synthetic oligonucleotide
  Target: COL7A1; (-) strand; PAM type: NRG; PAM sequence: AGG
tcaggctgggacgggcaggc

SEQ ID NO: 13835 - DNA, 20 bp, Artificial Sequence
  Description of Artificial Sequence: Synthetic oligonucleotide
  Target: COL7A1; (-) strand; PAM type: NRG; PAM sequence: CAG
ttcaggctgggacgggcagg

SEQ ID NO: 13836 - DNA, 20 bp, Artificial Sequence
  Description of Artificial Sequence: Synthetic oligonucleotide
  Target: COL7A1; (-) strand; PAM type: NRG; PAM sequence: AGG
ttcttcaggctgggacgggc

SEQ ID NO: 13837 - DNA, 20 bp, Artificial Sequence
  Description of Artificial Sequence: Synthetic oligonucleotide
  Target: COL7A1; (-) strand; PAM type: NRG; PAM sequence: CAG
tttcttcaggctgggacggg

SEQ ID NO: 13838 - DNA, 20 bp, Artificial Sequence
  Description of Artificial Sequence: Synthetic oligonucleotide
  Target: COL7A1; (-) strand; PAM type: NRG; PAM sequence: GGG
cactttcttcaggctgggac

SEQ ID NO: 13839 - DNA, 20 bp, Artificial Sequence
  Description of Artificial Sequence: Synthetic oligonucleotide
  Target: COL7A1; (-) strand; PAM type: NRG; PAM sequence: CGG
gcactttcttcaggctggga

SEQ ID NO: 13840 - DNA, 20 bp, Artificial Sequence
  Description of Artificial Sequence: Synthetic oligonucleotide
  Target: COL7A1; (-) strand; PAM type: NRG; PAM sequence: GGG
ctgggcactttcttcaggct

SEQ ID NO: 13841 - DNA, 20 bp, Artificial Sequence
  Description of Artificial Sequence: Synthetic oligonucleotide
  Target: COL7A1; (-) strand; PAM type: NRG; PAM sequence: TGG
gctgggcactttcttcaggc

SEQ ID NO: 13842 - DNA, 20 bp, Artificial Sequence
  Description of Artificial Sequence: Synthetic oligonucleotide
  Target: COL7A1; (-) strand; PAM type: NRG; PAM sequence: AGG
gaaggctgggcactttcttc

SEQ ID NO: 13843 - DNA, 20 bp, Artificial Sequence
  Description of Artificial Sequence: Synthetic oligonucleotide
  Target: COL7A1; (-) strand; PAM type: NRG; PAM sequence: CAG
agaaggctgggcactttctt

SEQ ID NO: 13844 - DNA, 20 bp, Artificial Sequence
  Description of Artificial Sequence: Synthetic oligonucleotide
  Target: COL7A1; (-) strand; PAM type: NRG; PAM sequence: GGG
ctcgcactggtgagaaggct

SEQ ID NO: 13845 - DNA, 20 bp, Artificial Sequence
  Description of Artificial Sequence: Synthetic oligonucleotide
  Target: COL7A1; (-) strand; PAM type: NRG; PAM sequence: TGG
gctcgcactggtgagaaggc

SEQ ID NO: 13846 - DNA, 20 bp, Artificial Sequence
  Description of Artificial Sequence: Synthetic oligonucleotide
  Target: COL7A1; (-) strand; PAM type: NRG; PAM sequence: AGG
gatggctcgcactggtgaga

SEQ ID NO: 13847 - DNA, 20 bp, Artificial Sequence
  Description of Artificial Sequence: Synthetic oligonucleotide
  Target: COL7A1; (-) strand; PAM type: NRG; PAM sequence: AAG
tgatggctcgcactggtgag

SEQ ID NO: 13848 - DNA, 20 bp, Artificial Sequence
  Description of Artificial Sequence: Synthetic oligonucleotide
  Target: COL7A1; (-) strand; PAM type: NRG; PAM sequence: GAG
ccctgatggctcgcactggt

SEQ ID NO: 13849 - DNA, 20 bp, Artificial Sequence
  Description of Artificial Sequence: Synthetic oligonucleotide
  Target: COL7A1; (-) strand; PAM type: NRG; PAM sequence: TGG
acttccctgatggctcgcac

SEQ ID NO: 13850 - DNA, 20 bp, Artificial Sequence
  Description of Artificial Sequence: Synthetic oligonucleotide
  Target: COL7A1; (-) strand; PAM type: NRG; PAM sequence: TGG
ggggcccgccacttccctga

SEQ ID NO: 13851 - DNA, 20 bp, Artificial Sequence
  Description of Artificial Sequence: Synthetic oligonucleotide
  Target: COL7A1; (-) strand; PAM type: NRG; PAM sequence: GGG
ccctatttggccgcagtgtg

SEQ ID NO: 13852 - DNA, 20 bp, Artificial Sequence
  Description of Artificial Sequence: Synthetic oligonucleotide
  Target: COL7A1; (-) strand; PAM type: NRG; PAM sequence: GGG
accctatttggccgcagtgt

SEQ ID NO: 13853 - DNA, 20 bp, Artificial Sequence
  Description of Artificial Sequence: Synthetic oligonucleotide
  Target: COL7A1; (-) strand; PAM type: NRG; PAM sequence: TGG
caccctatttggccgcagtg

SEQ ID NO: 13854 - DNA, 20 bp, Artificial Sequence
  Description of Artificial Sequence: Synthetic oligonucleotide
  Target: COL7A1; (-) strand; PAM type: NRG; PAM sequence: CAG
gtgagcaccctatttggccg

SEQ ID NO: 13855 - DNA, 20 bp, Artificial Sequence
  Description of Artificial Sequence: Synthetic oligonucleotide
  Target: COL7A1; (-) strand; PAM type: NRG; PAM sequence: TGG
gtgaccgtgagcaccctatt

SEQ ID NO: 13856 - DNA, 20 bp, Artificial Sequence
  Description of Artificial Sequence: Synthetic oligonucleotide
  Target: COL7A1; (-) strand; PAM type: NRG; PAM sequence: GAG
acggactatgaggtgaccgt

SEQ ID NO: 13857 - DNA, 20 bp, Artificial Sequence
  Description of Artificial Sequence: Synthetic oligonucleotide
  Target: COL7A1; (-) strand; PAM type: NRG; PAM sequence: AGG
ggagcctggcacggactatg

SEQ ID NO: 13858 - DNA, 20 bp, Artificial Sequence
  Description of Artificial Sequence: Synthetic oligonucleotide
  Target: COL7A1; (-) strand; PAM type: NRG; PAM sequence: GAG
tggagcctggcacggactat

SEQ ID NO: 13859 - DNA, 20 bp, Artificial Sequence
  Description of Artificial Sequence: Synthetic oligonucleotide
  Target: COL7A1; (-) strand; PAM type: NRG; PAM sequence: CGG
gcgtgacttggagcctggca

SEQ ID NO: 13860 - DNA, 20 bp, Artificial Sequence
  Description of Artificial Sequence: Synthetic oligonucleotide
  Target: COL7A1; (-) strand; PAM type: NRG; PAM sequence: TGG
ttgctgcgtgacttggagcc

SEQ ID NO: 13861 - DNA, 20 bp, Artificial Sequence
  Description of Artificial Sequence: Synthetic oligonucleotide
  Target: COL7A1; (-) strand; PAM type: NRG; PAM sequence: GAG
cagtgttgctgcgtgacttg

SEQ ID NO: 13862 - DNA, 20 bp, Artificial Sequence
  Description of Artificial Sequence: Synthetic oligonucleotide
  Target: COL7A1; (-) strand; PAM type: NRG; PAM sequence: TGG
ttcagtgttgctgcgtgact

SEQ ID NO: 13863 - DNA, 20 bp, Artificial Sequence
  Description of Artificial Sequence: Synthetic oligonucleotide
  Target: COL7A1; (-) strand; PAM type: NRG; PAM sequence: CAG
gctgggccctgggcagggtt

SEQ ID NO: 13864 - DNA, 20 bp, Artificial Sequence
  Description of Artificial Sequence: Synthetic oligonucleotide
  Target: COL7A1; (-) strand; PAM type: NRG; PAM sequence: GGG
caggagctgggccctgggca

SEQ ID NO: 13865 - DNA, 20 bp, Artificial Sequence
  Description of Artificial Sequence: Synthetic oligonucleotide
  Target: COL7A1; (-) strand; PAM type: NRG; PAM sequence: AGG
gcaggagctgggccctgggc

SEQ ID NO: 13866 - DNA, 20 bp, Artificial Sequence
  Description of Artificial Sequence: Synthetic oligonucleotide
  Target: COL7A1; (-) strand; PAM type: NRG; PAM sequence: CAG
agcaggagctgggccctggg

SEQ ID NO: 13867 - DNA, 20 bp, Artificial Sequence
  Description of Artificial Sequence: Synthetic oligonucleotide
  Target: COL7A1; (-) strand; PAM type: NRG; PAM sequence: GGG
agcagcaggagctgggccct

SEQ ID NO: 13868 - DNA, 20 bp, Artificial Sequence
  Description of Artificial Sequence: Synthetic oligonucleotide
  Target: COL7A1; (-) strand; PAM type: NRG; PAM sequence: TGG
cagcagcaggagctgggccc

SEQ ID NO: 13869 - DNA, 20 bp, Artificial Sequence
  Description of Artificial Sequence: Synthetic oligonucleotide
  Target: COL7A1; (-) strand; PAM type: NRG; PAM sequence: GGG
cccacacagcagcaggagct

SEQ ID NO: 13870 - DNA, 20 bp, Artificial Sequence
  Description of Artificial Sequence: Synthetic oligonucleotide
  Target: COL7A1; (-) strand; PAM type: NRG; PAM sequence: TGG
gcccacacagcagcaggagc

SEQ ID NO: 13871 - DNA, 20 bp, Artificial Sequence
  Description of Artificial Sequence: Synthetic oligonucleotide
  Target: COL7A1; (-) strand; PAM type: NRG; PAM sequence: GAG
gtgggcccacacagcagcag

SEQ ID NO: 13872 - DNA, 20 bp, Artificial Sequence
  Description of Artificial Sequence: Synthetic oligonucleotide
  Target: COL7A1; (-) strand; PAM type: NRG; PAM sequence: AGG
aggtgggcccacacagcagc

SEQ ID NO: 13873 - DNA, 20 bp, Artificial Sequence
  Description of Artificial Sequence: Synthetic oligonucleotide
  Target: COL7A1; (-) strand; PAM type: NRG; PAM sequence: CAG
caggtgggcccacacagcag

SEQ ID NO: 13874 - DNA, 20 bp, Artificial Sequence
  Description of Artificial Sequence: Synthetic oligonucleotide
  Target: COL7A1; (-) strand; PAM type: NRG; PAM sequence: CAG
atgcaggtgggcccacacag

SEQ ID NO: 13875 - DNA, 20 bp, Artificial Sequence
  Description of Artificial Sequence: Synthetic oligonucleotide
  Target: COL7A1; (-) strand; PAM type: NRG; PAM sequence: CAG
cccatgcaggtgggcccaca

SEQ ID NO: 13876 - DNA, 20 bp, Artificial Sequence
  Description of Artificial Sequence: Synthetic oligonucleotide
  Target: COL7A1; (-) strand; PAM type: NRG; PAM sequence: GGG
ttggtgtcccccatgcaggt

SEQ ID NO: 13877 - DNA, 20 bp, Artificial Sequence
  Description of Artificial Sequence: Synthetic oligonucleotide
  Target: COL7A1; (-) strand; PAM type: NRG; PAM sequence: TGG
cttggtgtcccccatgcagg

SEQ ID NO: 13878 - DNA, 20 bp, Artificial Sequence
  Description of Artificial Sequence: Synthetic oligonucleotide
  Target: COL7A1; (-) strand; PAM type: NRG; PAM sequence: AGG
ccccttggtgtcccccatgc

SEQ ID NO: 13879 - DNA, 20 bp, Artificial Sequence
  Description of Artificial Sequence: Synthetic oligonucleotide
  Target: COL7A1; (-) strand; PAM type: NRG; PAM sequence: CAG
gccccttggtgtcccccatg

SEQ ID NO: 13880 - DNA, 20 bp, Artificial Sequence
  Description of Artificial Sequence: Synthetic oligonucleotide
  Target: COL7A1; (-) strand; PAM type: NRG; PAM sequence: TGG
tgcaaggcccactggcccct

SEQ ID NO: 13881 - DNA, 20 bp, Artificial Sequence
  Description of Artificial Sequence: Synthetic oligonucleotide
  Target: COL7A1; (-) strand; PAM type: NRG; PAM sequence: TGG
cctgagtctgcaaggcccac

SEQ ID NO: 13882 - DNA, 20 bp, Artificial Sequence
  Description of Artificial Sequence: Synthetic oligonucleotide
  Target: COL7A1; (-) strand; PAM type: NRG; PAM sequence: AGG
tgtagagtcctgagtctgca

SEQ ID NO: 13883 - DNA, 20 bp, Artificial Sequence
  Description of Artificial Sequence: Synthetic oligonucleotide
  Target: COL7A1; (-) strand; PAM type: NRG; PAM sequence: AAG
ctgtagagtcctgagtctgc

SEQ ID NO: 13884 - DNA, 20 bp, Artificial Sequence
  Description of Artificial Sequence: Synthetic oligonucleotide
  Target: COL7A1; (-) strand; PAM type: NRG; PAM sequence: GAG
agacaaggctgtagagtcct

SEQ ID NO: 13885 - DNA, 20 bp, Artificial Sequence
  Description of Artificial Sequence: Synthetic oligonucleotide
  Target: COL7A1; (-) strand; PAM type: NRG; PAM sequence: GAG
gcgcctcagacaaggctgta

SEQ ID NO: 13886 - DNA, 20 bp, Artificial Sequence
  Description of Artificial Sequence: Synthetic oligonucleotide
  Target: COL7A1; (-) strand; PAM type: NRG; PAM sequence: TAG
ccgcgcctcagacaaggctg

SEQ ID NO: 13887 - DNA, 20 bp, Artificial Sequence
  Description of Artificial Sequence: Synthetic oligonucleotide
  Target: COL7A1; (-) strand; PAM type: NRG; PAM sequence: AGG
gagtccccgcgcctcagaca

SEQ ID NO: 13888 - DNA, 20 bp, Artificial Sequence
  Description of Artificial Sequence: Synthetic oligonucleotide
  Target: COL7A1; (-) strand; PAM type: NRG; PAM sequence: AAG
ggagtccccgcgcctcagac

SEQ ID NO: 13889 - DNA, 20 bp, Artificial Sequence
  Description of Artificial Sequence: Synthetic oligonucleotide
  Target: COL7A1; (-) strand; PAM type: NRG; PAM sequence: CAG
tgaggggagtccccgcgcct

SEQ ID NO: 13890 - DNA, 20 bp, Artificial Sequence
  Description of Artificial Sequence: Synthetic oligonucleotide
  Target: COL7A1; (-) strand; PAM type: NRG; PAM sequence: GAG
tgagagatgtgggctgaggg

SEQ ID NO: 13891 - DNA, 20 bp, Artificial Sequence
  Description of Artificial Sequence: Synthetic oligonucleotide
  Target: COL7A1; (-) strand; PAM type: NRG; PAM sequence: GGG
agtgagagatgtgggctgag

SEQ ID NO: 13892 - DNA, 20 bp, Artificial Sequence
  Description of Artificial Sequence: Synthetic oligonucleotide
  Target: COL7A1; (-) strand; PAM type: NRG; PAM sequence: GGG
gagtgagagatgtgggctga

SEQ ID NO: 13893 - DNA, 20 bp, Artificial Sequence
  Description of Artificial Sequence: Synthetic oligonucleotide
  Target: COL7A1; (-) strand; PAM type: NRG; PAM sequence: AGG
tgagtgagagatgtgggctg

SEQ ID NO: 13894 - DNA, 20 bp, Artificial Sequence
  Description of Artificial Sequence: Synthetic oligonucleotide
  Target: COL7A1; (-) strand; PAM type: NRG; PAM sequence: GAG
gtgagtgagagatgtgggct

SEQ ID NO: 13895 - DNA, 20 bp, Artificial Sequence
  Description of Artificial Sequence: Synthetic oligonucleotide
  Target: COL7A1; (-) strand; PAM type: NRG; PAM sequence: GGG
cagtggtgagtgagagatgt

SEQ ID NO: 13896 - DNA, 20 bp, Artificial Sequence
  Description of Artificial Sequence: Synthetic oligonucleotide
  Target: COL7A1; (-) strand; PAM type: NRG; PAM sequence: TGG
tcagtggtgagtgagagatg

SEQ ID NO: 13897 - DNA, 20 bp, Artificial Sequence
  Description of Artificial Sequence: Synthetic oligonucleotide
  Target: COL7A1; (-) strand; PAM type: NRG; PAM sequence: GAG
gggtcctcagtggtgagtga

SEQ ID NO: 13898 - DNA, 20 bp, Artificial Sequence
  Description of Artificial Sequence: Synthetic oligonucleotide
  Target: COL7A1; (-) strand; PAM type: NRG; PAM sequence: GAG
gcgggtcctcagtggtgagt

SEQ ID NO: 13899 - DNA, 20 bp, Artificial Sequence
  Description of Artificial Sequence: Synthetic oligonucleotide
  Target: COL7A1; (-) strand; PAM type: NRG; PAM sequence: GAG
catggcgggtcctcagtggt

SEQ ID NO: 13900 - DNA, 20 bp, Artificial Sequence
  Description of Artificial Sequence: Synthetic oligonucleotide
  Target: COL7A1; (-) strand; PAM type: NRG; PAM sequence: TGG
gtgacatggcgggtcctcag

SEQ ID NO: 13901 - DNA, 20 bp, Artificial Sequence
  Description of Artificial Sequence: Synthetic oligonucleotide
  Target: COL7A1; (-) strand; PAM type: NRG; PAM sequence: CAG
cgtgtgacatggcgggtcct

SEQ ID NO: 13902 - DNA, 20 bp, Artificial Sequence
  Description of Artificial Sequence: Synthetic oligonucleotide
  Target: COL7A1; (-) strand; PAM type: NRG; PAM sequence: GGG
tggctaccgtgtgacatggc

SEQ ID NO: 13903 - DNA, 20 bp, Artificial Sequence
  Description of Artificial Sequence: Synthetic oligonucleotide
  Target: COL7A1; (-) strand; PAM type: NRG; PAM sequence: CGG
ctggctaccgtgtgacatgg

SEQ ID NO: 13904 - DNA, 20 bp, Artificial Sequence
  Description of Artificial Sequence: Synthetic oligonucleotide
  Target: COL7A1; (-) strand; PAM type: NRG; PAM sequence: TGG
ccactggctaccgtgtgaca

SEQ ID NO: 13905 - DNA, 20 bp, Artificial Sequence
  Description of Artificial Sequence: Synthetic oligonucleotide
  Target: COL7A1; (-) strand; PAM type: NRG; PAM sequence: TGG
cggagtgtgccaggtgccac

SEQ ID NO: 13906 - DNA, 20 bp, Artificial Sequence
  Description of Artificial Sequence: Synthetic oligonucleotide
  Target: COL7A1; (-) strand; PAM type: NRG; PAM sequence: AGG
gtggcctggcggagtgtgcc

SEQ ID NO: 13907 - DNA, 20 bp, Artificial Sequence
  Description of Artificial Sequence: Synthetic oligonucleotide
  Target: COL7A1; (-) strand; PAM type: NRG; PAM sequence: CAG
ggtggcctggcggagtgtgc

SEQ ID NO: 13908 - DNA, 20 bp, Artificial Sequence
  Description of Artificial Sequence: Synthetic oligonucleotide
  Target: COL7A1; (-) strand; PAM type: NRG; PAM sequence: GAG
agcctcctggtggcctggcg

SEQ ID NO: 13909 - DNA, 20 bp, Artificial Sequence
  Description of Artificial Sequence: Synthetic oligonucleotide
  Target: COL7A1; (-) strand; PAM type: NRG; PAM sequence: CGG
acagcctcctggtggcctgg

SEQ ID NO: 13910 - DNA, 20 bp, Artificial Sequence
  Description of Artificial Sequence: Synthetic oligonucleotide
  Target: COL7A1; (-) strand; PAM type: NRG; PAM sequence: TGG
cccacagcctcctggtggcc

SEQ ID NO: 13911 - DNA, 20 bp, Artificial Sequence
  Description of Artificial Sequence: Synthetic oligonucleotide
  Target: COL7A1; (-) strand; PAM type: NRG; PAM sequence: TGG
cacagcccacagcctcctgg

SEQ ID NO: 13912 - DNA, 20 bp, Artificial Sequence
  Description of Artificial Sequence: Synthetic oligonucleotide
  Target: COL7A1; (-) strand; PAM type: NRG; PAM sequence: TGG
taccacagcccacagcctcc

SEQ ID NO: 13913 - DNA, 20 bp, Artificial Sequence
  Description of Artificial Sequence: Synthetic oligonucleotide
  Target: COL7A1; (-) strand; PAM type: NRG; PAM sequence: CAG
atccagaataccacagccca

SEQ ID NO: 13914 - DNA, 20 bp, Artificial Sequence
  Description of Artificial Sequence: Synthetic oligonucleotide
  Target: COL7A1; (-) strand; PAM type: NRG; PAM sequence: CAG
actgaccatccagaatacca

SEQ ID NO: 13915 - DNA, 20 bp, Artificial Sequence
  Description of Artificial Sequence: Synthetic oligonucleotide
  Target: COL7A1; (-) strand; PAM type: NRG; PAM sequence: CAG
aagggccggaactgaccatc

SEQ ID NO: 13916 - DNA, 20 bp, Artificial Sequence
  Description of Artificial Sequence: Synthetic oligonucleotide
  Target: COL7A1; (-) strand; PAM type: NRG; PAM sequence: CGG
cccagctgccctagaagggc

SEQ ID NO: 13917 - DNA, 20 bp, Artificial Sequence
  Description of Artificial Sequence: Synthetic oligonucleotide
  Target: COL7A1; (-) strand; PAM type: NRG; PAM sequence: GGG
ctcccccagctgccctagaa

SEQ ID NO: 13918 - DNA, 20 bp, Artificial Sequence
  Description of Artificial Sequence: Synthetic oligonucleotide
  Target: COL7A1; (-) strand; PAM type: NRG; PAM sequence: AGG
tctcccccagctgccctaga

SEQ ID NO: 13919 - DNA, 20 bp, Artificial Sequence
  Description of Artificial Sequence: Synthetic oligonucleotide
  Target: COL7A1; (-) strand; PAM type: NRG; PAM sequence: AAG
ctctcccccagctgccctag

SEQ ID NO: 13920 - DNA, 20 bp, Artificial Sequence
  Description of Artificial Sequence: Synthetic oligonucleotide
  Target: COL7A1; (-) strand; PAM type: NRG; PAM sequence: TAG
ggactctcccccagctgccc

SEQ ID NO: 13921 - DNA, 20 bp, Artificial Sequence
  Description of Artificial Sequence: Synthetic oligonucleotide
  Target: COL7A1; (-) strand; PAM type: NRG; PAM sequence: CAG
tccctggtgggactctcccc

SEQ ID NO: 13922 - DNA, 20 bp, Artificial Sequence
  Description of Artificial Sequence: Synthetic oligonucleotide
  Target: COL7A1; (-) strand; PAM type: NRG; PAM sequence: GGG
tgactccatgaatccctggt

SEQ ID NO: 13923 - DNA, 20 bp, Artificial Sequence
  Description of Artificial Sequence: Synthetic oligonucleotide
  Target: COL7A1; (-) strand; PAM type: NRG; PAM sequence: TGG
ctgactccatgaatccctgg

SEQ ID NO: 13924 - DNA, 20 bp, Artificial Sequence
  Description of Artificial Sequence: Synthetic oligonucleotide
  Target: COL7A1; (-) strand; PAM type: NRG; PAM sequence: TGG
cttctgactccatgaatccc

SEQ ID NO: 13925 - DNA, 20 bp, Artificial Sequence
  Description of Artificial Sequence: Synthetic oligonucleotide
  Target: COL7A1; (-) strand; PAM type: NRG; PAM sequence: CAG
attcacctaacccccgaccc

SEQ ID NO: 13926 - DNA, 20 bp, Artificial Sequence
  Description of Artificial Sequence: Synthetic oligonucleotide
  Target: COL7A1; (-) strand; PAM type: NRG; PAM sequence: CAG
ggaccagtgagcaattctgc

SEQ ID NO: 13927 - DNA, 20 bp, Artificial Sequence
  Description of Artificial Sequence: Synthetic oligonucleotide
  Target: COL7A1; (-) strand; PAM type: NRG; PAM sequence: GAG
gcgggacagctcggaccagt

SEQ ID NO: 13928 - DNA, 20 bp, Artificial Sequence
  Description of Artificial Sequence: Synthetic oligonucleotide
  Target: COL7A1; (-) strand; PAM type: NRG; PAM sequence: CAG
gtgagcgggacagctcggac

SEQ ID NO: 13929 - DNA, 20 bp, Artificial Sequence
  Description of Artificial Sequence: Synthetic oligonucleotide
  Target: COL7A1; (-) strand; PAM type: NRG; PAM sequence: CGG
aggctgtgagcgggacagct

SEQ ID NO: 13930 - DNA, 20 bp, Artificial Sequence
  Description of Artificial Sequence: Synthetic oligonucleotide
  Target: COL7A1; (-) strand; PAM type: NRG; PAM sequence: CAG
cggggaggctgtgagcggga

SEQ ID NO: 13931 - DNA, 20 bp, Artificial Sequence
  Description of Artificial Sequence: Synthetic oligonucleotide
  Target: COL7A1; (-) strand; PAM type: NRG; PAM sequence: GGG
gcatcggggaggctgtgagc

SEQ ID NO: 13932 - DNA, 20 bp, Artificial Sequence
  Description of Artificial Sequence: Synthetic oligonucleotide
  Target: COL7A1; (-) strand; PAM type: NRG; PAM sequence: CGG
agcatcggggaggctgtgag

SEQ ID NO: 13933 - DNA, 20 bp, Artificial Sequence
  Description of Artificial Sequence: Synthetic oligonucleotide
  Target: COL7A1; (-) strand; PAM type: NRG; PAM sequence: GAG
aacagcatcggggaggctgt

SEQ ID NO: 13934 - DNA, 20 bp, Artificial Sequence
  Description of Artificial Sequence: Synthetic oligonucleotide
  Target: COL7A1; (-) strand; PAM type: NRG; PAM sequence: AGG
ctacgccaacagcatcgggg

SEQ ID NO: 13935 - DNA, 20 bp, Artificial Sequence
  Description of Artificial Sequence: Synthetic oligonucleotide
  Target: COL7A1; (-) strand; PAM type: NRG; PAM sequence: GAG
tctacgccaacagcatcggg

SEQ ID NO: 13936 - DNA, 20 bp, Artificial Sequence
  Description of Artificial Sequence: Synthetic oligonucleotide
  Target: COL7A1; (-) strand; PAM type: NRG; PAM sequence: GGG
cctctacgccaacagcatcg

SEQ ID NO: 13937 - DNA, 20 bp, Artificial Sequence
  Description of Artificial Sequence: Synthetic oligonucleotide
  Target: COL7A1; (-) strand; PAM type: NRG; PAM sequence: GGG
ccctctacgccaacagcatc

SEQ ID NO: 13938 - DNA, 20 bp, Artificial Sequence
  Description of Artificial Sequence: Synthetic oligonucleotide
  Target: COL7A1; (-) strand; PAM type: NRG; PAM sequence: CGG
gccctctacgccaacagcat

SEQ ID NO: 13939 - DNA, 20 bp, Artificial Sequence
  Description of Artificial Sequence: Synthetic oligonucleotide
  Target: COL7A1; (-) strand; PAM type: NRG; PAM sequence: CAG
gtgattgccctctacgccaa

SEQ ID NO: 13940 - DNA, 20 bp, Artificial Sequence
  Description of Artificial Sequence: Synthetic oligonucleotide
  Target: COL7A1; (-) strand; PAM type: NRG; PAM sequence: AAG
ccggccactgaccgagtacc

SEQ ID NO: 13941 - DNA, 20 bp, Artificial Sequence
  Description of Artificial Sequence: Synthetic oligonucleotide
  Target: COL7A1; (-) strand; PAM type: NRG; PAM sequence: GAG
ggggtctccggccactgacc

SEQ ID NO: 13942 - DNA, 20 bp, Artificial Sequence
  Description of Artificial Sequence: Synthetic oligonucleotide
  Target: COL7A1; (-) strand; PAM type: NRG; PAM sequence: CGG
gtgtgcggctgcggggtctc

SEQ ID NO: 13943 - DNA, 20 bp, Artificial Sequence
  Description of Artificial Sequence: Synthetic oligonucleotide
  Target: COL7A1; (-) strand; PAM type: NRG; PAM sequence: GGG
gagaccagtgtgcggctgcg

SEQ ID NO: 13944 - DNA, 20 bp, Artificial Sequence
  Description of Artificial Sequence: Synthetic oligonucleotide
  Target: COL7A1; (-) strand; PAM type: NRG; PAM sequence: GGG
tgagaccagtgtgcggctgc

SEQ ID NO: 13945 - DNA, 20 bp, Artificial Sequence
  Description of Artificial Sequence: Synthetic oligonucleotide
  Target: COL7A1; (-) strand; PAM type: NRG; PAM sequence: CGG
gtgagaccagtgtgcggctg

SEQ ID NO: 13946 - DNA, 20 bp, Artificial Sequence
  Description of Artificial Sequence: Synthetic oligonucleotide
  Target: COL7A1; (-) strand; PAM type: NRG; PAM sequence: CGG
cagctggtgagaccagtgtg

SEQ ID NO: 13947 - DNA, 20 bp, Artificial Sequence
  Description of Artificial Sequence: Synthetic oligonucleotide
  Target: COL7A1; (-) strand; PAM type: NRG; PAM sequence: CAG
aacgtcccagctggtgagac

SEQ ID NO: 13948 - DNA, 20 bp, Artificial Sequence
  Description of Artificial Sequence: Synthetic oligonucleotide
  Target: COL7A1; (-) strand; PAM type: NRG; PAM sequence: GAG
aggtgaacgtcccagctggt

SEQ ID NO: 13949 - DNA, 20 bp, Artificial Sequence
  Description of Artificial Sequence: Synthetic oligonucleotide
  Target: COL7A1; (-) strand; PAM type: NRG; PAM sequence: TGG
gggcaggtgaacgtcccagc

SEQ ID NO: 13950 - DNA, 20 bp, Artificial Sequence
  Description of Artificial Sequence: Synthetic oligonucleotide
  Target: COL7A1; (-) strand; PAM type: NRG; PAM sequence: CAG
ccctgggcaggtgaacgtcc

SEQ ID NO: 13951 - DNA, 20 bp, Artificial Sequence
  Description of Artificial Sequence: Synthetic oligonucleotide
  Target: COL7A1; (-) strand; PAM type: NRG; PAM sequence: AGG
agtgacctcttgccctgggc

SEQ ID NO: 13952 - DNA, 20 bp, Artificial Sequence
  Description of Artificial Sequence: Synthetic oligonucleotide
  Target: COL7A1; (-) strand; PAM type: NRG; PAM sequence: CAG
aagtgacctcttgccctggg

SEQ ID NO: 13953 - DNA, 20 bp, Artificial Sequence
  Description of Artificial Sequence: Synthetic oligonucleotide
  Target: COL7A1; (-) strand; PAM type: NRG; PAM sequence: GGG
ataaagtgacctcttgccct

SEQ ID NO: 13954 - DNA, 20 bp, Artificial Sequence
  Description of Artificial Sequence: Synthetic oligonucleotide
  Target: COL7A1; (-) strand; PAM type: NRG; PAM sequence: TGG
gataaagtgacctcttgccc

SEQ ID NO: 13955 - DNA, 20 bp, Artificial Sequence
  Description of Artificial Sequence: Synthetic oligonucleotide
  Target: COL7A1; (-) strand; PAM type: NRG; PAM sequence: AAG
ggacttggctgggcaagata

SEQ ID NO: 13956 - DNA, 20 bp, Artificial Sequence
  Description of Artificial Sequence: Synthetic oligonucleotide
  Target: COL7A1; (-) strand; PAM type: NRG; PAM sequence: AAG
ggctggggacttggctgggc

SEQ ID NO: 13957 - DNA, 20 bp, Artificial Sequence
  Description of Artificial Sequence: Synthetic oligonucleotide
  Target: COL7A1; (-) strand; PAM type: NRG; PAM sequence: GGG
tggtggctggggacttggct

SEQ ID NO: 13958 - DNA, 20 bp, Artificial Sequence
  Description of Artificial Sequence: Synthetic oligonucleotide
  Target: COL7A1; (-) strand; PAM type: NRG; PAM sequence: TGG
gtggtggctggggacttggc

SEQ ID NO: 13959 - DNA, 20 bp, Artificial Sequence
  Description of Artificial Sequence: Synthetic oligonucleotide
  Target: COL7A1; (-) strand; PAM type: NRG; PAM sequence: TGG
ataggtggtggctggggact

SEQ ID NO: 13960 - DNA, 20 bp, Artificial Sequence
  Description of Artificial Sequence: Synthetic oligonucleotide
  Target: COL7A1; (-) strand; PAM type: NRG; PAM sequence: GGG
ggagtgataggtggtggctg

SEQ ID NO: 13961 - DNA, 20 bp, Artificial Sequence
  Description of Artificial Sequence: Synthetic oligonucleotide
  Target: COL7A1; (-) strand; PAM type: NRG; PAM sequence: GGG
aggagtgataggtggtggct

SEQ ID NO: 13962 - DNA, 20 bp, Artificial Sequence
  Description of Artificial Sequence: Synthetic oligonucleotide
  Target: COL7A1; (-) strand; PAM type: NRG; PAM sequence: TGG
caggagtgataggtggtggc

SEQ ID NO: 13963 - DNA, 20 bp, Artificial Sequence
  Description of Artificial Sequence: Synthetic oligonucleotide
  Target: COL7A1; (-) strand; PAM type: NRG; PAM sequence: TGG
atgtcaggagtgataggtgg

SEQ ID NO: 13964 - DNA, 20 bp, Artificial Sequence
  Description of Artificial Sequence: Synthetic oligonucleotide
  Target: COL7A1; (-) strand; PAM type: NRG; PAM sequence: TGG
aggatgtcaggagtgatagg

SEQ ID NO: 13965 - DNA, 20 bp, Artificial Sequence
  Description of Artificial Sequence: Synthetic oligonucleotide
  Target: COL7A1; (-) strand; PAM type: NRG; PAM sequence: AGG
ggtaggatgtcaggagtgat

SEQ ID NO: 13966 - DNA, 20 bp, Artificial Sequence
  Description of Artificial Sequence: Synthetic oligonucleotide
  Target: COL7A1; (-) strand; PAM type: NRG; PAM sequence: TAG
aggtaggatgtcaggagtga

SEQ ID NO: 13967 - DNA, 20 bp, Artificial Sequence
  Description of Artificial Sequence: Synthetic oligonucleotide
  Target: COL7A1; (-) strand; PAM type: NRG; PAM sequence: GAG
ggcaggaggtaggatgtcag

SEQ ID NO: 13968 - DNA, 20 bp, Artificial Sequence
  Description of Artificial Sequence: Synthetic oligonucleotide
  Target: COL7A1; (-) strand; PAM type: NRG; PAM sequence: AGG
gcggcaggaggtaggatgtc

SEQ ID NO: 13969 - DNA, 20 bp, Artificial Sequence
  Description of Artificial Sequence: Synthetic oligonucleotide
  Target: COL7A1; (-) strand; PAM type: NRG; PAM sequence: CAG
agcggcaggaggtaggatgt

SEQ ID NO: 13970 - DNA, 20 bp, Artificial Sequence
  Description of Artificial Sequence: Synthetic oligonucleotide
  Target: COL7A1; (-) strand; PAM type: NRG; PAM sequence: AGG
ccgagtgagcggcaggaggt

SEQ ID NO: 13971 - DNA, 20 bp, Artificial Sequence
  Description of Artificial Sequence: Synthetic oligonucleotide
  Target: COL7A1; (-) strand; PAM type: NRG; PAM sequence: TAG
gccgagtgagcggcaggagg

SEQ ID NO: 13972 - DNA, 20 bp, Artificial Sequence
  Description of Artificial Sequence: Synthetic oligonucleotide
  Target: COL7A1; (-) strand; PAM type: NRG; PAM sequence: AGG
actgccgagtgagcggcagg

SEQ ID NO: 13973 - DNA, 20 bp, Artificial Sequence
  Description of Artificial Sequence: Synthetic oligonucleotide
  Target: COL7A1; (-) strand; PAM type: NRG; PAM sequence: GAG
cactgccgagtgagcggcag

SEQ ID NO: 13974 - DNA, 20 bp, Artificial Sequence
  Description of Artificial Sequence: Synthetic oligonucleotide
  Target: COL7A1; (-) strand; PAM type: NRG; PAM sequence: AGG
gccactgccgagtgagcggc

SEQ ID NO: 13975 - DNA, 20 bp, Artificial Sequence
  Description of Artificial Sequence: Synthetic oligonucleotide
  Target: COL7A1; (-) strand; PAM type: NRG; PAM sequence: CAG
agccactgccgagtgagcgg

SEQ ID NO: 13976 - DNA, 20 bp, Artificial Sequence
  Description of Artificial Sequence: Synthetic oligonucleotide
  Target: COL7A1; (-) strand; PAM type: NRG; PAM sequence: CGG
gacagccactgccgagtgag

SEQ ID NO: 13977 - DNA, 20 bp, Artificial Sequence
  Description of Artificial Sequence: Synthetic oligonucleotide
  Target: COL7A1; (-) strand; PAM type: NRG; PAM sequence: GAG
tgggacagccactgccgagt

SEQ ID NO: 13978 - DNA, 20 bp, Artificial Sequence
  Description of Artificial Sequence: Synthetic oligonucleotide
  Target: COL7A1; (-) strand; PAM type: NRG; PAM sequence: GAG
gggctgggacagccactgcc

SEQ ID NO: 13979 - DNA, 20 bp, Artificial Sequence
  Description of Artificial Sequence: Synthetic oligonucleotide
  Target: COL7A1; (-) strand; PAM type: NRG; PAM sequence: CAG
ctcctctgacggggctggga

SEQ ID NO: 13980 - DNA, 20 bp, Artificial Sequence
  Description of Artificial Sequence: Synthetic oligonucleotide
  Target: COL7A1; (-) strand; PAM type: NRG; PAM sequence: GGG
tacactcctctgacggggct

SEQ ID NO: 13981 - DNA, 20 bp, Artificial Sequence
  Description of Artificial Sequence: Synthetic oligonucleotide
  Target: COL7A1; (-) strand; PAM type: NRG; PAM sequence: TGG
gtacactcctctgacggggc

SEQ ID NO: 13982 - DNA, 20 bp, Artificial Sequence
  Description of Artificial Sequence: Synthetic oligonucleotide
  Target: COL7A1; (-) strand; PAM type: NRG; PAM sequence: GGG
tccagtacactcctctgacg

SEQ ID NO: 13983 - DNA, 20 bp, Artificial Sequence
  Description of Artificial Sequence: Synthetic oligonucleotide
  Target: COL7A1; (-) strand; PAM type: NRG; PAM sequence: GGG
gtccagtacactcctctgac

SEQ ID NO: 13984 - DNA, 20 bp, Artificial Sequence
  Description of Artificial Sequence: Synthetic oligonucleotide
  Target: COL7A1; (-) strand; PAM type: NRG; PAM sequence: CGG
ggtccagtacactcctctga

SEQ ID NO: 13985 - DNA, 20 bp, Artificial Sequence
  Description of Artificial Sequence: Synthetic oligonucleotide
  Target: COL7A1; (-) strand; PAM type: NRG; PAM sequence: CAG
ctgtgactggctacaaggtc

SEQ ID NO: 13986 - DNA, 20 bp, Artificial Sequence
  Description of Artificial Sequence: Synthetic oligonucleotide
  Target: COL7A1; (-) strand; PAM type: NRG; PAM sequence: AGG
tggccctgtgactggctaca

SEQ ID NO: 13987 - DNA, 20 bp, Artificial Sequence
  Description of Artificial Sequence: Synthetic oligonucleotide
  Target: COL7A1; (-) strand; PAM type: NRG; PAM sequence: AAG
gtggccctgtgactggctac

SEQ ID NO: 13988 - DNA, 20 bp, Artificial Sequence
  Description of Artificial Sequence: Synthetic oligonucleotide
  Target: COL7A1; (-) strand; PAM type: NRG; PAM sequence: TGG
gcggccagtggccctgtgac

SEQ ID NO: 13989 - DNA, 20 bp, Artificial Sequence
  Description of Artificial Sequence: Synthetic oligonucleotide
  Target: COL7A1; (-) strand; PAM type: NRG; PAM sequence: TGG
gtacagtggacagcggccag

SEQ ID NO: 13990 - DNA, 20 bp, Artificial Sequence
  Description of Artificial Sequence: Synthetic oligonucleotide
  Target: COL7A1; (-) strand; PAM type: NRG; PAM sequence: CAG
agagtacagtggacagcggc

SEQ ID NO: 13991 - DNA, 20 bp, Artificial Sequence
  Description of Artificial Sequence: Synthetic oligonucleotide
  Target: COL7A1; (-) strand; PAM type: NRG; PAM sequence: CGG
cttgagagtacagtggacag

SEQ ID NO: 13992 - DNA, 20 bp, Artificial Sequence
  Description of Artificial Sequence: Synthetic oligonucleotide
  Target: COL7A1; (-) strand; PAM type: NRG; PAM sequence: CAG
atccttgagagtacagtgga

SEQ ID NO: 13993 - DNA, 20 bp, Artificial Sequence
  Description of Artificial Sequence: Synthetic oligonucleotide
  Target: COL7A1; (-) strand; PAM type: NRG; PAM sequence: TGG
gccaatccttgagagtacag

SEQ ID NO: 13994 - DNA, 20 bp, Artificial Sequence
  Description of Artificial Sequence: Synthetic oligonucleotide
  Target: COL7A1; (-) strand; PAM type: NRG; PAM sequence: CAG
gcagccaatccttgagagta

SEQ ID NO: 13995 - DNA, 20 bp, Artificial Sequence
  Description of Artificial Sequence: Synthetic oligonucleotide
  Target: COL7A1; (-) strand; PAM type: NRG; PAM sequence: GAG
gccaagcagccaatccttga

SEQ ID NO: 13996 - DNA, 20 bp, Artificial Sequence
  Description of Artificial Sequence: Synthetic oligonucleotide
  Target: COL7A1; (-) strand; PAM type: NRG; PAM sequence: GAG
gagccaagcagccaatcctt

SEQ ID NO: 13997 - DNA, 20 bp, Artificial Sequence
  Description of Artificial Sequence: Synthetic oligonucleotide
  Target: COL7A1; (-) strand; PAM type: NRG; PAM sequence: CAG
ctggtgctgtctgagccaag

SEQ ID NO: 13998 - DNA, 20 bp, Artificial Sequence
  Description of Artificial Sequence: Synthetic oligonucleotide
  Target: COL7A1; (-) strand; PAM type: NRG; PAM sequence: AAG
gacctggtgctgtctgagcc

SEQ ID NO: 13999 - DNA, 20 bp, Artificial Sequence
  Description of Artificial Sequence: Synthetic oligonucleotide
  Target: COL7A1; (-) strand; PAM type: NRG; PAM sequence: GAG
cacgagacctggtgctgtct

SEQ ID NO: 14000 - DNA, 20 bp, Artificial Sequence
  Description of Artificial Sequence: Synthetic oligonucleotide
  Target: COL7A1; (-) strand; PAM type: NRG; PAM sequence: TGG
gacctctgctccacgagacc

SEQ ID NO: 14001 - DNA, 20 bp, Artificial Sequence
  Description of Artificial Sequence: Synthetic oligonucleotide
  Target: COL7A1; (-) strand; PAM type: NRG; PAM sequence: GAG
tgactcgacctctgctccac

SEQ ID NO: 14002 - DNA, 20 bp, Artificial Sequence
  Description of Artificial Sequence: Synthetic oligonucleotide
  Target: COL7A1; (-) strand; PAM type: NRG; PAM sequence: CGG
ccctgatcccgcattcccag

SEQ ID NO: 14003 - DNA, 20 bp, Artificial Sequence
  Description of Artificial Sequence: Synthetic oligonucleotide
  Target: COL7A1; (-) strand; PAM type: NRG; PAM sequence: CAG
atcccctgatcccgcattcc

SEQ ID NO: 14004 - DNA, 20 bp, Artificial Sequence
  Description of Artificial Sequence: Synthetic oligonucleotide
  Target: COL7A1; (-) strand; PAM type: NRG; PAM sequence: CAG
ggaccccaatccccacttgg

SEQ ID NO: 14005 - DNA, 20 bp, Artificial Sequence
  Description of Artificial Sequence: Synthetic oligonucleotide
  Target: COL7A1; (-) strand; PAM type: NRG; PAM sequence: TGG
cccggaccccaatccccact

SEQ ID NO: 14006 - DNA, 20 bp, Artificial Sequence
  Description of Artificial Sequence: Synthetic oligonucleotide
  Target: COL7A1; (-) strand; PAM type: NRG; PAM sequence: CGG
gtgtaccctgacctagaccc

SEQ ID NO: 14007 - DNA, 20 bp, Artificial Sequence
  Description of Artificial Sequence: Synthetic oligonucleotide
  Target: COL7A1; (-) strand; PAM type: NRG; PAM sequence: TAG
ccacacggtgtaccctgacc

SEQ ID NO: 14008 - DNA, 20 bp, Artificial Sequence
  Description of Artificial Sequence: Synthetic oligonucleotide
  Target: COL7A1; (-) strand; PAM type: NRG; PAM sequence: CGG
ctcgtgagttcctgcccaca

SEQ ID NO: 14009 - DNA, 20 bp, Artificial Sequence
  Description of Artificial Sequence: Synthetic oligonucleotide
  Target: COL7A1; (-) strand; PAM type: NRG; PAM sequence: GAG
tgcctgtgacccgacctcgt

SEQ ID NO: 14010 - DNA, 20 bp, Artificial Sequence
  Description of Artificial Sequence: Synthetic oligonucleotide
  Target: COL7A1; (-) strand; PAM type: NRG; PAM sequence: TGG
agagtgtgcacgactgctgg

SEQ ID NO: 14011 - DNA, 20 bp, Artificial Sequence
  Description of Artificial Sequence: Synthetic oligonucleotide
  Target: COL7A1; (-) strand; PAM type: NRG; PAM sequence: TGG
cggagagtgtgcacgactgc

SEQ ID NO: 14012 - DNA, 20 bp, Artificial Sequence
  Description of Artificial Sequence: Synthetic oligonucleotide
  Target: COL7A1; (-) strand; PAM type: NRG; PAM sequence: GAG
actgcccctcgtttcccgga

SEQ ID NO: 14013 - DNA, 20 bp, Artificial Sequence
  Description of Artificial Sequence: Synthetic oligonucleotide
  Target: COL7A1; (-) strand; PAM type: NRG; PAM sequence: GAG
ctactgcccctcgtttcccg

SEQ ID NO: 14014 - DNA, 20 bp, Artificial Sequence
  Description of Artificial Sequence: Synthetic oligonucleotide
  Target: COL7A1; (-) strand; PAM type: NRG; PAM sequence: CGG
cactactgcccctcgtttcc

SEQ ID NO: 14015 - DNA, 20 bp, Artificial Sequence
  Description of Artificial Sequence: Synthetic oligonucleotide
  Target: COL7A1; (-) strand; PAM type: NRG; PAM sequence: AGG
tcaatgacttcagcatcttg

SEQ ID NO: 14016 - DNA, 20 bp, Artificial Sequence
  Description of Artificial Sequence: Synthetic oligonucleotide
  Target: COL7A1; (-) strand; PAM type: NRG; PAM sequence: GAG
gtcaatgacttcagcatctt

SEQ ID NO: 14017 - DNA, 20 bp, Artificial Sequence
  Description of Artificial Sequence: Synthetic oligonucleotide
  Target: COL7A1; (-) strand; PAM type: NRG; PAM sequence: CAG
ttcttcttcgtcaatgactt

SEQ ID NO: 14018 - DNA, 20 bp, Artificial Sequence
  Description of Artificial Sequence: Synthetic oligonucleotide
  Target: COL7A1; (-) strand; PAM type: NRG; PAM sequence: CAG
cgagttgcctcacagcccac

SEQ ID NO: 14019 - DNA, 20 bp, Artificial Sequence
  Description of Artificial Sequence: Synthetic oligonucleotide
  Target: COL7A1; (-) strand; PAM type: NRG; PAM sequence: CAG
agctgaagcgagttgcctca

SEQ ID NO: 14020 - DNA, 20 bp, Artificial Sequence
  Description of Artificial Sequence: Synthetic oligonucleotide
  Target: COL7A1; (-) strand; PAM type: NRG; PAM sequence: GAG
tgaccctgaggagctgaagc

SEQ ID NO: 14021 - DNA, 20 bp, Artificial Sequence
  Description of Artificial Sequence: Synthetic oligonucleotide
  Target: COL7A1; (-) strand; PAM type: NRG; PAM sequence: AAG
atgctgaccctgaggagctg

SEQ ID NO: 14022 - DNA, 20 bp, Artificial Sequence
  Description of Artificial Sequence: Synthetic oligonucleotide
  Target: COL7A1; (-) strand; PAM type: NRG; PAM sequence: GAG
tcaagaatgctgaccctgag

SEQ ID NO: 14023 - DNA, 20 bp, Artificial Sequence
  Description of Artificial Sequence: Synthetic oligonucleotide
  Target: COL7A1; (-) strand; PAM type: NRG; PAM sequence: AGG
gatcaagaatgctgaccctg

SEQ ID NO: 14024 - DNA, 20 bp, Artificial Sequence
  Description of Artificial Sequence: Synthetic oligonucleotide
  Target: COL7A1; (-) strand; PAM type: NRG; PAM sequence: GAG
ggatcaagaatgctgaccct

SEQ ID NO: 14025 - DNA, 20 bp, Artificial Sequence
  Description of Artificial Sequence: Synthetic oligonucleotide
  Target: COL7A1; (-) strand; PAM type: NRG; PAM sequence: AAG
gggtcgtcacttcagggatc

SEQ ID NO: 14026 - DNA, 20 bp, Artificial Sequence
  Description of Artificial Sequence: Synthetic oligonucleotide
  Target: COL7A1; (-) strand; PAM type: NRG; PAM sequence: GGG
cctgatgggtcgtcacttca

SEQ ID NO: 14027 - DNA, 20 bp, Artificial Sequence
  Description of Artificial Sequence: Synthetic oligonucleotide
  Target: COL7A1; (-) strand; PAM type: NRG; PAM sequence: AGG
tcctgatgggtcgtcacttc

SEQ ID NO: 14028 - DNA, 20 bp, Artificial Sequence
  Description of Artificial Sequence: Synthetic oligonucleotide
  Target: COL7A1; (-) strand; PAM type: NRG; PAM sequence: CAG
gtcctgatgggtcgtcactt

SEQ ID NO: 14029 - DNA, 20 bp, Artificial Sequence
  Description of Artificial Sequence: Synthetic oligonucleotide
  Target: COL7A1; (-) strand; PAM type: NRG; PAM sequence: GGG
gtgggtgactgagtcctgat

SEQ ID NO: 14030 - DNA, 20 bp, Artificial Sequence
  Description of Artificial Sequence: Synthetic oligonucleotide
  Target: COL7A1; (-) strand; PAM type: NRG; PAM sequence: TGG
tgtgggtgactgagtcctga

SEQ ID NO: 14031 - DNA, 20 bp, Artificial Sequence
  Description of Artificial Sequence: Synthetic oligonucleotide
  Target: COL7A1; (-) strand; PAM type: NRG; PAM sequence: GAG
cagagagcatgtgggtgact

SEQ ID NO: 14032 - DNA, 20 bp, Artificial Sequence
  Description of Artificial Sequence: Synthetic oligonucleotide
  Target: COL7A1; (-) strand; PAM type: NRG; PAM sequence: GGG
ggggcagtcagagagcatgt

SEQ ID NO: 14033 - DNA, 20 bp, Artificial Sequence
  Description of Artificial Sequence: Synthetic oligonucleotide
  Target: COL7A1; (-) strand; PAM type: NRG; PAM sequence: TGG
gggggcagtcagagagcatg

SEQ ID NO: 14034 - DNA, 20 bp, Artificial Sequence
  Description of Artificial Sequence: Synthetic oligonucleotide
  Target: COL7A1; (-) strand; PAM type: NRG; PAM sequence: GAG
ggggggtgggggcagtcaga

SEQ ID NO: 14035 - DNA, 20 bp, Artificial Sequence
  Description of Artificial Sequence: Synthetic oligonucleotide
  Target: COL7A1; (-) strand; PAM type: NRG; PAM sequence: GAG
ctggggggtgggggcagtca

SEQ ID NO: 14036 - DNA, 20 bp, Artificial Sequence
  Description of Artificial Sequence: Synthetic oligonucleotide
  Target: COL7A1; (-) strand; PAM type: NRG; PAM sequence: CAG
agctggggggtgggggcagt

SEQ ID NO: 14037 - DNA, 20 bp, Artificial Sequence
  Description of Artificial Sequence: Synthetic oligonucleotide
  Target: COL7A1; (-) strand; PAM type: NRG; PAM sequence: CAG
ggtcagctggggggtggggg

SEQ ID NO: 14038 - DNA, 20 bp, Artificial Sequence
  Description of Artificial Sequence: Synthetic oligonucleotide
  Target: COL7A1; (-) strand; PAM type: NRG; PAM sequence: GGG
acaggtcagctggggggtgg

SEQ ID NO: 14039 - DNA, 20 bp, Artificial Sequence
  Description of Artificial Sequence: Synthetic oligonucleotide
  Target: COL7A1; (-) strand; PAM type: NRG; PAM sequence: GGG
gacaggtcagctggggggtg

SEQ ID NO: 14040 - DNA, 20 bp, Artificial Sequence
  Description of Artificial Sequence: Synthetic oligonucleotide
  Target: COL7A1; (-) strand; PAM type: NRG; PAM sequence: GGG
tgacaggtcagctggggggt

SEQ ID NO: 14041 - DNA, 20 bp, Artificial Sequence
  Description of Artificial Sequence: Synthetic oligonucleotide
  Target: COL7A1; (-) strand; PAM type: NRG; PAM sequence: TGG
gtgacaggtcagctgggggg

SEQ ID NO: 14042 - DNA, 20 bp, Artificial Sequence
  Description of Artificial Sequence: Synthetic oligonucleotide
  Target: COL7A1; (-) strand; PAM type: NRG; PAM sequence: GGG
ggagtgacaggtcagctggg

SEQ ID NO: 14043 - DNA, 20 bp, Artificial Sequence
  Description of Artificial Sequence: Synthetic oligonucleotide
  Target: COL7A1; (-) strand; PAM type: NRG; PAM sequence: GGG
aggagtgacaggtcagctgg

SEQ ID NO: 14044 - DNA, 20 bp, Artificial Sequence
  Description of Artificial Sequence: Synthetic oligonucleotide
  Target: COL7A1; (-) strand; PAM type: NRG; PAM sequence: GGG
caggagtgacaggtcagctg

SEQ ID NO: 14045 - DNA, 20 bp, Artificial Sequence
  Description of Artificial Sequence: Synthetic oligonucleotide
  Target: COL7A1; (-) strand; PAM type: NRG; PAM sequence: GGG
gcaggagtgacaggtcagct

SEQ ID NO: 14046 - DNA, 20 bp, Artificial Sequence
  Description of Artificial Sequence: Synthetic oligonucleotide
  Target: COL7A1; (-) strand; PAM type: NRG; PAM sequence: TGG
agcaggagtgacaggtcagc

SEQ ID NO: 14047 - DNA, 20 bp, Artificial Sequence
  Description of Artificial Sequence: Synthetic oligonucleotide
  Target: COL7A1; (-) strand; PAM type: NRG; PAM sequence: CAG
accgagcaggagtgacaggt

SEQ ID NO: 14048 - DNA, 20 bp, Artificial Sequence
  Description of Artificial Sequence: Synthetic oligonucleotide
  Target: COL7A1; (-) strand; PAM type: NRG; PAM sequence: AGG
aaggaccgagcaggagtgac

SEQ ID NO: 14049 - DNA, 20 bp, Artificial Sequence
  Description of Artificial Sequence: Synthetic oligonucleotide
  Target: COL7A1; (-) strand; PAM type: NRG; PAM sequence: CAG
taaggaccgagcaggagtga

SEQ ID NO: 14050 - DNA, 20 bp, Artificial Sequence
  Description of Artificial Sequence: Synthetic oligonucleotide
  Target: COL7A1; (-) strand; PAM type: NRG; PAM sequence: GAG
tgtgggtaaggaccgagcag

SEQ ID NO: 14051 - DNA, 20 bp, Artificial Sequence
  Description of Artificial Sequence: Synthetic oligonucleotide
  Target: COL7A1; (-) strand; PAM type: NRG; PAM sequence: AGG
gctgtgggtaaggaccgagc

SEQ ID NO: 14052 - DNA, 20 bp, Artificial Sequence
  Description of Artificial Sequence: Synthetic oligonucleotide
  Target: COL7A1; (-) strand; PAM type: NRG; PAM sequence: CAG
tgctgtgggtaaggaccgag

SEQ ID NO: 14053 - DNA, 20 bp, Artificial Sequence
  Description of Artificial Sequence: Synthetic oligonucleotide
  Target: COL7A1; (-) strand; PAM type: NRG; PAM sequence: GAG
atttgctgtgggtaaggacc

SEQ ID NO: 14054 - DNA, 20 bp, Artificial Sequence
  Description of Artificial Sequence: Synthetic oligonucleotide
  Target: COL7A1; (-) strand; PAM type: NRG; PAM sequence: AGG
caagctatttgctgtgggta

SEQ ID NO: 14055 - DNA, 20 bp, Artificial Sequence
  Description of Artificial Sequence: Synthetic oligonucleotide
  Target: COL7A1; (-) strand; PAM type: NRG; PAM sequence: AAG
tcaagctatttgctgtgggt

SEQ ID NO: 14056 - DNA, 20 bp, Artificial Sequence
  Description of Artificial Sequence: Synthetic oligonucleotide
  Target: COL7A1; (-) strand; PAM type: NRG; PAM sequence: GGG
ggggtcaagctatttgctgt

SEQ ID NO: 14057 - DNA, 20 bp, Artificial Sequence
  Description of Artificial Sequence: Synthetic oligonucleotide
  Target: COL7A1; (-) strand; PAM type: NRG; PAM sequence: TGG
gggggtcaagctatttgctg

SEQ ID NO: 14058 - DNA, 20 bp, Artificial Sequence
  Description of Artificial Sequence: Synthetic oligonucleotide
  Target: COL7A1; (-) strand; PAM type: NRG; PAM sequence: AAG
ggctgaaggggcagggggtc

SEQ ID NO: 14059 - DNA, 20 bp, Artificial Sequence
  Description of Artificial Sequence: Synthetic oligonucleotide
  Target: COL7A1; (-) strand; PAM type: NRG; PAM sequence: GGG
ccaaaggctgaaggggcagg

SEQ ID NO: 14060 - DNA, 20 bp, Artificial Sequence
  Description of Artificial Sequence: Synthetic oligonucleotide
  Target: COL7A1; (-) strand; PAM type: NRG; PAM sequence: GGG
cccaaaggctgaaggggcag

SEQ ID NO: 14061 - DNA, 20 bp, Artificial Sequence
  Description of Artificial Sequence: Synthetic oligonucleotide
  Target: COL7A1; (-) strand; PAM type: NRG; PAM sequence: GGG
gcccaaaggctgaaggggca

SEQ ID NO: 14062 - DNA, 20 bp, Artificial Sequence
  Description of Artificial Sequence: Synthetic oligonucleotide
  Target: COL7A1; (-) strand; PAM type: NRG; PAM sequence: AGG
tgcccaaaggctgaaggggc

SEQ ID NO: 14063 - DNA, 20 bp, Artificial Sequence
  Description of Artificial Sequence: Synthetic oligonucleotide
  Target: COL7A1; (-) strand; PAM type: NRG; PAM sequence: CAG
ctgcccaaaggctgaagggg

SEQ ID NO: 14064 - DNA, 20 bp, Artificial Sequence
  Description of Artificial Sequence: Synthetic oligonucleotide
  Target: COL7A1; (-) strand; PAM type: NRG; PAM sequence: GGG
cagctgcccaaaggctgaag

SEQ ID NO: 14065 - DNA, 20 bp, Artificial Sequence
  Description of Artificial Sequence: Synthetic oligonucleotide
  Target: COL7A1; (-) strand; PAM type: NRG; PAM sequence: GGG
acagctgcccaaaggctgaa

SEQ ID NO: 14066 - DNA, 20 bp, Artificial Sequence
  Description of Artificial Sequence: Synthetic oligonucleotide
  Target: COL7A1; (-) strand; PAM type: NRG; PAM sequence: AGG
cacagctgcccaaaggctga

SEQ ID NO: 14067 - DNA, 20 bp, Artificial Sequence
  Description of Artificial Sequence: Synthetic oligonucleotide
  Target: COL7A1; (-) strand; PAM type: NRG; PAM sequence: AAG
acacagctgcccaaaggctg

SEQ ID NO: 14068 - DNA, 20 bp, Artificial Sequence
  Description of Artificial Sequence: Synthetic oligonucleotide
  Target: COL7A1; (-) strand; PAM type: NRG; PAM sequence: AGG
tggtggacacagctgcccaa

SEQ ID NO: 14069 - DNA, 20 bp, Artificial Sequence
  Description of Artificial Sequence: Synthetic oligonucleotide
  Target: COL7A1; (-) strand; PAM type: NRG; PAM sequence: AAG
ctggtggacacagctgccca

SEQ ID NO: 14070 - DNA, 20 bp, Artificial Sequence
  Description of Artificial Sequence: Synthetic oligonucleotide
  Target: COL7A1; (-) strand; PAM type: NRG; PAM sequence: CAG
gtcccaggacctggtggaca

SEQ ID NO: 14071 - DNA, 20 bp, Artificial Sequence
  Description of Artificial Sequence: Synthetic oligonucleotide
  Target: COL7A1; (-) strand; PAM type: NRG; PAM sequence: TGG
cgggaagtcccaggacctgg

SEQ ID NO: 14072 - DNA, 20 bp, Artificial Sequence
  Description of Artificial Sequence: Synthetic oligonucleotide
  Target: COL7A1; (-) strand; PAM type: NRG; PAM sequence: TGG
agacgggaagtcccaggacc

SEQ ID NO: 14073 - DNA, 20 bp, Artificial Sequence
  Description of Artificial Sequence: Synthetic oligonucleotide
  Target: COL7A1; (-) strand; PAM type: NRG; PAM sequence: AGG
gatcacagacgggaagtccc

SEQ ID NO: 14074 - DNA, 20 bp, Artificial Sequence
  Description of Artificial Sequence: Synthetic oligonucleotide
  Target: COL7A1; (-) strand; PAM type: NRG; PAM sequence: CAG
tgatcacagacgggaagtcc

SEQ ID NO: 14075 - DNA, 20 bp, Artificial Sequence
  Description of Artificial Sequence: Synthetic oligonucleotide
  Target: COL7A1; (-) strand; PAM type: NRG; PAM sequence: AAG
gcatcctgatcacagacggg

SEQ ID NO: 14076 - DNA, 20 bp, Artificial Sequence
  Description of Artificial Sequence: Synthetic oligonucleotide
  Target: COL7A1; (-) strand; PAM type: NRG; PAM sequence: GGG
tctgcatcctgatcacagac

SEQ ID NO: 14077 - DNA, 20 bp, Artificial Sequence
  Description of Artificial Sequence: Synthetic oligonucleotide
  Target: COL7A1; (-) strand; PAM type: NRG; PAM sequence: CGG
gtctgcatcctgatcacaga

SEQ ID NO: 14078 - DNA, 20 bp, Artificial Sequence
  Description of Artificial Sequence: Synthetic oligonucleotide
  Target: COL7A1; (-) strand; PAM type: NRG; PAM sequence: CAG
ccaggtctgcatcctgatca

SEQ ID NO: 14079 - DNA, 20 bp, Artificial Sequence
  Description of Artificial Sequence: Synthetic oligonucleotide
  Target: COL7A1; (-) strand; PAM type: NRG; PAM sequence: AGG
ttgacccctgcacctgtccc

SEQ ID NO: 14080 - DNA, 20 bp, Artificial Sequence
  Description of Artificial Sequence: Synthetic oligonucleotide
  Target: COL7A1; (-) strand; PAM type: NRG; PAM sequence: CAG
tttgacccctgcacctgtcc

SEQ ID NO: 14081 - DNA, 20 bp, Artificial Sequence
  Description of Artificial Sequence: Synthetic oligonucleotide
  Target: COL7A1; (-) strand; PAM type: NRG; PAM sequence: GGG
accccaaatgaagtgtccag

SEQ ID NO: 14082 - DNA, 20 bp, Artificial Sequence
  Description of Artificial Sequence: Synthetic oligonucleotide
  Target: COL7A1; (-) strand; PAM type: NRG; PAM sequence: GGG
gaccccaaatgaagtgtcca

SEQ ID NO: 14083 - DNA, 20 bp, Artificial Sequence
  Description of Artificial Sequence: Synthetic oligonucleotide
  Target: COL7A1; (-) strand; PAM type: NRG; PAM sequence: AGG
tgaccccaaatgaagtgtcc

SEQ ID NO: 14084 - DNA, 20 bp, Artificial Sequence
  Description of Artificial Sequence: Synthetic oligonucleotide
  Target: COL7A1; (-) strand; PAM type: NRG; PAM sequence: CAG
atgaccccaaatgaagtgtc

SEQ ID NO: 14085 - DNA, 20 bp, Artificial Sequence
  Description of Artificial Sequence: Synthetic oligonucleotide
  Target: COL7A1; (-) strand; PAM type: NRG; PAM sequence: AAG
tcccaagatgaccccaaatg

SEQ ID NO: 14086 - DNA, 20 bp, Artificial Sequence
  Description of Artificial Sequence: Synthetic oligonucleotide
  Target: COL7A1; (-) strand; PAM type: NRG; PAM sequence: AAG
ctacccctaccatgcctccc

SEQ ID NO: 14087 - DNA, 20 bp, Artificial Sequence
  Description of Artificial Sequence: Synthetic oligonucleotide
  Target: COL7A1; (-) strand; PAM type: NRG; PAM sequence: AGG
ggcccgacctggtgtcccca

SEQ ID NO: 14088 - DNA, 20 bp, Artificial Sequence
  Description of Artificial Sequence: Synthetic oligonucleotide
  Target: COL7A1; (-) strand; PAM type: NRG; PAM sequence: AAG
tggcccgacctggtgtcccc

SEQ ID NO: 14089 - DNA, 20 bp, Artificial Sequence
  Description of Artificial Sequence: Synthetic oligonucleotide
  Target: COL7A1; (-) strand; PAM type: NRG; PAM sequence: TGG
ctgccccagctggcccgacc

SEQ ID NO: 14090 - DNA, 20 bp, Artificial Sequence
  Description of Artificial Sequence: Synthetic oligonucleotide
  Target: COL7A1; (-) strand; PAM type: NRG; PAM sequence: TGG
ccatgtcttcctgccccagc

SEQ ID NO: 14091 - DNA, 20 bp, Artificial Sequence
  Description of Artificial Sequence: Synthetic oligonucleotide
  Target: COL7A1; (-) strand; PAM type: NRG; PAM sequence: CAG
ctgaccatgtcttcctgccc

SEQ ID NO: 14092 - DNA, 20 bp, Artificial Sequence
  Description of Artificial Sequence: Synthetic oligonucleotide
  Target: COL7A1; (-) strand; PAM type: NRG; PAM sequence: TGG
aggggctgcaattctccatg

SEQ ID NO: 14093 - DNA, 20 bp, Artificial Sequence
  Description of Artificial Sequence: Synthetic oligonucleotide
  Target: COL7A1; (-) strand; PAM type: NRG; PAM sequence: GGG
ggggggcaacactcgcacag

SEQ ID NO: 14094 - DNA, 20 bp, Artificial Sequence
  Description of Artificial Sequence: Synthetic oligonucleotide
  Target: COL7A1; (-) strand; PAM type: NRG; PAM sequence: GGG
aggggggcaacactcgcaca

SEQ ID NO: 14095 - DNA, 20 bp, Artificial Sequence
  Description of Artificial Sequence: Synthetic oligonucleotide
  Target: COL7A1; (-) strand; PAM type: NRG; PAM sequence: AGG
aaggggggcaacactcgcac

SEQ ID NO: 14096 - DNA, 20 bp, Artificial Sequence
  Description of Artificial Sequence: Synthetic oligonucleotide
  Target: COL7A1; (-) strand; PAM type: NRG; PAM sequence: CAG
caaggggggcaacactcgca

SEQ ID NO: 14097 - DNA, 20 bp, Artificial Sequence
  Description of Artificial Sequence: Synthetic oligonucleotide
  Target: COL7A1; (-) strand; PAM type: NRG; PAM sequence: GGG
cgtgagcttagctacaaggg

SEQ ID NO: 14098 - DNA, 20 bp, Artificial Sequence
  Description of Artificial Sequence: Synthetic oligonucleotide
  Target: COL7A1; (-) strand; PAM type: NRG; PAM sequence: GGG
ccgtgagcttagctacaagg

SEQ ID NO: 14099 - DNA, 20 bp, Artificial Sequence
  Description of Artificial Sequence: Synthetic oligonucleotide
  Target: COL7A1; (-) strand; PAM type: NRG; PAM sequence: GGG
tccgtgagcttagctacaag

SEQ ID NO: 14100 - DNA, 20 bp, Artificial Sequence
  Description of Artificial Sequence: Synthetic oligonucleotide
  Target: COL7A1; (-) strand; PAM type: NRG; PAM sequence: GGG
atccgtgagcttagctacaa

SEQ ID NO: 14101 - DNA, 20 bp, Artificial Sequence
  Description of Artificial Sequence: Synthetic oligonucleotide
  Target: COL7A1; (-) strand; PAM type: NRG; PAM sequence: AGG
catccgtgagcttagctaca

SEQ ID NO: 14102 - DNA, 20 bp, Artificial Sequence
  Description of Artificial Sequence: Synthetic oligonucleotide
  Target: COL7A1; (-) strand; PAM type: NRG; PAM sequence: AAG
ccatccgtgagcttagctac

SEQ ID NO: 14103 - DNA, 20 bp, Artificial Sequence
  Description of Artificial Sequence: Synthetic oligonucleotide
  Target: COL7A1; (-) strand; PAM type: NRG; PAM sequence: TAG
atccgcgccatccgtgagct

SEQ ID NO: 14104 - DNA, 20 bp, Artificial Sequence
  Description of Artificial Sequence: Synthetic oligonucleotide
  Target: COL7A1; (-) strand; PAM type: NRG; PAM sequence: GAG
atgtgatccgcgccatccgt

SEQ ID NO: 14105 - DNA, 20 bp, Artificial Sequence
  Description of Artificial Sequence: Synthetic oligonucleotide
  Target: COL7A1; (-) strand; PAM type: NRG; PAM sequence: GGG
ctggatgcacttggctctgg

SEQ ID NO: 14106 - DNA, 20 bp, Artificial Sequence
  Description of Artificial Sequence: Synthetic oligonucleotide
  Target: COL7A1; (-) strand; PAM type: NRG; PAM sequence: GGG
cctggatgcacttggctctg

SEQ ID NO: 14107 - DNA, 20 bp, Artificial Sequence
  Description of Artificial Sequence: Synthetic oligonucleotide
  Target: COL7A1; (-) strand; PAM type: NRG; PAM sequence: GGG
gcctggatgcacttggctct

SEQ ID NO: 14108 - DNA, 20 bp, Artificial Sequence
  Description of Artificial Sequence: Synthetic oligonucleotide
  Target: COL7A1; (-) strand; PAM type: NRG; PAM sequence: TGG
ggcctggatgcacttggctc

SEQ ID NO: 14109 - DNA, 20 bp, Artificial Sequence
  Description of Artificial Sequence: Synthetic oligonucleotide
  Target: COL7A1; (-) strand; PAM type: NRG; PAM sequence: TGG
gagttcggcctggatgcact

SEQ ID NO: 14110 - DNA, 20 bp, Artificial Sequence
  Description of Artificial Sequence: Synthetic oligonucleotide
  Target: COL7A1; (-) strand; PAM type: NRG; PAM sequence: TGG
caacaggacagagttcggcc

SEQ ID NO: 14111 - DNA, 20 bp, Artificial Sequence
  Description of Artificial Sequence: Synthetic oligonucleotide
  Target: COL7A1; (-) strand; PAM type: NRG; PAM sequence: CGG
ccctccaacaggacagagtt

SEQ ID NO: 14112 - DNA, 20 bp, Artificial Sequence
  Description of Artificial Sequence: Synthetic oligonucleotide
  Target: COL7A1; (-) strand; PAM type: NRG; PAM sequence: GAG
ccctaccctccaacaggaca

SEQ ID NO: 14113 - DNA, 20 bp, Artificial Sequence
  Description of Artificial Sequence: Synthetic oligonucleotide
  Target: COL7A1; (-) strand; PAM type: NRG; PAM sequence: CAG
acccctaccctccaacagga

SEQ ID NO: 14114 - DNA, 20 bp, Artificial Sequence
  Description of Artificial Sequence: Synthetic oligonucleotide
  Target: COL7A1; (-) strand; PAM type: NRG; PAM sequence: AGG
tgccacccctaccctccaac

SEQ ID NO: 14115 - DNA, 20 bp, Artificial Sequence
  Description of Artificial Sequence: Synthetic oligonucleotide
  Target: COL7A1; (-) strand; PAM type: NRG; PAM sequence: CAG
ttgccacccctaccctccaa

SEQ ID NO: 14116 - DNA, 20 bp, Artificial Sequence
  Description of Artificial Sequence: Synthetic oligonucleotide
  Target: COL7A1; (-) strand; PAM type: NRG; PAM sequence: TAG
ccagaagagatcctgagtcc

SEQ ID NO: 14117 - DNA, 20 bp, Artificial Sequence
  Description of Artificial Sequence: Synthetic oligonucleotide
  Target: COL7A1; (-) strand; PAM type: NRG; PAM sequence: GAG
ccagggccagaagagatcct

SEQ ID NO: 14118 - DNA, 20 bp, Artificial Sequence
  Description of Artificial Sequence: Synthetic oligonucleotide
  Target: COL7A1; (-) strand; PAM type: NRG; PAM sequence: GAG
cctcaaggccagggccagaa

SEQ ID NO: 14119 - DNA, 20 bp, Artificial Sequence
  Description of Artificial Sequence: Synthetic oligonucleotide
  Target: COL7A1; (-) strand; PAM type: NRG; PAM sequence: AAG
ctcctcaaggccagggccag

SEQ ID NO: 14120 - DNA, 20 bp, Artificial Sequence
  Description of Artificial Sequence: Synthetic oligonucleotide
  Target: COL7A1; (-) strand; PAM type: NRG; PAM sequence: CAG
ggcctcctcaaggccagggc

SEQ ID NO: 14121 - DNA, 20 bp, Artificial Sequence
  Description of Artificial Sequence: Synthetic oligonucleotide
  Target: COL7A1; (-) strand; PAM type: NRG; PAM sequence: GGG
tagaggcctcctcaaggcca

SEQ ID NO: 14122 - DNA, 20 bp, Artificial Sequence
  Description of Artificial Sequence: Synthetic oligonucleotide
  Target: COL7A1; (-) strand; PAM type: NRG; PAM sequence: AGG
ctagaggcctcctcaaggcc

SEQ ID NO: 14123 - DNA, 20 bp, Artificial Sequence
  Description of Artificial Sequence: Synthetic oligonucleotide
  Target: COL7A1; (-) strand; PAM type: NRG; PAM sequence: CAG
cctagaggcctcctcaaggc

SEQ ID NO: 14124 - DNA, 20 bp, Artificial Sequence
  Description of Artificial Sequence: Synthetic oligonucleotide
  Target: COL7A1; (-) strand; PAM type: NRG; PAM sequence: AGG
tcaccctagaggcctcctca

SEQ ID NO: 14125 - DNA, 20 bp, Artificial Sequence
  Description of Artificial Sequence: Synthetic oligonucleotide
  Target: COL7A1; (-) strand; PAM type: NRG; PAM sequence: AAG
ctcaccctagaggcctcctc

SEQ ID NO: 14126 - DNA, 20 bp, Artificial Sequence
  Description of Artificial Sequence: Synthetic oligonucleotide
  Target: COL7A1; (-) strand; PAM type: NRG; PAM sequence: AGG
acccgtaaccctcaccctag

SEQ ID NO: 14127 - DNA, 20 bp, Artificial Sequence
  Description of Artificial Sequence: Synthetic oligonucleotide
  Target: COL7A1; (-) strand; PAM type: NRG; PAM sequence: GAG
tacccgtaaccctcacccta

SEQ ID NO: 14128 - DNA, 20 bp, Artificial Sequence
  Description of Artificial Sequence: Synthetic oligonucleotide
  Target: COL7A1; (-) strand; PAM type: NRG; PAM sequence: TAG
gatacccgtaaccctcaccc

SEQ ID NO: 14129 - DNA, 20 bp, Artificial Sequence
  Description of Artificial Sequence: Synthetic oligonucleotide
  Target: COL7A1; (-) strand; PAM type: NRG; PAM sequence: GAG
aacgaagggacccctcaaga

SEQ ID NO: 14130 - DNA, 20 bp, Artificial Sequence
  Description of Artificial Sequence: Synthetic oligonucleotide
  Target: COL7A1; (-) strand; PAM type: NRG; PAM sequence: GAG
agaacgaagggacccctcaa

SEQ ID NO: 14131 - DNA, 20 bp, Artificial Sequence
  Description of Artificial Sequence: Synthetic oligonucleotide
  Target: COL7A1; (-) strand; PAM type: NRG; PAM sequence: AAG
acagaacgaagggacccctc

SEQ ID NO: 14132 - DNA, 20 bp, Artificial Sequence
  Description of Artificial Sequence: Synthetic oligonucleotide
  Target: COL7A1; (-) strand; PAM type: NRG; PAM sequence: GGG
gtggagaatgacagaacgaa

SEQ ID NO: 14133 - DNA, 20 bp, Artificial Sequence
  Description of Artificial Sequence: Synthetic oligonucleotide
  Target: COL7A1; (-) strand; PAM type: NRG; PAM sequence: AGG
tgtggagaatgacagaacga

SEQ ID NO: 14134 - DNA, 20 bp, Artificial Sequence
  Description of Artificial Sequence: Synthetic oligonucleotide
  Target: COL7A1; (-) strand; PAM type: NRG; PAM sequence: AAG
gtgtggagaatgacagaacg

SEQ ID NO: 14135 - DNA, 20 bp, Artificial Sequence
  Description of Artificial Sequence: Synthetic oligonucleotide
  Target: COL7A1; (-) strand; PAM type: NRG; PAM sequence: CAG
caagtgggtgtggagaatga

SEQ ID NO: 14136 - DNA, 20 bp, Artificial Sequence
  Description of Artificial Sequence: Synthetic oligonucleotide
  Target: COL7A1; (-) strand; PAM type: NRG; PAM sequence: GAG
tccagaggcaagtgggtgtg

SEQ ID NO: 14137 - DNA, 20 bp, Artificial Sequence
  Description of Artificial Sequence: Synthetic oligonucleotide
  Target: COL7A1; (-) strand; PAM type: NRG; PAM sequence: TGG
gttccagaggcaagtgggtg

SEQ ID NO: 14138 - DNA, 20 bp, Artificial Sequence
  Description of Artificial Sequence: Synthetic oligonucleotide
  Target: COL7A1; (-) strand; PAM type: NRG; PAM sequence: GGG
tgggggttccagaggcaagt

SEQ ID NO: 14139 - DNA, 20 bp, Artificial Sequence
  Description of Artificial Sequence: Synthetic oligonucleotide
  Target: COL7A1; (-) strand; PAM type: NRG; PAM sequence: TGG
ctgggggttccagaggcaag

SEQ ID NO: 14140 - DNA, 20 bp, Artificial Sequence
  Description of Artificial Sequence: Synthetic oligonucleotide
  Target: COL7A1; (-) strand; PAM type: NRG; PAM sequence: AAG
aacctgggggttccagaggc

SEQ ID NO: 14141 - DNA, 20 bp, Artificial Sequence
  Description of Artificial Sequence: Synthetic oligonucleotide
  Target: COL7A1; (-) strand; PAM type: NRG; PAM sequence: AGG
tgttaacctgggggttccag

SEQ ID NO: 14142 - DNA, 20 bp, Artificial Sequence
  Description of Artificial Sequence: Synthetic oligonucleotide
  Target: COL7A1; (-) strand; PAM type: NRG; PAM sequence: GAG
ttgttaacctgggggttcca

SEQ ID NO: 14143 - DNA, 20 bp, Artificial Sequence
  Description of Artificial Sequence: Synthetic oligonucleotide
  Target: COL7A1; (-) strand; PAM type: NRG; PAM sequence: CAG
gtttgttaacctgggggttc

SEQ ID NO: 14144 - DNA, 20 bp, Artificial Sequence
  Description of Artificial Sequence: Synthetic oligonucleotide
  Target: COL7A1; (-) strand; PAM type: NRG; PAM sequence: GGG
tggggagtttgttaacctgg

SEQ ID NO: 14145 - DNA, 20 bp, Artificial Sequence
  Description of Artificial Sequence: Synthetic oligonucleotide
  Target: COL7A1; (-) strand; PAM type: NRG; PAM sequence: GGG
ctggggagtttgttaacctg

SEQ ID NO: 14146 - DNA, 20 bp, Artificial Sequence
  Description of Artificial Sequence: Synthetic oligonucleotide
  Target: COL7A1; (-) strand; PAM type: NRG; PAM sequence: GGG
cctggggagtttgttaacct

SEQ ID NO: 14147 - DNA, 20 bp, Artificial Sequence
  Description of Artificial Sequence: Synthetic oligonucleotide
  Target: COL7A1; (-) strand; PAM type: NRG; PAM sequence: TGG
ccctggggagtttgttaacc

SEQ ID NO: 14148 - DNA, 20 bp, Artificial Sequence
  Description of Artificial Sequence: Synthetic oligonucleotide
  Target: COL7A1; (-) strand; PAM type: NRG; PAM sequence: GAG
tgcacaaaggagcccctggg

SEQ ID NO: 14149 - DNA, 20 bp, Artificial Sequence
  Description of Artificial Sequence: Synthetic oligonucleotide
  Target: COL7A1; (-) strand; PAM type: NRG; PAM sequence: GGG
ggtgcacaaaggagcccctg

SEQ ID NO: 14150 - DNA, 20 bp, Artificial Sequence
  Description of Artificial Sequence: Synthetic oligonucleotide
  Target: COL7A1; (-) strand; PAM type: NRG; PAM sequence: GGG
tggtgcacaaaggagcccct

SEQ ID NO: 14151 - DNA, 20 bp, Artificial Sequence
  Description of Artificial Sequence: Synthetic oligonucleotide
  Target: COL7A1; (-) strand; PAM type: NRG; PAM sequence: TGG
atggtgcacaaaggagcccc

SEQ ID NO: 14152 - DNA, 20 bp, Artificial Sequence
  Description of Artificial Sequence: Synthetic oligonucleotide
  Target: COL7A1; (-) strand; PAM type: NRG; PAM sequence: GAG
cctgcagatggtgcacaaag

SEQ ID NO: 14153 - DNA, 20 bp, Artificial Sequence
  Description of Artificial Sequence: Synthetic oligonucleotide
  Target: COL7A1; (-) strand; PAM type: NRG; PAM sequence: AGG
cacctgcagatggtgcacaa

SEQ ID NO: 14154 - DNA, 20 bp, Artificial Sequence
  Description of Artificial Sequence: Synthetic oligonucleotide
  Target: COL7A1; (-) strand; PAM type: NRG; PAM sequence: AAG
ccacctgcagatggtgcaca

SEQ ID NO: 14155 - DNA, 20 bp, Artificial Sequence
  Description of Artificial Sequence: Synthetic oligonucleotide
  Target: COL7A1; (-) strand; PAM type: NRG; PAM sequence: TGG
tgcccaggcccacctgcaga

SEQ ID NO: 14156 - DNA, 20 bp, Artificial Sequence
  Description of Artificial Sequence: Synthetic oligonucleotide
  Target: COL7A1; (-) strand; PAM type: NRG; PAM sequence: CAG
ggtctgcccaggcccacctg

SEQ ID NO: 14157 - DNA, 20 bp, Artificial Sequence
  Description of Artificial Sequence: Synthetic oligonucleotide
  Target: COL7A1; (-) strand; PAM type: NRG; PAM sequence: AGG
gggctccttcaggtctgccc

SEQ ID NO: 14158 - DNA, 20 bp, Artificial Sequence
  Description of Artificial Sequence: Synthetic oligonucleotide
  Target: COL7A1; (-) strand; PAM type: NRG; PAM sequence: CAG
agggctccttcaggtctgcc

SEQ ID NO: 14159 - DNA, 20 bp, Artificial Sequence
  Description of Artificial Sequence: Synthetic oligonucleotide
  Target: COL7A1; (-) strand; PAM type: NRG; PAM sequence: AGG
gagcccctaagggctccttc

SEQ ID NO: 14160 - DNA, 20 bp, Artificial Sequence
  Description of Artificial Sequence: Synthetic oligonucleotide
  Target: COL7A1; (-) strand; PAM type: NRG; PAM sequence: CAG
tgagcccctaagggctcctt

SEQ ID NO: 14161 - DNA, 20 bp, Artificial Sequence
  Description of Artificial Sequence: Synthetic oligonucleotide
  Target: COL7A1; (-) strand; PAM type: NRG; PAM sequence: GGG
cacagactgtgagcccctaa

SEQ ID NO: 14162 - DNA, 20 bp, Artificial Sequence
  Description of Artificial Sequence: Synthetic oligonucleotide
  Target: COL7A1; (-) strand; PAM type: NRG; PAM sequence: AGG
ccacagactgtgagccccta

SEQ ID NO: 14163 - DNA, 20 bp, Artificial Sequence
  Description of Artificial Sequence: Synthetic oligonucleotide
  Target: COL7A1; (-) strand; PAM type: NRG; PAM sequence: AAG
cccacagactgtgagcccct

SEQ ID NO: 14164 - DNA, 20 bp, Artificial Sequence
  Description of Artificial Sequence: Synthetic oligonucleotide
  Target: COL7A1; (-) strand; PAM type: NRG; PAM sequence: GAG
tcttgttccccacagactgt

SEQ ID NO: 14165 - DNA, 20 bp, Artificial Sequence
  Description of Artificial Sequence: Synthetic oligonucleotide
  Target: COL7A1; (-) strand; PAM type: NRG; PAM sequence: CAG
aagcagcatcttgttcccca

SEQ ID NO: 14166 - DNA, 20 bp, Artificial Sequence
  Description of Artificial Sequence: Synthetic oligonucleotide
  Target: COL7A1; (-) strand; PAM type: NRG; PAM sequence: CAG
cctgcaattatttaattaag

SEQ ID NO: 14167 - DNA, 20 bp, Artificial Sequence
  Description of Artificial Sequence: Synthetic oligonucleotide
  Target: COL7A1; (-) strand; PAM type: NRG; PAM sequence: AAG
cctcctgcaattatttaatt

SEQ ID NO: 14168 - DNA, 20 bp, Artificial Sequence
  Description of Artificial Sequence: Synthetic oligonucleotide
  Target: COL7A1; (-) strand; PAM type: NRG; PAM sequence: TGG
agcatccactttcctacatc

SEQ ID NO: 14169 - DNA, 20 bp, Artificial Sequence
  Description of Artificial Sequence: Synthetic oligonucleotide
  Target: COL7A1; (-) strand; PAM type: NRG; PAM sequence: CAG
ccagaggtgctccatctggc

SEQ ID NO: 14170 - DNA, 20 bp, Artificial Sequence
  Description of Artificial Sequence: Synthetic oligonucleotide
  Target: COL7A1; (-) strand; PAM type: NRG; PAM sequence: TGG
ttcaccagaggtgctccatc

SEQ ID NO: 14171 - DNA, 20 bp, Artificial Sequence
  Description of Artificial Sequence: Synthetic oligonucleotide
  Target: COL7A1; (-) strand; PAM type: NRG; PAM sequence: AGG
cccttgcagccgttcaccag

SEQ ID NO: 14172 - DNA, 20 bp, Artificial Sequence
  Description of Artificial Sequence: Synthetic oligonucleotide
  Target: COL7A1; (-) strand; PAM type: NRG; PAM sequence: GAG
acccttgcagccgttcacca

SEQ ID NO: 14173 - DNA, 20 bp, Artificial Sequence
  Description of Artificial Sequence: Synthetic oligonucleotide
  Target: COL7A1; (-) strand; PAM type: NRG; PAM sequence: CAG
taacccttgcagccgttcac

SEQ ID NO: 14174 - DNA, 20 bp, Artificial Sequence
  Description of Artificial Sequence: Synthetic oligonucleotide
  Target: COL7A1; (-) strand; PAM type: NRG; PAM sequence: CAG
ttctagccctctaacccttg

SEQ ID NO: 14175 - DNA, 20 bp, Artificial Sequence
  Description of Artificial Sequence: Synthetic oligonucleotide
  Target: COL7A1; (-) strand; PAM type: NRG; PAM sequence: TAG
ctgttggattctccacgttc

SEQ ID NO: 14176 - DNA, 20 bp, Artificial Sequence
  Description of Artificial Sequence: Synthetic oligonucleotide
  Target: COL7A1; (-) strand; PAM type: NRG; PAM sequence: TGG
gagggggcccccacgcctgt

SEQ ID NO: 14177 - DNA, 20 bp, Artificial Sequence
  Description of Artificial Sequence: Synthetic oligonucleotide
  Target: COL7A1; (-) strand; PAM type: NRG; PAM sequence: GGG
gagatggggagcccaggagg

SEQ ID NO: 14178 - DNA, 20 bp, Artificial Sequence
  Description of Artificial Sequence: Synthetic oligonucleotide
  Target: COL7A1; (-) strand; PAM type: NRG; PAM sequence: GGG
ggagatggggagcccaggag

SEQ ID NO: 14179 - DNA, 20 bp, Artificial Sequence
  Description of Artificial Sequence: Synthetic oligonucleotide
  Target: COL7A1; (-) strand; PAM type: NRG; PAM sequence: GGG
tggagatggggagcccagga

SEQ ID NO: 14180 - DNA, 20 bp, Artificial Sequence
  Description of Artificial Sequence: Synthetic oligonucleotide
  Target: COL7A1; (-) strand; PAM type: NRG; PAM sequence: AGG
ctggagatggggagcccagg

SEQ ID NO: 14181 - DNA, 20 bp, Artificial Sequence
  Description of Artificial Sequence: Synthetic oligonucleotide
  Target: COL7A1; (-) strand; PAM type: NRG; PAM sequence: GAG
tctggagatggggagcccag

SEQ ID NO: 14182 - DNA, 20 bp, Artificial Sequence
  Description of Artificial Sequence: Synthetic oligonucleotide
  Target: COL7A1; (-) strand; PAM type: NRG; PAM sequence: AGG
gatctggagatggggagccc

SEQ ID NO: 14183 - DNA, 20 bp, Artificial Sequence
  Description of Artificial Sequence: Synthetic oligonucleotide
  Target: COL7A1; (-) strand; PAM type: NRG; PAM sequence: CAG
tgatctggagatggggagcc

SEQ ID NO: 14184 - DNA, 20 bp, Artificial Sequence
  Description of Artificial Sequence: Synthetic oligonucleotide
  Target: COL7A1; (-) strand; PAM type: NRG; PAM sequence: GAG
ttttctgatctggagatggg

SEQ ID NO: 14185 - DNA, 20 bp, Artificial Sequence
  Description of Artificial Sequence: Synthetic oligonucleotide
  Target: COL7A1; (-) strand; PAM type: NRG; PAM sequence: GGG
tgttttctgatctggagatg

SEQ ID NO: 14186 - DNA, 20 bp, Artificial Sequence
  Description of Artificial Sequence: Synthetic oligonucleotide
  Target: COL7A1; (-) strand; PAM type: NRG; PAM sequence: GGG
gtgttttctgatctggagat

SEQ ID NO: 14187 - DNA, 20 bp, Artificial Sequence
  Description of Artificial Sequence: Synthetic oligonucleotide
  Target: COL7A1; (-) strand; PAM type: NRG; PAM sequence: TGG
tgtgttttctgatctggaga

SEQ ID NO: 14188 - DNA, 20 bp, Artificial Sequence
  Description of Artificial Sequence: Synthetic oligonucleotide
  Target: COL7A1; (-) strand; PAM type: NRG; PAM sequence: GAG
aggctgtgttttctgatctg

SEQ ID NO: 14189 - DNA, 20 bp, Artificial Sequence
  Description of Artificial Sequence: Synthetic oligonucleotide
  Target: COL7A1; (-) strand; PAM type: NRG; PAM sequence: TGG
tgaggctgtgttttctgatc

SEQ ID NO: 14190 - DNA, 20 bp, Artificial Sequence
  Description of Artificial Sequence: Synthetic oligonucleotide
  Target: COL7A1; (-) strand; PAM type: NRG; PAM sequence: AGG
caggaaggtgcaagacagtg

SEQ ID NO: 14191 - DNA, 20 bp, Artificial Sequence
  Description of Artificial Sequence: Synthetic oligonucleotide
  Target: COL7A1; (-) strand; PAM type: NRG; PAM sequence: GAG
acaggaaggtgcaagacagt

SEQ ID NO: 14192 - DNA, 20 bp, Artificial Sequence
  Description of Artificial Sequence: Synthetic oligonucleotide
  Target: COL7A1; (-) strand; PAM type: NRG; PAM sequence: CAG
caagacaggaaggtgcaaga

SEQ ID NO: 14193 - DNA, 20 bp, Artificial Sequence
  Description of Artificial Sequence: Synthetic oligonucleotide
  Target: COL7A1; (-) strand; PAM type: NRG; PAM sequence: AAG
actgcaagacaggaaggtgc

SEQ ID NO: 14194 - DNA, 20 bp, Artificial Sequence
  Description of Artificial Sequence: Synthetic oligonucleotide
  Target: COL7A1; (-) strand; PAM type: NRG; PAM sequence: AGG
caggctactgcaagacagga

SEQ ID NO: 14195 - DNA, 20 bp, Artificial Sequence
  Description of Artificial Sequence: Synthetic oligonucleotide
  Target: COL7A1; (-) strand; PAM type: NRG; PAM sequence: AAG
ccaggctactgcaagacagg

SEQ ID NO: 14196 - DNA, 20 bp, Artificial Sequence
  Description of Artificial Sequence: Synthetic oligonucleotide
  Target: COL7A1; (-) strand; PAM type: NRG; PAM sequence: AGG
cctccaggctactgcaagac

SEQ ID NO: 14197 - DNA, 20 bp, Artificial Sequence
  Description of Artificial Sequence: Synthetic oligonucleotide
  Target: COL7A1; (-) strand; PAM type: NRG; PAM sequence: CAG
acctccaggctactgcaaga

SEQ ID NO: 14198 - DNA, 20 bp, Artificial Sequence
  Description of Artificial Sequence: Synthetic oligonucleotide
  Target: COL7A1; (-) strand; PAM type: NRG; PAM sequence: AAG
aggcacctccaggctactgc

SEQ ID NO: 14199 - DNA, 20 bp, Artificial Sequence
  Description of Artificial Sequence: Synthetic oligonucleotide
  Target: COL7A1; (-) strand; PAM type: NRG; PAM sequence: AGG
tcgtgccctgaggcacctcc

SEQ ID NO: 14200 - DNA, 20 bp, Artificial Sequence
  Description of Artificial Sequence: Synthetic oligonucleotide
  Target: COL7A1; (-) strand; PAM type: NRG; PAM sequence: CAG
ttcgtgccctgaggcacctc

SEQ ID NO: 14201 - DNA, 20 bp, Artificial Sequence
  Description of Artificial Sequence: Synthetic oligonucleotide
  Target: COL7A1; (-) strand; PAM type: NRG; PAM sequence: AGG
ggtagaaccttcgtgccctg

SEQ ID NO: 14202 - DNA, 20 bp, Artificial Sequence
  Description of Artificial Sequence: Synthetic oligonucleotide
  Target: COL7A1; (-) strand; PAM type: NRG; PAM sequence: GAG
aggtagaaccttcgtgccct

SEQ ID NO: 14203 - DNA, 20 bp, Artificial Sequence
  Description of Artificial Sequence: Synthetic oligonucleotide
  Target: COL7A1; (-) strand; PAM type: NRG; PAM sequence: TAG
agaggtaaggattccctagg

SEQ ID NO: 14204 - DNA, 20 bp, Artificial Sequence
  Description of Artificial Sequence: Synthetic oligonucleotide
  Target: COL7A1; (-) strand; PAM type: NRG; PAM sequence: AGG
gacagaggtaaggattccct

SEQ ID NO: 14205 - DNA, 20 bp, Artificial Sequence
  Description of Artificial Sequence: Synthetic oligonucleotide
  Target: COL7A1; (-) strand; PAM type: NRG; PAM sequence: TAG
agacagaggtaaggattccc

SEQ ID NO: 14206 - DNA, 20 bp, Artificial Sequence
  Description of Artificial Sequence: Synthetic oligonucleotide
  Target: COL7A1; (-) strand; PAM type: NRG; PAM sequence: AGG
ctcctttggagacagaggta

SEQ ID NO: 14207 - DNA, 20 bp, Artificial Sequence
  Description of Artificial Sequence: Synthetic oligonucleotide
  Target: COL7A1; (-) strand; PAM type: NRG; PAM sequence: AAG
cctcctttggagacagaggt

SEQ ID NO: 14208 - DNA, 20 bp, Artificial Sequence
  Description of Artificial Sequence: Synthetic oligonucleotide
  Target: COL7A1; (-) strand; PAM type: NRG; PAM sequence: AGG
aggacctcctttggagacag

SEQ ID NO: 14209 - DNA, 20 bp, Artificial Sequence
  Description of Artificial Sequence: Synthetic oligonucleotide
  Target: COL7A1; (-) strand; PAM type: NRG; PAM sequence: GAG
caggacctcctttggagaca

SEQ ID NO: 14210 - DNA, 20 bp, Artificial Sequence
  Description of Artificial Sequence: Synthetic oligonucleotide
  Target: COL7A1; (-) strand; PAM type: NRG; PAM sequence: CAG
gccaggacctcctttggaga

SEQ ID NO: 14211 - DNA, 20 bp, Artificial Sequence
  Description of Artificial Sequence: Synthetic oligonucleotide
  Target: COL7A1; (-) strand; PAM type: NRG; PAM sequence: GAG
cctagccaggacctcctttg

SEQ ID NO: 14212 - DNA, 20 bp, Artificial Sequence
  Description of Artificial Sequence: Synthetic oligonucleotide
  Target: COL7A1; (-) strand; PAM type: NRG; PAM sequence: TGG
cccctagccaggacctcctt

SEQ ID NO: 14213 - DNA, 20 bp, Artificial Sequence
  Description of Artificial Sequence: Synthetic oligonucleotide
  Target: COL7A1; (-) strand; PAM type: NRG; PAM sequence: AGG
aacctagagaccccctagcc

SEQ ID NO: 14214 - DNA, 20 bp, Artificial Sequence
  Description of Artificial Sequence: Synthetic oligonucleotide
  Target: COL7A1; (-) strand; PAM type: NRG; PAM sequence: CAG
gaacctagagaccccctagc

SEQ ID NO: 14215 - DNA, 20 bp, Artificial Sequence
  Description of Artificial Sequence: Synthetic oligonucleotide
  Target: COL7A1; (-) strand; PAM type: NRG; PAM sequence: TAG
tggggaacctagagaccccc

SEQ ID NO: 14216 - DNA, 20 bp, Artificial Sequence
  Description of Artificial Sequence: Synthetic oligonucleotide
  Target: COL7A1; (-) strand; PAM type: NRG; PAM sequence: GAG
aacaagttttggggaaccta

SEQ ID NO: 14217 - DNA, 20 bp, Artificial Sequence
  Description of Artificial Sequence: Synthetic oligonucleotide
  Target: COL7A1; (-) strand; PAM type: NRG; PAM sequence: TAG
gaaacaagttttggggaacc

SEQ ID NO: 14218 - DNA, 20 bp, Artificial Sequence
  Description of Artificial Sequence: Synthetic oligonucleotide
  Target: COL7A1; (-) strand; PAM type: NRG; PAM sequence: GGG
ctttgcagaaacaagttttg

SEQ ID NO: 14219 - DNA, 20 bp, Artificial Sequence
  Description of Artificial Sequence: Synthetic oligonucleotide
  Target: COL7A1; (-) strand; PAM type: NRG; PAM sequence: GGG
tctttgcagaaacaagtttt

SEQ ID NO: 14220 - DNA, 20 bp, Artificial Sequence
  Description of Artificial Sequence: Synthetic oligonucleotide
  Target: COL7A1; (-) strand; PAM type: NRG; PAM sequence: TGG
gtctttgcagaaacaagttt

SEQ ID NO: 14221 - DNA, 20 bp, Artificial Sequence
  Description of Artificial Sequence: Synthetic oligonucleotide
  Target: COL7A1; (-) strand; PAM type: NRG; PAM sequence: AAG
ggccaggtctttgcagaaac

SEQ ID NO: 14222 - DNA, 20 bp, Artificial Sequence
  Description of Artificial Sequence: Synthetic oligonucleotide
  Target: COL7A1; (-) strand; PAM type: NRG; PAM sequence: CAG
aaccccaggccaggtctttg

SEQ ID NO: 14223 - DNA, 20 bp, Artificial Sequence
  Description of Artificial Sequence: Synthetic oligonucleotide
  Target: COL7A1; (-) strand; PAM type: NRG; PAM sequence: AGG
gaccctggaaaccccaggcc

SEQ ID NO: 14224 - DNA, 20 bp, Artificial Sequence
  Description of Artificial Sequence: Synthetic oligonucleotide
  Target: COL7A1; (-) strand; PAM type: NRG; PAM sequence: CAG
agaccctggaaaccccaggc

SEQ ID NO: 14225 - DNA, 20 bp, Artificial Sequence
  Description of Artificial Sequence: Synthetic oligonucleotide
  Target: COL7A1; (-) strand; PAM type: NRG; PAM sequence: AGG
gaggagaccctggaaacccc

SEQ ID NO: 14226 - DNA, 20 bp, Artificial Sequence
  Description of Artificial Sequence: Synthetic oligonucleotide
  Target: COL7A1; (-) strand; PAM type: NRG; PAM sequence: CAG
ggaggagaccctggaaaccc

SEQ ID NO: 14227 - DNA, 20 bp, Artificial Sequence
  Description of Artificial Sequence: Synthetic oligonucleotide
  Target: COL7A1; (-) strand; PAM type: NRG; PAM sequence: TGG
cccagagagggaggagaccc

SEQ ID NO: 14228 - DNA, 20 bp, Artificial Sequence
  Description of Artificial Sequence: Synthetic oligonucleotide
  Target: COL7A1; (-) strand; PAM type: NRG; PAM sequence: GAG
ctccttccccagagagggag

SEQ ID NO: 14229 - DNA, 20 bp, Artificial Sequence
  Description of Artificial Sequence: Synthetic oligonucleotide
  Target: COL7A1; (-) strand; PAM type: NRG; PAM sequence: AGG
gactccttccccagagaggg

SEQ ID NO: 14230 - DNA, 20 bp, Artificial Sequence
  Description of Artificial Sequence: Synthetic oligonucleotide
  Target: COL7A1; (-) strand; PAM type: NRG; PAM sequence: GAG
agactccttccccagagagg

SEQ ID NO: 14231 - DNA, 20 bp, Artificial Sequence
  Description of Artificial Sequence: Synthetic oligonucleotide
  Target: COL7A1; (-) strand; PAM type: NRG; PAM sequence: GGG
caagactccttccccagaga

SEQ ID NO: 14232 - DNA, 20 bp, Artificial Sequence
  Description of Artificial Sequence: Synthetic oligonucleotide
  Target: COL7A1; (-) strand; PAM type: NRG; PAM sequence: AGG
ccaagactccttccccagag

SEQ ID NO: 14233 - DNA, 20 bp, Artificial Sequence
  Description of Artificial Sequence: Synthetic oligonucleotide
  Target: COL7A1; (-) strand; PAM type: NRG; PAM sequence: GAG
accaagactccttccccaga

SEQ ID NO: 14234 - DNA, 20 bp, Artificial Sequence
  Description of Artificial Sequence: Synthetic oligonucleotide
  Target: COL7A1; (-) strand; PAM type: NRG; PAM sequence: GAG
ccaccaagactccttcccca

SEQ ID NO: 14235 - DNA, 20 bp, Artificial Sequence
  Description of Artificial Sequence: Synthetic oligonucleotide
  Target: COL7A1; (-) strand; PAM type: NRG; PAM sequence: CAG
ccccaccaagactccttccc

SEQ ID NO: 14236 - DNA, 20 bp, Artificial Sequence
  Description of Artificial Sequence: Synthetic oligonucleotide
  Target: COL7A1; (-) strand; PAM type: NRG; PAM sequence: AAG
gggaccacgagatccccacc

SEQ ID NO: 14237 - DNA, 20 bp, Artificial Sequence
  Description of Artificial Sequence: Synthetic oligonucleotide
  Target: COL7A1; (-) strand; PAM type: NRG; PAM sequence: GAG
ccctgggggctggggaccac

SEQ ID NO: 14238 - DNA, 20 bp, Artificial Sequence
  Description of Artificial Sequence: Synthetic oligonucleotide
  Target: COL7A1; (-) strand; PAM type: NRG; PAM sequence: GGG
agtaggggccctgggggctg

SEQ ID NO: 14239 - DNA, 20 bp, Artificial Sequence
  Description of Artificial Sequence: Synthetic oligonucleotide
  Target: COL7A1; (-) strand; PAM type: NRG; PAM sequence: GGG
gagtaggggccctgggggct

SEQ ID NO: 14240 - DNA, 20 bp, Artificial Sequence
  Description of Artificial Sequence: Synthetic oligonucleotide
  Target: COL7A1; (-) strand; PAM type: NRG; PAM sequence: TGG
tgagtaggggccctgggggc

SEQ ID NO: 14241 - DNA, 20 bp, Artificial Sequence
  Description of Artificial Sequence: Synthetic oligonucleotide
  Target: COL7A1; (-) strand; PAM type: NRG; PAM sequence: GGG
acggtgagtaggggccctgg

SEQ ID NO: 14242 - DNA, 20 bp, Artificial Sequence
  Description of Artificial Sequence: Synthetic oligonucleotide
  Target: COL7A1; (-) strand; PAM type: NRG; PAM sequence: GGG
cacggtgagtaggggccctg

SEQ ID NO: 14243 - DNA, 20 bp, Artificial Sequence
  Description of Artificial Sequence: Synthetic oligonucleotide
  Target: COL7A1; (-) strand; PAM type: NRG; PAM sequence: GGG
ccacggtgagtaggggccct

SEQ ID NO: 14244 - DNA, 20 bp, Artificial Sequence
  Description of Artificial Sequence: Synthetic oligonucleotide
  Target: COL7A1; (-) strand; PAM type: NRG; PAM sequence: TGG
cccacggtgagtaggggccc

SEQ ID NO: 14245 - DNA, 20 bp, Artificial Sequence
  Description of Artificial Sequence: Synthetic oligonucleotide
  Target: COL7A1; (-) strand; PAM type: NRG; PAM sequence: GGG
cgatgacccacggtgagtag

SEQ ID NO: 14246 - DNA, 20 bp, Artificial Sequence
  Description of Artificial Sequence: Synthetic oligonucleotide
  Target: COL7A1; (-) strand; PAM type: NRG; PAM sequence: GGG
gcgatgacccacggtgagta

SEQ ID NO: 14247 - DNA, 20 bp, Artificial Sequence
  Description of Artificial Sequence: Synthetic oligonucleotide
  Target: COL7A1; (-) strand; PAM type: NRG; PAM sequence: AGG
agcgatgacccacggtgagt

SEQ ID NO: 14248 - DNA, 20 bp, Artificial Sequence
  Description of Artificial Sequence: Synthetic oligonucleotide
  Target: COL7A1; (-) strand; PAM type: NRG; PAM sequence: TAG
cagcgatgacccacggtgag

SEQ ID NO: 14249 - DNA, 20 bp, Artificial Sequence
  Description of Artificial Sequence: Synthetic oligonucleotide
  Target: COL7A1; (-) strand; PAM type: NRG; PAM sequence: GAG
gtacagcgatgacccacggt

SEQ ID NO: 14250 - DNA, 20 bp, Artificial Sequence
  Description of Artificial Sequence: Synthetic oligonucleotide
  Target: COL7A1; (-) strand; PAM type: NRG; PAM sequence: CGG
tgcagtacagcgatgaccca

SEQ ID NO: 14251 - DNA, 20 bp, Artificial Sequence
  Description of Artificial Sequence: Synthetic oligonucleotide
  Target: COL7A1; (-) strand; PAM type: NRG; PAM sequence: CAG
cgctttgccacagtgcagta

SEQ ID NO: 14252 - DNA, 20 bp, Artificial Sequence
  Description of Artificial Sequence: Synthetic oligonucleotide
  Target: COL7A1; (-) strand; PAM type: NRG; PAM sequence: CAG
gtgtgcgctttgccacagtg

SEQ ID NO: 14253 - DNA, 20 bp, Artificial Sequence
  Description of Artificial Sequence: Synthetic oligonucleotide
  Target: COL7A1; (-) strand; PAM type: NRG; PAM sequence: CAG
acagggtgtgcgctttgcca

SEQ ID NO: 14254 - DNA, 20 bp, Artificial Sequence
  Description of Artificial Sequence: Synthetic oligonucleotide
  Target: COL7A1; (-) strand; PAM type: NRG; PAM sequence: GGG
tctggagcagccagtgcaca

SEQ ID NO: 14255 - DNA, 20 bp, Artificial Sequence
  Description of Artificial Sequence: Synthetic oligonucleotide
  Target: COL7A1; (-) strand; PAM type: NRG; PAM sequence: AGG
ctctggagcagccagtgcac

SEQ ID NO: 14256 - DNA, 20 bp, Artificial Sequence
  Description of Artificial Sequence: Synthetic oligonucleotide
  Target: COL7A1; (-) strand; PAM type: NRG; PAM sequence: CAG
tctctggagcagccagtgca

SEQ ID NO: 14257 - DNA, 20 bp, Artificial Sequence
  Description of Artificial Sequence: Synthetic oligonucleotide
  Target: COL7A1; (-) strand; PAM type: NRG; PAM sequence: CAG
ctgcctttctctggagcagc

SEQ ID NO: 14258 - DNA, 20 bp, Artificial Sequence
  Description of Artificial Sequence: Synthetic oligonucleotide
  Target: COL7A1; (-) strand; PAM type: NRG; PAM sequence: CAG
ggtgctgcctttctctggag

SEQ ID NO: 14259 - DNA, 20 bp, Artificial Sequence
  Description of Artificial Sequence: Synthetic oligonucleotide
  Target: COL7A1; (-) strand; PAM type: NRG; PAM sequence: GAG
gctggtgctgcctttctctg

SEQ ID NO: 14260 - DNA, 20 bp, Artificial Sequence
  Description of Artificial Sequence: Synthetic oligonucleotide
  Target: COL7A1; (-) strand; PAM type: NRG; PAM sequence: TGG
gggctggtgctgcctttctc

SEQ ID NO: 14261 - DNA, 20 bp, Artificial Sequence
  Description of Artificial Sequence: Synthetic oligonucleotide
  Target: COL7A1; (-) strand; PAM type: NRG; PAM sequence: TGG
ccgcagctttctcgaagggc

SEQ ID NO: 14262 - DNA, 20 bp, Artificial Sequence
  Description of Artificial Sequence: Synthetic oligonucleotide
  Target: COL7A1; (-) strand; PAM type: NRG; PAM sequence: GGG
aggtccgcagctttctcgaa

SEQ ID NO: 14263 - DNA, 20 bp, Artificial Sequence
  Description of Artificial Sequence: Synthetic oligonucleotide
  Target: COL7A1; (-) strand; PAM type: NRG; PAM sequence: AGG
gaggtccgcagctttctcga

SEQ ID NO: 14264 - DNA, 20 bp, Artificial Sequence
  Description of Artificial Sequence: Synthetic oligonucleotide
  Target: COL7A1; (-) strand; PAM type: NRG; PAM sequence: AAG
cgaggtccgcagctttctcg

SEQ ID NO: 14265 - DNA, 20 bp, Artificial Sequence
  Description of Artificial Sequence: Synthetic oligonucleotide
  Target: COL7A1; (-) strand; PAM type: NRG; PAM sequence: CAG
agcaatttccgcgaggtccg

SEQ ID NO: 14266 - DNA, 20 bp, Artificial Sequence
  Description of Artificial Sequence: Synthetic oligonucleotide
  Target: COL7A1; (-) strand; PAM type: NRG; PAM sequence: AGG
tggccgcagcaatttccgcg

SEQ ID NO: 14267 - DNA, 20 bp, Artificial Sequence
  Description of Artificial Sequence: Synthetic oligonucleotide
  Target: COL7A1; (-) strand; PAM type: NRG; PAM sequence: GAG
ttggccgcagcaatttccgc

SEQ ID NO: 14268 - DNA, 20 bp, Artificial Sequence
  Description of Artificial Sequence: Synthetic oligonucleotide
  Target: COL7A1; (-) strand; PAM type: NRG; PAM sequence: CAG
ggctcctcatccattggccg

SEQ ID NO: 14269 - DNA, 20 bp, Artificial Sequence
  Description of Artificial Sequence: Synthetic oligonucleotide
  Target: COL7A1; (-) strand; PAM type: NRG; PAM sequence: TGG
ctggatggctcctcatccat

SEQ ID NO: 14270 - DNA, 20 bp, Artificial Sequence
  Description of Artificial Sequence: Synthetic oligonucleotide
  Target: COL7A1; (-) strand; PAM type: NRG; PAM sequence: TGG
gacattgtgttcttactgga

SEQ ID NO: 14271 - DNA, 20 bp, Artificial Sequence
  Description of Artificial Sequence: Synthetic oligonucleotide
  Target: COL7A1; (-) strand; PAM type: NRG; PAM sequence: TGG
cgctgacattgtgttcttac

SEQ ID NO: 14272 - DNA, 20 bp, Artificial Sequence
  Description of Artificial Sequence: Synthetic oligonucleotide
  Target: COL7A1; (-) strand; PAM type: NRG; PAM sequence: CAG
ctgatctctcctgcccgccc

SEQ ID NO: 14273 - DNA, 20 bp, Artificial Sequence
  Description of Artificial Sequence: Synthetic oligonucleotide
  Target: COL7A1; (-) strand; PAM type: NRG; PAM sequence: AGG
ggtggttggcctcccagaag

SEQ ID NO: 14274 - DNA, 20 bp, Artificial Sequence
  Description of Artificial Sequence: Synthetic oligonucleotide
  Target: COL7A1; (-) strand; PAM type: NRG; PAM sequence: GAG
gggtggttggcctcccagaa

SEQ ID NO: 14275 - DNA, 20 bp, Artificial Sequence
  Description of Artificial Sequence: Synthetic oligonucleotide
  Target: COL7A1; (-) strand; PAM type: NRG; PAM sequence: AAG
gcgggtggttggcctcccag

SEQ ID NO: 14276 - DNA, 20 bp, Artificial Sequence
  Description of Artificial Sequence: Synthetic oligonucleotide
  Target: COL7A1; (-) strand; PAM type: NRG; PAM sequence: CAG
taggcgggtggttggcctcc

SEQ ID NO: 14277 - DNA, 20 bp, Artificial Sequence
  Description of Artificial Sequence: Synthetic oligonucleotide
  Target: COL7A1; (-) strand; PAM type: NRG; PAM sequence: TGG
cgtgcgggtaggcgggtggt

SEQ ID NO: 14278 - DNA, 20 bp, Artificial Sequence
  Description of Artificial Sequence: Synthetic oligonucleotide
  Target: COL7A1; (-) strand; PAM type: NRG; PAM sequence: TGG
ccaccgtgcgggtaggcggg

SEQ ID NO: 14279 - DNA, 20 bp, Artificial Sequence
  Description of Artificial Sequence: Synthetic oligonucleotide
  Target: COL7A1; (-) strand; PAM type: NRG; PAM sequence: GGG
aggccaccgtgcgggtaggc

SEQ ID NO: 14280 - DNA, 20 bp, Artificial Sequence
  Description of Artificial Sequence: Synthetic oligonucleotide
  Target: COL7A1; (-) strand; PAM type: NRG; PAM sequence: CGG
gaggccaccgtgcgggtagg

SEQ ID NO: 14281 - DNA, 20 bp, Artificial Sequence
  Description of Artificial Sequence: Synthetic oligonucleotide
  Target: COL7A1; (-) strand; PAM type: NRG; PAM sequence: AGG
agtgaggccaccgtgcgggt

SEQ ID NO: 14282 - DNA, 20 bp, Artificial Sequence
  Description of Artificial Sequence: Synthetic oligonucleotide
  Target: COL7A1; (-) strand; PAM type: NRG; PAM sequence: TAG
cagtgaggccaccgtgcggg

SEQ ID NO: 14283 - DNA, 20 bp, Artificial Sequence
  Description of Artificial Sequence: Synthetic oligonucleotide
  Target: COL7A1; (-) strand; PAM type: NRG; PAM sequence: GGG
tcccagtgaggccaccgtgc

SEQ ID NO: 14284 - DNA, 20 bp, Artificial Sequence
  Description of Artificial Sequence: Synthetic oligonucleotide
  Target: COL7A1; (-) strand; PAM type: NRG; PAM sequence: CGG
gtcccagtgaggccaccgtg

SEQ ID NO: 14285 - DNA, 20 bp, Artificial Sequence
  Description of Artificial Sequence: Synthetic oligonucleotide
  Target: COL7A1; (-) strand; PAM type: NRG; PAM sequence: AGG
caccatcccaagtcccagtg

SEQ ID NO: 14286 - DNA, 20 bp, Artificial Sequence
  Description of Artificial Sequence: Synthetic oligonucleotide
  Target: COL7A1; (-) strand; PAM type: NRG; PAM sequence: GAG
ccaccatcccaagtcccagt

SEQ ID NO: 14287 - DNA, 20 bp, Artificial Sequence
  Description of Artificial Sequence: Synthetic oligonucleotide
  Target: COL7A1; (-) strand; PAM type: NRG; PAM sequence: CAG
ctccccaccatcccaagtcc

SEQ ID NO: 14288 - DNA, 20 bp, Artificial Sequence
  Description of Artificial Sequence: Synthetic oligonucleotide
  Target: COL7A1; (-) strand; PAM type: NRG; PAM sequence: AAG
cctactctccccaccatccc

SEQ ID NO: 14289 - DNA, 20 bp, Artificial Sequence
  Description of Artificial Sequence: Synthetic oligonucleotide
  Target: COL7A1; (-) strand; PAM type: NRG; PAM sequence: AGG
gccctggtttgcataagatg

SEQ ID NO: 14290 - DNA, 20 bp, Artificial Sequence
  Description of Artificial Sequence: Synthetic oligonucleotide
  Target: COL7A1; (-) strand; PAM type: NRG; PAM sequence: GAG
ggccctggtttgcataagat

SEQ ID NO: 14291 - DNA, 20 bp, Artificial Sequence
  Description of Artificial Sequence: Synthetic oligonucleotide
  Target: COL7A1; (-) strand; PAM type: NRG; PAM sequence: AAG
gattcggccctggtttgcat

SEQ ID NO: 14292 - DNA, 20 bp, Artificial Sequence
  Description of Artificial Sequence: Synthetic oligonucleotide
  Target: COL7A1; (-) strand; PAM type: NRG; PAM sequence: TGG
ggctcaggccgattcggccc

SEQ ID NO: 14293 - DNA, 20 bp, Artificial Sequence
  Description of Artificial Sequence: Synthetic oligonucleotide
  Target: COL7A1; (-) strand; PAM type: NRG; PAM sequence: CGG
ccctcaggctcaggccgatt

SEQ ID NO: 14294 - DNA, 20 bp, Artificial Sequence
  Description of Artificial Sequence: Synthetic oligonucleotide
  Target: COL7A1; (-) strand; PAM type: NRG; PAM sequence: AGG
cctccaaggccctcaggctc

SEQ ID NO: 14295 - DNA, 20 bp, Artificial Sequence
  Description of Artificial Sequence: Synthetic oligonucleotide
  Target: COL7A1; (-) strand; PAM type: NRG; PAM sequence: CAG
ccctccaaggccctcaggct

SEQ ID NO: 14296 - DNA, 20 bp, Artificial Sequence
  Description of Artificial Sequence: Synthetic oligonucleotide
  Target: COL7A1; (-) strand; PAM type: NRG; PAM sequence: AGG
caactccctccaaggccctc

SEQ ID NO: 14297 - DNA, 20 bp, Artificial Sequence
  Description of Artificial Sequence: Synthetic oligonucleotide
  Target: COL7A1; (-) strand; PAM type: NRG; PAM sequence: CAG
tcaactccctccaaggccct

SEQ ID NO: 14298 - DNA, 20 bp, Artificial Sequence
  Description of Artificial Sequence: Synthetic oligonucleotide
  Target: COL7A1; (-) strand; PAM type: NRG; PAM sequence: AGG
accgagctcaactccctcca

SEQ ID NO: 14299 - DNA, 20 bp, Artificial Sequence
  Description of Artificial Sequence: Synthetic oligonucleotide
  Target: COL7A1; (-) strand; PAM type: NRG; PAM sequence: AAG
caccgagctcaactccctcc

SEQ ID NO: 14300 - DNA, 20 bp, Artificial Sequence
  Description of Artificial Sequence: Synthetic oligonucleotide
  Target: COL7A1; (-) strand; PAM type: NRG; PAM sequence: GAG
agtctgctctgggacccacc

SEQ ID NO: 14301 - DNA, 20 bp, Artificial Sequence
  Description of Artificial Sequence: Synthetic oligonucleotide
  Target: COL7A1; (-) strand; PAM type: NRG; PAM sequence: GGG
cctccgcgggagtctgctct

SEQ ID NO: 14302 - DNA, 20 bp, Artificial Sequence
  Description of Artificial Sequence: Synthetic oligonucleotide
  Target: COL7A1; (-) strand; PAM type: NRG; PAM sequence: TGG
ccctccgcgggagtctgctc

SEQ ID NO: 14303 - DNA, 20 bp, Artificial Sequence
  Description of Artificial Sequence: Synthetic oligonucleotide
  Target: COL7A1; (-) strand; PAM type: NRG; PAM sequence: GAG
acacccccaaccctccgcgg

SEQ ID NO: 14304 - DNA, 20 bp, Artificial Sequence
  Description of Artificial Sequence: Synthetic oligonucleotide
  Target: COL7A1; (-) strand; PAM type: NRG; PAM sequence: GGG
gcacacccccaaccctccgc

SEQ ID NO: 14305 - DNA, 20 bp, Artificial Sequence
  Description of Artificial Sequence: Synthetic oligonucleotide
  Target: COL7A1; (-) strand; PAM type: NRG; PAM sequence: CGG
cgcacacccccaaccctccg

SEQ ID NO: 14306 - DNA, 20 bp, Artificial Sequence
  Description of Artificial Sequence: Synthetic oligonucleotide
  Target: COL7A1; (-) strand; PAM type: NRG; PAM sequence: TGG
tcccaagtccacacccgtgc

SEQ ID NO: 14307 - DNA, 20 bp, Artificial Sequence
  Description of Artificial Sequence: Synthetic oligonucleotide
  Target: COL7A1; (-) strand; PAM type: NRG; PAM sequence: AAG
tagaggctgacctcagtccc

SEQ ID NO: 14308 - DNA, 20 bp, Artificial Sequence
  Description of Artificial Sequence: Synthetic oligonucleotide
  Target: COL7A1; (-) strand; PAM type: NRG; PAM sequence: CAG
cggcccctagaggctgacct

SEQ ID NO: 14309 - DNA, 20 bp, Artificial Sequence
  Description of Artificial Sequence: Synthetic oligonucleotide
  Target: COL7A1; (-) strand; PAM type: NRG; PAM sequence: AGG
caatccacgccggcccctag

SEQ ID NO: 14310 - DNA, 20 bp, Artificial Sequence
  Description of Artificial Sequence: Synthetic oligonucleotide
  Target: COL7A1; (-) strand; PAM type: NRG; PAM sequence: GAG
ccaatccacgccggccccta

SEQ ID NO: 14311 - DNA, 20 bp, Artificial Sequence
  Description of Artificial Sequence: Synthetic oligonucleotide
  Target: COL7A1; (-) strand; PAM type: NRG; PAM sequence: TAG
tgccaatccacgccggcccc

SEQ ID NO: 14312 - DNA, 20 bp, Artificial Sequence
  Description of Artificial Sequence: Synthetic oligonucleotide
  Target: COL7A1; (-) strand; PAM type: NRG; PAM sequence: CGG
tgccttatgccaatccacgc

SEQ ID NO: 14313 - DNA, 20 bp, Artificial Sequence
  Description of Artificial Sequence: Synthetic oligonucleotide
  Target: COL7A1; (-) strand; PAM type: NRG; PAM sequence: GGG
tggctccctggatgcgtgcg

SEQ ID NO: 14314 - DNA, 20 bp, Artificial Sequence
  Description of Artificial Sequence: Synthetic oligonucleotide
  Target: COL7A1; (-) strand; PAM type: NRG; PAM sequence: GGG
ctggctccctggatgcgtgc

SEQ ID NO: 14315 - DNA, 20 bp, Artificial Sequence
  Description of Artificial Sequence: Synthetic oligonucleotide
  Target: COL7A1; (-) strand; PAM type: NRG; PAM sequence: CGG
tctggctccctggatgcgtg

SEQ ID NO: 14316 - DNA, 20 bp, Artificial Sequence
  Description of Artificial Sequence: Synthetic oligonucleotide
  Target: COL7A1; (-) strand; PAM type: NRG; PAM sequence: TGG
ctacccaaattctggctccc

SEQ ID NO: 14317 - DNA, 20 bp, Artificial Sequence
  Description of Artificial Sequence: Synthetic oligonucleotide
  Target: COL7A1; (-) strand; PAM type: NRG; PAM sequence: TGG
tcctgttcctacccaaattc

SEQ ID NO: 14318 - DNA, 20 bp, Artificial Sequence
  Description of Artificial Sequence: Synthetic oligonucleotide
  Target: COL7A1; (-) strand; PAM type: NRG; PAM sequence: GGG
aaccctccgcgatcggtgct

SEQ ID NO: 14319 - DNA, 20 bp, Artificial Sequence
  Description of Artificial Sequence: Synthetic oligonucleotide
  Target: COL7A1; (-) strand; PAM type: NRG; PAM sequence: TGG
gaaccctccgcgatcggtgc

SEQ ID NO: 14320 - DNA, 20 bp, Artificial Sequence
  Description of Artificial Sequence: Synthetic oligonucleotide
  Target: COL7A1; (-) strand; PAM type: NRG; PAM sequence: CGG
ctccccgaaccctccgcgat

SEQ ID NO: 14321 - DNA, 20 bp, Artificial Sequence
  Description of Artificial Sequence: Synthetic oligonucleotide
  Target: COL7A1; (-) strand; PAM type: NRG; PAM sequence: GGG
cgcggattcctcctaattct

SEQ ID NO: 14322 - DNA, 20 bp, Artificial Sequence
  Description of Artificial Sequence: Synthetic oligonucleotide
  Target: COL7A1; (-) strand; PAM type: NRG; PAM sequence: TGG
ccgcggattcctcctaattc

SEQ ID NO: 14323 - DNA, 20 bp, Artificial Sequence
  Description of Artificial Sequence: Synthetic oligonucleotide
  Target: COL7A1; (-) strand; PAM type: NRG; PAM sequence: CGG
gccaactccacgacgccccg

SEQ ID NO: 14324 - DNA, 20 bp, Artificial Sequence
  Description of Artificial Sequence: Synthetic oligonucleotide
  Target: COL7A1; (-) strand; PAM type: NRG; PAM sequence: CAG
aacaccccccgcccacaacc

SEQ ID NO: 14325 - DNA, 20 bp, Artificial Sequence
  Description of Artificial Sequence: Synthetic oligonucleotide
  Target: COL7A1; (-) strand; PAM type: NRG; PAM sequence: CGG
gtgccaccctccgctccact

SEQ ID NO: 14326 - DNA, 20 bp, Artificial Sequence
  Description of Artificial Sequence: Synthetic oligonucleotide
  Target: COL7A1; (-) strand; PAM type: NRG; PAM sequence: GGG
gcaagggaggacccggcccg

SEQ ID NO: 14327 - DNA, 20 bp, Artificial Sequence
  Description of Artificial Sequence: Synthetic oligonucleotide
  Target: COL7A1; (-) strand; PAM type: NRG; PAM sequence: GGG
cgcaagggaggacccggccc

SEQ ID NO: 14328 - DNA, 20 bp, Artificial Sequence
  Description of Artificial Sequence: Synthetic oligonucleotide
  Target: COL7A1; (-) strand; PAM type: NRG; PAM sequence: CGG
ccgcaagggaggacccggcc

SEQ ID NO: 14329 - DNA, 20 bp, Artificial Sequence
  Description of Artificial Sequence: Synthetic oligonucleotide
  Target: COL7A1; (-) strand; PAM type: NRG; PAM sequence: CGG
gggcaccgcaagggaggacc

SEQ ID NO: 14330 - DNA, 20 bp, Artificial Sequence
  Description of Artificial Sequence: Synthetic oligonucleotide
  Target: COL7A1; (-) strand; PAM type: NRG; PAM sequence: AGG
agaggtgggcaccgcaaggg

SEQ ID NO: 14331 - DNA, 20 bp, Artificial Sequence
  Description of Artificial Sequence: Synthetic oligonucleotide
  Target: COL7A1; (-) strand; PAM type: NRG; PAM sequence: GAG
gagaggtgggcaccgcaagg

SEQ ID NO: 14332 - DNA, 20 bp, Artificial Sequence
  Description of Artificial Sequence: Synthetic oligonucleotide
  Target: COL7A1; (-) strand; PAM type: NRG; PAM sequence: GGG
gagagaggtgggcaccgcaa

SEQ ID NO: 14333 - DNA, 20 bp, Artificial Sequence
  Description of Artificial Sequence: Synthetic oligonucleotide
  Target: COL7A1; (-) strand; PAM type: NRG; PAM sequence: AGG
ggagagaggtgggcaccgca

SEQ ID NO: 14334 - DNA, 20 bp, Artificial Sequence
  Description of Artificial Sequence: Synthetic oligonucleotide
  Target: COL7A1; (-) strand; PAM type: NRG; PAM sequence: AAG
gggagagaggtgggcaccgc

SEQ ID NO: 14335 - DNA, 20 bp, Artificial Sequence
  Description of Artificial Sequence: Synthetic oligonucleotide
  Target: COL7A1; (-) strand; PAM type: NRG; PAM sequence: GGG
cccagcacagggagagaggt

SEQ ID NO: 14336 - DNA, 20 bp, Artificial Sequence
  Description of Artificial Sequence: Synthetic oligonucleotide
  Target: COL7A1; (-) strand; PAM type: NRG; PAM sequence: TGG
gcccagcacagggagagagg

SEQ ID NO: 14337 - DNA, 20 bp, Artificial Sequence
  Description of Artificial Sequence: Synthetic oligonucleotide
  Target: COL7A1; (-) strand; PAM type: NRG; PAM sequence: AGG
cgagcccagcacagggagag

SEQ ID NO: 14338 - DNA, 20 bp, Artificial Sequence
  Description of Artificial Sequence: Synthetic oligonucleotide
  Target: COL7A1; (-) strand; PAM type: NRG; PAM sequence: GAG
gcgagcccagcacagggaga

SEQ ID NO: 14339 - DNA, 20 bp, Artificial Sequence
  Description of Artificial Sequence: Synthetic oligonucleotide
  Target: COL7A1; (-) strand; PAM type: NRG; PAM sequence: GAG
gtgcgagcccagcacaggga

SEQ ID NO: 14340 - DNA, 20 bp, Artificial Sequence
  Description of Artificial Sequence: Synthetic oligonucleotide
  Target: COL7A1; (-) strand; PAM type: NRG; PAM sequence: GAG
gagtgcgagcccagcacagg

SEQ ID NO: 14341 - DNA, 20 bp, Artificial Sequence
  Description of Artificial Sequence: Synthetic oligonucleotide
  Target: COL7A1; (-) strand; PAM type: NRG; PAM sequence: GGG
ccgagtgcgagcccagcaca

SEQ ID NO: 14342 - DNA, 20 bp, Artificial Sequence
  Description of Artificial Sequence: Synthetic oligonucleotide
  Target: COL7A1; (-) strand; PAM type: NRG; PAM sequence: AGG
cccgagtgcgagcccagcac

SEQ ID NO: 14343 - DNA, 20 bp, Artificial Sequence
  Description of Artificial Sequence: Synthetic oligonucleotide
  Target: COL7A1; (-) strand; PAM type: NRG; PAM sequence: CAG
ccccgagtgcgagcccagca

SEQ ID NO: 14344 - DNA, 20 bp, Artificial Sequence
  Description of Artificial Sequence: Synthetic oligonucleotide
  Target: COL7A1; (-) strand; PAM type: NRG; PAM sequence: CAG
aggcgccccgagtgcgagcc

SEQ ID NO: 14345 - DNA, 20 bp, Artificial Sequence
  Description of Artificial Sequence: Synthetic oligonucleotide
  Target: COL7A1; (-) strand; PAM type: NRG; PAM sequence: GAG
ggcagaggcgccccgagtgc

SEQ ID NO: 14346 - DNA, 20 bp, Artificial Sequence
  Description of Artificial Sequence: Synthetic oligonucleotide
  Target: COL7A1; (-) strand; PAM type: NRG; PAM sequence: GAG
gatcctggcagaggcgcccc

SEQ ID NO: 14347 - DNA, 20 bp, Artificial Sequence
  Description of Artificial Sequence: Synthetic oligonucleotide
  Target: COL7A1; (-) strand; PAM type: NRG; PAM sequence: AGG
ctgcgccgggatcctggcag

SEQ ID NO: 14348 - DNA, 20 bp, Artificial Sequence
  Description of Artificial Sequence: Synthetic oligonucleotide
  Target: COL7A1; (-) strand; PAM type: NRG; PAM sequence: GAG
tctgcgccgggatcctggca

SEQ ID NO: 14349 - DNA, 20 bp, Artificial Sequence
  Description of Artificial Sequence: Synthetic oligonucleotide
  Target: COL7A1; (-) strand; PAM type: NRG; PAM sequence: CAG
gctctgcgccgggatcctgg

SEQ ID NO: 14350 - DNA, 20 bp, Artificial Sequence
  Description of Artificial Sequence: Synthetic oligonucleotide
  Target: COL7A1; (-) strand; PAM type: NRG; PAM sequence: TGG
cgcgctctgcgccgggatcc

SEQ ID NO: 14351 - DNA, 20 bp, Artificial Sequence
  Description of Artificial Sequence: Synthetic oligonucleotide
  Target: COL7A1; (-) strand; PAM type: NRG; PAM sequence: GGG
tggtggccgcgctctgcgcc

SEQ ID NO: 14352 - DNA, 20 bp, Artificial Sequence
  Description of Artificial Sequence: Synthetic oligonucleotide
  Target: COL7A1; (-) strand; PAM type: NRG; PAM sequence: CGG
ctggtggccgcgctctgcgc

SEQ ID NO: 14353 - DNA, 20 bp, Artificial Sequence
  Description of Artificial Sequence: Synthetic oligonucleotide
  Target: COL7A1; (-) strand; PAM type: NRG; PAM sequence: TGG
gatgacgctgcggcttctgg

SEQ ID NO: 14354 - DNA, 20 bp, Artificial Sequence
  Description of Artificial Sequence: Synthetic oligonucleotide
  Target: COL7A1; (-) strand; PAM type: NRG; PAM sequence: TGG
taggatgacgctgcggcttc

SEQ ID NO: 14355 - DNA, 20 bp, Artificial Sequence
  Description of Artificial Sequence: Synthetic oligonucleotide
  Target: COL7A1; (-) strand; PAM type: NRG; PAM sequence: CGG
tactgcctaggatgacgctg

SEQ ID NO: 14356 - DNA, 20 bp, Artificial Sequence
  Description of Artificial Sequence: Synthetic oligonucleotide
  Target: COL7A1; (-) strand; PAM type: NRG; PAM sequence: AGG
gctgacggcttttactgcct

SEQ ID NO: 14357 - DNA, 20 bp, Artificial Sequence
  Description of Artificial Sequence: Synthetic oligonucleotide
  Target: COL7A1; (-) strand; PAM type: NRG; PAM sequence: TAG
agctgacggcttttactgcc

SEQ ID NO: 14358 - DNA, 20 bp, Artificial Sequence
  Description of Artificial Sequence: Synthetic oligonucleotide
  Target: COL7A1; (-) strand; PAM type: NRG; PAM sequence: CGG
gaggcgggggtcctagctga

SEQ ID NO: 14359 - DNA, 20 bp, Artificial Sequence
  Description of Artificial Sequence: Synthetic oligonucleotide
  Target: COL7A1; (-) strand; PAM type: NRG; PAM sequence: TAG
agggacagaggcgggggtcc

SEQ ID NO: 14360 - DNA, 20 bp, Artificial Sequence
  Description of Artificial Sequence: Synthetic oligonucleotide
  Target: COL7A1; (-) strand; PAM type: NRG; PAM sequence: GGG
ggagcaagggacagaggcgg

SEQ ID NO: 14361 - DNA, 20 bp, Artificial Sequence
  Description of Artificial Sequence: Synthetic oligonucleotide
  Target: COL7A1; (-) strand; PAM type: NRG; PAM sequence: GGG
gggagcaagggacagaggcg

SEQ ID NO: 14362 - DNA, 20 bp, Artificial Sequence
  Description of Artificial Sequence: Synthetic oligonucleotide
  Target: COL7A1; (-) strand; PAM type: NRG; PAM sequence: GGG
ggggagcaagggacagaggc

SEQ ID NO: 14363 - DNA, 20 bp, Artificial Sequence
  Description of Artificial Sequence: Synthetic oligonucleotide
  Target: COL7A1; (-) strand; PAM type: NRG; PAM sequence: CGG
gggggagcaagggacagagg

SEQ ID NO: 14364 - DNA, 20 bp, Artificial Sequence
  Description of Artificial Sequence: Synthetic oligonucleotide
  Target: COL7A1; (-) strand; PAM type: NRG; PAM sequence: AGG
cacgggggagcaagggacag

SEQ ID NO: 14365 - DNA, 20 bp, Artificial Sequence
  Description of Artificial Sequence: Synthetic oligonucleotide
  Target: COL7A1; (-) strand; PAM type: NRG; PAM sequence: GAG
ccacgggggagcaagggaca

SEQ ID NO: 14366 - DNA, 20 bp, Artificial Sequence
  Description of Artificial Sequence: Synthetic oligonucleotide
  Target: COL7A1; (-) strand; PAM type: NRG; PAM sequence: CAG
ggccacgggggagcaaggga

SEQ ID NO: 14367 - DNA, 20 bp, Artificial Sequence
  Description of Artificial Sequence: Synthetic oligonucleotide
  Target: COL7A1; (-) strand; PAM type: NRG; PAM sequence: GGG
ccaaggccacgggggagcaa

SEQ ID NO: 14368 - DNA, 20 bp, Artificial Sequence
  Description of Artificial Sequence: Synthetic oligonucleotide
  Target: COL7A1; (-) strand; PAM type: NRG; PAM sequence: AGG
gccaaggccacgggggagca

SEQ ID NO: 14369 - DNA, 20 bp, Artificial Sequence
  Description of Artificial Sequence: Synthetic oligonucleotide
  Target: COL7A1; (-) strand; PAM type: NRG; PAM sequence: AAG
tgccaaggccacgggggagc

SEQ ID NO: 14370 - DNA, 20 bp, Artificial Sequence
  Description of Artificial Sequence: Synthetic oligonucleotide
  Target: COL7A1; (-) strand; PAM type: NRG; PAM sequence: GAG
gacctgccaaggccacgggg

SEQ ID NO: 14371 - DNA, 20 bp, Artificial Sequence
  Description of Artificial Sequence: Synthetic oligonucleotide
  Target: COL7A1; (-) strand; PAM type: NRG; PAM sequence: GGG
cggacctgccaaggccacgg

SEQ ID NO: 14372 - DNA, 20 bp, Artificial Sequence
  Description of Artificial Sequence: Synthetic oligonucleotide
  Target: COL7A1; (-) strand; PAM type: NRG; PAM sequence: GGG
tcggacctgccaaggccacg

SEQ ID NO: 14373 - DNA, 20 bp, Artificial Sequence
  Description of Artificial Sequence: Synthetic oligonucleotide
  Target: COL7A1; (-) strand; PAM type: NRG; PAM sequence: GGG
ctcggacctgccaaggccac

SEQ ID NO: 14374 - DNA, 20 bp, Artificial Sequence
  Description of Artificial Sequence: Synthetic oligonucleotide
  Target: COL7A1; (-) strand; PAM type: NRG; PAM sequence: CGG
gctcggacctgccaaggcca

SEQ ID NO: 14375 - DNA, 20 bp, Artificial Sequence
  Description of Artificial Sequence: Synthetic oligonucleotide
  Target: COL7A1; (-) strand; PAM type: NRG; PAM sequence: AGG
cgctgggctcggacctgcca

SEQ ID NO: 14376 - DNA, 20 bp, Artificial Sequence
  Description of Artificial Sequence: Synthetic oligonucleotide
  Target: COL7A1; (-) strand; PAM type: NRG; PAM sequence: AAG
gcgctgggctcggacctgcc

SEQ ID NO: 14377 - DNA, 20 bp, Artificial Sequence
  Description of Artificial Sequence: Synthetic oligonucleotide
  Target: COL7A1; (-) strand; PAM type: NRG; PAM sequence: CGG
ggctggaggggcgctgggct

SEQ ID NO: 14378 - DNA, 20 bp, Artificial Sequence
  Description of Artificial Sequence: Synthetic oligonucleotide
  Target: COL7A1; (-) strand; PAM type: NRG; PAM sequence: GGG
actcgggctggaggggcgct

SEQ ID NO: 14379 - DNA, 20 bp, Artificial Sequence
  Description of Artificial Sequence: Synthetic oligonucleotide
  Target: COL7A1; (-) strand; PAM type: NRG; PAM sequence: TGG
gactcgggctggaggggcgc

SEQ ID NO: 14380 - DNA, 20 bp, Artificial Sequence
  Description of Artificial Sequence: Synthetic oligonucleotide
  Target: COL7A1; (-) strand; PAM type: NRG; PAM sequence: GGG
gaccaggactcgggctggag

SEQ ID NO: 14381 - DNA, 20 bp, Artificial Sequence
  Description of Artificial Sequence: Synthetic oligonucleotide
  Target: COL7A1; (-) strand; PAM type: NRG; PAM sequence: GGG
agaccaggactcgggctgga

SEQ ID NO: 14382 - DNA, 20 bp, Artificial Sequence
  Description of Artificial Sequence: Synthetic oligonucleotide
  Target: COL7A1; (-) strand; PAM type: NRG; PAM sequence: AGG
aagaccaggactcgggctgg

SEQ ID NO: 14383 - DNA, 20 bp, Artificial Sequence
  Description of Artificial Sequence: Synthetic oligonucleotide
  Target: COL7A1; (-) strand; PAM type: NRG; PAM sequence: GAG
caagaccaggactcgggctg

SEQ ID NO: 14384 - DNA, 20 bp, Artificial Sequence
  Description of Artificial Sequence: Synthetic oligonucleotide
  Target: COL7A1; (-) strand; PAM type: NRG; PAM sequence: TGG
ggcaagaccaggactcgggc

SEQ ID NO: 14385 - DNA, 20 bp, Artificial Sequence
  Description of Artificial Sequence: Synthetic oligonucleotide
  Target: COL7A1; (-) strand; PAM type: NRG; PAM sequence: GGG
cgcaggcaagaccaggactc

SEQ ID NO: 14386 - DNA, 20 bp, Artificial Sequence
  Description of Artificial Sequence: Synthetic oligonucleotide
  Target: COL7A1; (-) strand; PAM type: NRG; PAM sequence: CGG
gcgcaggcaagaccaggact

SEQ ID NO: 14387 - DNA, 20 bp, Artificial Sequence
  Description of Artificial Sequence: Synthetic oligonucleotide
  Target: COL7A1; (-) strand; PAM type: NRG; PAM sequence: AGG
gcggacgcgcaggcaagacc

SEQ ID NO: 14388 - DNA, 20 bp, Artificial Sequence
  Description of Artificial Sequence: Synthetic oligonucleotide
  Target: COL7A1; (-) strand; PAM type: NRG; PAM sequence: CAG
ggcggacgcgcaggcaagac

SEQ ID NO: 14389 - DNA, 20 bp, Artificial Sequence
  Description of Artificial Sequence: Synthetic oligonucleotide
  Target: COL7A1; (-) strand; PAM type: NRG; PAM sequence: AAG
gagcgggcggacgcgcaggc

SEQ ID NO: 14390 - DNA, 20 bp, Artificial Sequence
  Description of Artificial Sequence: Synthetic oligonucleotide
  Target: COL7A1; (-) strand; PAM type: NRG; PAM sequence: AGG
gcgggagcgggcggacgcgc

SEQ ID NO: 14391 - DNA, 20 bp, Artificial Sequence
  Description of Artificial Sequence: Synthetic oligonucleotide
  Target: COL7A1; (-) strand; PAM type: NRG; PAM sequence: CAG
ggcgggagcgggcggacgcg

SEQ ID NO: 14392 - DNA, 20 bp, Artificial Sequence
  Description of Artificial Sequence: Synthetic oligonucleotide
  Target: COL7A1; (-) strand; PAM type: NRG; PAM sequence: CGG
gcggcggcggcgggagcggg

SEQ ID NO: 14393 - DNA, 20 bp, Artificial Sequence
  Description of Artificial Sequence: Synthetic oligonucleotide
  Target: COL7A1; (-) strand; PAM type: NRG; PAM sequence: GGG
gcagcggcggcggcgggagc

SEQ ID NO: 14394 - DNA, 20 bp, Artificial Sequence
  Description of Artificial Sequence: Synthetic oligonucleotide
  Target: COL7A1; (-) strand; PAM type: NRG; PAM sequence: CGG
tgcagcggcggcggcgggag

SEQ ID NO: 14395 - DNA, 20 bp, Artificial Sequence
  Description of Artificial Sequence: Synthetic oligonucleotide
  Target: COL7A1; (-) strand; PAM type: NRG; PAM sequence: GAG
gactgcagcggcggcggcgg

SEQ ID NO: 14396 - DNA, 20 bp, Artificial Sequence
  Description of Artificial Sequence: Synthetic oligonucleotide
  Target: COL7A1; (-) strand; PAM type: NRG; PAM sequence: GGG
gagactgcagcggcggcggc

SEQ ID NO: 14397 - DNA, 20 bp, Artificial Sequence
  Description of Artificial Sequence: Synthetic oligonucleotide
  Target: COL7A1; (-) strand; PAM type: NRG; PAM sequence: CGG
agagactgcagcggcggcgg

SEQ ID NO: 14398 - DNA, 20 bp, Artificial Sequence
  Description of Artificial Sequence: Synthetic oligonucleotide
  Target: COL7A1; (-) strand; PAM type: NRG; PAM sequence: CGG
ccgagagactgcagcggcgg

SEQ ID NO: 14399 - DNA, 20 bp, Artificial Sequence
  Description of Artificial Sequence: Synthetic oligonucleotide
  Target: COL7A1; (-) strand; PAM type: NRG; PAM sequence: CGG
tgcccgagagactgcagcgg

SEQ ID NO: 14400 - DNA, 20 bp, Artificial Sequence
  Description of Artificial Sequence: Synthetic oligonucleotide
  Target: COL7A1; (-) strand; PAM type: NRG; PAM sequence: CGG
ctctgcccgagagactgcag

SEQ ID NO: 14401 - DNA, 20 bp, Artificial Sequence
  Description of Artificial Sequence: Synthetic oligonucleotide
  Target: COL7A1; (-) strand; PAM type: NRG; PAM sequence: CAG
ctgctctgcccgagagactg

SEQ ID NO: 14402 - DNA, 20 bp, Artificial Sequence
  Description of Artificial Sequence: Synthetic oligonucleotide
  Target: COL7A1; (-) strand; PAM type: NRG; PAM sequence: GAG
cttttctctgctctgcccga

SEQ ID NO: 14403 - DNA, 20 bp, Artificial Sequence
  Description of Artificial Sequence: Synthetic oligonucleotide
  Target: COL7A1; (-) strand; PAM type: NRG; PAM sequence: GAG
gacttttctctgctctgccc

SEQ ID NO: 14404 - DNA, 20 bp, Artificial Sequence
  Description of Artificial Sequence: Synthetic oligonucleotide
  Target: COL7A1; (-) strand; PAM type: NRG; PAM sequence: GGG
cgctccgccccccgagatca

SEQ ID NO: 14405 - DNA, 20 bp, Artificial Sequence
  Description of Artificial Sequence: Synthetic oligonucleotide
  Target: COL7A1; (-) strand; PAM type: NRG; PAM sequence: AGG
ccgctccgccccccgagatc

SEQ ID NO: 14406 - DNA, 20 bp, Artificial Sequence
  Description of Artificial Sequence: Synthetic oligonucleotide
  Target: COL7A1; (-) strand; PAM type: NRG; PAM sequence: CAG
gccgctccgccccccgagat

SEQ ID NO: 14407 - DNA, 20 bp, Artificial Sequence
  Description of Artificial Sequence: Synthetic oligonucleotide
  Target: COL7A1; (-) strand; PAM type: NRG; PAM sequence: GAG
cgcctgccgctccgcccccc

SEQ ID NO: 14408 - DNA, 20 bp, Artificial Sequence
  Description of Artificial Sequence: Synthetic oligonucleotide
  Target: COL7A1; (-) strand; PAM type: NRG; PAM sequence: GGG
atgggtgagggcgggtgcct

SEQ ID NO: 14409 - DNA, 20 bp, Artificial Sequence
  Description of Artificial Sequence: Synthetic oligonucleotide
  Target: COL7A1; (-) strand; PAM type: NRG; PAM sequence: TGG
tatgggtgagggcgggtgcc

SEQ ID NO: 14410 - DNA, 20 bp, Artificial Sequence
  Description of Artificial Sequence: Synthetic oligonucleotide
  Target: COL7A1; (-) strand; PAM type: NRG; PAM sequence: GGG
tcagggatatgggtgagggc

SEQ ID NO: 14411 - DNA, 20 bp, Artificial Sequence
  Description of Artificial Sequence: Synthetic oligonucleotide
  Target: COL7A1; (-) strand; PAM type: NRG; PAM sequence: CGG
ctcagggatatgggtgaggg

SEQ ID NO: 14412 - DNA, 20 bp, Artificial Sequence
  Description of Artificial Sequence: Synthetic oligonucleotide
  Target: COL7A1; (-) strand; PAM type: NRG; PAM sequence: GGG
cctctcagggatatgggtga

SEQ ID NO: 14413 - DNA, 20 bp, Artificial Sequence
  Description of Artificial Sequence: Synthetic oligonucleotide
  Target: COL7A1; (-) strand; PAM type: NRG; PAM sequence: AGG
acctctcagggatatgggtg

SEQ ID NO: 14414 - DNA, 20 bp, Artificial Sequence
  Description of Artificial Sequence: Synthetic oligonucleotide
  Target: COL7A1; (-) strand; PAM type: NRG; PAM sequence: GAG
gacctctcagggatatgggt

SEQ ID NO: 14415 - DNA, 20 bp, Artificial Sequence
  Description of Artificial Sequence: Synthetic oligonucleotide
  Target: COL7A1; (-) strand; PAM type: NRG; PAM sequence: GGG
cggcgacctctcagggatat

SEQ ID NO: 14416 - DNA, 20 bp, Artificial Sequence
  Description of Artificial Sequence: Synthetic oligonucleotide
  Target: COL7A1; (-) strand; PAM type: NRG; PAM sequence: TGG
gcggcgacctctcagggata

SEQ ID NO: 14417 - DNA, 20 bp, Artificial Sequence
  Description of Artificial Sequence: Synthetic oligonucleotide
  Target: COL7A1; (-) strand; PAM type: NRG; PAM sequence: GGG
gggggggcggcgacctctca

SEQ ID NO: 14418 - DNA, 20 bp, Artificial Sequence
  Description of Artificial Sequence: Synthetic oligonucleotide
  Target: COL7A1; (-) strand; PAM type: NRG; PAM sequence: AGG
ggggggggcggcgacctctc

SEQ ID NO: 14419 - DNA, 20 bp, Artificial Sequence
  Description of Artificial Sequence: Synthetic oligonucleotide
  Target: COL7A1; (-) strand; PAM type: NRG; PAM sequence: CAG
tggggggggcggcgacctct

SEQ ID NO: 14420 - DNA, 20 bp, Artificial Sequence
  Description of Artificial Sequence: Synthetic oligonucleotide
  Target: COL7A1; (-) strand; PAM type: NRG; PAM sequence: CGG
tgggggaggggtgggggggg

SEQ ID NO: 14421 - DNA, 20 bp, Artificial Sequence
  Description of Artificial Sequence: Synthetic oligonucleotide
  Target: COL7A1; (-) strand; PAM type: NRG; PAM sequence: GGG
gtctgggggaggggtggggg

SEQ ID NO: 14422 - DNA, 20 bp, Artificial Sequence
  Description of Artificial Sequence: Synthetic oligonucleotide
  Target: COL7A1; (-) strand; PAM type: NRG; PAM sequence: GGG
tgtctgggggaggggtgggg

SEQ ID NO: 14423 - DNA, 20 bp, Artificial Sequence
  Description of Artificial Sequence: Synthetic oligonucleotide
  Target: COL7A1; (-) strand; PAM type: NRG; PAM sequence: GGG
ttgtctgggggaggggtggg

SEQ ID NO: 14424 - DNA, 20 bp, Artificial Sequence
  Description of Artificial Sequence: Synthetic oligonucleotide
  Target: COL7A1; (-) strand; PAM type: NRG; PAM sequence: GGG
tttgtctgggggaggggtgg

SEQ ID NO: 14425 - DNA, 20 bp, Artificial Sequence
  Description of Artificial Sequence: Synthetic oligonucleotide
  Target: COL7A1; (-) strand; PAM type: NRG; PAM sequence: GGG
gtttgtctgggggaggggtg

SEQ ID NO: 14426 - DNA, 20 bp, Artificial Sequence
  Description of Artificial Sequence: Synthetic oligonucleotide
  Target: COL7A1; (-) strand; PAM type: NRG; PAM sequence: GGG
cgtttgtctgggggaggggt

SEQ ID NO: 14427 - DNA, 20 bp, Artificial Sequence
  Description of Artificial Sequence: Synthetic oligonucleotide
  Target: COL7A1; (-) strand; PAM type: NRG; PAM sequence: TGG
tcgtttgtctgggggagggg

SEQ ID NO: 14428 - DNA, 20 bp, Artificial Sequence
  Description of Artificial Sequence: Synthetic oligonucleotide
  Target: COL7A1; (-) strand; PAM type: NRG; PAM sequence: GGG
atatcgtttgtctgggggag

SEQ ID NO: 14429 - DNA, 20 bp, Artificial Sequence
  Description of Artificial Sequence: Synthetic oligonucleotide
  Target: COL7A1; (-) strand; PAM type: NRG; PAM sequence: GGG
catatcgtttgtctggggga

SEQ ID NO: 14430 - DNA, 20 bp, Artificial Sequence
  Description of Artificial Sequence: Synthetic oligonucleotide
  Target: COL7A1; (-) strand; PAM type: NRG; PAM sequence: AGG
tcatatcgtttgtctggggg

SEQ ID NO: 14431 - DNA, 20 bp, Artificial Sequence
  Description of Artificial Sequence: Synthetic oligonucleotide
  Target: COL7A1; (-) strand; PAM type: NRG; PAM sequence: GAG
gtcatatcgtttgtctgggg

SEQ ID NO: 14432 - DNA, 20 bp, Artificial Sequence
  Description of Artificial Sequence: Synthetic oligonucleotide
  Target: COL7A1; (-) strand; PAM type: NRG; PAM sequence: GGG
gcgtcatatcgtttgtctgg

SEQ ID NO: 14433 - DNA, 20 bp, Artificial Sequence
  Description of Artificial Sequence: Synthetic oligonucleotide
  Target: COL7A1; (-) strand; PAM type: NRG; PAM sequence: GGG
tgcgtcatatcgtttgtctg

SEQ ID NO: 14434 - DNA, 20 bp, Artificial Sequence
  Description of Artificial Sequence: Synthetic oligonucleotide
  Target: COL7A1; (-) strand; PAM type: NRG; PAM sequence: GGG
gtgcgtcatatcgtttgtct

SEQ ID NO: 14435 - DNA, 20 bp, Artificial Sequence
  Description of Artificial Sequence: Synthetic oligonucleotide
  Target: COL7A1; (-) strand; PAM type: NRG; PAM sequence: TGG
agtgcgtcatatcgtttgtc

SEQ ID NO: 14436 - DNA, 20 bp, Artificial Sequence
  Description of Artificial Sequence: Synthetic oligonucleotide
  Target: COL7A1; (-) strand; PAM type: NRG; PAM sequence: AAG
gggtcggggggtttatagtt

SEQ ID NO: 14437 - DNA, 20 bp, Artificial Sequence
  Description of Artificial Sequence: Synthetic oligonucleotide
  Target: COL7A1; (-) strand; PAM type: NRG; PAM sequence: TAG
acggggggtcggggggttta

SEQ ID NO: 14438 - DNA, 20 bp, Artificial Sequence
  Description of Artificial Sequence: Synthetic oligonucleotide
  Target: COL7A1; (-) strand; PAM type: NRG; PAM sequence: GGG
agaagccacggggggtcggg

SEQ ID NO: 14439 - DNA, 20 bp, Artificial Sequence
  Description of Artificial Sequence: Synthetic oligonucleotide
  Target: COL7A1; (-) strand; PAM type: NRG; PAM sequence: GGG
cagaagccacggggggtcgg

SEQ ID NO: 14440 - DNA, 20 bp, Artificial Sequence
  Description of Artificial Sequence: Synthetic oligonucleotide
  Target: COL7A1; (-) strand; PAM type: NRG; PAM sequence: GGG
ccagaagccacggggggtcg

SEQ ID NO: 14441 - DNA, 20 bp, Artificial Sequence
  Description of Artificial Sequence: Synthetic oligonucleotide
  Target: COL7A1; (-) strand; PAM type: NRG; PAM sequence: GGG
cccagaagccacggggggtc

SEQ ID NO: 14442 - DNA, 20 bp, Artificial Sequence
  Description of Artificial Sequence: Synthetic oligonucleotide
  Target: COL7A1; (-) strand; PAM type: NRG; PAM sequence: CGG
tcccagaagccacggggggt

SEQ ID NO: 14443 - DNA, 20 bp, Artificial Sequence
  Description of Artificial Sequence: Synthetic oligonucleotide
  Target: COL7A1; (-) strand; PAM type: NRG; PAM sequence: GGG
aaattcccagaagccacggg

SEQ ID NO: 14444 - DNA, 20 bp, Artificial Sequence
  Description of Artificial Sequence: Synthetic oligonucleotide
  Target: COL7A1; (-) strand; PAM type: NRG; PAM sequence: GGG
gaaattcccagaagccacgg

SEQ ID NO: 14445 - DNA, 20 bp, Artificial Sequence
  Description of Artificial Sequence: Synthetic oligonucleotide
  Target: COL7A1; (-) strand; PAM type: NRG; PAM sequence: GGG
ggaaattcccagaagccacg

SEQ ID NO: 14446 - DNA, 20 bp, Artificial Sequence
  Description of Artificial Sequence: Synthetic oligonucleotide
  Target: COL7A1; (-) strand; PAM type: NRG; PAM sequence: GGG
gggaaattcccagaagccac

SEQ ID NO: 14447 - DNA, 20 bp, Artificial Sequence
  Description of Artificial Sequence: Synthetic oligonucleotide
  Target: COL7A1; (-) strand; PAM type: NRG; PAM sequence: CGG
tgggaaattcccagaagcca

SEQ ID NO: 14448 - DNA, 20 bp, Artificial Sequence
  Description of Artificial Sequence: Synthetic oligonucleotide
  Target: COL7A1; (-) strand; PAM type: NRG; PAM sequence: AAG
accttctgggaaattcccag

SEQ ID NO: 14449 - DNA, 20 bp, Artificial Sequence
  Description of Artificial Sequence: Synthetic oligonucleotide
  Target: COL7A1; (-) strand; PAM type: NRG; PAM sequence: CAG
agaaccttctgggaaattcc

SEQ ID NO: 14450 - DNA, 20 bp, Artificial Sequence
  Description of Artificial Sequence: Synthetic oligonucleotide
  Target: COL7A1; (-) strand; PAM type: NRG; PAM sequence: GGG
ctgcccatgcagaaccttct

SEQ ID NO: 14451 - DNA, 20 bp, Artificial Sequence
  Description of Artificial Sequence: Synthetic oligonucleotide
  Target: COL7A1; (-) strand; PAM type: NRG; PAM sequence: TGG
tctgcccatgcagaaccttc

SEQ ID NO: 14452 - DNA, 20 bp, Artificial Sequence
  Description of Artificial Sequence: Synthetic oligonucleotide
  Target: COL7A1; (-) strand; PAM type: NRG; PAM sequence: CAG
tccctcagcatctgcccatg

SEQ ID NO: 14453 - DNA, 20 bp, Artificial Sequence
  Description of Artificial Sequence: Synthetic oligonucleotide
  Target: COL7A1; (-) strand; PAM type: NRG; PAM sequence: CAG
tggagttaggggtactccct

SEQ ID NO: 14454 - DNA, 20 bp, Artificial Sequence
  Description of Artificial Sequence: Synthetic oligonucleotide
  Target: COL7A1; (-) strand; PAM type: NRG; PAM sequence: GGG
gtgaccttagatggagttag

SEQ ID NO: 14455 - DNA, 20 bp, Artificial Sequence
  Description of Artificial Sequence: Synthetic oligonucleotide
  Target: COL7A1; (-) strand; PAM type: NRG; PAM sequence: GGG
tgtgaccttagatggagtta

SEQ ID NO: 14456 - DNA, 20 bp, Artificial Sequence
  Description of Artificial Sequence: Synthetic oligonucleotide
  Target: COL7A1; (-) strand; PAM type: NRG; PAM sequence: AGG
ctgtgaccttagatggagtt

SEQ ID NO: 14457 - DNA, 20 bp, Artificial Sequence
  Description of Artificial Sequence: Synthetic oligonucleotide
  Target: COL7A1; (-) strand; PAM type: NRG; PAM sequence: TAG
cctgtgaccttagatggagt

SEQ ID NO: 14458 - DNA, 20 bp, Artificial Sequence
  Description of Artificial Sequence: Synthetic oligonucleotide
  Target: COL7A1; (-) strand; PAM type: NRG; PAM sequence: GAG
aagacctgtgaccttagatg

SEQ ID NO: 14459 - DNA, 20 bp, Artificial Sequence
  Description of Artificial Sequence: Synthetic oligonucleotide
  Target: COL7A1; (-) strand; PAM type: NRG; PAM sequence: TGG
ccaagacctgtgaccttaga

SEQ ID NO: 14460 - DNA, 20 bp, Artificial Sequence
  Description of Artificial Sequence: Synthetic oligonucleotide
  Target: COL7A1; (-) strand; PAM type: NRG; PAM sequence: TAG
gcagccaagacctgtgacct

SEQ ID NO: 14461 - DNA, 20 bp, Artificial Sequence
  Description of Artificial Sequence: Synthetic oligonucleotide
  Target: COL7A1; (-) strand; PAM type: NRG; PAM sequence: AAG
gtgattgacctaaagcagcc

SEQ ID NO: 14462 - DNA, 20 bp, Artificial Sequence
  Description of Artificial Sequence: Synthetic oligonucleotide
  Target: COL7A1; (-) strand; PAM type: NRG; PAM sequence: CAG
tcactgtgattgacctaaag

SEQ ID NO: 14463 - DNA, 20 bp, Artificial Sequence
  Description of Artificial Sequence: Synthetic oligonucleotide
  Target: COL7A1; (-) strand; PAM type: NRG; PAM sequence: AAG
tggtcactgtgattgaccta

SEQ ID NO: 14464 - DNA, 20 bp, Artificial Sequence
  Description of Artificial Sequence: Synthetic oligonucleotide
  Target: COL7A1; (-) strand; PAM type: NRG; PAM sequence: TGG
aacctgtccactcctcagcc

SEQ ID NO: 14465 - DNA, 20 bp, Artificial Sequence
  Description of Artificial Sequence: Synthetic oligonucleotide
  Target: COL7A1; (-) strand; PAM type: NRG; PAM sequence: CAG
gcaggaacctgtccactcct

SEQ ID NO: 14466 - DNA, 20 bp, Artificial Sequence
  Description of Artificial Sequence: Synthetic oligonucleotide
  Target: COL7A1; (-) strand; PAM type: NRG; PAM sequence: AGG
ctgctgccttgtggctctgc

SEQ ID NO: 14467 - DNA, 20 bp, Artificial Sequence
  Description of Artificial Sequence: Synthetic oligonucleotide
  Target: COL7A1; (-) strand; PAM type: NRG; PAM sequence: CAG
gctgctgccttgtggctctg

SEQ ID NO: 14468 - DNA, 20 bp, Artificial Sequence
  Description of Artificial Sequence: Synthetic oligonucleotide
  Target: COL7A1; (-) strand; PAM type: NRG; PAM sequence: TGG
cccacggcgctgctgccttg

SEQ ID NO: 14469 - DNA, 20 bp, Artificial Sequence
  Description of Artificial Sequence: Synthetic oligonucleotide
  Target: COL7A1; (-) strand; PAM type: NRG; PAM sequence: CGG
aactgcagccccacccccca

SEQ ID NO: 14470 - DNA, 20 bp, Artificial Sequence
  Description of Artificial Sequence: Synthetic oligonucleotide
  Target: COL7A1; (-) strand; PAM type: NRG; PAM sequence: CAG
gggtgagtcatccccaactg

SEQ ID NO: 14471 - DNA, 20 bp, Artificial Sequence
  Description of Artificial Sequence: Synthetic oligonucleotide
  Target: COL7A1; (-) strand; PAM type: NRG; PAM sequence: GAG
acccccactggattgggggt

SEQ ID NO: 14472 - DNA, 20 bp, Artificial Sequence
  Description of Artificial Sequence: Synthetic oligonucleotide
  Target: COL7A1; (-) strand; PAM type: NRG; PAM sequence: GGG
gggcacccccactggattgg

SEQ ID NO: 14473 - DNA, 20 bp, Artificial Sequence
  Description of Artificial Sequence: Synthetic oligonucleotide
  Target: COL7A1; (-) strand; PAM type: NRG; PAM sequence: GGG
tgggcacccccactggattg

SEQ ID NO: 14474 - DNA, 20 bp, Artificial Sequence
  Description of Artificial Sequence: Synthetic oligonucleotide
  Target: COL7A1; (-) strand; PAM type: NRG; PAM sequence: GGG
ctgggcacccccactggatt

SEQ ID NO: 14475 - DNA, 20 bp, Artificial Sequence
  Description of Artificial Sequence: Synthetic oligonucleotide
  Target: COL7A1; (-) strand; PAM type: NRG; PAM sequence: TGG
tctgggcacccccactggat

SEQ ID NO: 14476 - DNA, 20 bp, Artificial Sequence
  Description of Artificial Sequence: Synthetic oligonucleotide
  Target: COL7A1; (-) strand; PAM type: NRG; PAM sequence: TGG
gcttgtctgggcacccccac

SEQ ID NO: 14477 - DNA, 20 bp, Artificial Sequence
  Description of Artificial Sequence: Synthetic oligonucleotide
  Target: COL7A1; (-) strand; PAM type: NRG; PAM sequence: GGG
catggcctgagggcttgtct

SEQ ID NO: 14478 - DNA, 20 bp, Artificial Sequence
  Description of Artificial Sequence: Synthetic oligonucleotide
  Target: COL7A1; (-) strand; PAM type: NRG; PAM sequence: TGG
ccatggcctgagggcttgtc

SEQ ID NO: 14479 - DNA, 20 bp, Artificial Sequence
  Description of Artificial Sequence: Synthetic oligonucleotide
  Target: COL7A1; (-) strand; PAM type: NRG; PAM sequence: GGG
cggcgggacccatggcctga

SEQ ID NO: 14480 - DNA, 20 bp, Artificial Sequence
  Description of Artificial Sequence: Synthetic oligonucleotide
  Target: COL7A1; (-) strand; PAM type: NRG; PAM sequence: AGG
ccggcgggacccatggcctg

SEQ ID NO: 14481 - DNA, 20 bp, Artificial Sequence
  Description of Artificial Sequence: Synthetic oligonucleotide
  Target: COL7A1; (-) strand; PAM type: NRG; PAM sequence: GAG
gccggcgggacccatggcct

SEQ ID NO: 14482 - DNA, 20 bp, Artificial Sequence
  Description of Artificial Sequence: Synthetic oligonucleotide
  Target: COL7A1; (-) strand; PAM type: NRG; PAM sequence: TGG
ggagtggccggcgggaccca

SEQ ID NO: 14483 - DNA, 20 bp, Artificial Sequence
  Description of Artificial Sequence: Synthetic oligonucleotide
  Target: COL7A1; (-) strand; PAM type: NRG; PAM sequence: GGG
gaatcacaggagtggccggc

SEQ ID NO: 14484 - DNA, 20 bp, Artificial Sequence
  Description of Artificial Sequence: Synthetic oligonucleotide
  Target: COL7A1; (-) strand; PAM type: NRG; PAM sequence: CGG
tgaatcacaggagtggccgg

SEQ ID NO: 14485 - DNA, 20 bp, Artificial Sequence
  Description of Artificial Sequence: Synthetic oligonucleotide
  Target: COL7A1; (-) strand; PAM type: NRG; PAM sequence: CGG
ggctgaatcacaggagtggc

SEQ ID NO: 14486 - DNA, 20 bp, Artificial Sequence
  Description of Artificial Sequence: Synthetic oligonucleotide
  Target: COL7A1; (-) strand; PAM type: NRG; PAM sequence: TGG
agatggctgaatcacaggag

SEQ ID NO: 14487 - DNA, 20 bp, Artificial Sequence
  Description of Artificial Sequence: Synthetic oligonucleotide
  Target: COL7A1; (-) strand; PAM type: NRG; PAM sequence: GAG
gacagatggctgaatcacag

SEQ ID NO: 14488 - DNA, 20 bp, Artificial Sequence
  Description of Artificial Sequence: Synthetic oligonucleotide
  Target: COL7A1; (-) strand; PAM type: NRG; PAM sequence: AGG
cagacagatggctgaatcac

SEQ ID NO: 14489 - DNA, 20 bp, Artificial Sequence
  Description of Artificial Sequence: Synthetic oligonucleotide
  Target: COL7A1; (-) strand; PAM type: NRG; PAM sequence: CAG
ccagacagatggctgaatca

SEQ ID NO: 14490 - DNA, 20 bp, Artificial Sequence
  Description of Artificial Sequence: Synthetic oligonucleotide
  Target: COL7A1; (-) strand; PAM type: NRG; PAM sequence: TGG
caggaggcccaccagacaga

SEQ ID NO: 14491 - DNA, 20 bp, Artificial Sequence
  Description of Artificial Sequence: Synthetic oligonucleotide
  Target: COL7A1; (-) strand; PAM type: NRG; PAM sequence: CAG
ggcccaggaggcccaccaga

SEQ ID NO: 14492 - DNA, 20 bp, Artificial Sequence
  Description of Artificial Sequence: Synthetic oligonucleotide
  Target: COL7A1; (-) strand; PAM type: NRG; PAM sequence: CAG
gtggggcccaggaggcccac

SEQ ID NO: 14493 - DNA, 20 bp, Artificial Sequence
  Description of Artificial Sequence: Synthetic oligonucleotide
  Target: COL7A1; (-) strand; PAM type: NRG; PAM sequence: AGG
agatccgggtggggcccagg

SEQ ID NO: 14494 - DNA, 20 bp, Artificial Sequence
  Description of Artificial Sequence: Synthetic oligonucleotide
  Target: COL7A1; (-) strand; PAM type: NRG; PAM sequence: GAG
gagatccgggtggggcccag

SEQ ID NO: 14495 - DNA, 20 bp, Artificial Sequence
  Description of Artificial Sequence: Synthetic oligonucleotide
  Target: COL7A1; (-) strand; PAM type: NRG; PAM sequence: AGG
aggagatccgggtggggccc

SEQ ID NO: 14496 - DNA, 20 bp, Artificial Sequence
  Description of Artificial Sequence: Synthetic oligonucleotide
  Target: COL7A1; (-) strand; PAM type: NRG; PAM sequence: CAG
aaggagatccgggtggggcc

SEQ ID NO: 14497 - DNA, 20 bp, Artificial Sequence
  Description of Artificial Sequence: Synthetic oligonucleotide
  Target: COL7A1; (-) strand; PAM type: NRG; PAM sequence: GGG
ctgtcaaggagatccgggtg

SEQ ID NO: 14498 - DNA, 20 bp, Artificial Sequence
  Description of Artificial Sequence: Synthetic oligonucleotide
  Target: COL7A1; (-) strand; PAM type: NRG; PAM sequence: GGG
cctgtcaaggagatccgggt

SEQ ID NO: 14499 - DNA, 20 bp, Artificial Sequence
  Description of Artificial Sequence: Synthetic oligonucleotide
  Target: COL7A1; (-) strand; PAM type: NRG; PAM sequence: TGG
gcctgtcaaggagatccggg

SEQ ID NO: 14500 - DNA, 20 bp, Artificial Sequence
  Description of Artificial Sequence: Synthetic oligonucleotide
  Target: COL7A1; (-) strand; PAM type: NRG; PAM sequence: GGG
cttgcctgtcaaggagatcc

SEQ ID NO: 14501 - DNA, 20 bp, Artificial Sequence
  Description of Artificial Sequence: Synthetic oligonucleotide
  Target: COL7A1; (-) strand; PAM type: NRG; PAM sequence: CGG
tcttgcctgtcaaggagatc

SEQ ID NO: 14502 - DNA, 20 bp, Artificial Sequence
  Description of Artificial Sequence: Synthetic oligonucleotide
  Target: COL7A1; (-) strand; PAM type: NRG; PAM sequence: GAG
agggcttcttgcctgtcaag

SEQ ID NO: 14503 - DNA, 20 bp, Artificial Sequence
  Description of Artificial Sequence: Synthetic oligonucleotide
  Target: COL7A1; (-) strand; PAM type: NRG; PAM sequence: AGG
ccagggcttcttgcctgtca

SEQ ID NO: 14504 - DNA, 20 bp, Artificial Sequence
  Description of Artificial Sequence: Synthetic oligonucleotide
  Target: COL7A1; (-) strand; PAM type: NRG; PAM sequence: AAG
gccagggcttcttgcctgtc

SEQ ID NO: 14505 - DNA, 20 bp, Artificial Sequence
  Description of Artificial Sequence: Synthetic oligonucleotide
  Target: COL7A1; (-) strand; PAM type: NRG; PAM sequence: GGG
ccagagtcactcatttgcca

SEQ ID NO: 14506 - DNA, 20 bp, Artificial Sequence
  Description of Artificial Sequence: Synthetic oligonucleotide
  Target: COL7A1; (-) strand; PAM type: NRG; PAM sequence: AGG
cccagagtcactcatttgcc

SEQ ID NO: 14507 - DNA, 20 bp, Artificial Sequence
  Description of Artificial Sequence: Synthetic oligonucleotide
  Target: COL7A1; (-) strand; PAM type: NRG; PAM sequence: CAG
gcccagagtcactcatttgc

SEQ ID NO: 14508 - DNA, 20 bp, Artificial Sequence
  Description of Artificial Sequence: Synthetic oligonucleotide
  Target: COL7A1; (-) strand; PAM type: NRG; PAM sequence: GAG
gtttccctaagaccggccca

SEQ ID NO: 14509 - DNA, 20 bp, Artificial Sequence
  Description of Artificial Sequence: Synthetic oligonucleotide
  Target: COL7A1; (-) strand; PAM type: NRG; PAM sequence: CAG
tggtttccctaagaccggcc

SEQ ID NO: 14510 - DNA, 20 bp, Artificial Sequence
  Description of Artificial Sequence: Synthetic oligonucleotide
  Target: COL7A1; (-) strand; PAM type: NRG; PAM sequence: CGG
gaccttggtttccctaagac

SEQ ID NO: 14511 - DNA, 20 bp, Artificial Sequence
  Description of Artificial Sequence: Synthetic oligonucleotide
  Target: COL7A1; (-) strand; PAM type: NRG; PAM sequence: AAG
aaggggaccttggtttccct

SEQ ID NO: 14512 - DNA, 20 bp, Artificial Sequence
  Description of Artificial Sequence: Synthetic oligonucleotide
  Target: COL7A1; (-) strand; PAM type: NRG; PAM sequence: TGG
gatccaggccaaggggacct

SEQ ID NO: 14513 - DNA, 20 bp, Artificial Sequence
  Description of Artificial Sequence: Synthetic oligonucleotide
  Target: COL7A1; (-) strand; PAM type: NRG; PAM sequence: GGG
ttacttggatccaggccaag

SEQ ID NO: 14514 - DNA, 20 bp, Artificial Sequence
  Description of Artificial Sequence: Synthetic oligonucleotide
  Target: COL7A1; (-) strand; PAM type: NRG; PAM sequence: GGG
gttacttggatccaggccaa

SEQ ID NO: 14515 - DNA, 20 bp, Artificial Sequence
  Description of Artificial Sequence: Synthetic oligonucleotide
  Target: COL7A1; (-) strand; PAM type: NRG; PAM sequence: AGG
agttacttggatccaggcca

SEQ ID NO: 14516 - DNA, 20 bp, Artificial Sequence
  Description of Artificial Sequence: Synthetic oligonucleotide
  Target: COL7A1; (-) strand; PAM type: NRG; PAM sequence: AAG
gagttacttggatccaggcc

SEQ ID NO: 14517 - DNA, 20 bp, Artificial Sequence
  Description of Artificial Sequence: Synthetic oligonucleotide
  Target: COL7A1; (-) strand; PAM type: NRG; PAM sequence: AGG
ggggtgagttacttggatcc

SEQ ID NO: 14518 - DNA, 20 bp, Artificial Sequence
  Description of Artificial Sequence: Synthetic oligonucleotide
  Target: COL7A1; (-) strand; PAM type: NRG; PAM sequence: CAG
gggggtgagttacttggatc

SEQ ID NO: 14519 - DNA, 20 bp, Artificial Sequence
  Description of Artificial Sequence: Synthetic oligonucleotide
  Target: COL7A1; (-) strand; PAM type: NRG; PAM sequence: TGG
caaagagggggtgagttact

SEQ ID NO: 14520 - DNA, 20 bp, Artificial Sequence
  Description of Artificial Sequence: Synthetic oligonucleotide
  Target: COL7A1; (-) strand; PAM type: NRG; PAM sequence: GAG
atcccctacaaagagggggt

SEQ ID NO: 14521 - DNA, 20 bp, Artificial Sequence
  Description of Artificial Sequence: Synthetic oligonucleotide
  Target: COL7A1; (-) strand; PAM type: NRG; PAM sequence: GGG
gcttatcccctacaaagagg

SEQ ID NO: 14522 - DNA, 20 bp, Artificial Sequence
  Description of Artificial Sequence: Synthetic oligonucleotide
  Target: COL7A1; (-) strand; PAM type: NRG; PAM sequence: GGG
ggcttatcccctacaaagag

SEQ ID NO: 14523 - DNA, 20 bp, Artificial Sequence
  Description of Artificial Sequence: Synthetic oligonucleotide
  Target: COL7A1; (-) strand; PAM type: NRG; PAM sequence: GGG
cggcttatcccctacaaaga

SEQ ID NO: 14524 - DNA, 20 bp, Artificial Sequence
  Description of Artificial Sequence: Synthetic oligonucleotide
  Target: COL7A1; (-) strand; PAM type: NRG; PAM sequence: AGG
ccggcttatcccctacaaag

SEQ ID NO: 14525 - DNA, 20 bp, Artificial Sequence
  Description of Artificial Sequence: Synthetic oligonucleotide
  Target: COL7A1; (-) strand; PAM type: NRG; PAM sequence: GAG
tccggcttatcccctacaaa

SEQ ID NO: 14526 - DNA, 20 bp, Artificial Sequence
  Description of Artificial Sequence: Synthetic oligonucleotide
  Target: COL7A1; (-) strand; PAM type: NRG; PAM sequence: AAG
cttccggcttatcccctaca

SEQ ID NO: 14527 - DNA, 20 bp, Artificial Sequence
  Description of Artificial Sequence: Synthetic oligonucleotide
  Target: COL7A1; (-) strand; PAM type: NRG; PAM sequence: CGG
cacaggttctctcctccttc

SEQ ID NO: 14528 - DNA, 20 bp, Artificial Sequence
  Description of Artificial Sequence: Synthetic oligonucleotide
  Target: COL7A1; (-) strand; PAM type: NRG; PAM sequence: AGG
tgtatgcataagcatgacac

SEQ ID NO: 14529 - DNA, 20 bp, Artificial Sequence
  Description of Artificial Sequence: Synthetic oligonucleotide
  Target: COL7A1; (-) strand; PAM type: NRG; PAM sequence: CAG
atgtatgcataagcatgaca

SEQ ID NO: 14530 - DNA, 20 bp, Artificial Sequence
  Description of Artificial Sequence: Synthetic oligonucleotide
  Target: COL7A1; (-) strand; PAM type: NRG; PAM sequence: AAG
ggacactgggatgtatgcat

SEQ ID NO: 14531 - DNA, 20 bp, Artificial Sequence
  Description of Artificial Sequence: Synthetic oligonucleotide
  Target: COL7A1; (-) strand; PAM type: NRG; PAM sequence: GGG
ggtaggggatgtgggacact

SEQ ID NO: 14532 - DNA, 20 bp, Artificial Sequence
  Description of Artificial Sequence: Synthetic oligonucleotide
  Target: COL7A1; (-) strand; PAM type: NRG; PAM sequence: TGG
tggtaggggatgtgggacac

SEQ ID NO: 14533 - DNA, 20 bp, Artificial Sequence
  Description of Artificial Sequence: Synthetic oligonucleotide
  Target: COL7A1; (-) strand; PAM type: NRG; PAM sequence: GGG
tgtgacatggtaggggatgt

SEQ ID NO: 14534 - DNA, 20 bp, Artificial Sequence
  Description of Artificial Sequence: Synthetic oligonucleotide
  Target: COL7A1; (-) strand; PAM type: NRG; PAM sequence: TGG
ctgtgacatggtaggggatg

SEQ ID NO: 14535 - DNA, 20 bp, Artificial Sequence
  Description of Artificial Sequence: Synthetic oligonucleotide
  Target: COL7A1; (-) strand; PAM type: NRG; PAM sequence: GGG
atctgcctgtgacatggtag

SEQ ID NO: 14536 - DNA, 20 bp, Artificial Sequence
  Description of Artificial Sequence: Synthetic oligonucleotide
  Target: COL7A1; (-) strand; PAM type: NRG; PAM sequence: GGG
catctgcctgtgacatggta

SEQ ID NO: 14537 - DNA, 20 bp, Artificial Sequence
  Description of Artificial Sequence: Synthetic oligonucleotide
  Target: COL7A1; (-) strand; PAM type: NRG; PAM sequence: AGG
gcatctgcctgtgacatggt

SEQ ID NO: 14538 - DNA, 20 bp, Artificial Sequence
  Description of Artificial Sequence: Synthetic oligonucleotide
  Target: COL7A1; (-) strand; PAM type: NRG; PAM sequence: TAG
tgcatctgcctgtgacatgg

SEQ ID NO: 14539 - DNA, 20 bp, Artificial Sequence
  Description of Artificial Sequence: Synthetic oligonucleotide
  Target: COL7A1; (-) strand; PAM type: NRG; PAM sequence: TGG
gattgcatctgcctgtgaca

SEQ ID NO: 14540 - DNA, 20 bp, Artificial Sequence
  Description of Artificial Sequence: Synthetic oligonucleotide
  Target: COL7A1; (-) strand; PAM type: NRG; PAM sequence: TGG
cccctccctgcaggcacagc

SEQ ID NO: 14541 - DNA, 20 bp, Artificial Sequence
  Description of Artificial Sequence: Synthetic oligonucleotide
  Target: COL7A1; (-) strand; PAM type: NRG; PAM sequence: CAG
cggccccctccctgcaggca

SEQ ID NO: 14542 - DNA, 20 bp, Artificial Sequence
  Description of Artificial Sequence: Synthetic oligonucleotide
  Target: COL7A1; (-) strand; PAM type: NRG; PAM sequence: AGG
atgggcggccccctccctgc

SEQ ID NO: 14543 - DNA, 20 bp, Artificial Sequence
  Description of Artificial Sequence: Synthetic oligonucleotide
  Target: COL7A1; (-) strand; PAM type: NRG; PAM sequence: CAG
gatgggcggccccctccctg

SEQ ID NO: 14544 - DNA, 20 bp, Artificial Sequence
  Description of Artificial Sequence: Synthetic oligonucleotide
  Target: COL7A1; (-) strand; PAM type: NRG; PAM sequence: CGG
tcccgccctccacagatggg

SEQ ID NO: 14545 - DNA, 20 bp, Artificial Sequence
  Description of Artificial Sequence: Synthetic oligonucleotide
  Target: COL7A1; (-) strand; PAM type: NRG; PAM sequence: GGG
tggtcccgccctccacagat

SEQ ID NO: 14546 - DNA, 20 bp, Artificial Sequence
  Description of Artificial Sequence: Synthetic oligonucleotide
  Target: COL7A1; (-) strand; PAM type: NRG; PAM sequence: TGG
gtggtcccgccctccacaga

SEQ ID NO: 14547 - DNA, 20 bp, Artificial Sequence
  Description of Artificial Sequence: Synthetic oligonucleotide
  Target: COL7A1; (-) strand; PAM type: NRG; PAM sequence: CAG
gtgggtggtcccgccctcca

SEQ ID NO: 14548 - DNA, 20 bp, Artificial Sequence
  Description of Artificial Sequence: Synthetic oligonucleotide
  Target: COL7A1; (-) strand; PAM type: NRG; PAM sequence: TGG
agatgagctgtcactgtggg

SEQ ID NO: 14549 - DNA, 20 bp, Artificial Sequence
  Description of Artificial Sequence: Synthetic oligonucleotide
  Target: COL7A1; (-) strand; PAM type: NRG; PAM sequence: GGG
gagagatgagctgtcactgt

SEQ ID NO: 14550 - DNA, 20 bp, Artificial Sequence
  Description of Artificial Sequence: Synthetic oligonucleotide
  Target: COL7A1; (-) strand; PAM type: NRG; PAM sequence: TGG
tgagagatgagctgtcactg

SEQ ID NO: 14551 - DNA, 20 bp, Artificial Sequence
  Description of Artificial Sequence: Synthetic oligonucleotide
  Target: COL7A1; (-) strand; PAM type: NRG; PAM sequence: GAG
gggctcgattcctgagagat

SEQ ID NO: 14552 - DNA, 20 bp, Artificial Sequence
  Description of Artificial Sequence: Synthetic oligonucleotide
  Target: COL7A1; (-) strand; PAM type: NRG; PAM sequence: GAG
atggagggctcgattcctga

SEQ ID NO: 14553 - DNA, 20 bp, Artificial Sequence
  Description of Artificial Sequence: Synthetic oligonucleotide
  Target: COL7A1; (-) strand; PAM type: NRG; PAM sequence: GAG
gcatggagggctcgattcct

SEQ ID NO: 14554 - DNA, 20 bp, Artificial Sequence
  Description of Artificial Sequence: Synthetic oligonucleotide
  Target: COL7A1; (-) strand; PAM type: NRG; PAM sequence: GGG
gacctggcctggggcatgga

SEQ ID NO: 14555 - DNA, 20 bp, Artificial Sequence
  Description of Artificial Sequence: Synthetic oligonucleotide
  Target: COL7A1; (-) strand; PAM type: NRG; PAM sequence: AGG
ggacctggcctggggcatgg

SEQ ID NO: 14556 - DNA, 20 bp, Artificial Sequence
  Description of Artificial Sequence: Synthetic oligonucleotide
  Target: COL7A1; (-) strand; PAM type: NRG; PAM sequence: GAG
gggacctggcctggggcatg

SEQ ID NO: 14557 - DNA, 20 bp, Artificial Sequence
  Description of Artificial Sequence: Synthetic oligonucleotide
  Target: COL7A1; (-) strand; PAM type: NRG; PAM sequence: TGG
gggggacctggcctggggca

SEQ ID NO: 14558 - DNA, 20 bp, Artificial Sequence
  Description of Artificial Sequence: Synthetic oligonucleotide
  Target: COL7A1; (-) strand; PAM type: NRG; PAM sequence: GGG
aggtagggggacctggcctg

SEQ ID NO: 14559 - DNA, 20 bp, Artificial Sequence
  Description of Artificial Sequence: Synthetic oligonucleotide
  Target: COL7A1; (-) strand; PAM type: NRG; PAM sequence: GGG
taggtagggggacctggcct

SEQ ID NO: 14560 - DNA, 20 bp, Artificial Sequence
  Description of Artificial Sequence: Synthetic oligonucleotide
  Target: COL7A1; (-) strand; PAM type: NRG; PAM sequence: TGG
gtaggtagggggacctggcc

SEQ ID NO: 14561 - DNA, 20 bp, Artificial Sequence
  Description of Artificial Sequence: Synthetic oligonucleotide
  Target: COL7A1; (-) strand; PAM type: NRG; PAM sequence: TGG
gacatgtaggtagggggacc

SEQ ID NO: 14562 - DNA, 20 bp, Artificial Sequence
  Description of Artificial Sequence: Synthetic oligonucleotide
  Target: COL7A1; (-) strand; PAM type: NRG; PAM sequence: GGG
ggtgaggacatgtaggtagg

SEQ ID NO: 14563 - DNA, 20 bp, Artificial Sequence
  Description of Artificial Sequence: Synthetic oligonucleotide
  Target: COL7A1; (-) strand; PAM type: NRG; PAM sequence: GGG
gggtgaggacatgtaggtag

SEQ ID NO: 14564 - DNA, 20 bp, Artificial Sequence
  Description of Artificial Sequence: Synthetic oligonucleotide
  Target: COL7A1; (-) strand; PAM type: NRG; PAM sequence: GGG
tgggtgaggacatgtaggta

SEQ ID NO: 14565 - DNA, 20 bp, Artificial Sequence
  Description of Artificial Sequence: Synthetic oligonucleotide
  Target: COL7A1; (-) strand; PAM type: NRG; PAM sequence: AGG
gtgggtgaggacatgtaggt

SEQ ID NO: 14566 - DNA, 20 bp, Artificial Sequence
  Description of Artificial Sequence: Synthetic oligonucleotide
  Target: COL7A1; (-) strand; PAM type: NRG; PAM sequence: TAG
tgtgggtgaggacatgtagg

SEQ ID NO: 14567 - DNA, 20 bp, Artificial Sequence
  Description of Artificial Sequence: Synthetic oligonucleotide
  Target: COL7A1; (-) strand; PAM type: NRG; PAM sequence: AGG
gcctgtgggtgaggacatgt

SEQ ID NO: 14568 - DNA, 20 bp, Artificial Sequence
  Description of Artificial Sequence: Synthetic oligonucleotide
  Target: COL7A1; (-) strand; PAM type: NRG; PAM sequence: TAG
tgcctgtgggtgaggacatg

SEQ ID NO: 14569 - DNA, 20 bp, Artificial Sequence
  Description of Artificial Sequence: Synthetic oligonucleotide
  Target: COL7A1; (-) strand; PAM type: NRG; PAM sequence: AGG
ggagaggatgcctgtgggtg

SEQ ID NO: 14570 - DNA, 20 bp, Artificial Sequence
  Description of Artificial Sequence: Synthetic oligonucleotide
  Target: COL7A1; (-) strand; PAM type: NRG; PAM sequence: GAG
aggagaggatgcctgtgggt

SEQ ID NO: 14571 - DNA, 20 bp, Artificial Sequence
  Description of Artificial Sequence: Synthetic oligonucleotide
  Target: COL7A1; (-) strand; PAM type: NRG; PAM sequence: GGG
tggaaggagaggatgcctgt

SEQ ID NO: 14572 - DNA, 20 bp, Artificial Sequence
  Description of Artificial Sequence: Synthetic oligonucleotide
  Target: COL7A1; (-) strand; PAM type: NRG; PAM sequence: TGG
atggaaggagaggatgcctg

SEQ ID NO: 14573 - DNA, 20 bp, Artificial Sequence
  Description of Artificial Sequence: Synthetic oligonucleotide
  Target: COL7A1; (-) strand; PAM type: NRG; PAM sequence: AGG
agaaaagtagatggaaggag

SEQ ID NO: 14574 - DNA, 20 bp, Artificial Sequence
  Description of Artificial Sequence: Synthetic oligonucleotide
  Target: COL7A1; (-) strand; PAM type: NRG; PAM sequence: GAG
aagaaaagtagatggaagga

SEQ ID NO: 14575 - DNA, 20 bp, Artificial Sequence
  Description of Artificial Sequence: Synthetic oligonucleotide
  Target: COL7A1; (-) strand; PAM type: NRG; PAM sequence: GAG
acaagaaaagtagatggaag

SEQ ID NO: 14576 - DNA, 20 bp, Artificial Sequence
  Description of Artificial Sequence: Synthetic oligonucleotide
  Target: COL7A1; (-) strand; PAM type: NRG; PAM sequence: AGG
ctacaagaaaagtagatgga

SEQ ID NO: 14577 - DNA, 20 bp, Artificial Sequence
  Description of Artificial Sequence: Synthetic oligonucleotide
  Target: COL7A1; (-) strand; PAM type: NRG; PAM sequence: AAG
cctacaagaaaagtagatgg

SEQ ID NO: 14578 - DNA, 20 bp, Artificial Sequence
  Description of Artificial Sequence: Synthetic oligonucleotide
  Target: COL7A1; (-) strand; PAM type: NRG; PAM sequence: TGG
ggacctacaagaaaagtaga

SEQ ID NO: 14579 - DNA, 20 bp, Artificial Sequence
  Description of Artificial Sequence: Synthetic oligonucleotide
  Target: COL7A1; (-) strand; PAM type: NRG; PAM sequence: TAG
gcagggacctacaagaaaag

SEQ ID NO: 14580 - DNA, 20 bp, Artificial Sequence
  Description of Artificial Sequence: Synthetic oligonucleotide
  Target: COL7A1; (-) strand; PAM type: NRG; PAM sequence: AAG
gtggcagggacctacaagaa

SEQ ID NO: 14581 - DNA, 20 bp, Artificial Sequence
  Description of Artificial Sequence: Synthetic oligonucleotide
  Target: COL7A1; (-) strand; PAM type: NRG; PAM sequence: AAG
gatgggtggcagggacctac

SEQ ID NO: 14582 - DNA, 20 bp, Artificial Sequence
  Description of Artificial Sequence: Synthetic oligonucleotide
  Target: COL7A1; (-) strand; PAM type: NRG; PAM sequence: GGG
ggtaggggagatgggtggca

SEQ ID NO: 14583 - DNA, 20 bp, Artificial Sequence
  Description of Artificial Sequence: Synthetic oligonucleotide
  Target: COL7A1; (-) strand; PAM type: NRG; PAM sequence: AGG
tggtaggggagatgggtggc

SEQ ID NO: 14584 - DNA, 20 bp, Artificial Sequence
  Description of Artificial Sequence: Synthetic oligonucleotide
  Target: COL7A1; (-) strand; PAM type: NRG; PAM sequence: CAG
ctggtaggggagatgggtgg

SEQ ID NO: 14585 - DNA, 20 bp, Artificial Sequence
  Description of Artificial Sequence: Synthetic oligonucleotide
  Target: COL7A1; (-) strand; PAM type: NRG; PAM sequence: TGG
ggcctggtaggggagatggg

SEQ ID NO: 14586 - DNA, 20 bp, Artificial Sequence
  Description of Artificial Sequence: Synthetic oligonucleotide
  Target: COL7A1; (-) strand; PAM type: NRG; PAM sequence: GGG
ctcggcctggtaggggagat

SEQ ID NO: 14587 - DNA, 20 bp, Artificial Sequence
  Description of Artificial Sequence: Synthetic oligonucleotide
  Target: COL7A1; (-) strand; PAM type: NRG; PAM sequence: TGG
cctcggcctggtaggggaga

SEQ ID NO: 14588 - DNA, 20 bp, Artificial Sequence
  Description of Artificial Sequence: Synthetic oligonucleotide
  Target: COL7A1; (-) strand; PAM type: NRG; PAM sequence: GAG
gggacctcggcctggtaggg

SEQ ID NO: 14589 - DNA, 20 bp, Artificial Sequence
  Description of Artificial Sequence: Synthetic oligonucleotide
  Target: COL7A1; (-) strand; PAM type: NRG; PAM sequence: GGG
aggggacctcggcctggtag

SEQ ID NO: 14590 - DNA, 20 bp, Artificial Sequence
  Description of Artificial Sequence: Synthetic oligonucleotide
  Target: COL7A1; (-) strand; PAM type: NRG; PAM sequence: GGG
aaggggacctcggcctggta

SEQ ID NO: 14591 - DNA, 20 bp, Artificial Sequence
  Description of Artificial Sequence: Synthetic oligonucleotide
  Target: COL7A1; (-) strand; PAM type: NRG; PAM sequence: AGG
caaggggacctcggcctggt

SEQ ID NO: 14592 - DNA, 20 bp, Artificial Sequence
  Description of Artificial Sequence: Synthetic oligonucleotide
  Target: COL7A1; (-) strand; PAM type: NRG; PAM sequence: TAG
ccaaggggacctcggcctgg

SEQ ID NO: 14593 - DNA, 20 bp, Artificial Sequence
  Description of Artificial Sequence: Synthetic oligonucleotide
  Target: COL7A1; (-) strand; PAM type: NRG; PAM sequence: TGG
ggcccaaggggacctcggcc

SEQ ID NO: 14594 - DNA, 20 bp, Artificial Sequence
  Description of Artificial Sequence: Synthetic oligonucleotide
  Target: COL7A1; (-) strand; PAM type: NRG; PAM sequence: CGG
gaaggggcccaaggggacct

SEQ ID NO: 14595 - DNA, 20 bp, Artificial Sequence
  Description of Artificial Sequence: Synthetic oligonucleotide
  Target: COL7A1; (-) strand; PAM type: NRG; PAM sequence: GGG
aaaggaggaaggggcccaag

SEQ ID NO: 14596 - DNA, 20 bp, Artificial Sequence
  Description of Artificial Sequence: Synthetic oligonucleotide
  Target: COL7A1; (-) strand; PAM type: NRG; PAM sequence: GGG
gaaaggaggaaggggcccaa

SEQ ID NO: 14597 - DNA, 20 bp, Artificial Sequence
  Description of Artificial Sequence: Synthetic oligonucleotide
  Target: COL7A1; (-) strand; PAM type: NRG; PAM sequence: AGG
ggaaaggaggaaggggccca

SEQ ID NO: 14598 - DNA, 20 bp, Artificial Sequence
  Description of Artificial Sequence: Synthetic oligonucleotide
  Target: COL7A1; (-) strand; PAM type: NRG; PAM sequence: AAG
aggaaaggaggaaggggccc

SEQ ID NO: 14599 - DNA, 20 bp, Artificial Sequence
  Description of Artificial Sequence: Synthetic oligonucleotide
  Target: COL7A1; (-) strand; PAM type: NRG; PAM sequence: GGG
gcagtgaggaaaggaggaag

SEQ ID NO: 14600 - DNA, 20 bp, Artificial Sequence
  Description of Artificial Sequence: Synthetic oligonucleotide
  Target: COL7A1; (-) strand; PAM type: NRG; PAM sequence: GGG
ggcagtgaggaaaggaggaa

SEQ ID NO: 14601 - DNA, 20 bp, Artificial Sequence
  Description of Artificial Sequence: Synthetic oligonucleotide
  Target: COL7A1; (-) strand; PAM type: NRG; PAM sequence: AGG
gggcagtgaggaaaggagga

SEQ ID NO: 14602 - DNA, 20 bp, Artificial Sequence
  Description of Artificial Sequence: Synthetic oligonucleotide
  Target: COL7A1; (-) strand; PAM type: NRG; PAM sequence: AAG
agggcagtgaggaaaggagg

SEQ ID NO: 14603 - DNA, 20 bp, Artificial Sequence
  Description of Artificial Sequence: Synthetic oligonucleotide
  Target: COL7A1; (-) strand; PAM type: NRG; PAM sequence: AGG
atgagggcagtgaggaaagg

SEQ ID NO: 14604 - DNA, 20 bp, Artificial Sequence
  Description of Artificial Sequence: Synthetic oligonucleotide
  Target: COL7A1; (-) strand; PAM type: NRG; PAM sequence: GAG
catgagggcagtgaggaaag

SEQ ID NO: 14605 - DNA, 20 bp, Artificial Sequence
  Description of Artificial Sequence: Synthetic oligonucleotide
  Target: COL7A1; (-) strand; PAM type: NRG; PAM sequence: AGG
accatgagggcagtgaggaa

SEQ ID NO: 14606 - DNA, 20 bp, Artificial Sequence
  Description of Artificial Sequence: Synthetic oligonucleotide
  Target: COL7A1; (-) strand; PAM type: NRG; PAM sequence: AAG
taccatgagggcagtgagga

SEQ ID NO: 14607 - DNA, 20 bp, Artificial Sequence
  Description of Artificial Sequence: Synthetic oligonucleotide
  Target: COL7A1; (-) strand; PAM type: NRG; PAM sequence: AGG
caggtaccatgagggcagtg

SEQ ID NO: 14608 - DNA, 20 bp, Artificial Sequence
  Description of Artificial Sequence: Synthetic oligonucleotide
  Target: COL7A1; (-) strand; PAM type: NRG; PAM sequence: GAG
acaggtaccatgagggcagt

SEQ ID NO: 14609 - DNA, 20 bp, Artificial Sequence
  Description of Artificial Sequence: Synthetic oligonucleotide
  Target: COL7A1; (-) strand; PAM type: NRG; PAM sequence: CAG
agctacaggtaccatgaggg

SEQ ID NO: 14610 - DNA, 20 bp, Artificial Sequence
  Description of Artificial Sequence: Synthetic oligonucleotide
  Target: COL7A1; (-) strand; PAM type: NRG; PAM sequence: GGG
ggaagctacaggtaccatga

SEQ ID NO: 14611 - DNA, 20 bp, Artificial Sequence
  Description of Artificial Sequence: Synthetic oligonucleotide
  Target: COL7A1; (-) strand; PAM type: NRG; PAM sequence: AGG
tggaagctacaggtaccatg

SEQ ID NO: 14612 - DNA, 20 bp, Artificial Sequence
  Description of Artificial Sequence: Synthetic oligonucleotide
  Target: COL7A1; (-) strand; PAM type: NRG; PAM sequence: GAG
ctggaagctacaggtaccat

SEQ ID NO: 14613 - DNA, 20 bp, Artificial Sequence
  Description of Artificial Sequence: Synthetic oligonucleotide
  Target: COL7A1; (-) strand; PAM type: NRG; PAM sequence: AGG
gttatgaagctggaagctac

SEQ ID NO: 14614 - DNA, 20 bp, Artificial Sequence
  Description of Artificial Sequence: Synthetic oligonucleotide
  Target: COL7A1; (-) strand; PAM type: NRG; PAM sequence: CAG
agttatgaagctggaagcta

SEQ ID NO: 14615 - DNA, 20 bp, Artificial Sequence
  Description of Artificial Sequence: Synthetic oligonucleotide
  Target: COL7A1; (-) strand; PAM type: NRG; PAM sequence: AAG
gggggcagttatgaagctgg

SEQ ID NO: 14616 - DNA, 20 bp, Artificial Sequence
  Description of Artificial Sequence: Synthetic oligonucleotide
  Target: COL7A1; (-) strand; PAM type: NRG; PAM sequence: TGG
gtagggggcagttatgaagc

SEQ ID NO: 14617 - DNA, 20 bp, Artificial Sequence
  Description of Artificial Sequence: Synthetic oligonucleotide
  Target: COL7A1; (-) strand; PAM type: NRG; PAM sequence: AAG
taaggtagggggcagttatg

SEQ ID NO: 14618 - DNA, 20 bp, Artificial Sequence
  Description of Artificial Sequence: Synthetic oligonucleotide
  Target: COL7A1; (-) strand; PAM type: NRG; PAM sequence: CAG
gacaggagtaaggtaggggg

SEQ ID NO: 14619 - DNA, 20 bp, Artificial Sequence
  Description of Artificial Sequence: Synthetic oligonucleotide
  Target: COL7A1; (-) strand; PAM type: NRG; PAM sequence: GGG
ggggacaggagtaaggtagg

SEQ ID NO: 14620 - DNA, 20 bp, Artificial Sequence
  Description of Artificial Sequence: Synthetic oligonucleotide
  Target: COL7A1; (-) strand; PAM type: NRG; PAM sequence: GGG
aggggacaggagtaaggtag

SEQ ID NO: 14621 - DNA, 20 bp, Artificial Sequence
  Description of Artificial Sequence: Synthetic oligonucleotide
  Target: COL7A1; (-) strand; PAM type: NRG; PAM sequence: GGG
aaggggacaggagtaaggta

SEQ ID NO: 14622 - DNA, 20 bp, Artificial Sequence
  Description of Artificial Sequence: Synthetic oligonucleotide
  Target: COL7A1; (-) strand; PAM type: NRG; PAM sequence: AGG
taaggggacaggagtaaggt

SEQ ID NO: 14623 - DNA, 20 bp, Artificial Sequence
  Description of Artificial Sequence: Synthetic oligonucleotide
  Target: COL7A1; (-) strand; PAM type: NRG; PAM sequence: TAG
gtaaggggacaggagtaagg

SEQ ID NO: 14624 - DNA, 20 bp, Artificial Sequence
  Description of Artificial Sequence: Synthetic oligonucleotide
  Target: COL7A1; (-) strand; PAM type: NRG; PAM sequence: AGG
tgggtaaggggacaggagta

SEQ ID NO: 14625 - DNA, 20 bp, Artificial Sequence
  Description of Artificial Sequence: Synthetic oligonucleotide
  Target: COL7A1; (-) strand; PAM type: NRG; PAM sequence: AAG
ctgggtaaggggacaggagt

SEQ ID NO: 14626 - DNA, 20 bp, Artificial Sequence
  Description of Artificial Sequence: Synthetic oligonucleotide
  Target: COL7A1; (-) strand; PAM type: NRG; PAM sequence: GAG
cagcctgggtaaggggacag

SEQ ID NO: 14627 - DNA, 20 bp, Artificial Sequence
  Description of Artificial Sequence: Synthetic oligonucleotide
  Target: COL7A1; (-) strand; PAM type: NRG; PAM sequence: AGG
gtcagcctgggtaaggggac

SEQ ID NO: 14628 - DNA, 20 bp, Artificial Sequence
  Description of Artificial Sequence: Synthetic oligonucleotide
  Target: COL7A1; (-) strand; PAM type: NRG; PAM sequence: CAG
agtcagcctgggtaagggga

SEQ ID NO: 14629 - DNA, 20 bp, Artificial Sequence
  Description of Artificial Sequence: Synthetic oligonucleotide
  Target: COL7A1; (-) strand; PAM type: NRG; PAM sequence: GGG
gtgaagtcagcctgggtaag

SEQ ID NO: 14630 - DNA, 20 bp, Artificial Sequence
  Description of Artificial Sequence: Synthetic oligonucleotide
  Target: COL7A1; (-) strand; PAM type: NRG; PAM sequence: GGG
tgtgaagtcagcctgggtaa

SEQ ID NO: 14631 - DNA, 20 bp, Artificial Sequence
  Description of Artificial Sequence: Synthetic oligonucleotide
  Target: COL7A1; (-) strand; PAM type: NRG; PAM sequence: AGG
gtgtgaagtcagcctgggta

SEQ ID NO: 14632 - DNA, 20 bp, Artificial Sequence
  Description of Artificial Sequence: Synthetic oligonucleotide
  Target: COL7A1; (-) strand; PAM type: NRG; PAM sequence: AAG
ggtgtgaagtcagcctgggt

SEQ ID NO: 14633 - DNA, 20 bp, Artificial Sequence
  Description of Artificial Sequence: Synthetic oligonucleotide
  Target: COL7A1; (-) strand; PAM type: NRG; PAM sequence: GGG
ggagggtgtgaagtcagcct

SEQ ID NO: 14634 - DNA, 20 bp, Artificial Sequence
  Description of Artificial Sequence: Synthetic oligonucleotide
  Target: COL7A1; (-) strand; PAM type: NRG; PAM sequence: TGG
gggagggtgtgaagtcagcc

SEQ ID NO: 14635 - DNA, 20 bp, Artificial Sequence
  Description of Artificial Sequence: Synthetic oligonucleotide
  Target: COL7A1; (-) strand; PAM type: NRG; PAM sequence: CAG
gctgggggagggtgtgaagt

SEQ ID NO: 14636 - DNA, 20 bp, Artificial Sequence
  Description of Artificial Sequence: Synthetic oligonucleotide
  Target: COL7A1; (-) strand; PAM type: NRG; PAM sequence: AAG
cgaagctgggggagggtgtg

SEQ ID NO: 14637 - DNA, 20 bp, Artificial Sequence
  Description of Artificial Sequence: Synthetic oligonucleotide
  Target: COL7A1; (-) strand; PAM type: NRG; PAM sequence: GGG
tcagaagcgaagctggggga

SEQ ID NO: 14638 - DNA, 20 bp, Artificial Sequence
  Description of Artificial Sequence: Synthetic oligonucleotide
  Target: COL7A1; (-) strand; PAM type: NRG; PAM sequence: AGG
ctcagaagcgaagctggggg

SEQ ID NO: 14639 - DNA, 20 bp, Artificial Sequence
  Description of Artificial Sequence: Synthetic oligonucleotide
  Target: COL7A1; (-) strand; PAM type: NRG; PAM sequence: GAG
cctcagaagcgaagctgggg

SEQ ID NO: 14640 - DNA, 20 bp, Artificial Sequence
  Description of Artificial Sequence: Synthetic oligonucleotide
  Target: COL7A1; (-) strand; PAM type: NRG; PAM sequence: GGG
agcctcagaagcgaagctgg

SEQ ID NO: 14641 - DNA, 20 bp, Artificial Sequence
  Description of Artificial Sequence: Synthetic oligonucleotide
  Target: COL7A1; (-) strand; PAM type: NRG; PAM sequence: GGG
cagcctcagaagcgaagctg

SEQ ID NO: 14642 - DNA, 20 bp, Artificial Sequence
  Description of Artificial Sequence: Synthetic oligonucleotide
  Target: COL7A1; (-) strand; PAM type: NRG; PAM sequence: GGG
acagcctcagaagcgaagct

SEQ ID NO: 14643 - DNA, 20 bp, Artificial Sequence
  Description of Artificial Sequence: Synthetic oligonucleotide
  Target: COL7A1; (-) strand; PAM type: NRG; PAM sequence: TGG
cacagcctcagaagcgaagc

SEQ ID NO: 14644 - DNA, 20 bp, Artificial Sequence
  Description of Artificial Sequence: Synthetic oligonucleotide
  Target: COL7A1; (-) strand; PAM type: NRG; PAM sequence: AAG
tgtccacagcctcagaagcg

SEQ ID NO: 14645 - DNA, 20 bp, Artificial Sequence
  Description of Artificial Sequence: Synthetic oligonucleotide
  Target: COL7A1; (-) strand; PAM type: NRG; PAM sequence: AAG
aggactgtccacagcctcag

SEQ ID NO: 14646 - DNA, 20 bp, Artificial Sequence
  Description of Artificial Sequence: Synthetic oligonucleotide
  Target: COL7A1; (-) strand; PAM type: NRG; PAM sequence: CAG
tggaggactgtccacagcct

SEQ ID NO: 14647 - DNA, 20 bp, Artificial Sequence
  Description of Artificial Sequence: Synthetic oligonucleotide
  Target: COL7A1; (-) strand; PAM type: NRG; PAM sequence: CAG
gtgtgttggaggactgtcca

SEQ ID NO: 14648 - DNA, 20 bp, Artificial Sequence
  Description of Artificial Sequence: Synthetic oligonucleotide
  Target: COL7A1; (-) strand; PAM type: NRG; PAM sequence: AGG
cctggcgtggtgtgtgttgg

SEQ ID NO: 14649 - DNA, 20 bp, Artificial Sequence
  Description of Artificial Sequence: Synthetic oligonucleotide
  Target: COL7A1; (-) strand; PAM type: NRG; PAM sequence: GAG
ccctggcgtggtgtgtgttg

SEQ ID NO: 14650 - DNA, 20 bp, Artificial Sequence
  Description of Artificial Sequence: Synthetic oligonucleotide
  Target: COL7A1; (-) strand; PAM type: NRG; PAM sequence: TGG
ggccctggcgtggtgtgtgt

SEQ ID NO: 14651 - DNA, 20 bp, Artificial Sequence
  Description of Artificial Sequence: Synthetic oligonucleotide
  Target: COL7A1; (-) strand; PAM type: NRG; PAM sequence: TGG
ttcggacagtggccctggcg

SEQ ID NO: 14652 - DNA, 20 bp, Artificial Sequence
  Description of Artificial Sequence: Synthetic oligonucleotide
  Target: COL7A1; (-) strand; PAM type: NRG; PAM sequence: TGG
cctccttcggacagtggccc

SEQ ID NO: 14653 - DNA, 20 bp, Artificial Sequence
  Description of Artificial Sequence: Synthetic oligonucleotide
  Target: COL7A1; (-) strand; PAM type: NRG; PAM sequence: TGG
gccccacctccttcggacag

SEQ ID NO: 14654 - DNA, 20 bp, Artificial Sequence
  Description of Artificial Sequence: Synthetic oligonucleotide
  Target: COL7A1; (-) strand; PAM type: NRG; PAM sequence: CAG
agagccccacctccttcgga

SEQ ID NO: 14655 - DNA, 20 bp, Artificial Sequence
  Description of Artificial Sequence: Synthetic oligonucleotide
  Target: COL7A1; (-) strand; PAM type: NRG; PAM sequence: CGG
atacagagccccacctcctt

SEQ ID NO: 14656 - DNA, 20 bp, Artificial Sequence
  Description of Artificial Sequence: Synthetic oligonucleotide
  Target: COL7A1; (-) strand; PAM type: NRG; PAM sequence: GAG
tggagagatatgcatataca

SEQ ID NO: 14657 - DNA, 20 bp, Artificial Sequence
  Description of Artificial Sequence: Synthetic oligonucleotide
  Target: COL7A1; (-) strand; PAM type: NRG; PAM sequence: CAG
aatggagagatatgcatata

SEQ ID NO: 14658 - DNA, 20 bp, Artificial Sequence
  Description of Artificial Sequence: Synthetic oligonucleotide
  Target: COL7A1; (-) strand; PAM type: NRG; PAM sequence: GAG
agtgtcacccatctaatgga

SEQ ID NO: 14659 - DNA, 20 bp, Artificial Sequence
  Description of Artificial Sequence: Synthetic oligonucleotide
  Target: COL7A1; (-) strand; PAM type: NRG; PAM sequence: GAG
ttagtgtcacccatctaatg

SEQ ID NO: 14660 - DNA, 20 bp, Artificial Sequence
  Description of Artificial Sequence: Synthetic oligonucleotide
  Target: COL7A1; (-) strand; PAM type: NRG; PAM sequence: TGG
ccttagtgtcacccatctaa

SEQ ID NO: 14661 - DNA, 20 bp, Artificial Sequence
  Description of Artificial Sequence: Synthetic oligonucleotide
  Target: COL7A1; (-) strand; PAM type: NRG; PAM sequence: TAG
ttagcagtgcctctctgcct

SEQ ID NO: 14662 - DNA, 20 bp, Artificial Sequence
  Description of Artificial Sequence: Synthetic oligonucleotide
  Target: COL7A1; (-) strand; PAM type: NRG; PAM sequence: CAG
tgggggcctgcccttcttag

SEQ ID NO: 14663 - DNA, 20 bp, Artificial Sequence
  Description of Artificial Sequence: Synthetic oligonucleotide
  Target: COL7A1; (-) strand; PAM type: NRG; PAM sequence: TAG
agatgggggcctgcccttct

SEQ ID NO: 14664 - DNA, 20 bp, Artificial Sequence
  Description of Artificial Sequence: Synthetic oligonucleotide
  Target: COL7A1; (-) strand; PAM type: NRG; PAM sequence: GGG
ggggagcaggacccagatgg

SEQ ID NO: 14665 - DNA, 20 bp, Artificial Sequence
  Description of Artificial Sequence: Synthetic oligonucleotide
  Target: COL7A1; (-) strand; PAM type: NRG; PAM sequence: GGG
gggggagcaggacccagatg

SEQ ID NO: 14666 - DNA, 20 bp, Artificial Sequence
  Description of Artificial Sequence: Synthetic oligonucleotide
  Target: COL7A1; (-) strand; PAM type: NRG; PAM sequence: GGG
agggggagcaggacccagat

SEQ ID NO: 14667 - DNA, 20 bp, Artificial Sequence
  Description of Artificial Sequence: Synthetic oligonucleotide
  Target: COL7A1; (-) strand; PAM type: NRG; PAM sequence: TGG
aagggggagcaggacccaga

SEQ ID NO: 14668 - DNA, 20 bp, Artificial Sequence
  Description of Artificial Sequence: Synthetic oligonucleotide
  Target: COL7A1; (-) strand; PAM type: NRG; PAM sequence: CAG
aaaaaagggggagcaggacc

SEQ ID NO: 14669 - DNA, 20 bp, Artificial Sequence
  Description of Artificial Sequence: Synthetic oligonucleotide
  Target: COL7A1; (-) strand; PAM type: NRG; PAM sequence: AGG
gcaggaaaaaaagggggagc

SEQ ID NO: 14670 - DNA, 20 bp, Artificial Sequence
  Description of Artificial Sequence: Synthetic oligonucleotide
  Target: COL7A1; (-) strand; PAM type: NRG; PAM sequence: CAG
agcaggaaaaaaagggggag

SEQ ID NO: 14671 - DNA, 20 bp, Artificial Sequence
  Description of Artificial Sequence: Synthetic oligonucleotide
  Target: COL7A1; (-) strand; PAM type: NRG; PAM sequence: GAG
attagcaggaaaaaaagggg

SEQ ID NO: 14672 - DNA, 20 bp, Artificial Sequence
  Description of Artificial Sequence: Synthetic oligonucleotide
  Target: COL7A1; (-) strand; PAM type: NRG; PAM sequence: GGG
ggattagcaggaaaaaaagg

SEQ ID NO: 14673 - DNA, 20 bp, Artificial Sequence
  Description of Artificial Sequence: Synthetic oligonucleotide
  Target: COL7A1; (-) strand; PAM type: NRG; PAM sequence: GGG
aggattagcaggaaaaaaag

SEQ ID NO: 14674 - DNA, 20 bp, Artificial Sequence
  Description of Artificial Sequence: Synthetic oligonucleotide
  Target: COL7A1; (-) strand; PAM type: NRG; PAM sequence: GGG
caggattagcaggaaaaaaa

SEQ ID NO: 14675 - DNA, 20 bp, Artificial Sequence
  Description of Artificial Sequence: Synthetic oligonucleotide
  Target: COL7A1; (-) strand; PAM type: NRG; PAM sequence: AGG
tcaggattagcaggaaaaaa

SEQ ID NO: 14676 - DNA, 20 bp, Artificial Sequence
  Description of Artificial Sequence: Synthetic oligonucleotide
  Target: COL7A1; (-) strand; PAM type: NRG; PAM sequence: AAG
ttcaggattagcaggaaaaa

SEQ ID NO: 14677 - DNA, 20 bp, Artificial Sequence
  Description of Artificial Sequence: Synthetic oligonucleotide
  Target: COL7A1; (-) strand; PAM type: NRG; PAM sequence: AGG
cagagttattcaggattagc

SEQ ID NO: 14678 - DNA, 20 bp, Artificial Sequence
  Description of Artificial Sequence: Synthetic oligonucleotide
  Target: COL7A1; (-) strand; PAM type: NRG; PAM sequence: CAG
ccagagttattcaggattag

SEQ ID NO: 14679 - DNA, 20 bp, Artificial Sequence
  Description of Artificial Sequence: Synthetic oligonucleotide
  Target: COL7A1; (-) strand; PAM type: NRG; PAM sequence: TAG
tgcccagagttattcaggat

SEQ ID NO: 14680 - DNA, 20 bp, Artificial Sequence
  Description of Artificial Sequence: Synthetic oligonucleotide
  Target: COL7A1; (-) strand; PAM type: NRG; PAM sequence: AGG
tgggctgcccagagttattc

SEQ ID NO: 14681 - DNA, 20 bp, Artificial Sequence
  Description of Artificial Sequence: Synthetic oligonucleotide
  Target: COL7A1; (-) strand; PAM type: NRG; PAM sequence: CAG
ctgggctgcccagagttatt

SEQ ID NO: 14682 - DNA, 20 bp, Artificial Sequence
  Description of Artificial Sequence: Synthetic oligonucleotide
  Target: COL7A1; (-) strand; PAM type: NRG; PAM sequence: GAG
tgtgctttctgggctgccca

SEQ ID NO: 14683 - DNA, 20 bp, Artificial Sequence
  Description of Artificial Sequence: Synthetic oligonucleotide
  Target: COL7A1; (-) strand; PAM type: NRG; PAM sequence: CAG
gatgtgctttctgggctgcc

SEQ ID NO: 14684 - DNA, 20 bp, Artificial Sequence
  Description of Artificial Sequence: Synthetic oligonucleotide
  Target: COL7A1; (-) strand; PAM type: NRG; PAM sequence: GGG
tgagtatagatgtgctttct

SEQ ID NO: 14685 - DNA, 20 bp, Artificial Sequence
  Description of Artificial Sequence: Synthetic oligonucleotide
  Target: COL7A1; (-) strand; PAM type: NRG; PAM sequence: TGG
gtgagtatagatgtgctttc

SEQ ID NO: 14686 - DNA, 20 bp, Artificial Sequence
  Description of Artificial Sequence: Synthetic oligonucleotide
  Target: COL7A1; (-) strand; PAM type: NRG; PAM sequence: TAG
cccagcagccttggtgagta

SEQ ID NO: 14687 - DNA, 20 bp, Artificial Sequence
  Description of Artificial Sequence: Synthetic oligonucleotide
  Target: COL7A1; (-) strand; PAM type: NRG; PAM sequence: GAG
aggggcccagcagccttggt

SEQ ID NO: 14688 - DNA, 20 bp, Artificial Sequence
  Description of Artificial Sequence: Synthetic oligonucleotide
  Target: COL7A1; (-) strand; PAM type: NRG; PAM sequence: TGG
tagaaggggcccagcagcct

SEQ ID NO: 14689 - DNA, 20 bp, Artificial Sequence
  Description of Artificial Sequence: Synthetic oligonucleotide
  Target: COL7A1; (-) strand; PAM type: NRG; PAM sequence: CAG
gcatattagaaggggcccag

SEQ ID NO: 14690 - DNA, 20 bp, Artificial Sequence
  Description of Artificial Sequence: Synthetic oligonucleotide
  Target: COL7A1; (-) strand; PAM type: NRG; PAM sequence: CAG
cgggcatattagaaggggcc

SEQ ID NO: 14691 - DNA, 20 bp, Artificial Sequence
  Description of Artificial Sequence: Synthetic oligonucleotide
  Target: COL7A1; (-) strand; PAM type: NRG; PAM sequence: GGG
ggggccgggcatattagaag

SEQ ID NO: 14692 - DNA, 20 bp, Artificial Sequence
  Description of Artificial Sequence: Synthetic oligonucleotide
  Target: COL7A1; (-) strand; PAM type: NRG; PAM sequence: GGG
tggggccgggcatattagaa

SEQ ID NO: 14693 - DNA, 20 bp, Artificial Sequence
  Description of Artificial Sequence: Synthetic oligonucleotide
  Target: COL7A1; (-) strand; PAM type: NRG; PAM sequence: AGG
gtggggccgggcatattaga

SEQ ID NO: 14694 - DNA, 20 bp, Artificial Sequence
  Description of Artificial Sequence: Synthetic oligonucleotide
  Target: COL7A1; (-) strand; PAM type: NRG; PAM sequence: AAG
tgtggggccgggcatattag

SEQ ID NO: 14695 - DNA, 20 bp, Artificial Sequence
  Description of Artificial Sequence: Synthetic oligonucleotide
  Target: COL7A1; (-) strand; PAM type: NRG; PAM sequence: TAG
ggctgtggggccgggcatat

SEQ ID NO: 14696 - DNA, 20 bp, Artificial Sequence
  Description of Artificial Sequence: Synthetic oligonucleotide
  Target: COL7A1; (-) strand; PAM type: NRG; PAM sequence: GGG
ccaggggaggctgtggggcc

SEQ ID NO: 14697 - DNA, 20 bp, Artificial Sequence
  Description of Artificial Sequence: Synthetic oligonucleotide
  Target: COL7A1; (-) strand; PAM type: NRG; PAM sequence: CGG
cccaggggaggctgtggggc

SEQ ID NO: 14698 - DNA, 20 bp, Artificial Sequence
  Description of Artificial Sequence: Synthetic oligonucleotide
  Target: COL7A1; (-) strand; PAM type: NRG; PAM sequence: GGG
ggatcccaggggaggctgtg

SEQ ID NO: 14699 - DNA, 20 bp, Artificial Sequence
  Description of Artificial Sequence: Synthetic oligonucleotide
  Target: COL7A1; (-) strand; PAM type: NRG; PAM sequence: GGG
tggatcccaggggaggctgt

SEQ ID NO: 14700 - DNA, 20 bp, Artificial Sequence
  Description of Artificial Sequence: Synthetic oligonucleotide
  Target: COL7A1; (-) strand; PAM type: NRG; PAM sequence: TGG
gtggatcccaggggaggctg

SEQ ID NO: 14701 - DNA, 20 bp, Artificial Sequence
  Description of Artificial Sequence: Synthetic oligonucleotide
  Target: COL7A1; (-) strand; PAM type: NRG; PAM sequence: AGG
ctccctgtggatcccagggg

SEQ ID NO: 14702 - DNA, 20 bp, Artificial Sequence
  Description of Artificial Sequence: Synthetic oligonucleotide
  Target: COL7A1; (-) strand; PAM type: NRG; PAM sequence: GAG
tctccctgtggatcccaggg

SEQ ID NO: 14703 - DNA, 20 bp, Artificial Sequence
  Description of Artificial Sequence: Synthetic oligonucleotide
  Target: COL7A1; (-) strand; PAM type: NRG; PAM sequence: GGG
tatctccctgtggatcccag

SEQ ID NO: 14704 - DNA, 20 bp, Artificial Sequence
  Description of Artificial Sequence: Synthetic oligonucleotide
  Target: COL7A1; (-) strand; PAM type: NRG; PAM sequence: GGG
atatctccctgtggatccca

SEQ ID NO: 14705 - DNA, 20 bp, Artificial Sequence
  Description of Artificial Sequence: Synthetic oligonucleotide
  Target: COL7A1; (-) strand; PAM type: NRG; PAM sequence: AGG
catatctccctgtggatccc

SEQ ID NO: 14706 - DNA, 20 bp, Artificial Sequence
  Description of Artificial Sequence: Synthetic oligonucleotide
  Target: COL7A1; (-) strand; PAM type: NRG; PAM sequence: CAG
ccatatctccctgtggatcc

SEQ ID NO: 14707 - DNA, 20 bp, Artificial Sequence
  Description of Artificial Sequence: Synthetic oligonucleotide
  Target: COL7A1; (-) strand; PAM type: NRG; PAM sequence: TGG
gctgtccccatatctccctg

SEQ ID NO: 14708 - DNA, 20 bp, Artificial Sequence
  Description of Artificial Sequence: Synthetic oligonucleotide
  Target: COL7A1; (-) strand; PAM type: NRG; PAM sequence: CAG
gggctgtggaggagtccagc

SEQ ID NO: 14709 - DNA, 20 bp, Artificial Sequence
  Description of Artificial Sequence: Synthetic oligonucleotide
  Target: COL7A1; (-) strand; PAM type: NRG; PAM sequence: CAG
cctcgggctgtggaggagtc

SEQ ID NO: 14710 - DNA, 20 bp, Artificial Sequence
  Description of Artificial Sequence: Synthetic oligonucleotide
  Target: COL7A1; (-) strand; PAM type: NRG; PAM sequence: GAG
agagtcctcgggctgtggag

SEQ ID NO: 14711 - DNA, 20 bp, Artificial Sequence
  Description of Artificial Sequence: Synthetic oligonucleotide
  Target: COL7A1; (-) strand; PAM type: NRG; PAM sequence: AGG
ccagagtcctcgggctgtgg

SEQ ID NO: 14712 - DNA, 20 bp, Artificial Sequence
  Description of Artificial Sequence: Synthetic oligonucleotide
  Target: COL7A1; (-) strand; PAM type: NRG; PAM sequence: GAG
accagagtcctcgggctgtg

SEQ ID NO: 14713 - DNA, 20 bp, Artificial Sequence
  Description of Artificial Sequence: Synthetic oligonucleotide
  Target: COL7A1; (-) strand; PAM type: NRG; PAM sequence: TGG
acaccagagtcctcgggctg

SEQ ID NO: 14714 - DNA, 20 bp, Artificial Sequence
  Description of Artificial Sequence: Synthetic oligonucleotide
  Target: COL7A1; (-) strand; PAM type: NRG; PAM sequence: GGG
ctggccacaccagagtcctc

SEQ ID NO: 14715 - DNA, 20 bp, Artificial Sequence
  Description of Artificial Sequence: Synthetic oligonucleotide
  Target: COL7A1; (-) strand; PAM type: NRG; PAM sequence: CGG
tctggccacaccagagtcct

SEQ ID NO: 14716 - DNA, 20 bp, Artificial Sequence
  Description of Artificial Sequence: Synthetic oligonucleotide
  Target: COL7A1; (-) strand; PAM type: NRG; PAM sequence: GAG
ctccagctctggccacacca

SEQ ID NO: 14717 - DNA, 20 bp, Artificial Sequence
  Description of Artificial Sequence: Synthetic oligonucleotide
  Target: COL7A1; (-) strand; PAM type: NRG; PAM sequence: CAG
gcctccagctctggccacac

SEQ ID NO: 14718 - DNA, 20 bp, Artificial Sequence
  Description of Artificial Sequence: Synthetic oligonucleotide
  Target: COL7A1; (-) strand; PAM type: NRG; PAM sequence: TGG
gtcttcactgcctccagctc

SEQ ID NO: 14719 - DNA, 20 bp, Artificial Sequence
  Description of Artificial Sequence: Synthetic oligonucleotide
  Target: COL7A1; (-) strand; PAM type: NRG; PAM sequence: CAG
tggatggtcttcactgcctc

SEQ ID NO: 14720 - DNA, 20 bp, Artificial Sequence
  Description of Artificial Sequence: Synthetic oligonucleotide
  Target: COL7A1; (-) strand; PAM type: NRG; PAM sequence: TGG
aggaaagcaggcagcatgga

SEQ ID NO: 14721 - DNA, 20 bp, Artificial Sequence
  Description of Artificial Sequence: Synthetic oligonucleotide
  Target: COL7A1; (-) strand; PAM type: NRG; PAM sequence: TGG
caataggaaagcaggcagca

SEQ ID NO: 14722 - DNA, 20 bp, Artificial Sequence
  Description of Artificial Sequence: Synthetic oligonucleotide
  Target: COL7A1; (-) strand; PAM type: NRG; PAM sequence: CAG
ttgggcaataggaaagcagg

SEQ ID NO: 14723 - DNA, 20 bp, Artificial Sequence
  Description of Artificial Sequence: Synthetic oligonucleotide
  Target: COL7A1; (-) strand; PAM type: NRG; PAM sequence: AGG
tccttgggcaataggaaagc

SEQ ID NO: 14724 - DNA, 20 bp, Artificial Sequence
  Description of Artificial Sequence: Synthetic oligonucleotide
  Target: COL7A1; (-) strand; PAM type: NRG; PAM sequence: CAG
ttccttgggcaataggaaag

SEQ ID NO: 14725 - DNA, 20 bp, Artificial Sequence
  Description of Artificial Sequence: Synthetic oligonucleotide
  Target: COL7A1; (-) strand; PAM type: NRG; PAM sequence: AAG
gccttccttgggcaatagga

SEQ ID NO: 14726 - DNA, 20 bp, Artificial Sequence
  Description of Artificial Sequence: Synthetic oligonucleotide
  Target: COL7A1; (-) strand; PAM type: NRG; PAM sequence: AGG
cccagccttccttgggcaat

SEQ ID NO: 14727 - DNA, 20 bp, Artificial Sequence
  Description of Artificial Sequence: Synthetic oligonucleotide
  Target: COL7A1; (-) strand; PAM type: NRG; PAM sequence: TAG
ccccagccttccttgggcaa

SEQ ID NO: 14728 - DNA, 20 bp, Artificial Sequence
  Description of Artificial Sequence: Synthetic oligonucleotide
  Target: COL7A1; (-) strand; PAM type: NRG; PAM sequence: GGG
atagagccccagccttcctt

SEQ ID NO: 14729 - DNA, 20 bp, Artificial Sequence
  Description of Artificial Sequence: Synthetic oligonucleotide
  Target: COL7A1; (-) strand; PAM type: NRG; PAM sequence: TGG
gatagagccccagccttcct

SEQ ID NO: 14730 - DNA, 20 bp, Artificial Sequence
  Description of Artificial Sequence: Synthetic oligonucleotide
  Target: COL7A1; (-) strand; PAM type: NRG; PAM sequence: CAG
agtaataagggatagagccc

SEQ ID NO: 14731 - DNA, 20 bp, Artificial Sequence
  Description of Artificial Sequence: Synthetic oligonucleotide
  Target: COL7A1; (-) strand; PAM type: NRG; PAM sequence: GAG
ggggtcagtaataagggata

SEQ ID NO: 14732 - DNA, 20 bp, Artificial Sequence
  Description of Artificial Sequence: Synthetic oligonucleotide
  Target: COL7A1; (-) strand; PAM type: NRG; PAM sequence: TAG
ggggggtcagtaataaggga

SEQ ID NO: 14733 - DNA, 20 bp, Artificial Sequence
  Description of Artificial Sequence: Synthetic oligonucleotide
  Target: COL7A1; (-) strand; PAM type: NRG; PAM sequence: GGG
gtttggggggtcagtaataa

SEQ ID NO: 14734 - DNA, 20 bp, Artificial Sequence
  Description of Artificial Sequence: Synthetic oligonucleotide
  Target: COL7A1; (-) strand; PAM type: NRG; PAM sequence: AGG
agtttggggggtcagtaata

SEQ ID NO: 14735 - DNA, 20 bp, Artificial Sequence
  Description of Artificial Sequence: Synthetic oligonucleotide
  Target: COL7A1; (-) strand; PAM type: NRG; PAM sequence: AAG
tagtttggggggtcagtaat

SEQ ID NO: 14736 - DNA, 20 bp, Artificial Sequence
  Description of Artificial Sequence: Synthetic oligonucleotide
  Target: COL7A1; (-) strand; PAM type: NRG; PAM sequence: CAG
cccaggatagtttggggggt

SEQ ID NO: 14737 - DNA, 20 bp, Artificial Sequence
  Description of Artificial Sequence: Synthetic oligonucleotide
  Target: COL7A1; (-) strand; PAM type: NRG; PAM sequence: GGG
atgccccaggatagtttggg

SEQ ID NO: 14738 - DNA, 20 bp, Artificial Sequence
  Description of Artificial Sequence: Synthetic oligonucleotide
  Target: COL7A1; (-) strand; PAM type: NRG; PAM sequence: GGG
tatgccccaggatagtttgg

SEQ ID NO: 14739 - DNA, 20 bp, Artificial Sequence
  Description of Artificial Sequence: Synthetic oligonucleotide
  Target: COL7A1; (-) strand; PAM type: NRG; PAM sequence: GGG
ctatgccccaggatagtttg

SEQ ID NO: 14740 - DNA, 20 bp, Artificial Sequence
  Description of Artificial Sequence: Synthetic oligonucleotide
  Target: COL7A1; (-) strand; PAM type: NRG; PAM sequence: GGG
actatgccccaggatagttt

SEQ ID NO: 14741 - DNA, 20 bp, Artificial Sequence
  Description of Artificial Sequence: Synthetic oligonucleotide
  Target: COL7A1; (-) strand; PAM type: NRG; PAM sequence: TGG
cactatgccccaggatagtt

SEQ ID NO: 14742 - DNA, 20 bp, Artificial Sequence
  Description of Artificial Sequence: Synthetic oligonucleotide
  Target: COL7A1; (-) strand; PAM type: NRG; PAM sequence: TAG
catagcactatgccccagga

SEQ ID NO: 14743 - DNA, 20 bp, Artificial Sequence
  Description of Artificial Sequence: Synthetic oligonucleotide
  Target: COL7A1; (-) strand; PAM type: NRG; PAM sequence: AGG
aggtcatagcactatgcccc

SEQ ID NO: 14744 - DNA, 20 bp, Artificial Sequence
  Description of Artificial Sequence: Synthetic oligonucleotide
  Target: COL7A1; (-) strand; PAM type: NRG; PAM sequence: CAG
aaggtcatagcactatgccc

SEQ ID NO: 14745 - DNA, 20 bp, Artificial Sequence
  Description of Artificial Sequence: Synthetic oligonucleotide
  Target: COL7A1; (-) strand; PAM type: NRG; PAM sequence: TAG
ctgaccttggaataaggtca

SEQ ID NO: 14746 - DNA, 20 bp, Artificial Sequence
  Description of Artificial Sequence: Synthetic oligonucleotide
  Target: COL7A1; (-) strand; PAM type: NRG; PAM sequence: AGG
gagaccctgaccttggaata

SEQ ID NO: 14747 - DNA, 20 bp, Artificial Sequence
  Description of Artificial Sequence: Synthetic oligonucleotide
  Target: COL7A1; (-) strand; PAM type: NRG; PAM sequence: AAG
ggagaccctgaccttggaat

SEQ ID NO: 14748 - DNA, 20 bp, Artificial Sequence
  Description of Artificial Sequence: Synthetic oligonucleotide
  Target: COL7A1; (-) strand; PAM type: NRG; PAM sequence: TGG
ggctgaggagaccctgacct

SEQ ID NO: 14749 - DNA, 20 bp, Artificial Sequence
  Description of Artificial Sequence: Synthetic oligonucleotide
  Target: COL7A1; (-) strand; PAM type: NRG; PAM sequence: GAG
ggtcctgggacatggctgag

SEQ ID NO: 14750 - DNA, 20 bp, Artificial Sequence
  Description of Artificial Sequence: Synthetic oligonucleotide
  Target: COL7A1; (-) strand; PAM type: NRG; PAM sequence: AGG
ggggtcctgggacatggctg

SEQ ID NO: 14751 - DNA, 20 bp, Artificial Sequence
  Description of Artificial Sequence: Synthetic oligonucleotide
  Target: COL7A1; (-) strand; PAM type: NRG; PAM sequence: GAG
gggggtcctgggacatggct

SEQ ID NO: 14752 - DNA, 20 bp, Artificial Sequence
  Description of Artificial Sequence: Synthetic oligonucleotide
  Target: COL7A1; (-) strand; PAM type: NRG; PAM sequence: TGG
ggatggggggtcctgggaca

SEQ ID NO: 14753 - DNA, 20 bp, Artificial Sequence
  Description of Artificial Sequence: Synthetic oligonucleotide
  Target: COL7A1; (-) strand; PAM type: NRG; PAM sequence: GGG
ttgcagggatggggggtcct

SEQ ID NO: 14754 - DNA, 20 bp, Artificial Sequence
  Description of Artificial Sequence: Synthetic oligonucleotide
  Target: COL7A1; (-) strand; PAM type: NRG; PAM sequence: TGG
cttgcagggatggggggtcc

SEQ ID NO: 14755 - DNA, 20 bp, Artificial Sequence
  Description of Artificial Sequence: Synthetic oligonucleotide
  Target: COL7A1; (-) strand; PAM type: NRG; PAM sequence: GGG
gcacaccttgcagggatggg

SEQ ID NO: 14756 - DNA, 20 bp, Artificial Sequence
  Description of Artificial Sequence: Synthetic oligonucleotide
  Target: COL7A1; (-) strand; PAM type: NRG; PAM sequence: GGG
agcacaccttgcagggatgg

SEQ ID NO: 14757 - DNA, 20 bp, Artificial Sequence
  Description of Artificial Sequence: Synthetic oligonucleotide
  Target: COL7A1; (-) strand; PAM type: NRG; PAM sequence: GGG
gagcacaccttgcagggatg

SEQ ID NO: 14758 - DNA, 20 bp, Artificial Sequence
  Description of Artificial Sequence: Synthetic oligonucleotide
  Target: COL7A1; (-) strand; PAM type: NRG; PAM sequence: GGG
ggagcacaccttgcagggat

SEQ ID NO: 14759 - DNA, 20 bp, Artificial Sequence
  Description of Artificial Sequence: Synthetic oligonucleotide
  Target: COL7A1; (-) strand; PAM type: NRG; PAM sequence: TGG
tggagcacaccttgcaggga

SEQ ID NO: 14760 - DNA, 20 bp, Artificial Sequence
  Description of Artificial Sequence: Synthetic oligonucleotide
  Target: COL7A1; (-) strand; PAM type: NRG; PAM sequence: GGG
cacctggagcacaccttgca

SEQ ID NO: 14761 - DNA, 20 bp, Artificial Sequence
  Description of Artificial Sequence: Synthetic oligonucleotide
  Target: COL7A1; (-) strand; PAM type: NRG; PAM sequence: AGG
ccacctggagcacaccttgc

SEQ ID NO: 14762 - DNA, 20 bp, Artificial Sequence
  Description of Artificial Sequence: Synthetic oligonucleotide
  Target: COL7A1; (-) strand; PAM type: NRG; PAM sequence: CAG
cccacctggagcacaccttg

SEQ ID NO: 14763 - DNA, 20 bp, Artificial Sequence
  Description of Artificial Sequence: Synthetic oligonucleotide
  Target: COL7A1; (-) strand; PAM type: NRG; PAM sequence: GAG
tctctgcagccccccacctg

SEQ ID NO: 14764 - DNA, 20 bp, Artificial Sequence
  Description of Artificial Sequence: Synthetic oligonucleotide
  Target: COL7A1; (-) strand; PAM type: NRG; PAM sequence: TGG
gttctctgcagccccccacc

SEQ ID NO: 14765 - DNA, 20 bp, Artificial Sequence
  Description of Artificial Sequence: Synthetic oligonucleotide
  Target: COL7A1; (-) strand; PAM type: NRG; PAM sequence: CAG
ataacatacctggttctctg

SEQ ID NO: 14766 - DNA, 20 bp, Artificial Sequence
  Description of Artificial Sequence: Synthetic oligonucleotide
  Target: COL7A1; (-) strand; PAM type: NRG; PAM sequence: TGG
tgcctgtgtgataacatacc

SEQ ID NO: 14767 - DNA, 20 bp, Artificial Sequence
  Description of Artificial Sequence: Synthetic oligonucleotide
  Target: COL7A1; (-) strand; PAM type: NRG; PAM sequence: GGG
gtgacagtcttagggggaag

SEQ ID NO: 14768 - DNA, 20 bp, Artificial Sequence
  Description of Artificial Sequence: Synthetic oligonucleotide
  Target: COL7A1; (-) strand; PAM type: NRG; PAM sequence: GGG
ggtgacagtcttagggggaa

SEQ ID NO: 14769 - DNA, 20 bp, Artificial Sequence
  Description of Artificial Sequence: Synthetic oligonucleotide
  Target: COL7A1; (-) strand; PAM type: NRG; PAM sequence: AGG
aggtgacagtcttaggggga

SEQ ID NO: 14770 - DNA, 20 bp, Artificial Sequence
  Description of Artificial Sequence: Synthetic oligonucleotide
  Target: COL7A1; (-) strand; PAM type: NRG; PAM sequence: AAG
gaggtgacagtcttaggggg

SEQ ID NO: 14771 - DNA, 20 bp, Artificial Sequence
  Description of Artificial Sequence: Synthetic oligonucleotide
  Target: COL7A1; (-) strand; PAM type: NRG; PAM sequence: GGG
gaggaggtgacagtcttagg

SEQ ID NO: 14772 - DNA, 20 bp, Artificial Sequence
  Description of Artificial Sequence: Synthetic oligonucleotide
  Target: COL7A1; (-) strand; PAM type: NRG; PAM sequence: GGG
ggaggaggtgacagtcttag

SEQ ID NO: 14773 - DNA, 20 bp, Artificial Sequence
  Description of Artificial Sequence: Synthetic oligonucleotide
  Target: COL7A1; (-) strand; PAM type: NRG; PAM sequence: GGG
gggaggaggtgacagtctta

SEQ ID NO: 14774 - DNA, 20 bp, Artificial Sequence
  Description of Artificial Sequence: Synthetic oligonucleotide
  Target: COL7A1; (-) strand; PAM type: NRG; PAM sequence: AGG
cgggaggaggtgacagtctt

SEQ ID NO: 14775 - DNA, 20 bp, Artificial Sequence
  Description of Artificial Sequence: Synthetic oligonucleotide
  Target: COL7A1; (-) strand; PAM type: NRG; PAM sequence: TAG
acgggaggaggtgacagtct

SEQ ID NO: 14776 - DNA, 20 bp, Artificial Sequence
  Description of Artificial Sequence: Synthetic oligonucleotide
  Target: COL7A1; (-) strand; PAM type: NRG; PAM sequence: CAG
ggctgcacgggaggaggtga

SEQ ID NO: 14777 - DNA, 20 bp, Artificial Sequence
  Description of Artificial Sequence: Synthetic oligonucleotide
  Target: COL7A1; (-) strand; PAM type: NRG; PAM sequence: AGG
cgccctggctgcacgggagg

SEQ ID NO: 14778 - DNA, 20 bp, Artificial Sequence
  Description of Artificial Sequence: Synthetic oligonucleotide
  Target: COL7A1; (-) strand; PAM type: NRG; PAM sequence: GAG
ccgccctggctgcacgggag

SEQ ID NO: 14779 - DNA, 20 bp, Artificial Sequence
  Description of Artificial Sequence: Synthetic oligonucleotide
  Target: COL7A1; (-) strand; PAM type: NRG; PAM sequence: AGG
gcccgccctggctgcacggg

SEQ ID NO: 14780 - DNA, 20 bp, Artificial Sequence
  Description of Artificial Sequence: Synthetic oligonucleotide
  Target: COL7A1; (-) strand; PAM type: NRG; PAM sequence: GAG
tgcccgccctggctgcacgg

SEQ ID NO: 14781 - DNA, 20 bp, Artificial Sequence
  Description of Artificial Sequence: Synthetic oligonucleotide
  Target: COL7A1; (-) strand; PAM type: NRG; PAM sequence: GGG
cttgcccgccctggctgcac

SEQ ID NO: 14782 - DNA, 20 bp, Artificial Sequence
  Description of Artificial Sequence: Synthetic oligonucleotide
  Target: COL7A1; (-) strand; PAM type: NRG; PAM sequence: CGG
tcttgcccgccctggctgca

SEQ ID NO: 14783 - DNA, 20 bp, Artificial Sequence
  Description of Artificial Sequence: Synthetic oligonucleotide
  Target: COL7A1; (-) strand; PAM type: NRG; PAM sequence: TGG
tggcctgctcttgcccgccc

SEQ ID NO: 14784 - DNA, 20 bp, Artificial Sequence
  Description of Artificial Sequence: Synthetic oligonucleotide
  Target: COL7A1; (-) strand; PAM type: NRG; PAM sequence: TGG
taccgtactgtccatgccac

SEQ ID NO: 14785 - DNA, 20 bp, Artificial Sequence
  Description of Artificial Sequence: Synthetic oligonucleotide
  Target: COL7A1; (-) strand; PAM type: NRG; PAM sequence: TGG
cctcctgtctcccctaagac

SEQ ID NO: 14786 - DNA, 20 bp, Artificial Sequence
  Description of Artificial Sequence: Synthetic oligonucleotide
  Target: COL7A1; (-) strand; PAM type: NRG; PAM sequence: AAG
ctgggcctcctgtctcccct

SEQ ID NO: 14787 - DNA, 20 bp, Artificial Sequence
  Description of Artificial Sequence: Synthetic oligonucleotide
  Target: COL7A1; (-) strand; PAM type: NRG; PAM sequence: GGG
gagcacccaccctcccagct

SEQ ID NO: 14788 - DNA, 20 bp, Artificial Sequence
  Description of Artificial Sequence: Synthetic oligonucleotide
  Target: COL7A1; (-) strand; PAM type: NRG; PAM sequence: TGG
tgagcacccaccctcccagc

SEQ ID NO: 14789 - DNA, 20 bp, Artificial Sequence
  Description of Artificial Sequence: Synthetic oligonucleotide
  Target: COL7A1; (-) strand; PAM type: NRG; PAM sequence: CAG
tgcctgagcacccaccctcc

SEQ ID NO: 14790 - DNA, 20 bp, Artificial Sequence
  Description of Artificial Sequence: Synthetic oligonucleotide
  Target: COL7A1; (-) strand; PAM type: NRG; PAM sequence: GAG
aattctgatgaggtttgcct

SEQ ID NO: 14791 - DNA, 20 bp, Artificial Sequence
  Description of Artificial Sequence: Synthetic oligonucleotide
  Target: COL7A1; (-) strand; PAM type: NRG; PAM sequence: AGG
gaggcacctcaattctgatg

SEQ ID NO: 14792 - DNA, 20 bp, Artificial Sequence
  Description of Artificial Sequence: Synthetic oligonucleotide
  Target: COL7A1; (-) strand; PAM type: NRG; PAM sequence: GAG
ggaggcacctcaattctgat

SEQ ID NO: 14793 - DNA, 20 bp, Artificial Sequence
  Description of Artificial Sequence: Synthetic oligonucleotide
  Target: COL7A1; (-) strand; PAM type: NRG; PAM sequence: AGG
cagcctgtcctttcttttgg

SEQ ID NO: 14794 - DNA, 20 bp, Artificial Sequence
  Description of Artificial Sequence: Synthetic oligonucleotide
  Target: COL7A1; (-) strand; PAM type: NRG; PAM sequence: GAG
gcagcctgtcctttcttttg

SEQ ID NO: 14795 - DNA, 20 bp, Artificial Sequence
  Description of Artificial Sequence: Synthetic oligonucleotide
  Target: COL7A1; (-) strand; PAM type: NRG; PAM sequence: TGG
cagcagcctgtcctttcttt

SEQ ID NO: 14796 - DNA, 20 bp, Artificial Sequence
  Description of Artificial Sequence: Synthetic oligonucleotide
  Target: COL7A1; (-) strand; PAM type: NRG; PAM sequence: CAG
tttgagagaccctctcacag

SEQ ID NO: 14797 - DNA, 20 bp, Artificial Sequence
  Description of Artificial Sequence: Synthetic oligonucleotide
  Target: COL7A1; (-) strand; PAM type: NRG; PAM sequence: CAG
ccctttgagagaccctctca

SEQ ID NO: 14798 - DNA, 20 bp, Artificial Sequence
  Description of Artificial Sequence: Synthetic oligonucleotide
  Target: COL7A1; (-) strand; PAM type: NRG; PAM sequence: GAG
cctctcccagcaccctttga

SEQ ID NO: 14799 - DNA, 20 bp, Artificial Sequence
  Description of Artificial Sequence: Synthetic oligonucleotide
  Target: COL7A1; (-) strand; PAM type: NRG; PAM sequence: GAG
agcctctcccagcacccttt

SEQ ID NO: 14800 - DNA, 20 bp, Artificial Sequence
  Description of Artificial Sequence: Synthetic oligonucleotide
  Target: COL7A1; (-) strand; PAM type: NRG; PAM sequence: CAG
accttctcaacagcctctcc

SEQ ID NO: 14801 - DNA, 20 bp, Artificial Sequence
  Description of Artificial Sequence: Synthetic oligonucleotide
  Target: COL7A1; (-) strand; PAM type: NRG; PAM sequence: CAG
ccttactcctaccttctcaa

SEQ ID NO: 14802 - DNA, 20 bp, Artificial Sequence
  Description of Artificial Sequence: Synthetic oligonucleotide
  Target: COL7A1; (-) strand; PAM type: NRG; PAM sequence: GAG
tcatagaagctccagacgtg

SEQ ID NO: 14803 - DNA, 20 bp, Artificial Sequence
  Description of Artificial Sequence: Synthetic oligonucleotide
  Target: COL7A1; (-) strand; PAM type: NRG; PAM sequence: TGG
tctcatagaagctccagacg

SEQ ID NO: 14804 - DNA, 20 bp, Artificial Sequence
  Description of Artificial Sequence: Synthetic oligonucleotide
  Target: COL7A1; (-) strand; PAM type: NRG; PAM sequence: CAG
cgtgagtctcatagaagctc

SEQ ID NO: 14805 - DNA, 20 bp, Artificial Sequence
  Description of Artificial Sequence: Synthetic oligonucleotide
  Target: COL7A1; (-) strand; PAM type: NRG; PAM sequence: AAG
cctgctcgtgagtctcatag

SEQ ID NO: 14806 - DNA, 20 bp, Artificial Sequence
  Description of Artificial Sequence: Synthetic oligonucleotide
  Target: COL7A1; (-) strand; PAM type: NRG; PAM sequence: TAG
actcctgctcgtgagtctca

SEQ ID NO: 14807 - DNA, 20 bp, Artificial Sequence
  Description of Artificial Sequence: Synthetic oligonucleotide
  Target: COL7A1; (-) strand; PAM type: NRG; PAM sequence: GAG
agggccacactcctgctcgt

SEQ ID NO: 14808 - DNA, 20 bp, Artificial Sequence
  Description of Artificial Sequence: Synthetic oligonucleotide
  Target: COL7A1; (-) strand; PAM type: NRG; PAM sequence: GGG
gccagagctggggcttcaga

SEQ ID NO: 14809 - DNA, 20 bp, Artificial Sequence
  Description of Artificial Sequence: Synthetic oligonucleotide
  Target: COL7A1; (-) strand; PAM type: NRG; PAM sequence: AGG
ggccagagctggggcttcag

SEQ ID NO: 14810 - DNA, 20 bp, Artificial Sequence
  Description of Artificial Sequence: Synthetic oligonucleotide
  Target: COL7A1; (-) strand; PAM type: NRG; PAM sequence: GAG
aggccagagctggggcttca

SEQ ID NO: 14811 - DNA, 20 bp, Artificial Sequence
  Description of Artificial Sequence: Synthetic oligonucleotide
  Target: COL7A1; (-) strand; PAM type: NRG; PAM sequence: CAG
ggaggccagagctggggctt

SEQ ID NO: 14812 - DNA, 20 bp, Artificial Sequence
  Description of Artificial Sequence: Synthetic oligonucleotide
  Target: COL7A1; (-) strand; PAM type: NRG; PAM sequence: GGG
ctcccaggaggccagagctg

SEQ ID NO: 14813 - DNA, 20 bp, Artificial Sequence
  Description of Artificial Sequence: Synthetic oligonucleotide
  Target: COL7A1; (-) strand; PAM type: NRG; PAM sequence: GGG
cctcccaggaggccagagct

SEQ ID NO: 14814 - DNA, 20 bp, Artificial Sequence
  Description of Artificial Sequence: Synthetic oligonucleotide
  Target: COL7A1; (-) strand; PAM type: NRG; PAM sequence: TGG
tcctcccaggaggccagagc

SEQ ID NO: 14815 - DNA, 20 bp, Artificial Sequence
  Description of Artificial Sequence: Synthetic oligonucleotide
  Target: COL7A1; (-) strand; PAM type: NRG; PAM sequence: GAG
gtgttcctcccaggaggcca

SEQ ID NO: 14816 - DNA, 20 bp, Artificial Sequence
  Description of Artificial Sequence: Synthetic oligonucleotide
  Target: COL7A1; (-) strand; PAM type: NRG; PAM sequence: CAG
ctgtgttcctcccaggaggc

SEQ ID NO: 14817 - DNA, 20 bp, Artificial Sequence
  Description of Artificial Sequence: Synthetic oligonucleotide
  Target: COL7A1; (-) strand; PAM type: NRG; PAM sequence: AGG
taggctgtgttcctcccagg

SEQ ID NO: 14818 - DNA, 20 bp, Artificial Sequence
  Description of Artificial Sequence: Synthetic oligonucleotide
  Target: COL7A1; (-) strand; PAM type: NRG; PAM sequence: GAG
ctaggctgtgttcctcccag

SEQ ID NO: 14819 - DNA, 20 bp, Artificial Sequence
  Description of Artificial Sequence: Synthetic oligonucleotide
  Target: COL7A1; (-) strand; PAM type: NRG; PAM sequence: AGG
ccctaggctgtgttcctccc

SEQ ID NO: 14820 - DNA, 20 bp, Artificial Sequence
  Description of Artificial Sequence: Synthetic oligonucleotide
  Target: COL7A1; (-) strand; PAM type: NRG; PAM sequence: CAG
gccctaggctgtgttcctcc

SEQ ID NO: 14821 - DNA, 20 bp, Artificial Sequence
  Description of Artificial Sequence: Synthetic oligonucleotide
  Target: COL7A1; (-) strand; PAM type: NRG; PAM sequence: AGG
ctggcctcgggctgtgccct

SEQ ID NO: 14822 - DNA, 20 bp, Artificial Sequence
  Description of Artificial Sequence: Synthetic oligonucleotide
  Target: COL7A1; (-) strand; PAM type: NRG; PAM sequence: TAG
actggcctcgggctgtgccc

SEQ ID NO: 14823 - DNA, 20 bp, Artificial Sequence
  Description of Artificial Sequence: Synthetic oligonucleotide
  Target: COL7A1; (-) strand; PAM type: NRG; PAM sequence: GGG
tgcaggtaggcactggcctc

SEQ ID NO: 14824 - DNA, 20 bp, Artificial Sequence
  Description of Artificial Sequence: Synthetic oligonucleotide
  Target: COL7A1; (-) strand; PAM type: NRG; PAM sequence: CGG
ttgcaggtaggcactggcct

SEQ ID NO: 14825 - DNA, 20 bp, Artificial Sequence
  Description of Artificial Sequence: Synthetic oligonucleotide
  Target: COL7A1; (-) strand; PAM type: NRG; PAM sequence: TGG
atggggttgcaggtaggcac

SEQ ID NO: 14826 - DNA, 20 bp, Artificial Sequence
  Description of Artificial Sequence: Synthetic oligonucleotide
  Target: COL7A1; (-) strand; PAM type: NRG; PAM sequence: AGG
gccctgatggggttgcaggt

SEQ ID NO: 14827 - DNA, 20 bp, Artificial Sequence
  Description of Artificial Sequence: Synthetic oligonucleotide
  Target: COL7A1; (-) strand; PAM type: NRG; PAM sequence: TAG
cgccctgatggggttgcagg

SEQ ID NO: 14828 - DNA, 20 bp, Artificial Sequence
  Description of Artificial Sequence: Synthetic oligonucleotide
  Target: COL7A1; (-) strand; PAM type: NRG; PAM sequence: AGG
caccgccctgatggggttgc

SEQ ID NO: 14829 - DNA, 20 bp, Artificial Sequence
  Description of Artificial Sequence: Synthetic oligonucleotide
  Target: COL7A1; (-) strand; PAM type: NRG; PAM sequence: CAG
ccaccgccctgatggggttg

SEQ ID NO: 14830 - DNA, 20 bp, Artificial Sequence
  Description of Artificial Sequence: Synthetic oligonucleotide
  Target: COL7A1; (-) strand; PAM type: NRG; PAM sequence: GGG
ggggctccaccgccctgatg

SEQ ID NO: 14831 - DNA, 20 bp, Artificial Sequence
  Description of Artificial Sequence: Synthetic oligonucleotide
  Target: COL7A1; (-) strand; PAM type: NRG; PAM sequence: GGG
gggggctccaccgccctgat

SEQ ID NO: 14832 - DNA, 20 bp, Artificial Sequence
  Description of Artificial Sequence: Synthetic oligonucleotide
  Target: COL7A1; (-) strand; PAM type: NRG; PAM sequence: TGG
tgggggctccaccgccctga

SEQ ID NO: 14833 - DNA, 20 bp, Artificial Sequence
  Description of Artificial Sequence: Synthetic oligonucleotide
  Target: COL7A1; (-) strand; PAM type: NRG; PAM sequence: GGG
gggagaaggatgtgctctgg

SEQ ID NO: 14834 - DNA, 20 bp, Artificial Sequence
  Description of Artificial Sequence: Synthetic oligonucleotide
  Target: COL7A1; (-) strand; PAM type: NRG; PAM sequence: GGG
agggagaaggatgtgctctg

SEQ ID NO: 14835 - DNA, 20 bp, Artificial Sequence
  Description of Artificial Sequence: Synthetic oligonucleotide
  Target: COL7A1; (-) strand; PAM type: NRG; PAM sequence: GGG
gagggagaaggatgtgctct

SEQ ID NO: 14836 - DNA, 20 bp, Artificial Sequence
  Description of Artificial Sequence: Synthetic oligonucleotide
  Target: COL7A1; (-) strand; PAM type: NRG; PAM sequence: TGG
ggagggagaaggatgtgctc

SEQ ID NO: 14837 - DNA, 20 bp, Artificial Sequence
  Description of Artificial Sequence: Synthetic oligonucleotide
  Target: COL7A1; (-) strand; PAM type: NRG; PAM sequence: AGG
gggaaagcttgggagggaga

SEQ ID NO: 14838 - DNA, 20 bp, Artificial Sequence
  Description of Artificial Sequence: Synthetic oligonucleotide
  Target: COL7A1; (-) strand; PAM type: NRG; PAM sequence: AAG
agggaaagcttgggagggag

SEQ ID NO: 14839 - DNA, 20 bp, Artificial Sequence
  Description of Artificial Sequence: Synthetic oligonucleotide
  Target: COL7A1; (-) strand; PAM type: NRG; PAM sequence: GAG
ttcagggaaagcttgggagg

SEQ ID NO: 14840 - DNA, 20 bp, Artificial Sequence
  Description of Artificial Sequence: Synthetic oligonucleotide
  Target: COL7A1; (-) strand; PAM type: NRG; PAM sequence: GGG
tgttcagggaaagcttggga

SEQ ID NO: 14841 - DNA, 20 bp, Artificial Sequence
  Description of Artificial Sequence: Synthetic oligonucleotide
  Target: COL7A1; (-) strand; PAM type: NRG; PAM sequence: AGG
atgttcagggaaagcttggg

SEQ ID NO: 14842 - DNA, 20 bp, Artificial Sequence
  Description of Artificial Sequence: Synthetic oligonucleotide
  Target: COL7A1; (-) strand; PAM type: NRG; PAM sequence: GAG
aatgttcagggaaagcttgg

SEQ ID NO: 14843 - DNA, 20 bp, Artificial Sequence
  Description of Artificial Sequence: Synthetic oligonucleotide
  Target: COL7A1; (-) strand; PAM type: NRG; PAM sequence: GGG
gaaatgttcagggaaagctt

SEQ ID NO: 14844 - DNA, 20 bp, Artificial Sequence
  Description of Artificial Sequence: Synthetic oligonucleotide
  Target: COL7A1; (-) strand; PAM type: NRG; PAM sequence: TGG
ggaaatgttcagggaaagct

SEQ ID NO: 14845 - DNA, 20 bp, Artificial Sequence
  Description of Artificial Sequence: Synthetic oligonucleotide
  Target: COL7A1; (-) strand; PAM type: NRG; PAM sequence: AAG
gggaaggaaatgttcaggga

SEQ ID NO: 14846 - DNA, 20 bp, Artificial Sequence
  Description of Artificial Sequence: Synthetic oligonucleotide
  Target: COL7A1; (-) strand; PAM type: NRG; PAM sequence: GGG
gccagggaaggaaatgttca

SEQ ID NO: 14847 - DNA, 20 bp, Artificial Sequence
  Description of Artificial Sequence: Synthetic oligonucleotide
  Target: COL7A1; (-) strand; PAM type: NRG; PAM sequence: AGG
ggccagggaaggaaatgttc

SEQ ID NO: 14848 - DNA, 20 bp, Artificial Sequence
  Description of Artificial Sequence: Synthetic oligonucleotide
  Target: COL7A1; (-) strand; PAM type: NRG; PAM sequence: CAG
aggccagggaaggaaatgtt

SEQ ID NO: 14849 - DNA, 20 bp, Artificial Sequence
  Description of Artificial Sequence: Synthetic oligonucleotide
  Target: COL7A1; (-) strand; PAM type: NRG; PAM sequence: AGG
gtagtgactgaggccaggga

SEQ ID NO: 14850 - DNA, 20 bp, Artificial Sequence
  Description of Artificial Sequence: Synthetic oligonucleotide
  Target: COL7A1; (-) strand; PAM type: NRG; PAM sequence: AAG
ggtagtgactgaggccaggg

SEQ ID NO: 14851 - DNA, 20 bp, Artificial Sequence
  Description of Artificial Sequence: Synthetic oligonucleotide
  Target: COL7A1; (-) strand; PAM type: NRG; PAM sequence: GGG
tgaggtagtgactgaggcca

SEQ ID NO: 14852 - DNA, 20 bp, Artificial Sequence
  Description of Artificial Sequence: Synthetic oligonucleotide
  Target: COL7A1; (-) strand; PAM type: NRG; PAM sequence: AGG
gtgaggtagtgactgaggcc

SEQ ID NO: 14853 - DNA, 20 bp, Artificial Sequence
  Description of Artificial Sequence: Synthetic oligonucleotide
  Target: COL7A1; (-) strand; PAM type: NRG; PAM sequence: CAG
ggtgaggtagtgactgaggc

SEQ ID NO: 14854 - DNA, 20 bp, Artificial Sequence
  Description of Artificial Sequence: Synthetic oligonucleotide
  Target: COL7A1; (-) strand; PAM type: NRG; PAM sequence: AGG
atggggtgaggtagtgactg

SEQ ID NO: 14855 - DNA, 20 bp, Artificial Sequence
  Description of Artificial Sequence: Synthetic oligonucleotide
  Target: COL7A1; (-) strand; PAM type: NRG; PAM sequence: GAG
gatggggtgaggtagtgact

SEQ ID NO: 14856 - DNA, 20 bp, Artificial Sequence
  Description of Artificial Sequence: Synthetic oligonucleotide
  Target: COL7A1; (-) strand; PAM type: NRG; PAM sequence: TAG
tggaaacagatggggtgagg

SEQ ID NO: 14857 - DNA, 20 bp, Artificial Sequence
  Description of Artificial Sequence: Synthetic oligonucleotide
  Target: COL7A1; (-) strand; PAM type: NRG; PAM sequence: AGG
ggttggaaacagatggggtg

SEQ ID NO: 14858 - DNA, 20 bp, Artificial Sequence
  Description of Artificial Sequence: Synthetic oligonucleotide
  Target: COL7A1; (-) strand; PAM type: NRG; PAM sequence: GAG
tggttggaaacagatggggt

SEQ ID NO: 14859 - DNA, 20 bp, Artificial Sequence
  Description of Artificial Sequence: Synthetic oligonucleotide
  Target: COL7A1; (-) strand; PAM type: NRG; PAM sequence: GGG
gccctggttggaaacagatg

SEQ ID NO: 14860 - DNA, 20 bp, Artificial Sequence
  Description of Artificial Sequence: Synthetic oligonucleotide
  Target: COL7A1; (-) strand; PAM type: NRG; PAM sequence: GGG
ggccctggttggaaacagat

SEQ ID NO: 14861 - DNA, 20 bp, Artificial Sequence
  Description of Artificial Sequence: Synthetic oligonucleotide
  Target: COL7A1; (-) strand; PAM type: NRG; PAM sequence: TGG
aggccctggttggaaacaga

SEQ ID NO: 14862 - DNA, 20 bp, Artificial Sequence
  Description of Artificial Sequence: Synthetic oligonucleotide
  Target: COL7A1; (-) strand; PAM type: NRG; PAM sequence: CAG
aaagaggccctggttggaaa

SEQ ID NO: 14863 - DNA, 20 bp, Artificial Sequence
  Description of Artificial Sequence: Synthetic oligonucleotide
  Target: COL7A1; (-) strand; PAM type: NRG; PAM sequence: TGG
cctgataaagaggccctggt

SEQ ID NO: 14864 - DNA, 20 bp, Artificial Sequence
  Description of Artificial Sequence: Synthetic oligonucleotide
  Target: COL7A1; (-) strand; PAM type: NRG; PAM sequence: TGG
gggacctgataaagaggccc

SEQ ID NO: 14865 - DNA, 20 bp, Artificial Sequence
  Description of Artificial Sequence: Synthetic oligonucleotide
  Target: COL7A1; (-) strand; PAM type: NRG; PAM sequence: AGG
ggggctgggacctgataaag

SEQ ID NO: 14866 - DNA, 20 bp, Artificial Sequence
  Description of Artificial Sequence: Synthetic oligonucleotide
  Target: COL7A1; (-) strand; PAM type: NRG; PAM sequence: GAG
tggggctgggacctgataaa

SEQ ID NO: 14867 - DNA, 20 bp, Artificial Sequence
  Description of Artificial Sequence: Synthetic oligonucleotide
  Target: COL7A1; (-) strand; PAM type: NRG; PAM sequence: AAG
tgtggggctgggacctgata

SEQ ID NO: 14868 - DNA, 20 bp, Artificial Sequence
  Description of Artificial Sequence: Synthetic oligonucleotide
  Target: COL7A1; (-) strand; PAM type: NRG; PAM sequence: GGG
acagtgggatgtgtggggct

SEQ ID NO: 14869 - DNA, 20 bp, Artificial Sequence
  Description of Artificial Sequence: Synthetic oligonucleotide
  Target: COL7A1; (-) strand; PAM type: NRG; PAM sequence: TGG
tacagtgggatgtgtggggc

SEQ ID NO: 14870 - DNA, 20 bp, Artificial Sequence
  Description of Artificial Sequence: Synthetic oligonucleotide
  Target: COL7A1; (-) strand; PAM type: NRG; PAM sequence: GGG
agggtacagtgggatgtgtg

SEQ ID NO: 14871 - DNA, 20 bp, Artificial Sequence
  Description of Artificial Sequence: Synthetic oligonucleotide
  Target: COL7A1; (-) strand; PAM type: NRG; PAM sequence: GGG
cagggtacagtgggatgtgt

SEQ ID NO: 14872 - DNA, 20 bp, Artificial Sequence
  Description of Artificial Sequence: Synthetic oligonucleotide
  Target: COL7A1; (-) strand; PAM type: NRG; PAM sequence: TGG
ccagggtacagtgggatgtg

SEQ ID NO: 14873 - DNA, 20 bp, Artificial Sequence
  Description of Artificial Sequence: Synthetic oligonucleotide
  Target: COL7A1; (-) strand; PAM type: NRG; PAM sequence: GGG
ggtggtgtccagggtacagt

SEQ ID NO: 14874 - DNA, 20 bp, Artificial Sequence
  Description of Artificial Sequence: Synthetic oligonucleotide
  Target: COL7A1; (-) strand; PAM type: NRG; PAM sequence: TGG
tggtggtgtccagggtacag

SEQ ID NO: 14875 - DNA, 20 bp, Artificial Sequence
  Description of Artificial Sequence: Synthetic oligonucleotide
  Target: COL7A1; (-) strand; PAM type: NRG; PAM sequence: CAG
gtttggtggtgtccagggta

SEQ ID NO: 14876 - DNA, 20 bp, Artificial Sequence
  Description of Artificial Sequence: Synthetic oligonucleotide
  Target: COL7A1; (-) strand; PAM type: NRG; PAM sequence: GGG
gaggagtttggtggtgtcca

SEQ ID NO: 14877 - DNA, 20 bp, Artificial Sequence
  Description of Artificial Sequence: Synthetic oligonucleotide
  Target: COL7A1; (-) strand; PAM type: NRG; PAM sequence: AGG
tgaggagtttggtggtgtcc

SEQ ID NO: 14878 - DNA, 20 bp, Artificial Sequence
  Description of Artificial Sequence: Synthetic oligonucleotide
  Target: COL7A1; (-) strand; PAM type: NRG; PAM sequence: CAG
gtgaggagtttggtggtgtc

SEQ ID NO: 14879 - DNA, 20 bp, Artificial Sequence
  Description of Artificial Sequence: Synthetic oligonucleotide
  Target: COL7A1; (-) strand; PAM type: NRG; PAM sequence: TGG
tagtccagtgaggagtttgg

SEQ ID NO: 14880 - DNA, 20 bp, Artificial Sequence
  Description of Artificial Sequence: Synthetic oligonucleotide
  Target: COL7A1; (-) strand; PAM type: NRG; PAM sequence: TGG
ccatagtccagtgaggagtt

SEQ ID NO: 14881 - DNA, 20 bp, Artificial Sequence
  Description of Artificial Sequence: Synthetic oligonucleotide
  Target: COL7A1; (-) strand; PAM type: NRG; PAM sequence: GAG
atcttccatagtccagtgag

SEQ ID NO: 14882 - DNA, 20 bp, Artificial Sequence
  Description of Artificial Sequence: Synthetic oligonucleotide
  Target: COL7A1; (-) strand; PAM type: NRG; PAM sequence: AGG
taatcttccatagtccagtg

SEQ ID NO: 14883 - DNA, 20 bp, Artificial Sequence
  Description of Artificial Sequence: Synthetic oligonucleotide
  Target: COL7A1; (-) strand; PAM type: NRG; PAM sequence: GAG
gtaatcttccatagtccagt

SEQ ID NO: 14884 - DNA, 20 bp, Artificial Sequence
  Description of Artificial Sequence: Synthetic oligonucleotide
  Target: COL7A1; (-) strand; PAM type: NRG; PAM sequence: CAG
gagggtaatcttccatagtc

SEQ ID NO: 14885 - DNA, 20 bp, Artificial Sequence
  Description of Artificial Sequence: Synthetic oligonucleotide
  Target: COL7A1; (-) strand; PAM type: NRG; PAM sequence: TAG
tggaggagggtaatcttcca

SEQ ID NO: 14886 - DNA, 20 bp, Artificial Sequence
  Description of Artificial Sequence: Synthetic oligonucleotide
  Target: COL7A1; (-) strand; PAM type: NRG; PAM sequence: GGG
ggcacgagtgggttggagga

SEQ ID NO: 14887 - DNA, 20 bp, Artificial Sequence
  Description of Artificial Sequence: Synthetic oligonucleotide
  Target: COL7A1; (-) strand; PAM type: NRG; PAM sequence: AGG
aggcacgagtgggttggagg

SEQ ID NO: 14888 - DNA, 20 bp, Artificial Sequence
  Description of Artificial Sequence: Synthetic oligonucleotide
  Target: COL7A1; (-) strand; PAM type: NRG; PAM sequence: GAG
gaggcacgagtgggttggag

SEQ ID NO: 14889 - DNA, 20 bp, Artificial Sequence
  Description of Artificial Sequence: Synthetic oligonucleotide
  Target: COL7A1; (-) strand; PAM type: NRG; PAM sequence: AGG
cggaggcacgagtgggttgg

SEQ ID NO: 14890 - DNA, 20 bp, Artificial Sequence
  Description of Artificial Sequence: Synthetic oligonucleotide
  Target: COL7A1; (-) strand; PAM type: NRG; PAM sequence: GAG
gcggaggcacgagtgggttg

SEQ ID NO: 14891 - DNA, 20 bp, Artificial Sequence
  Description of Artificial Sequence: Synthetic oligonucleotide
  Target: COL7A1; (-) strand; PAM type: NRG; PAM sequence: TGG
acgcggaggcacgagtgggt

SEQ ID NO: 14892 - DNA, 20 bp, Artificial Sequence
  Description of Artificial Sequence: Synthetic oligonucleotide
  Target: COL7A1; (-) strand; PAM type: NRG; PAM sequence: GGG
ggagacgcggaggcacgagt

SEQ ID NO: 14893 - DNA, 20 bp, Artificial Sequence
  Description of Artificial Sequence: Synthetic oligonucleotide
  Target: COL7A1; (-) strand; PAM type: NRG; PAM sequence: TGG
gggagacgcggaggcacgag

SEQ ID NO: 14894 - DNA, 20 bp, Artificial Sequence
  Description of Artificial Sequence: Synthetic oligonucleotide
  Target: COL7A1; (-) strand; PAM type: NRG; PAM sequence: GAG
gctgggagacgcggaggcac

SEQ ID NO: 14895 - DNA, 20 bp, Artificial Sequence
  Description of Artificial Sequence: Synthetic oligonucleotide
  Target: COL7A1; (-) strand; PAM type: NRG; PAM sequence: AGG
agcagggctgggagacgcgg

SEQ ID NO: 14896 - DNA, 20 bp, Artificial Sequence
  Description of Artificial Sequence: Synthetic oligonucleotide
  Target: COL7A1; (-) strand; PAM type: NRG; PAM sequence: GAG
cagcagggctgggagacgcg

SEQ ID NO: 14897 - DNA, 20 bp, Artificial Sequence
  Description of Artificial Sequence: Synthetic oligonucleotide
  Target: COL7A1; (-) strand; PAM type: NRG; PAM sequence: CGG
cccagcagggctgggagacg

SEQ ID NO: 14898 - DNA, 20 bp, Artificial Sequence
  Description of Artificial Sequence: Synthetic oligonucleotide
  Target: COL7A1; (-) strand; PAM type: NRG; PAM sequence: GAG
tacattcccagcagggctgg

SEQ ID NO: 14899 - DNA, 20 bp, Artificial Sequence
  Description of Artificial Sequence: Synthetic oligonucleotide
  Target: COL7A1; (-) strand; PAM type: NRG; PAM sequence: GGG
actacattcccagcagggct

SEQ ID NO: 14900 - DNA, 20 bp, Artificial Sequence
  Description of Artificial Sequence: Synthetic oligonucleotide
  Target: COL7A1; (-) strand; PAM type: NRG; PAM sequence: TGG
gactacattcccagcagggc

SEQ ID NO: 14901 - DNA, 20 bp, Artificial Sequence
  Description of Artificial Sequence: Synthetic oligonucleotide
  Target: COL7A1; (-) strand; PAM type: NRG; PAM sequence: GGG
agaggactacattcccagca

SEQ ID NO: 14902 - DNA, 20 bp, Artificial Sequence
  Description of Artificial Sequence: Synthetic oligonucleotide
  Target: COL7A1; (-) strand; PAM type: NRG; PAM sequence: AGG
aagaggactacattcccagc

SEQ ID NO: 14903 - DNA, 20 bp, Artificial Sequence
  Description of Artificial Sequence: Synthetic oligonucleotide
  Target: COL7A1; (-) strand; PAM type: NRG; PAM sequence: CAG
aaagaggactacattcccag

SEQ ID NO: 14904 - DNA, 20 bp, Artificial Sequence
  Description of Artificial Sequence: Synthetic oligonucleotide
  Target: COL7A1; (-) strand; PAM type: NRG; PAM sequence: CAG
cacaaagaggactacattcc

SEQ ID NO: 14905 - DNA, 20 bp, Artificial Sequence
  Description of Artificial Sequence: Synthetic oligonucleotide
  Target: COL7A1; (-) strand; PAM type: NRG; PAM sequence: AGG
cagctgtaggggacacaaag

SEQ ID NO: 14906 - DNA, 20 bp, Artificial Sequence
  Description of Artificial Sequence: Synthetic oligonucleotide
  Target: COL7A1; (-) strand; PAM type: NRG; PAM sequence: GAG
ccagctgtaggggacacaaa

SEQ ID NO: 14907 - DNA, 20 bp, Artificial Sequence
  Description of Artificial Sequence: Synthetic oligonucleotide
  Target: COL7A1; (-) strand; PAM type: NRG; PAM sequence: AAG
agccagctgtaggggacaca

SEQ ID NO: 14908 - DNA, 20 bp, Artificial Sequence
  Description of Artificial Sequence: Synthetic oligonucleotide
  Target: COL7A1; (-) strand; PAM type: NRG; PAM sequence: GGG
cgaactggagccagctgtag

SEQ ID NO: 14909 - DNA, 20 bp, Artificial Sequence
  Description of Artificial Sequence: Synthetic oligonucleotide
  Target: COL7A1; (-) strand; PAM type: NRG; PAM sequence: GGG
acgaactggagccagctgta

SEQ ID NO: 14910 - DNA, 20 bp, Artificial Sequence
  Description of Artificial Sequence: Synthetic oligonucleotide
  Target: COL7A1; (-) strand; PAM type: NRG; PAM sequence: AGG
cacgaactggagccagctgt

SEQ ID NO: 14911 - DNA, 20 bp, Artificial Sequence
  Description of Artificial Sequence: Synthetic oligonucleotide
  Target: COL7A1; (-) strand; PAM type: NRG; PAM sequence: TAG
acacgaactggagccagctg

SEQ ID NO: 14912 - DNA, 20 bp, Artificial Sequence
  Description of Artificial Sequence: Synthetic oligonucleotide
  Target: COL7A1; (-) strand; PAM type: NRG; PAM sequence: CAG
atggccacacgaactggagc

SEQ ID NO: 14913 - DNA, 20 bp, Artificial Sequence
  Description of Artificial Sequence: Synthetic oligonucleotide
  Target: COL7A1; (-) strand; PAM type: NRG; PAM sequence: GAG
ggtcatggccacacgaactg

SEQ ID NO: 14914 - DNA, 20 bp, Artificial Sequence
  Description of Artificial Sequence: Synthetic oligonucleotide
  Target: COL7A1; (-) strand; PAM type: NRG; PAM sequence: TGG
gaggtcatggccacacgaac

SEQ ID NO: 14915 - DNA, 20 bp, Artificial Sequence
  Description of Artificial Sequence: Synthetic oligonucleotide
  Target: COL7A1; (-) strand; PAM type: NRG; PAM sequence: TGG
ctgtggcagaacagaggtca

SEQ ID NO: 14916 - DNA, 20 bp, Artificial Sequence
  Description of Artificial Sequence: Synthetic oligonucleotide
  Target: COL7A1; (-) strand; PAM type: NRG; PAM sequence: AGG
gctgtgctgtggcagaacag

SEQ ID NO: 14917 - DNA, 20 bp, Artificial Sequence
  Description of Artificial Sequence: Synthetic oligonucleotide
  Target: COL7A1; (-) strand; PAM type: NRG; PAM sequence: GAG
agctgtgctgtggcagaaca

SEQ ID NO: 14918 - DNA, 20 bp, Artificial Sequence
  Description of Artificial Sequence: Synthetic oligonucleotide
  Target: COL7A1; (-) strand; PAM type: NRG; PAM sequence: CAG
tgagctgtgctgtggcagaa

SEQ ID NO: 14919 - DNA, 20 bp, Artificial Sequence
  Description of Artificial Sequence: Synthetic oligonucleotide
  Target: COL7A1; (-) strand; PAM type: NRG; PAM sequence: CAG
cttggtgagctgtgctgtgg

SEQ ID NO: 14920 - DNA, 20 bp, Artificial Sequence
  Description of Artificial Sequence: Synthetic oligonucleotide
  Target: COL7A1; (-) strand; PAM type: NRG; PAM sequence: TGG
agtcttggtgagctgtgctg

SEQ ID NO: 14921 - DNA, 20 bp, Artificial Sequence
  Description of Artificial Sequence: Synthetic oligonucleotide
  Target: COL7A1; (-) strand; PAM type: NRG; PAM sequence: GAG
atttctgtatcagtcttggt

SEQ ID NO: 14922 - DNA, 20 bp, Artificial Sequence
  Description of Artificial Sequence: Synthetic oligonucleotide
  Target: COL7A1; (-) strand; PAM type: NRG; PAM sequence: TGG
ccatatttctgtatcagtct

SEQ ID NO: 14923 - DNA, 20 bp, Artificial Sequence
  Description of Artificial Sequence: Synthetic oligonucleotide
  Target: COL7A1; (-) strand; PAM type: NRG; PAM sequence: CAG
ctcaggccatatttctgtat

SEQ ID NO: 14924 - DNA, 20 bp, Artificial Sequence
  Description of Artificial Sequence: Synthetic oligonucleotide
  Target: COL7A1; (-) strand; PAM type: NRG; PAM sequence: AGG
gattcagcatggggactctc

SEQ ID NO: 14925 - DNA, 20 bp, Artificial Sequence
  Description of Artificial Sequence: Synthetic oligonucleotide
  Target: COL7A1; (-) strand; PAM type: NRG; PAM sequence: CAG
agattcagcatggggactct

SEQ ID NO: 14926 - DNA, 20 bp, Artificial Sequence
  Description of Artificial Sequence: Synthetic oligonucleotide
  Target: COL7A1; (-) strand; PAM type: NRG; PAM sequence: GGG
cagagttgagattcagcatg

SEQ ID NO: 14927 - DNA, 20 bp, Artificial Sequence
  Description of Artificial Sequence: Synthetic oligonucleotide
  Target: COL7A1; (-) strand; PAM type: NRG; PAM sequence: GGG
tcagagttgagattcagcat

SEQ ID NO: 14928 - DNA, 20 bp, Artificial Sequence
  Description of Artificial Sequence: Synthetic oligonucleotide
  Target: COL7A1; (-) strand; PAM type: NRG; PAM sequence: TGG
gtcagagttgagattcagca

SEQ ID NO: 14929 - DNA, 20 bp, Artificial Sequence
  Description of Artificial Sequence: Synthetic oligonucleotide
  Target: COL7A1; (-) strand; PAM type: NRG; PAM sequence: CAG
acttggtcagagttgagatt

SEQ ID NO: 14930 - DNA, 20 bp, Artificial Sequence
  Description of Artificial Sequence: Synthetic oligonucleotide
  Target: COL7A1; (-) strand; PAM type: NRG; PAM sequence: GAG
gaagtgacttggtcagagtt

SEQ ID NO: 14931 - DNA, 20 bp, Artificial Sequence
  Description of Artificial Sequence: Synthetic oligonucleotide
  Target: COL7A1; (-) strand; PAM type: NRG; PAM sequence: GAG
gaagagaagtgacttggtca

SEQ ID NO: 14932 - DNA, 20 bp, Artificial Sequence
  Description of Artificial Sequence: Synthetic oligonucleotide
  Target: COL7A1; (-) strand; PAM type: NRG; PAM sequence: CAG
gtgaagagaagtgacttggt

SEQ ID NO: 14933 - DNA, 20 bp, Artificial Sequence
  Description of Artificial Sequence: Synthetic oligonucleotide
  Target: COL7A1; (-) strand; PAM type: NRG; PAM sequence: TGG
tactgtgaagagaagtgact

SEQ ID NO: 14934 - DNA, 20 bp, Artificial Sequence
  Description of Artificial Sequence: Synthetic oligonucleotide
  Target: COL7A1; (-) strand; PAM type: NRG; PAM sequence: AAG
ttggaggttactgtgaagag

SEQ ID NO: 14935 - DNA, 20 bp, Artificial Sequence
  Description of Artificial Sequence: Synthetic oligonucleotide
  Target: COL7A1; (-) strand; PAM type: NRG; PAM sequence: GAG
gtgttggaggttactgtgaa

SEQ ID NO: 14936 - DNA, 20 bp, Artificial Sequence
  Description of Artificial Sequence: Synthetic oligonucleotide
  Target: COL7A1; (-) strand; PAM type: NRG; PAM sequence: AAG
gtgtgttggaggttactgtg

SEQ ID NO: 14937 - DNA, 20 bp, Artificial Sequence
  Description of Artificial Sequence: Synthetic oligonucleotide
  Target: COL7A1; (-) strand; PAM type: NRG; PAM sequence: AGG
atgctggggaggtgtgttgg

SEQ ID NO: 14938 - DNA, 20 bp, Artificial Sequence
  Description of Artificial Sequence: Synthetic oligonucleotide
  Target: COL7A1; (-) strand; PAM type: NRG; PAM sequence: GAG
catgctggggaggtgtgttg

SEQ ID NO: 14939 - DNA, 20 bp, Artificial Sequence
  Description of Artificial Sequence: Synthetic oligonucleotide
  Target: COL7A1; (-) strand; PAM type: NRG; PAM sequence: TGG
gccatgctggggaggtgtgt

SEQ ID NO: 14940 - DNA, 20 bp, Artificial Sequence
  Description of Artificial Sequence: Synthetic oligonucleotide
  Target: COL7A1; (-) strand; PAM type: NRG; PAM sequence: AGG
accctggagccatgctgggg

SEQ ID NO: 14941 - DNA, 20 bp, Artificial Sequence
  Description of Artificial Sequence: Synthetic oligonucleotide
  Target: COL7A1; (-) strand; PAM type: NRG; PAM sequence: GAG
taccctggagccatgctggg

SEQ ID NO: 14942 - DNA, 20 bp, Artificial Sequence
  Description of Artificial Sequence: Synthetic oligonucleotide
  Target: COL7A1; (-) strand; PAM type: NRG; PAM sequence: GGG
tttaccctggagccatgctg

SEQ ID NO: 14943 - DNA, 20 bp, Artificial Sequence
  Description of Artificial Sequence: Synthetic oligonucleotide
  Target: COL7A1; (-) strand; PAM type: NRG; PAM sequence: GGG
ctttaccctggagccatgct

SEQ ID NO: 14944 - DNA, 20 bp, Artificial Sequence
  Description of Artificial Sequence: Synthetic oligonucleotide
  Target: COL7A1; (-) strand; PAM type: NRG; PAM sequence: TGG
tctttaccctggagccatgc

SEQ ID NO: 14945 - DNA, 20 bp, Artificial Sequence
  Description of Artificial Sequence: Synthetic oligonucleotide
  Target: COL7A1; (-) strand; PAM type: NRG; PAM sequence: GAG
ggactctggtctttaccctg

SEQ ID NO: 14946 - DNA, 20 bp, Artificial Sequence
  Description of Artificial Sequence: Synthetic oligonucleotide
  Target: COL7A1; (-) strand; PAM type: NRG; PAM sequence: TGG
agggactctggtctttaccc

SEQ ID NO: 14947 - DNA, 20 bp, Artificial Sequence
  Description of Artificial Sequence: Synthetic oligonucleotide
  Target: COL7A1; (-) strand; PAM type: NRG; PAM sequence: TGG
gcgtaccaagccagggactc

SEQ ID NO: 14948 - DNA, 20 bp, Artificial Sequence
  Description of Artificial Sequence: Synthetic oligonucleotide
  Target: COL7A1; (-) strand; PAM type: NRG; PAM sequence: GGG
ggaccttgcgtaccaagcca

SEQ ID NO: 14949 - DNA, 20 bp, Artificial Sequence
  Description of Artificial Sequence: Synthetic oligonucleotide
  Target: COL7A1; (-) strand; PAM type: NRG; PAM sequence: AGG
gggaccttgcgtaccaagcc

SEQ ID NO: 14950 - DNA, 20 bp, Artificial Sequence
  Description of Artificial Sequence: Synthetic oligonucleotide
  Target: COL7A1; (-) strand; PAM type: NRG; PAM sequence: CAG
agggaccttgcgtaccaagc

SEQ ID NO: 14951 - DNA, 20 bp, Artificial Sequence
  Description of Artificial Sequence: Synthetic oligonucleotide
  Target: COL7A1; (-) strand; PAM type: NRG; PAM sequence: AAG
tctaagggaccttgcgtacc

SEQ ID NO: 14952 - DNA, 20 bp, Artificial Sequence
  Description of Artificial Sequence: Synthetic oligonucleotide
  Target: COL7A1; (-) strand; PAM type: NRG; PAM sequence: GGG
tgggagtggtctggttctaa

SEQ ID NO: 14953 - DNA, 20 bp, Artificial Sequence
  Description of Artificial Sequence: Synthetic oligonucleotide
  Target: COL7A1; (-) strand; PAM type: NRG; PAM sequence: AGG
ctgggagtggtctggttcta

SEQ ID NO: 14954 - DNA, 20 bp, Artificial Sequence
  Description of Artificial Sequence: Synthetic oligonucleotide
  Target: COL7A1; (-) strand; PAM type: NRG; PAM sequence: AAG
gctgggagtggtctggttct

SEQ ID NO: 14955 - DNA, 20 bp, Artificial Sequence
  Description of Artificial Sequence: Synthetic oligonucleotide
  Target: COL7A1; (-) strand; PAM type: NRG; PAM sequence: TGG
ttgagttgctgggagtggtc

SEQ ID NO: 14956 - DNA, 20 bp, Artificial Sequence
  Description of Artificial Sequence: Synthetic oligonucleotide
  Target: COL7A1; (-) strand; PAM type: NRG; PAM sequence: TGG
agagcttgagttgctgggag

SEQ ID NO: 14957 - DNA, 20 bp, Artificial Sequence
  Description of Artificial Sequence: Synthetic oligonucleotide
  Target: COL7A1; (-) strand; PAM type: NRG; PAM sequence: GAG
acgagagcttgagttgctgg

SEQ ID NO: 14958 - DNA, 20 bp, Artificial Sequence
  Description of Artificial Sequence: Synthetic oligonucleotide
  Target: COL7A1; (-) strand; PAM type: NRG; PAM sequence: GGG
acacgagagcttgagttgct

SEQ ID NO: 14959 - DNA, 20 bp, Artificial Sequence
  Description of Artificial Sequence: Synthetic oligonucleotide
  Target: COL7A1; (-) strand; PAM type: NRG; PAM sequence: TGG
gacacgagagcttgagttgc

SEQ ID NO: 14960 - DNA, 20 bp, Artificial Sequence
  Description of Artificial Sequence: Synthetic oligonucleotide
  Target: COL7A1; (-) strand; PAM type: NRG; PAM sequence: GAG
tgtgctggacacgagagctt

SEQ ID NO: 14961 - DNA, 20 bp, Artificial Sequence
  Description of Artificial Sequence: Synthetic oligonucleotide
  Target: COL7A1; (-) strand; PAM type: NRG; PAM sequence: GAG
tacaggtgtgctggacacga

SEQ ID NO: 14962 - DNA, 20 bp, Artificial Sequence
  Description of Artificial Sequence: Synthetic oligonucleotide
  Target: COL7A1; (-) strand; PAM type: NRG; PAM sequence: GAG
gctacaggtgtgctggacac

SEQ ID NO: 14963 - DNA, 20 bp, Artificial Sequence
  Description of Artificial Sequence: Synthetic oligonucleotide
  Target: COL7A1; (-) strand; PAM type: NRG; PAM sequence: TGG
cttagaggctacaggtgtgc

SEQ ID NO: 14964 - DNA, 20 bp, Artificial Sequence
  Description of Artificial Sequence: Synthetic oligonucleotide
  Target: COL7A1; (-) strand; PAM type: NRG; PAM sequence: AGG
gcctggcccttagaggctac

SEQ ID NO: 14965 - DNA, 20 bp, Artificial Sequence
  Description of Artificial Sequence: Synthetic oligonucleotide
  Target: COL7A1; (-) strand; PAM type: NRG; PAM sequence: CAG
agcctggcccttagaggcta

SEQ ID NO: 14966 - DNA, 20 bp, Artificial Sequence
  Description of Artificial Sequence: Synthetic oligonucleotide
  Target: COL7A1; (-) strand; PAM type: NRG; PAM sequence: AGG
aagcccagcctggcccttag

SEQ ID NO: 14967 - DNA, 20 bp, Artificial Sequence
  Description of Artificial Sequence: Synthetic oligonucleotide
  Target: COL7A1; (-) strand; PAM type: NRG; PAM sequence: GAG
taagcccagcctggccctta

SEQ ID NO: 14968 - DNA, 20 bp, Artificial Sequence
  Description of Artificial Sequence: Synthetic oligonucleotide
  Target: COL7A1; (-) strand; PAM type: NRG; PAM sequence: TAG
tctaagcccagcctggccct

SEQ ID NO: 14969 - DNA, 20 bp, Artificial Sequence
  Description of Artificial Sequence: Synthetic oligonucleotide
  Target: COL7A1; (-) strand; PAM type: NRG; PAM sequence: TGG
cttcatttctaagcccagcc

SEQ ID NO: 14970 - DNA, 20 bp, Artificial Sequence
  Description of Artificial Sequence: Synthetic oligonucleotide
  Target: COL7A1; (-) strand; PAM type: NRG; PAM sequence: CAG
tggggcttcatttctaagcc

SEQ ID NO: 14971 - DNA, 20 bp, Artificial Sequence
  Description of Artificial Sequence: Synthetic oligonucleotide
  Target: COL7A1; (-) strand; PAM type: NRG; PAM sequence: AAG
gaggatggggcttcatttct

SEQ ID NO: 14972 - DNA, 20 bp, Artificial Sequence
  Description of Artificial Sequence: Synthetic oligonucleotide
  Target: COL7A1; (-) strand; PAM type: NRG; PAM sequence: GGG
gtttgagctcctggaggatg

SEQ ID NO: 14973 - DNA, 20 bp, Artificial Sequence
  Description of Artificial Sequence: Synthetic oligonucleotide
  Target: COL7A1; (-) strand; PAM type: NRG; PAM sequence: GGG
agtttgagctcctggaggat

SEQ ID NO: 14974 - DNA, 20 bp, Artificial Sequence
  Description of Artificial Sequence: Synthetic oligonucleotide
  Target: COL7A1; (-) strand; PAM type: NRG; PAM sequence: TGG
aagtttgagctcctggagga

SEQ ID NO: 14975 - DNA, 20 bp, Artificial Sequence
  Description of Artificial Sequence: Synthetic oligonucleotide
  Target: COL7A1; (-) strand; PAM type: NRG; PAM sequence: AGG
tgtcaagtttgagctcctgg

SEQ ID NO: 14976 - DNA, 20 bp, Artificial Sequence
  Description of Artificial Sequence: Synthetic oligonucleotide
  Target: COL7A1; (-) strand; PAM type: NRG; PAM sequence: GAG
ttgtcaagtttgagctcctg

SEQ ID NO: 14977 - DNA, 20 bp, Artificial Sequence
  Description of Artificial Sequence: Synthetic oligonucleotide
  Target: COL7A1; (-) strand; PAM type: NRG; PAM sequence: TGG
tgttgtcaagtttgagctcc

SEQ ID NO: 14978 - DNA, 20 bp, Artificial Sequence
  Description of Artificial Sequence: Synthetic oligonucleotide
  Target: COL7A1; (-) strand; PAM type: NRG; PAM sequence: GAG
ccaagtctgttgtcaagttt

SEQ ID NO: 14979 - DNA, 20 bp, Artificial Sequence
  Description of Artificial Sequence: Synthetic oligonucleotide
  Target: COL7A1; (-) strand; PAM type: NRG; PAM sequence: AAG
caagtgccaagtctgttgtc

SEQ ID NO: 14980 - DNA, 20 bp, Artificial Sequence
  Description of Artificial Sequence: Synthetic oligonucleotide
  Target: COL7A1; (-) strand; PAM type: NRG; PAM sequence: AAG
caggcaggggaacaagtgcc

SEQ ID NO: 14981 - DNA, 20 bp, Artificial Sequence
  Description of Artificial Sequence: Synthetic oligonucleotide
  Target: COL7A1; (-) strand; PAM type: NRG; PAM sequence: AAG
caacacccaggcaggggaac

SEQ ID NO: 14982 - DNA, 20 bp, Artificial Sequence
  Description of Artificial Sequence: Synthetic oligonucleotide
  Target: COL7A1; (-) strand; PAM type: NRG; PAM sequence: GGG
gaggtgcaacacccaggcag

SEQ ID NO: 14983 - DNA, 20 bp, Artificial Sequence
  Description of Artificial Sequence: Synthetic oligonucleotide
  Target: COL7A1; (-) strand; PAM type: NRG; PAM sequence: GGG
ggaggtgcaacacccaggca

SEQ ID NO: 14984 - DNA, 20 bp, Artificial Sequence
  Description of Artificial Sequence: Synthetic oligonucleotide
  Target: COL7A1; (-) strand; PAM type: NRG; PAM sequence: AGG
tggaggtgcaacacccaggc

SEQ ID NO: 14985 - DNA, 20 bp, Artificial Sequence
  Description of Artificial Sequence: Synthetic oligonucleotide
  Target: COL7A1; (-) strand; PAM type: NRG; PAM sequence: CAG
atggaggtgcaacacccagg

SEQ ID NO: 14986 - DNA, 20 bp, Artificial Sequence
  Description of Artificial Sequence: Synthetic oligonucleotide
  Target: COL7A1; (-) strand; PAM type: NRG; PAM sequence: AGG
ctcatggaggtgcaacaccc

SEQ ID NO: 14987 - DNA, 20 bp, Artificial Sequence
  Description of Artificial Sequence: Synthetic oligonucleotide
  Target: COL7A1; (-) strand; PAM type: NRG; PAM sequence: CAG
gctcatggaggtgcaacacc

SEQ ID NO: 14988 - DNA, 20 bp, Artificial Sequence
  Description of Artificial Sequence: Synthetic oligonucleotide
  Target: COL7A1; (-) strand; PAM type: NRG; PAM sequence: AGG
ccaaccctgggtgctcatgg

SEQ ID NO: 14989 - DNA, 20 bp, Artificial Sequence
  Description of Artificial Sequence: Synthetic oligonucleotide
  Target: COL7A1; (-) strand; PAM type: NRG; PAM sequence: GAG
cccaaccctgggtgctcatg

SEQ ID NO: 14990 - DNA, 20 bp, Artificial Sequence
  Description of Artificial Sequence: Synthetic oligonucleotide
  Target: COL7A1; (-) strand; PAM type: NRG; PAM sequence: TGG
ggcccaaccctgggtgctca

SEQ ID NO: 14991 - DNA, 20 bp, Artificial Sequence
  Description of Artificial Sequence: Synthetic oligonucleotide
  Target: COL7A1; (-) strand; PAM type: NRG; PAM sequence: GGG
accctgacaggcccaaccct

SEQ ID NO: 14992 - DNA, 20 bp, Artificial Sequence
  Description of Artificial Sequence: Synthetic oligonucleotide
  Target: COL7A1; (-) strand; PAM type: NRG; PAM sequence: TGG
aaccctgacaggcccaaccc

SEQ ID NO: 14993 - DNA, 20 bp, Artificial Sequence
  Description of Artificial Sequence: Synthetic oligonucleotide
  Target: COL7A1; (-) strand; PAM type: NRG; PAM sequence: AGG
gggcagcgcagaaccctgac

SEQ ID NO: 14994 - DNA, 20 bp, Artificial Sequence
  Description of Artificial Sequence: Synthetic oligonucleotide
  Target: COL7A1; (-) strand; PAM type: NRG; PAM sequence: CAG
tgggcagcgcagaaccctga

SEQ ID NO: 14995 - DNA, 20 bp, Artificial Sequence
  Description of Artificial Sequence: Synthetic oligonucleotide
  Target: COL7A1; (-) strand; PAM type: NRG; PAM sequence: CAG
agagaagatgctgggcagcg

SEQ ID NO: 14996 - DNA, 20 bp, Artificial Sequence
  Description of Artificial Sequence: Synthetic oligonucleotide
  Target: COL7A1; (-) strand; PAM type: NRG; PAM sequence: CAG
gctggagagaagatgctggg

SEQ ID NO: 14997 - DNA, 20 bp, Artificial Sequence
  Description of Artificial Sequence: Synthetic oligonucleotide
  Target: COL7A1; (-) strand; PAM type: NRG; PAM sequence: GGG
acggctggagagaagatgct

SEQ ID NO: 14998 - DNA, 20 bp, Artificial Sequence
  Description of Artificial Sequence: Synthetic oligonucleotide
  Target: COL7A1; (-) strand; PAM type: NRG; PAM sequence: TGG
aacggctggagagaagatgc

SEQ ID NO: 14999 - DNA, 20 bp, Artificial Sequence
  Description of Artificial Sequence: Synthetic oligonucleotide
  Target: COL7A1; (-) strand; PAM type: NRG; PAM sequence: AAG
ctttgtgaacggctggagag

SEQ ID NO: 15000 - DNA, 20 bp, Artificial Sequence
  Description of Artificial Sequence: Synthetic oligonucleotide
  Target: COL7A1; (-) strand; PAM type: NRG; PAM sequence: GAG
ctactttgtgaacggctgga

SEQ ID NO: 15001 - DNA, 20 bp, Artificial Sequence
  Description of Artificial Sequence: Synthetic oligonucleotide
  Target: COL7A1; (-) strand; PAM type: NRG; PAM sequence: GAG
ttctactttgtgaacggctg

SEQ ID NO: 15002 - DNA, 20 bp, Artificial Sequence
  Description of Artificial Sequence: Synthetic oligonucleotide
  Target: COL7A1; (-) strand; PAM type: NRG; PAM sequence: TGG
cattctactttgtgaacggc

SEQ ID NO: 15003 - DNA, 20 bp, Artificial Sequence
  Description of Artificial Sequence: Synthetic oligonucleotide
  Target: COL7A1; (-) strand; PAM type: NRG; PAM sequence: CGG
agatcattctactttgtgaa

SEQ ID NO: 15004 - DNA, 20 bp, Artificial Sequence
  Description of Artificial Sequence: Synthetic oligonucleotide
  Target: COL7A1; (-) strand; PAM type: NRG; PAM sequence: CAG
cccgggactggggcattgcg

SEQ ID NO: 15005 - DNA, 20 bp, Artificial Sequence
  Description of Artificial Sequence: Synthetic oligonucleotide
  Target: COL7A1; (-) strand; PAM type: NRG; PAM sequence: GGG
ccttctacggcccgggactg

SEQ ID NO: 15006 - DNA, 20 bp, Artificial Sequence
  Description of Artificial Sequence: Synthetic oligonucleotide
  Target: COL7A1; (-) strand; PAM type: NRG; PAM sequence: GGG
accttctacggcccgggact

SEQ ID NO: 15007 - DNA, 20 bp, Artificial Sequence
  Description of Artificial Sequence: Synthetic oligonucleotide
  Target: COL7A1; (-) strand; PAM type: NRG; PAM sequence: TGG
caccttctacggcccgggac

SEQ ID NO: 15008 - DNA, 20 bp, Artificial Sequence
  Description of Artificial Sequence: Synthetic oligonucleotide
  Target: COL7A1; (-) strand; PAM type: NRG; PAM sequence: GGG
ttaagcaccttctacggccc

SEQ ID NO: 15009 - DNA, 20 bp, Artificial Sequence
  Description of Artificial Sequence: Synthetic oligonucleotide
  Target: COL7A1; (-) strand; PAM type: NRG; PAM sequence: CGG
gttaagcaccttctacggcc

SEQ ID NO: 15010 - DNA, 20 bp, Artificial Sequence
  Description of Artificial Sequence: Synthetic oligonucleotide
  Target: COL7A1; (-) strand; PAM type: NRG; PAM sequence: CGG
catttgttaagcaccttcta

SEQ ID NO: 15011 - DNA, 20 bp, Artificial Sequence
  Description of Artificial Sequence: Synthetic oligonucleotide
  Target: COL7A1; (-) strand; PAM type: NRG; PAM sequence: AAG
ccaattcggagacatttgtt

SEQ ID NO: 15012 - DNA, 20 bp, Artificial Sequence
  Description of Artificial Sequence: Synthetic oligonucleotide
  Target: COL7A1; (-) strand; PAM type: NRG; PAM sequence: GAG
tgccatacgttgccaattcg

SEQ ID NO: 15013 - DNA, 20 bp, Artificial Sequence
  Description of Artificial Sequence: Synthetic oligonucleotide
  Target: COL7A1; (-) strand; PAM type: NRG; PAM sequence: CGG
gttgccatacgttgccaatt

SEQ ID NO: 15014 - DNA, 20 bp, Artificial Sequence
  Description of Artificial Sequence: Synthetic oligonucleotide
  Target: COL7A1; (-) strand; PAM type: NRG; PAM sequence: TGG
cactgcctttccctcaccat

SEQ ID NO: 15015 - DNA, 20 bp, Artificial Sequence
  Description of Artificial Sequence: Synthetic oligonucleotide
  Target: COL7A1; (-) strand; PAM type: NRG; PAM sequence: AGG
cgtagcttggaagtagccca

SEQ ID NO: 15016 - DNA, 20 bp, Artificial Sequence
  Description of Artificial Sequence: Synthetic oligonucleotide
  Target: COL7A1; (-) strand; PAM type: NRG; PAM sequence: AAG
tcgtagcttggaagtagccc

SEQ ID NO: 15017 - DNA, 20 bp, Artificial Sequence
  Description of Artificial Sequence: Synthetic oligonucleotide
  Target: COL7A1; (-) strand; PAM type: NRG; PAM sequence: TAG
ccagcatcgtagcttggaag

SEQ ID NO: 15018 - DNA, 20 bp, Artificial Sequence
  Description of Artificial Sequence: Synthetic oligonucleotide
  Target: COL7A1; (-) strand; PAM type: NRG; PAM sequence: AAG
cccccagcatcgtagcttgg

SEQ ID NO: 15019 - DNA, 20 bp, Artificial Sequence
  Description of Artificial Sequence: Synthetic oligonucleotide
  Target: COL7A1; (-) strand; PAM type: NRG; PAM sequence: TGG
gtccccccagcatcgtagct

SEQ ID NO: 15020 - DNA, 20 bp, Artificial Sequence
  Description of Artificial Sequence: Synthetic oligonucleotide
  Target: COL7A1; (-) strand; PAM type: NRG; PAM sequence: TAG
cagaagtccccccagcatcg

SEQ ID NO: 15021 - DNA, 20 bp, Artificial Sequence
  Description of Artificial Sequence: Synthetic oligonucleotide
  Target: COL7A1; (-) strand; PAM type: NRG; PAM sequence: CAG
tggctgttcagaagtccccc

SEQ ID NO: 15022 - DNA, 20 bp, Artificial Sequence
  Description of Artificial Sequence: Synthetic oligonucleotide
  Target: COL7A1; (-) strand; PAM type: NRG; PAM sequence: AAG
tttagaagatggctgttcag

SEQ ID NO: 15023 - DNA, 20 bp, Artificial Sequence
  Description of Artificial Sequence: Synthetic oligonucleotide
  Target: COL7A1; (-) strand; PAM type: NRG; PAM sequence: CAG
tcttttagaagatggctgtt

SEQ ID NO: 15024 - DNA, 20 bp, Artificial Sequence
  Description of Artificial Sequence: Synthetic oligonucleotide
  Target: COL7A1; (-) strand; PAM type: NRG; PAM sequence: TGG
ggacaaggtcttttagaaga

SEQ ID NO: 15025 - DNA, 20 bp, Artificial Sequence
  Description of Artificial Sequence: Synthetic oligonucleotide
  Target: COL7A1; (-) strand; PAM type: NRG; PAM sequence: AAG
gctgggacaaggtcttttag

SEQ ID NO: 15026 - DNA, 20 bp, Artificial Sequence
  Description of Artificial Sequence: Synthetic oligonucleotide
  Target: COL7A1; (-) strand; PAM type: NRG; PAM sequence: TAG
ggtgctgggacaaggtcttt

SEQ ID NO: 15027 - DNA, 20 bp, Artificial Sequence
  Description of Artificial Sequence: Synthetic oligonucleotide
  Target: COL7A1; (-) strand; PAM type: NRG; PAM sequence: AGG
acaagcagggtgctgggaca

SEQ ID NO: 15028 - DNA, 20 bp, Artificial Sequence
  Description of Artificial Sequence: Synthetic oligonucleotide
  Target: COL7A1; (-) strand; PAM type: NRG; PAM sequence: AAG
cacaagcagggtgctgggac

SEQ ID NO: 15029 - DNA, 20 bp, Artificial Sequence
  Description of Artificial Sequence: Synthetic oligonucleotide
  Target: COL7A1; (-) strand; PAM type: NRG; PAM sequence: GGG
gcagtcacaagcagggtgct

SEQ ID NO: 15030 - DNA, 20 bp, Artificial Sequence
  Description of Artificial Sequence: Synthetic oligonucleotide
  Target: COL7A1; (-) strand; PAM type: NRG; PAM sequence: TGG
ggcagtcacaagcagggtgc

SEQ ID NO: 15031 - DNA, 20 bp, Artificial Sequence
  Description of Artificial Sequence: Synthetic oligonucleotide
  Target: COL7A1; (-) strand; PAM type: NRG; PAM sequence: GGG
ctgcctggcagtcacaagca

SEQ ID NO: 15032 - DNA, 20 bp, Artificial Sequence
  Description of Artificial Sequence: Synthetic oligonucleotide
  Target: COL7A1; (-) strand; PAM type: NRG; PAM sequence: AGG
gctgcctggcagtcacaagc

SEQ ID NO: 15033 - DNA, 20 bp, Artificial Sequence
  Description of Artificial Sequence: Synthetic oligonucleotide
  Target: COL7A1; (-) strand; PAM type: NRG; PAM sequence: CAG
cgctgcctggcagtcacaag

SEQ ID NO: 15034 - DNA, 20 bp, Artificial Sequence
  Description of Artificial Sequence: Synthetic oligonucleotide
  Target: COL7A1; (-) strand; PAM type: NRG; PAM sequence: AAG
agtcgctgcctggcagtcac

SEQ ID NO: 15035 - DNA, 20 bp, Artificial Sequence
  Description of Artificial Sequence: Synthetic oligonucleotide
  Target: COL7A1; (-) strand; PAM type: NRG; PAM sequence: CAG
ttgaggaagtcgctgcctgg

SEQ ID NO: 15036 - DNA, 20 bp, Artificial Sequence
  Description of Artificial Sequence: Synthetic oligonucleotide
  Target: COL7A1; (-) strand; PAM type: NRG; PAM sequence: TGG
cctttgaggaagtcgctgcc

SEQ ID NO: 15037 - DNA, 20 bp, Artificial Sequence
  Description of Artificial Sequence: Synthetic oligonucleotide
  Target: COL7A1; (-) strand; PAM type: NRG; PAM sequence: AAG
ggcccaattttcctttgagg

SEQ ID NO: 15038 - DNA, 20 bp, Artificial Sequence
  Description of Artificial Sequence: Synthetic oligonucleotide
  Target: COL7A1; (-) strand; PAM type: NRG; PAM sequence: AGG
aggggcccaattttcctttg

SEQ ID NO: 15039 - DNA, 20 bp, Artificial Sequence
  Description of Artificial Sequence: Synthetic oligonucleotide
  Target: COL7A1; (-) strand; PAM type: NRG; PAM sequence: GAG
gaggggcccaattttccttt

SEQ ID NO: 15040 - DNA, 20 bp, Artificial Sequence
  Description of Artificial Sequence: Synthetic oligonucleotide
  Target: COL7A1; (-) strand; PAM type: NRG; PAM sequence: GGG
agggggaagttgaaagcgag

SEQ ID NO: 15041 - DNA, 20 bp, Artificial Sequence
  Description of Artificial Sequence: Synthetic oligonucleotide
  Target: COL7A1; (-) strand; PAM type: NRG; PAM sequence: GGG
cagggggaagttgaaagcga

SEQ ID NO: 15042 - DNA, 20 bp, Artificial Sequence
  Description of Artificial Sequence: Synthetic oligonucleotide
  Target: COL7A1; (-) strand; PAM type: NRG; PAM sequence: AGG
ccagggggaagttgaaagcg

SEQ ID NO: 15043 - DNA, 20 bp, Artificial Sequence
  Description of Artificial Sequence: Synthetic oligonucleotide
  Target: COL7A1; (-) strand; PAM type: NRG; PAM sequence: GAG
cccagggggaagttgaaagc

SEQ ID NO: 15044 - DNA, 20 bp, Artificial Sequence
  Description of Artificial Sequence: Synthetic oligonucleotide
  Target: COL7A1; (-) strand; PAM type: NRG; PAM sequence: AAG
ggatcccagggggaagttga

SEQ ID NO: 15045 - DNA, 20 bp, Artificial Sequence
  Description of Artificial Sequence: Synthetic oligonucleotide
  Target: COL7A1; (-) strand; PAM type: NRG; PAM sequence: AAG
ttctctgggatcccaggggg

SEQ ID NO: 15046 - DNA, 20 bp, Artificial Sequence
  Description of Artificial Sequence: Synthetic oligonucleotide
  Target: COL7A1; (-) strand; PAM type: NRG; PAM sequence: GGG
aggttctctgggatcccagg

SEQ ID NO: 15047 - DNA, 20 bp, Artificial Sequence
  Description of Artificial Sequence: Synthetic oligonucleotide
  Target: COL7A1; (-) strand; PAM type: NRG; PAM sequence: GGG
caggttctctgggatcccag

SEQ ID NO: 15048 - DNA, 20 bp, Artificial Sequence
  Description of Artificial Sequence: Synthetic oligonucleotide
  Target: COL7A1; (-) strand; PAM type: NRG; PAM sequence: GGG
tcaggttctctgggatccca

SEQ ID NO: 15049 - DNA, 20 bp, Artificial Sequence
  Description of Artificial Sequence: Synthetic oligonucleotide
  Target: COL7A1; (-) strand; PAM type: NRG; PAM sequence: AGG
gtcaggttctctgggatccc

SEQ ID NO: 15050 - DNA, 20 bp, Artificial Sequence
  Description of Artificial Sequence: Synthetic oligonucleotide
  Target: COL7A1; (-) strand; PAM type: NRG; PAM sequence: CAG
agtcaggttctctgggatcc

SEQ ID NO: 15051 - DNA, 20 bp, Artificial Sequence
  Description of Artificial Sequence: Synthetic oligonucleotide
  Target: COL7A1; (-) strand; PAM type: NRG; PAM sequence: GGG
cttccacagtcaggttctct

SEQ ID NO: 15052 - DNA, 20 bp, Artificial Sequence
  Description of Artificial Sequence: Synthetic oligonucleotide
  Target: COL7A1; (-) strand; PAM type: NRG; PAM sequence: TGG
gcttccacagtcaggttctc

SEQ ID NO: 15053 - DNA, 20 bp, Artificial Sequence
  Description of Artificial Sequence: Synthetic oligonucleotide
  Target: COL7A1; (-) strand; PAM type: NRG; PAM sequence: AGG
cccccagtgcttccacagtc

SEQ ID NO: 15054 - DNA, 20 bp, Artificial Sequence
  Description of Artificial Sequence: Synthetic oligonucleotide
  Target: COL7A1; (-) strand; PAM type: NRG; PAM sequence: CAG
ccccccagtgcttccacagt

SEQ ID NO: 15055 - DNA, 20 bp, Artificial Sequence
  Description of Artificial Sequence: Synthetic oligonucleotide
  Target: COL7A1; (-) strand; PAM type: NRG; PAM sequence: CAG
tgcaccccccagtgcttcca

SEQ ID NO: 15056 - DNA, 20 bp, Artificial Sequence
  Description of Artificial Sequence: Synthetic oligonucleotide
  Target: COL7A1; (-) strand; PAM type: NRG; PAM sequence: CAG
gctgctcctcctgcaccccc

SEQ ID NO: 15057 - DNA, 20 bp, Artificial Sequence
  Description of Artificial Sequence: Synthetic oligonucleotide
  Target: COL7A1; (-) strand; PAM type: NRG; PAM sequence: AGG
cccatggtgggtgcgcaggt

SEQ ID NO: 15058 - DNA, 20 bp, Artificial Sequence
  Description of Artificial Sequence: Synthetic oligonucleotide
  Target: COL7A1; (-) strand; PAM type: NRG; PAM sequence: TAG
ccccatggtgggtgcgcagg

SEQ ID NO: 15059 - DNA, 20 bp, Artificial Sequence
  Description of Artificial Sequence: Synthetic oligonucleotide
  Target: COL7A1; (-) strand; PAM type: NRG; PAM sequence: AGG
ggtccccatggtgggtgcgc

SEQ ID NO: 15060 - DNA, 20 bp, Artificial Sequence
  Description of Artificial Sequence: Synthetic oligonucleotide
  Target: COL7A1; (-) strand; PAM type: NRG; PAM sequence: CAG
tggtccccatggtgggtgcg

SEQ ID NO: 15061 - DNA, 20 bp, Artificial Sequence
  Description of Artificial Sequence: Synthetic oligonucleotide
  Target: COL7A1; (-) strand; PAM type: NRG; PAM sequence: GGG
ttggctctggtccccatggt

SEQ ID NO: 15062 - DNA, 20 bp, Artificial Sequence
  Description of Artificial Sequence: Synthetic oligonucleotide
  Target: COL7A1; (-) strand; PAM type: NRG; PAM sequence: TGG
tttggctctggtccccatgg

SEQ ID NO: 15063 - DNA, 20 bp, Artificial Sequence
  Description of Artificial Sequence: Synthetic oligonucleotide
  Target: COL7A1; (-) strand; PAM type: NRG; PAM sequence: TGG
tcttttggctctggtcccca

SEQ ID NO: 15064 - DNA, 20 bp, Artificial Sequence
  Description of Artificial Sequence: Synthetic oligonucleotide
  Target: COL7A1; (-) strand; PAM type: NRG; PAM sequence: TGG
tctgttatctcttttggctc

SEQ ID NO: 15065 - DNA, 20 bp, Artificial Sequence
  Description of Artificial Sequence: Synthetic oligonucleotide
  Target: COL7A1; (-) strand; PAM type: NRG; PAM sequence: TGG
agtccctctgttatctcttt

SEQ ID NO: 15066 - DNA, 20 bp, Artificial Sequence
  Description of Artificial Sequence: Synthetic oligonucleotide
  Target: COL7A1; (-) strand; PAM type: NRG; PAM sequence: TAG
tggtacagctcttagctacc

SEQ ID NO: 15067 - DNA, 20 bp, Artificial Sequence
  Description of Artificial Sequence: Synthetic oligonucleotide
  Target: COL7A1; (-) strand; PAM type: NRG; PAM sequence: TAG
ccaggacctggtacagctct

SEQ ID NO: 15068 - DNA, 20 bp, Artificial Sequence
  Description of Artificial Sequence: Synthetic oligonucleotide
  Target: COL7A1; (-) strand; PAM type: NRG; PAM sequence: CAG
gaggcagccaggacctggta

SEQ ID NO: 15069 - DNA, 20 bp, Artificial Sequence
  Description of Artificial Sequence: Synthetic oligonucleotide
  Target: COL7A1; (-) strand; PAM type: NRG; PAM sequence: TGG
ttcctgaggcagccaggacc

SEQ ID NO: 15070 - DNA, 20 bp, Artificial Sequence
  Description of Artificial Sequence: Synthetic oligonucleotide
  Target: COL7A1; (-) strand; PAM type: NRG; PAM sequence: AGG
cccattttcctgaggcagcc

SEQ ID NO: 15071 - DNA, 20 bp, Artificial Sequence
  Description of Artificial Sequence: Synthetic oligonucleotide
  Target: COL7A1; (-) strand; PAM type: NRG; PAM sequence: CAG
ccccattttcctgaggcagc

SEQ ID NO: 15072 - DNA, 20 bp, Artificial Sequence
  Description of Artificial Sequence: Synthetic oligonucleotide
  Target: COL7A1; (-) strand; PAM type: NRG; PAM sequence: CAG
ccctccccattttcctgagg

SEQ ID NO: 15073 - DNA, 20 bp, Artificial Sequence
  Description of Artificial Sequence: Synthetic oligonucleotide
  Target: COL7A1; (-) strand; PAM type: NRG; PAM sequence: AGG
atcccctccccattttcctg

SEQ ID NO: 15074 - DNA, 20 bp, Artificial Sequence
  Description of Artificial Sequence: Synthetic oligonucleotide
  Target: COL7A1; (-) strand; PAM type: NRG; PAM sequence: GAG
aatcccctccccattttcct

SEQ ID NO: 15075 - DNA, 20 bp, Artificial Sequence
  Description of Artificial Sequence: Synthetic oligonucleotide
  Target: COL7A1; (-) strand; PAM type: NRG; PAM sequence: TGG
ccaggcaagtccagagctgc

SEQ ID NO: 15076 - DNA, 20 bp, Artificial Sequence
  Description of Artificial Sequence: Synthetic oligonucleotide
  Target: COL7A1; (-) strand; PAM type: NRG; PAM sequence: GAG
atttgtcccaggcaagtcca

SEQ ID NO: 15077 - DNA, 20 bp, Artificial Sequence
  Description of Artificial Sequence: Synthetic oligonucleotide
  Target: COL7A1; (-) strand; PAM type: NRG; PAM sequence: CAG
acatttgtcccaggcaagtc

SEQ ID NO: 15078 - DNA, 20 bp, Artificial Sequence
  Description of Artificial Sequence: Synthetic oligonucleotide
  Target: COL7A1; (-) strand; PAM type: NRG; PAM sequence: AAG
ctactacatttgtcccaggc

SEQ ID NO: 15079 - DNA, 20 bp, Artificial Sequence
  Description of Artificial Sequence: Synthetic oligonucleotide
  Target: COL7A1; (-) strand; PAM type: NRG; PAM sequence: AGG
ccctctactacatttgtccc

SEQ ID NO: 15080 - DNA, 20 bp, Artificial Sequence
  Description of Artificial Sequence: Synthetic oligonucleotide
  Target: COL7A1; (-) strand; PAM type: NRG; PAM sequence: CAG
tccctctactacatttgtcc

SEQ ID NO: 15081 - DNA, 20 bp, Artificial Sequence
  Description of Artificial Sequence: Synthetic oligonucleotide
  Target: COL7A1; (-) strand; PAM type: NRG; PAM sequence: GAG
ccctgagctcagtggggccc

SEQ ID NO: 15082 - DNA, 20 bp, Artificial Sequence
  Description of Artificial Sequence: Synthetic oligonucleotide
  Target: COL7A1; (-) strand; PAM type: NRG; PAM sequence: GGG
gaatagccctgagctcagtg

SEQ ID NO: 15083 - DNA, 20 bp, Artificial Sequence
  Description of Artificial Sequence: Synthetic oligonucleotide
  Target: COL7A1; (-) strand; PAM type: NRG; PAM sequence: GGG
agaatagccctgagctcagt

SEQ ID NO: 15084 - DNA, 20 bp, Artificial Sequence
  Description of Artificial Sequence: Synthetic oligonucleotide
  Target: COL7A1; (-) strand; PAM type: NRG; PAM sequence: TGG
aagaatagccctgagctcag

SEQ ID NO: 15085 - DNA, 20 bp, Artificial Sequence
  Description of Artificial Sequence: Synthetic oligonucleotide
  Target: COL7A1; (-) strand; PAM type: NRG; PAM sequence: CAG
tccaagaatagccctgagct

SEQ ID NO: 15086 - DNA, 20 bp, Artificial Sequence
  Description of Artificial Sequence: Synthetic oligonucleotide
  Target: COL7A1; (-) strand; PAM type: NRG; PAM sequence: GAG
caggctccaagaatagccct

SEQ ID NO: 15087 - DNA, 20 bp, Artificial Sequence
  Description of Artificial Sequence: Synthetic oligonucleotide
  Target: COL7A1; (-) strand; PAM type: NRG; PAM sequence: TAG
gctgactcaggctccaagaa

SEQ ID NO: 15088 - DNA, 20 bp, Artificial Sequence
  Description of Artificial Sequence: Synthetic oligonucleotide
  Target: COL7A1; (-) strand; PAM type: NRG; PAM sequence: AAG
cctccgctgactcaggctcc

SEQ ID NO: 15089 - DNA, 20 bp, Artificial Sequence
  Description of Artificial Sequence: Synthetic oligonucleotide
  Target: COL7A1; (-) strand; PAM type: NRG; PAM sequence: AGG
tcctttgcctccgctgactc

SEQ ID NO: 15090 - DNA, 20 bp, Artificial Sequence
  Description of Artificial Sequence: Synthetic oligonucleotide
  Target: COL7A1; (-) strand; PAM type: NRG; PAM sequence: CAG
atcctttgcctccgctgact

SEQ ID NO: 15091 - DNA, 20 bp, Artificial Sequence
  Description of Artificial Sequence: Synthetic oligonucleotide
  Target: COL7A1; (-) strand; PAM type: NRG; PAM sequence: AGG
gctgcctggacaagcagggc

SEQ ID NO: 15092 - DNA, 20 bp, Artificial Sequence
  Description of Artificial Sequence: Synthetic oligonucleotide
  Target: COL7A1; (-) strand; PAM type: NRG; PAM sequence: CAG
tgctgcctggacaagcaggg

SEQ ID NO: 15093 - DNA, 20 bp, Artificial Sequence
  Description of Artificial Sequence: Synthetic oligonucleotide
  Target: COL7A1; (-) strand; PAM type: NRG; PAM sequence: GGG
aactgctgcctggacaagca

SEQ ID NO: 15094 - DNA, 20 bp, Artificial Sequence
  Description of Artificial Sequence: Synthetic oligonucleotide
  Target: COL7A1; (-) strand; PAM type: NRG; PAM sequence: AGG
taactgctgcctggacaagc

SEQ ID NO: 15095 - DNA, 20 bp, Artificial Sequence
  Description of Artificial Sequence: Synthetic oligonucleotide
  Target: COL7A1; (-) strand; PAM type: NRG; PAM sequence: CAG
ctaactgctgcctggacaag

SEQ ID NO: 15096 - DNA, 20 bp, Artificial Sequence
  Description of Artificial Sequence: Synthetic oligonucleotide
  Target: COL7A1; (-) strand; PAM type: NRG; PAM sequence: AAG
tttctaactgctgcctggac

SEQ ID NO: 15097 - DNA, 20 bp, Artificial Sequence
  Description of Artificial Sequence: Synthetic oligonucleotide
  Target: COL7A1; (-) strand; PAM type: NRG; PAM sequence: TGG
tttggtttctaactgctgcc

SEQ ID NO: 15098 - DNA, 20 bp, Artificial Sequence
  Description of Artificial Sequence: Synthetic oligonucleotide
  Target: COL7A1; (-) strand; PAM type: NRG; PAM sequence: TGG
tggggcatagtgttctcatt

SEQ ID NO: 15099 - DNA, 20 bp, Artificial Sequence
  Description of Artificial Sequence: Synthetic oligonucleotide
  Target: COL7A1; (-) strand; PAM type: NRG; PAM sequence: TAG
gaggaggatagcctggggca

SEQ ID NO: 15100 - DNA, 20 bp, Artificial Sequence
  Description of Artificial Sequence: Synthetic oligonucleotide
  Target: COL7A1; (-) strand; PAM type: NRG; PAM sequence: GGG
tctgggaggaggatagcctg

SEQ ID NO: 15101 - DNA, 20 bp, Artificial Sequence
  Description of Artificial Sequence: Synthetic oligonucleotide
  Target: COL7A1; (-) strand; PAM type: NRG; PAM sequence: GGG
ttctgggaggaggatagcct

SEQ ID NO: 15102 - DNA, 20 bp, Artificial Sequence
  Description of Artificial Sequence: Synthetic oligonucleotide
  Target: COL7A1; (-) strand; PAM type: NRG; PAM sequence: TGG
attctgggaggaggatagcc

SEQ ID NO: 15103 - DNA, 20 bp, Artificial Sequence
  Description of Artificial Sequence: Synthetic oligonucleotide
  Target: COL7A1; (-) strand; PAM type: NRG; PAM sequence: TAG
tctgcattctgggaggagga

SEQ ID NO: 15104 - DNA, 20 bp, Artificial Sequence
  Description of Artificial Sequence: Synthetic oligonucleotide
  Target: COL7A1; (-) strand; PAM type: NRG; PAM sequence: AGG
ttactctgcattctgggagg

SEQ ID NO: 15105 - DNA, 20 bp, Artificial Sequence
  Description of Artificial Sequence: Synthetic oligonucleotide
  Target: COL7A1; (-) strand; PAM type: NRG; PAM sequence: GAG
tttactctgcattctgggag

SEQ ID NO: 15106 - DNA, 20 bp, Artificial Sequence
  Description of Artificial Sequence: Synthetic oligonucleotide
  Target: COL7A1; (-) strand; PAM type: NRG; PAM sequence: AGG
tgtttactctgcattctggg

SEQ ID NO: 15107 - DNA, 20 bp, Artificial Sequence
  Description of Artificial Sequence: Synthetic oligonucleotide
  Target: COL7A1; (-) strand; PAM type: NRG; PAM sequence: GAG
gtgtttactctgcattctgg

SEQ ID NO: 15108 - DNA, 20 bp, Artificial Sequence
  Description of Artificial Sequence: Synthetic oligonucleotide
  Target: COL7A1; (-) strand; PAM type: NRG; PAM sequence: GGG
gtgtgtttactctgcattct

SEQ ID NO: 15109 - DNA, 20 bp, Artificial Sequence
  Description of Artificial Sequence: Synthetic oligonucleotide
  Target: COL7A1; (-) strand; PAM type: NRG; PAM sequence: TGG
tgtgtgtttactctgcattc

SEQ ID NO: 15110 - DNA, 20 bp, Artificial Sequence
  Description of Artificial Sequence: Synthetic oligonucleotide
  Target: COL7A1; (-) strand; PAM type: NRG; PAM sequence: AGG
ggggccaaggggtgtctcca

SEQ ID NO: 15111 - DNA, 20 bp, Artificial Sequence
  Description of Artificial Sequence: Synthetic oligonucleotide
  Target: COL7A1; (-) strand; PAM type: NRG; PAM sequence: AAG
aggggccaaggggtgtctcc

SEQ ID NO: 15112 - DNA, 20 bp, Artificial Sequence
  Description of Artificial Sequence: Synthetic oligonucleotide
  Target: COL7A1; (-) strand; PAM type: NRG; PAM sequence: GGG
gtggaccagaaggggccaag

SEQ ID NO: 15113 - DNA, 20 bp, Artificial Sequence
  Description of Artificial Sequence: Synthetic oligonucleotide
  Target: COL7A1; (-) strand; PAM type: NRG; PAM sequence: GGG
ggtggaccagaaggggccaa

SEQ ID NO: 15114 - DNA, 20 bp, Artificial Sequence
  Description of Artificial Sequence: Synthetic oligonucleotide
  Target: COL7A1; (-) strand; PAM type: NRG; PAM sequence: AGG
tggtggaccagaaggggcca

SEQ ID NO: 15115 - DNA, 20 bp, Artificial Sequence
  Description of Artificial Sequence: Synthetic oligonucleotide
  Target: COL7A1; (-) strand; PAM type: NRG; PAM sequence: AAG
ctggtggaccagaaggggcc

SEQ ID NO: 15116 - DNA, 20 bp, Artificial Sequence
  Description of Artificial Sequence: Synthetic oligonucleotide
  Target: COL7A1; (-) strand; PAM type: NRG; PAM sequence: GGG
ggtccctggtggaccagaag

SEQ ID NO: 15117 - DNA, 20 bp, Artificial Sequence
  Description of Artificial Sequence: Synthetic oligonucleotide
  Target: COL7A1; (-) strand; PAM type: NRG; PAM sequence: GGG
tggtccctggtggaccagaa

SEQ ID NO: 15118 - DNA, 20 bp, Artificial Sequence
  Description of Artificial Sequence: Synthetic oligonucleotide
  Target: COL7A1; (-) strand; PAM type: NRG; PAM sequence: AGG
gtggtccctggtggaccaga

SEQ ID NO: 15119 - DNA, 20 bp, Artificial Sequence
  Description of Artificial Sequence: Synthetic oligonucleotide
  Target: COL7A1; (-) strand; PAM type: NRG; PAM sequence: AAG
ggtggtccctggtggaccag

SEQ ID NO: 15120 - DNA, 20 bp, Artificial Sequence
  Description of Artificial Sequence: Synthetic oligonucleotide
  Target: COL7A1; (-) strand; PAM type: NRG; PAM sequence: CAG
cctggtggtccctggtggac

SEQ ID NO: 15121 - DNA, 20 bp, Artificial Sequence
  Description of Artificial Sequence: Synthetic oligonucleotide
  Target: COL7A1; (-) strand; PAM type: NRG; PAM sequence: TGG
caccccctggtggtccctgg

SEQ ID NO: 15122 - DNA, 20 bp, Artificial Sequence
  Description of Artificial Sequence: Synthetic oligonucleotide
  Target: COL7A1; (-) strand; PAM type: NRG; PAM sequence: TGG
agtcaccccctggtggtccc

SEQ ID NO: 15123 - DNA, 20 bp, Artificial Sequence
  Description of Artificial Sequence: Synthetic oligonucleotide
  Target: COL7A1; (-) strand; PAM type: NRG; PAM sequence: TGG
tgtgccaagtcaccccctgg

SEQ ID NO: 15124 - DNA, 20 bp, Artificial Sequence
  Description of Artificial Sequence: Synthetic oligonucleotide
  Target: COL7A1; (-) strand; PAM type: NRG; PAM sequence: TGG
ccttgtgccaagtcaccccc

SEQ ID NO: 15125 - DNA, 20 bp, Artificial Sequence
  Description of Artificial Sequence: Synthetic oligonucleotide
  Target: COL7A1; (-) strand; PAM type: NRG; PAM sequence: AAG
ctcactgtggaccttgtgcc

SEQ ID NO: 15126 - DNA, 20 bp, Artificial Sequence
  Description of Artificial Sequence: Synthetic oligonucleotide
  Target: COL7A1; (-) strand; PAM type: NRG; PAM sequence: TGG
aggtgggaaacccctcactg

SEQ ID NO: 15127 - DNA, 20 bp, Artificial Sequence
  Description of Artificial Sequence: Synthetic oligonucleotide
  Target: COL7A1; (-) strand; PAM type: NRG; PAM sequence: GGG
gaatccctgcaggctcaggt

SEQ ID NO: 15128 - DNA, 20 bp, Artificial Sequence
  Description of Artificial Sequence: Synthetic oligonucleotide
  Target: COL7A1; (-) strand; PAM type: NRG; PAM sequence: TGG
ggaatccctgcaggctcagg

SEQ ID NO: 15129 - DNA, 20 bp, Artificial Sequence
  Description of Artificial Sequence: Synthetic oligonucleotide
  Target: COL7A1; (-) strand; PAM type: NRG; PAM sequence: AGG
cctggaatccctgcaggctc

SEQ ID NO: 15130 - DNA, 20 bp, Artificial Sequence
  Description of Artificial Sequence: Synthetic oligonucleotide
  Target: COL7A1; (-) strand; PAM type: NRG; PAM sequence: CAG
gcctggaatccctgcaggct

SEQ ID NO: 15131 - DNA, 20 bp, Artificial Sequence
  Description of Artificial Sequence: Synthetic oligonucleotide
  Target: COL7A1; (-) strand; PAM type: NRG; PAM sequence: AGG
tcccagcctggaatccctgc

SEQ ID NO: 15132 - DNA, 20 bp, Artificial Sequence
  Description of Artificial Sequence: Synthetic oligonucleotide
  Target: COL7A1; (-) strand; PAM type: NRG; PAM sequence: CAG
gtcccagcctggaatccctg

SEQ ID NO: 15133 - DNA, 20 bp, Artificial Sequence
  Description of Artificial Sequence: Synthetic oligonucleotide
  Target: COL7A1; (-) strand; PAM type: NRG; PAM sequence: TGG
cccctgtaggagtcccagcc

SEQ ID NO: 15134 - DNA, 20 bp, Artificial Sequence
  Description of Artificial Sequence: Synthetic oligonucleotide
  Target: COL7A1; (-) strand; PAM type: NRG; PAM sequence: CAG
ctttgcccctgtaggagtcc

SEQ ID NO: 15135 - DNA, 20 bp, Artificial Sequence
  Description of Artificial Sequence: Synthetic oligonucleotide
  Target: COL7A1; (-) strand; PAM type: NRG; PAM sequence: GAG
cccagcctttgcccctgtag

SEQ ID NO: 15136 - DNA, 20 bp, Artificial Sequence
  Description of Artificial Sequence: Synthetic oligonucleotide
  Target: COL7A1; (-) strand; PAM type: NRG; PAM sequence: AGG
aacccagcctttgcccctgt

SEQ ID NO: 15137 - DNA, 20 bp, Artificial Sequence
  Description of Artificial Sequence: Synthetic oligonucleotide
  Target: COL7A1; (-) strand; PAM type: NRG; PAM sequence: TAG
aaacccagcctttgcccctg

SEQ ID NO: 15138 - DNA, 20 bp, Artificial Sequence
  Description of Artificial Sequence: Synthetic oligonucleotide
  Target: COL7A1; (-) strand; PAM type: NRG; PAM sequence: CAG
gtccataggaagtgtaaacc

SEQ ID NO: 15139 - DNA, 20 bp, Artificial Sequence
  Description of Artificial Sequence: Synthetic oligonucleotide
  Target: COL7A1; (-) strand; PAM type: NRG; PAM sequence: AAG
gggctgtgggagtccatagg

SEQ ID NO: 15140 - DNA, 20 bp, Artificial Sequence
  Description of Artificial Sequence: Synthetic oligonucleotide
  Target: COL7A1; (-) strand; PAM type: NRG; PAM sequence: AGG
attgggctgtgggagtccat

SEQ ID NO: 15141 - DNA, 20 bp, Artificial Sequence
  Description of Artificial Sequence: Synthetic oligonucleotide
  Target: COL7A1; (-) strand; PAM type: NRG; PAM sequence: TAG
gattgggctgtgggagtcca

SEQ ID NO: 15142 - DNA, 20 bp, Artificial Sequence
  Description of Artificial Sequence: Synthetic oligonucleotide
  Target: COL7A1; (-) strand; PAM type: NRG; PAM sequence: GAG
gtcccaagattgggctgtgg

SEQ ID NO: 15143 - DNA, 20 bp, Artificial Sequence
  Description of Artificial Sequence: Synthetic oligonucleotide
  Target: COL7A1; (-) strand; PAM type: NRG; PAM sequence: GGG
tggtcccaagattgggctgt

SEQ ID NO: 15144 - DNA, 20 bp, Artificial Sequence
  Description of Artificial Sequence: Synthetic oligonucleotide
  Target: COL7A1; (-) strand; PAM type: NRG; PAM sequence: TGG
ctggtcccaagattgggctg

SEQ ID NO: 15145 - DNA, 20 bp, Artificial Sequence
  Description of Artificial Sequence: Synthetic oligonucleotide
  Target: COL7A1; (-) strand; PAM type: NRG; PAM sequence: GGG
agccagctggtcccaagatt

SEQ ID NO: 15146 - DNA, 20 bp, Artificial Sequence
  Description of Artificial Sequence: Synthetic oligonucleotide
  Target: COL7A1; (-) strand; PAM type: NRG; PAM sequence: TGG
cagccagctggtcccaagat

SEQ ID NO: 15147 - DNA, 20 bp, Artificial Sequence
  Description of Artificial Sequence: Synthetic oligonucleotide
  Target: COL7A1; (-) strand; PAM type: NRG; PAM sequence: AAG
ttcctcagccagctggtccc

SEQ ID NO: 15148 - DNA, 20 bp, Artificial Sequence
  Description of Artificial Sequence: Synthetic oligonucleotide
  Target: COL7A1; (-) strand; PAM type: NRG; PAM sequence: TGG
aggggagttcctcagccagc

SEQ ID NO: 15149 - DNA, 20 bp, Artificial Sequence
  Description of Artificial Sequence: Synthetic oligonucleotide
  Target: COL7A1; (-) strand; PAM type: NRG; PAM sequence: CAG
acttaggggagttcctcagc

SEQ ID NO: 15150 - DNA, 20 bp, Artificial Sequence
  Description of Artificial Sequence: Synthetic oligonucleotide
  Target: COL7A1; (-) strand; PAM type: NRG; PAM sequence: CAG
agccacttaggggagttcct

SEQ ID NO: 15151 - DNA, 20 bp, Artificial Sequence
  Description of Artificial Sequence: Synthetic oligonucleotide
  Target: COL7A1; (-) strand; PAM type: NRG; PAM sequence: GAG
ttccactcagccacttaggg

SEQ ID NO: 15152 - DNA, 20 bp, Artificial Sequence
  Description of Artificial Sequence: Synthetic oligonucleotide
  Target: COL7A1; (-) strand; PAM type: NRG; PAM sequence: GGG
gtttccactcagccacttag

SEQ ID NO: 15153 - DNA, 20 bp, Artificial Sequence
  Description of Artificial Sequence: Synthetic oligonucleotide
  Target: COL7A1; (-) strand; PAM type: NRG; PAM sequence: GGG
tgtttccactcagccactta

SEQ ID NO: 15154 - DNA, 20 bp, Artificial Sequence
  Description of Artificial Sequence: Synthetic oligonucleotide
  Target: COL7A1; (-) strand; PAM type: NRG; PAM sequence: AGG
atgtttccactcagccactt

SEQ ID NO: 15155 - DNA, 20 bp, Artificial Sequence
  Description of Artificial Sequence: Synthetic oligonucleotide
  Target: COL7A1; (-) strand; PAM type: NRG; PAM sequence: TAG
gatgtttccactcagccact

SEQ ID NO: 15156 - DNA, 20 bp, Artificial Sequence
  Description of Artificial Sequence: Synthetic oligonucleotide
  Target: COL7A1; (-) strand; PAM type: NRG; PAM sequence: CAG
tgagcccagatgtttccact

SEQ ID NO: 15157 - DNA, 20 bp, Artificial Sequence
  Description of Artificial Sequence: Synthetic oligonucleotide
  Target: COL7A1; (-) strand; PAM type: NRG; PAM sequence: CAG
tgcctacagggagctgagcc

SEQ ID NO: 15158 - DNA, 20 bp, Artificial Sequence
  Description of Artificial Sequence: Synthetic oligonucleotide
  Target: COL7A1; (-) strand; PAM type: NRG; PAM sequence: GAG
tttgatgcctacagggagct

SEQ ID NO: 15159 - DNA, 20 bp, Artificial Sequence
  Description of Artificial Sequence: Synthetic oligonucleotide
  Target: COL7A1; (-) strand; PAM type: NRG; PAM sequence: GAG
aagtctttgatgcctacagg

SEQ ID NO: 15160 - DNA, 20 bp, Artificial Sequence
  Description of Artificial Sequence: Synthetic oligonucleotide
  Target: COL7A1; (-) strand; PAM type: NRG; PAM sequence: GGG
ggaagtctttgatgcctaca

SEQ ID NO: 15161 - DNA, 20 bp, Artificial Sequence
  Description of Artificial Sequence: Synthetic oligonucleotide
  Target: COL7A1; (-) strand; PAM type: NRG; PAM sequence: AGG
cggaagtctttgatgcctac

SEQ ID NO: 15162 - DNA, 20 bp, Artificial Sequence
  Description of Artificial Sequence: Synthetic oligonucleotide
  Target: COL7A1; (-) strand; PAM type: NRG; PAM sequence: CAG
ccggaagtctttgatgccta

SEQ ID NO: 15163 - DNA, 20 bp, Artificial Sequence
  Description of Artificial Sequence: Synthetic oligonucleotide
  Target: COL7A1; (-) strand; PAM type: NRG; PAM sequence: AAG
ggggttgcagctgaggccgg

SEQ ID NO: 15164 - DNA, 20 bp, Artificial Sequence
  Description of Artificial Sequence: Synthetic oligonucleotide
  Target: COL7A1; (-) strand; PAM type: NRG; PAM sequence: CGG
gtgggggttgcagctgaggc

SEQ ID NO: 15165 - DNA, 20 bp, Artificial Sequence
  Description of Artificial Sequence: Synthetic oligonucleotide
  Target: COL7A1; (-) strand; PAM type: NRG; PAM sequence: AGG
aagcgtgggggttgcagctg

SEQ ID NO: 15166 - DNA, 20 bp, Artificial Sequence
  Description of Artificial Sequence: Synthetic oligonucleotide
  Target: COL7A1; (-) strand; PAM type: NRG; PAM sequence: GAG
caagcgtgggggttgcagct

SEQ ID NO: 15167 - DNA, 20 bp, Artificial Sequence
  Description of Artificial Sequence: Synthetic oligonucleotide
  Target: COL7A1; (-) strand; PAM type: NRG; PAM sequence: CAG
aggggcaagcgtgggggttg

SEQ ID NO: 15168 - DNA, 20 bp, Artificial Sequence
  Description of Artificial Sequence: Synthetic oligonucleotide
  Target: COL7A1; (-) strand; PAM type: NRG; PAM sequence: GGG
tcagccaggggcaagcgtgg

SEQ ID NO: 15169 - DNA, 20 bp, Artificial Sequence
  Description of Artificial Sequence: Synthetic oligonucleotide
  Target: COL7A1; (-) strand; PAM type: NRG; PAM sequence: GGG
ctcagccaggggcaagcgtg

SEQ ID NO: 15170 - DNA, 20 bp, Artificial Sequence
  Description of Artificial Sequence: Synthetic oligonucleotide
  Target: COL7A1; (-) strand; PAM type: NRG; PAM sequence: GGG
cctcagccaggggcaagcgt

SEQ ID NO: 15171 - DNA, 20 bp, Artificial Sequence
  Description of Artificial Sequence: Synthetic oligonucleotide
  Target: COL7A1; (-) strand; PAM type: NRG; PAM sequence: TGG
tcctcagccaggggcaagcg

SEQ ID NO: 15172 - DNA, 20 bp, Artificial Sequence
  Description of Artificial Sequence: Synthetic oligonucleotide
  Target: COL7A1; (-) strand; PAM type: NRG; PAM sequence: AAG
atgtgtcctcagccaggggc

SEQ ID NO: 15173 - DNA, 20 bp, Artificial Sequence
  Description of Artificial Sequence: Synthetic oligonucleotide
  Target: COL7A1; (-) strand; PAM type: NRG; PAM sequence: GGG
gctgatgtgtcctcagccag

SEQ ID NO: 15174 - DNA, 20 bp, Artificial Sequence
  Description of Artificial Sequence: Synthetic oligonucleotide
  Target: COL7A1; (-) strand; PAM type: NRG; PAM sequence: GGG
ggctgatgtgtcctcagcca

SEQ ID NO: 15175 - DNA, 20 bp, Artificial Sequence
  Description of Artificial Sequence: Synthetic oligonucleotide
  Target: COL7A1; (-) strand; PAM type: NRG; PAM sequence: AGG
aggctgatgtgtcctcagcc

SEQ ID NO: 15176 - DNA, 20 bp, Artificial Sequence
  Description of Artificial Sequence: Synthetic oligonucleotide
  Target: COL7A1; (-) strand; PAM type: NRG; PAM sequence: CAG
caggctgatgtgtcctcagc

SEQ ID NO: 15177 - DNA, 20 bp, Artificial Sequence
  Description of Artificial Sequence: Synthetic oligonucleotide
  Target: COL7A1; (-) strand; PAM type: NRG; PAM sequence: CAG
cccacaggctgatgtgtcct

SEQ ID NO: 15178 - DNA, 20 bp, Artificial Sequence
  Description of Artificial Sequence: Synthetic oligonucleotide
  Target: COL7A1; (-) strand; PAM type: NRG; PAM sequence: AGG
ggatcctcctgccttcccac

SEQ ID NO: 15179 - DNA, 20 bp, Artificial Sequence
  Description of Artificial Sequence: Synthetic oligonucleotide
  Target: COL7A1; (-) strand; PAM type: NRG; PAM sequence: CAG
tggatcctcctgccttccca

SEQ ID NO: 15180 - DNA, 20 bp, Artificial Sequence
  Description of Artificial Sequence: Synthetic oligonucleotide
  Target: COL7A1; (-) strand; PAM type: NRG; PAM sequence: TGG
ccctctagttctgtggctcc

SEQ ID NO: 15181 - DNA, 20 bp, Artificial Sequence
  Description of Artificial Sequence: Synthetic oligonucleotide
  Target: COL7A1; (-) strand; PAM type: NRG; PAM sequence: TGG
aggacttccctctagttctg

SEQ ID NO: 15182 - DNA, 20 bp, Artificial Sequence
  Description of Artificial Sequence: Synthetic oligonucleotide
  Target: COL7A1; (-) strand; PAM type: NRG; PAM sequence: TAG
ggggagcaaggacttccctc

SEQ ID NO: 15183 - DNA, 20 bp, Artificial Sequence
  Description of Artificial Sequence: Synthetic oligonucleotide
  Target: COL7A1; (-) strand; PAM type: NRG; PAM sequence: AGG
ggggcagtagatggggagca

SEQ ID NO: 15184 - DNA, 20 bp, Artificial Sequence
  Description of Artificial Sequence: Synthetic oligonucleotide
  Target: COL7A1; (-) strand; PAM type: NRG; PAM sequence: AAG
tggggcagtagatggggagc

SEQ ID NO: 15185 - DNA, 20 bp, Artificial Sequence
  Description of Artificial Sequence: Synthetic oligonucleotide
  Target: COL7A1; (-) strand; PAM type: NRG; PAM sequence: GAG
tccatggggcagtagatggg

SEQ ID NO: 15186 - DNA, 20 bp, Artificial Sequence
  Description of Artificial Sequence: Synthetic oligonucleotide
  Target: COL7A1; (-) strand; PAM type: NRG; PAM sequence: GGG
agtccatggggcagtagatg

SEQ ID NO: 15187 - DNA, 20 bp, Artificial Sequence
  Description of Artificial Sequence: Synthetic oligonucleotide
  Target: COL7A1; (-) strand; PAM type: NRG; PAM sequence: GGG
gagtccatggggcagtagat

SEQ ID NO: 15188 - DNA, 20 bp, Artificial Sequence
  Description of Artificial Sequence: Synthetic oligonucleotide
  Target: COL7A1; (-) strand; PAM type: NRG; PAM sequence: TGG
ggagtccatggggcagtaga

SEQ ID NO: 15189 - DNA, 20 bp, Artificial Sequence
  Description of Artificial Sequence: Synthetic oligonucleotide
  Target: COL7A1; (-) strand; PAM type: NRG; PAM sequence: TAG
gcatggagtccatggggcag

SEQ ID NO: 15190 - DNA, 20 bp, Artificial Sequence
  Description of Artificial Sequence: Synthetic oligonucleotide
  Target: COL7A1; (-) strand; PAM type: NRG; PAM sequence: CAG
ttggcatggagtccatgggg

SEQ ID NO: 15191 - DNA, 20 bp, Artificial Sequence
  Description of Artificial Sequence: Synthetic oligonucleotide
  Target: COL7A1; (-) strand; PAM type: NRG; PAM sequence: GGG
gcattggcatggagtccatg

SEQ ID NO: 15192 - DNA, 20 bp, Artificial Sequence
  Description of Artificial Sequence: Synthetic oligonucleotide
  Target: COL7A1; (-) strand; PAM type: NRG; PAM sequence: GGG
ggcattggcatggagtccat

SEQ ID NO: 15193 - DNA, 20 bp, Artificial Sequence
  Description of Artificial Sequence: Synthetic oligonucleotide
  Target: COL7A1; (-) strand; PAM type: NRG; PAM sequence: TGG
tggcattggcatggagtcca

SEQ ID NO: 15194 - DNA, 20 bp, Artificial Sequence
  Description of Artificial Sequence: Synthetic oligonucleotide
  Target: COL7A1; (-) strand; PAM type: NRG; PAM sequence: GAG
cctcttttggcattggcatg

SEQ ID NO: 15195 - DNA, 20 bp, Artificial Sequence
  Description of Artificial Sequence: Synthetic oligonucleotide
  Target: COL7A1; (-) strand; PAM type: NRG; PAM sequence: TGG
tccctcttttggcattggca

SEQ ID NO: 15196 - DNA, 20 bp, Artificial Sequence
  Description of Artificial Sequence: Synthetic oligonucleotide
  Target: COL7A1; (-) strand; PAM type: NRG; PAM sequence: TGG
tgtcatccctcttttggcat

SEQ ID NO: 15197 - DNA, 20 bp, Artificial Sequence
  Description of Artificial Sequence: Synthetic oligonucleotide
  Target: COL7A1; (-) strand; PAM type: NRG; PAM sequence: TGG
gaagtgtgtcatccctcttt

SEQ ID NO: 15198 - DNA, 20 bp, Artificial Sequence
  Description of Artificial Sequence: Synthetic oligonucleotide
  Target: COL7A1; (-) strand; PAM type: NRG; PAM sequence: AAG
caataaaatcctctgctgag

SEQ ID NO: 15199 - DNA, 20 bp, Artificial Sequence
  Description of Artificial Sequence: Synthetic oligonucleotide
  Target: COL7A1; (-) strand; PAM type: NRG; PAM sequence: GAG
caccaataaaatcctctgct

SEQ ID NO: 15200 - DNA, 20 bp, Artificial Sequence
  Description of Artificial Sequence: Synthetic oligonucleotide
  Target: COL7A1; (-) strand; PAM type: NRG; PAM sequence: AGG
gctcctctaacctgtgccac

SEQ ID NO: 15201 - DNA, 20 bp, Artificial Sequence
  Description of Artificial Sequence: Synthetic oligonucleotide
  Target: COL7A1; (-) strand; PAM type: NRG; PAM sequence: CAG
ggctcctctaacctgtgcca

SEQ ID NO: 15202 - DNA, 20 bp, Artificial Sequence
  Description of Artificial Sequence: Synthetic oligonucleotide
  Target: COL7A1; (-) strand; PAM type: NRG; PAM sequence: CGG
ccaccacaaacacagcactt

SEQ ID NO: 15203 - DNA, 20 bp, Artificial Sequence
  Description of Artificial Sequence: Synthetic oligonucleotide
  Target: COL7A1; (-) strand; PAM type: NRG; PAM sequence: CAG
tcccccccccaccacaaaca

SEQ ID NO: 15204 - DNA, 20 bp, Artificial Sequence
  Description of Artificial Sequence: Synthetic oligonucleotide
  Target: COL7A1; (-) strand; PAM type: NRG; PAM sequence: TGG
gagggcagggccggggtttg

SEQ ID NO: 15205 - DNA, 20 bp, Artificial Sequence
  Description of Artificial Sequence: Synthetic oligonucleotide
  Target: COL7A1; (-) strand; PAM type: NRG; PAM sequence: GGG
taagcaagagggcagggccg

SEQ ID NO: 15206 - DNA, 20 bp, Artificial Sequence
  Description of Artificial Sequence: Synthetic oligonucleotide
  Target: COL7A1; (-) strand; PAM type: NRG; PAM sequence: GGG
gtaagcaagagggcagggcc

SEQ ID NO: 15207 - DNA, 20 bp, Artificial Sequence
  Description of Artificial Sequence: Synthetic oligonucleotide
  Target: COL7A1; (-) strand; PAM type: NRG; PAM sequence: CGG
tgtaagcaagagggcagggc

SEQ ID NO: 15208 - DNA, 20 bp, Artificial Sequence
  Description of Artificial Sequence: Synthetic oligonucleotide
  Target: COL7A1; (-) strand; PAM type: NRG; PAM sequence: GGG
cctatgtaagcaagagggca

SEQ ID NO: 15209 - DNA, 20 bp, Artificial Sequence
  Description of Artificial Sequence: Synthetic oligonucleotide
  Target: COL7A1; (-) strand; PAM type: NRG; PAM sequence: AGG
gcctatgtaagcaagagggc

SEQ ID NO: 15210 - DNA, 20 bp, Artificial Sequence
  Description of Artificial Sequence: Synthetic oligonucleotide
  Target: COL7A1; (-) strand; PAM type: NRG; PAM sequence: CAG
agcctatgtaagcaagaggg

SEQ ID NO: 15211 - DNA, 20 bp, Artificial Sequence
  Description of Artificial Sequence: Synthetic oligonucleotide
  Target: COL7A1; (-) strand; PAM type: NRG; PAM sequence: GGG
ggaagcctatgtaagcaaga

SEQ ID NO: 15212 - DNA, 20 bp, Artificial Sequence
  Description of Artificial Sequence: Synthetic oligonucleotide
  Target: COL7A1; (-) strand; PAM type: NRG; PAM sequence: AGG
gggaagcctatgtaagcaag

SEQ ID NO: 15213 - DNA, 20 bp, Artificial Sequence
  Description of Artificial Sequence: Synthetic oligonucleotide
  Target: COL7A1; (-) strand; PAM type: NRG; PAM sequence: GAG
cgggaagcctatgtaagcaa

SEQ ID NO: 15214 - DNA, 20 bp, Artificial Sequence
  Description of Artificial Sequence: Synthetic oligonucleotide
  Target: COL7A1; (-) strand; PAM type: NRG; PAM sequence: AAG
ggcgggaagcctatgtaagc

SEQ ID NO: 15215 - DNA, 20 bp, Artificial Sequence
  Description of Artificial Sequence: Synthetic oligonucleotide
  Target: COL7A1; (-) strand; PAM type: NRG; PAM sequence: AAG
tctaggcgggaagcctatgt

SEQ ID NO: 15216 - DNA, 20 bp, Artificial Sequence
  Description of Artificial Sequence: Synthetic oligonucleotide
  Target: COL7A1; (-) strand; PAM type: NRG; PAM sequence: AAG
tggctgcgcttctaggcggg

SEQ ID NO: 15217 - DNA, 20 bp, Artificial Sequence
  Description of Artificial Sequence: Synthetic oligonucleotide
  Target: COL7A1; (-) strand; PAM type: NRG; PAM sequence: GGG
ttctggctgcgcttctaggc

SEQ ID NO: 15218 - DNA, 20 bp, Artificial Sequence
  Description of Artificial Sequence: Synthetic oligonucleotide
  Target: COL7A1; (-) strand; PAM type: NRG; PAM sequence: CGG
gttctggctgcgcttctagg

SEQ ID NO: 15219 - DNA, 20 bp, Artificial Sequence
  Description of Artificial Sequence: Synthetic oligonucleotide
  Target: COL7A1; (-) strand; PAM type: NRG; PAM sequence: AGG
catgttctggctgcgcttct

SEQ ID NO: 15220 - DNA, 20 bp, Artificial Sequence
  Description of Artificial Sequence: Synthetic oligonucleotide
  Target: COL7A1; (-) strand; PAM type: NRG; PAM sequence: TAG
gcatgttctggctgcgcttc

SEQ ID NO: 15221 - DNA, 20 bp, Artificial Sequence
  Description of Artificial Sequence: Synthetic oligonucleotide
  Target: COL7A1; (-) strand; PAM type: NRG; PAM sequence: TGG
ggatccgtagcggcatgttc

SEQ ID NO: 15222 - DNA, 20 bp, Artificial Sequence
  Description of Artificial Sequence: Synthetic oligonucleotide
  Target: COL7A1; (-) strand; PAM type: NRG; PAM sequence: CGG
gactacaaccggatccgtag

SEQ ID NO: 15223 - DNA, 20 bp, Artificial Sequence
  Description of Artificial Sequence: Synthetic oligonucleotide
  Target: COL7A1; (-) strand; PAM type: NRG; PAM sequence: TAG
ccagactacaaccggatccg

SEQ ID NO: 15224 - DNA, 20 bp, Artificial Sequence
  Description of Artificial Sequence: Synthetic oligonucleotide
  Target: COL7A1; (-) strand; PAM type: NRG; PAM sequence: CGG
agcagctcccagactacaac

SEQ ID NO: 15225 - DNA, 20 bp, Artificial Sequence
  Description of Artificial Sequence: Synthetic oligonucleotide
  Target: COL7A1; (-) strand; PAM type: NRG; PAM sequence: CAG
aggccccattgagcagctcc

SEQ ID NO: 15226 - DNA, 20 bp, Artificial Sequence
  Description of Artificial Sequence: Synthetic oligonucleotide
  Target: COL7A1; (-) strand; PAM type: NRG; PAM sequence: CAG
tccccacaggccccattgag

SEQ ID NO: 15227 - DNA, 20 bp, Artificial Sequence
  Description of Artificial Sequence: Synthetic oligonucleotide
  Target: COL7A1; (-) strand; PAM type: NRG; PAM sequence: GAG
ctatccccacaggccccatt

SEQ ID NO: 15228 - DNA, 20 bp, Artificial Sequence
  Description of Artificial Sequence: Synthetic oligonucleotide
  Target: COL7A1; (-) strand; PAM type: NRG; PAM sequence: AGG
acgctccaccctatccccac

SEQ ID NO: 15229 - DNA, 20 bp, Artificial Sequence
  Description of Artificial Sequence: Synthetic oligonucleotide
  Target: COL7A1; (-) strand; PAM type: NRG; PAM sequence: CAG
gacgctccaccctatcccca

SEQ ID NO: 15230 - DNA, 20 bp, Artificial Sequence
  Description of Artificial Sequence: Synthetic oligonucleotide
  Target: COL7A1; (-) strand; PAM type: NRG; PAM sequence: AGG
caggtgtccctgtgcaggcc

SEQ ID NO: 15231 - DNA, 20 bp, Artificial Sequence
  Description of Artificial Sequence: Synthetic oligonucleotide
  Target: COL7A1; (-) strand; PAM type: NRG; PAM sequence: CAG
ccaggtgtccctgtgcaggc

SEQ ID NO: 15232 - DNA, 20 bp, Artificial Sequence
  Description of Artificial Sequence: Synthetic oligonucleotide
  Target: COL7A1; (-) strand; PAM type: NRG; PAM sequence: AGG
agggccaggtgtccctgtgc

SEQ ID NO: 15233 - DNA, 20 bp, Artificial Sequence
  Description of Artificial Sequence: Synthetic oligonucleotide
  Target: COL7A1; (-) strand; PAM type: NRG; PAM sequence: CAG
cagggccaggtgtccctgtg

SEQ ID NO: 15234 - DNA, 20 bp, Artificial Sequence
  Description of Artificial Sequence: Synthetic oligonucleotide
  Target: COL7A1; (-) strand; PAM type: NRG; PAM sequence: AGG
gctgggtgcggcacagggcc

SEQ ID NO: 15235 - DNA, 20 bp, Artificial Sequence
  Description of Artificial Sequence: Synthetic oligonucleotide
  Target: COL7A1; (-) strand; PAM type: NRG; PAM sequence: CAG
agctgggtgcggcacagggc

SEQ ID NO: 15236 - DNA, 20 bp, Artificial Sequence
  Description of Artificial Sequence: Synthetic oligonucleotide
  Target: COL7A1; (-) strand; PAM type: NRG; PAM sequence: GGG
tccgagctgggtgcggcaca

SEQ ID NO: 15237 - DNA, 20 bp, Artificial Sequence
  Description of Artificial Sequence: Synthetic oligonucleotide
  Target: COL7A1; (-) strand; PAM type: NRG; PAM sequence: AGG
ctccgagctgggtgcggcac

SEQ ID NO: 15238 - DNA, 20 bp, Artificial Sequence
  Description of Artificial Sequence: Synthetic oligonucleotide
  Target: COL7A1; (-) strand; PAM type: NRG; PAM sequence: CAG
tctccgagctgggtgcggca

SEQ ID NO: 15239 - DNA, 20 bp, Artificial Sequence
  Description of Artificial Sequence: Synthetic oligonucleotide
  Target: COL7A1; (-) strand; PAM type: NRG; PAM sequence: CGG
cagcatctccgagctgggtg

SEQ ID NO: 15240 - DNA, 20 bp, Artificial Sequence
  Description of Artificial Sequence: Synthetic oligonucleotide
  Target: COL7A1; (-) strand; PAM type: NRG; PAM sequence: GGG
ctgggcagcatctccgagct

SEQ ID NO: 15241 - DNA, 20 bp, Artificial Sequence
  Description of Artificial Sequence: Synthetic oligonucleotide
  Target: COL7A1; (-) strand; PAM type: NRG; PAM sequence: TGG
tctgggcagcatctccgagc

SEQ ID NO: 15242 - DNA, 20 bp, Artificial Sequence
  Description of Artificial Sequence: Synthetic oligonucleotide
  Target: COL7A1; (-) strand; PAM type: NRG; PAM sequence: GAG
ctgctctgggcagcatctcc

SEQ ID NO: 15243 - DNA, 20 bp, Artificial Sequence
  Description of Artificial Sequence: Synthetic oligonucleotide
  Target: COL7A1; (-) strand; PAM type: NRG; PAM sequence: CAG
ctgtcttgtgctgctctggg

SEQ ID NO: 15244 - DNA, 20 bp, Artificial Sequence
  Description of Artificial Sequence: Synthetic oligonucleotide
  Target: COL7A1; (-) strand; PAM type: NRG; PAM sequence: GGG
agcctgtcttgtgctgctct

SEQ ID NO: 15245 - DNA, 20 bp, Artificial Sequence
  Description of Artificial Sequence: Synthetic oligonucleotide
  Target: COL7A1; (-) strand; PAM type: NRG; PAM sequence: TGG
aagcctgtcttgtgctgctc

SEQ ID NO: 15246 - DNA, 20 bp, Artificial Sequence
  Description of Artificial Sequence: Synthetic oligonucleotide
  Target: COL7A1; (-) strand; PAM type: NRG; PAM sequence: AAG
ctctcctctctttccactca

SEQ ID NO: 15247 - DNA, 20 bp, Artificial Sequence
  Description of Artificial Sequence: Synthetic oligonucleotide
  Target: COL7A1; (-) strand; PAM type: NRG; PAM sequence: GGG
gacaggctcagcacccctgg

SEQ ID NO: 15248 - DNA, 20 bp, Artificial Sequence
  Description of Artificial Sequence: Synthetic oligonucleotide
  Target: COL7A1; (-) strand; PAM type: NRG; PAM sequence: GGG
ggacaggctcagcacccctg

SEQ ID NO: 15249 - DNA, 20 bp, Artificial Sequence
  Description of Artificial Sequence: Synthetic oligonucleotide
  Target: COL7A1; (-) strand; PAM type: NRG; PAM sequence: GGG
gggacaggctcagcacccct

SEQ ID NO: 15250 - DNA, 20 bp, Artificial Sequence
  Description of Artificial Sequence: Synthetic oligonucleotide
  Target: COL7A1; (-) strand; PAM type: NRG; PAM sequence: TGG
agggacaggctcagcacccc

SEQ ID NO: 15251 - DNA, 20 bp, Artificial Sequence
  Description of Artificial Sequence: Synthetic oligonucleotide
  Target: COL7A1; (-) strand; PAM type: NRG; PAM sequence: CAG
agaacatgaagggacaggct

SEQ ID NO: 15252 - DNA, 20 bp, Artificial Sequence
  Description of Artificial Sequence: Synthetic oligonucleotide
  Target: COL7A1; (-) strand; PAM type: NRG; PAM sequence: AGG
gggccagaacatgaagggac

SEQ ID NO: 15253 - DNA, 20 bp, Artificial Sequence
  Description of Artificial Sequence: Synthetic oligonucleotide
  Target: COL7A1; (-) strand; PAM type: NRG; PAM sequence: CAG
agggccagaacatgaaggga

SEQ ID NO: 15254 - DNA, 20 bp, Artificial Sequence
  Description of Artificial Sequence: Synthetic oligonucleotide
  Target: COL7A1; (-) strand; PAM type: NRG; PAM sequence: GGG
ttcaagggccagaacatgaa

SEQ ID NO: 15255 - DNA, 20 bp, Artificial Sequence
  Description of Artificial Sequence: Synthetic oligonucleotide
  Target: COL7A1; (-) strand; PAM type: NRG; PAM sequence: AGG
cttcaagggccagaacatga

SEQ ID NO: 15256 - DNA, 20 bp, Artificial Sequence
  Description of Artificial Sequence: Synthetic oligonucleotide
  Target: COL7A1; (-) strand; PAM type: NRG; PAM sequence: AAG
gcttcaagggccagaacatg

SEQ ID NO: 15257 - DNA, 20 bp, Artificial Sequence
  Description of Artificial Sequence: Synthetic oligonucleotide
  Target: COL7A1; (-) strand; PAM type: NRG; PAM sequence: CAG
tggggtggggcttcaagggc

SEQ ID NO: 15258 - DNA, 20 bp, Artificial Sequence
  Description of Artificial Sequence: Synthetic oligonucleotide
  Target: COL7A1; (-) strand; PAM type: NRG; PAM sequence: GGG
catgtggggtggggcttcaa

SEQ ID NO: 15259 - DNA, 20 bp, Artificial Sequence
  Description of Artificial Sequence: Synthetic oligonucleotide
  Target: COL7A1; (-) strand; PAM type: NRG; PAM sequence: AGG
ccatgtggggtggggcttca

SEQ ID NO: 15260 - DNA, 20 bp, Artificial Sequence
  Description of Artificial Sequence: Synthetic oligonucleotide
  Target: COL7A1; (-) strand; PAM type: NRG; PAM sequence: AAG
tccatgtggggtggggcttc

SEQ ID NO: 15261 - DNA, 20 bp, Artificial Sequence
  Description of Artificial Sequence: Synthetic oligonucleotide
  Target: COL7A1; (-) strand; PAM type: NRG; PAM sequence: GGG
gggcacctccatgtggggtg

SEQ ID NO: 15262 - DNA, 20 bp, Artificial Sequence
  Description of Artificial Sequence: Synthetic oligonucleotide
  Target: COL7A1; (-) strand; PAM type: NRG; PAM sequence: GGG
cgggcacctccatgtggggt

SEQ ID NO: 15263 - DNA, 20 bp, Artificial Sequence
  Description of Artificial Sequence: Synthetic oligonucleotide
  Target: COL7A1; (-) strand; PAM type: NRG; PAM sequence: TGG
acgggcacctccatgtgggg

SEQ ID NO: 15264 - DNA, 20 bp, Artificial Sequence
  Description of Artificial Sequence: Synthetic oligonucleotide
  Target: COL7A1; (-) strand; PAM type: NRG; PAM sequence: GGG
gtaacgggcacctccatgtg

SEQ ID NO: 15265 - DNA, 20 bp, Artificial Sequence
  Description of Artificial Sequence: Synthetic oligonucleotide
  Target: COL7A1; (-) strand; PAM type: NRG; PAM sequence: GGG
ggtaacgggcacctccatgt

SEQ ID NO: 15266 - DNA, 20 bp, Artificial Sequence
  Description of Artificial Sequence: Synthetic oligonucleotide
  Target: COL7A1; (-) strand; PAM type: NRG; PAM sequence: TGG
aggtaacgggcacctccatg

SEQ ID NO: 15267 - DNA, 20 bp, Artificial Sequence
  Description of Artificial Sequence: Synthetic oligonucleotide
  Target: COL7A1; (-) strand; PAM type: NRG; PAM sequence: GGG
ccctgcacccgtcaggtaac

SEQ ID NO: 15268 - DNA, 20 bp, Artificial Sequence
  Description of Artificial Sequence: Synthetic oligonucleotide
  Target: COL7A1; (-) strand; PAM type: NRG; PAM sequence: CGG
accctgcacccgtcaggtaa

SEQ ID NO: 15269 - DNA, 20 bp, Artificial Sequence
  Description of Artificial Sequence: Synthetic oligonucleotide
  Target: COL7A1; (-) strand; PAM type: NRG; PAM sequence: AGG
atcaataccctgcacccgtc

SEQ ID NO: 15270 - DNA, 20 bp, Artificial Sequence
  Description of Artificial Sequence: Synthetic oligonucleotide
  Target: COL7A1; (-) strand; PAM type: NRG; PAM sequence: CAG
catcaataccctgcacccgt

SEQ ID NO: 15271 - DNA, 20 bp, Artificial Sequence
  Description of Artificial Sequence: Synthetic oligonucleotide
  Target: COL7A1; (-) strand; PAM type: NRG; PAM sequence: AGG
agttccttgactgcctgcca

SEQ ID NO: 15272 - DNA, 20 bp, Artificial Sequence
  Description of Artificial Sequence: Synthetic oligonucleotide
  Target: COL7A1; (-) strand; PAM type: NRG; PAM sequence: AAG
cagttccttgactgcctgcc

SEQ ID NO: 15273 - DNA, 20 bp, Artificial Sequence
  Description of Artificial Sequence: Synthetic oligonucleotide
  Target: COL7A1; (-) strand; PAM type: NRG; PAM sequence: CAG
gctcagaaaacctgtcccag

SEQ ID NO: 15274 - DNA, 20 bp, Artificial Sequence
  Description of Artificial Sequence: Synthetic oligonucleotide
  Target: COL7A1; (-) strand; PAM type: NRG; PAM sequence: CAG
cttgctcagaaaacctgtcc

SEQ ID NO: 15275 - DNA, 20 bp, Artificial Sequence
  Description of Artificial Sequence: Synthetic oligonucleotide
  Target: COL7A1; (-) strand; PAM type: NRG; PAM sequence: CAG
gctgccagggagttcttgct

SEQ ID NO: 15276 - DNA, 20 bp, Artificial Sequence
  Description of Artificial Sequence: Synthetic oligonucleotide
  Target: COL7A1; (-) strand; PAM type: NRG; PAM sequence: GAG
ccagtcccctggctgccagg

SEQ ID NO: 15277 - DNA, 20 bp, Artificial Sequence
  Description of Artificial Sequence: Synthetic oligonucleotide
  Target: COL7A1; (-) strand; PAM type: NRG; PAM sequence: GGG
ccccagtcccctggctgcca

SEQ ID NO: 15278 - DNA, 20 bp, Artificial Sequence
  Description of Artificial Sequence: Synthetic oligonucleotide
  Target: COL7A1; (-) strand; PAM type: NRG; PAM sequence: AGG
tccccagtcccctggctgcc

SEQ ID NO: 15279 - DNA, 20 bp, Artificial Sequence
  Description of Artificial Sequence: Synthetic oligonucleotide
  Target: COL7A1; (-) strand; PAM type: NRG; PAM sequence: CAG
ctccccagtcccctggctgc

SEQ ID NO: 15280 - DNA, 20 bp, Artificial Sequence
  Description of Artificial Sequence: Synthetic oligonucleotide
  Target: COL7A1; (-) strand; PAM type: NRG; PAM sequence: TGG
agcagctctccccagtcccc

SEQ ID NO: 15281 - DNA, 20 bp, Artificial Sequence
  Description of Artificial Sequence: Synthetic oligonucleotide
  Target: COL7A1; (-) strand; PAM type: NRG; PAM sequence: CAG
aggccccaagcagctctccc

SEQ ID NO: 15282 - DNA, 20 bp, Artificial Sequence
  Description of Artificial Sequence: Synthetic oligonucleotide
  Target: COL7A1; (-) strand; PAM type: NRG; PAM sequence: CAG
cagccagttaaggccccaag

SEQ ID NO: 15283 - DNA, 20 bp, Artificial Sequence
  Description of Artificial Sequence: Synthetic oligonucleotide
  Target: COL7A1; (-) strand; PAM type: NRG; PAM sequence: AAG
gagcagccagttaaggcccc

SEQ ID NO: 15284 - DNA, 20 bp, Artificial Sequence
  Description of Artificial Sequence: Synthetic oligonucleotide
  Target: COL7A1; (-) strand; PAM type: NRG; PAM sequence: AGG
gcttacagagcagccagtta

SEQ ID NO: 15285 - DNA, 20 bp, Artificial Sequence
  Description of Artificial Sequence: Synthetic oligonucleotide
  Target: COL7A1; (-) strand; PAM type: NRG; PAM sequence: AAG
agcttacagagcagccagtt

SEQ ID NO: 15286 - DNA, 20 bp, Artificial Sequence
  Description of Artificial Sequence: Synthetic oligonucleotide
  Target: COL7A1; (-) strand; PAM type: NRG; PAM sequence: CAG
tgctcagcttacagagcagc

SEQ ID NO: 15287 - DNA, 20 bp, Artificial Sequence
  Description of Artificial Sequence: Synthetic oligonucleotide
  Target: COL7A1; (-) strand; PAM type: NRG; PAM sequence: CAG
ctgctgctcagcttacagag

SEQ ID NO: 15288 - DNA, 20 bp, Artificial Sequence
  Description of Artificial Sequence: Synthetic oligonucleotide
  Target: COL7A1; (-) strand; PAM type: NRG; PAM sequence: GAG
gcactgctgctcagcttaca

SEQ ID NO: 15289 - DNA, 20 bp, Artificial Sequence
  Description of Artificial Sequence: Synthetic oligonucleotide
  Target: COL7A1; (-) strand; PAM type: NRG; PAM sequence: CAG
ccgcactgctgctcagctta

SEQ ID NO: 15290 - DNA, 20 bp, Artificial Sequence
  Description of Artificial Sequence: Synthetic oligonucleotide
  Target: COL7A1; (-) strand; PAM type: NRG; PAM sequence: CAG
tctgctcccgcactgctgct

SEQ ID NO: 15291 - DNA, 20 bp, Artificial Sequence
  Description of Artificial Sequence: Synthetic oligonucleotide
  Target: COL7A1; (-) strand; PAM type: NRG; PAM sequence: TGG
atttcctcaggccgttctct

SEQ ID NO: 15292 - DNA, 20 bp, Artificial Sequence
  Description of Artificial Sequence: Synthetic oligonucleotide
  Target: COL7A1; (-) strand; PAM type: NRG; PAM sequence: AGG
tgctctttgtttatttcctc

SEQ ID NO: 15293 - DNA, 20 bp, Artificial Sequence
  Description of Artificial Sequence: Synthetic oligonucleotide
  Target: COL7A1; (-) strand; PAM type: NRG; PAM sequence: CAG
ctgctctttgtttatttcct

SEQ ID NO: 15294 - DNA, 20 bp, Artificial Sequence
  Description of Artificial Sequence: Synthetic oligonucleotide
  Target: COL7A1; (-) strand; PAM type: NRG; PAM sequence: GGG
gatatggtaagtggcctagg

SEQ ID NO: 15295 - DNA, 20 bp, Artificial Sequence
  Description of Artificial Sequence: Synthetic oligonucleotide
  Target: COL7A1; (-) strand; PAM type: NRG; PAM sequence: GGG
ggatatggtaagtggcctag

SEQ ID NO: 15296 - DNA, 20 bp, Artificial Sequence
  Description of Artificial Sequence: Synthetic oligonucleotide
  Target: COL7A1; (-) strand; PAM type: NRG; PAM sequence: GGG
tggatatggtaagtggccta

SEQ ID NO: 15297 - DNA, 20 bp, Artificial Sequence
  Description of Artificial Sequence: Synthetic oligonucleotide
  Target: COL7A1; (-) strand; PAM type: NRG; PAM sequence: AGG
ctggatatggtaagtggcct

SEQ ID NO: 15298 - DNA, 20 bp, Artificial Sequence
  Description of Artificial Sequence: Synthetic oligonucleotide
  Target: COL7A1; (-) strand; PAM type: NRG; PAM sequence: TAG
gctggatatggtaagtggcc

SEQ ID NO: 15299 - DNA, 20 bp, Artificial Sequence
  Description of Artificial Sequence: Synthetic oligonucleotide
  Target: COL7A1; (-) strand; PAM type: NRG; PAM sequence: TGG
cagtggctggatatggtaag

SEQ ID NO: 15300 - DNA, 20 bp, Artificial Sequence
  Description of Artificial Sequence: Synthetic oligonucleotide
  Target: COL7A1; (-) strand; PAM type: NRG; PAM sequence: AAG
cagcagtggctggatatggt

SEQ ID NO: 15301 - DNA, 20 bp, Artificial Sequence
  Description of Artificial Sequence: Synthetic oligonucleotide
  Target: COL7A1; (-) strand; PAM type: NRG; PAM sequence: TGG
tgcccagcagtggctggata

SEQ ID NO: 15302 - DNA, 20 bp, Artificial Sequence
  Description of Artificial Sequence: Synthetic oligonucleotide
  Target: COL7A1; (-) strand; PAM type: NRG; PAM sequence: TGG
gaccagtgcccagcagtggc

SEQ ID NO: 15303 - DNA, 20 bp, Artificial Sequence
  Description of Artificial Sequence: Synthetic oligonucleotide
  Target: COL7A1; (-) strand; PAM type: NRG; PAM sequence: TGG
ctatgaccagtgcccagcag

SEQ ID NO: 15304 - DNA, 20 bp, Artificial Sequence
  Description of Artificial Sequence: Synthetic oligonucleotide
  Target: COL7A1; (-) strand; PAM type: NRG; PAM sequence: CAG
catctatgaccagtgcccag

SEQ ID NO: 15305 - DNA, 20 bp, Artificial Sequence
  Description of Artificial Sequence: Synthetic oligonucleotide
  Target: COL7A1; (-) strand; PAM type: NRG; PAM sequence: CAG
gtacatctatgaccagtgcc

SEQ ID NO: 15306 - DNA, 20 bp, Artificial Sequence
  Description of Artificial Sequence: Synthetic oligonucleotide
  Target: COL7A1; (-) strand; PAM type: NRG; PAM sequence: CAG
gctccaagtacatctatgac

SEQ ID NO: 15307 - DNA, 20 bp, Artificial Sequence
  Description of Artificial Sequence: Synthetic oligonucleotide
  Target: COL7A1; (-) strand; PAM type: NRG; PAM sequence: AAG
tggtacgtgagatctgctcc

SEQ ID NO: 15308 - DNA, 20 bp, Artificial Sequence
  Description of Artificial Sequence: Synthetic oligonucleotide
  Target: COL7A1; (-) strand; PAM type: NRG; PAM sequence: GAG
tggatgccagtgtggtacgt

SEQ ID NO: 15309 - DNA, 20 bp, Artificial Sequence
  Description of Artificial Sequence: Synthetic oligonucleotide
  Target: COL7A1; (-) strand; PAM type: NRG; PAM sequence: TGG
gcaggaggtggatgccagtg

SEQ ID NO: 15310 - DNA, 20 bp, Artificial Sequence
  Description of Artificial Sequence: Synthetic oligonucleotide
  Target: COL7A1; (-) strand; PAM type: NRG; PAM sequence: CAG
accctgcaggaggtggatgc

SEQ ID NO: 15311 - DNA, 20 bp, Artificial Sequence
  Description of Artificial Sequence: Synthetic oligonucleotide
  Target: COL7A1; (-) strand; PAM type: NRG; PAM sequence: TGG
ctgcctcaccctgcaggagg

SEQ ID NO: 15312 - DNA, 20 bp, Artificial Sequence
  Description of Artificial Sequence: Synthetic oligonucleotide
  Target: COL7A1; (-) strand; PAM type: NRG; PAM sequence: AGG
cctctgcctcaccctgcagg

SEQ ID NO: 15313 - DNA, 20 bp, Artificial Sequence
  Description of Artificial Sequence: Synthetic oligonucleotide
  Target: COL7A1; (-) strand; PAM type: NRG; PAM sequence: GAG
ccctctgcctcaccctgcag

SEQ ID NO: 15314 - DNA, 20 bp, Artificial Sequence
  Description of Artificial Sequence: Synthetic oligonucleotide
  Target: COL7A1; (-) strand; PAM type: NRG; PAM sequence: AGG
tgccctctgcctcaccctgc

SEQ ID NO: 15315 - DNA, 20 bp, Artificial Sequence
  Description of Artificial Sequence: Synthetic oligonucleotide
  Target: COL7A1; (-) strand; PAM type: NRG; PAM sequence: CAG
atgccctctgcctcaccctg

SEQ ID NO: 15316 - DNA, 20 bp, Artificial Sequence
  Description of Artificial Sequence: Synthetic oligonucleotide
  Target: COL7A1; (-) strand; PAM type: NRG; PAM sequence: CAG
gtggccaggtgcccgttagc

SEQ ID NO: 15317 - DNA, 20 bp, Artificial Sequence
  Description of Artificial Sequence: Synthetic oligonucleotide
  Target: COL7A1; (-) strand; PAM type: NRG; PAM sequence: TAG
ggtggtggccaggtgcccgt

SEQ ID NO: 15318 - DNA, 20 bp, Artificial Sequence
  Description of Artificial Sequence: Synthetic oligonucleotide
  Target: COL7A1; (-) strand; PAM type: NRG; PAM sequence: AGG
gactggctgaggtggtggcc

SEQ ID NO: 15319 - DNA, 20 bp, Artificial Sequence
  Description of Artificial Sequence: Synthetic oligonucleotide
  Target: COL7A1; (-) strand; PAM type: NRG; PAM sequence: CAG
tgactggctgaggtggtggc

SEQ ID NO: 15320 - DNA, 20 bp, Artificial Sequence
  Description of Artificial Sequence: Synthetic oligonucleotide
  Target: COL7A1; (-) strand; PAM type: NRG; PAM sequence: TGG
atgctgactggctgaggtgg

SEQ ID NO: 15321 - DNA, 20 bp, Artificial Sequence
  Description of Artificial Sequence: Synthetic oligonucleotide
  Target: COL7A1; (-) strand; PAM type: NRG; PAM sequence: TGG
atgatgctgactggctgagg

SEQ ID NO: 15322 - DNA, 20 bp, Artificial Sequence
  Description of Artificial Sequence: Synthetic oligonucleotide
  Target: COL7A1; (-) strand; PAM type: NRG; PAM sequence: AGG
tggatgatgctgactggctg

SEQ ID NO: 15323 - DNA, 20 bp, Artificial Sequence
  Description of Artificial Sequence: Synthetic oligonucleotide
  Target: COL7A1; (-) strand; PAM type: NRG; PAM sequence: GAG
ttggatgatgctgactggct

SEQ ID NO: 15324 - DNA, 20 bp, Artificial Sequence
  Description of Artificial Sequence: Synthetic oligonucleotide
  Target: COL7A1; (-) strand; PAM type: NRG; PAM sequence: TGG
gctagttggatgatgctgac

SEQ ID NO: 15325 - DNA, 20 bp, Artificial Sequence
  Description of Artificial Sequence: Synthetic oligonucleotide
  Target: COL7A1; (-) strand; PAM type: NRG; PAM sequence: TGG
tgtgggagatctctgctagt

SEQ ID NO: 15326 - DNA, 20 bp, Artificial Sequence
  Description of Artificial Sequence: Synthetic oligonucleotide
  Target: COL7A1; (-) strand; PAM type: NRG; PAM sequence: TAG
tgcctgtgggagatctctgc

SEQ ID NO: 15327 - DNA, 20 bp, Artificial Sequence
  Description of Artificial Sequence: Synthetic oligonucleotide
  Target: COL7A1; (-) strand; PAM type: NRG; PAM sequence: GAG
cagctgcatgctgcctgtgg

SEQ ID NO: 15328 - DNA, 20 bp, Artificial Sequence
  Description of Artificial Sequence: Synthetic oligonucleotide
  Target: COL7A1; (-) strand; PAM type: NRG; PAM sequence: GGG
gacagctgcatgctgcctgt

SEQ ID NO: 15329 - DNA, 20 bp, Artificial Sequence
  Description of Artificial Sequence: Synthetic oligonucleotide
  Target: COL7A1; (-) strand; PAM type: NRG; PAM sequence: TGG
ggacagctgcatgctgcctg

SEQ ID NO: 15330 - DNA, 20 bp, Artificial Sequence
  Description of Artificial Sequence: Synthetic oligonucleotide
  Target: COL7A1; (-) strand; PAM type: NRG; PAM sequence: CAG
ttcctcttttgggctgggga

SEQ ID NO: 15331 - DNA, 20 bp, Artificial Sequence
  Description of Artificial Sequence: Synthetic oligonucleotide
  Target: COL7A1; (-) strand; PAM type: NRG; PAM sequence: GGG
gcctttcctcttttgggctg

SEQ ID NO: 15332 - DNA, 20 bp, Artificial Sequence
  Description of Artificial Sequence: Synthetic oligonucleotide
  Target: COL7A1; (-) strand; PAM type: NRG; PAM sequence: GGG
tgcctttcctcttttgggct

SEQ ID NO: 15333 - DNA, 20 bp, Artificial Sequence
  Description of Artificial Sequence: Synthetic oligonucleotide
  Target: COL7A1; (-) strand; PAM type: NRG; PAM sequence: TGG
ctgcctttcctcttttgggc

SEQ ID NO: 15334 - DNA, 20 bp, Artificial Sequence
  Description of Artificial Sequence: Synthetic oligonucleotide
  Target: COL7A1; (-) strand; PAM type: NRG; PAM sequence: GGG
ccttctgcctttcctctttt

SEQ ID NO: 15335 - DNA, 20 bp, Artificial Sequence
  Description of Artificial Sequence: Synthetic oligonucleotide
  Target: COL7A1; (-) strand; PAM type: NRG; PAM sequence: TGG
cccttctgcctttcctcttt

SEQ ID NO: 15336 - DNA, 20 bp, Artificial Sequence
  Description of Artificial Sequence: Synthetic oligonucleotide
  Target: COL7A1; (-) strand; PAM type: NRG; PAM sequence: GGG
gcccatggaggtctatagca

SEQ ID NO: 15337 - DNA, 20 bp, Artificial Sequence
  Description of Artificial Sequence: Synthetic oligonucleotide
  Target: COL7A1; (-) strand; PAM type: NRG; PAM sequence: AGG
ggcccatggaggtctatagc

SEQ ID NO: 15338 - DNA, 20 bp, Artificial Sequence
  Description of Artificial Sequence: Synthetic oligonucleotide
  Target: COL7A1; (-) strand; PAM type: NRG; PAM sequence: CAG
gggcccatggaggtctatag

SEQ ID NO: 15339 - DNA, 20 bp, Artificial Sequence
  Description of Artificial Sequence: Synthetic oligonucleotide
  Target: COL7A1; (-) strand; PAM type: NRG; PAM sequence: TAG
gcggggcccatggaggtcta

SEQ ID NO: 15340 - DNA, 20 bp, Artificial Sequence
  Description of Artificial Sequence: Synthetic oligonucleotide
  Target: COL7A1; (-) strand; PAM type: NRG; PAM sequence: AGG
gagatgggcggggcccatgg

SEQ ID NO: 15341 - DNA, 20 bp, Artificial Sequence
  Description of Artificial Sequence: Synthetic oligonucleotide
  Target: COL7A1; (-) strand; PAM type: NRG; PAM sequence: GAG
ggagatgggcggggcccatg

SEQ ID NO: 15342 - DNA, 20 bp, Artificial Sequence
  Description of Artificial Sequence: Synthetic oligonucleotide
  Target: COL7A1; (-) strand; PAM type: NRG; PAM sequence: TGG
gtggagatgggcggggccca

SEQ ID NO: 15343 - DNA, 20 bp, Artificial Sequence
  Description of Artificial Sequence: Synthetic oligonucleotide
  Target: COL7A1; (-) strand; PAM type: NRG; PAM sequence: GGG
gatggctgtggagatgggcg

SEQ ID NO: 15344 - DNA, 20 bp, Artificial Sequence
  Description of Artificial Sequence: Synthetic oligonucleotide
  Target: COL7A1; (-) strand; PAM type: NRG; PAM sequence: GGG
tgatggctgtggagatgggc

SEQ ID NO: 15345 - DNA, 20 bp, Artificial Sequence
  Description of Artificial Sequence: Synthetic oligonucleotide
  Target: COL7A1; (-) strand; PAM type: NRG; PAM sequence: CGG
ctgatggctgtggagatggg

SEQ ID NO: 15346 - DNA, 20 bp, Artificial Sequence
  Description of Artificial Sequence: Synthetic oligonucleotide
  Target: COL7A1; (-) strand; PAM type: NRG; PAM sequence: GGG
gtgctgatggctgtggagat

SEQ ID NO: 15347 - DNA, 20 bp, Artificial Sequence
  Description of Artificial Sequence: Synthetic oligonucleotide
  Target: COL7A1; (-) strand; PAM type: NRG; PAM sequence: TGG
ggtgctgatggctgtggaga

SEQ ID NO: 15348 - DNA, 20 bp, Artificial Sequence
  Description of Artificial Sequence: Synthetic oligonucleotide
  Target: COL7A1; (-) strand; PAM type: NRG; PAM sequence: GAG
cataggtgctgatggctgtg

SEQ ID NO: 15349 - DNA, 20 bp, Artificial Sequence
  Description of Artificial Sequence: Synthetic oligonucleotide
  Target: COL7A1; (-) strand; PAM type: NRG; PAM sequence: TGG
ggcataggtgctgatggctg

SEQ ID NO: 15350 - DNA, 20 bp, Artificial Sequence
  Description of Artificial Sequence: Synthetic oligonucleotide
  Target: COL7A1; (-) strand; PAM type: NRG; PAM sequence: TGG
gggcagggcataggtgctga

SEQ ID NO: 15351 - DNA, 20 bp, Artificial Sequence
  Description of Artificial Sequence: Synthetic oligonucleotide
  Target: COL7A1; (-) strand; PAM type: NRG; PAM sequence: AGG
atagtgggagggcagggcat

SEQ ID NO: 15352 - DNA, 20 bp, Artificial Sequence
  Description of Artificial Sequence: Synthetic oligonucleotide
  Target: COL7A1; (-) strand; PAM type: NRG; PAM sequence: TAG
catagtgggagggcagggca

SEQ ID NO: 15353 - DNA, 20 bp, Artificial Sequence
  Description of Artificial Sequence: Synthetic oligonucleotide
  Target: COL7A1; (-) strand; PAM type: NRG; PAM sequence: GGG
ggtagcatagtgggagggca

SEQ ID NO: 15354 - DNA, 20 bp, Artificial Sequence
  Description of Artificial Sequence: Synthetic oligonucleotide
  Target: COL7A1; (-) strand; PAM type: NRG; PAM sequence: AGG
gggtagcatagtgggagggc

SEQ ID NO: 15355 - DNA, 20 bp, Artificial Sequence
  Description of Artificial Sequence: Synthetic oligonucleotide
  Target: COL7A1; (-) strand; PAM type: NRG; PAM sequence: CAG
ggggtagcatagtgggaggg

SEQ ID NO: 15356 - DNA, 20 bp, Artificial Sequence
  Description of Artificial Sequence: Synthetic oligonucleotide
  Target: COL7A1; (-) strand; PAM type: NRG; PAM sequence: GGG
gcaggggtagcatagtggga

SEQ ID NO: 15357 - DNA, 20 bp, Artificial Sequence
  Description of Artificial Sequence: Synthetic oligonucleotide
  Target: COL7A1; (-) strand; PAM type: NRG; PAM sequence: AGG
tgcaggggtagcatagtggg

SEQ ID NO: 15358 - DNA, 20 bp, Artificial Sequence
  Description of Artificial Sequence: Synthetic oligonucleotide
  Target: COL7A1; (-) strand; PAM type: NRG; PAM sequence: GAG
ctgcaggggtagcatagtgg

SEQ ID NO: 15359 - DNA, 20 bp, Artificial Sequence
  Description of Artificial Sequence: Synthetic oligonucleotide
  Target: COL7A1; (-) strand; PAM type: NRG; PAM sequence: GGG
acctgcaggggtagcatagt

SEQ ID NO: 15360 - DNA, 20 bp, Artificial Sequence
  Description of Artificial Sequence: Synthetic oligonucleotide
  Target: COL7A1; (-) strand; PAM type: NRG; PAM sequence: TGG
cacctgcaggggtagcatag

SEQ ID NO: 15361 - DNA, 20 bp, Artificial Sequence
  Description of Artificial Sequence: Synthetic oligonucleotide
  Target: COL7A1; (-) strand; PAM type: NRG; PAM sequence: TAG
tgtcacctgcaggggtagca

SEQ ID NO: 15362 - DNA, 20 bp, Artificial Sequence
  Description of Artificial Sequence: Synthetic oligonucleotide
  Target: COL7A1; (-) strand; PAM type: NRG; PAM sequence: TAG
gcagctgtcacctgcagggg

SEQ ID NO: 15363 - DNA, 20 bp, Artificial Sequence
  Description of Artificial Sequence: Synthetic oligonucleotide
  Target: COL7A1; (-) strand; PAM type: NRG; PAM sequence: GGG
taggcagctgtcacctgcag

SEQ ID NO: 15364 - DNA, 20 bp, Artificial Sequence
  Description of Artificial Sequence: Synthetic oligonucleotide
  Target: COL7A1; (-) strand; PAM type: NRG; PAM sequence: GGG
ctaggcagctgtcacctgca

SEQ ID NO: 15365 - DNA, 20 bp, Artificial Sequence
  Description of Artificial Sequence: Synthetic oligonucleotide
  Target: COL7A1; (-) strand; PAM type: NRG; PAM sequence: AGG
cctaggcagctgtcacctgc

SEQ ID NO: 15366 - DNA, 20 bp, Artificial Sequence
  Description of Artificial Sequence: Synthetic oligonucleotide
  Target: COL7A1; (-) strand; PAM type: NRG; PAM sequence: CAG
tcctaggcagctgtcacctg

SEQ ID NO: 15367 - DNA, 20 bp, Artificial Sequence
  Description of Artificial Sequence: Synthetic oligonucleotide
  Target: COL7A1; (-) strand; PAM type: NRG; PAM sequence: CAG
ggcatccctggtgtcctagg

SEQ ID NO: 15368 - DNA, 20 bp, Artificial Sequence
  Description of Artificial Sequence: Synthetic oligonucleotide
  Target: COL7A1; (-) strand; PAM type: NRG; PAM sequence: AGG
ataggcatccctggtgtcct

SEQ ID NO: 15369 - DNA, 20 bp, Artificial Sequence
  Description of Artificial Sequence: Synthetic oligonucleotide
  Target: COL7A1; (-) strand; PAM type: NRG; PAM sequence: TAG
tataggcatccctggtgtcc

SEQ ID NO: 15370 - DNA, 20 bp, Artificial Sequence
  Description of Artificial Sequence: Synthetic oligonucleotide
  Target: COL7A1; (-) strand; PAM type: NRG; PAM sequence: TGG
cctgctcctataggcatccc

SEQ ID NO: 15371 - DNA, 20 bp, Artificial Sequence
  Description of Artificial Sequence: Synthetic oligonucleotide
  Target: COL7A1; (-) strand; PAM type: NRG; PAM sequence: AGG
atagcgcagcctgctcctat

SEQ ID NO: 15372 - DNA, 20 bp, Artificial Sequence
  Description of Artificial Sequence: Synthetic oligonucleotide
  Target: COL7A1; (-) strand; PAM type: NRG; PAM sequence: TAG
catagcgcagcctgctccta

SEQ ID NO: 15373 - DNA, 20 bp, Artificial Sequence
  Description of Artificial Sequence: Synthetic oligonucleotide
  Target: COL7A1; (-) strand; PAM type: NRG; PAM sequence: CAG
ggttggggcctggcatagcg

SEQ ID NO: 15374 - DNA, 20 bp, Artificial Sequence
  Description of Artificial Sequence: Synthetic oligonucleotide
  Target: COL7A1; (-) strand; PAM type: NRG; PAM sequence: TAG
tgtagggttggggcctggca

SEQ ID NO: 15375 - DNA, 20 bp, Artificial Sequence
  Description of Artificial Sequence: Synthetic oligonucleotide
  Target: COL7A1; (-) strand; PAM type: NRG; PAM sequence: TGG
ggaggtgtagggttggggcc

SEQ ID NO: 15376 - DNA, 20 bp, Artificial Sequence
  Description of Artificial Sequence: Synthetic oligonucleotide
  Target: COL7A1; (-) strand; PAM type: NRG; PAM sequence: GGG
acctgggaggtgtagggttg

SEQ ID NO: 15377 - DNA, 20 bp, Artificial Sequence
  Description of Artificial Sequence: Synthetic oligonucleotide
  Target: COL7A1; (-) strand; PAM type: NRG; PAM sequence: GGG
cacctgggaggtgtagggtt

SEQ ID NO: 15378 - DNA, 20 bp, Artificial Sequence
  Description of Artificial Sequence: Synthetic oligonucleotide
  Target: COL7A1; (-) strand; PAM type: NRG; PAM sequence: TGG
acacctgggaggtgtagggt

SEQ ID NO: 15379 - DNA, 20 bp, Artificial Sequence
  Description of Artificial Sequence: Synthetic oligonucleotide
  Target: COL7A1; (-) strand; PAM type: NRG; PAM sequence: GGG
gcagacacctgggaggtgta

SEQ ID NO: 15380 - DNA, 20 bp, Artificial Sequence
  Description of Artificial Sequence: Synthetic oligonucleotide
  Target: COL7A1; (-) strand; PAM type: NRG; PAM sequence: AGG
ggcagacacctgggaggtgt

SEQ ID NO: 15381 - DNA, 20 bp, Artificial Sequence
  Description of Artificial Sequence: Synthetic oligonucleotide
  Target: COL7A1; (-) strand; PAM type: NRG; PAM sequence: TAG
tggcagacacctgggaggtg

SEQ ID NO: 15382 - DNA, 20 bp, Artificial Sequence
  Description of Artificial Sequence: Synthetic oligonucleotide
  Target: COL7A1; (-) strand; PAM type: NRG; PAM sequence: AGG
tggcctggcagacacctggg

SEQ ID NO: 15383 - DNA, 20 bp, Artificial Sequence
  Description of Artificial Sequence: Synthetic oligonucleotide
  Target: COL7A1; (-) strand; PAM type: NRG; PAM sequence: GAG
ttggcctggcagacacctgg

SEQ ID NO: 15384 - DNA, 20 bp, Artificial Sequence
  Description of Artificial Sequence: Synthetic oligonucleotide
  Target: COL7A1; (-) strand; PAM type: NRG; PAM sequence: GGG
tcttggcctggcagacacct

SEQ ID NO: 15385 - DNA, 20 bp, Artificial Sequence
  Description of Artificial Sequence: Synthetic oligonucleotide
  Target: COL7A1; (-) strand; PAM type: NRG; PAM sequence: TGG
gtcttggcctggcagacacc

SEQ ID NO: 15386 - DNA, 20 bp, Artificial Sequence
  Description of Artificial Sequence: Synthetic oligonucleotide
  Target: COL7A1; (-) strand; PAM type: NRG; PAM sequence: CAG
gttctggagtcttggcctgg

SEQ ID NO: 15387 - DNA, 20 bp, Artificial Sequence
  Description of Artificial Sequence: Synthetic oligonucleotide
  Target: COL7A1; (-) strand; PAM type: NRG; PAM sequence: TGG
gaggttctggagtcttggcc

SEQ ID NO: 15388 - DNA, 20 bp, Artificial Sequence
  Description of Artificial Sequence: Synthetic oligonucleotide
  Target: COL7A1; (-) strand; PAM type: NRG; PAM sequence: TGG
tgggagaggttctggagtct

SEQ ID NO: 15389 - DNA, 20 bp, Artificial Sequence
  Description of Artificial Sequence: Synthetic oligonucleotide
  Target: COL7A1; (-) strand; PAM type: NRG; PAM sequence: GAG
gacccctgggagaggttctg

SEQ ID NO: 15390 - DNA, 20 bp, Artificial Sequence
  Description of Artificial Sequence: Synthetic oligonucleotide
  Target: COL7A1; (-) strand; PAM type: NRG; PAM sequence: TGG
tggacccctgggagaggttc

SEQ ID NO: 15391 - DNA, 20 bp, Artificial Sequence
  Description of Artificial Sequence: Synthetic oligonucleotide
  Target: COL7A1; (-) strand; PAM type: NRG; PAM sequence: AGG
gtaacatggacccctgggag

SEQ ID NO: 15392 - DNA, 20 bp, Artificial Sequence
  Description of Artificial Sequence: Synthetic oligonucleotide
  Target: COL7A1; (-) strand; PAM type: NRG; PAM sequence: GAG
ggtaacatggacccctggga

SEQ ID NO: 15393 - DNA, 20 bp, Artificial Sequence
  Description of Artificial Sequence: Synthetic oligonucleotide
  Target: COL7A1; (-) strand; PAM type: NRG; PAM sequence: GAG
gcggtaacatggacccctgg

SEQ ID NO: 15394 - DNA, 20 bp, Artificial Sequence
  Description of Artificial Sequence: Synthetic oligonucleotide
  Target: COL7A1; (-) strand; PAM type: NRG; PAM sequence: GGG
ttgcggtaacatggacccct

SEQ ID NO: 15395 - DNA, 20 bp, Artificial Sequence
  Description of Artificial Sequence: Synthetic oligonucleotide
  Target: COL7A1; (-) strand; PAM type: NRG; PAM sequence: TGG
attgcggtaacatggacccc

SEQ ID NO: 15396 - DNA, 20 bp, Artificial Sequence
  Description of Artificial Sequence: Synthetic oligonucleotide
  Target: COL7A1; (-) strand; PAM type: NRG; PAM sequence: TGG
aaagccggattgcggtaaca

SEQ ID NO: 15397 - DNA, 20 bp, Artificial Sequence
  Description of Artificial Sequence: Synthetic oligonucleotide
  Target: COL7A1; (-) strand; PAM type: NRG; PAM sequence: CGG
tgaatgggaaagccggattg

SEQ ID NO: 15398 - DNA, 20 bp, Artificial Sequence
  Description of Artificial Sequence: Synthetic oligonucleotide
  Target: COL7A1; (-) strand; PAM type: NRG; PAM sequence: CGG
ccctggctgaatgggaaagc

SEQ ID NO: 15399 - DNA, 20 bp, Artificial Sequence
  Description of Artificial Sequence: Synthetic oligonucleotide
  Target: COL7A1; (-) strand; PAM type: NRG; PAM sequence: AAG
atccccctggctgaatggga

SEQ ID NO: 15400 - DNA, 20 bp, Artificial Sequence
  Description of Artificial Sequence: Synthetic oligonucleotide
  Target: COL7A1; (-) strand; PAM type: NRG; PAM sequence: GGG
ccgcatccccctggctgaat

SEQ ID NO: 15401 - DNA, 20 bp, Artificial Sequence
  Description of Artificial Sequence: Synthetic oligonucleotide
  Target: COL7A1; (-) strand; PAM type: NRG; PAM sequence: TGG
gccgcatccccctggctgaa

SEQ ID NO: 15402 - DNA, 20 bp, Artificial Sequence
  Description of Artificial Sequence: Synthetic oligonucleotide
  Target: COL7A1; (-) strand; PAM type: NRG; PAM sequence: TGG
ctatggccgccgcatccccc

SEQ ID NO: 15403 - DNA, 20 bp, Artificial Sequence
  Description of Artificial Sequence: Synthetic oligonucleotide
  Target: COL7A1; (-) strand; PAM type: NRG; PAM sequence: TGG
ggacgcagcctcctgaccta

SEQ ID NO: 15404 - DNA, 20 bp, Artificial Sequence
  Description of Artificial Sequence: Synthetic oligonucleotide
  Target: COL7A1; (-) strand; PAM type: NRG; PAM sequence: CAG
gtgtgtgaggacatcggacg

SEQ ID NO: 15405 - DNA, 20 bp, Artificial Sequence
  Description of Artificial Sequence: Synthetic oligonucleotide
  Target: COL7A1; (-) strand; PAM type: NRG; PAM sequence: CGG
actcctgtgtgtgaggacat

SEQ ID NO: 15406 - DNA, 20 bp, Artificial Sequence
  Description of Artificial Sequence: Synthetic oligonucleotide
  Target: COL7A1; (-) strand; PAM type: NRG; PAM sequence: AGG
aggcactactcctgtgtgtg

SEQ ID NO: 15407 - DNA, 20 bp, Artificial Sequence
  Description of Artificial Sequence: Synthetic oligonucleotide
  Target: COL7A1; (-) strand; PAM type: NRG; PAM sequence: GAG
aaggcactactcctgtgtgt

SEQ ID NO: 15408 - DNA, 20 bp, Artificial Sequence
  Description of Artificial Sequence: Synthetic oligonucleotide
  Target: COL7A1; (-) strand; PAM type: NRG; PAM sequence: AGG
gagccttctctcacccttaa

SEQ ID NO: 15409 - DNA, 20 bp, Artificial Sequence
  Description of Artificial Sequence: Synthetic oligonucleotide
  Target: COL7A1; (-) strand; PAM type: NRG; PAM sequence: AAG
tgagccttctctcaccctta

SEQ ID NO: 15410 - DNA, 20 bp, Artificial Sequence
  Description of Artificial Sequence: Synthetic oligonucleotide
  Target: COL7A1; (-) strand; PAM type: NRG; PAM sequence: GAG
attgggctgggtggacctct

SEQ ID NO: 15411 - DNA, 20 bp, Artificial Sequence
  Description of Artificial Sequence: Synthetic oligonucleotide
  Target: COL7A1; (-) strand; PAM type: NRG; PAM sequence: TGG
gggtccaggattgggctggg

SEQ ID NO: 15412 - DNA, 20 bp, Artificial Sequence
  Description of Artificial Sequence: Synthetic oligonucleotide
  Target: COL7A1; (-) strand; PAM type: NRG; PAM sequence: GGG
tgtgggtccaggattgggct

SEQ ID NO: 15413 - DNA, 20 bp, Artificial Sequence
  Description of Artificial Sequence: Synthetic oligonucleotide
  Target: COL7A1; (-) strand; PAM type: NRG; PAM sequence: TGG
ctgtgggtccaggattgggc

SEQ ID NO: 15414 - DNA, 20 bp, Artificial Sequence
  Description of Artificial Sequence: Synthetic oligonucleotide
  Target: COL7A1; (-) strand; PAM type: NRG; PAM sequence: GGG
gtacctgtgggtccaggatt

SEQ ID NO: 15415 - DNA, 20 bp, Artificial Sequence
  Description of Artificial Sequence: Synthetic oligonucleotide
  Target: COL7A1; (-) strand; PAM type: NRG; PAM sequence: TGG
tgtacctgtgggtccaggat

SEQ ID NO: 15416 - DNA, 20 bp, Artificial Sequence
  Description of Artificial Sequence: Synthetic oligonucleotide
  Target: COL7A1; (-) strand; PAM type: NRG; PAM sequence: AGG
gtttgtgtacctgtgggtcc

SEQ ID NO: 15417 - DNA, 20 bp, Artificial Sequence
  Description of Artificial Sequence: Synthetic oligonucleotide
  Target: COL7A1; (-) strand; PAM type: NRG; PAM sequence: CAG
tgtttgtgtacctgtgggtc

SEQ ID NO: 15418 - DNA, 20 bp, Artificial Sequence
  Description of Artificial Sequence: Synthetic oligonucleotide
  Target: COL7A1; (-) strand; PAM type: NRG; PAM sequence: GGG
gagattgtttgtgtacctgt

SEQ ID NO: 15419 - DNA, 20 bp, Artificial Sequence
  Description of Artificial Sequence: Synthetic oligonucleotide
  Target: COL7A1; (-) strand; PAM type: NRG; PAM sequence: TGG
ggagattgtttgtgtacctg

SEQ ID NO: 15420 - DNA, 20 bp, Artificial Sequence
  Description of Artificial Sequence: Synthetic oligonucleotide
  Target: COL7A1; (-) strand; PAM type: NRG; PAM sequence: GAG
tccttgtcaacctgaggctg

SEQ ID NO: 15421 - DNA, 20 bp, Artificial Sequence
  Description of Artificial Sequence: Synthetic oligonucleotide
  Target: COL7A1; (-) strand; PAM type: NRG; PAM sequence: TGG
ggtccttgtcaacctgaggc

SEQ ID NO: 15422 - DNA, 20 bp, Artificial Sequence
  Description of Artificial Sequence: Synthetic oligonucleotide
  Target: COL7A1; (-) strand; PAM type: NRG; PAM sequence: AGG
gggaggtccttgtcaacctg

SEQ ID NO: 15423 - DNA, 20 bp, Artificial Sequence
  Description of Artificial Sequence: Synthetic oligonucleotide
  Target: COL7A1; (-) strand; PAM type: NRG; PAM sequence: GAG
agggaggtccttgtcaacct

SEQ ID NO: 15424 - DNA, 20 bp, Artificial Sequence
  Description of Artificial Sequence: Synthetic oligonucleotide
  Target: COL7A1; (-) strand; PAM type: NRG; PAM sequence: AGG
gagtcagcatgaggtcaggg

SEQ ID NO: 15425 - DNA, 20 bp, Artificial Sequence
  Description of Artificial Sequence: Synthetic oligonucleotide
  Target: COL7A1; (-) strand; PAM type: NRG; PAM sequence: GAG
tgagtcagcatgaggtcagg

SEQ ID NO: 15426 - DNA, 20 bp, Artificial Sequence
  Description of Artificial Sequence: Synthetic oligonucleotide
  Target: COL7A1; (+) strand; PAM type: NRG; PAM sequence: TGG
ggggtagaggacagctggcc

SEQ ID NO: 15427 - DNA, 20 bp, Artificial Sequence
  Description of Artificial Sequence: Synthetic oligonucleotide
  Target: COL7A1; (+) strand; PAM type: NRG; PAM sequence: GGG
gggtagaggacagctggcct

SEQ ID NO: 15428 - DNA, 20 bp, Artificial Sequence
  Description of Artificial Sequence: Synthetic oligonucleotide
  Target: COL7A1; (+) strand; PAM type: NRG; PAM sequence: CAG
tagaggacagctggcctggg

SEQ ID NO: 15429 - DNA, 20 bp, Artificial Sequence
  Description of Artificial Sequence: Synthetic oligonucleotide
  Target: COL7A1; (+) strand; PAM type: NRG; PAM sequence: AGG
agaggacagctggcctgggc

SEQ ID NO: 15430 - DNA, 20 bp, Artificial Sequence
  Description of Artificial Sequence: Synthetic oligonucleotide
  Target: COL7A1; (+) strand; PAM type: NRG; PAM sequence: GGG
gaggacagctggcctgggca

SEQ ID NO: 15431 - DNA, 20 bp, Artificial Sequence
  Description of Artificial Sequence: Synthetic oligonucleotide
  Target: COL7A1; (+) strand; PAM type: NRG; PAM sequence: GGG
aggacagctggcctgggcag

SEQ ID NO: 15432 - DNA, 20 bp, Artificial Sequence
  Description of Artificial Sequence: Synthetic oligonucleotide
  Target: COL7A1; (+) strand; PAM type: NRG; PAM sequence: GGG
ggacagctggcctgggcagg

SEQ ID NO: 15433 - DNA, 20 bp, Artificial Sequence
  Description of Artificial Sequence: Synthetic oligonucleotide
  Target: COL7A1; (+) strand; PAM type: NRG; PAM sequence: CAG
agctggcctgggcagggggc

SEQ ID NO: 15434 - DNA, 20 bp, Artificial Sequence
  Description of Artificial Sequence: Synthetic oligonucleotide
  Target: COL7A1; (+) strand; PAM type: NRG; PAM sequence: AGG
gctggcctgggcagggggcc

SEQ ID NO: 15435 - DNA, 20 bp, Artificial Sequence
  Description of Artificial Sequence: Synthetic oligonucleotide
  Target: COL7A1; (+) strand; PAM type: NRG; PAM sequence: GGG
ctggcctgggcagggggcca

SEQ ID NO: 15436 - DNA, 20 bp, Artificial Sequence
  Description of Artificial Sequence: Synthetic oligonucleotide
  Target: COL7A1; (+) strand; PAM type: NRG; PAM sequence: TGG
cagggggccagggctatctc

SEQ ID NO: 15437 - DNA, 20 bp, Artificial Sequence
  Description of Artificial Sequence: Synthetic oligonucleotide
  Target: COL7A1; (+) strand; PAM type: NRG; PAM sequence: GGG
agggggccagggctatctct

SEQ ID NO: 15438 - DNA, 20 bp, Artificial Sequence
  Description of Artificial Sequence: Synthetic oligonucleotide
  Target: COL7A1; (+) strand; PAM type: NRG; PAM sequence: AAG
gggccagggctatctctggg

SEQ ID NO: 15439 - DNA, 20 bp, Artificial Sequence
  Description of Artificial Sequence: Synthetic oligonucleotide
  Target: COL7A1; (+) strand; PAM type: NRG; PAM sequence: AGG
ggccagggctatctctggga

SEQ ID NO: 15440 - DNA, 20 bp, Artificial Sequence
  Description of Artificial Sequence: Synthetic oligonucleotide
  Target: COL7A1; (+) strand; PAM type: NRG; PAM sequence: CAG
tgggaaggcatcctcacacc

SEQ ID NO: 15441 - DNA, 20 bp, Artificial Sequence
  Description of Artificial Sequence: Synthetic oligonucleotide
  Target: COL7A1; (+) strand; PAM type: NRG; PAM sequence: CAG
aaggcatcctcacacccaga

SEQ ID NO: 15442 - DNA, 20 bp, Artificial Sequence
  Description of Artificial Sequence: Synthetic oligonucleotide
  Target: COL7A1; (+) strand; PAM type: NRG; PAM sequence: AGG
aggcatcctcacacccagac

SEQ ID NO: 15443 - DNA, 20 bp, Artificial Sequence
  Description of Artificial Sequence: Synthetic oligonucleotide
  Target: COL7A1; (+) strand; PAM type: NRG; PAM sequence: GAG
tcctcacacccagacaggat

SEQ ID NO: 15444 - DNA, 20 bp, Artificial Sequence
  Description of Artificial Sequence: Synthetic oligonucleotide
  Target: COL7A1; (+) strand; PAM type: NRG; PAM sequence: TGG
acacccagacaggatgagcc

SEQ ID NO: 15445 - DNA, 20 bp, Artificial Sequence
  Description of Artificial Sequence: Synthetic oligonucleotide
  Target: COL7A1; (+) strand; PAM type: NRG; PAM sequence: CAG
gacaggatgagcctggttcc

SEQ ID NO: 15446 - DNA, 20 bp, Artificial Sequence
  Description of Artificial Sequence: Synthetic oligonucleotide
  Target: COL7A1; (+) strand; PAM type: NRG; PAM sequence: AGG
acaggatgagcctggttccc

SEQ ID NO: 15447 - DNA, 20 bp, Artificial Sequence
  Description of Artificial Sequence: Synthetic oligonucleotide
  Target: COL7A1; (+) strand; PAM type: NRG; PAM sequence: CAG
ctggttcccaggaaatgcaa

SEQ ID NO: 15448 - DNA, 20 bp, Artificial Sequence
  Description of Artificial Sequence: Synthetic oligonucleotide
  Target: COL7A1; (+) strand; PAM type: NRG; PAM sequence: CAG
ctgcaccttcctctcttccc

SEQ ID NO: 15449 - DNA, 20 bp, Artificial Sequence
  Description of Artificial Sequence: Synthetic oligonucleotide
  Target: COL7A1; (+) strand; PAM type: NRG; PAM sequence: AAG
accttcctctcttccccaga

SEQ ID NO: 15450 - DNA, 20 bp, Artificial Sequence
  Description of Artificial Sequence: Synthetic oligonucleotide
  Target: COL7A1; (+) strand; PAM type: NRG; PAM sequence: TGG
ttccccagaaagtctacccg

SEQ ID NO: 15451 - DNA, 20 bp, Artificial Sequence
  Description of Artificial Sequence: Synthetic oligonucleotide
  Target: COL7A1; (+) strand; PAM type: NRG; PAM sequence: CAG
aagtctacccgtggctgacc

SEQ ID NO: 15452 - DNA, 20 bp, Artificial Sequence
  Description of Artificial Sequence: Synthetic oligonucleotide
  Target: COL7A1; (+) strand; PAM type: NRG; PAM sequence: AGG
agtctacccgtggctgaccc

SEQ ID NO: 15453 - DNA, 20 bp, Artificial Sequence
  Description of Artificial Sequence: Synthetic oligonucleotide
  Target: COL7A1; (+) strand; PAM type: NRG; PAM sequence: AAG
tgacccaggcaccctccttc

SEQ ID NO: 15454 - DNA, 20 bp, Artificial Sequence
  Description of Artificial Sequence: Synthetic oligonucleotide
  Target: COL7A1; (+) strand; PAM type: NRG; PAM sequence: AGG
gacccaggcaccctccttca

SEQ ID NO: 15455 - DNA, 20 bp, Artificial Sequence
  Description of Artificial Sequence: Synthetic oligonucleotide
  Target: COL7A1; (+) strand; PAM type: NRG; PAM sequence: CAG
ctccttcaaggccctatgtc

SEQ ID NO: 15456 - DNA, 20 bp, Artificial Sequence
  Description of Artificial Sequence: Synthetic oligonucleotide
  Target: COL7A1; (+) strand; PAM type: NRG; PAM sequence: TGG
ttcaaggccctatgtccagc

SEQ ID NO: 15457 - DNA, 20 bp, Artificial Sequence
  Description of Artificial Sequence: Synthetic oligonucleotide
  Target: COL7A1; (+) strand; PAM type: NRG; PAM sequence: AAG
aaggccctatgtccagctgg

SEQ ID NO: 15458 - DNA, 20 bp, Artificial Sequence
  Description of Artificial Sequence: Synthetic oligonucleotide
  Target: COL7A1; (+) strand; PAM type: NRG; PAM sequence: AGG
aggccctatgtccagctgga

SEQ ID NO: 15459 - DNA, 20 bp, Artificial Sequence
  Description of Artificial Sequence: Synthetic oligonucleotide
  Target: COL7A1; (+) strand; PAM type: NRG; PAM sequence: CAG
tatgtccagctggaaggcca

SEQ ID NO: 15460 - DNA, 20 bp, Artificial Sequence
  Description of Artificial Sequence: Synthetic oligonucleotide
  Target: COL7A1; (+) strand; PAM type: NRG; PAM sequence: AGG
atgtccagctggaaggccac

SEQ ID NO: 15461 - DNA, 20 bp, Artificial Sequence
  Description of Artificial Sequence: Synthetic oligonucleotide
  Target: COL7A1; (+) strand; PAM type: NRG; PAM sequence: CAG
ggaaggccacaggtcaacat

SEQ ID NO: 15462 - DNA, 20 bp, Artificial Sequence
  Description of Artificial Sequence: Synthetic oligonucleotide
  Target: COL7A1; (+) strand; PAM type: NRG; PAM sequence: AGG
gaaggccacaggtcaacatc

SEQ ID NO: 15463 - DNA, 20 bp, Artificial Sequence
  Description of Artificial Sequence: Synthetic oligonucleotide
  Target: COL7A1; (+) strand; PAM type: NRG; PAM sequence: GAG
aggccacaggtcaacatcag

SEQ ID NO: 15464 - DNA, 20 bp, Artificial Sequence
  Description of Artificial Sequence: Synthetic oligonucleotide
  Target: COL7A1; (+) strand; PAM type: NRG; PAM sequence: TGG
ggtcaacatcaggagatgcc

SEQ ID NO: 15465 - DNA, 20 bp, Artificial Sequence
  Description of Artificial Sequence: Synthetic oligonucleotide
  Target: COL7A1; (+) strand; PAM type: NRG; PAM sequence: GGG
gtcaacatcaggagatgcct

SEQ ID NO: 15466 - DNA, 20 bp, Artificial Sequence
  Description of Artificial Sequence: Synthetic oligonucleotide
  Target: COL7A1; (+) strand; PAM type: NRG; PAM sequence: GGG
tcaacatcaggagatgcctg

SEQ ID NO: 15467 - DNA, 20 bp, Artificial Sequence
  Description of Artificial Sequence: Synthetic oligonucleotide
  Target: COL7A1; (+) strand; PAM type: NRG; PAM sequence: AAG
gatgcctggggttcctcccc

SEQ ID NO: 15468 - DNA, 20 bp, Artificial Sequence
  Description of Artificial Sequence: Synthetic oligonucleotide
  Target: COL7A1; (+) strand; PAM type: NRG; PAM sequence: AGG
atgcctggggttcctcccca

SEQ ID NO: 15469 - DNA, 20 bp, Artificial Sequence
  Description of Artificial Sequence: Synthetic oligonucleotide
  Target: COL7A1; (+) strand; PAM type: NRG; PAM sequence: GAG
ccaccgtccacatctgctct

SEQ ID NO: 15470 - DNA, 20 bp, Artificial Sequence
  Description of Artificial Sequence: Synthetic oligonucleotide
  Target: COL7A1; (+) strand; PAM type: NRG; PAM sequence: AGG
caccgtccacatctgctctg

SEQ ID NO: 15471 - DNA, 20 bp, Artificial Sequence
  Description of Artificial Sequence: Synthetic oligonucleotide
  Target: COL7A1; (+) strand; PAM type: NRG; PAM sequence: TGG
attctccatctcccctccca

SEQ ID NO: 15472 - DNA, 20 bp, Artificial Sequence
  Description of Artificial Sequence: Synthetic oligonucleotide
  Target: COL7A1; (+) strand; PAM type: NRG; PAM sequence: CAG
cctcccatggccctgtttgt

SEQ ID NO: 15473 - DNA, 20 bp, Artificial Sequence
  Description of Artificial Sequence: Synthetic oligonucleotide
  Target: COL7A1; (+) strand; PAM type: NRG; PAM sequence: AGG
ctcccatggccctgtttgtc

SEQ ID NO: 15474 - DNA, 20 bp, Artificial Sequence
  Description of Artificial Sequence: Synthetic oligonucleotide
  Target: COL7A1; (+) strand; PAM type: NRG; PAM sequence: TGG
ccatggccctgtttgtcagg

SEQ ID NO: 15475 - DNA, 20 bp, Artificial Sequence
  Description of Artificial Sequence: Synthetic oligonucleotide
  Target: COL7A1; (+) strand; PAM type: NRG; PAM sequence: GGG
catggccctgtttgtcaggt

SEQ ID NO: 15476 - DNA, 20 bp, Artificial Sequence
  Description of Artificial Sequence: Synthetic oligonucleotide
  Target: COL7A1; (+) strand; PAM type: NRG; PAM sequence: GAG
tgtttgtcaggtgggaaact

SEQ ID NO: 15477 - DNA, 20 bp, Artificial Sequence
  Description of Artificial Sequence: Synthetic oligonucleotide
  Target: COL7A1; (+) strand; PAM type: NRG; PAM sequence: AGG
gtttgtcaggtgggaaactg

SEQ ID NO: 15478 - DNA, 20 bp, Artificial Sequence
  Description of Artificial Sequence: Synthetic oligonucleotide
  Target: COL7A1; (+) strand; PAM type: NRG; PAM sequence: GGG
tttgtcaggtgggaaactga

SEQ ID NO: 15479 - DNA, 20 bp, Artificial Sequence
  Description of Artificial Sequence: Synthetic oligonucleotide
  Target: COL7A1; (+) strand; PAM type: NRG; PAM sequence: CAG
tcaggtgggaaactgagggt

SEQ ID NO: 15480 - DNA, 20 bp, Artificial Sequence
  Description of Artificial Sequence: Synthetic oligonucleotide
  Target: COL7A1; (+) strand; PAM type: NRG; PAM sequence: AGG
caggtgggaaactgagggtc

SEQ ID NO: 15481 - DNA, 20 bp, Artificial Sequence
  Description of Artificial Sequence: Synthetic oligonucleotide
  Target: COL7A1; (+) strand; PAM type: NRG; PAM sequence: AAG
gtgggaaactgagggtcagg

SEQ ID NO: 15482 - DNA, 20 bp, Artificial Sequence
  Description of Artificial Sequence: Synthetic oligonucleotide
  Target: COL7A1; (+) strand; PAM type: NRG; PAM sequence: GAG
gggaaactgagggtcaggaa

SEQ ID NO: 15483 - DNA, 20 bp, Artificial Sequence
  Description of Artificial Sequence: Synthetic oligonucleotide
  Target: COL7A1; (+) strand; PAM type: NRG; PAM sequence: AGG
ggaaactgagggtcaggaag

SEQ ID NO: 15484 - DNA, 20 bp, Artificial Sequence
  Description of Artificial Sequence: Synthetic oligonucleotide
  Target: COL7A1; (+) strand; PAM type: NRG; PAM sequence: GGG
gaaactgagggtcaggaaga

SEQ ID NO: 15485 - DNA, 20 bp, Artificial Sequence
  Description of Artificial Sequence: Synthetic oligonucleotide
  Target: COL7A1; (+) strand; PAM type: NRG; PAM sequence: GAG
aactgagggtcaggaagagg

SEQ ID NO: 15486 - DNA, 20 bp, Artificial Sequence
  Description of Artificial Sequence: Synthetic oligonucleotide
  Target: COL7A1; (+) strand; PAM type: NRG; PAM sequence: AAG
tgagggtcaggaagagggag

SEQ ID NO: 15487 - DNA, 20 bp, Artificial Sequence
  Description of Artificial Sequence: Synthetic oligonucleotide
  Target: COL7A1; (+) strand; PAM type: NRG; PAM sequence: AGG
gagggtcaggaagagggaga

SEQ ID NO: 15488 - DNA, 20 bp, Artificial Sequence
  Description of Artificial Sequence: Synthetic oligonucleotide
  Target: COL7A1; (+) strand; PAM type: NRG; PAM sequence: GGG
agggtcaggaagagggagaa

SEQ ID NO: 15489 - DNA, 20 bp, Artificial Sequence
  Description of Artificial Sequence: Synthetic oligonucleotide
  Target: COL7A1; (+) strand; PAM type: NRG; PAM sequence: AAG
aggaagagggagaagggtcc

SEQ ID NO: 15490 - DNA, 20 bp, Artificial Sequence
  Description of Artificial Sequence: Synthetic oligonucleotide
  Target: COL7A1; (+) strand; PAM type: NRG; PAM sequence: AAG
gagaagggtccaagatcaca

SEQ ID NO: 15491 - DNA, 20 bp, Artificial Sequence
  Description of Artificial Sequence: Synthetic oligonucleotide
  Target: COL7A1; (+) strand; PAM type: NRG; PAM sequence: GAG
agggtccaagatcacaaagc

SEQ ID NO: 15492 - DNA, 20 bp, Artificial Sequence
  Description of Artificial Sequence: Synthetic oligonucleotide
  Target: COL7A1; (+) strand; PAM type: NRG; PAM sequence: CAG
aagatcacaaagcgagtcca

SEQ ID NO: 15493 - DNA, 20 bp, Artificial Sequence
  Description of Artificial Sequence: Synthetic oligonucleotide
  Target: COL7A1; (+) strand; PAM type: NRG; PAM sequence: CAG
cacaaagcgagtccacagtg

SEQ ID NO: 15494 - DNA, 20 bp, Artificial Sequence
  Description of Artificial Sequence: Synthetic oligonucleotide
  Target: COL7A1; (+) strand; PAM type: NRG; PAM sequence: TGG
agcgagtccacagtgcagca

SEQ ID NO: 15495 - DNA, 20 bp, Artificial Sequence
  Description of Artificial Sequence: Synthetic oligonucleotide
  Target: COL7A1; (+) strand; PAM type: NRG; PAM sequence: CAG
tccacagtgcagcatggact

SEQ ID NO: 15496 - DNA, 20 bp, Artificial Sequence
  Description of Artificial Sequence: Synthetic oligonucleotide
  Target: COL7A1; (+) strand; PAM type: NRG; PAM sequence: CAG
catggactcagctcaactcc

SEQ ID NO: 15497 - DNA, 20 bp, Artificial Sequence
  Description of Artificial Sequence: Synthetic oligonucleotide
  Target: COL7A1; (+) strand; PAM type: NRG; PAM sequence: CAG
cagctcaactcccagccttc

SEQ ID NO: 15498 - DNA, 20 bp, Artificial Sequence
  Description of Artificial Sequence: Synthetic oligonucleotide
  Target: COL7A1; (+) strand; PAM type: NRG; PAM sequence: CAG
agaccttgcctgccacacta

SEQ ID NO: 15499 - DNA, 20 bp, Artificial Sequence
  Description of Artificial Sequence: Synthetic oligonucleotide
  Target: COL7A1; (+) strand; PAM type: NRG; PAM sequence: TGG
ccttgcctgccacactacag

SEQ ID NO: 15500 - DNA, 20 bp, Artificial Sequence
  Description of Artificial Sequence: Synthetic oligonucleotide
  Target: COL7A1; (+) strand; PAM type: NRG; PAM sequence: CAG
cacactacagtggaatcgca

SEQ ID NO: 15501 - DNA, 20 bp, Artificial Sequence
  Description of Artificial Sequence: Synthetic oligonucleotide
  Target: COL7A1; (+) strand; PAM type: NRG; PAM sequence: TGG
actcccctgtgtcctctcca

SEQ ID NO: 15502 - DNA, 20 bp, Artificial Sequence
  Description of Artificial Sequence: Synthetic oligonucleotide
  Target: COL7A1; (+) strand; PAM type: NRG; PAM sequence: GAG
tcccctgtgtcctctccatg

SEQ ID NO: 15503 - DNA, 20 bp, Artificial Sequence
  Description of Artificial Sequence: Synthetic oligonucleotide
  Target: COL7A1; (+) strand; PAM type: NRG; PAM sequence: CAG
tctccatggagatgctgtcc

SEQ ID NO: 15504 - DNA, 20 bp, Artificial Sequence
  Description of Artificial Sequence: Synthetic oligonucleotide
  Target: COL7A1; (+) strand; PAM type: NRG; PAM sequence: CAG
tgtcccagcgtctgctctct

SEQ ID NO: 15505 - DNA, 20 bp, Artificial Sequence
  Description of Artificial Sequence: Synthetic oligonucleotide
  Target: COL7A1; (+) strand; PAM type: NRG; PAM sequence: CAG
agcgtctgctctctcagcat

SEQ ID NO: 15506 - DNA, 20 bp, Artificial Sequence
  Description of Artificial Sequence: Synthetic oligonucleotide
  Target: COL7A1; (+) strand; PAM type: NRG; PAM sequence: CGG
gtctgctctctcagcatcag

SEQ ID NO: 15507 - DNA, 20 bp, Artificial Sequence
  Description of Artificial Sequence: Synthetic oligonucleotide
  Target: COL7A1; (+) strand; PAM type: NRG; PAM sequence: CGG
tctcagcatcagcggatgcc

SEQ ID NO: 15508 - DNA, 20 bp, Artificial Sequence
  Description of Artificial Sequence: Synthetic oligonucleotide
  Target: COL7A1; (+) strand; PAM type: NRG; PAM sequence: TAG
cagcatcagcggatgcccgg

SEQ ID NO: 15509 - DNA, 20 bp, Artificial Sequence
  Description of Artificial Sequence: Synthetic oligonucleotide
  Target: COL7A1; (+) strand; PAM type: NRG; PAM sequence: TGG
cggatgcccggtagaatctc

SEQ ID NO: 15510 - DNA, 20 bp, Artificial Sequence
  Description of Artificial Sequence: Synthetic oligonucleotide
  Target: COL7A1; (+) strand; PAM type: NRG; PAM sequence: TGG
ggtagaatctctggccctca

SEQ ID NO: 15511 - DNA, 20 bp, Artificial Sequence
  Description of Artificial Sequence: Synthetic oligonucleotide
  Target: COL7A1; (+) strand; PAM type: NRG; PAM sequence: CAG
cctcatggctttttcctcct

SEQ ID NO: 15512 - DNA, 20 bp, Artificial Sequence
  Description of Artificial Sequence: Synthetic oligonucleotide
  Target: COL7A1; (+) strand; PAM type: NRG; PAM sequence: AAG
ttcctcctcagtatatccga

SEQ ID NO: 15513 - DNA, 20 bp, Artificial Sequence
  Description of Artificial Sequence: Synthetic oligonucleotide
  Target: COL7A1; (+) strand; PAM type: NRG; PAM sequence: GAG
tcctcagtatatccgaaagt

SEQ ID NO: 15514 - DNA, 20 bp, Artificial Sequence
  Description of Artificial Sequence: Synthetic oligonucleotide
  Target: COL7A1; (+) strand; PAM type: NRG; PAM sequence: CAG
cagtatatccgaaagtgagc

SEQ ID NO: 15515 - DNA, 20 bp, Artificial Sequence
  Description of Artificial Sequence: Synthetic oligonucleotide
  Target: COL7A1; (+) strand; PAM type: NRG; PAM sequence: CAG
gtgagccagctgttctgtcc

SEQ ID NO: 15516 - DNA, 20 bp, Artificial Sequence
  Description of Artificial Sequence: Synthetic oligonucleotide
  Target: COL7A1; (+) strand; PAM type: NRG; PAM sequence: AGG
tgagccagctgttctgtccc

SEQ ID NO: 15517 - DNA, 20 bp, Artificial Sequence
  Description of Artificial Sequence: Synthetic oligonucleotide
  Target: COL7A1; (+) strand; PAM type: NRG; PAM sequence: TGG
cagctgttctgtcccaggcg

SEQ ID NO: 15518 - DNA, 20 bp, Artificial Sequence
  Description of Artificial Sequence: Synthetic oligonucleotide
  Target: COL7A1; (+) strand; PAM type: NRG; PAM sequence: GGG
agctgttctgtcccaggcgt

SEQ ID NO: 15519 - DNA, 20 bp, Artificial Sequence
  Description of Artificial Sequence: Synthetic oligonucleotide
  Target: COL7A1; (+) strand; PAM type: NRG; PAM sequence: AAG
tgttctgtcccaggcgtggg

SEQ ID NO: 15520 - DNA, 20 bp, Artificial Sequence
  Description of Artificial Sequence: Synthetic oligonucleotide
  Target: COL7A1; (+) strand; PAM type: NRG; PAM sequence: TGG
cccaggcgtgggaagtatgc

SEQ ID NO: 15521 - DNA, 20 bp, Artificial Sequence
  Description of Artificial Sequence: Synthetic oligonucleotide
  Target: COL7A1; (+) strand; PAM type: NRG; PAM sequence: GGG
ccaggcgtgggaagtatgct

SEQ ID NO: 15522 - DNA, 20 bp, Artificial Sequence
  Description of Artificial Sequence: Synthetic oligonucleotide
  Target: COL7A1; (+) strand; PAM type: NRG; PAM sequence: CAG
acgtgtgaacatgttctgct

SEQ ID NO: 15523 - DNA, 20 bp, Artificial Sequence
  Description of Artificial Sequence: Synthetic oligonucleotide
  Target: COL7A1; (+) strand; PAM type: NRG; PAM sequence: TGG
gcctctgcccaccatgaacc

SEQ ID NO: 15524 - DNA, 20 bp, Artificial Sequence
  Description of Artificial Sequence: Synthetic oligonucleotide
  Target: COL7A1; (+) strand; PAM type: NRG; PAM sequence: TGG
ctgcccaccatgaacctggc

SEQ ID NO: 15525 - DNA, 20 bp, Artificial Sequence
  Description of Artificial Sequence: Synthetic oligonucleotide
  Target: COL7A1; (+) strand; PAM type: NRG; PAM sequence: TGG
gaacctggctggcctgaccc

SEQ ID NO: 15526 - DNA, 20 bp, Artificial Sequence
  Description of Artificial Sequence: Synthetic oligonucleotide
  Target: COL7A1; (+) strand; PAM type: NRG; PAM sequence: TGG
ctggctggcctgaccctggt

SEQ ID NO: 15527 - DNA, 20 bp, Artificial Sequence
  Description of Artificial Sequence: Synthetic oligonucleotide
  Target: COL7A1; (+) strand; PAM type: NRG; PAM sequence: CAG
gcctgaccctggttggctcc

SEQ ID NO: 15528 - DNA, 20 bp, Artificial Sequence
  Description of Artificial Sequence: Synthetic oligonucleotide
  Target: COL7A1; (+) strand; PAM type: NRG; PAM sequence: AGG
cctgaccctggttggctccc

SEQ ID NO: 15529 - DNA, 20 bp, Artificial Sequence
  Description of Artificial Sequence: Synthetic oligonucleotide
  Target: COL7A1; (+) strand; PAM type: NRG; PAM sequence: GGG
ctgaccctggttggctccca

SEQ ID NO: 15530 - DNA, 20 bp, Artificial Sequence
  Description of Artificial Sequence: Synthetic oligonucleotide
  Target: COL7A1; (+) strand; PAM type: NRG; PAM sequence: TGG
gtgccctctgcactgaccac

SEQ ID NO: 15531 - DNA, 20 bp, Artificial Sequence
  Description of Artificial Sequence: Synthetic oligonucleotide
  Target: COL7A1; (+) strand; PAM type: NRG; PAM sequence: CAG
ctgaccactggacttcctcc

SEQ ID NO: 15532 - DNA, 20 bp, Artificial Sequence
  Description of Artificial Sequence: Synthetic oligonucleotide
  Target: COL7A1; (+) strand; PAM type: NRG; PAM sequence: CAG
tggacttcctcccagtgtcc

SEQ ID NO: 15533 - DNA, 20 bp, Artificial Sequence
  Description of Artificial Sequence: Synthetic oligonucleotide
  Target: COL7A1; (+) strand; PAM type: NRG; PAM sequence: TAG
ttcctcccagtgtcccagcc

SEQ ID NO: 15534 - DNA, 20 bp, Artificial Sequence
  Description of Artificial Sequence: Synthetic oligonucleotide
  Target: COL7A1; (+) strand; PAM type: NRG; PAM sequence: AAG
ctcccagtgtcccagcctag

SEQ ID NO: 15535 - DNA, 20 bp, Artificial Sequence
  Description of Artificial Sequence: Synthetic oligonucleotide
  Target: COL7A1; (+) strand; PAM type: NRG; PAM sequence: TGG
gtcccagcctagaagccatg

SEQ ID NO: 15536 - DNA, 20 bp, Artificial Sequence
  Description of Artificial Sequence: Synthetic oligonucleotide
  Target: COL7A1; (+) strand; PAM type: NRG; PAM sequence: TGG
ccagcctagaagccatgtgg

SEQ ID NO: 15537 - DNA, 20 bp, Artificial Sequence
  Description of Artificial Sequence: Synthetic oligonucleotide
  Target: COL7A1; (+) strand; PAM type: NRG; PAM sequence: CAG
cctagaagccatgtggtggc

SEQ ID NO: 15538 - DNA, 20 bp, Artificial Sequence
  Description of Artificial Sequence: Synthetic oligonucleotide
  Target: COL7A1; (+) strand; PAM type: NRG; PAM sequence: AAG
catgtggtggccagttctca

SEQ ID NO: 15539 - DNA, 20 bp, Artificial Sequence
  Description of Artificial Sequence: Synthetic oligonucleotide
  Target: COL7A1; (+) strand; PAM type: NRG; PAM sequence: CAG
ctcaaagctcaaactcttcc

SEQ ID NO: 15540 - DNA, 20 bp, Artificial Sequence
  Description of Artificial Sequence: Synthetic oligonucleotide
  Target: COL7A1; (+) strand; PAM type: NRG; PAM sequence: TGG
ttcccagtccctgtatctac

SEQ ID NO: 15541 - DNA, 20 bp, Artificial Sequence
  Description of Artificial Sequence: Synthetic oligonucleotide
  Target: COL7A1; (+) strand; PAM type: NRG; PAM sequence: CAG
cagtccctgtatctactggc

SEQ ID NO: 15542 - DNA, 20 bp, Artificial Sequence
  Description of Artificial Sequence: Synthetic oligonucleotide
  Target: COL7A1; (+) strand; PAM type: NRG; PAM sequence: CAG
tatctactggccagtcctga

SEQ ID NO: 15543 - DNA, 20 bp, Artificial Sequence
  Description of Artificial Sequence: Synthetic oligonucleotide
  Target: COL7A1; (+) strand; PAM type: NRG; PAM sequence: CAG
cacacacacacacacacaca

SEQ ID NO: 15544 - DNA, 20 bp, Artificial Sequence
  Description of Artificial Sequence: Synthetic oligonucleotide
  Target: COL7A1; (+) strand; PAM type: NRG; PAM sequence: CAG
acagtctcgctcctgttacc

SEQ ID NO: 15545 - DNA, 20 bp, Artificial Sequence
  Description of Artificial Sequence: Synthetic oligonucleotide
  Target: COL7A1; (+) strand; PAM type: NRG; PAM sequence: TGG
ctcgctcctgttacccagcc

SEQ ID NO: 15546 - DNA, 20 bp, Artificial Sequence
  Description of Artificial Sequence: Synthetic oligonucleotide
  Target: COL7A1; (+) strand; PAM type: NRG; PAM sequence: GAG
cgctcctgttacccagcctg

SEQ ID NO: 15547 - DNA, 20 bp, Artificial Sequence
  Description of Artificial Sequence: Synthetic oligonucleotide
  Target: COL7A1; (+) strand; PAM type: NRG; PAM sequence: TAG
gttacccagcctggagcaca

SEQ ID NO: 15548 - DNA, 20 bp, Artificial Sequence
  Description of Artificial Sequence: Synthetic oligonucleotide
  Target: COL7A1; (+) strand; PAM type: NRG; PAM sequence: TGG
tggagcacatagtgcaatca

SEQ ID NO: 15549 - DNA, 20 bp, Artificial Sequence
  Description of Artificial Sequence: Synthetic oligonucleotide
  Target: COL7A1; (+) strand; PAM type: NRG; PAM sequence: CAG
agtgcaatcatggctcactg

SEQ ID NO: 15550 - DNA, 20 bp, Artificial Sequence
  Description of Artificial Sequence: Synthetic oligonucleotide
  Target: COL7A1; (+) strand; PAM type: NRG; PAM sequence: TGG
tcactgcagccttgaactcc

SEQ ID NO: 15551 - DNA, 20 bp, Artificial Sequence
  Description of Artificial Sequence: Synthetic oligonucleotide
  Target: COL7A1; (+) strand; PAM type: NRG; PAM sequence: AAG
agccttgaactcctggcctc

SEQ ID NO: 15552 - DNA, 20 bp, Artificial Sequence
  Description of Artificial Sequence: Synthetic oligonucleotide
  Target: COL7A1; (+) strand; PAM type: NRG; PAM sequence: AAG
cctcccgcctcaacctccca

SEQ ID NO: 15553 - DNA, 20 bp, Artificial Sequence
  Description of Artificial Sequence: Synthetic oligonucleotide
  Target: COL7A1; (+) strand; PAM type: NRG; PAM sequence: TGG
gcctcaacctcccaaagccc

SEQ ID NO: 15554 - DNA, 20 bp, Artificial Sequence
  Description of Artificial Sequence: Synthetic oligonucleotide
  Target: COL7A1; (+) strand; PAM type: NRG; PAM sequence: GGG
cctcaacctcccaaagccct

SEQ ID NO: 15555 - DNA, 20 bp, Artificial Sequence
  Description of Artificial Sequence: Synthetic oligonucleotide
  Target: COL7A1; (+) strand; PAM type: NRG; PAM sequence: TAG
ctcccaaagccctgggttta

SEQ ID NO: 15556 - DNA, 20 bp, Artificial Sequence
  Description of Artificial Sequence: Synthetic oligonucleotide
  Target: COL7A1; (+) strand; PAM type: NRG; PAM sequence: TAG
agccctgggtttatagccat

SEQ ID NO: 15557 - DNA, 20 bp, Artificial Sequence
  Description of Artificial Sequence: Synthetic oligonucleotide
  Target: COL7A1; (+) strand; PAM type: NRG; PAM sequence: TGG
tagccattagccaccacatc

SEQ ID NO: 15558 - DNA, 20 bp, Artificial Sequence
  Description of Artificial Sequence: Synthetic oligonucleotide
  Target: COL7A1; (+) strand; PAM type: NRG; PAM sequence: CAG
ggcccacaaaccaccctttg

SEQ ID NO: 15559 - DNA, 20 bp, Artificial Sequence
  Description of Artificial Sequence: Synthetic oligonucleotide
  Target: COL7A1; (+) strand; PAM type: NRG; PAM sequence: AAG
aaaccaccctttgcagcata

SEQ ID NO: 15560 - DNA, 20 bp, Artificial Sequence
  Description of Artificial Sequence: Synthetic oligonucleotide
  Target: COL7A1; (+) strand; PAM type: NRG; PAM sequence: CAG
ccctttgcagcataaagacc

SEQ ID NO: 15561 - DNA, 20 bp, Artificial Sequence
  Description of Artificial Sequence: Synthetic oligonucleotide
  Target: COL7A1; (+) strand; PAM type: NRG; PAM sequence: AGG
cctttgcagcataaagaccc

SEQ ID NO: 15562 - DNA, 20 bp, Artificial Sequence
  Description of Artificial Sequence: Synthetic oligonucleotide
  Target: COL7A1; (+) strand; PAM type: NRG; PAM sequence: GGG
ctttgcagcataaagaccca

SEQ ID NO: 15563 - DNA, 20 bp, Artificial Sequence
  Description of Artificial Sequence: Synthetic oligonucleotide
  Target: COL7A1; (+) strand; PAM type: NRG; PAM sequence: GGG
tttgcagcataaagacccag

SEQ ID NO: 15564 - DNA, 20 bp, Artificial Sequence
  Description of Artificial Sequence: Synthetic oligonucleotide
  Target: COL7A1; (+) strand; PAM type: NRG; PAM sequence: CAG
gcataaagacccaggggttt

SEQ ID NO: 15565 - DNA, 20 bp, Artificial Sequence
  Description of Artificial Sequence: Synthetic oligonucleotide
  Target: COL7A1; (+) strand; PAM type: NRG; PAM sequence: CAG
gggtttcagtgcatgccaca

SEQ ID NO: 15566 - DNA, 20 bp, Artificial Sequence
  Description of Artificial Sequence: Synthetic oligonucleotide
  Target: COL7A1; (+) strand; PAM type: NRG; PAM sequence: AGG
ggtttcagtgcatgccacac

SEQ ID NO: 15567 - DNA, 20 bp, Artificial Sequence
  Description of Artificial Sequence: Synthetic oligonucleotide
  Target: COL7A1; (+) strand; PAM type: NRG; PAM sequence: CAG
ggcccacacactgatgcaca

SEQ ID NO: 15568 - DNA, 20 bp, Artificial Sequence
  Description of Artificial Sequence: Synthetic oligonucleotide
  Target: COL7A1; (+) strand; PAM type: NRG; PAM sequence: GAG
cccacacactgatgcacaca

SEQ ID NO: 15569 - DNA, 20 bp, Artificial Sequence
  Description of Artificial Sequence: Synthetic oligonucleotide
  Target: COL7A1; (+) strand; PAM type: NRG; PAM sequence: TGG
actgatgcacacagagacac

SEQ ID NO: 15570 - DNA, 20 bp, Artificial Sequence
  Description of Artificial Sequence: Synthetic oligonucleotide
  Target: COL7A1; (+) strand; PAM type: NRG; PAM sequence: CAG
tgcacacagagacactggca

SEQ ID NO: 15571 - DNA, 20 bp, Artificial Sequence
  Description of Artificial Sequence: Synthetic oligonucleotide
  Target: COL7A1; (+) strand; PAM type: NRG; PAM sequence: CAG
cacagctgcacatgcacaca

SEQ ID NO: 15572 - DNA, 20 bp, Artificial Sequence
  Description of Artificial Sequence: Synthetic oligonucleotide
  Target: COL7A1; (+) strand; PAM type: NRG; PAM sequence: AAG
acagacgcacacacactcac

SEQ ID NO: 15573 - DNA, 20 bp, Artificial Sequence
  Description of Artificial Sequence: Synthetic oligonucleotide
  Target: COL7A1; (+) strand; PAM type: NRG; PAM sequence: CAG
cactcacaagtcctgcaccc

SEQ ID NO: 15574 - DNA, 20 bp, Artificial Sequence
  Description of Artificial Sequence: Synthetic oligonucleotide
  Target: COL7A1; (+) strand; PAM type: NRG; PAM sequence: CAG
gtcctgcaccccagcatgtg

SEQ ID NO: 15575 - DNA, 20 bp, Artificial Sequence
  Description of Artificial Sequence: Synthetic oligonucleotide
  Target: COL7A1; (+) strand; PAM type: NRG; PAM sequence: GAG
cctgcaccccagcatgtgca

SEQ ID NO: 15576 - DNA, 20 bp, Artificial Sequence
  Description of Artificial Sequence: Synthetic oligonucleotide
  Target: COL7A1; (+) strand; PAM type: NRG; PAM sequence: CAG
caccccagcatgtgcagaga

SEQ ID NO: 15577 - DNA, 20 bp, Artificial Sequence
  Description of Artificial Sequence: Synthetic oligonucleotide
  Target: COL7A1; (+) strand; PAM type: NRG; PAM sequence: AGG
accccagcatgtgcagagac

SEQ ID NO: 15578 - DNA, 20 bp, Artificial Sequence
  Description of Artificial Sequence: Synthetic oligonucleotide
  Target: COL7A1; (+) strand; PAM type: NRG; PAM sequence: CAG
ccagcatgtgcagagacagg

SEQ ID NO: 15579 - DNA, 20 bp, Artificial Sequence
  Description of Artificial Sequence: Synthetic oligonucleotide
  Target: COL7A1; (+) strand; PAM type: NRG; PAM sequence: AGG
cagcatgtgcagagacaggc

SEQ ID NO: 15580 - DNA, 20 bp, Artificial Sequence
  Description of Artificial Sequence: Synthetic oligonucleotide
  Target: COL7A1; (+) strand; PAM type: NRG; PAM sequence: CAG
gtgcagagacaggcaggctg

SEQ ID NO: 15581 - DNA, 20 bp, Artificial Sequence
  Description of Artificial Sequence: Synthetic oligonucleotide
  Target: COL7A1; (+) strand; PAM type: NRG; PAM sequence: TGG
cagagacaggcaggctgcag

SEQ ID NO: 15582 - DNA, 20 bp, Artificial Sequence
  Description of Artificial Sequence: Synthetic oligonucleotide
  Target: COL7A1; (+) strand; PAM type: NRG; PAM sequence: GGG
agagacaggcaggctgcagt

SEQ ID NO: 15583 - DNA, 20 bp, Artificial Sequence
  Description of Artificial Sequence: Synthetic oligonucleotide
  Target: COL7A1; (+) strand; PAM type: NRG; PAM sequence: GGG
gagacaggcaggctgcagtg

SEQ ID NO: 15584 - DNA, 20 bp, Artificial Sequence
  Description of Artificial Sequence: Synthetic oligonucleotide
  Target: COL7A1; (+) strand; PAM type: NRG; PAM sequence: CAG
cacatatatctctccacccc

SEQ ID NO: 15585 - DNA, 20 bp, Artificial Sequence
  Description of Artificial Sequence: Synthetic oligonucleotide
  Target: COL7A1; (+) strand; PAM type: NRG; PAM sequence: TGG
cccccagccctgctgtccac

SEQ ID NO: 15586 - DNA, 20 bp, Artificial Sequence
  Description of Artificial Sequence: Synthetic oligonucleotide
  Target: COL7A1; (+) strand; PAM type: NRG; PAM sequence: GGG
ccccagccctgctgtccact

SEQ ID NO: 15587 - DNA, 20 bp, Artificial Sequence
  Description of Artificial Sequence: Synthetic oligonucleotide
  Target: COL7A1; (+) strand; PAM type: NRG; PAM sequence: GAG
ccagccctgctgtccactgg

SEQ ID NO: 15588 - DNA, 20 bp, Artificial Sequence
  Description of Artificial Sequence: Synthetic oligonucleotide
  Target: COL7A1; (+) strand; PAM type: NRG; PAM sequence: AGG
cagccctgctgtccactggg

SEQ ID NO: 15589 - DNA, 20 bp, Artificial Sequence
  Description of Artificial Sequence: Synthetic oligonucleotide
  Target: COL7A1; (+) strand; PAM type: NRG; PAM sequence: CAG
ctgctgtccactgggaggtt

SEQ ID NO: 15590 - DNA, 20 bp, Artificial Sequence
  Description of Artificial Sequence: Synthetic oligonucleotide
  Target: COL7A1; (+) strand; PAM type: NRG; PAM sequence: AGG
tgctgtccactgggaggttc

SEQ ID NO: 15591 - DNA, 20 bp, Artificial Sequence
  Description of Artificial Sequence: Synthetic oligonucleotide
  Target: COL7A1; (+) strand; PAM type: NRG; PAM sequence: GAG
ctgtccactgggaggttcag

SEQ ID NO: 15592 - DNA, 20 bp, Artificial Sequence
  Description of Artificial Sequence: Synthetic oligonucleotide
  Target: COL7A1; (+) strand; PAM type: NRG; PAM sequence: CAG
ctgggaggttcaggagtttc

SEQ ID NO: 15593 - DNA, 20 bp, Artificial Sequence
  Description of Artificial Sequence: Synthetic oligonucleotide
  Target: COL7A1; (+) strand; PAM type: NRG; PAM sequence: AGG
tgggaggttcaggagtttcc

SEQ ID NO: 15594 - DNA, 20 bp, Artificial Sequence
  Description of Artificial Sequence: Synthetic oligonucleotide
  Target: COL7A1; (+) strand; PAM type: NRG; PAM sequence: CAG
tcaggagtttccaggaattc

SEQ ID NO: 15595 - DNA, 20 bp, Artificial Sequence
  Description of Artificial Sequence: Synthetic oligonucleotide
  Target: COL7A1; (+) strand; PAM type: NRG; PAM sequence: TGG
ccaggaattccagcttcctc

SEQ ID NO: 15596 - DNA, 20 bp, Artificial Sequence
  Description of Artificial Sequence: Synthetic oligonucleotide
  Target: COL7A1; (+) strand; PAM type: NRG; PAM sequence: CAG
cagcttcctctggccatttc

SEQ ID NO: 15597 - DNA, 20 bp, Artificial Sequence
  Description of Artificial Sequence: Synthetic oligonucleotide
  Target: COL7A1; (+) strand; PAM type: NRG; PAM sequence: AAG
tcctctggccatttccagca

SEQ ID NO: 15598 - DNA, 20 bp, Artificial Sequence
  Description of Artificial Sequence: Synthetic oligonucleotide
  Target: COL7A1; (+) strand; PAM type: NRG; PAM sequence: AGG
cctctggccatttccagcaa

SEQ ID NO: 15599 - DNA, 20 bp, Artificial Sequence
  Description of Artificial Sequence: Synthetic oligonucleotide
  Target: COL7A1; (+) strand; PAM type: NRG; PAM sequence: TGG
gattgtcccctgtgtctccc

SEQ ID NO: 15600 - DNA, 20 bp, Artificial Sequence
  Description of Artificial Sequence: Synthetic oligonucleotide
  Target: COL7A1; (+) strand; PAM type: NRG; PAM sequence: GGG
attgtcccctgtgtctccct

SEQ ID NO: 15601 - DNA, 20 bp, Artificial Sequence
  Description of Artificial Sequence: Synthetic oligonucleotide
  Target: COL7A1; (+) strand; PAM type: NRG; PAM sequence: CAG
cccctgtgtctccctgggcc

SEQ ID NO: 15602 - DNA, 20 bp, Artificial Sequence
  Description of Artificial Sequence: Synthetic oligonucleotide
  Target: COL7A1; (+) strand; PAM type: NRG; PAM sequence: AGG
ccctgtgtctccctgggccc

SEQ ID NO: 15603 - DNA, 20 bp, Artificial Sequence
  Description of Artificial Sequence: Synthetic oligonucleotide
  Target: COL7A1; (+) strand; PAM type: NRG; PAM sequence: GGG
cctgtgtctccctgggccca

SEQ ID NO: 15604 - DNA, 20 bp, Artificial Sequence
  Description of Artificial Sequence: Synthetic oligonucleotide
  Target: COL7A1; (+) strand; PAM type: NRG; PAM sequence: AAG
tccctgggcccagggctcac

SEQ ID NO: 15605 - DNA, 20 bp, Artificial Sequence
  Description of Artificial Sequence: Synthetic oligonucleotide
  Target: COL7A1; (+) strand; PAM type: NRG; PAM sequence: AGG
ccctgggcccagggctcaca

SEQ ID NO: 15606 - DNA, 20 bp, Artificial Sequence
  Description of Artificial Sequence: Synthetic oligonucleotide
  Target: COL7A1; (+) strand; PAM type: NRG; PAM sequence: GAG
ctgggcccagggctcacaag

SEQ ID NO: 15607 - DNA, 20 bp, Artificial Sequence
  Description of Artificial Sequence: Synthetic oligonucleotide
  Target: COL7A1; (+) strand; PAM type: NRG; PAM sequence: AAG
cagggctcacaaggagtgtg

SEQ ID NO: 15608 - DNA, 20 bp, Artificial Sequence
  Description of Artificial Sequence: Synthetic oligonucleotide
  Target: COL7A1; (+) strand; PAM type: NRG; PAM sequence: CAG
ggagtgtgaagttctgactt

SEQ ID NO: 15609 - DNA, 20 bp, Artificial Sequence
  Description of Artificial Sequence: Synthetic oligonucleotide
  Target: COL7A1; (+) strand; PAM type: NRG; PAM sequence: AGG
gagtgtgaagttctgacttc

SEQ ID NO: 15610 - DNA, 20 bp, Artificial Sequence
  Description of Artificial Sequence: Synthetic oligonucleotide
  Target: COL7A1; (+) strand; PAM type: NRG; PAM sequence: TAG
gaagttctgacttcaggtta

SEQ ID NO: 15611 - DNA, 20 bp, Artificial Sequence
  Description of Artificial Sequence: Synthetic oligonucleotide
  Target: COL7A1; (+) strand; PAM type: NRG; PAM sequence: AAG
ggttatagaaccatgtcacc

SEQ ID NO: 15612 - DNA, 20 bp, Artificial Sequence
  Description of Artificial Sequence: Synthetic oligonucleotide
  Target: COL7A1; (+) strand; PAM type: NRG; PAM sequence: CAG
tatagaaccatgtcaccaag

SEQ ID NO: 15613 - DNA, 20 bp, Artificial Sequence
  Description of Artificial Sequence: Synthetic oligonucleotide
  Target: COL7A1; (+) strand; PAM type: NRG; PAM sequence: TGG
aaccatgtcaccaagcagcc

SEQ ID NO: 15614 - DNA, 20 bp, Artificial Sequence
  Description of Artificial Sequence: Synthetic oligonucleotide
  Target: COL7A1; (+) strand; PAM type: NRG; PAM sequence: GGG
accatgtcaccaagcagcct

SEQ ID NO: 15615 - DNA, 20 bp, Artificial Sequence
  Description of Artificial Sequence: Synthetic oligonucleotide
  Target: COL7A1; (+) strand; PAM type: NRG; PAM sequence: CAG
tgatctgcacttcctccttc

SEQ ID NO: 15616 - DNA, 20 bp, Artificial Sequence
  Description of Artificial Sequence: Synthetic oligonucleotide
  Target: COL7A1; (+) strand; PAM type: NRG; PAM sequence: CAG
ttcctccttccagcctgcca

SEQ ID NO: 15617 - DNA, 20 bp, Artificial Sequence
  Description of Artificial Sequence: Synthetic oligonucleotide
  Target: COL7A1; (+) strand; PAM type: NRG; PAM sequence: AGG
tcctccttccagcctgccac

SEQ ID NO: 15618 - DNA, 20 bp, Artificial Sequence
  Description of Artificial Sequence: Synthetic oligonucleotide
  Target: COL7A1; (+) strand; PAM type: NRG; PAM sequence: GGG
cctccttccagcctgccaca

SEQ ID NO: 15619 - DNA, 20 bp, Artificial Sequence
  Description of Artificial Sequence: Synthetic oligonucleotide
  Target: COL7A1; (+) strand; PAM type: NRG; PAM sequence: CAG
ccagcctgccacagggcgta

SEQ ID NO: 15620 - DNA, 20 bp, Artificial Sequence
  Description of Artificial Sequence: Synthetic oligonucleotide
  Target: COL7A1; (+) strand; PAM type: NRG; PAM sequence: TAG
gcctgccacagggcgtacag

SEQ ID NO: 15621 - DNA, 20 bp, Artificial Sequence
  Description of Artificial Sequence: Synthetic oligonucleotide
  Target: COL7A1; (+) strand; PAM type: NRG; PAM sequence: AGG
cctgccacagggcgtacagt

SEQ ID NO: 15622 - DNA, 20 bp, Artificial Sequence
  Description of Artificial Sequence: Synthetic oligonucleotide
  Target: COL7A1; (+) strand; PAM type: NRG; PAM sequence: TAG
cagggcgtacagtaggtgct

SEQ ID NO: 15623 - DNA, 20 bp, Artificial Sequence
  Description of Artificial Sequence: Synthetic oligonucleotide
  Target: COL7A1; (+) strand; PAM type: NRG; PAM sequence: AGG
agggcgtacagtaggtgctt

SEQ ID NO: 15624 - DNA, 20 bp, Artificial Sequence
  Description of Artificial Sequence: Synthetic oligonucleotide
  Target: COL7A1; (+) strand; PAM type: NRG; PAM sequence: GGG
gggcgtacagtaggtgctta

SEQ ID NO: 15625 - DNA, 20 bp, Artificial Sequence
  Description of Artificial Sequence: Synthetic oligonucleotide
  Target: COL7A1; (+) strand; PAM type: NRG; PAM sequence: CAG
acagtaggtgcttagggatt

SEQ ID NO: 15626 - DNA, 20 bp, Artificial Sequence
  Description of Artificial Sequence: Synthetic oligonucleotide
  Target: COL7A1; (+) strand; PAM type: NRG; PAM sequence: AGG
cagtaggtgcttagggattc

SEQ ID NO: 15627 - DNA, 20 bp, Artificial Sequence
  Description of Artificial Sequence: Synthetic oligonucleotide
  Target: COL7A1; (+) strand; PAM type: NRG; PAM sequence: CAG
ggtgcttagggattcaggac

SEQ ID NO: 15628 - DNA, 20 bp, Artificial Sequence
  Description of Artificial Sequence: Synthetic oligonucleotide
  Target: COL7A1; (+) strand; PAM type: NRG; PAM sequence: AAG
cttagggattcaggaccagc

SEQ ID NO: 15629 - DNA, 20 bp, Artificial Sequence
  Description of Artificial Sequence: Synthetic oligonucleotide
  Target: COL7A1; (+) strand; PAM type: NRG; PAM sequence: AGG
ttagggattcaggaccagca

SEQ ID NO: 15630 - DNA, 20 bp, Artificial Sequence
  Description of Artificial Sequence: Synthetic oligonucleotide
  Target: COL7A1; (+) strand; PAM type: NRG; PAM sequence: GGG
tagggattcaggaccagcaa

SEQ ID NO: 15631 - DNA, 20 bp, Artificial Sequence
  Description of Artificial Sequence: Synthetic oligonucleotide
  Target: COL7A1; (+) strand; PAM type: NRG; PAM sequence: CAG
tcaggaccagcaagggcaca

SEQ ID NO: 15632 - DNA, 20 bp, Artificial Sequence
  Description of Artificial Sequence: Synthetic oligonucleotide
  Target: COL7A1; (+) strand; PAM type: NRG; PAM sequence: AAG
gaccagcaagggcacacaga

SEQ ID NO: 15633 - DNA, 20 bp, Artificial Sequence
  Description of Artificial Sequence: Synthetic oligonucleotide
  Target: COL7A1; (+) strand; PAM type: NRG; PAM sequence: AGG
accagcaagggcacacagaa

SEQ ID NO: 15634 - DNA, 20 bp, Artificial Sequence
  Description of Artificial Sequence: Synthetic oligonucleotide
  Target: COL7A1; (+) strand; PAM type: NRG; PAM sequence: GGG
ccagcaagggcacacagaaa

SEQ ID NO: 15635 - DNA, 20 bp, Artificial Sequence
  Description of Artificial Sequence: Synthetic oligonucleotide
  Target: COL7A1; (+) strand; PAM type: NRG; PAM sequence: CAG
aagggcacacagaaagggtt

SEQ ID NO: 15636 - DNA, 20 bp, Artificial Sequence
  Description of Artificial Sequence: Synthetic oligonucleotide
  Target: COL7A1; (+) strand; PAM type: NRG; PAM sequence: GAG
gggcacacagaaagggttca

SEQ ID NO: 15637 - DNA, 20 bp, Artificial Sequence
  Description of Artificial Sequence: Synthetic oligonucleotide
  Target: COL7A1; (+) strand; PAM type: NRG; PAM sequence: GAG
gcacacagaaagggttcaga

SEQ ID NO: 15638 - DNA, 20 bp, Artificial Sequence
  Description of Artificial Sequence: Synthetic oligonucleotide
  Target: COL7A1; (+) strand; PAM type: NRG; PAM sequence: AGG
cacacagaaagggttcagag

SEQ ID NO: 15639 - DNA, 20 bp, Artificial Sequence
  Description of Artificial Sequence: Synthetic oligonucleotide
  Target: COL7A1; (+) strand; PAM type: NRG; PAM sequence: GAG
gagaggttcatgaccaaact

SEQ ID NO: 15640 - DNA, 20 bp, Artificial Sequence
  Description of Artificial Sequence: Synthetic oligonucleotide
  Target: COL7A1; (+) strand; PAM type: NRG; PAM sequence: CAG
tcatgaccaaactgagtaca

SEQ ID NO: 15641 - DNA, 20 bp, Artificial Sequence
  Description of Artificial Sequence: Synthetic oligonucleotide
  Target: COL7A1; (+) strand; PAM type: NRG; PAM sequence: CAG
tgaccaaactgagtacacag

SEQ ID NO: 15642 - DNA, 20 bp, Artificial Sequence
  Description of Artificial Sequence: Synthetic oligonucleotide
  Target: COL7A1; (+) strand; PAM type: NRG; PAM sequence: AGG
gaccaaactgagtacacagc

SEQ ID NO: 15643 - DNA, 20 bp, Artificial Sequence
  Description of Artificial Sequence: Synthetic oligonucleotide
  Target: COL7A1; (+) strand; PAM type: NRG; PAM sequence: CAG
ctgagtacacagcaggtgtt

SEQ ID NO: 15644 - DNA, 20 bp, Artificial Sequence
  Description of Artificial Sequence: Synthetic oligonucleotide
  Target: COL7A1; (+) strand; PAM type: NRG; PAM sequence: GAG
gagtacacagcaggtgttca

SEQ ID NO: 15645 - DNA, 20 bp, Artificial Sequence
  Description of Artificial Sequence: Synthetic oligonucleotide
  Target: COL7A1; (+) strand; PAM type: NRG; PAM sequence: AAG
tacacagcaggtgttcagag

SEQ ID NO: 15646 - DNA, 20 bp, Artificial Sequence
  Description of Artificial Sequence: Synthetic oligonucleotide
  Target: COL7A1; (+) strand; PAM type: NRG; PAM sequence: CAG
agcaggtgttcagagaagct

SEQ ID NO: 15647 - DNA, 20 bp, Artificial Sequence
  Description of Artificial Sequence: Synthetic oligonucleotide
  Target: COL7A1; (+) strand; PAM type: NRG; PAM sequence: AGG
gcaggtgttcagagaagctc

SEQ ID NO: 15648 - DNA, 20 bp, Artificial Sequence
  Description of Artificial Sequence: Synthetic oligonucleotide
  Target: COL7A1; (+) strand; PAM type: NRG; PAM sequence: TGG
tgttcagagaagctcaggac

SEQ ID NO: 15649 - DNA, 20 bp, Artificial Sequence
  Description of Artificial Sequence: Synthetic oligonucleotide
  Target: COL7A1; (+) strand; PAM type: NRG; PAM sequence: CAG
agagaagctcaggactggca

SEQ ID NO: 15650 - DNA, 20 bp, Artificial Sequence
  Description of Artificial Sequence: Synthetic oligonucleotide
  Target: COL7A1; (+) strand; PAM type: NRG; PAM sequence: AGG
gagaagctcaggactggcac

SEQ ID NO: 15651 - DNA, 20 bp, Artificial Sequence
  Description of Artificial Sequence: Synthetic oligonucleotide
  Target: COL7A1; (+) strand; PAM type: NRG; PAM sequence: GGG
agaagctcaggactggcaca

SEQ ID NO: 15652 - DNA, 20 bp, Artificial Sequence
  Description of Artificial Sequence: Synthetic oligonucleotide
  Target: COL7A1; (+) strand; PAM type: NRG; PAM sequence: CAG
caggactggcacagggcaca

SEQ ID NO: 15653 - DNA, 20 bp, Artificial Sequence
  Description of Artificial Sequence: Synthetic oligonucleotide
  Target: COL7A1; (+) strand; PAM type: NRG; PAM sequence: CAG
gactggcacagggcacacag

SEQ ID NO: 15654 - DNA, 20 bp, Artificial Sequence
  Description of Artificial Sequence: Synthetic oligonucleotide
  Target: COL7A1; (+) strand; PAM type: NRG; PAM sequence: TAG
agggcacacagcagacaccc

SEQ ID NO: 15655 - DNA, 20 bp, Artificial Sequence
  Description of Artificial Sequence: Synthetic oligonucleotide
  Target: COL7A1; (+) strand; PAM type: NRG; PAM sequence: AAG
gcacacagcagacaccctag

SEQ ID NO: 15656 - DNA, 20 bp, Artificial Sequence
  Description of Artificial Sequence: Synthetic oligonucleotide
  Target: COL7A1; (+) strand; PAM type: NRG; PAM sequence: TGG
agcagacaccctagaagtgc

SEQ ID NO: 15657 - DNA, 20 bp, Artificial Sequence
  Description of Artificial Sequence: Synthetic oligonucleotide
  Target: COL7A1; (+) strand; PAM type: NRG; PAM sequence: AAG
caccctagaagtgctggttt

SEQ ID NO: 15658 - DNA, 20 bp, Artificial Sequence
  Description of Artificial Sequence: Synthetic oligonucleotide
  Target: COL7A1; (+) strand; PAM type: NRG; PAM sequence: AGG
accctagaagtgctggttta

SEQ ID NO: 15659 - DNA, 20 bp, Artificial Sequence
  Description of Artificial Sequence: Synthetic oligonucleotide
  Target: COL7A1; (+) strand; PAM type: NRG; PAM sequence: GGG
ccctagaagtgctggtttaa

SEQ ID NO: 15660 - DNA, 20 bp, Artificial Sequence
  Description of Artificial Sequence: Synthetic oligonucleotide
  Target: COL7A1; (+) strand; PAM type: NRG; PAM sequence: AAG
aagtgctggtttaagggcta

SEQ ID NO: 15661 - DNA, 20 bp, Artificial Sequence
  Description of Artificial Sequence: Synthetic oligonucleotide
  Target: COL7A1; (+) strand; PAM type: NRG; PAM sequence: GAG
atgtgaaacccatcctaaat

SEQ ID NO: 15662 - DNA, 20 bp, Artificial Sequence
  Description of Artificial Sequence: Synthetic oligonucleotide
  Target: COL7A1; (+) strand; PAM type: NRG; PAM sequence: TAG
acccatcctaaatgagcctc

SEQ ID NO: 15663 - DNA, 20 bp, Artificial Sequence
  Description of Artificial Sequence: Synthetic oligonucleotide
  Target: COL7A1; (+) strand; PAM type: NRG; PAM sequence: TGG
gcctctagacttccccaaac

SEQ ID NO: 15664 - DNA, 20 bp, Artificial Sequence
  Description of Artificial Sequence: Synthetic oligonucleotide
  Target: COL7A1; (+) strand; PAM type: NRG; PAM sequence: AAG
ccccaaactggtgtgacccc

SEQ ID NO: 15665 - DNA, 20 bp, Artificial Sequence
  Description of Artificial Sequence: Synthetic oligonucleotide
  Target: COL7A1; (+) strand; PAM type: NRG; PAM sequence: GAG
ccaaactggtgtgaccccaa

SEQ ID NO: 15666 - DNA, 20 bp, Artificial Sequence
  Description of Artificial Sequence: Synthetic oligonucleotide
  Target: COL7A1; (+) strand; PAM type: NRG; PAM sequence: AGG
caaactggtgtgaccccaag

SEQ ID NO: 15667 - DNA, 20 bp, Artificial Sequence
  Description of Artificial Sequence: Synthetic oligonucleotide
  Target: COL7A1; (+) strand; PAM type: NRG; PAM sequence: TGG
tgtgaccccaagaggaaacc

SEQ ID NO: 15668 - DNA, 20 bp, Artificial Sequence
  Description of Artificial Sequence: Synthetic oligonucleotide
  Target: COL7A1; (+) strand; PAM type: NRG; PAM sequence: TGG
cctggacaaacatgatccct

SEQ ID NO: 15669 - DNA, 20 bp, Artificial Sequence
  Description of Artificial Sequence: Synthetic oligonucleotide
  Target: COL7A1; (+) strand; PAM type: NRG; PAM sequence: GAG
tggacaaacatgatcccttg

SEQ ID NO: 15670 - DNA, 20 bp, Artificial Sequence
  Description of Artificial Sequence: Synthetic oligonucleotide
  Target: COL7A1; (+) strand; PAM type: NRG; PAM sequence: AGG
ggacaaacatgatcccttgg

SEQ ID NO: 15671 - DNA, 20 bp, Artificial Sequence
  Description of Artificial Sequence: Synthetic oligonucleotide
  Target: COL7A1; (+) strand; PAM type: NRG; PAM sequence: CAG
aaacatgatcccttggaggc

SEQ ID NO: 15672 - DNA, 20 bp, Artificial Sequence
  Description of Artificial Sequence: Synthetic oligonucleotide
  Target: COL7A1; (+) strand; PAM type: NRG; PAM sequence: AAG
tgatcccttggaggccagca

SEQ ID NO: 15673 - DNA, 20 bp, Artificial Sequence
  Description of Artificial Sequence: Synthetic oligonucleotide
  Target: COL7A1; (+) strand; PAM type: NRG; PAM sequence: GAG
atcccttggaggccagcaaa

SEQ ID NO: 15674 - DNA, 20 bp, Artificial Sequence
  Description of Artificial Sequence: Synthetic oligonucleotide
  Target: COL7A1; (+) strand; PAM type: NRG; PAM sequence: CAG
ccttggaggccagcaaagag

SEQ ID NO: 15675 - DNA, 20 bp, Artificial Sequence
  Description of Artificial Sequence: Synthetic oligonucleotide
  Target: COL7A1; (+) strand; PAM type: NRG; PAM sequence: GAG
ttggaggccagcaaagagca

SEQ ID NO: 15676 - DNA, 20 bp, Artificial Sequence
  Description of Artificial Sequence: Synthetic oligonucleotide
  Target: COL7A1; (+) strand; PAM type: NRG; PAM sequence: CAG
gaggccagcaaagagcagag

SEQ ID NO: 15677 - DNA, 20 bp, Artificial Sequence
  Description of Artificial Sequence: Synthetic oligonucleotide
  Target: COL7A1; (+) strand; PAM type: NRG; PAM sequence: AGG
aggccagcaaagagcagagc

SEQ ID NO: 15678 - DNA, 20 bp, Artificial Sequence
  Description of Artificial Sequence: Synthetic oligonucleotide
  Target: COL7A1; (+) strand; PAM type: NRG; PAM sequence: GAG
gccagcaaagagcagagcag

SEQ ID NO: 15679 - DNA, 20 bp, Artificial Sequence
  Description of Artificial Sequence: Synthetic oligonucleotide
  Target: COL7A1; (+) strand; PAM type: NRG; PAM sequence: AGG
ccagcaaagagcagagcagg

SEQ ID NO: 15680 - DNA, 20 bp, Artificial Sequence
  Description of Artificial Sequence: Synthetic oligonucleotide
  Target: COL7A1; (+) strand; PAM type: NRG; PAM sequence: GGG
cagcaaagagcagagcagga

SEQ ID NO: 15681 - DNA, 20 bp, Artificial Sequence
  Description of Artificial Sequence: Synthetic oligonucleotide
  Target: COL7A1; (+) strand; PAM type: NRG; PAM sequence: TGG
aagagcagagcaggagggcc

SEQ ID NO: 15682 - DNA, 20 bp, Artificial Sequence
  Description of Artificial Sequence: Synthetic oligonucleotide
  Target: COL7A1; (+) strand; PAM type: NRG; PAM sequence: GGG
agagcagagcaggagggcct

SEQ ID NO: 15683 - DNA, 20 bp, Artificial Sequence
  Description of Artificial Sequence: Synthetic oligonucleotide
  Target: COL7A1; (+) strand; PAM type: NRG; PAM sequence: CAG
gcagagcaggagggcctggg

SEQ ID NO: 15684 - DNA, 20 bp, Artificial Sequence
  Description of Artificial Sequence: Synthetic oligonucleotide
  Target: COL7A1; (+) strand; PAM type: NRG; PAM sequence: CAG
caggagggcctgggcagcgc

SEQ ID NO: 15685 - DNA, 20 bp, Artificial Sequence
  Description of Artificial Sequence: Synthetic oligonucleotide
  Target: COL7A1; (+) strand; PAM type: NRG; PAM sequence: TGG
agggcctgggcagcgccagc

SEQ ID NO: 15686 - DNA, 20 bp, Artificial Sequence
  Description of Artificial Sequence: Synthetic oligonucleotide
  Target: COL7A1; (+) strand; PAM type: NRG; PAM sequence: CGG
gcctgggcagcgccagctgg

SEQ ID NO: 15687 - DNA, 20 bp, Artificial Sequence
  Description of Artificial Sequence: Synthetic oligonucleotide
  Target: COL7A1; (+) strand; PAM type: NRG; PAM sequence: TGG
cagctggcggtccctccccc

SEQ ID NO: 15688 - DNA, 20 bp, Artificial Sequence
  Description of Artificial Sequence: Synthetic oligonucleotide
  Target: COL7A1; (+) strand; PAM type: NRG; PAM sequence: GGG
agctggcggtccctccccct

SEQ ID NO: 15689 - DNA, 20 bp, Artificial Sequence
  Description of Artificial Sequence: Synthetic oligonucleotide
  Target: COL7A1; (+) strand; PAM type: NRG; PAM sequence: TGG
ggcggtccctccccctgggc

SEQ ID NO: 15690 - DNA, 20 bp, Artificial Sequence
  Description of Artificial Sequence: Synthetic oligonucleotide
  Target: COL7A1; (+) strand; PAM type: NRG; PAM sequence: GAG
cggtccctccccctgggctg

SEQ ID NO: 15691 - DNA, 20 bp, Artificial Sequence
  Description of Artificial Sequence: Synthetic oligonucleotide
  Target: COL7A1; (+) strand; PAM type: NRG; PAM sequence: AGG
ggtccctccccctgggctgg

SEQ ID NO: 15692 - DNA, 20 bp, Artificial Sequence
  Description of Artificial Sequence: Synthetic oligonucleotide
  Target: COL7A1; (+) strand; PAM type: NRG; PAM sequence: AAG
ccctccccctgggctggagg

SEQ ID NO: 15693 - DNA, 20 bp, Artificial Sequence
  Description of Artificial Sequence: Synthetic oligonucleotide
  Target: COL7A1; (+) strand; PAM type: NRG; PAM sequence: TAG
ctggaggaagacactattta

SEQ ID NO: 15694 - DNA, 20 bp, Artificial Sequence
  Description of Artificial Sequence: Synthetic oligonucleotide
  Target: COL7A1; (+) strand; PAM type: NRG; PAM sequence: TGG
cactatttatagttccccct

SEQ ID NO: 15695 - DNA, 20 bp, Artificial Sequence
  Description of Artificial Sequence: Synthetic oligonucleotide
  Target: COL7A1; (+) strand; PAM type: NRG; PAM sequence: CAG
tttatagttcccccttggcc

SEQ ID NO: 15696 - DNA, 20 bp, Artificial Sequence
  Description of Artificial Sequence: Synthetic oligonucleotide
  Target: COL7A1; (+) strand; PAM type: NRG; PAM sequence: CAG
gcccagccccctctcccttg

SEQ ID NO: 15697 - DNA, 20 bp, Artificial Sequence
  Description of Artificial Sequence: Synthetic oligonucleotide
  Target: COL7A1; (+) strand; PAM type: NRG; PAM sequence: AGG
cccagccccctctcccttgc

SEQ ID NO: 15698 - DNA, 20 bp, Artificial Sequence
  Description of Artificial Sequence: Synthetic oligonucleotide
  Target: COL7A1; (+) strand; PAM type: NRG; PAM sequence: GGG
ccagccccctctcccttgca

SEQ ID NO: 15699 - DNA, 20 bp, Artificial Sequence
  Description of Artificial Sequence: Synthetic oligonucleotide
  Target: COL7A1; (+) strand; PAM type: NRG; PAM sequence: CAG
ccctctcccttgcagggcga

SEQ ID NO: 15700 - DNA, 20 bp, Artificial Sequence
  Description of Artificial Sequence: Synthetic oligonucleotide
  Target: COL7A1; (+) strand; PAM type: NRG; PAM sequence: CGG
cgacagttttccccctcctt

SEQ ID NO: 15701 - DNA, 20 bp, Artificial Sequence
  Description of Artificial Sequence: Synthetic oligonucleotide
  Target: COL7A1; (+) strand; PAM type: NRG; PAM sequence: GGG
gacagttttccccctccttc

SEQ ID NO: 15702 - DNA, 20 bp, Artificial Sequence
  Description of Artificial Sequence: Synthetic oligonucleotide
  Target: COL7A1; (+) strand; PAM type: NRG; PAM sequence: CAG
cccctccttcgggccactga

SEQ ID NO: 15703 - DNA, 20 bp, Artificial Sequence
  Description of Artificial Sequence: Synthetic oligonucleotide
  Target: COL7A1; (+) strand; PAM type: NRG; PAM sequence: TGG
tcgggccactgacagatgaa

SEQ ID NO: 15704 - DNA, 20 bp, Artificial Sequence
  Description of Artificial Sequence: Synthetic oligonucleotide
  Target: COL7A1; (+) strand; PAM type: NRG; PAM sequence: CAG
actgacagatgaatggccct

SEQ ID NO: 15705 - DNA, 20 bp, Artificial Sequence
  Description of Artificial Sequence: Synthetic oligonucleotide
  Target: COL7A1; (+) strand; PAM type: NRG; PAM sequence: GAG
tgacagatgaatggccctca

SEQ ID NO: 15706 - DNA, 20 bp, Artificial Sequence
  Description of Artificial Sequence: Synthetic oligonucleotide
  Target: COL7A1; (+) strand; PAM type: NRG; PAM sequence: CAG
ccctcagagcacccctaaac

SEQ ID NO: 15707 - DNA, 20 bp, Artificial Sequence
  Description of Artificial Sequence: Synthetic oligonucleotide
  Target: COL7A1; (+) strand; PAM type: NRG; PAM sequence: AGG
cctcagagcacccctaaacc

SEQ ID NO: 15708 - DNA, 20 bp, Artificial Sequence
  Description of Artificial Sequence: Synthetic oligonucleotide
  Target: COL7A1; (+) strand; PAM type: NRG; PAM sequence: GAG
tcagagcacccctaaaccag

SEQ ID NO: 15709 - DNA, 20 bp, Artificial Sequence
  Description of Artificial Sequence: Synthetic oligonucleotide
  Target: COL7A1; (+) strand; PAM type: NRG; PAM sequence: GAG
agagcacccctaaaccagga

SEQ ID NO: 15710 - DNA, 20 bp, Artificial Sequence
  Description of Artificial Sequence: Synthetic oligonucleotide
  Target: COL7A1; (+) strand; PAM type: NRG; PAM sequence: CAG
ccaacactctcgcacccctc

SEQ ID NO: 15711 - DNA, 20 bp, Artificial Sequence
  Description of Artificial Sequence: Synthetic oligonucleotide
  Target: COL7A1; (+) strand; PAM type: NRG; PAM sequence: CAG
agcaccaccctgacttcatc

SEQ ID NO: 15712 - DNA, 20 bp, Artificial Sequence
  Description of Artificial Sequence: Synthetic oligonucleotide
  Target: COL7A1; (+) strand; PAM type: NRG; PAM sequence: AGG
gcaccaccctgacttcatcc

SEQ ID NO: 15713 - DNA, 20 bp, Artificial Sequence
  Description of Artificial Sequence: Synthetic oligonucleotide
  Target: COL7A1; (+) strand; PAM type: NRG; PAM sequence: CGG
ctaccccgcctgctgctccc

SEQ ID NO: 15714 - DNA, 20 bp, Artificial Sequence
  Description of Artificial Sequence: Synthetic oligonucleotide
  Target: COL7A1; (+) strand; PAM type: NRG; PAM sequence: CAG
cgcctgctgctccccggccc

SEQ ID NO: 15715 - DNA, 20 bp, Artificial Sequence
  Description of Artificial Sequence: Synthetic oligonucleotide
  Target: COL7A1; (+) strand; PAM type: NRG; PAM sequence: AGG
gcctgctgctccccggcccc

SEQ ID NO: 15716 - DNA, 20 bp, Artificial Sequence
  Description of Artificial Sequence: Synthetic oligonucleotide
  Target: COL7A1; (+) strand; PAM type: NRG; PAM sequence: CGG
gctgctccccggccccaggt

SEQ ID NO: 15717 - DNA, 20 bp, Artificial Sequence
  Description of Artificial Sequence: Synthetic oligonucleotide
  Target: COL7A1; (+) strand; PAM type: NRG; PAM sequence: CAG
ctccccggccccaggtcggt

SEQ ID NO: 15718 - DNA, 20 bp, Artificial Sequence
  Description of Artificial Sequence: Synthetic oligonucleotide
  Target: COL7A1; (+) strand; PAM type: NRG; PAM sequence: AGG
tccccggccccaggtcggtc

SEQ ID NO: 15719 - DNA, 20 bp, Artificial Sequence
  Description of Artificial Sequence: Synthetic oligonucleotide
  Target: COL7A1; (+) strand; PAM type: NRG; PAM sequence: GGG
ccccggccccaggtcggtca

SEQ ID NO: 15720 - DNA, 20 bp, Artificial Sequence
  Description of Artificial Sequence: Synthetic oligonucleotide
  Target: COL7A1; (+) strand; PAM type: NRG; PAM sequence: GAG
ccggccccaggtcggtcagg

SEQ ID NO: 15721 - DNA, 20 bp, Artificial Sequence
  Description of Artificial Sequence: Synthetic oligonucleotide
  Target: COL7A1; (+) strand; PAM type: NRG; PAM sequence: GAG
tcagggagctgcctcctaac

SEQ ID NO: 15722 - DNA, 20 bp, Artificial Sequence
  Description of Artificial Sequence: Synthetic oligonucleotide
  Target: COL7A1; (+) strand; PAM type: NRG; PAM sequence: TGG
tgtccatcctgcaaccaaac

SEQ ID NO: 15723 - DNA, 20 bp, Artificial Sequence
  Description of Artificial Sequence: Synthetic oligonucleotide
  Target: COL7A1; (+) strand; PAM type: NRG; PAM sequence: CAG
catcctgcaaccaaactggc

SEQ ID NO: 15724 - DNA, 20 bp, Artificial Sequence
  Description of Artificial Sequence: Synthetic oligonucleotide
  Target: COL7A1; (+) strand; PAM type: NRG; PAM sequence: AGG
atcctgcaaccaaactggcc

SEQ ID NO: 15725 - DNA, 20 bp, Artificial Sequence
  Description of Artificial Sequence: Synthetic oligonucleotide
  Target: COL7A1; (+) strand; PAM type: NRG; PAM sequence: GGG
tcctgcaaccaaactggcca

SEQ ID NO: 15726 - DNA, 20 bp, Artificial Sequence
  Description of Artificial Sequence: Synthetic oligonucleotide
  Target: COL7A1; (+) strand; PAM type: NRG; PAM sequence: CAG
gccagggccactgccccctg

SEQ ID NO: 15727 - DNA, 20 bp, Artificial Sequence
  Description of Artificial Sequence: Synthetic oligonucleotide
  Target: COL7A1; (+) strand; PAM type: NRG; PAM sequence: CAG
gccactgccccctgcagctc

SEQ ID NO: 15728 - DNA, 20 bp, Artificial Sequence
  Description of Artificial Sequence: Synthetic oligonucleotide
  Target: COL7A1; (+) strand; PAM type: NRG; PAM sequence: GAG
cactgccccctgcagctcca

SEQ ID NO: 15729 - DNA, 20 bp, Artificial Sequence
  Description of Artificial Sequence: Synthetic oligonucleotide
  Target: COL7A1; (+) strand; PAM type: NRG; PAM sequence: TGG
tgccccctgcagctccagag

SEQ ID NO: 15730 - DNA, 20 bp, Artificial Sequence
  Description of Artificial Sequence: Synthetic oligonucleotide
  Target: COL7A1; (+) strand; PAM type: NRG; PAM sequence: GGG
gccccctgcagctccagagt

SEQ ID NO: 15731 - DNA, 20 bp, Artificial Sequence
  Description of Artificial Sequence: Synthetic oligonucleotide
  Target: COL7A1; (+) strand; PAM type: NRG; PAM sequence: GGG
ccccctgcagctccagagtg

SEQ ID NO: 15732 - DNA, 20 bp, Artificial Sequence
  Description of Artificial Sequence: Synthetic oligonucleotide
  Target: COL7A1; (+) strand; PAM type: NRG; PAM sequence: TAG
cagagtggggtaaccccgcc

SEQ ID NO: 15733 - DNA, 20 bp, Artificial Sequence
  Description of Artificial Sequence: Synthetic oligonucleotide
  Target: COL7A1; (+) strand; PAM type: NRG; PAM sequence: AAG
taaccccgcctagcactctg

SEQ ID NO: 15734 - DNA, 20 bp, Artificial Sequence
  Description of Artificial Sequence: Synthetic oligonucleotide
  Target: COL7A1; (+) strand; PAM type: NRG; PAM sequence: GAG
accccgcctagcactctgaa

SEQ ID NO: 15735 - DNA, 20 bp, Artificial Sequence
  Description of Artificial Sequence: Synthetic oligonucleotide
  Target: COL7A1; (+) strand; PAM type: NRG; PAM sequence: GAG
cccgcctagcactctgaaga

SEQ ID NO: 15736 - DNA, 20 bp, Artificial Sequence
  Description of Artificial Sequence: Synthetic oligonucleotide
  Target: COL7A1; (+) strand; PAM type: NRG; PAM sequence: GAG
cgcctagcactctgaagaga

SEQ ID NO: 15737 - DNA, 20 bp, Artificial Sequence
  Description of Artificial Sequence: Synthetic oligonucleotide
  Target: COL7A1; (+) strand; PAM type: NRG; PAM sequence: AAG
ctagcactctgaagagagag

SEQ ID NO: 15738 - DNA, 20 bp, Artificial Sequence
  Description of Artificial Sequence: Synthetic oligonucleotide
  Target: COL7A1; (+) strand; PAM type: NRG; PAM sequence: CGG
agagagagaagcgactcctg

SEQ ID NO: 15739 - DNA, 20 bp, Artificial Sequence
  Description of Artificial Sequence: Synthetic oligonucleotide
  Target: COL7A1; (+) strand; PAM type: NRG; PAM sequence: CAG
agcgactcctgcggctcctg

SEQ ID NO: 15740 - DNA, 20 bp, Artificial Sequence
  Description of Artificial Sequence: Synthetic oligonucleotide
  Target: COL7A1; (+) strand; PAM type: NRG; PAM sequence: CAG
ctcctgcagccccgcctccc

SEQ ID NO: 15741 - DNA, 20 bp, Artificial Sequence
  Description of Artificial Sequence: Synthetic oligonucleotide
  Target: COL7A1; (+) strand; PAM type: NRG; PAM sequence: TAG
cccgcctccccagcccactg

SEQ ID NO: 15742 - DNA, 20 bp, Artificial Sequence
  Description of Artificial Sequence: Synthetic oligonucleotide
  Target: COL7A1; (+) strand; PAM type: NRG; PAM sequence: AGG
ccgcctccccagcccactgt

SEQ ID NO: 15743 - DNA, 20 bp, Artificial Sequence
  Description of Artificial Sequence: Synthetic oligonucleotide
  Target: COL7A1; (+) strand; PAM type: NRG; PAM sequence: CAG
ccactgtaggcccgccccca

SEQ ID NO: 15744 - DNA, 20 bp, Artificial Sequence
  Description of Artificial Sequence: Synthetic oligonucleotide
  Target: COL7A1; (+) strand; PAM type: NRG; PAM sequence: AGG
cactgtaggcccgcccccac

SEQ ID NO: 15745 - DNA, 20 bp, Artificial Sequence
  Description of Artificial Sequence: Synthetic oligonucleotide
  Target: COL7A1; (+) strand; PAM type: NRG; PAM sequence: GGG
actgtaggcccgcccccaca

SEQ ID NO: 15746 - DNA, 20 bp, Artificial Sequence
  Description of Artificial Sequence: Synthetic oligonucleotide
  Target: COL7A1; (+) strand; PAM type: NRG; PAM sequence: GAG
acagggctgcttacaactgt

SEQ ID NO: 15747 - DNA, 20 bp, Artificial Sequence
  Description of Artificial Sequence: Synthetic oligonucleotide
  Target: COL7A1; (+) strand; PAM type: NRG; PAM sequence: AGG
cagggctgcttacaactgtg

SEQ ID NO: 15748 - DNA, 20 bp, Artificial Sequence
  Description of Artificial Sequence: Synthetic oligonucleotide
  Target: COL7A1; (+) strand; PAM type: NRG; PAM sequence: GGG
agggctgcttacaactgtga

SEQ ID NO: 15749 - DNA, 20 bp, Artificial Sequence
  Description of Artificial Sequence: Synthetic oligonucleotide
  Target: COL7A1; (+) strand; PAM type: NRG; PAM sequence: CAG
gctgcttacaactgtgaggg

SEQ ID NO: 15750 - DNA, 20 bp, Artificial Sequence
  Description of Artificial Sequence: Synthetic oligonucleotide
  Target: COL7A1; (+) strand; PAM type: NRG; PAM sequence: CAG
tacaactgtgagggcagcgc

SEQ ID NO: 15751 - DNA, 20 bp, Artificial Sequence
  Description of Artificial Sequence: Synthetic oligonucleotide
  Target: COL7A1; (+) strand; PAM type: NRG; PAM sequence: CAG
cagcgccagtgcccccactc

SEQ ID NO: 15752 - DNA, 20 bp, Artificial Sequence
  Description of Artificial Sequence: Synthetic oligonucleotide
  Target: COL7A1; (+) strand; PAM type: NRG; PAM sequence: CAG
gccagtgcccccactccagt

SEQ ID NO: 15753 - DNA, 20 bp, Artificial Sequence
  Description of Artificial Sequence: Synthetic oligonucleotide
  Target: COL7A1; (+) strand; PAM type: NRG; PAM sequence: CGG
gtgcccccactccagtcagc

SEQ ID NO: 15754 - DNA, 20 bp, Artificial Sequence
  Description of Artificial Sequence: Synthetic oligonucleotide
  Target: COL7A1; (+) strand; PAM type: NRG; PAM sequence: TGG
ccagtcagccggccacgctg

SEQ ID NO: 15755 - DNA, 20 bp, Artificial Sequence
  Description of Artificial Sequence: Synthetic oligonucleotide
  Target: COL7A1; (+) strand; PAM type: NRG; PAM sequence: CAG
tcagccggccacgctgtggc

SEQ ID NO: 15756 - DNA, 20 bp, Artificial Sequence
  Description of Artificial Sequence: Synthetic oligonucleotide
  Target: COL7A1; (+) strand; PAM type: NRG; PAM sequence: CAG
cggccacgctgtggccagta

SEQ ID NO: 15757 - DNA, 20 bp, Artificial Sequence
  Description of Artificial Sequence: Synthetic oligonucleotide
  Target: COL7A1; (+) strand; PAM type: NRG; PAM sequence: CAG
gtacagtctccctctcccgc

SEQ ID NO: 15758 - DNA, 20 bp, Artificial Sequence
  Description of Artificial Sequence: Synthetic oligonucleotide
  Target: COL7A1; (+) strand; PAM type: NRG; PAM sequence: GAG
acagtctccctctcccgcca

SEQ ID NO: 15759 - DNA, 20 bp, Artificial Sequence
  Description of Artificial Sequence: Synthetic oligonucleotide
  Target: COL7A1; (+) strand; PAM type: NRG; PAM sequence: CAG
ccagagctgcccatgccacc

SEQ ID NO: 15760 - DNA, 20 bp, Artificial Sequence
  Description of Artificial Sequence: Synthetic oligonucleotide
  Target: COL7A1; (+) strand; PAM type: NRG; PAM sequence: TAG
cgtctgccttcatgtccacc

SEQ ID NO: 15761 - DNA, 20 bp, Artificial Sequence
  Description of Artificial Sequence: Synthetic oligonucleotide
  Target: COL7A1; (+) strand; PAM type: NRG; PAM sequence: GAG
tctgccttcatgtccaccta

SEQ ID NO: 15762 - DNA, 20 bp, Artificial Sequence
  Description of Artificial Sequence: Synthetic oligonucleotide
  Target: COL7A1; (+) strand; PAM type: NRG; PAM sequence: CAG
tccacctagagttgtctgca

SEQ ID NO: 15763 - DNA, 20 bp, Artificial Sequence
  Description of Artificial Sequence: Synthetic oligonucleotide
  Target: COL7A1; (+) strand; PAM type: NRG; PAM sequence: CAG
ctagagttgtctgcacagcc

SEQ ID NO: 15764 - DNA, 20 bp, Artificial Sequence
  Description of Artificial Sequence: Synthetic oligonucleotide
  Target: COL7A1; (+) strand; PAM type: NRG; PAM sequence: GAG
agagttgtctgcacagccca

SEQ ID NO: 15765 - DNA, 20 bp, Artificial Sequence
  Description of Artificial Sequence: Synthetic oligonucleotide
  Target: COL7A1; (+) strand; PAM type: NRG; PAM sequence: CGG
cagagtgcctgccccctctg

SEQ ID NO: 15766 - DNA, 20 bp, Artificial Sequence
  Description of Artificial Sequence: Synthetic oligonucleotide
  Target: COL7A1; (+) strand; PAM type: NRG; PAM sequence: GGG
agagtgcctgccccctctgc

SEQ ID NO: 15767 - DNA, 20 bp, Artificial Sequence
  Description of Artificial Sequence: Synthetic oligonucleotide
  Target: COL7A1; (+) strand; PAM type: NRG; PAM sequence: AAG
tgcctgccccctctgcgggc

SEQ ID NO: 15768 - DNA, 20 bp, Artificial Sequence
  Description of Artificial Sequence: Synthetic oligonucleotide
  Target: COL7A1; (+) strand; PAM type: NRG; PAM sequence: TGG
gcaagcccgtccacactgcc

SEQ ID NO: 15769 - DNA, 20 bp, Artificial Sequence
  Description of Artificial Sequence: Synthetic oligonucleotide
  Target: COL7A1; (+) strand; PAM type: NRG; PAM sequence: AAG
gcccgtccacactgcctgga

SEQ ID NO: 15770 - DNA, 20 bp, Artificial Sequence
  Description of Artificial Sequence: Synthetic oligonucleotide
  Target: COL7A1; (+) strand; PAM type: NRG; PAM sequence: CAG
gtccacactgcctggaaagt

SEQ ID NO: 15771 - DNA, 20 bp, Artificial Sequence
  Description of Artificial Sequence: Synthetic oligonucleotide
  Target: COL7A1; (+) strand; PAM type: NRG; PAM sequence: TGG
tggaaagtcagttctgtctc

SEQ ID NO: 15772 - DNA, 20 bp, Artificial Sequence
  Description of Artificial Sequence: Synthetic oligonucleotide
  Target: COL7A1; (+) strand; PAM type: NRG; PAM sequence: CAG
agtcagttctgtctctggcc

SEQ ID NO: 15773 - DNA, 20 bp, Artificial Sequence
  Description of Artificial Sequence: Synthetic oligonucleotide
  Target: COL7A1; (+) strand; PAM type: NRG; PAM sequence: TGG
ttctgtctctggcccagcaa

SEQ ID NO: 15774 - DNA, 20 bp, Artificial Sequence
  Description of Artificial Sequence: Synthetic oligonucleotide
  Target: COL7A1; (+) strand; PAM type: NRG; PAM sequence: GAG
ctgtctctggcccagcaatg

SEQ ID NO: 15775 - DNA, 20 bp, Artificial Sequence
  Description of Artificial Sequence: Synthetic oligonucleotide
  Target: COL7A1; (+) strand; PAM type: NRG; PAM sequence: TGG
ctctggcccagcaatggagt

SEQ ID NO: 15776 - DNA, 20 bp, Artificial Sequence
  Description of Artificial Sequence: Synthetic oligonucleotide
  Target: COL7A1; (+) strand; PAM type: NRG; PAM sequence: GGG
tctggcccagcaatggagtt

SEQ ID NO: 15777 - DNA, 20 bp, Artificial Sequence
  Description of Artificial Sequence: Synthetic oligonucleotide
  Target: COL7A1; (+) strand; PAM type: NRG; PAM sequence: CAG
atggagttgggctgtgaaat

SEQ ID NO: 15778 - DNA, 20 bp, Artificial Sequence
  Description of Artificial Sequence: Synthetic oligonucleotide
  Target: COL7A1; (+) strand; PAM type: NRG; PAM sequence: AGG
tggagttgggctgtgaaatc

SEQ ID NO: 15779 - DNA, 20 bp, Artificial Sequence
  Description of Artificial Sequence: Synthetic oligonucleotide
  Target: COL7A1; (+) strand; PAM type: NRG; PAM sequence: TAG
ctgtgaaatcaggcaaaacc

SEQ ID NO: 15780 - DNA, 20 bp, Artificial Sequence
  Description of Artificial Sequence: Synthetic oligonucleotide
  Target: COL7A1; (+) strand; PAM type: NRG; PAM sequence: AAG
aaacctagtccttccaaacc

SEQ ID NO: 15781 - DNA, 20 bp, Artificial Sequence
  Description of Artificial Sequence: Synthetic oligonucleotide
  Target: COL7A1; (+) strand; PAM type: NRG; PAM sequence: AGG
aacctagtccttccaaacca

SEQ ID NO: 15782 - DNA, 20 bp, Artificial Sequence
  Description of Artificial Sequence: Synthetic oligonucleotide
  Target: COL7A1; (+) strand; PAM type: NRG; PAM sequence: GGG
acctagtccttccaaaccaa

SEQ ID NO: 15783 - DNA, 20 bp, Artificial Sequence
  Description of Artificial Sequence: Synthetic oligonucleotide
  Target: COL7A1; (+) strand; PAM type: NRG; PAM sequence: CAG
gtccttccaaaccaagggac

SEQ ID NO: 15784 - DNA, 20 bp, Artificial Sequence
  Description of Artificial Sequence: Synthetic oligonucleotide
  Target: COL7A1; (+) strand; PAM type: NRG; PAM sequence: AGG
tccttccaaaccaagggacc

SEQ ID NO: 15785 - DNA, 20 bp, Artificial Sequence
  Description of Artificial Sequence: Synthetic oligonucleotide
  Target: COL7A1; (+) strand; PAM type: NRG; PAM sequence: CAG
tccaaaccaagggaccaggt

SEQ ID NO: 15786 - DNA, 20 bp, Artificial Sequence
  Description of Artificial Sequence: Synthetic oligonucleotide
  Target: COL7A1; (+) strand; PAM type: NRG; PAM sequence: CGG
aagggaccaggtcagttaac

SEQ ID NO: 15787 - DNA, 20 bp, Artificial Sequence
  Description of Artificial Sequence: Synthetic oligonucleotide
  Target: COL7A1; (+) strand; PAM type: NRG; PAM sequence: GGG
agggaccaggtcagttaacc

SEQ ID NO: 15788 - DNA, 20 bp, Artificial Sequence
  Description of Artificial Sequence: Synthetic oligonucleotide
  Target: COL7A1; (+) strand; PAM type: NRG; PAM sequence: GGG
gggaccaggtcagttaaccg

SEQ ID NO: 15789 - DNA, 20 bp, Artificial Sequence
  Description of Artificial Sequence: Synthetic oligonucleotide
  Target: COL7A1; (+) strand; PAM type: NRG; PAM sequence: GAG
gaccaggtcagttaaccggg

SEQ ID NO: 15790 - DNA, 20 bp, Artificial Sequence
  Description of Artificial Sequence: Synthetic oligonucleotide
  Target: COL7A1; (+) strand; PAM type: NRG; PAM sequence: TAG
aggtcagttaaccggggagc

SEQ ID NO: 15791 - DNA, 20 bp, Artificial Sequence
  Description of Artificial Sequence: Synthetic oligonucleotide
  Target: COL7A1; (+) strand; PAM type: NRG; PAM sequence: AGG
ggtcagttaaccggggagct

SEQ ID NO: 15792 - DNA, 20 bp, Artificial Sequence
  Description of Artificial Sequence: Synthetic oligonucleotide
  Target: COL7A1; (+) strand; PAM type: NRG; PAM sequence: GGG
gtcagttaaccggggagcta

SEQ ID NO: 15793 - DNA, 20 bp, Artificial Sequence
  Description of Artificial Sequence: Synthetic oligonucleotide
  Target: COL7A1; (+) strand; PAM type: NRG; PAM sequence: GAG
cagttaaccggggagctagg

SEQ ID NO: 15794 - DNA, 20 bp, Artificial Sequence
  Description of Artificial Sequence: Synthetic oligonucleotide
  Target: COL7A1; (+) strand; PAM type: NRG; PAM sequence: AGG
agttaaccggggagctaggg

SEQ ID NO: 15795 - DNA, 20 bp, Artificial Sequence
  Description of Artificial Sequence: Synthetic oligonucleotide
  Target: COL7A1; (+) strand; PAM type: NRG; PAM sequence: AAG
taaccggggagctagggagg

SEQ ID NO: 15796 - DNA, 20 bp, Artificial Sequence
  Description of Artificial Sequence: Synthetic oligonucleotide
  Target: COL7A1; (+) strand; PAM type: NRG; PAM sequence: AGG
aaccggggagctagggagga

SEQ ID NO: 15797 - DNA, 20 bp, Artificial Sequence
  Description of Artificial Sequence: Synthetic oligonucleotide
  Target: COL7A1; (+) strand; PAM type: NRG; PAM sequence: CAG
cggggagctagggaggaagg

SEQ ID NO: 15798 - DNA, 20 bp, Artificial Sequence
  Description of Artificial Sequence: Synthetic oligonucleotide
  Target: COL7A1; (+) strand; PAM type: NRG; PAM sequence: GAG
gggagctagggaggaaggca

SEQ ID NO: 15799 - DNA, 20 bp, Artificial Sequence
  Description of Artificial Sequence: Synthetic oligonucleotide
  Target: COL7A1; (+) strand; PAM type: NRG; PAM sequence: AAG
agctagggaggaaggcagag

SEQ ID NO: 15800 - DNA, 20 bp, Artificial Sequence
  Description of Artificial Sequence: Synthetic oligonucleotide
  Target: COL7A1; (+) strand; PAM type: NRG; PAM sequence: CAG
agggaggaaggcagagaagc

SEQ ID NO: 15801 - DNA, 20 bp, Artificial Sequence
  Description of Artificial Sequence: Synthetic oligonucleotide
  Target: COL7A1; (+) strand; PAM type: NRG; PAM sequence: AGG
gggaggaaggcagagaagcc

SEQ ID NO: 15802 - DNA, 20 bp, Artificial Sequence
  Description of Artificial Sequence: Synthetic oligonucleotide
  Target: COL7A1; (+) strand; PAM type: NRG; PAM sequence: CGG
gactcacccaccatgtgtcg

SEQ ID NO: 15803 - DNA, 20 bp, Artificial Sequence
  Description of Artificial Sequence: Synthetic oligonucleotide
  Target: COL7A1; (+) strand; PAM type: NRG; PAM sequence: TGG
acccaccatgtgtcgcggcc

SEQ ID NO: 15804 - DNA, 20 bp, Artificial Sequence
  Description of Artificial Sequence: Synthetic oligonucleotide
  Target: COL7A1; (+) strand; PAM type: NRG; PAM sequence: GGG
cccaccatgtgtcgcggcct

SEQ ID NO: 15805 - DNA, 20 bp, Artificial Sequence
  Description of Artificial Sequence: Synthetic oligonucleotide
  Target: COL7A1; (+) strand; PAM type: NRG; PAM sequence: TGG
gcggcctgggtgcacaccac

SEQ ID NO: 15806 - DNA, 20 bp, Artificial Sequence
  Description of Artificial Sequence: Synthetic oligonucleotide
  Target: COL7A1; (+) strand; PAM type: NRG; PAM sequence: GGG
cggcctgggtgcacaccact

SEQ ID NO: 15807 - DNA, 20 bp, Artificial Sequence
  Description of Artificial Sequence: Synthetic oligonucleotide
  Target: COL7A1; (+) strand; PAM type: NRG; PAM sequence: CAG
ttctcgcacatcccatcctt

SEQ ID NO: 15808 - DNA, 20 bp, Artificial Sequence
  Description of Artificial Sequence: Synthetic oligonucleotide
  Target: COL7A1; (+) strand; PAM type: NRG; PAM sequence: GAG
tcagtcgctttgtgtttatt

SEQ ID NO: 15809 - DNA, 20 bp, Artificial Sequence
  Description of Artificial Sequence: Synthetic oligonucleotide
  Target: COL7A1; (+) strand; PAM type: NRG; PAM sequence: CAG
ttattgagcacctcctgctg

SEQ ID NO: 15810 - DNA, 20 bp, Artificial Sequence
  Description of Artificial Sequence: Synthetic oligonucleotide
  Target: COL7A1; (+) strand; PAM type: NRG; PAM sequence: AGG
tattgagcacctcctgctgc

SEQ ID NO: 15811 - DNA, 20 bp, Artificial Sequence
  Description of Artificial Sequence: Synthetic oligonucleotide
  Target: COL7A1; (+) strand; PAM type: NRG; PAM sequence: CAG
tgctacatacacaatgctca

SEQ ID NO: 15812 - DNA, 20 bp, Artificial Sequence
  Description of Artificial Sequence: Synthetic oligonucleotide
  Target: COL7A1; (+) strand; PAM type: NRG; PAM sequence: AGG
gctacatacacaatgctcac

SEQ ID NO: 15813 - DNA, 20 bp, Artificial Sequence
  Description of Artificial Sequence: Synthetic oligonucleotide
  Target: COL7A1; (+) strand; PAM type: NRG; PAM sequence: TGG
cacaatgctcacaggcttgc

SEQ ID NO: 15814 - DNA, 20 bp, Artificial Sequence
  Description of Artificial Sequence: Synthetic oligonucleotide
  Target: COL7A1; (+) strand; PAM type: NRG; PAM sequence: CAG
ggcttgctggtcccatcctt

SEQ ID NO: 15815 - DNA, 20 bp, Artificial Sequence
  Description of Artificial Sequence: Synthetic oligonucleotide
  Target: COL7A1; (+) strand; PAM type: NRG; PAM sequence: GAG
tcagtcgctttgtgtttatt

SEQ ID NO: 15816 - DNA, 20 bp, Artificial Sequence
  Description of Artificial Sequence: Synthetic oligonucleotide
  Target: COL7A1; (+) strand; PAM type: NRG; PAM sequence: CAG
ttattgagcacctcctgctg

SEQ ID NO: 15817 - DNA, 20 bp, Artificial Sequence
  Description of Artificial Sequence: Synthetic oligonucleotide
  Target: COL7A1; (+) strand; PAM type: NRG; PAM sequence: AGG
tattgagcacctcctgctgc

SEQ ID NO: 15818 - DNA, 20 bp, Artificial Sequence
  Description of Artificial Sequence: Synthetic oligonucleotide
  Target: COL7A1; (+) strand; PAM type: NRG; PAM sequence: CAG
tgctatatacacaatgctca

SEQ ID NO: 15819 - DNA, 20 bp, Artificial Sequence
  Description of Artificial Sequence: Synthetic oligonucleotide
  Target: COL7A1; (+) strand; PAM type: NRG; PAM sequence: AGG
gctatatacacaatgctcac

SEQ ID NO: 15820 - DNA, 20 bp, Artificial Sequence
  Description of Artificial Sequence: Synthetic oligonucleotide
  Target: COL7A1; (+) strand; PAM type: NRG; PAM sequence: TGG
cacaatgctcacaggcttgc

SEQ ID NO: 15821 - DNA, 20 bp, Artificial Sequence
  Description of Artificial Sequence: Synthetic oligonucleotide
  Target: COL7A1; (+) strand; PAM type: NRG; PAM sequence: CAG
gctggtgtcgctttgcttta

SEQ ID NO: 15822 - DNA, 20 bp, Artificial Sequence
  Description of Artificial Sequence: Synthetic oligonucleotide
  Target: COL7A1; (+) strand; PAM type: NRG; PAM sequence: AAG
tgtcgctttgctttacagat

SEQ ID NO: 15823 - DNA, 20 bp, Artificial Sequence
  Description of Artificial Sequence: Synthetic oligonucleotide
  Target: COL7A1; (+) strand; PAM type: NRG; PAM sequence: AGG
gtcgctttgctttacagata

SEQ ID NO: 15824 - DNA, 20 bp, Artificial Sequence
  Description of Artificial Sequence: Synthetic oligonucleotide
  Target: COL7A1; (+) strand; PAM type: NRG; PAM sequence: GAG
gctttacagataaggaaacc

SEQ ID NO: 15825 - DNA, 20 bp, Artificial Sequence
  Description of Artificial Sequence: Synthetic oligonucleotide
  Target: COL7A1; (+) strand; PAM type: NRG; PAM sequence: AGG
ctttacagataaggaaaccg

SEQ ID NO: 15826 - DNA, 20 bp, Artificial Sequence
  Description of Artificial Sequence: Synthetic oligonucleotide
  Target: COL7A1; (+) strand; PAM type: NRG; PAM sequence: CGG
cagataaggaaaccgaggct

SEQ ID NO: 15827 - DNA, 20 bp, Artificial Sequence
  Description of Artificial Sequence: Synthetic oligonucleotide
  Target: COL7A1; (+) strand; PAM type: NRG; PAM sequence: AAG
taaggaaaccgaggctcgga

SEQ ID NO: 15828 - DNA, 20 bp, Artificial Sequence
  Description of Artificial Sequence: Synthetic oligonucleotide
  Target: COL7A1; (+) strand; PAM type: NRG; PAM sequence: AGG
aaggaaaccgaggctcggaa

SEQ ID NO: 15829 - DNA, 20 bp, Artificial Sequence
  Description of Artificial Sequence: Synthetic oligonucleotide
  Target: COL7A1; (+) strand; PAM type: NRG; PAM sequence: CAG
gaaaggtgaacacctttgcc

SEQ ID NO: 15830 - DNA, 20 bp, Artificial Sequence
  Description of Artificial Sequence: Synthetic oligonucleotide
  Target: COL7A1; (+) strand; PAM type: NRG; PAM sequence: AGG
aaaggtgaacacctttgccc

SEQ ID NO: 15831 - DNA, 20 bp, Artificial Sequence
  Description of Artificial Sequence: Synthetic oligonucleotide
  Target: COL7A1; (+) strand; PAM type: NRG; PAM sequence: CAG
gtgaacacctttgcccagga

SEQ ID NO: 15832 - DNA, 20 bp, Artificial Sequence
  Description of Artificial Sequence: Synthetic oligonucleotide
  Target: COL7A1; (+) strand; PAM type: NRG; PAM sequence: AAG
cccaggacagtccgtgcgtg

SEQ ID NO: 15833 - DNA, 20 bp, Artificial Sequence
  Description of Artificial Sequence: Synthetic oligonucleotide
  Target: COL7A1; (+) strand; PAM type: NRG; PAM sequence: TGG
aggacagtccgtgcgtgaag

SEQ ID NO: 15834 - DNA, 20 bp, Artificial Sequence
  Description of Artificial Sequence: Synthetic oligonucleotide
  Target: COL7A1; (+) strand; PAM type: NRG; PAM sequence: GGG
ggacagtccgtgcgtgaagt

SEQ ID NO: 15835 - DNA, 20 bp, Artificial Sequence
  Description of Artificial Sequence: Synthetic oligonucleotide
  Target: COL7A1; (+) strand; PAM type: NRG; PAM sequence: CAG
agtccgtgcgtgaagtggga

SEQ ID NO: 15836 - DNA, 20 bp, Artificial Sequence
  Description of Artificial Sequence: Synthetic oligonucleotide
  Target: COL7A1; (+) strand; PAM type: NRG; PAM sequence: GAG
tccgtgcgtgaagtgggaca

SEQ ID NO: 15837 - DNA, 20 bp, Artificial Sequence
  Description of Artificial Sequence: Synthetic oligonucleotide
  Target: COL7A1; (+) strand; PAM type: NRG; PAM sequence: TGG
gcgtgaagtgggacagagtt

SEQ ID NO: 15838 - DNA, 20 bp, Artificial Sequence
  Description of Artificial Sequence: Synthetic oligonucleotide
  Target: COL7A1; (+) strand; PAM type: NRG; PAM sequence: TGG
gaagtgggacagagtttggt

SEQ ID NO: 15839 - DNA, 20 bp, Artificial Sequence
  Description of Artificial Sequence: Synthetic oligonucleotide
  Target: COL7A1; (+) strand; PAM type: NRG; PAM sequence: GAG
agtgggacagagtttggttg

SEQ ID NO: 15840 - DNA, 20 bp, Artificial Sequence
  Description of Artificial Sequence: Synthetic oligonucleotide
  Target: COL7A1; (+) strand; PAM type: NRG; PAM sequence: CGG
acagagtttggttggagctc

SEQ ID NO: 15841 - DNA, 20 bp, Artificial Sequence
  Description of Artificial Sequence: Synthetic oligonucleotide
  Target: COL7A1; (+) strand; PAM type: NRG; PAM sequence: CAG
gagtttggttggagctccgg

SEQ ID NO: 15842 - DNA, 20 bp, Artificial Sequence
  Description of Artificial Sequence: Synthetic oligonucleotide
  Target: COL7A1; (+) strand; PAM type: NRG; PAM sequence: GAG
ggttggagctccggcagcct

SEQ ID NO: 15843 - DNA, 20 bp, Artificial Sequence
  Description of Artificial Sequence: Synthetic oligonucleotide
  Target: COL7A1; (+) strand; PAM type: NRG; PAM sequence: GAG
gcctgagccctgtctcctgt

SEQ ID NO: 15844 - DNA, 20 bp, Artificial Sequence
  Description of Artificial Sequence: Synthetic oligonucleotide
  Target: COL7A1; (+) strand; PAM type: NRG; PAM sequence: TGG
ctgtgagccctgcatgtccc

SEQ ID NO: 15845 - DNA, 20 bp, Artificial Sequence
  Description of Artificial Sequence: Synthetic oligonucleotide
  Target: COL7A1; (+) strand; PAM type: NRG; PAM sequence: GGG
tgtgagccctgcatgtccct

SEQ ID NO: 15846 - DNA, 20 bp, Artificial Sequence
  Description of Artificial Sequence: Synthetic oligonucleotide
  Target: COL7A1; (+) strand; PAM type: NRG; PAM sequence: GAG
gccctgcatgtccctgggtc

SEQ ID NO: 15847 - DNA, 20 bp, Artificial Sequence
  Description of Artificial Sequence: Synthetic oligonucleotide
  Target: COL7A1; (+) strand; PAM type: NRG; PAM sequence: AGG
ccctgcatgtccctgggtcg

SEQ ID NO: 15848 - DNA, 20 bp, Artificial Sequence
  Description of Artificial Sequence: Synthetic oligonucleotide
  Target: COL7A1; (+) strand; PAM type: NRG; PAM sequence: TGG
gcatgtccctgggtcgaggc

SEQ ID NO: 15849 - DNA, 20 bp, Artificial Sequence
  Description of Artificial Sequence: Synthetic oligonucleotide
  Target: COL7A1; (+) strand; PAM type: NRG; PAM sequence: GGG
catgtccctgggtcgaggct

SEQ ID NO: 15850 - DNA, 20 bp, Artificial Sequence
  Description of Artificial Sequence: Synthetic oligonucleotide
  Target: COL7A1; (+) strand; PAM type: NRG; PAM sequence: GGG
atgtccctgggtcgaggctg

SEQ ID NO: 15851 - DNA, 20 bp, Artificial Sequence
  Description of Artificial Sequence: Synthetic oligonucleotide
  Target: COL7A1; (+) strand; PAM type: NRG; PAM sequence: CAG
ctgggtcgaggctggggatg

SEQ ID NO: 15852 - DNA, 20 bp, Artificial Sequence
  Description of Artificial Sequence: Synthetic oligonucleotide
  Target: COL7A1; (+) strand; PAM type: NRG; PAM sequence: AGG
tgggtcgaggctggggatgc

SEQ ID NO: 15853 - DNA, 20 bp, Artificial Sequence
  Description of Artificial Sequence: Synthetic oligonucleotide
  Target: COL7A1; (+) strand; PAM type: NRG; PAM sequence: GGG
gggtcgaggctggggatgca

SEQ ID NO: 15854 - DNA, 20 bp, Artificial Sequence
  Description of Artificial Sequence: Synthetic oligonucleotide
  Target: COL7A1; (+) strand; PAM type: NRG; PAM sequence: GGG
ggtcgaggctggggatgcag

SEQ ID NO: 15855 - DNA, 20 bp, Artificial Sequence
  Description of Artificial Sequence: Synthetic oligonucleotide
  Target: COL7A1; (+) strand; PAM type: NRG; PAM sequence: TGG
gctggggatgcaggggtacg

SEQ ID NO: 15856 - DNA, 20 bp, Artificial Sequence
  Description of Artificial Sequence: Synthetic oligonucleotide
  Target: COL7A1; (+) strand; PAM type: NRG; PAM sequence: GGG
ctggggatgcaggggtacgt

SEQ ID NO: 15857 - DNA, 20 bp, Artificial Sequence
  Description of Artificial Sequence: Synthetic oligonucleotide
  Target: COL7A1; (+) strand; PAM type: NRG; PAM sequence: GGG
tggggatgcaggggtacgtg

SEQ ID NO: 15858 - DNA, 20 bp, Artificial Sequence
  Description of Artificial Sequence: Synthetic oligonucleotide
  Target: COL7A1; (+) strand; PAM type: NRG; PAM sequence: GAG
gggatgcaggggtacgtggg

SEQ ID NO: 15859 - DNA, 20 bp, Artificial Sequence
  Description of Artificial Sequence: Synthetic oligonucleotide
  Target: COL7A1; (+) strand; PAM type: NRG; PAM sequence: AGG
ggatgcaggggtacgtgggg

SEQ ID NO: 15860 - DNA, 20 bp, Artificial Sequence
  Description of Artificial Sequence: Synthetic oligonucleotide
  Target: COL7A1; (+) strand; PAM type: NRG; PAM sequence: CAG
gcaggggtacgtggggagga

SEQ ID NO: 15861 - DNA, 20 bp, Artificial Sequence
  Description of Artificial Sequence: Synthetic oligonucleotide
  Target: COL7A1; (+) strand; PAM type: NRG; PAM sequence: AGG
caggggtacgtggggaggac

SEQ ID NO: 15862 - DNA, 20 bp, Artificial Sequence
  Description of Artificial Sequence: Synthetic oligonucleotide
  Target: COL7A1; (+) strand; PAM type: NRG; PAM sequence: GGG
aggggtacgtggggaggaca

SEQ ID NO: 15863 - DNA, 20 bp, Artificial Sequence
  Description of Artificial Sequence: Synthetic oligonucleotide
  Target: COL7A1; (+) strand; PAM type: NRG; PAM sequence: TGG
tacgtggggaggacagggcc

SEQ ID NO: 15864 - DNA, 20 bp, Artificial Sequence
  Description of Artificial Sequence: Synthetic oligonucleotide
  Target: COL7A1; (+) strand; PAM type: NRG; PAM sequence: CAG
tggggaggacagggcctggc

SEQ ID NO: 15865 - DNA, 20 bp, Artificial Sequence
  Description of Artificial Sequence: Synthetic oligonucleotide
  Target: COL7A1; (+) strand; PAM type: NRG; PAM sequence: AGG
ggggaggacagggcctggcc

SEQ ID NO: 15866 - DNA, 20 bp, Artificial Sequence
  Description of Artificial Sequence: Synthetic oligonucleotide
  Target: COL7A1; (+) strand; PAM type: NRG; PAM sequence: GAG
ggaggacagggcctggccag

SEQ ID NO: 15867 - DNA, 20 bp, Artificial Sequence
  Description of Artificial Sequence: Synthetic oligonucleotide
  Target: COL7A1; (+) strand; PAM type: NRG; PAM sequence: CAG
ggagttgttcttgcttcatg

SEQ ID NO: 15868 - DNA, 20 bp, Artificial Sequence
  Description of Artificial Sequence: Synthetic oligonucleotide
  Target: COL7A1; (+) strand; PAM type: NRG; PAM sequence: AGG
gagttgttcttgcttcatgc

SEQ ID NO: 15869 - DNA, 20 bp, Artificial Sequence
  Description of Artificial Sequence: Synthetic oligonucleotide
  Target: COL7A1; (+) strand; PAM type: NRG; PAM sequence: TGG
gttcttgcttcatgcaggtt

SEQ ID NO: 15870 - DNA, 20 bp, Artificial Sequence
  Description of Artificial Sequence: Synthetic oligonucleotide
  Target: COL7A1; (+) strand; PAM type: NRG; PAM sequence: GGG
ttcttgcttcatgcaggttt

SEQ ID NO: 15871 - DNA, 20 bp, Artificial Sequence
  Description of Artificial Sequence: Synthetic oligonucleotide
  Target: COL7A1; (+) strand; PAM type: NRG; PAM sequence: GGG
tcttgcttcatgcaggtttg

SEQ ID NO: 15872 - DNA, 20 bp, Artificial Sequence
  Description of Artificial Sequence: Synthetic oligonucleotide
  Target: COL7A1; (+) strand; PAM type: NRG; PAM sequence: GGG
cttgcttcatgcaggtttgg

SEQ ID NO: 15873 - DNA, 20 bp, Artificial Sequence
  Description of Artificial Sequence: Synthetic oligonucleotide
  Target: COL7A1; (+) strand; PAM type: NRG; PAM sequence: AAG
ttcatgcaggtttgggggac

SEQ ID NO: 15874 - DNA, 20 bp, Artificial Sequence
  Description of Artificial Sequence: Synthetic oligonucleotide
  Target: COL7A1; (+) strand; PAM type: NRG; PAM sequence: CAG
ggacaagcacccactcctct

SEQ ID NO: 15875 - DNA, 20 bp, Artificial Sequence
  Description of Artificial Sequence: Synthetic oligonucleotide
  Target: COL7A1; (+) strand; PAM type: NRG; PAM sequence: CAG
accctgctcacacacactca

SEQ ID NO: 15876 - DNA, 20 bp, Artificial Sequence
  Description of Artificial Sequence: Synthetic oligonucleotide
  Target: COL7A1; (+) strand; PAM type: NRG; PAM sequence: CAG
tcacacacactcacagctgt

SEQ ID NO: 15877 - DNA, 20 bp, Artificial Sequence
  Description of Artificial Sequence: Synthetic oligonucleotide
  Target: COL7A1; (+) strand; PAM type: NRG; PAM sequence: GAG
acacacactcacagctgtca

SEQ ID NO: 15878 - DNA, 20 bp, Artificial Sequence
  Description of Artificial Sequence: Synthetic oligonucleotide
  Target: COL7A1; (+) strand; PAM type: NRG; PAM sequence: CAG
actcacagctgtcagagact

SEQ ID NO: 15879 - DNA, 20 bp, Artificial Sequence
  Description of Artificial Sequence: Synthetic oligonucleotide
  Target: COL7A1; (+) strand; PAM type: NRG; PAM sequence: AAG
acacgcacatatgcgcccat

SEQ ID NO: 15880 - DNA, 20 bp, Artificial Sequence
  Description of Artificial Sequence: Synthetic oligonucleotide
  Target: COL7A1; (+) strand; PAM type: NRG; PAM sequence: AAG
cacatatgcgcccataagac

SEQ ID NO: 15881 - DNA, 20 bp, Artificial Sequence
  Description of Artificial Sequence: Synthetic oligonucleotide
  Target: COL7A1; (+) strand; PAM type: NRG; PAM sequence: AGG
acatatgcgcccataagaca

SEQ ID NO: 15882 - DNA, 20 bp, Artificial Sequence
  Description of Artificial Sequence: Synthetic oligonucleotide
  Target: COL7A1; (+) strand; PAM type: NRG; PAM sequence: TGG
cccataagacaaggctgcca

SEQ ID NO: 15883 - DNA, 20 bp, Artificial Sequence
  Description of Artificial Sequence: Synthetic oligonucleotide
  Target: COL7A1; (+) strand; PAM type: NRG; PAM sequence: CAG
agacaaggctgccatggtca

SEQ ID NO: 15884 - DNA, 20 bp, Artificial Sequence
  Description of Artificial Sequence: Synthetic oligonucleotide
  Target: COL7A1; (+) strand; PAM type: NRG; PAM sequence: AGG
gacaaggctgccatggtcac

SEQ ID NO: 15885 - DNA, 20 bp, Artificial Sequence
  Description of Artificial Sequence: Synthetic oligonucleotide
  Target: COL7A1; (+) strand; PAM type: NRG; PAM sequence: CGG
ggtcacaggcttcctgtgtt

SEQ ID NO: 15886 - DNA, 20 bp, Artificial Sequence
  Description of Artificial Sequence: Synthetic oligonucleotide
  Target: COL7A1; (+) strand; PAM type: NRG; PAM sequence: GGG
gtcacaggcttcctgtgttc

SEQ ID NO: 15887 - DNA, 20 bp, Artificial Sequence
  Description of Artificial Sequence: Synthetic oligonucleotide
  Target: COL7A1; (+) strand; PAM type: NRG; PAM sequence: TGG
tgtgttcgggcctttgtgcc

SEQ ID NO: 15888 - DNA, 20 bp, Artificial Sequence
  Description of Artificial Sequence: Synthetic oligonucleotide
  Target: COL7A1; (+) strand; PAM type: NRG; PAM sequence: GAG
tgttcgggcctttgtgcctg

SEQ ID NO: 15889 - DNA, 20 bp, Artificial Sequence
  Description of Artificial Sequence: Synthetic oligonucleotide
  Target: COL7A1; (+) strand; PAM type: NRG; PAM sequence: CAG
gtgcctggagacacccctca

SEQ ID NO: 15890 - DNA, 20 bp, Artificial Sequence
  Description of Artificial Sequence: Synthetic oligonucleotide
  Target: COL7A1; (+) strand; PAM type: NRG; PAM sequence: TGG
ccctcacagccccgtccatc

SEQ ID NO: 15891 - DNA, 20 bp, Artificial Sequence
  Description of Artificial Sequence: Synthetic oligonucleotide
  Target: COL7A1; (+) strand; PAM type: NRG; PAM sequence: GGG
cctcacagccccgtccatct

SEQ ID NO: 15892 - DNA, 20 bp, Artificial Sequence
  Description of Artificial Sequence: Synthetic oligonucleotide
  Target: COL7A1; (+) strand; PAM type: NRG; PAM sequence: GGG
ctcacagccccgtccatctg

SEQ ID NO: 15893 - DNA, 20 bp, Artificial Sequence
  Description of Artificial Sequence: Synthetic oligonucleotide
  Target: COL7A1; (+) strand; PAM type: NRG; PAM sequence: CAG
acagccccgtccatctgggg

SEQ ID NO: 15894 - DNA, 20 bp, Artificial Sequence
  Description of Artificial Sequence: Synthetic oligonucleotide
  Target: COL7A1; (+) strand; PAM type: NRG; PAM sequence: AGG
cagccccgtccatctggggc

SEQ ID NO: 15895 - DNA, 20 bp, Artificial Sequence
  Description of Artificial Sequence: Synthetic oligonucleotide
  Target: COL7A1; (+) strand; PAM type: NRG; PAM sequence: TGG
ctggggcaggtgctgcctca

SEQ ID NO: 15896 - DNA, 20 bp, Artificial Sequence
  Description of Artificial Sequence: Synthetic oligonucleotide
  Target: COL7A1; (+) strand; PAM type: NRG; PAM sequence: GGG
tggggcaggtgctgcctcat

SEQ ID NO: 15897 - DNA, 20 bp, Artificial Sequence
  Description of Artificial Sequence: Synthetic oligonucleotide
  Target: COL7A1; (+) strand; PAM type: NRG; PAM sequence: GGG
ggggcaggtgctgcctcatg

SEQ ID NO: 15898 - DNA, 20 bp, Artificial Sequence
  Description of Artificial Sequence: Synthetic oligonucleotide
  Target: COL7A1; (+) strand; PAM type: NRG; PAM sequence: CAG
aggtgctgcctcatggggca

SEQ ID NO: 15899 - DNA, 20 bp, Artificial Sequence
  Description of Artificial Sequence: Synthetic oligonucleotide
  Target: COL7A1; (+) strand; PAM type: NRG; PAM sequence: GAG
gtgctgcctcatggggcaca

SEQ ID NO: 15900 - DNA, 20 bp, Artificial Sequence
  Description of Artificial Sequence: Synthetic oligonucleotide
  Target: COL7A1; (+) strand; PAM type: NRG; PAM sequence: AAG
tgcctcatggggcacagagc

SEQ ID NO: 15901 - DNA, 20 bp, Artificial Sequence
  Description of Artificial Sequence: Synthetic oligonucleotide
  Target: COL7A1; (+) strand; PAM type: NRG; PAM sequence: AAG
tcatggggcacagagcaagc

SEQ ID NO: 15902 - DNA, 20 bp, Artificial Sequence
  Description of Artificial Sequence: Synthetic oligonucleotide
  Target: COL7A1; (+) strand; PAM type: NRG; PAM sequence: CAG
cagagcaagcaagtgaccct

SEQ ID NO: 15903 - DNA, 20 bp, Artificial Sequence
  Description of Artificial Sequence: Synthetic oligonucleotide
  Target: COL7A1; (+) strand; PAM type: NRG; PAM sequence: CAG
gcaagcaagtgaccctcagc

SEQ ID NO: 15904 - DNA, 20 bp, Artificial Sequence
  Description of Artificial Sequence: Synthetic oligonucleotide
  Target: COL7A1; (+) strand; PAM type: NRG; PAM sequence: TGG
tcagccagcatttctctgtg

SEQ ID NO: 15905 - DNA, 20 bp, Artificial Sequence
  Description of Artificial Sequence: Synthetic oligonucleotide
  Target: COL7A1; (+) strand; PAM type: NRG; PAM sequence: TGG
gccagcatttctctgtgtgg

SEQ ID NO: 15906 - DNA, 20 bp, Artificial Sequence
  Description of Artificial Sequence: Synthetic oligonucleotide
  Target: COL7A1; (+) strand; PAM type: NRG; PAM sequence: TGG
tttctctgtgtggtggccta

SEQ ID NO: 15907 - DNA, 20 bp, Artificial Sequence
  Description of Artificial Sequence: Synthetic oligonucleotide
  Target: COL7A1; (+) strand; PAM type: NRG; PAM sequence: GGG
ttctctgtgtggtggcctat

SEQ ID NO: 15908 - DNA, 20 bp, Artificial Sequence
  Description of Artificial Sequence: Synthetic oligonucleotide
  Target: COL7A1; (+) strand; PAM type: NRG; PAM sequence: CAG
tgtggtggcctatgggatga

SEQ ID NO: 15909 - DNA, 20 bp, Artificial Sequence
  Description of Artificial Sequence: Synthetic oligonucleotide
  Target: COL7A1; (+) strand; PAM type: NRG; PAM sequence: TGG
cctatgggatgacagacctg

SEQ ID NO: 15910 - DNA, 20 bp, Artificial Sequence
  Description of Artificial Sequence: Synthetic oligonucleotide
  Target: COL7A1; (+) strand; PAM type: NRG; PAM sequence: GGG
ctatgggatgacagacctgt

SEQ ID NO: 15911 - DNA, 20 bp, Artificial Sequence
  Description of Artificial Sequence: Synthetic oligonucleotide
  Target: COL7A1; (+) strand; PAM type: NRG; PAM sequence: CAG
gatgacagacctgtgggcct

SEQ ID NO: 15912 - DNA, 20 bp, Artificial Sequence
  Description of Artificial Sequence: Synthetic oligonucleotide
  Target: COL7A1; (+) strand; PAM type: NRG; PAM sequence: GAG
tgacagacctgtgggcctca

SEQ ID NO: 15913 - DNA, 20 bp, Artificial Sequence
  Description of Artificial Sequence: Synthetic oligonucleotide
  Target: COL7A1; (+) strand; PAM type: NRG; PAM sequence: AGG
gacagacctgtgggcctcag

SEQ ID NO: 15914 - DNA, 20 bp, Artificial Sequence
  Description of Artificial Sequence: Synthetic oligonucleotide
  Target: COL7A1; (+) strand; PAM type: NRG; PAM sequence: GGG
acagacctgtgggcctcaga

SEQ ID NO: 15915 - DNA, 20 bp, Artificial Sequence
  Description of Artificial Sequence: Synthetic oligonucleotide
  Target: COL7A1; (+) strand; PAM type: NRG; PAM sequence: TGG
cctgtgggcctcagagggac

SEQ ID NO: 15916 - DNA, 20 bp, Artificial Sequence
  Description of Artificial Sequence: Synthetic oligonucleotide
  Target: COL7A1; (+) strand; PAM type: NRG; PAM sequence: CGG
tgggcctcagagggactggt

SEQ ID NO: 15917 - DNA, 20 bp, Artificial Sequence
  Description of Artificial Sequence: Synthetic oligonucleotide
  Target: COL7A1; (+) strand; PAM type: NRG; PAM sequence: GAG
ggcctcagagggactggtcg

SEQ ID NO: 15918 - DNA, 20 bp, Artificial Sequence
  Description of Artificial Sequence: Synthetic oligonucleotide
  Target: COL7A1; (+) strand; PAM type: NRG; PAM sequence: AGG
gcctcagagggactggtcgg

SEQ ID NO: 15919 - DNA, 20 bp, Artificial Sequence
  Description of Artificial Sequence: Synthetic oligonucleotide
  Target: COL7A1; (+) strand; PAM type: NRG; PAM sequence: CAG
tcagagggactggtcggagg

SEQ ID NO: 15920 - DNA, 20 bp, Artificial Sequence
  Description of Artificial Sequence: Synthetic oligonucleotide
  Target: COL7A1; (+) strand; PAM type: NRG; PAM sequence: GAG
gactggtcggaggcagtgtt

SEQ ID NO: 15921 - DNA, 20 bp, Artificial Sequence
  Description of Artificial Sequence: Synthetic oligonucleotide
  Target: COL7A1; (+) strand; PAM type: NRG; PAM sequence: GAG
cagtgttgagctctcgtgtt

SEQ ID NO: 15922 - DNA, 20 bp, Artificial Sequence
  Description of Artificial Sequence: Synthetic oligonucleotide
  Target: COL7A1; (+) strand; PAM type: NRG; PAM sequence: AGG
agtgttgagctctcgtgttg

SEQ ID NO: 15923 - DNA, 20 bp, Artificial Sequence
  Description of Artificial Sequence: Synthetic oligonucleotide
  Target: COL7A1; (+) strand; PAM type: NRG; PAM sequence: AAG
tctcgtgttgaggctcctga

SEQ ID NO: 15924 - DNA, 20 bp, Artificial Sequence
  Description of Artificial Sequence: Synthetic oligonucleotide
  Target: COL7A1; (+) strand; PAM type: NRG; PAM sequence: TGG
aacatgatgatgactgcatg

SEQ ID NO: 15925 - DNA, 20 bp, Artificial Sequence
  Description of Artificial Sequence: Synthetic oligonucleotide
  Target: COL7A1; (+) strand; PAM type: NRG; PAM sequence: CGG
atgatgatgactgcatgtgg

SEQ ID NO: 15926 - DNA, 20 bp, Artificial Sequence
  Description of Artificial Sequence: Synthetic oligonucleotide
  Target: COL7A1; (+) strand; PAM type: NRG; PAM sequence: CAG
tgactgcatgtggcggtgtc

SEQ ID NO: 15927 - DNA, 20 bp, Artificial Sequence
  Description of Artificial Sequence: Synthetic oligonucleotide
  Target: COL7A1; (+) strand; PAM type: NRG; PAM sequence: AGG
gactgcatgtggcggtgtcc

SEQ ID NO: 15928 - DNA, 20 bp, Artificial Sequence
  Description of Artificial Sequence: Synthetic oligonucleotide
  Target: COL7A1; (+) strand; PAM type: NRG; PAM sequence: TGG
gtccaggtgttctgtgacta

SEQ ID NO: 15929 - DNA, 20 bp, Artificial Sequence
  Description of Artificial Sequence: Synthetic oligonucleotide
  Target: COL7A1; (+) strand; PAM type: NRG; PAM sequence: GGG
tccaggtgttctgtgactat

SEQ ID NO: 15930 - DNA, 20 bp, Artificial Sequence
  Description of Artificial Sequence: Synthetic oligonucleotide
  Target: COL7A1; (+) strand; PAM type: NRG; PAM sequence: GGG
ccaggtgttctgtgactatg

SEQ ID NO: 15931 - DNA, 20 bp, Artificial Sequence
  Description of Artificial Sequence: Synthetic oligonucleotide
  Target: COL7A1; (+) strand; PAM type: NRG; PAM sequence: CAG
ttctgtgactatggggcacc

SEQ ID NO: 15932 - DNA, 20 bp, Artificial Sequence
  Description of Artificial Sequence: Synthetic oligonucleotide
  Target: COL7A1; (+) strand; PAM type: NRG; PAM sequence: TAG
gactatggggcacccagaca

SEQ ID NO: 15933 - DNA, 20 bp, Artificial Sequence
  Description of Artificial Sequence: Synthetic oligonucleotide
  Target: COL7A1; (+) strand; PAM type: NRG; PAM sequence: AAG
atggggcacccagacatagc

SEQ ID NO: 15934 - DNA, 20 bp, Artificial Sequence
  Description of Artificial Sequence: Synthetic oligonucleotide
  Target: COL7A1; (+) strand; PAM type: NRG; PAM sequence: CAG
agacatagcaagactcgcca

SEQ ID NO: 15935 - DNA, 20 bp, Artificial Sequence
  Description of Artificial Sequence: Synthetic oligonucleotide
  Target: COL7A1; (+) strand; PAM type: NRG; PAM sequence: CAG
catagcaagactcgccacag

SEQ ID NO: 15936 - DNA, 20 bp, Artificial Sequence
  Description of Artificial Sequence: Synthetic oligonucleotide
  Target: COL7A1; (+) strand; PAM type: NRG; PAM sequence: TGG
gccacagcagtgaccttacg

SEQ ID NO: 15937 - DNA, 20 bp, Artificial Sequence
  Description of Artificial Sequence: Synthetic oligonucleotide
  Target: COL7A1; (+) strand; PAM type: NRG; PAM sequence: CAG
acagcagtgaccttacgtgg

SEQ ID NO: 15938 - DNA, 20 bp, Artificial Sequence
  Description of Artificial Sequence: Synthetic oligonucleotide
  Target: COL7A1; (+) strand; PAM type: NRG; PAM sequence: AAG
gaccttacgtggcagcatcc

SEQ ID NO: 15939 - DNA, 20 bp, Artificial Sequence
  Description of Artificial Sequence: Synthetic oligonucleotide
  Target: COL7A1; (+) strand; PAM type: NRG; PAM sequence: CGG
gtggcagcatccaagctgtc

SEQ ID NO: 15940 - DNA, 20 bp, Artificial Sequence
  Description of Artificial Sequence: Synthetic oligonucleotide
  Target: COL7A1; (+) strand; PAM type: NRG; PAM sequence: TAG
caagctgtccggacatatat

SEQ ID NO: 15941 - DNA, 20 bp, Artificial Sequence
  Description of Artificial Sequence: Synthetic oligonucleotide
  Target: COL7A1; (+) strand; PAM type: NRG; PAM sequence: AGG
aagctgtccggacatatatt

SEQ ID NO: 15942 - DNA, 20 bp, Artificial Sequence
  Description of Artificial Sequence: Synthetic oligonucleotide
  Target: COL7A1; (+) strand; PAM type: NRG; PAM sequence: TGG
ccggacatatattaggtctg

SEQ ID NO: 15943 - DNA, 20 bp, Artificial Sequence
  Description of Artificial Sequence: Synthetic oligonucleotide
  Target: COL7A1; (+) strand; PAM type: NRG; PAM sequence: GGG
cggacatatattaggtctgt

SEQ ID NO: 15944 - DNA, 20 bp, Artificial Sequence
  Description of Artificial Sequence: Synthetic oligonucleotide
  Target: COL7A1; (+) strand; PAM type: NRG; PAM sequence: GGG
ggacatatattaggtctgtg

SEQ ID NO: 15945 - DNA, 20 bp, Artificial Sequence
  Description of Artificial Sequence: Synthetic oligonucleotide
  Target: COL7A1; (+) strand; PAM type: NRG; PAM sequence: CAG
tattaggtctgtggggcaca

SEQ ID NO: 15946 - DNA, 20 bp, Artificial Sequence
  Description of Artificial Sequence: Synthetic oligonucleotide
  Target: COL7A1; (+) strand; PAM type: NRG; PAM sequence: AGG
attaggtctgtggggcacac

SEQ ID NO: 15947 - DNA, 20 bp, Artificial Sequence
  Description of Artificial Sequence: Synthetic oligonucleotide
  Target: COL7A1; (+) strand; PAM type: NRG; PAM sequence: TGG
gtctgtggggcacacaggca

SEQ ID NO: 15948 - DNA, 20 bp, Artificial Sequence
  Description of Artificial Sequence: Synthetic oligonucleotide
  Target: COL7A1; (+) strand; PAM type: NRG; PAM sequence: AAG
gtggggcacacaggcatggc

SEQ ID NO: 15949 - DNA, 20 bp, Artificial Sequence
  Description of Artificial Sequence: Synthetic oligonucleotide
  Target: COL7A1; (+) strand; PAM type: NRG; PAM sequence: TGG
aggcatggcaagactccatg

SEQ ID NO: 15950 - DNA, 20 bp, Artificial Sequence
  Description of Artificial Sequence: Synthetic oligonucleotide
  Target: COL7A1; (+) strand; PAM type: NRG; PAM sequence: CAG
catggcaagactccatgtgg

SEQ ID NO: 15951 - DNA, 20 bp, Artificial Sequence
  Description of Artificial Sequence: Synthetic oligonucleotide
  Target: COL7A1; (+) strand; PAM type: NRG; PAM sequence: TAG
catgtggcagtgacccaact

SEQ ID NO: 15952 - DNA, 20 bp, Artificial Sequence
  Description of Artificial Sequence: Synthetic oligonucleotide
  Target: COL7A1; (+) strand; PAM type: NRG; PAM sequence: CAG
acttagcaatgtccaatgtc

SEQ ID NO: 15953 - DNA, 20 bp, Artificial Sequence
  Description of Artificial Sequence: Synthetic oligonucleotide
  Target: COL7A1; (+) strand; PAM type: NRG; PAM sequence: AGG
cttagcaatgtccaatgtcc

SEQ ID NO: 15954 - DNA, 20 bp, Artificial Sequence
  Description of Artificial Sequence: Synthetic oligonucleotide
  Target: COL7A1; (+) strand; PAM type: NRG; PAM sequence: CAG
tgtccaatgtccaggctgtc

SEQ ID NO: 15955 - DNA, 20 bp, Artificial Sequence
  Description of Artificial Sequence: Synthetic oligonucleotide
  Target: COL7A1; (+) strand; PAM type: NRG; PAM sequence: TGG
ccagacacactgtgactctg

SEQ ID NO: 15956 - DNA, 20 bp, Artificial Sequence
  Description of Artificial Sequence: Synthetic oligonucleotide
  Target: COL7A1; (+) strand; PAM type: NRG; PAM sequence: GGG
cagacacactgtgactctgt

SEQ ID NO: 15957 - DNA, 20 bp, Artificial Sequence
  Description of Artificial Sequence: Synthetic oligonucleotide
  Target: COL7A1; (+) strand; PAM type: NRG; PAM sequence: GGG
agacacactgtgactctgtg

SEQ ID NO: 15958 - DNA, 20 bp, Artificial Sequence
  Description of Artificial Sequence: Synthetic oligonucleotide
  Target: COL7A1; (+) strand; PAM type: NRG; PAM sequence: CAG
ctgtgactctgtggggcact

SEQ ID NO: 15959 - DNA, 20 bp, Artificial Sequence
  Description of Artificial Sequence: Synthetic oligonucleotide
  Target: COL7A1; (+) strand; PAM type: NRG; PAM sequence: CAG
atctgatatgacctgcatga

SEQ ID NO: 15960 - DNA, 20 bp, Artificial Sequence
  Description of Artificial Sequence: Synthetic oligonucleotide
  Target: COL7A1; (+) strand; PAM type: NRG; PAM sequence: TGG
tgatatgacctgcatgacag

SEQ ID NO: 15961 - DNA, 20 bp, Artificial Sequence
  Description of Artificial Sequence: Synthetic oligonucleotide
  Target: COL7A1; (+) strand; PAM type: NRG; PAM sequence: TGG
tgcatgacagtggctccatg

SEQ ID NO: 15962 - DNA, 20 bp, Artificial Sequence
  Description of Artificial Sequence: Synthetic oligonucleotide
  Target: COL7A1; (+) strand; PAM type: NRG; PAM sequence: CAG
atgacagtggctccatgtgg

SEQ ID NO: 15963 - DNA, 20 bp, Artificial Sequence
  Description of Artificial Sequence: Synthetic oligonucleotide
  Target: COL7A1; (+) strand; PAM type: NRG; PAM sequence: CAG
tggctccatgtggcagtgtc

SEQ ID NO: 15964 - DNA, 20 bp, Artificial Sequence
  Description of Artificial Sequence: Synthetic oligonucleotide
  Target: COL7A1; (+) strand; PAM type: NRG; PAM sequence: CAG
gtgtccagacactgtatgcc

SEQ ID NO: 15965 - DNA, 20 bp, Artificial Sequence
  Description of Artificial Sequence: Synthetic oligonucleotide
  Target: COL7A1; (+) strand; PAM type: NRG; PAM sequence: TGG
agacactgtatgcccagatg

SEQ ID NO: 15966 - DNA, 20 bp, Artificial Sequence
  Description of Artificial Sequence: Synthetic oligonucleotide
  Target: COL7A1; (+) strand; PAM type: NRG; PAM sequence: CAG
cactgtatgcccagatgtgg

SEQ ID NO: 15967 - DNA, 20 bp, Artificial Sequence
  Description of Artificial Sequence: Synthetic oligonucleotide
  Target: COL7A1; (+) strand; PAM type: NRG; PAM sequence: CAG
tgcccagatgtggcagcgtc

SEQ ID NO: 15968 - DNA, 20 bp, Artificial Sequence
  Description of Artificial Sequence: Synthetic oligonucleotide
  Target: COL7A1; (+) strand; PAM type: NRG; PAM sequence: CAG
gcgtccagacactgtatgcc

SEQ ID NO: 15969 - DNA, 20 bp, Artificial Sequence
  Description of Artificial Sequence: Synthetic oligonucleotide
  Target: COL7A1; (+) strand; PAM type: NRG; PAM sequence: TGG
agacactgtatgcccagatg

SEQ ID NO: 15970 - DNA, 20 bp, Artificial Sequence
  Description of Artificial Sequence: Synthetic oligonucleotide
  Target: COL7A1; (+) strand; PAM type: NRG; PAM sequence: CAG
cactgtatgcccagatgtgg

SEQ ID NO: 15971 - DNA, 20 bp, Artificial Sequence
  Description of Artificial Sequence: Synthetic oligonucleotide
  Target: COL7A1; (+) strand; PAM type: NRG; PAM sequence: CAG
cagatgtggcagcatccgtc

SEQ ID NO: 15972 - DNA, 20 bp, Artificial Sequence
  Description of Artificial Sequence: Synthetic oligonucleotide
  Target: COL7A1; (+) strand; PAM type: NRG; PAM sequence: TGG
gcagcatccgtccagctgtg

SEQ ID NO: 15973 - DNA, 20 bp, Artificial Sequence
  Description of Artificial Sequence: Synthetic oligonucleotide
  Target: COL7A1; (+) strand; PAM type: NRG; PAM sequence: CAG
ccagctgtgtggctgccctc

SEQ ID NO: 15974 - DNA, 20 bp, Artificial Sequence
  Description of Artificial Sequence: Synthetic oligonucleotide
  Target: COL7A1; (+) strand; PAM type: NRG; PAM sequence: AGG
cagctgtgtggctgccctcc

SEQ ID NO: 15975 - DNA, 20 bp, Artificial Sequence
  Description of Artificial Sequence: Synthetic oligonucleotide
  Target: COL7A1; (+) strand; PAM type: NRG; PAM sequence: CAG
gccctccaggtcttcccatc

SEQ ID NO: 15976 - DNA, 20 bp, Artificial Sequence
  Description of Artificial Sequence: Synthetic oligonucleotide
  Target: COL7A1; (+) strand; PAM type: NRG; PAM sequence: AGG
ccctccaggtcttcccatcc

SEQ ID NO: 15977 - DNA, 20 bp, Artificial Sequence
  Description of Artificial Sequence: Synthetic oligonucleotide
  Target: COL7A1; (+) strand; PAM type: NRG; PAM sequence: GGG
cctccaggtcttcccatcca

SEQ ID NO: 15978 - DNA, 20 bp, Artificial Sequence
  Description of Artificial Sequence: Synthetic oligonucleotide
  Target: COL7A1; (+) strand; PAM type: NRG; PAM sequence: TGG
ccaggtcttcccatccaggg

SEQ ID NO: 15979 - DNA, 20 bp, Artificial Sequence
  Description of Artificial Sequence: Synthetic oligonucleotide
  Target: COL7A1; (+) strand; PAM type: NRG; PAM sequence: CAG
atcactgtgaccccctctct

SEQ ID NO: 15980 - DNA, 20 bp, Artificial Sequence
  Description of Artificial Sequence: Synthetic oligonucleotide
  Target: COL7A1; (+) strand; PAM type: NRG; PAM sequence: AGG
tcactgtgaccccctctctc

SEQ ID NO: 15981 - DNA, 20 bp, Artificial Sequence
  Description of Artificial Sequence: Synthetic oligonucleotide
  Target: COL7A1; (+) strand; PAM type: NRG; PAM sequence: CAG
gtgaccccctctctcaggct

SEQ ID NO: 15982 - DNA, 20 bp, Artificial Sequence
  Description of Artificial Sequence: Synthetic oligonucleotide
  Target: COL7A1; (+) strand; PAM type: NRG; PAM sequence: CAG
accccctctctcaggctcag

SEQ ID NO: 15983 - DNA, 20 bp, Artificial Sequence
  Description of Artificial Sequence: Synthetic oligonucleotide
  Target: COL7A1; (+) strand; PAM type: NRG; PAM sequence: TGG
ccctctctcaggctcagcag

SEQ ID NO: 15984 - DNA, 20 bp, Artificial Sequence
  Description of Artificial Sequence: Synthetic oligonucleotide
  Target: COL7A1; (+) strand; PAM type: NRG; PAM sequence: CGG
aggctcagcagtggccgaca

SEQ ID NO: 15985 - DNA, 20 bp, Artificial Sequence
  Description of Artificial Sequence: Synthetic oligonucleotide
  Target: COL7A1; (+) strand; PAM type: NRG; PAM sequence: GGG
ggctcagcagtggccgacac

SEQ ID NO: 15986 - DNA, 20 bp, Artificial Sequence
  Description of Artificial Sequence: Synthetic oligonucleotide
  Target: COL7A1; (+) strand; PAM type: NRG; PAM sequence: CAG
cagcagtggccgacacgggc

SEQ ID NO: 15987 - DNA, 20 bp, Artificial Sequence
  Description of Artificial Sequence: Synthetic oligonucleotide
  Target: COL7A1; (+) strand; PAM type: NRG; PAM sequence: AGG
agcagtggccgacacgggcc

SEQ ID NO: 15988 - DNA, 20 bp, Artificial Sequence
  Description of Artificial Sequence: Synthetic oligonucleotide
  Target: COL7A1; (+) strand; PAM type: NRG; PAM sequence: CGG
ggccgacacgggccaggatg

SEQ ID NO: 15989 - DNA, 20 bp, Artificial Sequence
  Description of Artificial Sequence: Synthetic oligonucleotide
  Target: COL7A1; (+) strand; PAM type: NRG; PAM sequence: GGG
gccgacacgggccaggatgc

SEQ ID NO: 15990 - DNA, 20 bp, Artificial Sequence
  Description of Artificial Sequence: Synthetic oligonucleotide
  Target: COL7A1; (+) strand; PAM type: NRG; PAM sequence: TGG
acgggccaggatgcgggcgt

SEQ ID NO: 15991 - DNA, 20 bp, Artificial Sequence
  Description of Artificial Sequence: Synthetic oligonucleotide
  Target: COL7A1; (+) strand; PAM type: NRG; PAM sequence: TGG
ggccaggatgcgggcgttgg

SEQ ID NO: 15992 - DNA, 20 bp, Artificial Sequence
  Description of Artificial Sequence: Synthetic oligonucleotide
  Target: COL7A1; (+) strand; PAM type: NRG; PAM sequence: TGG
caggatgcgggcgttggtgg

SEQ ID NO: 15993 - DNA, 20 bp, Artificial Sequence
  Description of Artificial Sequence: Synthetic oligonucleotide
  Target: COL7A1; (+) strand; PAM type: NRG; PAM sequence: TGG
gttggtggtggcctgctccc

SEQ ID NO: 15994 - DNA, 20 bp, Artificial Sequence
  Description of Artificial Sequence: Synthetic oligonucleotide
  Target: COL7A1; (+) strand; PAM type: NRG; PAM sequence: CAG
ggtggtggcctgctccctgg

SEQ ID NO: 15995 - DNA, 20 bp, Artificial Sequence
  Description of Artificial Sequence: Synthetic oligonucleotide
  Target: COL7A1; (+) strand; PAM type: NRG; PAM sequence: TGG
ggcctgctccctggcagccc

SEQ ID NO: 15996 - DNA, 20 bp, Artificial Sequence
  Description of Artificial Sequence: Synthetic oligonucleotide
  Target: COL7A1; (+) strand; PAM type: NRG; PAM sequence: CGG
gctccctggcagccctggcc

SEQ ID NO: 15997 - DNA, 20 bp, Artificial Sequence
  Description of Artificial Sequence: Synthetic oligonucleotide
  Target: COL7A1; (+) strand; PAM type: NRG; PAM sequence: GGG
ctccctggcagccctggccc

SEQ ID NO: 15998 - DNA, 20 bp, Artificial Sequence
  Description of Artificial Sequence: Synthetic oligonucleotide
  Target: COL7A1; (+) strand; PAM type: NRG; PAM sequence: CAG
gccctggcccgggcttgctc

SEQ ID NO: 15999 - DNA, 20 bp, Artificial Sequence
  Description of Artificial Sequence: Synthetic oligonucleotide
  Target: COL7A1; (+) strand; PAM type: NRG; PAM sequence: AAG
tggcccgggcttgctccagt

SEQ ID NO: 16000 - DNA, 20 bp, Artificial Sequence
  Description of Artificial Sequence: Synthetic oligonucleotide
  Target: COL7A1; (+) strand; PAM type: NRG; PAM sequence: AAG
cttgctccagtaagatctgc

SEQ ID NO: 16001 - DNA, 20 bp, Artificial Sequence
  Description of Artificial Sequence: Synthetic oligonucleotide
  Target: COL7A1; (+) strand; PAM type: NRG; PAM sequence: GAG
tgctccagtaagatctgcaa

SEQ ID NO: 16002 - DNA, 20 bp, Artificial Sequence
  Description of Artificial Sequence: Synthetic oligonucleotide
  Target: COL7A1; (+) strand; PAM type: NRG; PAM sequence: AGG
gctccagtaagatctgcaag

SEQ ID NO: 16003 - DNA, 20 bp, Artificial Sequence
  Description of Artificial Sequence: Synthetic oligonucleotide
  Target: COL7A1; (+) strand; PAM type: NRG; PAM sequence: TGG
taagatctgcaagaggccga

SEQ ID NO: 16004 - DNA, 20 bp, Artificial Sequence
  Description of Artificial Sequence: Synthetic oligonucleotide
  Target: COL7A1; (+) strand; PAM type: NRG; PAM sequence: GGG
aagatctgcaagaggccgat

SEQ ID NO: 16005 - DNA, 20 bp, Artificial Sequence
  Description of Artificial Sequence: Synthetic oligonucleotide
  Target: COL7A1; (+) strand; PAM type: NRG; PAM sequence: GGG
agatctgcaagaggccgatg

SEQ ID NO: 16006 - DNA, 20 bp, Artificial Sequence
  Description of Artificial Sequence: Synthetic oligonucleotide
  Target: COL7A1; (+) strand; PAM type: NRG; PAM sequence: CAG
aagaggccgatggggacatc

SEQ ID NO: 16007 - DNA, 20 bp, Artificial Sequence
  Description of Artificial Sequence: Synthetic oligonucleotide
  Target: COL7A1; (+) strand; PAM type: NRG; PAM sequence: TAG
ccgatggggacatccagcga

SEQ ID NO: 16008 - DNA, 20 bp, Artificial Sequence
  Description of Artificial Sequence: Synthetic oligonucleotide
  Target: COL7A1; (+) strand; PAM type: NRG; PAM sequence: AGG
cgatggggacatccagcgat

SEQ ID NO: 16009 - DNA, 20 bp, Artificial Sequence
  Description of Artificial Sequence: Synthetic oligonucleotide
  Target: COL7A1; (+) strand; PAM type: NRG; PAM sequence: GAG
ccagcgataggacaatgcgc

SEQ ID NO: 16010 - DNA, 20 bp, Artificial Sequence
  Description of Artificial Sequence: Synthetic oligonucleotide
  Target: COL7A1; (+) strand; PAM type: NRG; PAM sequence: CAG
cgataggacaatgcgcgagc

SEQ ID NO: 16011 - DNA, 20 bp, Artificial Sequence
  Description of Artificial Sequence: Synthetic oligonucleotide
  Target: COL7A1; (+) strand; PAM type: NRG; PAM sequence: AGG
gataggacaatgcgcgagcc

SEQ ID NO: 16012 - DNA, 20 bp, Artificial Sequence
  Description of Artificial Sequence: Synthetic oligonucleotide
  Target: COL7A1; (+) strand; PAM type: NRG; PAM sequence: GGG
ataggacaatgcgcgagcca

SEQ ID NO: 16013 - DNA, 20 bp, Artificial Sequence
  Description of Artificial Sequence: Synthetic oligonucleotide
  Target: COL7A1; (+) strand; PAM type: NRG; PAM sequence: TGG
ggacaatgcgcgagccaggg

SEQ ID NO: 16014 - DNA, 20 bp, Artificial Sequence
  Description of Artificial Sequence: Synthetic oligonucleotide
  Target: COL7A1; (+) strand; PAM type: NRG; PAM sequence: CGG
caatgcgcgagccagggtgg

SEQ ID NO: 16015 - DNA, 20 bp, Artificial Sequence
  Description of Artificial Sequence: Synthetic oligonucleotide
  Target: COL7A1; (+) strand; PAM type: NRG; PAM sequence: GGG
aatgcgcgagccagggtggc

SEQ ID NO: 16016 - DNA, 20 bp, Artificial Sequence
  Description of Artificial Sequence: Synthetic oligonucleotide
  Target: COL7A1; (+) strand; PAM type: NRG; PAM sequence: TGG
gcgcgagccagggtggcggg

SEQ ID NO: 16017 - DNA, 20 bp, Artificial Sequence
  Description of Artificial Sequence: Synthetic oligonucleotide
  Target: COL7A1; (+) strand; PAM type: NRG; PAM sequence: GGG
cgcgagccagggtggcgggt

SEQ ID NO: 16018 - DNA, 20 bp, Artificial Sequence
  Description of Artificial Sequence: Synthetic oligonucleotide
  Target: COL7A1; (+) strand; PAM type: NRG; PAM sequence: GGG
gcgagccagggtggcgggtg

SEQ ID NO: 16019 - DNA, 20 bp, Artificial Sequence
  Description of Artificial Sequence: Synthetic oligonucleotide
  Target: COL7A1; (+) strand; PAM type: NRG; PAM sequence: CAG
cagggtggcgggtggggctg

SEQ ID NO: 16020 - DNA, 20 bp, Artificial Sequence
  Description of Artificial Sequence: Synthetic oligonucleotide
  Target: COL7A1; (+) strand; PAM type: NRG; PAM sequence: TGG
ggtggcgggtggggctgcag

SEQ ID NO: 16021 - DNA, 20 bp, Artificial Sequence
  Description of Artificial Sequence: Synthetic oligonucleotide
  Target: COL7A1; (+) strand; PAM type: NRG; PAM sequence: TGG
gggtggggctgcagtggctc

SEQ ID NO: 16022 - DNA, 20 bp, Artificial Sequence
  Description of Artificial Sequence: Synthetic oligonucleotide
  Target: COL7A1; (+) strand; PAM type: NRG; PAM sequence: GGG
ggtggggctgcagtggctct

SEQ ID NO: 16023 - DNA, 20 bp, Artificial Sequence
  Description of Artificial Sequence: Synthetic oligonucleotide
  Target: COL7A1; (+) strand; PAM type: NRG; PAM sequence: CAG
ggggctgcagtggctctggg

SEQ ID NO: 16024 - DNA, 20 bp, Artificial Sequence
  Description of Artificial Sequence: Synthetic oligonucleotide
  Target: COL7A1; (+) strand; PAM type: NRG; PAM sequence: CGG
cagtggctctgggcagccca

SEQ ID NO: 16025 - DNA, 20 bp, Artificial Sequence
  Description of Artificial Sequence: Synthetic oligonucleotide
  Target: COL7A1; (+) strand; PAM type: NRG; PAM sequence: TGG
ctgggcagcccacggccatg

SEQ ID NO: 16026 - DNA, 20 bp, Artificial Sequence
  Description of Artificial Sequence: Synthetic oligonucleotide
  Target: COL7A1; (+) strand; PAM type: NRG; PAM sequence: GGG
tgggcagcccacggccatgt

SEQ ID NO: 16027 - DNA, 20 bp, Artificial Sequence
  Description of Artificial Sequence: Synthetic oligonucleotide
  Target: COL7A1; (+) strand; PAM type: NRG; PAM sequence: GAG
ggcagcccacggccatgtgg

SEQ ID NO: 16028 - DNA, 20 bp, Artificial Sequence
  Description of Artificial Sequence: Synthetic oligonucleotide
  Target: COL7A1; (+) strand; PAM type: NRG; PAM sequence: CAG
agcccacggccatgtgggag

SEQ ID NO: 16029 - DNA, 20 bp, Artificial Sequence
  Description of Artificial Sequence: Synthetic oligonucleotide
  Target: COL7A1; (+) strand; PAM type: NRG; PAM sequence: GAG
acggccatgtgggagcagct

SEQ ID NO: 16030 - DNA, 20 bp, Artificial Sequence
  Description of Artificial Sequence: Synthetic oligonucleotide
  Target: COL7A1; (+) strand; PAM type: NRG; PAM sequence: AGG
cggccatgtgggagcagctg

SEQ ID NO: 16031 - DNA, 20 bp, Artificial Sequence
  Description of Artificial Sequence: Synthetic oligonucleotide
  Target: COL7A1; (+) strand; PAM type: NRG; PAM sequence: GGG
ggccatgtgggagcagctga

SEQ ID NO: 16032 - DNA, 20 bp, Artificial Sequence
  Description of Artificial Sequence: Synthetic oligonucleotide
  Target: COL7A1; (+) strand; PAM type: NRG; PAM sequence: GGG
gccatgtgggagcagctgag

SEQ ID NO: 16033 - DNA, 20 bp, Artificial Sequence
  Description of Artificial Sequence: Synthetic oligonucleotide
  Target: COL7A1; (+) strand; PAM type: NRG; PAM sequence: GAG
gagcagctgaggggctctct

SEQ ID NO: 16034 - DNA, 20 bp, Artificial Sequence
  Description of Artificial Sequence: Synthetic oligonucleotide
  Target: COL7A1; (+) strand; PAM type: NRG; PAM sequence: AGG
agcagctgaggggctctctg

SEQ ID NO: 16035 - DNA, 20 bp, Artificial Sequence
  Description of Artificial Sequence: Synthetic oligonucleotide
  Target: COL7A1; (+) strand; PAM type: NRG; PAM sequence: CAG
tgaggggctctctgaggccg

SEQ ID NO: 16036 - DNA, 20 bp, Artificial Sequence
  Description of Artificial Sequence: Synthetic oligonucleotide
  Target: COL7A1; (+) strand; PAM type: NRG; PAM sequence: AGG
gaggggctctctgaggccgc

SEQ ID NO: 16037 - DNA, 20 bp, Artificial Sequence
  Description of Artificial Sequence: Synthetic oligonucleotide
  Target: COL7A1; (+) strand; PAM type: NRG; PAM sequence: CGG
ggctctctgaggccgcaggt

SEQ ID NO: 16038 - DNA, 20 bp, Artificial Sequence
  Description of Artificial Sequence: Synthetic oligonucleotide
  Target: COL7A1; (+) strand; PAM type: NRG; PAM sequence: GGG
gctctctgaggccgcaggtc

SEQ ID NO: 16039 - DNA, 20 bp, Artificial Sequence
  Description of Artificial Sequence: Synthetic oligonucleotide
  Target: COL7A1; (+) strand; PAM type: NRG; PAM sequence: GGG
ctctctgaggccgcaggtcg

SEQ ID NO: 16040 - DNA, 20 bp, Artificial Sequence
  Description of Artificial Sequence: Synthetic oligonucleotide
  Target: COL7A1; (+) strand; PAM type: NRG; PAM sequence: GAG
ctctgaggccgcaggtcggg

SEQ ID NO: 16041 - DNA, 20 bp, Artificial Sequence
  Description of Artificial Sequence: Synthetic oligonucleotide
  Target: COL7A1; (+) strand; PAM type: NRG; PAM sequence: TGG
tgaggccgcaggtcggggag

SEQ ID NO: 16042 - DNA, 20 bp, Artificial Sequence
  Description of Artificial Sequence: Synthetic oligonucleotide
  Target: COL7A1; (+) strand; PAM type: NRG; PAM sequence: TGG
ccgcaggtcggggagtggtc

SEQ ID NO: 16043 - DNA, 20 bp, Artificial Sequence
  Description of Artificial Sequence: Synthetic oligonucleotide
  Target: COL7A1; (+) strand; PAM type: NRG; PAM sequence: GGG
cgcaggtcggggagtggtct

SEQ ID NO: 16044 - DNA, 20 bp, Artificial Sequence
  Description of Artificial Sequence: Synthetic oligonucleotide
  Target: COL7A1; (+) strand; PAM type: NRG; PAM sequence: GGG
gcaggtcggggagtggtctg

SEQ ID NO: 16045 - DNA, 20 bp, Artificial Sequence
  Description of Artificial Sequence: Synthetic oligonucleotide
  Target: COL7A1; (+) strand; PAM type: NRG; PAM sequence: GAG
aggtcggggagtggtctggg

SEQ ID NO: 16046 - DNA, 20 bp, Artificial Sequence
  Description of Artificial Sequence: Synthetic oligonucleotide
  Target: COL7A1; (+) strand; PAM type: NRG; PAM sequence: GAG
agtggtctggggagaattct

SEQ ID NO: 16047 - DNA, 20 bp, Artificial Sequence
  Description of Artificial Sequence: Synthetic oligonucleotide
  Target: COL7A1; (+) strand; PAM type: NRG; PAM sequence: AGG
gtggtctggggagaattctg

SEQ ID NO: 16048 - DNA, 20 bp, Artificial Sequence
  Description of Artificial Sequence: Synthetic oligonucleotide
  Target: COL7A1; (+) strand; PAM type: NRG; PAM sequence: GGG
tggtctggggagaattctga

SEQ ID NO: 16049 - DNA, 20 bp, Artificial Sequence
  Description of Artificial Sequence: Synthetic oligonucleotide
  Target: COL7A1; (+) strand; PAM type: NRG; PAM sequence: CGG
tctggggagaattctgaggg

SEQ ID NO: 16050 - DNA, 20 bp, Artificial Sequence
  Description of Artificial Sequence: Synthetic oligonucleotide
  Target: COL7A1; (+) strand; PAM type: NRG; PAM sequence: GAG
tggggagaattctgagggcg

SEQ ID NO: 16051 - DNA, 20 bp, Artificial Sequence
  Description of Artificial Sequence: Synthetic oligonucleotide
  Target: COL7A1; (+) strand; PAM type: NRG; PAM sequence: TGG
gagaattctgagggcggagc

SEQ ID NO: 16052 - DNA, 20 bp, Artificial Sequence
  Description of Artificial Sequence: Synthetic oligonucleotide
  Target: COL7A1; (+) strand; PAM type: NRG; PAM sequence: AAG
aattctgagggcggagctgg

SEQ ID NO: 16053 - DNA, 20 bp, Artificial Sequence
  Description of Artificial Sequence: Synthetic oligonucleotide
  Target: COL7A1; (+) strand; PAM type: NRG; PAM sequence: AGG
attctgagggcggagctgga

SEQ ID NO: 16054 - DNA, 20 bp, Artificial Sequence
  Description of Artificial Sequence: Synthetic oligonucleotide
  Target: COL7A1; (+) strand; PAM type: NRG; PAM sequence: TGG
tgagggcggagctggaaggt

SEQ ID NO: 16055 - DNA, 20 bp, Artificial Sequence
  Description of Artificial Sequence: Synthetic oligonucleotide
  Target: COL7A1; (+) strand; PAM type: NRG; PAM sequence: GGG
gagggcggagctggaaggtt

SEQ ID NO: 16056 - DNA, 20 bp, Artificial Sequence
  Description of Artificial Sequence: Synthetic oligonucleotide
  Target: COL7A1; (+) strand; PAM type: NRG; PAM sequence: TAG
gcggagctggaaggttggga

SEQ ID NO: 16057 - DNA, 20 bp, Artificial Sequence
  Description of Artificial Sequence: Synthetic oligonucleotide
  Target: COL7A1; (+) strand; PAM type: NRG; PAM sequence: AGG
cggagctggaaggttgggat

SEQ ID NO: 16058 - DNA, 20 bp, Artificial Sequence
  Description of Artificial Sequence: Synthetic oligonucleotide
  Target: COL7A1; (+) strand; PAM type: NRG; PAM sequence: GGG
ggagctggaaggttgggata

SEQ ID NO: 16059 - DNA, 20 bp, Artificial Sequence
  Description of Artificial Sequence: Synthetic oligonucleotide
  Target: COL7A1; (+) strand; PAM type: NRG; PAM sequence: GGG
gagctggaaggttgggatag

SEQ ID NO: 16060 - DNA, 20 bp, Artificial Sequence
  Description of Artificial Sequence: Synthetic oligonucleotide
  Target: COL7A1; (+) strand; PAM type: NRG; PAM sequence: TGG
aaggttgggataggggtcac

SEQ ID NO: 16061 - DNA, 20 bp, Artificial Sequence
  Description of Artificial Sequence: Synthetic oligonucleotide
  Target: COL7A1; (+) strand; PAM type: NRG; PAM sequence: GGG
aggttgggataggggtcact

SEQ ID NO: 16062 - DNA, 20 bp, Artificial Sequence
  Description of Artificial Sequence: Synthetic oligonucleotide
  Target: COL7A1; (+) strand; PAM type: NRG; PAM sequence: CAG
ataggggtcactgggacaac

SEQ ID NO: 16063 - DNA, 20 bp, Artificial Sequence
  Description of Artificial Sequence: Synthetic oligonucleotide
  Target: COL7A1; (+) strand; PAM type: NRG; PAM sequence: AGG
taggggtcactgggacaacc

SEQ ID NO: 16064 - DNA, 20 bp, Artificial Sequence
  Description of Artificial Sequence: Synthetic oligonucleotide
  Target: COL7A1; (+) strand; PAM type: NRG; PAM sequence: CAG
accaggactctgcccaacat

SEQ ID NO: 16065 - DNA, 20 bp, Artificial Sequence
  Description of Artificial Sequence: Synthetic oligonucleotide
  Target: COL7A1; (+) strand; PAM type: NRG; PAM sequence: AGG
ccaggactctgcccaacatc

SEQ ID NO: 16066 - DNA, 20 bp, Artificial Sequence
  Description of Artificial Sequence: Synthetic oligonucleotide
  Target: COL7A1; (+) strand; PAM type: NRG; PAM sequence: CAG
ctgcccaacatcaggaccat

SEQ ID NO: 16067 - DNA, 20 bp, Artificial Sequence
  Description of Artificial Sequence: Synthetic oligonucleotide
  Target: COL7A1; (+) strand; PAM type: NRG; PAM sequence: CAG
aacatcaggaccatcagcaa

SEQ ID NO: 16068 - DNA, 20 bp, Artificial Sequence
  Description of Artificial Sequence: Synthetic oligonucleotide
  Target: COL7A1; (+) strand; PAM type: NRG; PAM sequence: CAG
atcaggaccatcagcaacag

SEQ ID NO: 16069 - DNA, 20 bp, Artificial Sequence
  Description of Artificial Sequence: Synthetic oligonucleotide
  Target: COL7A1; (+) strand; PAM type: NRG; PAM sequence: GAG
caggaccatcagcaacagca

SEQ ID NO: 16070 - DNA, 20 bp, Artificial Sequence
  Description of Artificial Sequence: Synthetic oligonucleotide
  Target: COL7A1; (+) strand; PAM type: NRG; PAM sequence: TGG
cagcaacagcagagcacacc

SEQ ID NO: 16071 - DNA, 20 bp, Artificial Sequence
  Description of Artificial Sequence: Synthetic oligonucleotide
  Target: COL7A1; (+) strand; PAM type: NRG; PAM sequence: GAG
agagcacacctggtcatcgt

SEQ ID NO: 16072 - DNA, 20 bp, Artificial Sequence
  Description of Artificial Sequence: Synthetic oligonucleotide
  Target: COL7A1; (+) strand; PAM type: NRG; PAM sequence: AGG
gagcacacctggtcatcgtg

SEQ ID NO: 16073 - DNA, 20 bp, Artificial Sequence
  Description of Artificial Sequence: Synthetic oligonucleotide
  Target: COL7A1; (+) strand; PAM type: NRG; PAM sequence: CAG
acacctggtcatcgtgaggt

SEQ ID NO: 16074 - DNA, 20 bp, Artificial Sequence
  Description of Artificial Sequence: Synthetic oligonucleotide
  Target: COL7A1; (+) strand; PAM type: NRG; PAM sequence: AGG
cacctggtcatcgtgaggtc

SEQ ID NO: 16075 - DNA, 20 bp, Artificial Sequence
  Description of Artificial Sequence: Synthetic oligonucleotide
  Target: COL7A1; (+) strand; PAM type: NRG; PAM sequence: AAG
tcatcgtgaggtcaggctgc

SEQ ID NO: 16076 - DNA, 20 bp, Artificial Sequence
  Description of Artificial Sequence: Synthetic oligonucleotide
  Target: COL7A1; (+) strand; PAM type: NRG; PAM sequence: AGG
catcgtgaggtcaggctgca

SEQ ID NO: 16077 - DNA, 20 bp, Artificial Sequence
  Description of Artificial Sequence: Synthetic oligonucleotide
  Target: COL7A1; (+) strand; PAM type: NRG; PAM sequence: GAG
tcgtgaggtcaggctgcaag

SEQ ID NO: 16078 - DNA, 20 bp, Artificial Sequence
  Description of Artificial Sequence: Synthetic oligonucleotide
  Target: COL7A1; (+) strand; PAM type: NRG; PAM sequence: TGG
gtcaggctgcaaggagaaaa

SEQ ID NO: 16079 - DNA, 20 bp, Artificial Sequence
  Description of Artificial Sequence: Synthetic oligonucleotide
  Target: COL7A1; (+) strand; PAM type: NRG; PAM sequence: GGG
tcaggctgcaaggagaaaat

SEQ ID NO: 16080 - DNA, 20 bp, Artificial Sequence
  Description of Artificial Sequence: Synthetic oligonucleotide
  Target: COL7A1; (+) strand; PAM type: NRG; PAM sequence: CAG
ctgcaaggagaaaatgggct

SEQ ID NO: 16081 - DNA, 20 bp, Artificial Sequence
  Description of Artificial Sequence: Synthetic oligonucleotide
  Target: COL7A1; (+) strand; PAM type: NRG; PAM sequence: AGG
tgcaaggagaaaatgggctc

SEQ ID NO: 16082 - DNA, 20 bp, Artificial Sequence
  Description of Artificial Sequence: Synthetic oligonucleotide
  Target: COL7A1; (+) strand; PAM type: NRG; PAM sequence: GGG
gcaaggagaaaatgggctca

SEQ ID NO: 16083 - DNA, 20 bp, Artificial Sequence
  Description of Artificial Sequence: Synthetic oligonucleotide
  Target: COL7A1; (+) strand; PAM type: NRG; PAM sequence: CAG
aggagaaaatgggctcaggg

SEQ ID NO: 16084 - DNA, 20 bp, Artificial Sequence
  Description of Artificial Sequence: Synthetic oligonucleotide
  Target: COL7A1; (+) strand; PAM type: NRG; PAM sequence: AGG
ggagaaaatgggctcagggc

SEQ ID NO: 16085 - DNA, 20 bp, Artificial Sequence
  Description of Artificial Sequence: Synthetic oligonucleotide
  Target: COL7A1; (+) strand; PAM type: NRG; PAM sequence: GGG
gagaaaatgggctcagggca

SEQ ID NO: 16086 - DNA, 20 bp, Artificial Sequence
  Description of Artificial Sequence: Synthetic oligonucleotide
  Target: COL7A1; (+) strand; PAM type: NRG; PAM sequence: GGG
agaaaatgggctcagggcag

SEQ ID NO: 16087 - DNA, 20 bp, Artificial Sequence
  Description of Artificial Sequence: Synthetic oligonucleotide
  Target: COL7A1; (+) strand; PAM type: NRG; PAM sequence: TGG
tgggctcagggcaggggctc

SEQ ID NO: 16088 - DNA, 20 bp, Artificial Sequence
  Description of Artificial Sequence: Synthetic oligonucleotide
  Target: COL7A1; (+) strand; PAM type: NRG; PAM sequence: TGG
gggcaggggctctggtcaac

SEQ ID NO: 16089 - DNA, 20 bp, Artificial Sequence
  Description of Artificial Sequence: Synthetic oligonucleotide
  Target: COL7A1; (+) strand; PAM type: NRG; PAM sequence: GGG
ggcaggggctctggtcaact

SEQ ID NO: 16090 - DNA, 20 bp, Artificial Sequence
  Description of Artificial Sequence: Synthetic oligonucleotide
  Target: COL7A1; (+) strand; PAM type: NRG; PAM sequence: GGG
gcaggggctctggtcaactg

SEQ ID NO: 16091 - DNA, 20 bp, Artificial Sequence
  Description of Artificial Sequence: Synthetic oligonucleotide
  Target: COL7A1; (+) strand; PAM type: NRG; PAM sequence: TGG
ctctggtcaactggggtcca

SEQ ID NO: 16092 - DNA, 20 bp, Artificial Sequence
  Description of Artificial Sequence: Synthetic oligonucleotide
  Target: COL7A1; (+) strand; PAM type: NRG; PAM sequence: CAG
ggtcaactggggtccatgga

SEQ ID NO: 16093 - DNA, 20 bp, Artificial Sequence
  Description of Artificial Sequence: Synthetic oligonucleotide
  Target: COL7A1; (+) strand; PAM type: NRG; PAM sequence: GAG
tcaactggggtccatggaca

SEQ ID NO: 16094 - DNA, 20 bp, Artificial Sequence
  Description of Artificial Sequence: Synthetic oligonucleotide
  Target: COL7A1; (+) strand; PAM type: NRG; PAM sequence: CAG
ctggggtccatggacagaga

SEQ ID NO: 16095 - DNA, 20 bp, Artificial Sequence
  Description of Artificial Sequence: Synthetic oligonucleotide
  Target: COL7A1; (+) strand; PAM type: NRG; PAM sequence: TGG
ggtccatggacagagacaga

SEQ ID NO: 16096 - DNA, 20 bp, Artificial Sequence
  Description of Artificial Sequence: Synthetic oligonucleotide
  Target: COL7A1; (+) strand; PAM type: NRG; PAM sequence: AAG
catggacagagacagatggc

SEQ ID NO: 16097 - DNA, 20 bp, Artificial Sequence
  Description of Artificial Sequence: Synthetic oligonucleotide
  Target: COL7A1; (+) strand; PAM type: NRG; PAM sequence: AGG
atggacagagacagatggca

SEQ ID NO: 16098 - DNA, 20 bp, Artificial Sequence
  Description of Artificial Sequence: Synthetic oligonucleotide
  Target: COL7A1; (+) strand; PAM type: NRG; PAM sequence: GGG
tggacagagacagatggcaa

SEQ ID NO: 16099 - DNA, 20 bp, Artificial Sequence
  Description of Artificial Sequence: Synthetic oligonucleotide
  Target: COL7A1; (+) strand; PAM type: NRG; PAM sequence: CAG
acagagacagatggcaaggg

SEQ ID NO: 16100 - DNA, 20 bp, Artificial Sequence
  Description of Artificial Sequence: Synthetic oligonucleotide
  Target: COL7A1; (+) strand; PAM type: NRG; PAM sequence: GAG
agagacagatggcaagggca

SEQ ID NO: 16101 - DNA, 20 bp, Artificial Sequence
  Description of Artificial Sequence: Synthetic oligonucleotide
  Target: COL7A1; (+) strand; PAM type: NRG; PAM sequence: CAG
agatggcaagggcagagtga

SEQ ID NO: 16102 - DNA, 20 bp, Artificial Sequence
  Description of Artificial Sequence: Synthetic oligonucleotide
  Target: COL7A1; (+) strand; PAM type: NRG; PAM sequence: GAG
atggcaagggcagagtgaca

SEQ ID NO: 16103 - DNA, 20 bp, Artificial Sequence
  Description of Artificial Sequence: Synthetic oligonucleotide
  Target: COL7A1; (+) strand; PAM type: NRG; PAM sequence: CGG
gcaagggcagagtgacagag

SEQ ID NO: 16104 - DNA, 20 bp, Artificial Sequence
  Description of Artificial Sequence: Synthetic oligonucleotide
  Target: COL7A1; (+) strand; PAM type: NRG; PAM sequence: GGG
caagggcagagtgacagagc

SEQ ID NO: 16105 - DNA, 20 bp, Artificial Sequence
  Description of Artificial Sequence: Synthetic oligonucleotide
  Target: COL7A1; (+) strand; PAM type: NRG; PAM sequence: GGG
aagggcagagtgacagagcg

SEQ ID NO: 16106 - DNA, 20 bp, Artificial Sequence
  Description of Artificial Sequence: Synthetic oligonucleotide
  Target: COL7A1; (+) strand; PAM type: NRG; PAM sequence: GGG
agggcagagtgacagagcgg

SEQ ID NO: 16107 - DNA, 20 bp, Artificial Sequence
  Description of Artificial Sequence: Synthetic oligonucleotide
  Target: COL7A1; (+) strand; PAM type: NRG; PAM sequence: TGG
cagagtgacagagcggggga

SEQ ID NO: 16108 - DNA, 20 bp, Artificial Sequence
  Description of Artificial Sequence: Synthetic oligonucleotide
  Target: COL7A1; (+) strand; PAM type: NRG; PAM sequence: GAG
gagtgacagagcgggggatg

SEQ ID NO: 16109 - DNA, 20 bp, Artificial Sequence
  Description of Artificial Sequence: Synthetic oligonucleotide
  Target: COL7A1; (+) strand; PAM type: NRG; PAM sequence: GAG
gtgacagagcgggggatgga

SEQ ID NO: 16110 - DNA, 20 bp, Artificial Sequence
  Description of Artificial Sequence: Synthetic oligonucleotide
  Target: COL7A1; (+) strand; PAM type: NRG; PAM sequence: GAG
gacagagcgggggatggaga

SEQ ID NO: 16111 - DNA, 20 bp, Artificial Sequence
  Description of Artificial Sequence: Synthetic oligonucleotide
  Target: COL7A1; (+) strand; PAM type: NRG; PAM sequence: GAG
cagagcgggggatggagaga

SEQ ID NO: 16112 - DNA, 20 bp, Artificial Sequence
  Description of Artificial Sequence: Synthetic oligonucleotide
  Target: COL7A1; (+) strand; PAM type: NRG; PAM sequence: AGG
agagcgggggatggagagag

SEQ ID NO: 16113 - DNA, 20 bp, Artificial Sequence
  Description of Artificial Sequence: Synthetic oligonucleotide
  Target: COL7A1; (+) strand; PAM type: NRG; PAM sequence: AAG
gcgggggatggagagagagg

SEQ ID NO: 16114 - DNA, 20 bp, Artificial Sequence
  Description of Artificial Sequence: Synthetic oligonucleotide
  Target: COL7A1; (+) strand; PAM type: NRG; PAM sequence: GAG
tggagagagaggaagacacc

SEQ ID NO: 16115 - DNA, 20 bp, Artificial Sequence
  Description of Artificial Sequence: Synthetic oligonucleotide
  Target: COL7A1; (+) strand; PAM type: NRG; PAM sequence: AAG
gagagaggaagacaccgaga

SEQ ID NO: 16116 - DNA, 20 bp, Artificial Sequence
  Description of Artificial Sequence: Synthetic oligonucleotide
  Target: COL7A1; (+) strand; PAM type: NRG; PAM sequence: AGG
agagaggaagacaccgagaa

SEQ ID NO: 16117 - DNA, 20 bp, Artificial Sequence
  Description of Artificial Sequence: Synthetic oligonucleotide
  Target: COL7A1; (+) strand; PAM type: NRG; PAM sequence: GGG
gagaggaagacaccgagaaa

SEQ ID NO: 16118 - DNA, 20 bp, Artificial Sequence
  Description of Artificial Sequence: Synthetic oligonucleotide
  Target: COL7A1; (+) strand; PAM type: NRG; PAM sequence: GGG
agaggaagacaccgagaaag

SEQ ID NO: 16119 - DNA, 20 bp, Artificial Sequence
  Description of Artificial Sequence: Synthetic oligonucleotide
  Target: COL7A1; (+) strand; PAM type: NRG; PAM sequence: TAG
gaagacaccgagaaaggggt

SEQ ID NO: 16120 - DNA, 20 bp, Artificial Sequence
  Description of Artificial Sequence: Synthetic oligonucleotide
  Target: COL7A1; (+) strand; PAM type: NRG; PAM sequence: GAG
agacaccgagaaaggggtta

SEQ ID NO: 16121 - DNA, 20 bp, Artificial Sequence
  Description of Artificial Sequence: Synthetic oligonucleotide
  Target: COL7A1; (+) strand; PAM type: NRG; PAM sequence: GAG
acaccgagaaaggggttaga

SEQ ID NO: 16122 - DNA, 20 bp, Artificial Sequence
  Description of Artificial Sequence: Synthetic oligonucleotide
  Target: COL7A1; (+) strand; PAM type: NRG; PAM sequence: AGG
caccgagaaaggggttagag

SEQ ID NO: 16123 - DNA, 20 bp, Artificial Sequence
  Description of Artificial Sequence: Synthetic oligonucleotide
  Target: COL7A1; (+) strand; PAM type: NRG; PAM sequence: CAG
gagaaaggggttagagaggc

SEQ ID NO: 16124 - DNA, 20 bp, Artificial Sequence
  Description of Artificial Sequence: Synthetic oligonucleotide
  Target: COL7A1; (+) strand; PAM type: NRG; PAM sequence: AGG
agaaaggggttagagaggcc

SEQ ID NO: 16125 - DNA, 20 bp, Artificial Sequence
  Description of Artificial Sequence: Synthetic oligonucleotide
  Target: COL7A1; (+) strand; PAM type: NRG; PAM sequence: CAG
aggggttagagaggccaggc

SEQ ID NO: 16126 - DNA, 20 bp, Artificial Sequence
  Description of Artificial Sequence: Synthetic oligonucleotide
  Target: COL7A1; (+) strand; PAM type: NRG; PAM sequence: AGG
ggggttagagaggccaggcc

SEQ ID NO: 16127 - DNA, 20 bp, Artificial Sequence
  Description of Artificial Sequence: Synthetic oligonucleotide
  Target: COL7A1; (+) strand; PAM type: NRG; PAM sequence: CAG
ttagagaggccaggccaggc

SEQ ID NO: 16128 - DNA, 20 bp, Artificial Sequence
  Description of Artificial Sequence: Synthetic oligonucleotide
  Target: COL7A1; (+) strand; PAM type: NRG; PAM sequence: GAG
agagaggccaggccaggcca

SEQ ID NO: 16129 - DNA, 20 bp, Artificial Sequence
  Description of Artificial Sequence: Synthetic oligonucleotide
  Target: COL7A1; (+) strand; PAM type: NRG; PAM sequence: CAG
aggccaggccaggccagaga

SEQ ID NO: 16130 - DNA, 20 bp, Artificial Sequence
  Description of Artificial Sequence: Synthetic oligonucleotide
  Target: COL7A1; (+) strand; PAM type: NRG; PAM sequence: GAG
gccaggccaggccagagaca

SEQ ID NO: 16131 - DNA, 20 bp, Artificial Sequence
  Description of Artificial Sequence: Synthetic oligonucleotide
  Target: COL7A1; (+) strand; PAM type: NRG; PAM sequence: AAG
aggccaggccagagacagag

SEQ ID NO: 16132 - DNA, 20 bp, Artificial Sequence
  Description of Artificial Sequence: Synthetic oligonucleotide
  Target: COL7A1; (+) strand; PAM type: NRG; PAM sequence: AGG
ggccaggccagagacagaga

SEQ ID NO: 16133 - DNA, 20 bp, Artificial Sequence
  Description of Artificial Sequence: Synthetic oligonucleotide
  Target: COL7A1; (+) strand; PAM type: NRG; PAM sequence: GGG
gccaggccagagacagagaa

SEQ ID NO: 16134 - DNA, 20 bp, Artificial Sequence
  Description of Artificial Sequence: Synthetic oligonucleotide
  Target: COL7A1; (+) strand; PAM type: NRG; PAM sequence: GGG
ccaggccagagacagagaag

SEQ ID NO: 16135 - DNA, 20 bp, Artificial Sequence
  Description of Artificial Sequence: Synthetic oligonucleotide
  Target: COL7A1; (+) strand; PAM type: NRG; PAM sequence: GAG
aggccagagacagagaaggg

SEQ ID NO: 16136 - DNA, 20 bp, Artificial Sequence
  Description of Artificial Sequence: Synthetic oligonucleotide
  Target: COL7A1; (+) strand; PAM type: NRG; PAM sequence: AAG
agagacagagaaggggagac

SEQ ID NO: 16137 - DNA, 20 bp, Artificial Sequence
  Description of Artificial Sequence: Synthetic oligonucleotide
  Target: COL7A1; (+) strand; PAM type: NRG; PAM sequence: GAG
agacagagaaggggagacaa

SEQ ID NO: 16138 - DNA, 20 bp, Artificial Sequence
  Description of Artificial Sequence: Synthetic oligonucleotide
  Target: COL7A1; (+) strand; PAM type: NRG; PAM sequence: AGG
gacagagaaggggagacaag

SEQ ID NO: 16139 - DNA, 20 bp, Artificial Sequence
  Description of Artificial Sequence: Synthetic oligonucleotide
  Target: COL7A1; (+) strand; PAM type: NRG; PAM sequence: GAG
cagagaaggggagacaagag

SEQ ID NO: 16140 - DNA, 20 bp, Artificial Sequence
  Description of Artificial Sequence: Synthetic oligonucleotide
  Target: COL7A1; (+) strand; PAM type: NRG; PAM sequence: GAG
gagaaggggagacaagagga

SEQ ID NO: 16141 - DNA, 20 bp, Artificial Sequence
  Description of Artificial Sequence: Synthetic oligonucleotide
  Target: COL7A1; (+) strand; PAM type: NRG; PAM sequence: CAG
aggggagacaagaggagagc

SEQ ID NO: 16142 - DNA, 20 bp, Artificial Sequence
  Description of Artificial Sequence: Synthetic oligonucleotide
  Target: COL7A1; (+) strand; PAM type: NRG; PAM sequence: GAG
gacaagaggagagccagaat

SEQ ID NO: 16143 - DNA, 20 bp, Artificial Sequence
  Description of Artificial Sequence: Synthetic oligonucleotide
  Target: COL7A1; (+) strand; PAM type: NRG; PAM sequence: AAG
aggagagccagaatgagaca

SEQ ID NO: 16144 - DNA, 20 bp, Artificial Sequence
  Description of Artificial Sequence: Synthetic oligonucleotide
  Target: COL7A1; (+) strand; PAM type: NRG; PAM sequence: GAG
gagagccagaatgagacaaa

SEQ ID NO: 16145 - DNA, 20 bp, Artificial Sequence
  Description of Artificial Sequence: Synthetic oligonucleotide
  Target: COL7A1; (+) strand; PAM type: NRG; PAM sequence: AGG
agagccagaatgagacaaag

SEQ ID NO: 16146 - DNA, 20 bp, Artificial Sequence
  Description of Artificial Sequence: Synthetic oligonucleotide
  Target: COL7A1; (+) strand; PAM type: NRG; PAM sequence: CAG
gccagaatgagacaaagagg

SEQ ID NO: 16147 - DNA, 20 bp, Artificial Sequence
  Description of Artificial Sequence: Synthetic oligonucleotide
  Target: COL7A1; (+) strand; PAM type: NRG; PAM sequence: AAG
gaatgagacaaagaggcaga

SEQ ID NO: 16148 - DNA, 20 bp, Artificial Sequence
  Description of Artificial Sequence: Synthetic oligonucleotide
  Target: COL7A1; (+) strand; PAM type: NRG; PAM sequence: AAG
gagacaaagaggcagaaagc

SEQ ID NO: 16149 - DNA, 20 bp, Artificial Sequence
  Description of Artificial Sequence: Synthetic oligonucleotide
  Target: COL7A1; (+) strand; PAM type: NRG; PAM sequence: CAG
caaagaggcagaaagcaaga

SEQ ID NO: 16150 - DNA, 20 bp, Artificial Sequence
  Description of Artificial Sequence: Synthetic oligonucleotide
  Target: COL7A1; (+) strand; PAM type: NRG; PAM sequence: AAG
cagaaagcaagacagaaaaa

SEQ ID NO: 16151 - DNA, 20 bp, Artificial Sequence
  Description of Artificial Sequence: Synthetic oligonucleotide
  Target: COL7A1; (+) strand; PAM type: NRG; PAM sequence: AAG
aagacagaaaaaaagaaaca

SEQ ID NO: 16152 - DNA, 20 bp, Artificial Sequence
  Description of Artificial Sequence: Synthetic oligonucleotide
  Target: COL7A1; (+) strand; PAM type: NRG; PAM sequence: CAG
aaaaaagaaacaaagaaatc

SEQ ID NO: 16153 - DNA, 20 bp, Artificial Sequence
  Description of Artificial Sequence: Synthetic oligonucleotide
  Target: COL7A1; (+) strand; PAM type: NRG; PAM sequence: GAG
aaaagaaacaaagaaatcca

SEQ ID NO: 16154 - DNA, 20 bp, Artificial Sequence
  Description of Artificial Sequence: Synthetic oligonucleotide
  Target: COL7A1; (+) strand; PAM type: NRG; PAM sequence: CAG
gaaacaaagaaatccagaga

SEQ ID NO: 16155 - DNA, 20 bp, Artificial Sequence
  Description of Artificial Sequence: Synthetic oligonucleotide
  Target: COL7A1; (+) strand; PAM type: NRG; PAM sequence: GAG
aacaaagaaatccagagaca

SEQ ID NO: 16156 - DNA, 20 bp, Artificial Sequence
  Description of Artificial Sequence: Synthetic oligonucleotide
  Target: COL7A1; (+) strand; PAM type: NRG; PAM sequence: AGG
acaaagaaatccagagacag

SEQ ID NO: 16157 - DNA, 20 bp, Artificial Sequence
  Description of Artificial Sequence: Synthetic oligonucleotide
  Target: COL7A1; (+) strand; PAM type: NRG; PAM sequence: GGG
caaagaaatccagagacaga

SEQ ID NO: 16158 - DNA, 20 bp, Artificial Sequence
  Description of Artificial Sequence: Synthetic oligonucleotide
  Target: COL7A1; (+) strand; PAM type: NRG; PAM sequence: CAG
gaaatccagagacagaggga

SEQ ID NO: 16159 - DNA, 20 bp, Artificial Sequence
  Description of Artificial Sequence: Synthetic oligonucleotide
  Target: COL7A1; (+) strand; PAM type: NRG; PAM sequence: AAG
tccagagacagagggacagc

SEQ ID NO: 16160 - DNA, 20 bp, Artificial Sequence
  Description of Artificial Sequence: Synthetic oligonucleotide
  Target: COL7A1; (+) strand; PAM type: NRG; PAM sequence: GAG
cagagacagagggacagcaa

SEQ ID NO: 16161 - DNA, 20 bp, Artificial Sequence
  Description of Artificial Sequence: Synthetic oligonucleotide
  Target: COL7A1; (+) strand; PAM type: NRG; PAM sequence: GAG
gagacagagggacagcaaga

SEQ ID NO: 16162 - DNA, 20 bp, Artificial Sequence
  Description of Artificial Sequence: Synthetic oligonucleotide
  Target: COL7A1; (+) strand; PAM type: NRG; PAM sequence: AGG
agacagagggacagcaagag

SEQ ID NO: 16163 - DNA, 20 bp, Artificial Sequence
  Description of Artificial Sequence: Synthetic oligonucleotide
  Target: COL7A1; (+) strand; PAM type: NRG; PAM sequence: GGG
gacagagggacagcaagaga

SEQ ID NO: 16164 - DNA, 20 bp, Artificial Sequence
  Description of Artificial Sequence: Synthetic oligonucleotide
  Target: COL7A1; (+) strand; PAM type: NRG; PAM sequence: GAG
cagagggacagcaagagagg

SEQ ID NO: 16165 - DNA, 20 bp, Artificial Sequence
  Description of Artificial Sequence: Synthetic oligonucleotide
  Target: COL7A1; (+) strand; PAM type: NRG; PAM sequence: AAG
gacagcaagagagggagatg

SEQ ID NO: 16166 - DNA, 20 bp, Artificial Sequence
  Description of Artificial Sequence: Synthetic oligonucleotide
  Target: COL7A1; (+) strand; PAM type: NRG; PAM sequence: AGG
acagcaagagagggagatga

SEQ ID NO: 16167 - DNA, 20 bp, Artificial Sequence
  Description of Artificial Sequence: Synthetic oligonucleotide
  Target: COL7A1; (+) strand; PAM type: NRG; PAM sequence: GAG
agcaagagagggagatgaag

SEQ ID NO: 16168 - DNA, 20 bp, Artificial Sequence
  Description of Artificial Sequence: Synthetic oligonucleotide
  Target: COL7A1; (+) strand; PAM type: NRG; PAM sequence: TGG
agagagggagatgaaggaga

SEQ ID NO: 16169 - DNA, 20 bp, Artificial Sequence
  Description of Artificial Sequence: Synthetic oligonucleotide
  Target: COL7A1; (+) strand; PAM type: NRG; PAM sequence: GAG
agagggagatgaaggagatg

SEQ ID NO: 16170 - DNA, 20 bp, Artificial Sequence
  Description of Artificial Sequence: Synthetic oligonucleotide
  Target: COL7A1; (+) strand; PAM type: NRG; PAM sequence: AGG
gagggagatgaaggagatgg

SEQ ID NO: 16171 - DNA, 20 bp, Artificial Sequence
  Description of Artificial Sequence: Synthetic oligonucleotide
  Target: COL7A1; (+) strand; PAM type: NRG; PAM sequence: CAG
ggagatgaaggagatggagg

SEQ ID NO: 16172 - DNA, 20 bp, Artificial Sequence
  Description of Artificial Sequence: Synthetic oligonucleotide
  Target: COL7A1; (+) strand; PAM type: NRG; PAM sequence: GAG
agatgaaggagatggaggca

SEQ ID NO: 16173 - DNA, 20 bp, Artificial Sequence
  Description of Artificial Sequence: Synthetic oligonucleotide
  Target: COL7A1; (+) strand; PAM type: NRG; PAM sequence: TGG
gagatggaggcagagcaaaa

SEQ ID NO: 16174 - DNA, 20 bp, Artificial Sequence
  Description of Artificial Sequence: Synthetic oligonucleotide
  Target: COL7A1; (+) strand; PAM type: NRG; PAM sequence: GAG
gatggaggcagagcaaaatg

SEQ ID NO: 16175 - DNA, 20 bp, Artificial Sequence
  Description of Artificial Sequence: Synthetic oligonucleotide
  Target: COL7A1; (+) strand; PAM type: NRG; PAM sequence: TAG
aggcagagcaaaatggagac

SEQ ID NO: 16176 - DNA, 20 bp, Artificial Sequence
  Description of Artificial Sequence: Synthetic oligonucleotide
  Target: COL7A1; (+) strand; PAM type: NRG; PAM sequence: AAG
cagagcaaaatggagactag

SEQ ID NO: 16177 - DNA, 20 bp, Artificial Sequence
  Description of Artificial Sequence: Synthetic oligonucleotide
  Target: COL7A1; (+) strand; PAM type: NRG; PAM sequence: AAG
aaaatggagactagaagaaa

SEQ ID NO: 16178 - DNA, 20 bp, Artificial Sequence
  Description of Artificial Sequence: Synthetic oligonucleotide
  Target: COL7A1; (+) strand; PAM type: NRG; PAM sequence: CAG
tggagactagaagaaaaaga

SEQ ID NO: 16179 - DNA, 20 bp, Artificial Sequence
  Description of Artificial Sequence: Synthetic oligonucleotide
  Target: COL7A1; (+) strand; PAM type: NRG; PAM sequence: CAG
gactagaagaaaaagacaga

SEQ ID NO: 16180 - DNA, 20 bp, Artificial Sequence
  Description of Artificial Sequence: Synthetic oligonucleotide
  Target: COL7A1; (+) strand; PAM type: NRG; PAM sequence: CAG
aagacagacagaaaccatcc

SEQ ID NO: 16181 - DNA, 20 bp, Artificial Sequence
  Description of Artificial Sequence: Synthetic oligonucleotide
  Target: COL7A1; (+) strand; PAM type: NRG; PAM sequence: GAG
gacagacagaaaccatccca

SEQ ID NO: 16182 - DNA, 20 bp, Artificial Sequence
  Description of Artificial Sequence: Synthetic oligonucleotide
  Target: COL7A1; (+) strand; PAM type: NRG; PAM sequence: CAG
gacagaaaccatcccagaga

SEQ ID NO: 16183 - DNA, 20 bp, Artificial Sequence
  Description of Artificial Sequence: Synthetic oligonucleotide
  Target: COL7A1; (+) strand; PAM type: NRG; PAM sequence: CAG
gaaaccatcccagagacaga

SEQ ID NO: 16184 - DNA, 20 bp, Artificial Sequence
  Description of Artificial Sequence: Synthetic oligonucleotide
  Target: COL7A1; (+) strand; PAM type: NRG; PAM sequence: TGG
cccagagacagacagcatga

SEQ ID NO: 16185 - DNA, 20 bp, Artificial Sequence
  Description of Artificial Sequence: Synthetic oligonucleotide
  Target: COL7A1; (+) strand; PAM type: NRG; PAM sequence: AAG
gagacagacagcatgatgga

SEQ ID NO: 16186 - DNA, 20 bp, Artificial Sequence
  Description of Artificial Sequence: Synthetic oligonucleotide
  Target: COL7A1; (+) strand; PAM type: NRG; PAM sequence: AAG
cagacagcatgatggaaaga

SEQ ID NO: 16187 - DNA, 20 bp, Artificial Sequence
  Description of Artificial Sequence: Synthetic oligonucleotide
  Target: COL7A1; (+) strand; PAM type: NRG; PAM sequence: CAG
gcatgatggaaagaaagatt

SEQ ID NO: 16188 - DNA, 20 bp, Artificial Sequence
  Description of Artificial Sequence: Synthetic oligonucleotide
  Target: COL7A1; (+) strand; PAM type: NRG; PAM sequence: CAG
gatggaaagaaagattcaga

SEQ ID NO: 16189 - DNA, 20 bp, Artificial Sequence
  Description of Artificial Sequence: Synthetic oligonucleotide
  Target: COL7A1; (+) strand; PAM type: NRG; PAM sequence: CAG
gaaagattcagacagaaaca

SEQ ID NO: 16190 - DNA, 20 bp, Artificial Sequence
  Description of Artificial Sequence: Synthetic oligonucleotide
  Target: COL7A1; (+) strand; PAM type: NRG; PAM sequence: GAG
aagattcagacagaaacaca

SEQ ID NO: 16191 - DNA, 20 bp, Artificial Sequence
  Description of Artificial Sequence: Synthetic oligonucleotide
  Target: COL7A1; (+) strand; PAM type: NRG; PAM sequence: CAG
agacagaaacacagagtcca

SEQ ID NO: 16192 - DNA, 20 bp, Artificial Sequence
  Description of Artificial Sequence: Synthetic oligonucleotide
  Target: COL7A1; (+) strand; PAM type: NRG; PAM sequence: AGG
gacagaaacacagagtccac

SEQ ID NO: 16193 - DNA, 20 bp, Artificial Sequence
  Description of Artificial Sequence: Synthetic oligonucleotide
  Target: COL7A1; (+) strand; PAM type: NRG; PAM sequence: GAG
cagaaacacagagtccacag

SEQ ID NO: 16194 - DNA, 20 bp, Artificial Sequence
  Description of Artificial Sequence: Synthetic oligonucleotide
  Target: COL7A1; (+) strand; PAM type: NRG; PAM sequence: AGG
agaaacacagagtccacagg

SEQ ID NO: 16195 - DNA, 20 bp, Artificial Sequence
  Description of Artificial Sequence: Synthetic oligonucleotide
  Target: COL7A1; (+) strand; PAM type: NRG; PAM sequence: GGG
gaaacacagagtccacagga

SEQ ID NO: 16196 - DNA, 20 bp, Artificial Sequence
  Description of Artificial Sequence: Synthetic oligonucleotide
  Target: COL7A1; (+) strand; PAM type: NRG; PAM sequence: CAG
acacagagtccacaggaggg

SEQ ID NO: 16197 - DNA, 20 bp, Artificial Sequence
  Description of Artificial Sequence: Synthetic oligonucleotide
  Target: COL7A1; (+) strand; PAM type: NRG; PAM sequence: AGG
cacagagtccacaggagggc

SEQ ID NO: 16198 - DNA, 20 bp, Artificial Sequence
  Description of Artificial Sequence: Synthetic oligonucleotide
  Target: COL7A1; (+) strand; PAM type: NRG; PAM sequence: CGG
agagtccacaggagggcagg

SEQ ID NO: 16199 - DNA, 20 bp, Artificial Sequence
  Description of Artificial Sequence: Synthetic oligonucleotide
  Target: COL7A1; (+) strand; PAM type: NRG; PAM sequence: CAG
acaggagggcaggcggttct

SEQ ID NO: 16200 - DNA, 20 bp, Artificial Sequence
  Description of Artificial Sequence: Synthetic oligonucleotide
  Target: COL7A1; (+) strand; PAM type: NRG; PAM sequence: CAG
ggagggcaggcggttctcag

SEQ ID NO: 16201 - DNA, 20 bp, Artificial Sequence
  Description of Artificial Sequence: Synthetic oligonucleotide
  Target: COL7A1; (+) strand; PAM type: NRG; PAM sequence: AGG
gagggcaggcggttctcagc

SEQ ID NO: 16202 - DNA, 20 bp, Artificial Sequence
  Description of Artificial Sequence: Synthetic oligonucleotide
  Target: COL7A1; (+) strand; PAM type: NRG; PAM sequence: GAG
gggcaggcggttctcagcag

SEQ ID NO: 16203 - DNA, 20 bp, Artificial Sequence
  Description of Artificial Sequence: Synthetic oligonucleotide
  Target: COL7A1; (+) strand; PAM type: NRG; PAM sequence: GAG
gcaggcggttctcagcagga

SEQ ID NO: 16204 - DNA, 20 bp, Artificial Sequence
  Description of Artificial Sequence: Synthetic oligonucleotide
  Target: COL7A1; (+) strand; PAM type: NRG; PAM sequence: CAG
gttctcagcaggagagcttg

SEQ ID NO: 16205 - DNA, 20 bp, Artificial Sequence
  Description of Artificial Sequence: Synthetic oligonucleotide
  Target: COL7A1; (+) strand; PAM type: NRG; PAM sequence: CAG
aggagagcttgcagctgatc

SEQ ID NO: 16206 - DNA, 20 bp, Artificial Sequence
  Description of Artificial Sequence: Synthetic oligonucleotide
  Target: COL7A1; (+) strand; PAM type: NRG; PAM sequence: AGG
ggagagcttgcagctgatcc

SEQ ID NO: 16207 - DNA, 20 bp, Artificial Sequence
  Description of Artificial Sequence: Synthetic oligonucleotide
  Target: COL7A1; (+) strand; PAM type: NRG; PAM sequence: CAG
cttgcagctgatccaggaaa

SEQ ID NO: 16208 - DNA, 20 bp, Artificial Sequence
  Description of Artificial Sequence: Synthetic oligonucleotide
  Target: COL7A1; (+) strand; PAM type: NRG; PAM sequence: AAG
gcagctgatccaggaaacag

SEQ ID NO: 16209 - DNA, 20 bp, Artificial Sequence
  Description of Artificial Sequence: Synthetic oligonucleotide
  Target: COL7A1; (+) strand; PAM type: NRG; PAM sequence: AGG
cagctgatccaggaaacaga

SEQ ID NO: 16210 - DNA, 20 bp, Artificial Sequence
  Description of Artificial Sequence: Synthetic oligonucleotide
  Target: COL7A1; (+) strand; PAM type: NRG; PAM sequence: GGG
agctgatccaggaaacagaa

SEQ ID NO: 16211 - DNA, 20 bp, Artificial Sequence
  Description of Artificial Sequence: Synthetic oligonucleotide
  Target: COL7A1; (+) strand; PAM type: NRG; PAM sequence: CAG
tgatccaggaaacagaaggg

SEQ ID NO: 16212 - DNA, 20 bp, Artificial Sequence
  Description of Artificial Sequence: Synthetic oligonucleotide
  Target: COL7A1; (+) strand; PAM type: NRG; PAM sequence: AGG
gatccaggaaacagaagggc

SEQ ID NO: 16213 - DNA, 20 bp, Artificial Sequence
  Description of Artificial Sequence: Synthetic oligonucleotide
  Target: COL7A1; (+) strand; PAM type: NRG; PAM sequence: CGG
ggaaacagaagggcaggaat

SEQ ID NO: 16214 - DNA, 20 bp, Artificial Sequence
  Description of Artificial Sequence: Synthetic oligonucleotide
  Target: COL7A1; (+) strand; PAM type: NRG; PAM sequence: CAG
gaagggcaggaatcggatct

SEQ ID NO: 16215 - DNA, 20 bp, Artificial Sequence
  Description of Artificial Sequence: Synthetic oligonucleotide
  Target: COL7A1; (+) strand; PAM type: NRG; PAM sequence: GAG
agggcaggaatcggatctca

SEQ ID NO: 16216 - DNA, 20 bp, Artificial Sequence
  Description of Artificial Sequence: Synthetic oligonucleotide
  Target: COL7A1; (+) strand; PAM type: NRG; PAM sequence: AGG
gggcaggaatcggatctcag

SEQ ID NO: 16217 - DNA, 20 bp, Artificial Sequence
  Description of Artificial Sequence: Synthetic oligonucleotide
  Target: COL7A1; (+) strand; PAM type: NRG; PAM sequence: CAG
caggaatcggatctcagagg

SEQ ID NO: 16218 - DNA, 20 bp, Artificial Sequence
  Description of Artificial Sequence: Synthetic oligonucleotide
  Target: COL7A1; (+) strand; PAM type: NRG; PAM sequence: AAG
atcggatctcagaggcagaa

SEQ ID NO: 16219 - DNA, 20 bp, Artificial Sequence
  Description of Artificial Sequence: Synthetic oligonucleotide
  Target: COL7A1; (+) strand; PAM type: NRG; PAM sequence: CAG
ggatctcagaggcagaaaag

SEQ ID NO: 16220 - DNA, 20 bp, Artificial Sequence
  Description of Artificial Sequence: Synthetic oligonucleotide
  Target: COL7A1; (+) strand; PAM type: NRG; PAM sequence: CAG
ctcagaggcagaaaagcagc

SEQ ID NO: 16221 - DNA, 20 bp, Artificial Sequence
  Description of Artificial Sequence: Synthetic oligonucleotide
  Target: COL7A1; (+) strand; PAM type: NRG; PAM sequence: GAG
cagaggcagaaaagcagcca

SEQ ID NO: 16222 - DNA, 20 bp, Artificial Sequence
  Description of Artificial Sequence: Synthetic oligonucleotide
  Target: COL7A1; (+) strand; PAM type: NRG; PAM sequence: CAG
agaaaagcagccagagatcc

SEQ ID NO: 16223 - DNA, 20 bp, Artificial Sequence
  Description of Artificial Sequence: Synthetic oligonucleotide
  Target: COL7A1; (+) strand; PAM type: NRG; PAM sequence: GAG
aaaagcagccagagatccca

SEQ ID NO: 16224 - DNA, 20 bp, Artificial Sequence
  Description of Artificial Sequence: Synthetic oligonucleotide
  Target: COL7A1; (+) strand; PAM type: NRG; PAM sequence: TGG
ccagagatcccagagtcccc

SEQ ID NO: 16225 - DNA, 20 bp, Artificial Sequence
  Description of Artificial Sequence: Synthetic oligonucleotide
  Target: COL7A1; (+) strand; PAM type: NRG; PAM sequence: GGG
cagagatcccagagtcccct

SEQ ID NO: 16226 - DNA, 20 bp, Artificial Sequence
  Description of Artificial Sequence: Synthetic oligonucleotide
  Target: COL7A1; (+) strand; PAM type: NRG; PAM sequence: AAG
tcccagagtcccctgggtcc

SEQ ID NO: 16227 - DNA, 20 bp, Artificial Sequence
  Description of Artificial Sequence: Synthetic oligonucleotide
  Target: COL7A1; (+) strand; PAM type: NRG; PAM sequence: AAG
ctgggtccaagccctccata

SEQ ID NO: 16228 - DNA, 20 bp, Artificial Sequence
  Description of Artificial Sequence: Synthetic oligonucleotide
  Target: COL7A1; (+) strand; PAM type: NRG; PAM sequence: AAG
cccacatccactcaacctcc

SEQ ID NO: 16229 - DNA, 20 bp, Artificial Sequence
  Description of Artificial Sequence: Synthetic oligonucleotide
  Target: COL7A1; (+) strand; PAM type: NRG; PAM sequence: CAG
cttcccatcccgacccaacc

SEQ ID NO: 16230 - DNA, 20 bp, Artificial Sequence
  Description of Artificial Sequence: Synthetic oligonucleotide
  Target: COL7A1; (+) strand; PAM type: NRG; PAM sequence: CAG
caacccagtcctaccgccac

SEQ ID NO: 16231 - DNA, 20 bp, Artificial Sequence
  Description of Artificial Sequence: Synthetic oligonucleotide
  Target: COL7A1; (+) strand; PAM type: NRG; PAM sequence: TGG
ctaccgccaccagctgcttc

SEQ ID NO: 16232 - DNA, 20 bp, Artificial Sequence
  Description of Artificial Sequence: Synthetic oligonucleotide
  Target: COL7A1; (+) strand; PAM type: NRG; PAM sequence: GGG
taccgccaccagctgcttct

SEQ ID NO: 16233 - DNA, 20 bp, Artificial Sequence
  Description of Artificial Sequence: Synthetic oligonucleotide
  Target: COL7A1; (+) strand; PAM type: NRG; PAM sequence: GGG
accgccaccagctgcttctg

SEQ ID NO: 16234 - DNA, 20 bp, Artificial Sequence
  Description of Artificial Sequence: Synthetic oligonucleotide
  Target: COL7A1; (+) strand; PAM type: NRG; PAM sequence: AAG
ccaccagctgcttctggggt

SEQ ID NO: 16235 - DNA, 20 bp, Artificial Sequence
  Description of Artificial Sequence: Synthetic oligonucleotide
  Target: COL7A1; (+) strand; PAM type: NRG; PAM sequence: AGG
caccagctgcttctggggta

SEQ ID NO: 16236 - DNA, 20 bp, Artificial Sequence
  Description of Artificial Sequence: Synthetic oligonucleotide
  Target: COL7A1; (+) strand; PAM type: NRG; PAM sequence: CAG
cagctgcttctggggtaagg

SEQ ID NO: 16237 - DNA, 20 bp, Artificial Sequence
  Description of Artificial Sequence: Synthetic oligonucleotide
  Target: COL7A1; (+) strand; PAM type: NRG; PAM sequence: TGG
tggggtaaggcagcctgctg

SEQ ID NO: 16238 - DNA, 20 bp, Artificial Sequence
  Description of Artificial Sequence: Synthetic oligonucleotide
  Target: COL7A1; (+) strand; PAM type: NRG; PAM sequence: TGG
ggcagcctgctgtggctgcc

SEQ ID NO: 16239 - DNA, 20 bp, Artificial Sequence
  Description of Artificial Sequence: Synthetic oligonucleotide
  Target: COL7A1; (+) strand; PAM type: NRG; PAM sequence: GGG
gcagcctgctgtggctgcct

SEQ ID NO: 16240 - DNA, 20 bp, Artificial Sequence
  Description of Artificial Sequence: Synthetic oligonucleotide
  Target: COL7A1; (+) strand; PAM type: NRG; PAM sequence: GGG
cagcctgctgtggctgcctg

SEQ ID NO: 16241 - DNA, 20 bp, Artificial Sequence
  Description of Artificial Sequence: Synthetic oligonucleotide
  Target: COL7A1; (+) strand; PAM type: NRG; PAM sequence: TGG
ctgctgtggctgcctggggc

SEQ ID NO: 16242 - DNA, 20 bp, Artificial Sequence
  Description of Artificial Sequence: Synthetic oligonucleotide
  Target: COL7A1; (+) strand; PAM type: NRG; PAM sequence: GGG
tgctgtggctgcctggggct

SEQ ID NO: 16243 - DNA, 20 bp, Artificial Sequence
  Description of Artificial Sequence: Synthetic oligonucleotide
  Target: COL7A1; (+) strand; PAM type: NRG; PAM sequence: GGG
gctgtggctgcctggggctg

SEQ ID NO: 16244 - DNA, 20 bp, Artificial Sequence
  Description of Artificial Sequence: Synthetic oligonucleotide
  Target: COL7A1; (+) strand; PAM type: NRG; PAM sequence: CAG
tggctgcctggggctggggc

SEQ ID NO: 16245 - DNA, 20 bp, Artificial Sequence
  Description of Artificial Sequence: Synthetic oligonucleotide
  Target: COL7A1; (+) strand; PAM type: NRG; PAM sequence: AGG
ggctgcctggggctggggcc

SEQ ID NO: 16246 - DNA, 20 bp, Artificial Sequence
  Description of Artificial Sequence: Synthetic oligonucleotide
  Target: COL7A1; (+) strand; PAM type: NRG; PAM sequence: TGG
ggccaggcactactgtcctg

SEQ ID NO: 16247 - DNA, 20 bp, Artificial Sequence
  Description of Artificial Sequence: Synthetic oligonucleotide
  Target: COL7A1; (+) strand; PAM type: NRG; PAM sequence: CAG
tctgaccctctaccccgctt

SEQ ID NO: 16248 - DNA, 20 bp, Artificial Sequence
  Description of Artificial Sequence: Synthetic oligonucleotide
  Target: COL7A1; (+) strand; PAM type: NRG; PAM sequence: AGG
ctgaccctctaccccgcttc

SEQ ID NO: 16249 - DNA, 20 bp, Artificial Sequence
  Description of Artificial Sequence: Synthetic oligonucleotide
  Target: COL7A1; (+) strand; PAM type: NRG; PAM sequence: GGG
tgaccctctaccccgcttca

SEQ ID NO: 16250 - DNA, 20 bp, Artificial Sequence
  Description of Artificial Sequence: Synthetic oligonucleotide
  Target: COL7A1; (+) strand; PAM type: NRG; PAM sequence: CAG
cagggcccatttatctccct

SEQ ID NO: 16251 - DNA, 20 bp, Artificial Sequence
  Description of Artificial Sequence: Synthetic oligonucleotide
  Target: COL7A1; (+) strand; PAM type: NRG; PAM sequence: TGG
atttatctccctcagccccc

SEQ ID NO: 16252 - DNA, 20 bp, Artificial Sequence
  Description of Artificial Sequence: Synthetic oligonucleotide
  Target: COL7A1; (+) strand; PAM type: NRG; PAM sequence: GGG
tttatctccctcagccccct

SEQ ID NO: 16253 - DNA, 20 bp, Artificial Sequence
  Description of Artificial Sequence: Synthetic oligonucleotide
  Target: COL7A1; (+) strand; PAM type: NRG; PAM sequence: GGG
ttatctccctcagccccctg

SEQ ID NO: 16254 - DNA, 20 bp, Artificial Sequence
  Description of Artificial Sequence: Synthetic oligonucleotide
  Target: COL7A1; (+) strand; PAM type: NRG; PAM sequence: TGG
tctccctcagccccctgggg

SEQ ID NO: 16255 - DNA, 20 bp, Artificial Sequence
  Description of Artificial Sequence: Synthetic oligonucleotide
  Target: COL7A1; (+) strand; PAM type: NRG; PAM sequence: GGG
ctccctcagccccctggggt

SEQ ID NO: 16256 - DNA, 20 bp, Artificial Sequence
  Description of Artificial Sequence: Synthetic oligonucleotide
  Target: COL7A1; (+) strand; PAM type: NRG; PAM sequence: GAG
ccctcagccccctggggtgg

SEQ ID NO: 16257 - DNA, 20 bp, Artificial Sequence
  Description of Artificial Sequence: Synthetic oligonucleotide
  Target: COL7A1; (+) strand; PAM type: NRG; PAM sequence: TGG
cagccccctggggtgggagc

SEQ ID NO: 16258 - DNA, 20 bp, Artificial Sequence
  Description of Artificial Sequence: Synthetic oligonucleotide
  Target: COL7A1; (+) strand; PAM type: NRG; PAM sequence: TGG
gggagctggtacatgcttcc

SEQ ID NO: 16259 - DNA, 20 bp, Artificial Sequence
  Description of Artificial Sequence: Synthetic oligonucleotide
  Target: COL7A1; (+) strand; PAM type: NRG; PAM sequence: GAG
tggtacatgcttcctggcat

SEQ ID NO: 16260 - DNA, 20 bp, Artificial Sequence
  Description of Artificial Sequence: Synthetic oligonucleotide
  Target: COL7A1; (+) strand; PAM type: NRG; PAM sequence: AGG
ggtacatgcttcctggcatg

SEQ ID NO: 16261 - DNA, 20 bp, Artificial Sequence
  Description of Artificial Sequence: Synthetic oligonucleotide
  Target: COL7A1; (+) strand; PAM type: NRG; PAM sequence: CAG
acatgcttcctggcatgagg

SEQ ID NO: 16262 - DNA, 20 bp, Artificial Sequence
  Description of Artificial Sequence: Synthetic oligonucleotide
  Target: COL7A1; (+) strand; PAM type: NRG; PAM sequence: CGG
cacctatgactcatccctcc

SEQ ID NO: 16263 - DNA, 20 bp, Artificial Sequence
  Description of Artificial Sequence: Synthetic oligonucleotide
  Target: COL7A1; (+) strand; PAM type: NRG; PAM sequence: GGG
acctatgactcatccctccc

SEQ ID NO: 16264 - DNA, 20 bp, Artificial Sequence
  Description of Artificial Sequence: Synthetic oligonucleotide
  Target: COL7A1; (+) strand; PAM type: NRG; PAM sequence: GGG
cctatgactcatccctcccg

SEQ ID NO: 16265 - DNA, 20 bp, Artificial Sequence
  Description of Artificial Sequence: Synthetic oligonucleotide
  Target: COL7A1; (+) strand; PAM type: NRG; PAM sequence: GGG
ctatgactcatccctcccgg

SEQ ID NO: 16266 - DNA, 20 bp, Artificial Sequence
  Description of Artificial Sequence: Synthetic oligonucleotide
  Target: COL7A1; (+) strand; PAM type: NRG; PAM sequence: TAG
atccctcccgggggtgtcct

SEQ ID NO: 16267 - DNA, 20 bp, Artificial Sequence
  Description of Artificial Sequence: Synthetic oligonucleotide
  Target: COL7A1; (+) strand; PAM type: NRG; PAM sequence: CGG
ccaccctatctactcttttc

SEQ ID NO: 16268 - DNA, 20 bp, Artificial Sequence
  Description of Artificial Sequence: Synthetic oligonucleotide
  Target: COL7A1; (+) strand; PAM type: NRG; PAM sequence: GGG
caccctatctactcttttcc

SEQ ID NO: 16269 - DNA, 20 bp, Artificial Sequence
  Description of Artificial Sequence: Synthetic oligonucleotide
  Target: COL7A1; (+) strand; PAM type: NRG; PAM sequence: GGG
accctatctactcttttccg

SEQ ID NO: 16270 - DNA, 20 bp, Artificial Sequence
  Description of Artificial Sequence: Synthetic oligonucleotide
  Target: COL7A1; (+) strand; PAM type: NRG; PAM sequence: AAG
atctactcttttccggggac

SEQ ID NO: 16271 - DNA, 20 bp, Artificial Sequence
  Description of Artificial Sequence: Synthetic oligonucleotide
  Target: COL7A1; (+) strand; PAM type: NRG; PAM sequence: TGG
actcttttccggggacaagt

SEQ ID NO: 16272 - DNA, 20 bp, Artificial Sequence
  Description of Artificial Sequence: Synthetic oligonucleotide
  Target: COL7A1; (+) strand; PAM type: NRG; PAM sequence: GGG
ctcttttccggggacaagtt

SEQ ID NO: 16273 - DNA, 20 bp, Artificial Sequence
  Description of Artificial Sequence: Synthetic oligonucleotide
  Target: COL7A1; (+) strand; PAM type: NRG; PAM sequence: GGG
tcttttccggggacaagttg

SEQ ID NO: 16274 - DNA, 20 bp, Artificial Sequence
  Description of Artificial Sequence: Synthetic oligonucleotide
  Target: COL7A1; (+) strand; PAM type: NRG; PAM sequence: GAG
ccggggacaagttggggact

SEQ ID NO: 16275 - DNA, 20 bp, Artificial Sequence
  Description of Artificial Sequence: Synthetic oligonucleotide
  Target: COL7A1; (+) strand; PAM type: NRG; PAM sequence: AAG
agttggggactgagaatcac

SEQ ID NO: 16276 - DNA, 20 bp, Artificial Sequence
  Description of Artificial Sequence: Synthetic oligonucleotide
  Target: COL7A1; (+) strand; PAM type: NRG; PAM sequence: CAG
ggggactgagaatcacaaga

SEQ ID NO: 16277 - DNA, 20 bp, Artificial Sequence
  Description of Artificial Sequence: Synthetic oligonucleotide
  Target: COL7A1; (+) strand; PAM type: NRG; PAM sequence: CAG
gagaatcacaagacagtgac

SEQ ID NO: 16278 - DNA, 20 bp, Artificial Sequence
  Description of Artificial Sequence: Synthetic oligonucleotide
  Target: COL7A1; (+) strand; PAM type: NRG; PAM sequence: AGG
agaatcacaagacagtgacc

SEQ ID NO: 16279 - DNA, 20 bp, Artificial Sequence
  Description of Artificial Sequence: Synthetic oligonucleotide
  Target: COL7A1; (+) strand; PAM type: NRG; PAM sequence: TGG
cacaagacagtgaccaggac

SEQ ID NO: 16280 - DNA, 20 bp, Artificial Sequence
  Description of Artificial Sequence: Synthetic oligonucleotide
  Target: COL7A1; (+) strand; PAM type: NRG; PAM sequence: GGG
acaagacagtgaccaggact

SEQ ID NO: 16281 - DNA, 20 bp, Artificial Sequence
  Description of Artificial Sequence: Synthetic oligonucleotide
  Target: COL7A1; (+) strand; PAM type: NRG; PAM sequence: CAG
agacagtgaccaggactggg

SEQ ID NO: 16282 - DNA, 20 bp, Artificial Sequence
  Description of Artificial Sequence: Synthetic oligonucleotide
  Target: COL7A1; (+) strand; PAM type: NRG; PAM sequence: GAG
acagtgaccaggactgggca

SEQ ID NO: 16283 - DNA, 20 bp, Artificial Sequence
  Description of Artificial Sequence: Synthetic oligonucleotide
  Target: COL7A1; (+) strand; PAM type: NRG; PAM sequence: AGG
cagtgaccaggactgggcag

SEQ ID NO: 16284 - DNA, 20 bp, Artificial Sequence
  Description of Artificial Sequence: Synthetic oligonucleotide
  Target: COL7A1; (+) strand; PAM type: NRG; PAM sequence: GGG
agtgaccaggactgggcaga

SEQ ID NO: 16285 - DNA, 20 bp, Artificial Sequence
  Description of Artificial Sequence: Synthetic oligonucleotide
  Target: COL7A1; (+) strand; PAM type: NRG; PAM sequence: CAG
agagggactctgtacccatg

SEQ ID NO: 16286 - DNA, 20 bp, Artificial Sequence
  Description of Artificial Sequence: Synthetic oligonucleotide
  Target: COL7A1; (+) strand; PAM type: NRG; PAM sequence: AAG
cagaataataccaacccccc

SEQ ID NO: 16287 - DNA, 20 bp, Artificial Sequence
  Description of Artificial Sequence: Synthetic oligonucleotide
  Target: COL7A1; (+) strand; PAM type: NRG; PAM sequence: AGG
agaataataccaacccccca

SEQ ID NO: 16288 - DNA, 20 bp, Artificial Sequence
  Description of Artificial Sequence: Synthetic oligonucleotide
  Target: COL7A1; (+) strand; PAM type: NRG; PAM sequence: CAG
aaaccccccatcttcccaaa

SEQ ID NO: 16289 - DNA, 20 bp, Artificial Sequence
  Description of Artificial Sequence: Synthetic oligonucleotide
  Target: COL7A1; (+) strand; PAM type: NRG; PAM sequence: CAG
atcttcccaaacagtcacaa

SEQ ID NO: 16290 - DNA, 20 bp, Artificial Sequence
  Description of Artificial Sequence: Synthetic oligonucleotide
  Target: COL7A1; (+) strand; PAM type: NRG; PAM sequence: AGG
tcttcccaaacagtcacaac

SEQ ID NO: 16291 - DNA, 20 bp, Artificial Sequence
  Description of Artificial Sequence: Synthetic oligonucleotide
  Target: COL7A1; (+) strand; PAM type: NRG; PAM sequence: GAG
ttcccaaacagtcacaacag

SEQ ID NO: 16292 - DNA, 20 bp, Artificial Sequence
  Description of Artificial Sequence: Synthetic oligonucleotide
  Target: COL7A1; (+) strand; PAM type: NRG; PAM sequence: CAG
acaacaggagccttttaaaa

SEQ ID NO: 16293 - DNA, 20 bp, Artificial Sequence
  Description of Artificial Sequence: Synthetic oligonucleotide
  Target: COL7A1; (+) strand; PAM type: NRG; PAM sequence: CAG
acaggagccttttaaaacag

SEQ ID NO: 16294 - DNA, 20 bp, Artificial Sequence
  Description of Artificial Sequence: Synthetic oligonucleotide
  Target: COL7A1; (+) strand; PAM type: NRG; PAM sequence: CAG
acagcagctttaatgccccc

SEQ ID NO: 16295 - DNA, 20 bp, Artificial Sequence
  Description of Artificial Sequence: Synthetic oligonucleotide
  Target: COL7A1; (+) strand; PAM type: NRG; PAM sequence: CAG
gctttaatgccccccagaat

SEQ ID NO: 16296 - DNA, 20 bp, Artificial Sequence
  Description of Artificial Sequence: Synthetic oligonucleotide
  Target: COL7A1; (+) strand; PAM type: NRG; PAM sequence: CAG
gaatcagcaccatgtcatca

SEQ ID NO: 16297 - DNA, 20 bp, Artificial Sequence
  Description of Artificial Sequence: Synthetic oligonucleotide
  Target: COL7A1; (+) strand; PAM type: NRG; PAM sequence: AGG
aatcagcaccatgtcatcac

SEQ ID NO: 16298 - DNA, 20 bp, Artificial Sequence
  Description of Artificial Sequence: Synthetic oligonucleotide
  Target: COL7A1; (+) strand; PAM type: NRG; PAM sequence: TGG
gcaccatgtcatcacaggct

SEQ ID NO: 16299 - DNA, 20 bp, Artificial Sequence
  Description of Artificial Sequence: Synthetic oligonucleotide
  Target: COL7A1; (+) strand; PAM type: NRG; PAM sequence: GGG
caccatgtcatcacaggctt

SEQ ID NO: 16300 - DNA, 20 bp, Artificial Sequence
  Description of Artificial Sequence: Synthetic oligonucleotide
  Target: COL7A1; (+) strand; PAM type: NRG; PAM sequence: AAG
tgtcatcacaggcttgggtc

SEQ ID NO: 16301 - DNA, 20 bp, Artificial Sequence
  Description of Artificial Sequence: Synthetic oligonucleotide
  Target: COL7A1; (+) strand; PAM type: NRG; PAM sequence: AGG
gtcatcacaggcttgggtca

SEQ ID NO: 16302 - DNA, 20 bp, Artificial Sequence
  Description of Artificial Sequence: Synthetic oligonucleotide
  Target: COL7A1; (+) strand; PAM type: NRG; PAM sequence: GGG
tcatcacaggcttgggtcaa

SEQ ID NO: 16303 - DNA, 20 bp, Artificial Sequence
  Description of Artificial Sequence: Synthetic oligonucleotide
  Target: COL7A1; (+) strand; PAM type: NRG; PAM sequence: GGG
catcacaggcttgggtcaag

SEQ ID NO: 16304 - DNA, 20 bp, Artificial Sequence
  Description of Artificial Sequence: Synthetic oligonucleotide
  Target: COL7A1; (+) strand; PAM type: NRG; PAM sequence: CGG
cacaggcttgggtcaagggg

SEQ ID NO: 16305 - DNA, 20 bp, Artificial Sequence
  Description of Artificial Sequence: Synthetic oligonucleotide
  Target: COL7A1; (+) strand; PAM type: NRG; PAM sequence: GGG
acaggcttgggtcaaggggc

SEQ ID NO: 16306 - DNA, 20 bp, Artificial Sequence
  Description of Artificial Sequence: Synthetic oligonucleotide
  Target: COL7A1; (+) strand; PAM type: NRG; PAM sequence: CAG
gcttgggtcaaggggcgggt

SEQ ID NO: 16307 - DNA, 20 bp, Artificial Sequence
  Description of Artificial Sequence: Synthetic oligonucleotide
  Target: COL7A1; (+) strand; PAM type: NRG; PAM sequence: CAG
tcaaggggcgggtcagacgc

SEQ ID NO: 16308 - DNA, 20 bp, Artificial Sequence
  Description of Artificial Sequence: Synthetic oligonucleotide
  Target: COL7A1; (+) strand; PAM type: NRG; PAM sequence: CAG
tcacatccgctcactgccca

SEQ ID NO: 16309 - DNA, 20 bp, Artificial Sequence
  Description of Artificial Sequence: Synthetic oligonucleotide
  Target: COL7A1; (+) strand; PAM type: NRG; PAM sequence: CAG
tgcccacagccaccccccca

SEQ ID NO: 16310 - DNA, 20 bp, Artificial Sequence
  Description of Artificial Sequence: Synthetic oligonucleotide
  Target: COL7A1; (+) strand; PAM type: NRG; PAM sequence: GAG
cacagccacccccccacagt

SEQ ID NO: 16311 - DNA, 20 bp, Artificial Sequence
  Description of Artificial Sequence: Synthetic oligonucleotide
  Target: COL7A1; (+) strand; PAM type: NRG; PAM sequence: CAG
ccccacagtgagtcatctgc

SEQ ID NO: 16312 - DNA, 20 bp, Artificial Sequence
  Description of Artificial Sequence: Synthetic oligonucleotide
  Target: COL7A1; (+) strand; PAM type: NRG; PAM sequence: AGG
cccacagtgagtcatctgcc

SEQ ID NO: 16313 - DNA, 20 bp, Artificial Sequence
  Description of Artificial Sequence: Synthetic oligonucleotide
  Target: COL7A1; (+) strand; PAM type: NRG; PAM sequence: GGG
ccacagtgagtcatctgcca

SEQ ID NO: 16314 - DNA, 20 bp, Artificial Sequence
  Description of Artificial Sequence: Synthetic oligonucleotide
  Target: COL7A1; (+) strand; PAM type: NRG; PAM sequence: TGG
cagtgagtcatctgccaggg

SEQ ID NO: 16315 - DNA, 20 bp, Artificial Sequence
  Description of Artificial Sequence: Synthetic oligonucleotide
  Target: COL7A1; (+) strand; PAM type: NRG; PAM sequence: CAG
tgagtcatctgccagggtgg

SEQ ID NO: 16316 - DNA, 20 bp, Artificial Sequence
  Description of Artificial Sequence: Synthetic oligonucleotide
  Target: COL7A1; (+) strand; PAM type: NRG; PAM sequence: AGG
gagtcatctgccagggtggc

SEQ ID NO: 16317 - DNA, 20 bp, Artificial Sequence
  Description of Artificial Sequence: Synthetic oligonucleotide
  Target: COL7A1; (+) strand; PAM type: NRG; PAM sequence: GAG
gtcatctgccagggtggcag

SEQ ID NO: 16318 - DNA, 20 bp, Artificial Sequence
  Description of Artificial Sequence: Synthetic oligonucleotide
  Target: COL7A1; (+) strand; PAM type: NRG; PAM sequence: TGG
cagggtggcaggagccacaa

SEQ ID NO: 16319 - DNA, 20 bp, Artificial Sequence
  Description of Artificial Sequence: Synthetic oligonucleotide
  Target: COL7A1; (+) strand; PAM type: NRG; PAM sequence: GGG
agggtggcaggagccacaat

SEQ ID NO: 16320 - DNA, 20 bp, Artificial Sequence
  Description of Artificial Sequence: Synthetic oligonucleotide
  Target: COL7A1; (+) strand; PAM type: NRG; PAM sequence: GGG
gggtggcaggagccacaatg

SEQ ID NO: 16321 - DNA, 20 bp, Artificial Sequence
  Description of Artificial Sequence: Synthetic oligonucleotide
  Target: COL7A1; (+) strand; PAM type: NRG; PAM sequence: GGG
ggtggcaggagccacaatgg

SEQ ID NO: 16322 - DNA, 20 bp, Artificial Sequence
  Description of Artificial Sequence: Synthetic oligonucleotide
  Target: COL7A1; (+) strand; PAM type: NRG; PAM sequence: CAG
ccacaatgggggtttgtcca

SEQ ID NO: 16323 - DNA, 20 bp, Artificial Sequence
  Description of Artificial Sequence: Synthetic oligonucleotide
  Target: COL7A1; (+) strand; PAM type: NRG; PAM sequence: AGG
cacaatgggggtttgtccac

SEQ ID NO: 16324 - DNA, 20 bp, Artificial Sequence
  Description of Artificial Sequence: Synthetic oligonucleotide
  Target: COL7A1; (+) strand; PAM type: NRG; PAM sequence: GGG
acaatgggggtttgtccaca

SEQ ID NO: 16325 - DNA, 20 bp, Artificial Sequence
  Description of Artificial Sequence: Synthetic oligonucleotide
  Target: COL7A1; (+) strand; PAM type: NRG; PAM sequence: GGG
caatgggggtttgtccacag

SEQ ID NO: 16326 - DNA, 20 bp, Artificial Sequence
  Description of Artificial Sequence: Synthetic oligonucleotide
  Target: COL7A1; (+) strand; PAM type: NRG; PAM sequence: GGG
aatgggggtttgtccacagg

SEQ ID NO: 16327 - DNA, 20 bp, Artificial Sequence
  Description of Artificial Sequence: Synthetic oligonucleotide
  Target: COL7A1; (+) strand; PAM type: NRG; PAM sequence: GGG
atgggggtttgtccacaggg

SEQ ID NO: 16328 - DNA, 20 bp, Artificial Sequence
  Description of Artificial Sequence: Synthetic oligonucleotide
  Target: COL7A1; (+) strand; PAM type: NRG; PAM sequence: AAG
ggggtttgtccacagggggg

SEQ ID NO: 16329 - DNA, 20 bp, Artificial Sequence
  Description of Artificial Sequence: Synthetic oligonucleotide
  Target: COL7A1; (+) strand; PAM type: NRG; PAM sequence: AGG
gggtttgtccacagggggga

SEQ ID NO: 16330 - DNA, 20 bp, Artificial Sequence
  Description of Artificial Sequence: Synthetic oligonucleotide
  Target: COL7A1; (+) strand; PAM type: NRG; PAM sequence: TAG
ttgtccacaggggggaaggc

SEQ ID NO: 16331 - DNA, 20 bp, Artificial Sequence
  Description of Artificial Sequence: Synthetic oligonucleotide
  Target: COL7A1; (+) strand; PAM type: NRG; PAM sequence: CGG
aggggggaaggctagaccca

SEQ ID NO: 16332 - DNA, 20 bp, Artificial Sequence
  Description of Artificial Sequence: Synthetic oligonucleotide
  Target: COL7A1; (+) strand; PAM type: NRG; PAM sequence: GGG
ggggggaaggctagacccac

SEQ ID NO: 16333 - DNA, 20 bp, Artificial Sequence
  Description of Artificial Sequence: Synthetic oligonucleotide
  Target: COL7A1; (+) strand; PAM type: NRG; PAM sequence: AAG
aaggctagacccacgggacc

SEQ ID NO: 16334 - DNA, 20 bp, Artificial Sequence
  Description of Artificial Sequence: Synthetic oligonucleotide
  Target: COL7A1; (+) strand; PAM type: NRG; PAM sequence: CGG
ggaccaagtcactgaaataa

SEQ ID NO: 16335 - DNA, 20 bp, Artificial Sequence
  Description of Artificial Sequence: Synthetic oligonucleotide
  Target: COL7A1; (+) strand; PAM type: NRG; PAM sequence: AAG
acgcacgctcacgtgcacac

SEQ ID NO: 16336 - DNA, 20 bp, Artificial Sequence
  Description of Artificial Sequence: Synthetic oligonucleotide
  Target: COL7A1; (+) strand; PAM type: NRG; PAM sequence: TAG
ctcacgtgcacacaagcctc

SEQ ID NO: 16337 - DNA, 20 bp, Artificial Sequence
  Description of Artificial Sequence: Synthetic oligonucleotide
  Target: COL7A1; (+) strand; PAM type: NRG; PAM sequence: AAG
gcacacaagcctctagcacc

SEQ ID NO: 16338 - DNA, 20 bp, Artificial Sequence
  Description of Artificial Sequence: Synthetic oligonucleotide
  Target: COL7A1; (+) strand; PAM type: NRG; PAM sequence: AGG
cacacaagcctctagcacca

SEQ ID NO: 16339 - DNA, 20 bp, Artificial Sequence
  Description of Artificial Sequence: Synthetic oligonucleotide
  Target: COL7A1; (+) strand; PAM type: NRG; PAM sequence: GGG
acacaagcctctagcaccaa

SEQ ID NO: 16340 - DNA, 20 bp, Artificial Sequence
  Description of Artificial Sequence: Synthetic oligonucleotide
  Target: COL7A1; (+) strand; PAM type: NRG; PAM sequence: GGG
cacaagcctctagcaccaag

SEQ ID NO: 16341 - DNA, 20 bp, Artificial Sequence
  Description of Artificial Sequence: Synthetic oligonucleotide
  Target: COL7A1; (+) strand; PAM type: NRG; PAM sequence: GAG
caagcctctagcaccaaggg

SEQ ID NO: 16342 - DNA, 20 bp, Artificial Sequence
  Description of Artificial Sequence: Synthetic oligonucleotide
  Target: COL7A1; (+) strand; PAM type: NRG; PAM sequence: AGG
aagcctctagcaccaagggg

SEQ ID NO: 16343 - DNA, 20 bp, Artificial Sequence
  Description of Artificial Sequence: Synthetic oligonucleotide
  Target: COL7A1; (+) strand; PAM type: NRG; PAM sequence: GGG
agcctctagcaccaagggga

SEQ ID NO: 16344 - DNA, 20 bp, Artificial Sequence
  Description of Artificial Sequence: Synthetic oligonucleotide
  Target: COL7A1; (+) strand; PAM type: NRG; PAM sequence: CAG
tctagcaccaaggggaggga

SEQ ID NO: 16345 - DNA, 20 bp, Artificial Sequence
  Description of Artificial Sequence: Synthetic oligonucleotide
  Target: COL7A1; (+) strand; PAM type: NRG; PAM sequence: TGG
agcaccaaggggagggacag

SEQ ID NO: 16346 - DNA, 20 bp, Artificial Sequence
  Description of Artificial Sequence: Synthetic oligonucleotide
  Target: COL7A1; (+) strand; PAM type: NRG; PAM sequence: GGG
gcaccaaggggagggacagt

SEQ ID NO: 16347 - DNA, 20 bp, Artificial Sequence
  Description of Artificial Sequence: Synthetic oligonucleotide
  Target: COL7A1; (+) strand; PAM type: NRG; PAM sequence: GGG
caccaaggggagggacagtg

SEQ ID NO: 16348 - DNA, 20 bp, Artificial Sequence
  Description of Artificial Sequence: Synthetic oligonucleotide
  Target: COL7A1; (+) strand; PAM type: NRG; PAM sequence: GAG
agggacagtggggttctgct

SEQ ID NO: 16349 - DNA, 20 bp, Artificial Sequence
  Description of Artificial Sequence: Synthetic oligonucleotide
  Target: COL7A1; (+) strand; PAM type: NRG; PAM sequence: CAG
tgctgagaccccgactcctc

SEQ ID NO: 16350 - DNA, 20 bp, Artificial Sequence
  Description of Artificial Sequence: Synthetic oligonucleotide
  Target: COL7A1; (+) strand; PAM type: NRG; PAM sequence: AGG
gctgagaccccgactcctcc

SEQ ID NO: 16351 - DNA, 20 bp, Artificial Sequence
  Description of Artificial Sequence: Synthetic oligonucleotide
  Target: COL7A1; (+) strand; PAM type: NRG; PAM sequence: GGG
ctgagaccccgactcctcca

SEQ ID NO: 16352 - DNA, 20 bp, Artificial Sequence
  Description of Artificial Sequence: Synthetic oligonucleotide
  Target: COL7A1; (+) strand; PAM type: NRG; PAM sequence: GGG
tgagaccccgactcctccag

SEQ ID NO: 16353 - DNA, 20 bp, Artificial Sequence
  Description of Artificial Sequence: Synthetic oligonucleotide
  Target: COL7A1; (+) strand; PAM type: NRG; PAM sequence: CAG
ctccaggggatgctgaatct

SEQ ID NO: 16354 - DNA, 20 bp, Artificial Sequence
  Description of Artificial Sequence: Synthetic oligonucleotide
  Target: COL7A1; (+) strand; PAM type: NRG; PAM sequence: TGG
ctgaatctcagctcattatc

SEQ ID NO: 16355 - DNA, 20 bp, Artificial Sequence
  Description of Artificial Sequence: Synthetic oligonucleotide
  Target: COL7A1; (+) strand; PAM type: NRG; PAM sequence: GGG
tgaatctcagctcattatct

SEQ ID NO: 16356 - DNA, 20 bp, Artificial Sequence
  Description of Artificial Sequence: Synthetic oligonucleotide
  Target: COL7A1; (+) strand; PAM type: NRG; PAM sequence: CAG
tcagctcattatctgggcct

SEQ ID NO: 16357 - DNA, 20 bp, Artificial Sequence
  Description of Artificial Sequence: Synthetic oligonucleotide
  Target: COL7A1; (+) strand; PAM type: NRG; PAM sequence: TGG
cattatctgggcctcagtcc

SEQ ID NO: 16358 - DNA, 20 bp, Artificial Sequence
  Description of Artificial Sequence: Synthetic oligonucleotide
  Target: COL7A1; (+) strand; PAM type: NRG; PAM sequence: GGG
attatctgggcctcagtcct

SEQ ID NO: 16359 - DNA, 20 bp, Artificial Sequence
  Description of Artificial Sequence: Synthetic oligonucleotide
  Target: COL7A1; (+) strand; PAM type: NRG; PAM sequence: CAG
atctgggcctcagtcctggg

SEQ ID NO: 16360 - DNA, 20 bp, Artificial Sequence
  Description of Artificial Sequence: Synthetic oligonucleotide
  Target: COL7A1; (+) strand; PAM type: NRG; PAM sequence: TGG
cctcagtcctgggcagtacc

SEQ ID NO: 16361 - DNA, 20 bp, Artificial Sequence
  Description of Artificial Sequence: Synthetic oligonucleotide
  Target: COL7A1; (+) strand; PAM type: NRG; PAM sequence: GAG
agtcctgggcagtacctggt

SEQ ID NO: 16362 - DNA, 20 bp, Artificial Sequence
  Description of Artificial Sequence: Synthetic oligonucleotide
  Target: COL7A1; (+) strand; PAM type: NRG; PAM sequence: AGG
gtcctgggcagtacctggtg

SEQ ID NO: 16363 - DNA, 20 bp, Artificial Sequence
  Description of Artificial Sequence: Synthetic oligonucleotide
  Target: COL7A1; (+) strand; PAM type: NRG; PAM sequence: CAG
tgggcagtacctggtgagga

SEQ ID NO: 16364 - DNA, 20 bp, Artificial Sequence
  Description of Artificial Sequence: Synthetic oligonucleotide
  Target: COL7A1; (+) strand; PAM type: NRG; PAM sequence: AGG
gggcagtacctggtgaggac

SEQ ID NO: 16365 - DNA, 20 bp, Artificial Sequence
  Description of Artificial Sequence: Synthetic oligonucleotide
  Target: COL7A1; (+) strand; PAM type: NRG; PAM sequence: TGG
agtacctggtgaggacaggt

SEQ ID NO: 16366 - DNA, 20 bp, Artificial Sequence
  Description of Artificial Sequence: Synthetic oligonucleotide
  Target: COL7A1; (+) strand; PAM type: NRG; PAM sequence: CGG
tggtgaggacaggttggaaa

SEQ ID NO: 16367 - DNA, 20 bp, Artificial Sequence
  Description of Artificial Sequence: Synthetic oligonucleotide
  Target: COL7A1; (+) strand; PAM type: NRG; PAM sequence: CAG
gacaggttggaaacggtcgt

SEQ ID NO: 16368 - DNA, 20 bp, Artificial Sequence
  Description of Artificial Sequence: Synthetic oligonucleotide
  Target: COL7A1; (+) strand; PAM type: NRG; PAM sequence: CGG
gtcagccatctgaccttccc

SEQ ID NO: 16369 - DNA, 20 bp, Artificial Sequence
  Description of Artificial Sequence: Synthetic oligonucleotide
  Target: COL7A1; (+) strand; PAM type: NRG; PAM sequence: GAG
cagccatctgaccttccccg

SEQ ID NO: 16370 - DNA, 20 bp, Artificial Sequence
  Description of Artificial Sequence: Synthetic oligonucleotide
  Target: COL7A1; (+) strand; PAM type: NRG; PAM sequence: CAG
tgaccttccccggagacgct

SEQ ID NO: 16371 - DNA, 20 bp, Artificial Sequence
  Description of Artificial Sequence: Synthetic oligonucleotide
  Target: COL7A1; (+) strand; PAM type: NRG; PAM sequence: AGG
gaccttccccggagacgctc

SEQ ID NO: 16372 - DNA, 20 bp, Artificial Sequence
  Description of Artificial Sequence: Synthetic oligonucleotide
  Target: COL7A1; (+) strand; PAM type: NRG; PAM sequence: CAG
cttccccggagacgctcagg

SEQ ID NO: 16373 - DNA, 20 bp, Artificial Sequence
  Description of Artificial Sequence: Synthetic oligonucleotide
  Target: COL7A1; (+) strand; PAM type: NRG; PAM sequence: GAG
tccccggagacgctcaggca

SEQ ID NO: 16374 - DNA, 20 bp, Artificial Sequence
  Description of Artificial Sequence: Synthetic oligonucleotide
  Target: COL7A1; (+) strand; PAM type: NRG; PAM sequence: AGG
ccccggagacgctcaggcag

SEQ ID NO: 16375 - DNA, 20 bp, Artificial Sequence
  Description of Artificial Sequence: Synthetic oligonucleotide
  Target: COL7A1; (+) strand; PAM type: NRG; PAM sequence: AAG
gctcaggcagaggcaccgcc

SEQ ID NO: 16376 - DNA, 20 bp, Artificial Sequence
  Description of Artificial Sequence: Synthetic oligonucleotide
  Target: COL7A1; (+) strand; PAM type: NRG; PAM sequence: AGG
ctcaggcagaggcaccgcca

SEQ ID NO: 16377 - DNA, 20 bp, Artificial Sequence
  Description of Artificial Sequence: Synthetic oligonucleotide
  Target: COL7A1; (+) strand; PAM type: NRG; PAM sequence: GGG
tcaggcagaggcaccgccaa

SEQ ID NO: 16378 - DNA, 20 bp, Artificial Sequence
  Description of Artificial Sequence: Synthetic oligonucleotide
  Target: COL7A1; (+) strand; PAM type: NRG; PAM sequence: GGG
caggcagaggcaccgccaag

SEQ ID NO: 16379 - DNA, 20 bp, Artificial Sequence
  Description of Artificial Sequence: Synthetic oligonucleotide
  Target: COL7A1; (+) strand; PAM type: NRG; PAM sequence: GAG
ggcagaggcaccgccaaggg

SEQ ID NO: 16380 - DNA, 20 bp, Artificial Sequence
  Description of Artificial Sequence: Synthetic oligonucleotide
  Target: COL7A1; (+) strand; PAM type: NRG; PAM sequence: AGG
gcagaggcaccgccaagggg

SEQ ID NO: 16381 - DNA, 20 bp, Artificial Sequence
  Description of Artificial Sequence: Synthetic oligonucleotide
  Target: COL7A1; (+) strand; PAM type: NRG; PAM sequence: GGG
cagaggcaccgccaagggga

SEQ ID NO: 16382 - DNA, 20 bp, Artificial Sequence
  Description of Artificial Sequence: Synthetic oligonucleotide
  Target: COL7A1; (+) strand; PAM type: NRG; PAM sequence: GAG
gaggcaccgccaaggggagg

SEQ ID NO: 16383 - DNA, 20 bp, Artificial Sequence
  Description of Artificial Sequence: Synthetic oligonucleotide
  Target: COL7A1; (+) strand; PAM type: NRG; PAM sequence: CGG
gcaccgccaaggggagggag

SEQ ID NO: 16384 - DNA, 20 bp, Artificial Sequence
  Description of Artificial Sequence: Synthetic oligonucleotide
  Target: COL7A1; (+) strand; PAM type: NRG; PAM sequence: GAG
accgccaaggggagggagcg

SEQ ID NO: 16385 - DNA, 20 bp, Artificial Sequence
  Description of Artificial Sequence: Synthetic oligonucleotide
  Target: COL7A1; (+) strand; PAM type: NRG; PAM sequence: AGG
ccgccaaggggagggagcgg

SEQ ID NO: 16386 - DNA, 20 bp, Artificial Sequence
  Description of Artificial Sequence: Synthetic oligonucleotide
  Target: COL7A1; (+) strand; PAM type: NRG; PAM sequence: CAG
ggagggagcggaggctacaa

SEQ ID NO: 16387 - DNA, 20 bp, Artificial Sequence
  Description of Artificial Sequence: Synthetic oligonucleotide
  Target: COL7A1; (+) strand; PAM type: NRG; PAM sequence: AGG
gagggagcggaggctacaac

SEQ ID NO: 16388 - DNA, 20 bp, Artificial Sequence
  Description of Artificial Sequence: Synthetic oligonucleotide
  Target: COL7A1; (+) strand; PAM type: NRG; PAM sequence: AAG
ggagcggaggctacaacagg

SEQ ID NO: 16389 - DNA, 20 bp, Artificial Sequence
  Description of Artificial Sequence: Synthetic oligonucleotide
  Target: COL7A1; (+) strand; PAM type: NRG; PAM sequence: TGG
gcggaggctacaacaggaag

SEQ ID NO: 16390 - DNA, 20 bp, Artificial Sequence
  Description of Artificial Sequence: Synthetic oligonucleotide
  Target: COL7A1; (+) strand; PAM type: NRG; PAM sequence: GGG
cggaggctacaacaggaagt

SEQ ID NO: 16391 - DNA, 20 bp, Artificial Sequence
  Description of Artificial Sequence: Synthetic oligonucleotide
  Target: COL7A1; (+) strand; PAM type: NRG; PAM sequence: GGG
ggaggctacaacaggaagtg

SEQ ID NO: 16392 - DNA, 20 bp, Artificial Sequence
  Description of Artificial Sequence: Synthetic oligonucleotide
  Target: COL7A1; (+) strand; PAM type: NRG; PAM sequence: GGG
gaggctacaacaggaagtgg

SEQ ID NO: 16393 - DNA, 20 bp, Artificial Sequence
  Description of Artificial Sequence: Synthetic oligonucleotide
  Target: COL7A1; (+) strand; PAM type: NRG; PAM sequence: CAG
ggaagtgggggctctgacct

SEQ ID NO: 16394 - DNA, 20 bp, Artificial Sequence
  Description of Artificial Sequence: Synthetic oligonucleotide
  Target: COL7A1; (+) strand; PAM type: NRG; PAM sequence: GAG
aagtgggggctctgacctca

SEQ ID NO: 16395 - DNA, 20 bp, Artificial Sequence
  Description of Artificial Sequence: Synthetic oligonucleotide
  Target: COL7A1; (+) strand; PAM type: NRG; PAM sequence: AGG
agtgggggctctgacctcag

SEQ ID NO: 16396 - DNA, 20 bp, Artificial Sequence
  Description of Artificial Sequence: Synthetic oligonucleotide
  Target: COL7A1; (+) strand; PAM type: NRG; PAM sequence: GGG
gtgggggctctgacctcaga

SEQ ID NO: 16397 - DNA, 20 bp, Artificial Sequence
  Description of Artificial Sequence: Synthetic oligonucleotide
  Target: COL7A1; (+) strand; PAM type: NRG; PAM sequence: GGG
tgggggctctgacctcagag

SEQ ID NO: 16398 - DNA, 20 bp, Artificial Sequence
  Description of Artificial Sequence: Synthetic oligonucleotide
  Target: COL7A1; (+) strand; PAM type: NRG; PAM sequence: TAG
acctcagaggggtccatact

SEQ ID NO: 16399 - DNA, 20 bp, Artificial Sequence
  Description of Artificial Sequence: Synthetic oligonucleotide
  Target: COL7A1; (+) strand; PAM type: NRG; PAM sequence: AGG
cctcagaggggtccatactt

SEQ ID NO: 16400 - DNA, 20 bp, Artificial Sequence
  Description of Artificial Sequence: Synthetic oligonucleotide
  Target: COL7A1; (+) strand; PAM type: NRG; PAM sequence: AAG
ggtccatacttaggtcttta

SEQ ID NO: 16401 - DNA, 20 bp, Artificial Sequence
  Description of Artificial Sequence: Synthetic oligonucleotide
  Target: COL7A1; (+) strand; PAM type: NRG; PAM sequence: AGG
gtccatacttaggtctttaa

SEQ ID NO: 16402 - DNA, 20 bp, Artificial Sequence
  Description of Artificial Sequence: Synthetic oligonucleotide
  Target: COL7A1; (+) strand; PAM type: NRG; PAM sequence: GAG
ccatacttaggtctttaaag

SEQ ID NO: 16403 - DNA, 20 bp, Artificial Sequence
  Description of Artificial Sequence: Synthetic oligonucleotide
  Target: COL7A1; (+) strand; PAM type: NRG; PAM sequence: AGG
catacttaggtctttaaagg

SEQ ID NO: 16404 - DNA, 20 bp, Artificial Sequence
  Description of Artificial Sequence: Synthetic oligonucleotide
  Target: COL7A1; (+) strand; PAM type: NRG; PAM sequence: GGG
atacttaggtctttaaagga

SEQ ID NO: 16405 - DNA, 20 bp, Artificial Sequence
  Description of Artificial Sequence: Synthetic oligonucleotide
  Target: COL7A1; (+) strand; PAM type: NRG; PAM sequence: TGG
ggtctttaaaggagggaaca

SEQ ID NO: 16406 - DNA, 20 bp, Artificial Sequence
  Description of Artificial Sequence: Synthetic oligonucleotide
  Target: COL7A1; (+) strand; PAM type: NRG; PAM sequence: AAG
ctttaaaggagggaacatgg

SEQ ID NO: 16407 - DNA, 20 bp, Artificial Sequence
  Description of Artificial Sequence: Synthetic oligonucleotide
  Target: COL7A1; (+) strand; PAM type: NRG; PAM sequence: AGG
tttaaaggagggaacatgga

SEQ ID NO: 16408 - DNA, 20 bp, Artificial Sequence
  Description of Artificial Sequence: Synthetic oligonucleotide
  Target: COL7A1; (+) strand; PAM type: NRG; PAM sequence: GGG
ttaaaggagggaacatggaa

SEQ ID NO: 16409 - DNA, 20 bp, Artificial Sequence
  Description of Artificial Sequence: Synthetic oligonucleotide
  Target: COL7A1; (+) strand; PAM type: NRG; PAM sequence: GGG
taaaggagggaacatggaag

SEQ ID NO: 16410 - DNA, 20 bp, Artificial Sequence
  Description of Artificial Sequence: Synthetic oligonucleotide
  Target: COL7A1; (+) strand; PAM type: NRG; PAM sequence: TGG
aacatggaaggggaccctac

SEQ ID NO: 16411 - DNA, 20 bp, Artificial Sequence
  Description of Artificial Sequence: Synthetic oligonucleotide
  Target: COL7A1; (+) strand; PAM type: NRG; PAM sequence: GGG
acatggaaggggaccctact

SEQ ID NO: 16412 - DNA, 20 bp, Artificial Sequence
  Description of Artificial Sequence: Synthetic oligonucleotide
  Target: COL7A1; (+) strand; PAM type: NRG; PAM sequence: GGG
catggaaggggaccctactg

SEQ ID NO: 16413 - DNA, 20 bp, Artificial Sequence
  Description of Artificial Sequence: Synthetic oligonucleotide
  Target: COL7A1; (+) strand; PAM type: NRG; PAM sequence: GGG
atggaaggggaccctactgg

SEQ ID NO: 16414 - DNA, 20 bp, Artificial Sequence
  Description of Artificial Sequence: Synthetic oligonucleotide
  Target: COL7A1; (+) strand; PAM type: NRG; PAM sequence: CGG
ggaccctactgggggctcca

SEQ ID NO: 16415 - DNA, 20 bp, Artificial Sequence
  Description of Artificial Sequence: Synthetic oligonucleotide
  Target: COL7A1; (+) strand; PAM type: NRG; PAM sequence: TGG
cctactgggggctccacggc

SEQ ID NO: 16416 - DNA, 20 bp, Artificial Sequence
  Description of Artificial Sequence: Synthetic oligonucleotide
  Target: COL7A1; (+) strand; PAM type: NRG; PAM sequence: GGG
ctactgggggctccacggct

SEQ ID NO: 16417 - DNA, 20 bp, Artificial Sequence
  Description of Artificial Sequence: Synthetic oligonucleotide
  Target: COL7A1; (+) strand; PAM type: NRG; PAM sequence: GGG
tactgggggctccacggctg

SEQ ID NO: 16418 - DNA, 20 bp, Artificial Sequence
  Description of Artificial Sequence: Synthetic oligonucleotide
  Target: COL7A1; (+) strand; PAM type: NRG; PAM sequence: CAG
cacggctggggctctatatt

SEQ ID NO: 16419 - DNA, 20 bp, Artificial Sequence
  Description of Artificial Sequence: Synthetic oligonucleotide
  Target: COL7A1; (+) strand; PAM type: NRG; PAM sequence: TGG
gggctctatattcagctctt

SEQ ID NO: 16420 - DNA, 20 bp, Artificial Sequence
  Description of Artificial Sequence: Synthetic oligonucleotide
  Target: COL7A1; (+) strand; PAM type: NRG; PAM sequence: TGG
ctatattcagctctttggtc

SEQ ID NO: 16421 - DNA, 20 bp, Artificial Sequence
  Description of Artificial Sequence: Synthetic oligonucleotide
  Target: COL7A1; (+) strand; PAM type: NRG; PAM sequence: GGG
tatattcagctctttggtct

SEQ ID NO: 16422 - DNA, 20 bp, Artificial Sequence
  Description of Artificial Sequence: Synthetic oligonucleotide
  Target: COL7A1; (+) strand; PAM type: NRG; PAM sequence: CAG
tttggtctgggcgtctgccc

SEQ ID NO: 16423 - DNA, 20 bp, Artificial Sequence
  Description of Artificial Sequence: Synthetic oligonucleotide
  Target: COL7A1; (+) strand; PAM type: NRG; PAM sequence: AGG
ttggtctgggcgtctgcccc

SEQ ID NO: 16424 - DNA, 20 bp, Artificial Sequence
  Description of Artificial Sequence: Synthetic oligonucleotide
  Target: COL7A1; (+) strand; PAM type: NRG; PAM sequence: GAG
tgccccaggtcccctactgc

SEQ ID NO: 16425 - DNA, 20 bp, Artificial Sequence
  Description of Artificial Sequence: Synthetic oligonucleotide
  Target: COL7A1; (+) strand; PAM type: NRG; PAM sequence: AGG
gccccaggtcccctactgcg

SEQ ID NO: 16426 - DNA, 20 bp, Artificial Sequence
  Description of Artificial Sequence: Synthetic oligonucleotide
  Target: COL7A1; (+) strand; PAM type: NRG; PAM sequence: GGG
ccccaggtcccctactgcga

SEQ ID NO: 16427 - DNA, 20 bp, Artificial Sequence
  Description of Artificial Sequence: Synthetic oligonucleotide
  Target: COL7A1; (+) strand; PAM type: NRG; PAM sequence: GAG
ccaggtcccctactgcgagg

SEQ ID NO: 16428 - DNA, 20 bp, Artificial Sequence
  Description of Artificial Sequence: Synthetic oligonucleotide
  Target: COL7A1; (+) strand; PAM type: NRG; PAM sequence: CAG
ctgcgagggagcgtctcctc

SEQ ID NO: 16429 - DNA, 20 bp, Artificial Sequence
  Description of Artificial Sequence: Synthetic oligonucleotide
  Target: COL7A1; (+) strand; PAM type: NRG; PAM sequence: AGG
tgcgagggagcgtctcctcc

SEQ ID NO: 16430 - DNA, 20 bp, Artificial Sequence
  Description of Artificial Sequence: Synthetic oligonucleotide
  Target: COL7A1; (+) strand; PAM type: NRG; PAM sequence: TGG
tctcctccaggaccctgacc

SEQ ID NO: 16431 - DNA, 20 bp, Artificial Sequence
  Description of Artificial Sequence: Synthetic oligonucleotide
  Target: COL7A1; (+) strand; PAM type: NRG; PAM sequence: TGG
aggaccctgacctggaaccc

SEQ ID NO: 16432 - DNA, 20 bp, Artificial Sequence
  Description of Artificial Sequence: Synthetic oligonucleotide
  Target: COL7A1; (+) strand; PAM type: NRG; PAM sequence: AAG
ctgacctggaaccctggccc

SEQ ID NO: 16433 - DNA, 20 bp, Artificial Sequence
  Description of Artificial Sequence: Synthetic oligonucleotide
  Target: COL7A1; (+) strand; PAM type: NRG; PAM sequence: AGG
tgacctggaaccctggccca

SEQ ID NO: 16434 - DNA, 20 bp, Artificial Sequence
  Description of Artificial Sequence: Synthetic oligonucleotide
  Target: COL7A1; (+) strand; PAM type: NRG; PAM sequence: CAG
tggcccaaggactcctcccc

SEQ ID NO: 16435 - DNA, 20 bp, Artificial Sequence
  Description of Artificial Sequence: Synthetic oligonucleotide
  Target: COL7A1; (+) strand; PAM type: NRG; PAM sequence: CAG
tcctcccccagaacccgatc

SEQ ID NO: 16436 - DNA, 20 bp, Artificial Sequence
  Description of Artificial Sequence: Synthetic oligonucleotide
  Target: COL7A1; (+) strand; PAM type: NRG; PAM sequence: AGG
cctcccccagaacccgatcc

SEQ ID NO: 16437 - DNA, 20 bp, Artificial Sequence
  Description of Artificial Sequence: Synthetic oligonucleotide
  Target: COL7A1; (+) strand; PAM type: NRG; PAM sequence: CAG
cccccagaacccgatccagg

SEQ ID NO: 16438 - DNA, 20 bp, Artificial Sequence
  Description of Artificial Sequence: Synthetic oligonucleotide
  Target: COL7A1; (+) strand; PAM type: NRG; PAM sequence: AGG
ccccagaacccgatccaggc

SEQ ID NO: 16439 - DNA, 20 bp, Artificial Sequence
  Description of Artificial Sequence: Synthetic oligonucleotide
  Target: COL7A1; (+) strand; PAM type: NRG; PAM sequence: CAG
gaacccgatccaggcaggct

SEQ ID NO: 16440 - DNA, 20 bp, Artificial Sequence
  Description of Artificial Sequence: Synthetic oligonucleotide
  Target: COL7A1; (+) strand; PAM type: NRG; PAM sequence: CAG
atccaggcaggctcagtgcc

SEQ ID NO: 16441 - DNA, 20 bp, Artificial Sequence
  Description of Artificial Sequence: Synthetic oligonucleotide
  Target: COL7A1; (+) strand; PAM type: NRG; PAM sequence: CGG
gctcagtgcccagttcccca

SEQ ID NO: 16442 - DNA, 20 bp, Artificial Sequence
  Description of Artificial Sequence: Synthetic oligonucleotide
  Target: COL7A1; (+) strand; PAM type: NRG; PAM sequence: TGG
cagtgcccagttccccacgg

SEQ ID NO: 16443 - DNA, 20 bp, Artificial Sequence
  Description of Artificial Sequence: Synthetic oligonucleotide
  Target: COL7A1; (+) strand; PAM type: NRG; PAM sequence: GGG
agtgcccagttccccacggt

SEQ ID NO: 16444 - DNA, 20 bp, Artificial Sequence
  Description of Artificial Sequence: Synthetic oligonucleotide
  Target: COL7A1; (+) strand; PAM type: NRG; PAM sequence: GGG
gtgcccagttccccacggtg

SEQ ID NO: 16445 - DNA, 20 bp, Artificial Sequence
  Description of Artificial Sequence: Synthetic oligonucleotide
  Target: COL7A1; (+) strand; PAM type: NRG; PAM sequence: GGG
tgcccagttccccacggtgg

SEQ ID NO: 16446 - DNA, 20 bp, Artificial Sequence
  Description of Artificial Sequence: Synthetic oligonucleotide
  Target: COL7A1; (+) strand; PAM type: NRG; PAM sequence: CAG
agttccccacggtgggggct

SEQ ID NO: 16447 - DNA, 20 bp, Artificial Sequence
  Description of Artificial Sequence: Synthetic oligonucleotide
  Target: COL7A1; (+) strand; PAM type: NRG; PAM sequence: TGG
ctcagcccatacctgtcccc

SEQ ID NO: 16448 - DNA, 20 bp, Artificial Sequence
  Description of Artificial Sequence: Synthetic oligonucleotide
  Target: COL7A1; (+) strand; PAM type: NRG; PAM sequence: TGG
ccatacctgtcccctggctc

SEQ ID NO: 16449 - DNA, 20 bp, Artificial Sequence
  Description of Artificial Sequence: Synthetic oligonucleotide
  Target: COL7A1; (+) strand; PAM type: NRG; PAM sequence: CGG
tcccctggctctggaccacc

SEQ ID NO: 16450 - DNA, 20 bp, Artificial Sequence
  Description of Artificial Sequence: Synthetic oligonucleotide
  Target: COL7A1; (+) strand; PAM type: NRG; PAM sequence: GGG
cccctggctctggaccaccc

SEQ ID NO: 16451 - DNA, 20 bp, Artificial Sequence
  Description of Artificial Sequence: Synthetic oligonucleotide
  Target: COL7A1; (+) strand; PAM type: NRG; PAM sequence: GGG
ccctggctctggaccacccg

SEQ ID NO: 16452 - DNA, 20 bp, Artificial Sequence
  Description of Artificial Sequence: Synthetic oligonucleotide
  Target: COL7A1; (+) strand; PAM type: NRG; PAM sequence: TGG
tggctctggaccacccgggg

SEQ ID NO: 16453 - DNA, 20 bp, Artificial Sequence
  Description of Artificial Sequence: Synthetic oligonucleotide
  Target: COL7A1; (+) strand; PAM type: NRG; PAM sequence: GGG
ggctctggaccacccggggt

SEQ ID NO: 16454 - DNA, 20 bp, Artificial Sequence
  Description of Artificial Sequence: Synthetic oligonucleotide
  Target: COL7A1; (+) strand; PAM type: NRG; PAM sequence: CAG
tctggaccacccggggtggg

SEQ ID NO: 16455 - DNA, 20 bp, Artificial Sequence
  Description of Artificial Sequence: Synthetic oligonucleotide
  Target: COL7A1; (+) strand; PAM type: NRG; PAM sequence: CGG
ggaccacccggggtgggcag

SEQ ID NO: 16456 - DNA, 20 bp, Artificial Sequence
  Description of Artificial Sequence: Synthetic oligonucleotide
  Target: COL7A1; (+) strand; PAM type: NRG; PAM sequence: CAG
ggggtgggcagcggcgctcg

SEQ ID NO: 16457 - DNA, 20 bp, Artificial Sequence
  Description of Artificial Sequence: Synthetic oligonucleotide
  Target: COL7A1; (+) strand; PAM type: NRG; PAM sequence: AGG
gggtgggcagcggcgctcgc

SEQ ID NO: 16458 - DNA, 20 bp, Artificial Sequence
  Description of Artificial Sequence: Synthetic oligonucleotide
  Target: COL7A1; (+) strand; PAM type: NRG; PAM sequence: CGG
agcggcgctcgcaggcctca

SEQ ID NO: 16459 - DNA, 20 bp, Artificial Sequence
  Description of Artificial Sequence: Synthetic oligonucleotide
  Target: COL7A1; (+) strand; PAM type: NRG; PAM sequence: GGG
gcggcgctcgcaggcctcac

SEQ ID NO: 16460 - DNA, 20 bp, Artificial Sequence
  Description of Artificial Sequence: Synthetic oligonucleotide
  Target: COL7A1; (+) strand; PAM type: NRG; PAM sequence: CGG
aggcctcacgggtcccaaaa

SEQ ID NO: 16461 - DNA, 20 bp, Artificial Sequence
  Description of Artificial Sequence: Synthetic oligonucleotide
  Target: COL7A1; (+) strand; PAM type: NRG; PAM sequence: TGG
ctcacgggtcccaaaacggt

SEQ ID NO: 16462 - DNA, 20 bp, Artificial Sequence
  Description of Artificial Sequence: Synthetic oligonucleotide
  Target: COL7A1; (+) strand; PAM type: NRG; PAM sequence: CAG
aacggttggcattccctcca

SEQ ID NO: 16463 - DNA, 20 bp, Artificial Sequence
  Description of Artificial Sequence: Synthetic oligonucleotide
  Target: COL7A1; (+) strand; PAM type: NRG; PAM sequence: TAG
cattccctccacagccacca

SEQ ID NO: 16464 - DNA, 20 bp, Artificial Sequence
  Description of Artificial Sequence: Synthetic oligonucleotide
  Target: COL7A1; (+) strand; PAM type: NRG; PAM sequence: AAG
tccacagccaccatagacaa

SEQ ID NO: 16465 - DNA, 20 bp, Artificial Sequence
  Description of Artificial Sequence: Synthetic oligonucleotide
  Target: COL7A1; (+) strand; PAM type: NRG; PAM sequence: AGG
ccacagccaccatagacaaa

SEQ ID NO: 16466 - DNA, 20 bp, Artificial Sequence
  Description of Artificial Sequence: Synthetic oligonucleotide
  Target: COL7A1; (+) strand; PAM type: NRG; PAM sequence: GGG
cacagccaccatagacaaaa

SEQ ID NO: 16467 - DNA, 20 bp, Artificial Sequence
  Description of Artificial Sequence: Synthetic oligonucleotide
  Target: COL7A1; (+) strand; PAM type: NRG; PAM sequence: CAG
caccatagacaaaagggtga

SEQ ID NO: 16468 - DNA, 20 bp, Artificial Sequence
  Description of Artificial Sequence: Synthetic oligonucleotide
  Target: COL7A1; (+) strand; PAM type: NRG; PAM sequence: AGG
accatagacaaaagggtgac

SEQ ID NO: 16469 - DNA, 20 bp, Artificial Sequence
  Description of Artificial Sequence: Synthetic oligonucleotide
  Target: COL7A1; (+) strand; PAM type: NRG; PAM sequence: CAG
ggcctctgtgctgcctgtca

SEQ ID NO: 16470 - DNA, 20 bp, Artificial Sequence
  Description of Artificial Sequence: Synthetic oligonucleotide
  Target: COL7A1; (+) strand; PAM type: NRG; PAM sequence: TGG
tgctgcctgtcacagcccga

SEQ ID NO: 16471 - DNA, 20 bp, Artificial Sequence
  Description of Artificial Sequence: Synthetic oligonucleotide
  Target: COL7A1; (+) strand; PAM type: NRG; PAM sequence: CAG
ctgtcacagcccgatggtac

SEQ ID NO: 16472 - DNA, 20 bp, Artificial Sequence
  Description of Artificial Sequence: Synthetic oligonucleotide
  Target: COL7A1; (+) strand; PAM type: NRG; PAM sequence: CAG
acagcccgatggtaccagcg

SEQ ID NO: 16473 - DNA, 20 bp, Artificial Sequence
  Description of Artificial Sequence: Synthetic oligonucleotide
  Target: COL7A1; (+) strand; PAM type: NRG; PAM sequence: AGG
cagcccgatggtaccagcgc

SEQ ID NO: 16474 - DNA, 20 bp, Artificial Sequence
  Description of Artificial Sequence: Synthetic oligonucleotide
  Target: COL7A1; (+) strand; PAM type: NRG; PAM sequence: GGG
agcccgatggtaccagcgca

SEQ ID NO: 16475 - DNA, 20 bp, Artificial Sequence
  Description of Artificial Sequence: Synthetic oligonucleotide
  Target: COL7A1; (+) strand; PAM type: NRG; PAM sequence: TAG
gatggtaccagcgcagggtg

SEQ ID NO: 16476 - DNA, 20 bp, Artificial Sequence
  Description of Artificial Sequence: Synthetic oligonucleotide
  Target: COL7A1; (+) strand; PAM type: NRG; PAM sequence: AGG
atggtaccagcgcagggtgt

SEQ ID NO: 16477 - DNA, 20 bp, Artificial Sequence
  Description of Artificial Sequence: Synthetic oligonucleotide
  Target: COL7A1; (+) strand; PAM type: NRG; PAM sequence: CAG
gtaccagcgcagggtgtagg

SEQ ID NO: 16478 - DNA, 20 bp, Artificial Sequence
  Description of Artificial Sequence: Synthetic oligonucleotide
  Target: COL7A1; (+) strand; PAM type: NRG; PAM sequence: CAG
agcgcagggtgtaggcagtg

SEQ ID NO: 16479 - DNA, 20 bp, Artificial Sequence
  Description of Artificial Sequence: Synthetic oligonucleotide
  Target: COL7A1; (+) strand; PAM type: NRG; PAM sequence: AGG
gcgcagggtgtaggcagtgc

SEQ ID NO: 16480 - DNA, 20 bp, Artificial Sequence
  Description of Artificial Sequence: Synthetic oligonucleotide
  Target: COL7A1; (+) strand; PAM type: NRG; PAM sequence: GAG
gcagggtgtaggcagtgcag

SEQ ID NO: 16481 - DNA, 20 bp, Artificial Sequence
  Description of Artificial Sequence: Synthetic oligonucleotide
  Target: COL7A1; (+) strand; PAM type: NRG; PAM sequence: CAG
gcagtgcaggagccctcatc

SEQ ID NO: 16482 - DNA, 20 bp, Artificial Sequence
  Description of Artificial Sequence: Synthetic oligonucleotide
  Target: COL7A1; (+) strand; PAM type: NRG; PAM sequence: TGG
gtgcaggagccctcatccag

SEQ ID NO: 16483 - DNA, 20 bp, Artificial Sequence
  Description of Artificial Sequence: Synthetic oligonucleotide
  Target: COL7A1; (+) strand; PAM type: NRG; PAM sequence: CAG
caggagccctcatccagtgg

SEQ ID NO: 16484 - DNA, 20 bp, Artificial Sequence
  Description of Artificial Sequence: Synthetic oligonucleotide
  Target: COL7A1; (+) strand; PAM type: NRG; PAM sequence: AGG
aggagccctcatccagtggc

SEQ ID NO: 16485 - DNA, 20 bp, Artificial Sequence
  Description of Artificial Sequence: Synthetic oligonucleotide
  Target: COL7A1; (+) strand; PAM type: NRG; PAM sequence: GGG
ggagccctcatccagtggca

SEQ ID NO: 16486 - DNA, 20 bp, Artificial Sequence
  Description of Artificial Sequence: Synthetic oligonucleotide
  Target: COL7A1; (+) strand; PAM type: NRG; PAM sequence: CAG
cctcatccagtggcagggaa

SEQ ID NO: 16487 - DNA, 20 bp, Artificial Sequence
  Description of Artificial Sequence: Synthetic oligonucleotide
  Target: COL7A1; (+) strand; PAM type: NRG; PAM sequence: AGG
ctcatccagtggcagggaac

SEQ ID NO: 16488 - DNA, 20 bp, Artificial Sequence
  Description of Artificial Sequence: Synthetic oligonucleotide
  Target: COL7A1; (+) strand; PAM type: NRG; PAM sequence: GGG
tcatccagtggcagggaaca

SEQ ID NO: 16489 - DNA, 20 bp, Artificial Sequence
  Description of Artificial Sequence: Synthetic oligonucleotide
  Target: COL7A1; (+) strand; PAM type: NRG; PAM sequence: GGG
catccagtggcagggaacag

SEQ ID NO: 16490 - DNA, 20 bp, Artificial Sequence
  Description of Artificial Sequence: Synthetic oligonucleotide
  Target: COL7A1; (+) strand; PAM type: NRG; PAM sequence: TGG
agtggcagggaacaggggtc

SEQ ID NO: 16491 - DNA, 20 bp, Artificial Sequence
  Description of Artificial Sequence: Synthetic oligonucleotide
  Target: COL7A1; (+) strand; PAM type: NRG; PAM sequence: GGG
gtggcagggaacaggggtct

SEQ ID NO: 16492 - DNA, 20 bp, Artificial Sequence
  Description of Artificial Sequence: Synthetic oligonucleotide
  Target: COL7A1; (+) strand; PAM type: NRG; PAM sequence: TGG
ggaacaggggtctgggccaa

SEQ ID NO: 16493 - DNA, 20 bp, Artificial Sequence
  Description of Artificial Sequence: Synthetic oligonucleotide
  Target: COL7A1; (+) strand; PAM type: NRG; PAM sequence: GGG
gaacaggggtctgggccaat

SEQ ID NO: 16494 - DNA, 20 bp, Artificial Sequence
  Description of Artificial Sequence: Synthetic oligonucleotide
  Target: COL7A1; (+) strand; PAM type: NRG; PAM sequence: GGG
aacaggggtctgggccaatg

SEQ ID NO: 16495 - DNA, 20 bp, Artificial Sequence
  Description of Artificial Sequence: Synthetic oligonucleotide
  Target: COL7A1; (+) strand; PAM type: NRG; PAM sequence: AAG
gggtctgggccaatggggtc

SEQ ID NO: 16496 - DNA, 20 bp, Artificial Sequence
  Description of Artificial Sequence: Synthetic oligonucleotide
  Target: COL7A1; (+) strand; PAM type: NRG; PAM sequence: CAG
ctgggccaatggggtcaagt

SEQ ID NO: 16497 - DNA, 20 bp, Artificial Sequence
  Description of Artificial Sequence: Synthetic oligonucleotide
  Target: COL7A1; (+) strand; PAM type: NRG; PAM sequence: CAG
ggccaatggggtcaagtcag

SEQ ID NO: 16498 - DNA, 20 bp, Artificial Sequence
  Description of Artificial Sequence: Synthetic oligonucleotide
  Target: COL7A1; (+) strand; PAM type: NRG; PAM sequence: AGG
gccaatggggtcaagtcagc

SEQ ID NO: 16499 - DNA, 20 bp, Artificial Sequence
  Description of Artificial Sequence: Synthetic oligonucleotide
  Target: COL7A1; (+) strand; PAM type: NRG; PAM sequence: GGG
ccaatggggtcaagtcagca

SEQ ID NO: 16500 - DNA, 20 bp, Artificial Sequence
  Description of Artificial Sequence: Synthetic oligonucleotide
  Target: COL7A1; (+) strand; PAM type: NRG; PAM sequence: TGG
ggtcaagtcagcagggtttg

SEQ ID NO: 16501 - DNA, 20 bp, Artificial Sequence
  Description of Artificial Sequence: Synthetic oligonucleotide
  Target: COL7A1; (+) strand; PAM type: NRG; PAM sequence: GGG
gtcaagtcagcagggtttgt

SEQ ID NO: 16502 - DNA, 20 bp, Artificial Sequence
  Description of Artificial Sequence: Synthetic oligonucleotide
  Target: COL7A1; (+) strand; PAM type: NRG; PAM sequence: CAG
tcagcagggtttgtgggaat

SEQ ID NO: 16503 - DNA, 20 bp, Artificial Sequence
  Description of Artificial Sequence: Synthetic oligonucleotide
  Target: COL7A1; (+) strand; PAM type: NRG; PAM sequence: GAG
agcagggtttgtgggaatca

SEQ ID NO: 16504 - DNA, 20 bp, Artificial Sequence
  Description of Artificial Sequence: Synthetic oligonucleotide
  Target: COL7A1; (+) strand; PAM type: NRG; PAM sequence: GAG
cagggtttgtgggaatcaga

SEQ ID NO: 16505 - DNA, 20 bp, Artificial Sequence
  Description of Artificial Sequence: Synthetic oligonucleotide
  Target: COL7A1; (+) strand; PAM type: NRG; PAM sequence: AGG
agggtttgtgggaatcagag

SEQ ID NO: 16506 - DNA, 20 bp, Artificial Sequence
  Description of Artificial Sequence: Synthetic oligonucleotide
  Target: COL7A1; (+) strand; PAM type: NRG; PAM sequence: GGG
gggtttgtgggaatcagaga

SEQ ID NO: 16507 - DNA, 20 bp, Artificial Sequence
  Description of Artificial Sequence: Synthetic oligonucleotide
  Target: COL7A1; (+) strand; PAM type: NRG; PAM sequence: AAG
tgggaatcagagagggttga

SEQ ID NO: 16508 - DNA, 20 bp, Artificial Sequence
  Description of Artificial Sequence: Synthetic oligonucleotide
  Target: COL7A1; (+) strand; PAM type: NRG; PAM sequence: AGG
gggaatcagagagggttgaa

SEQ ID NO: 16509 - DNA, 20 bp, Artificial Sequence
  Description of Artificial Sequence: Synthetic oligonucleotide
  Target: COL7A1; (+) strand; PAM type: NRG; PAM sequence: CAG
atcagagagggttgaaaggt

SEQ ID NO: 16510 - DNA, 20 bp, Artificial Sequence
  Description of Artificial Sequence: Synthetic oligonucleotide
  Target: COL7A1; (+) strand; PAM type: NRG; PAM sequence: AGG
tcagagagggttgaaaggtc

SEQ ID NO: 16511 - DNA, 20 bp, Artificial Sequence
  Description of Artificial Sequence: Synthetic oligonucleotide
  Target: COL7A1; (+) strand; PAM type: NRG; PAM sequence: GGG
cagagagggttgaaaggtca

SEQ ID NO: 16512 - DNA, 20 bp, Artificial Sequence
  Description of Artificial Sequence: Synthetic oligonucleotide
  Target: COL7A1; (+) strand; PAM type: NRG; PAM sequence: GGG
agagagggttgaaaggtcag

SEQ ID NO: 16513 - DNA, 20 bp, Artificial Sequence
  Description of Artificial Sequence: Synthetic oligonucleotide
  Target: COL7A1; (+) strand; PAM type: NRG; PAM sequence: GGG
gagagggttgaaaggtcagg

SEQ ID NO: 16514 - DNA, 20 bp, Artificial Sequence
  Description of Artificial Sequence: Synthetic oligonucleotide
  Target: COL7A1; (+) strand; PAM type: NRG; PAM sequence: GAG
gagggttgaaaggtcagggg

SEQ ID NO: 16515 - DNA, 20 bp, Artificial Sequence
  Description of Artificial Sequence: Synthetic oligonucleotide
  Target: COL7A1; (+) strand; PAM type: NRG; PAM sequence: AGG
agggttgaaaggtcaggggg

SEQ ID NO: 16516 - DNA, 20 bp, Artificial Sequence
  Description of Artificial Sequence: Synthetic oligonucleotide
  Target: COL7A1; (+) strand; PAM type: NRG; PAM sequence: CAG
ttgaaaggtcagggggaggt

SEQ ID NO: 16517 - DNA, 20 bp, Artificial Sequence
  Description of Artificial Sequence: Synthetic oligonucleotide
  Target: COL7A1; (+) strand; PAM type: NRG; PAM sequence: CAG
aaaggtcagggggaggtcag

SEQ ID NO: 16518 - DNA, 20 bp, Artificial Sequence
  Description of Artificial Sequence: Synthetic oligonucleotide
  Target: COL7A1; (+) strand; PAM type: NRG; PAM sequence: AGG
aaggtcagggggaggtcagc

SEQ ID NO: 16519 - DNA, 20 bp, Artificial Sequence
  Description of Artificial Sequence: Synthetic oligonucleotide
  Target: COL7A1; (+) strand; PAM type: NRG; PAM sequence: GGG
aggtcagggggaggtcagca

SEQ ID NO: 16520 - DNA, 20 bp, Artificial Sequence
  Description of Artificial Sequence: Synthetic oligonucleotide
  Target: COL7A1; (+) strand; PAM type: NRG; PAM sequence: CAG
agggggaggtcagcagggct

SEQ ID NO: 16521 - DNA, 20 bp, Artificial Sequence
  Description of Artificial Sequence: Synthetic oligonucleotide
  Target: COL7A1; (+) strand; PAM type: NRG; PAM sequence: CAG
cagccctgcctgcccctccc

SEQ ID NO: 16522 - DNA, 20 bp, Artificial Sequence
  Description of Artificial Sequence: Synthetic oligonucleotide
  Target: COL7A1; (+) strand; PAM type: NRG; PAM sequence: TGG
tgcccctccccagaccccgc

SEQ ID NO: 16523 - DNA, 20 bp, Artificial Sequence
  Description of Artificial Sequence: Synthetic oligonucleotide
  Target: COL7A1; (+) strand; PAM type: NRG; PAM sequence: CAG
ccctccccagaccccgctgg

SEQ ID NO: 16524 - DNA, 20 bp, Artificial Sequence
  Description of Artificial Sequence: Synthetic oligonucleotide
  Target: COL7A1; (+) strand; PAM type: NRG; PAM sequence: AAG
attctcaccatcactatccc

SEQ ID NO: 16525 - DNA, 20 bp, Artificial Sequence
  Description of Artificial Sequence: Synthetic oligonucleotide
  Target: COL7A1; (+) strand; PAM type: NRG; PAM sequence: AGG
ttctcaccatcactatccca

SEQ ID NO: 16526 - DNA, 20 bp, Artificial Sequence
  Description of Artificial Sequence: Synthetic oligonucleotide
  Target: COL7A1; (+) strand; PAM type: NRG; PAM sequence: GAG
ctcaccatcactatcccaag

SEQ ID NO: 16527 - DNA, 20 bp, Artificial Sequence
  Description of Artificial Sequence: Synthetic oligonucleotide
  Target: COL7A1; (+) strand; PAM type: NRG; PAM sequence: CAG
atcactatcccaaggagctt

SEQ ID NO: 16528 - DNA, 20 bp, Artificial Sequence
  Description of Artificial Sequence: Synthetic oligonucleotide
  Target: COL7A1; (+) strand; PAM type: NRG; PAM sequence: AGG
tcactatcccaaggagcttc

SEQ ID NO: 16529 - DNA, 20 bp, Artificial Sequence
  Description of Artificial Sequence: Synthetic oligonucleotide
  Target: COL7A1; (+) strand; PAM type: NRG; PAM sequence: GGG
cactatcccaaggagcttca

SEQ ID NO: 16530 - DNA, 20 bp, Artificial Sequence
  Description of Artificial Sequence: Synthetic oligonucleotide
  Target: COL7A1; (+) strand; PAM type: NRG; PAM sequence: TGG
cccaaggagcttcagggtcc

SEQ ID NO: 16531 - DNA, 20 bp, Artificial Sequence
  Description of Artificial Sequence: Synthetic oligonucleotide
  Target: COL7A1; (+) strand; PAM type: NRG; PAM sequence: CAG
agggtcctggtactcctcca

SEQ ID NO: 16532 - DNA, 20 bp, Artificial Sequence
  Description of Artificial Sequence: Synthetic oligonucleotide
  Target: COL7A1; (+) strand; PAM type: NRG; PAM sequence: CGG
gtactcctccacagaatact

SEQ ID NO: 16533 - DNA, 20 bp, Artificial Sequence
  Description of Artificial Sequence: Synthetic oligonucleotide
  Target: COL7A1; (+) strand; PAM type: NRG; PAM sequence: GAG
actcctccacagaatactcg

SEQ ID NO: 16534 - DNA, 20 bp, Artificial Sequence
  Description of Artificial Sequence: Synthetic oligonucleotide
  Target: COL7A1; (+) strand; PAM type: NRG; PAM sequence: CAG
cacagaatactcggagtatt

SEQ ID NO: 16535 - DNA, 20 bp, Artificial Sequence
  Description of Artificial Sequence: Synthetic oligonucleotide
  Target: COL7A1; (+) strand; PAM type: NRG; PAM sequence: GAG
cagaatactcggagtattca

SEQ ID NO: 16536 - DNA, 20 bp, Artificial Sequence
  Description of Artificial Sequence: Synthetic oligonucleotide
  Target: COL7A1; (+) strand; PAM type: NRG; PAM sequence: CAG
ttcagagtactcatcatcct

SEQ ID NO: 16537 - DNA, 20 bp, Artificial Sequence
  Description of Artificial Sequence: Synthetic oligonucleotide
  Target: COL7A1; (+) strand; PAM type: NRG; PAM sequence: AGG
tcagagtactcatcatcctc

SEQ ID NO: 16538 - DNA, 20 bp, Artificial Sequence
  Description of Artificial Sequence: Synthetic oligonucleotide
  Target: COL7A1; (+) strand; PAM type: NRG; PAM sequence: GGG
cagagtactcatcatcctca

SEQ ID NO: 16539 - DNA, 20 bp, Artificial Sequence
  Description of Artificial Sequence: Synthetic oligonucleotide
  Target: COL7A1; (+) strand; PAM type: NRG; PAM sequence: GGG
agagtactcatcatcctcag

SEQ ID NO: 16540 - DNA, 20 bp, Artificial Sequence
  Description of Artificial Sequence: Synthetic oligonucleotide
  Target: COL7A1; (+) strand; PAM type: NRG; PAM sequence: GGG
gagtactcatcatcctcagg

SEQ ID NO: 16541 - DNA, 20 bp, Artificial Sequence
  Description of Artificial Sequence: Synthetic oligonucleotide
  Target: COL7A1; (+) strand; PAM type: NRG; PAM sequence: CAG
ctcagggggtacccgctctg

SEQ ID NO: 16542 - DNA, 20 bp, Artificial Sequence
  Description of Artificial Sequence: Synthetic oligonucleotide
  Target: COL7A1; (+) strand; PAM type: NRG; PAM sequence: AGG
tcagggggtacccgctctgc

SEQ ID NO: 16543 - DNA, 20 bp, Artificial Sequence
  Description of Artificial Sequence: Synthetic oligonucleotide
  Target: COL7A1; (+) strand; PAM type: NRG; PAM sequence: TAG
gggggtacccgctctgcagg

SEQ ID NO: 16544 - DNA, 20 bp, Artificial Sequence
  Description of Artificial Sequence: Synthetic oligonucleotide
  Target: COL7A1; (+) strand; PAM type: NRG; PAM sequence: AGG
ggggtacccgctctgcaggt

SEQ ID NO: 16545 - DNA, 20 bp, Artificial Sequence
  Description of Artificial Sequence: Synthetic oligonucleotide
  Target: COL7A1; (+) strand; PAM type: NRG; PAM sequence: GGG
gggtacccgctctgcaggta

SEQ ID NO: 16546 - DNA, 20 bp, Artificial Sequence
  Description of Artificial Sequence: Synthetic oligonucleotide
  Target: COL7A1; (+) strand; PAM type: NRG; PAM sequence: CAG
tacccgctctgcaggtaggg

SEQ ID NO: 16547 - DNA, 20 bp, Artificial Sequence
  Description of Artificial Sequence: Synthetic oligonucleotide
  Target: COL7A1; (+) strand; PAM type: NRG; PAM sequence: AGG
acccgctctgcaggtagggc

SEQ ID NO: 16548 - DNA, 20 bp, Artificial Sequence
  Description of Artificial Sequence: Synthetic oligonucleotide
  Target: COL7A1; (+) strand; PAM type: NRG; PAM sequence: GGG
cccgctctgcaggtagggca

SEQ ID NO: 16549 - DNA, 20 bp, Artificial Sequence
  Description of Artificial Sequence: Synthetic oligonucleotide
  Target: COL7A1; (+) strand; PAM type: NRG; PAM sequence: TGG
gcaggtagggcagggtgtgc

SEQ ID NO: 16550 - DNA, 20 bp, Artificial Sequence
  Description of Artificial Sequence: Synthetic oligonucleotide
  Target: COL7A1; (+) strand; PAM type: NRG; PAM sequence: GGG
caggtagggcagggtgtgct

SEQ ID NO: 16551 - DNA, 20 bp, Artificial Sequence
  Description of Artificial Sequence: Synthetic oligonucleotide
  Target: COL7A1; (+) strand; PAM type: NRG; PAM sequence: GAG
ggtagggcagggtgtgctgg

SEQ ID NO: 16552 - DNA, 20 bp, Artificial Sequence
  Description of Artificial Sequence: Synthetic oligonucleotide
  Target: COL7A1; (+) strand; PAM type: NRG; PAM sequence: CAG
agggcagggtgtgctgggag

SEQ ID NO: 16553 - DNA, 20 bp, Artificial Sequence
  Description of Artificial Sequence: Synthetic oligonucleotide
  Target: COL7A1; (+) strand; PAM type: NRG; PAM sequence: TGG
gcagggtgtgctgggagcag

SEQ ID NO: 16554 - DNA, 20 bp, Artificial Sequence
  Description of Artificial Sequence: Synthetic oligonucleotide
  Target: COL7A1; (+) strand; PAM type: NRG; PAM sequence: TGG
gtgctgggagcagtggctgc

SEQ ID NO: 16555 - DNA, 20 bp, Artificial Sequence
  Description of Artificial Sequence: Synthetic oligonucleotide
  Target: COL7A1; (+) strand; PAM type: NRG; PAM sequence: CGG
ggagcagtggctgctggccc

SEQ ID NO: 16556 - DNA, 20 bp, Artificial Sequence
  Description of Artificial Sequence: Synthetic oligonucleotide
  Target: COL7A1; (+) strand; PAM type: NRG; PAM sequence: GGG
gagcagtggctgctggcccc

SEQ ID NO: 16557 - DNA, 20 bp, Artificial Sequence
  Description of Artificial Sequence: Synthetic oligonucleotide
  Target: COL7A1; (+) strand; PAM type: NRG; PAM sequence: GGG
agcagtggctgctggccccg

SEQ ID NO: 16558 - DNA, 20 bp, Artificial Sequence
  Description of Artificial Sequence: Synthetic oligonucleotide
  Target: COL7A1; (+) strand; PAM type: NRG; PAM sequence: AAG
gtggctgctggccccggggc

SEQ ID NO: 16559 - DNA, 20 bp, Artificial Sequence
  Description of Artificial Sequence: Synthetic oligonucleotide
  Target: COL7A1; (+) strand; PAM type: NRG; PAM sequence: AGG
tggctgctggccccggggca

SEQ ID NO: 16560 - DNA, 20 bp, Artificial Sequence
  Description of Artificial Sequence: Synthetic oligonucleotide
  Target: COL7A1; (+) strand; PAM type: NRG; PAM sequence: TGG
ctgctggccccggggcaagg

SEQ ID NO: 16561 - DNA, 20 bp, Artificial Sequence
  Description of Artificial Sequence: Synthetic oligonucleotide
  Target: COL7A1; (+) strand; PAM type: NRG; PAM sequence: GGG
tgctggccccggggcaaggt

SEQ ID NO: 16562 - DNA, 20 bp, Artificial Sequence
  Description of Artificial Sequence: Synthetic oligonucleotide
  Target: COL7A1; (+) strand; PAM type: NRG; PAM sequence: CAG
tggccccggggcaaggtggg

SEQ ID NO: 16563 - DNA, 20 bp, Artificial Sequence
  Description of Artificial Sequence: Synthetic oligonucleotide
  Target: COL7A1; (+) strand; PAM type: NRG; PAM sequence: CAG
tgatttccactgtgtgcaca

SEQ ID NO: 16564 - DNA, 20 bp, Artificial Sequence
  Description of Artificial Sequence: Synthetic oligonucleotide
  Target: COL7A1; (+) strand; PAM type: NRG; PAM sequence: CAG
ccatgcgtgtgccctgcatg

SEQ ID NO: 16565 - DNA, 20 bp, Artificial Sequence
  Description of Artificial Sequence: Synthetic oligonucleotide
  Target: COL7A1; (+) strand; PAM type: NRG; PAM sequence: TGG
gcatgcagaccctacgtgct

SEQ ID NO: 16566 - DNA, 20 bp, Artificial Sequence
  Description of Artificial Sequence: Synthetic oligonucleotide
  Target: COL7A1; (+) strand; PAM type: NRG; PAM sequence: TGG
tggcgtgtgccctgcattca

SEQ ID NO: 16567 - DNA, 20 bp, Artificial Sequence
  Description of Artificial Sequence: Synthetic oligonucleotide
  Target: COL7A1; (+) strand; PAM type: NRG; PAM sequence: CGG
ggacacccatgtgcgtgtct

SEQ ID NO: 16568 - DNA, 20 bp, Artificial Sequence
  Description of Artificial Sequence: Synthetic oligonucleotide
  Target: COL7A1; (+) strand; PAM type: NRG; PAM sequence: TAG
gcgtgtctcggccccaccca

SEQ ID NO: 16569 - DNA, 20 bp, Artificial Sequence
  Description of Artificial Sequence: Synthetic oligonucleotide
  Target: COL7A1; (+) strand; PAM type: NRG; PAM sequence: CGG
ccccacccatagctgcccca

SEQ ID NO: 16570 - DNA, 20 bp, Artificial Sequence
  Description of Artificial Sequence: Synthetic oligonucleotide
  Target: COL7A1; (+) strand; PAM type: NRG; PAM sequence: GGG
cccacccatagctgccccac

SEQ ID NO: 16571 - DNA, 20 bp, Artificial Sequence
  Description of Artificial Sequence: Synthetic oligonucleotide
  Target: COL7A1; (+) strand; PAM type: NRG; PAM sequence: CAG
ccatagctgccccacgggtt

SEQ ID NO: 16572 - DNA, 20 bp, Artificial Sequence
  Description of Artificial Sequence: Synthetic oligonucleotide
  Target: COL7A1; (+) strand; PAM type: NRG; PAM sequence: GAG
ctcaccttcctcctctgcat

SEQ ID NO: 16573 - DNA, 20 bp, Artificial Sequence
  Description of Artificial Sequence: Synthetic oligonucleotide
  Target: COL7A1; (+) strand; PAM type: NRG; PAM sequence: GAG
caccttcctcctctgcatga

SEQ ID NO: 16574 - DNA, 20 bp, Artificial Sequence
  Description of Artificial Sequence: Synthetic oligonucleotide
  Target: COL7A1; (+) strand; PAM type: NRG; PAM sequence: CGG
cctcctctgcatgagagacg

SEQ ID NO: 16575 - DNA, 20 bp, Artificial Sequence
  Description of Artificial Sequence: Synthetic oligonucleotide
  Target: COL7A1; (+) strand; PAM type: NRG; PAM sequence: GAG
tcctctgcatgagagacgcg

SEQ ID NO: 16576 - DNA, 20 bp, Artificial Sequence
  Description of Artificial Sequence: Synthetic oligonucleotide
  Target: COL7A1; (+) strand; PAM type: NRG; PAM sequence: CAG
tgcatgagagacgcggagca

SEQ ID NO: 16577 - DNA, 20 bp, Artificial Sequence
  Description of Artificial Sequence: Synthetic oligonucleotide
  Target: COL7A1; (+) strand; PAM type: NRG; PAM sequence: AGG
gcatgagagacgcggagcac

SEQ ID NO: 16578 - DNA, 20 bp, Artificial Sequence
  Description of Artificial Sequence: Synthetic oligonucleotide
  Target: COL7A1; (+) strand; PAM type: NRG; PAM sequence: CAG
agagacgcggagcacaggca

SEQ ID NO: 16579 - DNA, 20 bp, Artificial Sequence
  Description of Artificial Sequence: Synthetic oligonucleotide
  Target: COL7A1; (+) strand; PAM type: NRG; PAM sequence: TGG
cgcggagcacaggcacagca

SEQ ID NO: 16580 - DNA, 20 bp, Artificial Sequence
  Description of Artificial Sequence: Synthetic oligonucleotide
  Target: COL7A1; (+) strand; PAM type: NRG; PAM sequence: GAG
cggagcacaggcacagcatg

SEQ ID NO: 16581 - DNA, 20 bp, Artificial Sequence
  Description of Artificial Sequence: Synthetic oligonucleotide
  Target: COL7A1; (+) strand; PAM type: NRG; PAM sequence: TGG
gcacaggcacagcatggagc

SEQ ID NO: 16582 - DNA, 20 bp, Artificial Sequence
  Description of Artificial Sequence: Synthetic oligonucleotide
  Target: COL7A1; (+) strand; PAM type: NRG; PAM sequence: GGG
cacaggcacagcatggagct

SEQ ID NO: 16583 - DNA, 20 bp, Artificial Sequence
  Description of Artificial Sequence: Synthetic oligonucleotide
  Target: COL7A1; (+) strand; PAM type: NRG; PAM sequence: GAG
caggcacagcatggagctgg

SEQ ID NO: 16584 - DNA, 20 bp, Artificial Sequence
  Description of Artificial Sequence: Synthetic oligonucleotide
  Target: COL7A1; (+) strand; PAM type: NRG; PAM sequence: CGG
cacagcatggagctgggagc

SEQ ID NO: 16585 - DNA, 20 bp, Artificial Sequence
  Description of Artificial Sequence: Synthetic oligonucleotide
  Target: COL7A1; (+) strand; PAM type: NRG; PAM sequence: CAG
agcatggagctgggagccgg

SEQ ID NO: 16586 - DNA, 20 bp, Artificial Sequence
  Description of Artificial Sequence: Synthetic oligonucleotide
  Target: COL7A1; (+) strand; PAM type: NRG; PAM sequence: CAG
ctgggagccggcagtgtctg

SEQ ID NO: 16587 - DNA, 20 bp, Artificial Sequence
  Description of Artificial Sequence: Synthetic oligonucleotide
  Target: COL7A1; (+) strand; PAM type: NRG; PAM sequence: TAG
ggcagtgtctgcagcataac

SEQ ID NO: 16588 - DNA, 20 bp, Artificial Sequence
  Description of Artificial Sequence: Synthetic oligonucleotide
  Target: COL7A1; (+) strand; PAM type: NRG; PAM sequence: AGG
gcagtgtctgcagcataact

SEQ ID NO: 16589 - DNA, 20 bp, Artificial Sequence
  Description of Artificial Sequence: Synthetic oligonucleotide
  Target: COL7A1; (+) strand; PAM type: NRG; PAM sequence: GGG
cagtgtctgcagcataacta

SEQ ID NO: 16590 - DNA, 20 bp, Artificial Sequence
  Description of Artificial Sequence: Synthetic oligonucleotide
  Target: COL7A1; (+) strand; PAM type: NRG; PAM sequence: GAG
gtgtctgcagcataactagg

SEQ ID NO: 16591 - DNA, 20 bp, Artificial Sequence
  Description of Artificial Sequence: Synthetic oligonucleotide
  Target: COL7A1; (+) strand; PAM type: NRG; PAM sequence: AGG
tgtctgcagcataactaggg

SEQ ID NO: 16592 - DNA, 20 bp, Artificial Sequence
  Description of Artificial Sequence: Synthetic oligonucleotide
  Target: COL7A1; (+) strand; PAM type: NRG; PAM sequence: GGG
gtctgcagcataactaggga

SEQ ID NO: 16593 - DNA, 20 bp, Artificial Sequence
  Description of Artificial Sequence: Synthetic oligonucleotide
  Target: COL7A1; (+) strand; PAM type: NRG; PAM sequence: GGG
tctgcagcataactagggag

SEQ ID NO: 16594 - DNA, 20 bp, Artificial Sequence
  Description of Artificial Sequence: Synthetic oligonucleotide
  Target: COL7A1; (+) strand; PAM type: NRG; PAM sequence: TGG
gcataactagggaggggtcc

SEQ ID NO: 16595 - DNA, 20 bp, Artificial Sequence
  Description of Artificial Sequence: Synthetic oligonucleotide
  Target: COL7A1; (+) strand; PAM type: NRG; PAM sequence: GAG
ataactagggaggggtcctg

SEQ ID NO: 16596 - DNA, 20 bp, Artificial Sequence
  Description of Artificial Sequence: Synthetic oligonucleotide
  Target: COL7A1; (+) strand; PAM type: NRG; PAM sequence: AAG
tagggaggggtcctggagcc

SEQ ID NO: 16597 - DNA, 20 bp, Artificial Sequence
  Description of Artificial Sequence: Synthetic oligonucleotide
  Target: COL7A1; (+) strand; PAM type: NRG; PAM sequence: GAG
gggaggggtcctggagccaa

SEQ ID NO: 16598 - DNA, 20 bp, Artificial Sequence
  Description of Artificial Sequence: Synthetic oligonucleotide
  Target: COL7A1; (+) strand; PAM type: NRG; PAM sequence: CAG
aggggtcctggagccaagag

SEQ ID NO: 16599 - DNA, 20 bp, Artificial Sequence
  Description of Artificial Sequence: Synthetic oligonucleotide
  Target: COL7A1; (+) strand; PAM type: NRG; PAM sequence: AGG
ggggtcctggagccaagagc

SEQ ID NO: 16600 - DNA, 20 bp, Artificial Sequence
  Description of Artificial Sequence: Synthetic oligonucleotide
  Target: COL7A1; (+) strand; PAM type: NRG; PAM sequence: GGG
gggtcctggagccaagagca

SEQ ID NO: 16601 - DNA, 20 bp, Artificial Sequence
  Description of Artificial Sequence: Synthetic oligonucleotide
  Target: COL7A1; (+) strand; PAM type: NRG; PAM sequence: GGG
ggtcctggagccaagagcag

SEQ ID NO: 16602 - DNA, 20 bp, Artificial Sequence
  Description of Artificial Sequence: Synthetic oligonucleotide
  Target: COL7A1; (+) strand; PAM type: NRG; PAM sequence: CAG
ggagccaagagcaggggcct

SEQ ID NO: 16603 - DNA, 20 bp, Artificial Sequence
  Description of Artificial Sequence: Synthetic oligonucleotide
  Target: COL7A1; (+) strand; PAM type: NRG; PAM sequence: AGG
gagccaagagcaggggcctc

SEQ ID NO: 16604 - DNA, 20 bp, Artificial Sequence
  Description of Artificial Sequence: Synthetic oligonucleotide
  Target: COL7A1; (+) strand; PAM type: NRG; PAM sequence: GGG
agccaagagcaggggcctca

SEQ ID NO: 16605 - DNA, 20 bp, Artificial Sequence
  Description of Artificial Sequence: Synthetic oligonucleotide
  Target: COL7A1; (+) strand; PAM type: NRG; PAM sequence: AAG
gcaggggcctcagggccctg

SEQ ID NO: 16606 - DNA, 20 bp, Artificial Sequence
  Description of Artificial Sequence: Synthetic oligonucleotide
  Target: COL7A1; (+) strand; PAM type: NRG; PAM sequence: TGG
tcagggccctgaagtcacca

SEQ ID NO: 16607 - DNA, 20 bp, Artificial Sequence
  Description of Artificial Sequence: Synthetic oligonucleotide
  Target: COL7A1; (+) strand; PAM type: NRG; PAM sequence: GGG
cagggccctgaagtcaccat

SEQ ID NO: 16608 - DNA, 20 bp, Artificial Sequence
  Description of Artificial Sequence: Synthetic oligonucleotide
  Target: COL7A1; (+) strand; PAM type: NRG; PAM sequence: CAG
ggccctgaagtcaccatggg

SEQ ID NO: 16609 - DNA, 20 bp, Artificial Sequence
  Description of Artificial Sequence: Synthetic oligonucleotide
  Target: COL7A1; (+) strand; PAM type: NRG; PAM sequence: CAG
gtcaccatgggcagccatcc

SEQ ID NO: 16610 - DNA, 20 bp, Artificial Sequence
  Description of Artificial Sequence: Synthetic oligonucleotide
  Target: COL7A1; (+) strand; PAM type: NRG; PAM sequence: GAG
ccatcccagccaacccccct

SEQ ID NO: 16611 - DNA, 20 bp, Artificial Sequence
  Description of Artificial Sequence: Synthetic oligonucleotide
  Target: COL7A1; (+) strand; PAM type: NRG; PAM sequence: GAG
atcccagccaacccccctga

SEQ ID NO: 16612 - DNA, 20 bp, Artificial Sequence
  Description of Artificial Sequence: Synthetic oligonucleotide
  Target: COL7A1; (+) strand; PAM type: NRG; PAM sequence: AGG
tcccagccaacccccctgag

SEQ ID NO: 16613 - DNA, 20 bp, Artificial Sequence
  Description of Artificial Sequence: Synthetic oligonucleotide
  Target: COL7A1; (+) strand; PAM type: NRG; PAM sequence: CAG
caacccccctgagaggaccc

SEQ ID NO: 16614 - DNA, 20 bp, Artificial Sequence
  Description of Artificial Sequence: Synthetic oligonucleotide
  Target: COL7A1; (+) strand; PAM type: NRG; PAM sequence: TAG
cctgagaggaccccagttga

SEQ ID NO: 16615 - DNA, 20 bp, Artificial Sequence
  Description of Artificial Sequence: Synthetic oligonucleotide
  Target: COL7A1; (+) strand; PAM type: NRG; PAM sequence: AGG
ctgagaggaccccagttgat

SEQ ID NO: 16616 - DNA, 20 bp, Artificial Sequence
  Description of Artificial Sequence: Synthetic oligonucleotide
  Target: COL7A1; (+) strand; PAM type: NRG; PAM sequence: CAG
agaggaccccagttgatagg

SEQ ID NO: 16617 - DNA, 20 bp, Artificial Sequence
  Description of Artificial Sequence: Synthetic oligonucleotide
  Target: COL7A1; (+) strand; PAM type: NRG; PAM sequence: AGG
gaggaccccagttgataggc

SEQ ID NO: 16618 - DNA, 20 bp, Artificial Sequence
  Description of Artificial Sequence: Synthetic oligonucleotide
  Target: COL7A1; (+) strand; PAM type: NRG; PAM sequence: GGG
aggaccccagttgataggca

SEQ ID NO: 16619 - DNA, 20 bp, Artificial Sequence
  Description of Artificial Sequence: Synthetic oligonucleotide
  Target: COL7A1; (+) strand; PAM type: NRG; PAM sequence: CAG
accccagttgataggcaggg

SEQ ID NO: 16620 - DNA, 20 bp, Artificial Sequence
  Description of Artificial Sequence: Synthetic oligonucleotide
  Target: COL7A1; (+) strand; PAM type: NRG; PAM sequence: AGG
ccccagttgataggcagggc

SEQ ID NO: 16621 - DNA, 20 bp, Artificial Sequence
  Description of Artificial Sequence: Synthetic oligonucleotide
  Target: COL7A1; (+) strand; PAM type: NRG; PAM sequence: GGG
cccagttgataggcagggca

SEQ ID NO: 16622 - DNA, 20 bp, Artificial Sequence
  Description of Artificial Sequence: Synthetic oligonucleotide
  Target: COL7A1; (+) strand; PAM type: NRG; PAM sequence: TGG
ttgataggcagggcagggcc

SEQ ID NO: 16623 - DNA, 20 bp, Artificial Sequence
  Description of Artificial Sequence: Synthetic oligonucleotide
  Target: COL7A1; (+) strand; PAM type: NRG; PAM sequence: GGG
tgataggcagggcagggcct

SEQ ID NO: 16624 - DNA, 20 bp, Artificial Sequence
  Description of Artificial Sequence: Synthetic oligonucleotide
  Target: COL7A1; (+) strand; PAM type: NRG; PAM sequence: GGG
gataggcagggcagggcctg

SEQ ID NO: 16625 - DNA, 20 bp, Artificial Sequence
  Description of Artificial Sequence: Synthetic oligonucleotide
  Target: COL7A1; (+) strand; PAM type: NRG; PAM sequence: AAG
gcagggcagggcctggggtg

SEQ ID NO: 16626 - DNA, 20 bp, Artificial Sequence
  Description of Artificial Sequence: Synthetic oligonucleotide
  Target: COL7A1; (+) strand; PAM type: NRG; PAM sequence: AAG
ggcagggcctggggtgaaga

SEQ ID NO: 16627 - DNA, 20 bp, Artificial Sequence
  Description of Artificial Sequence: Synthetic oligonucleotide
  Target: COL7A1; (+) strand; PAM type: NRG; PAM sequence: TGG
gcctggggtgaagaaagttc

SEQ ID NO: 16628 - DNA, 20 bp, Artificial Sequence
  Description of Artificial Sequence: Synthetic oligonucleotide
  Target: COL7A1; (+) strand; PAM type: NRG; PAM sequence: GGG
cctggggtgaagaaagttct

SEQ ID NO: 16629 - DNA, 20 bp, Artificial Sequence
  Description of Artificial Sequence: Synthetic oligonucleotide
  Target: COL7A1; (+) strand; PAM type: NRG; PAM sequence: GAG
tggggtgaagaaagttctgg

SEQ ID NO: 16630 - DNA, 20 bp, Artificial Sequence
  Description of Artificial Sequence: Synthetic oligonucleotide
  Target: COL7A1; (+) strand; PAM type: NRG; PAM sequence: TAG
ggtgaagaaagttctgggag

SEQ ID NO: 16631 - DNA, 20 bp, Artificial Sequence
  Description of Artificial Sequence: Synthetic oligonucleotide
  Target: COL7A1; (+) strand; PAM type: NRG; PAM sequence: CAG
agaaaactactcacgtgatc

SEQ ID NO: 16632 - DNA, 20 bp, Artificial Sequence
  Description of Artificial Sequence: Synthetic oligonucleotide
  Target: COL7A1; (+) strand; PAM type: NRG; PAM sequence: TGG
gtgatccagatgcgatgaac

SEQ ID NO: 16633 - DNA, 20 bp, Artificial Sequence
  Description of Artificial Sequence: Synthetic oligonucleotide
  Target: COL7A1; (+) strand; PAM type: NRG; PAM sequence: TGG
cagatgcgatgaactggccc

SEQ ID NO: 16634 - DNA, 20 bp, Artificial Sequence
  Description of Artificial Sequence: Synthetic oligonucleotide
  Target: COL7A1; (+) strand; PAM type: NRG; PAM sequence: CAG
atgcgatgaactggccctgg

SEQ ID NO: 16635 - DNA, 20 bp, Artificial Sequence
  Description of Artificial Sequence: Synthetic oligonucleotide
  Target: COL7A1; (+) strand; PAM type: NRG; PAM sequence: AGG
tgcgatgaactggccctggc

SEQ ID NO: 16636 - DNA, 20 bp, Artificial Sequence
  Description of Artificial Sequence: Synthetic oligonucleotide
  Target: COL7A1; (+) strand; PAM type: NRG; PAM sequence: TAG
atgaactggccctggcaggc

SEQ ID NO: 16637 - DNA, 20 bp, Artificial Sequence
  Description of Artificial Sequence: Synthetic oligonucleotide
  Target: COL7A1; (+) strand; PAM type: NRG; PAM sequence: GAG
gaactggccctggcaggcta

SEQ ID NO: 16638 - DNA, 20 bp, Artificial Sequence
  Description of Artificial Sequence: Synthetic oligonucleotide
  Target: COL7A1; (+) strand; PAM type: NRG; PAM sequence: AGG
aactggccctggcaggctag

SEQ ID NO: 16639 - DNA, 20 bp, Artificial Sequence
  Description of Artificial Sequence: Synthetic oligonucleotide
  Target: COL7A1; (+) strand; PAM type: NRG; PAM sequence: GGG
actggccctggcaggctaga

SEQ ID NO: 16640 - DNA, 20 bp, Artificial Sequence
  Description of Artificial Sequence: Synthetic oligonucleotide
  Target: COL7A1; (+) strand; PAM type: NRG; PAM sequence: GGG
ctggccctggcaggctagag

SEQ ID NO: 16641 - DNA, 20 bp, Artificial Sequence
  Description of Artificial Sequence: Synthetic oligonucleotide
  Target: COL7A1; (+) strand; PAM type: NRG; PAM sequence: GGG
tggccctggcaggctagagg

SEQ ID NO: 16642 - DNA, 20 bp, Artificial Sequence
  Description of Artificial Sequence: Synthetic oligonucleotide
  Target: COL7A1; (+) strand; PAM type: NRG; PAM sequence: CAG
ccctggcaggctagaggggg

SEQ ID NO: 16643 - DNA, 20 bp, Artificial Sequence
  Description of Artificial Sequence: Synthetic oligonucleotide
  Target: COL7A1; (+) strand; PAM type: NRG; PAM sequence: GAG
ctggcaggctagagggggca

SEQ ID NO: 16644 - DNA, 20 bp, Artificial Sequence
  Description of Artificial Sequence: Synthetic oligonucleotide
  Target: COL7A1; (+) strand; PAM type: NRG; PAM sequence: GAG
ggcaggctagagggggcaga

SEQ ID NO: 16645 - DNA, 20 bp, Artificial Sequence
  Description of Artificial Sequence: Synthetic oligonucleotide
  Target: COL7A1; (+) strand; PAM type: NRG; PAM sequence: AGG
gcaggctagagggggcagag

SEQ ID NO: 16646 - DNA, 20 bp, Artificial Sequence
  Description of Artificial Sequence: Synthetic oligonucleotide
  Target: COL7A1; (+) strand; PAM type: NRG; PAM sequence: GGG
caggctagagggggcagaga

SEQ ID NO: 16647 - DNA, 20 bp, Artificial Sequence
  Description of Artificial Sequence: Synthetic oligonucleotide
  Target: COL7A1; (+) strand; PAM type: NRG; PAM sequence: TAG
ctagagggggcagagaggga

SEQ ID NO: 16648 - DNA, 20 bp, Artificial Sequence
  Description of Artificial Sequence: Synthetic oligonucleotide
  Target: COL7A1; (+) strand; PAM type: NRG; PAM sequence: GAG
agagggggcagagagggata

SEQ ID NO: 16649 - DNA, 20 bp, Artificial Sequence
  Description of Artificial Sequence: Synthetic oligonucleotide
  Target: COL7A1; (+) strand; PAM type: NRG; PAM sequence: GAG
agggggcagagagggataga

SEQ ID NO: 16650 - DNA, 20 bp, Artificial Sequence
  Description of Artificial Sequence: Synthetic oligonucleotide
  Target: COL7A1; (+) strand; PAM type: NRG; PAM sequence: CAG
gagggatagagagacaatga

SEQ ID NO: 16651 - DNA, 20 bp, Artificial Sequence
  Description of Artificial Sequence: Synthetic oligonucleotide
  Target: COL7A1; (+) strand; PAM type: NRG; PAM sequence: GAG
gggatagagagacaatgaca

SEQ ID NO: 16652 - DNA, 20 bp, Artificial Sequence
  Description of Artificial Sequence: Synthetic oligonucleotide
  Target: COL7A1; (+) strand; PAM type: NRG; PAM sequence: GAG
gatagagagacaatgacaga

SEQ ID NO: 16653 - DNA, 20 bp, Artificial Sequence
  Description of Artificial Sequence: Synthetic oligonucleotide
  Target: COL7A1; (+) strand; PAM type: NRG; PAM sequence: AAG
agagagacaatgacagagag

SEQ ID NO: 16654 - DNA, 20 bp, Artificial Sequence
  Description of Artificial Sequence: Synthetic oligonucleotide
  Target: COL7A1; (+) strand; PAM type: NRG; PAM sequence: AGG
gagagacaatgacagagaga

SEQ ID NO: 16655 - DNA, 20 bp, Artificial Sequence
  Description of Artificial Sequence: Synthetic oligonucleotide
  Target: COL7A1; (+) strand; PAM type: NRG; PAM sequence: TGG
gacaatgacagagagaagga

SEQ ID NO: 16656 - DNA, 20 bp, Artificial Sequence
  Description of Artificial Sequence: Synthetic oligonucleotide
  Target: COL7A1; (+) strand; PAM type: NRG; PAM sequence: GGG
acaatgacagagagaaggat

SEQ ID NO: 16657 - DNA, 20 bp, Artificial Sequence
  Description of Artificial Sequence: Synthetic oligonucleotide
  Target: COL7A1; (+) strand; PAM type: NRG; PAM sequence: AAG
atgacagagagaaggatggg

SEQ ID NO: 16658 - DNA, 20 bp, Artificial Sequence
  Description of Artificial Sequence: Synthetic oligonucleotide
  Target: COL7A1; (+) strand; PAM type: NRG; PAM sequence: TGG
cagagagaaggatgggaaga

SEQ ID NO: 16659 - DNA, 20 bp, Artificial Sequence
  Description of Artificial Sequence: Synthetic oligonucleotide
  Target: COL7A1; (+) strand; PAM type: NRG; PAM sequence: GAG
gagagaaggatgggaagatg

SEQ ID NO: 16660 - DNA, 20 bp, Artificial Sequence
  Description of Artificial Sequence: Synthetic oligonucleotide
  Target: COL7A1; (+) strand; PAM type: NRG; PAM sequence: GAG
gagaaggatgggaagatgga

SEQ ID NO: 16661 - DNA, 20 bp, Artificial Sequence
  Description of Artificial Sequence: Synthetic oligonucleotide
  Target: COL7A1; (+) strand; PAM type: NRG; PAM sequence: CAG
aggatgggaagatggagaga

SEQ ID NO: 16662 - DNA, 20 bp, Artificial Sequence
  Description of Artificial Sequence: Synthetic oligonucleotide
  Target: COL7A1; (+) strand; PAM type: NRG; PAM sequence: CAG
tgggaagatggagagacaga

SEQ ID NO: 16663 - DNA, 20 bp, Artificial Sequence
  Description of Artificial Sequence: Synthetic oligonucleotide
  Target: COL7A1; (+) strand; PAM type: NRG; PAM sequence: GAG
ggaagatggagagacagaca

SEQ ID NO: 16664 - DNA, 20 bp, Artificial Sequence
  Description of Artificial Sequence: Synthetic oligonucleotide
  Target: COL7A1; (+) strand; PAM type: NRG; PAM sequence: CAG
gagagacagacagagacaca

SEQ ID NO: 16665 - DNA, 20 bp, Artificial Sequence
  Description of Artificial Sequence: Synthetic oligonucleotide
  Target: COL7A1; (+) strand; PAM type: NRG; PAM sequence: AGG
agagacagacagagacacac

SEQ ID NO: 16666 - DNA, 20 bp, Artificial Sequence
  Description of Artificial Sequence: Synthetic oligonucleotide
  Target: COL7A1; (+) strand; PAM type: NRG; PAM sequence: CAG
gacagacagagacacacagg

SEQ ID NO: 16667 - DNA, 20 bp, Artificial Sequence
  Description of Artificial Sequence: Synthetic oligonucleotide
  Target: COL7A1; (+) strand; PAM type: NRG; PAM sequence: GAG
cagacagagacacacaggca

SEQ ID NO: 16668 - DNA, 20 bp, Artificial Sequence
  Description of Artificial Sequence: Synthetic oligonucleotide
  Target: COL7A1; (+) strand; PAM type: NRG; PAM sequence: AGG
agacagagacacacaggcag

SEQ ID NO: 16669 - DNA, 20 bp, Artificial Sequence
  Description of Artificial Sequence: Synthetic oligonucleotide
  Target: COL7A1; (+) strand; PAM type: NRG; PAM sequence: GGG
gacagagacacacaggcaga

SEQ ID NO: 16670 - DNA, 20 bp, Artificial Sequence
  Description of Artificial Sequence: Synthetic oligonucleotide
  Target: COL7A1; (+) strand; PAM type: NRG; PAM sequence: GGG
acagagacacacaggcagag

SEQ ID NO: 16671 - DNA, 20 bp, Artificial Sequence
  Description of Artificial Sequence: Synthetic oligonucleotide
  Target: COL7A1; (+) strand; PAM type: NRG; PAM sequence: TAG
gagacacacaggcagagggg

SEQ ID NO: 16672 - DNA, 20 bp, Artificial Sequence
  Description of Artificial Sequence: Synthetic oligonucleotide
  Target: COL7A1; (+) strand; PAM type: NRG; PAM sequence: GAG
gacacacaggcagaggggta

SEQ ID NO: 16673 - DNA, 20 bp, Artificial Sequence
  Description of Artificial Sequence: Synthetic oligonucleotide
  Target: COL7A1; (+) strand; PAM type: NRG; PAM sequence: AAG
cagaggggtagagatacaca

SEQ ID NO: 16674 - DNA, 20 bp, Artificial Sequence
  Description of Artificial Sequence: Synthetic oligonucleotide
  Target: COL7A1; (+) strand; PAM type: NRG; PAM sequence: GAG
gaggggtagagatacacaaa

SEQ ID NO: 16675 - DNA, 20 bp, Artificial Sequence
  Description of Artificial Sequence: Synthetic oligonucleotide
  Target: COL7A1; (+) strand; PAM type: NRG; PAM sequence: TAG
ggtagagatacacaaagaga

SEQ ID NO: 16676 - DNA, 20 bp, Artificial Sequence
  Description of Artificial Sequence: Synthetic oligonucleotide
  Target: COL7A1; (+) strand; PAM type: NRG; PAM sequence: CAG
agagatacacaaagagatag

SEQ ID NO: 16677 - DNA, 20 bp, Artificial Sequence
  Description of Artificial Sequence: Synthetic oligonucleotide
  Target: COL7A1; (+) strand; PAM type: NRG; PAM sequence: AGG
gagatacacaaagagatagc

SEQ ID NO: 16678 - DNA, 20 bp, Artificial Sequence
  Description of Artificial Sequence: Synthetic oligonucleotide
  Target: COL7A1; (+) strand; PAM type: NRG; PAM sequence: GAG
gatacacaaagagatagcag

SEQ ID NO: 16679 - DNA, 20 bp, Artificial Sequence
  Description of Artificial Sequence: Synthetic oligonucleotide
  Target: COL7A1; (+) strand; PAM type: NRG; PAM sequence: GAG
tacacaaagagatagcagga

SEQ ID NO: 16680 - DNA, 20 bp, Artificial Sequence
  Description of Artificial Sequence: Synthetic oligonucleotide
  Target: COL7A1; (+) strand; PAM type: NRG; PAM sequence: AGG
acacaaagagatagcaggag

SEQ ID NO: 16681 - DNA, 20 bp, Artificial Sequence
  Description of Artificial Sequence: Synthetic oligonucleotide
  Target: COL7A1; (+) strand; PAM type: NRG; PAM sequence: GGG
cacaaagagatagcaggaga

SEQ ID NO: 16682 - DNA, 20 bp, Artificial Sequence
  Description of Artificial Sequence: Synthetic oligonucleotide
  Target: COL7A1; (+) strand; PAM type: NRG; PAM sequence: CAG
gagatagcaggagagggtaa

SEQ ID NO: 16683 - DNA, 20 bp, Artificial Sequence
  Description of Artificial Sequence: Synthetic oligonucleotide
  Target: COL7A1; (+) strand; PAM type: NRG; PAM sequence: AGG
agatagcaggagagggtaac

SEQ ID NO: 16684 - DNA, 20 bp, Artificial Sequence
  Description of Artificial Sequence: Synthetic oligonucleotide
  Target: COL7A1; (+) strand; PAM type: NRG; PAM sequence: GAG
atagcaggagagggtaacag

SEQ ID NO: 16685 - DNA, 20 bp, Artificial Sequence
  Description of Artificial Sequence: Synthetic oligonucleotide
  Target: COL7A1; (+) strand; PAM type: NRG; PAM sequence: GAG
agcaggagagggtaacagga

SEQ ID NO: 16686 - DNA, 20 bp, Artificial Sequence
  Description of Artificial Sequence: Synthetic oligonucleotide
  Target: COL7A1; (+) strand; PAM type: NRG; PAM sequence: GAG
caggagagggtaacaggaga

SEQ ID NO: 16687 - DNA, 20 bp, Artificial Sequence
  Description of Artificial Sequence: Synthetic oligonucleotide
  Target: COL7A1; (+) strand; PAM type: NRG; PAM sequence: GAG
ggagagggtaacaggagaga

SEQ ID NO: 16688 - DNA, 20 bp, Artificial Sequence
  Description of Artificial Sequence: Synthetic oligonucleotide
  Target: COL7A1; (+) strand; PAM type: NRG; PAM sequence: AGG
gagagggtaacaggagagag

SEQ ID NO: 16689 - DNA, 20 bp, Artificial Sequence
  Description of Artificial Sequence: Synthetic oligonucleotide
  Target: COL7A1; (+) strand; PAM type: NRG; PAM sequence: AAG
agggtaacaggagagagagg

SEQ ID NO: 16690 - DNA, 20 bp, Artificial Sequence
  Description of Artificial Sequence: Synthetic oligonucleotide
  Target: COL7A1; (+) strand; PAM type: NRG; PAM sequence: GAG
ggtaacaggagagagaggaa

SEQ ID NO: 16691 - DNA, 20 bp, Artificial Sequence
  Description of Artificial Sequence: Synthetic oligonucleotide
  Target: COL7A1; (+) strand; PAM type: NRG; PAM sequence: GAG
taacaggagagagaggaaga

SEQ ID NO: 16692 - DNA, 20 bp, Artificial Sequence
  Description of Artificial Sequence: Synthetic oligonucleotide
  Target: COL7A1; (+) strand; PAM type: NRG; PAM sequence: GAG
acaggagagagaggaagaga

SEQ ID NO: 16693 - DNA, 20 bp, Artificial Sequence
  Description of Artificial Sequence: Synthetic oligonucleotide
  Target: COL7A1; (+) strand; PAM type: NRG; PAM sequence: AGG
caggagagagaggaagagag

SEQ ID NO: 16694 - DNA, 20 bp, Artificial Sequence
  Description of Artificial Sequence: Synthetic oligonucleotide
  Target: COL7A1; (+) strand; PAM type: NRG; PAM sequence: GGG
aggagagagaggaagagaga

SEQ ID NO: 16695 - DNA, 20 bp, Artificial Sequence
  Description of Artificial Sequence: Synthetic oligonucleotide
  Target: COL7A1; (+) strand; PAM type: NRG; PAM sequence: TGG
agagagaggaagagagaggg

SEQ ID NO: 16696 - DNA, 20 bp, Artificial Sequence
  Description of Artificial Sequence: Synthetic oligonucleotide
  Target: COL7A1; (+) strand; PAM type: NRG; PAM sequence: GGG
gagagaggaagagagagggt

SEQ ID NO: 16697 - DNA, 20 bp, Artificial Sequence
  Description of Artificial Sequence: Synthetic oligonucleotide
  Target: COL7A1; (+) strand; PAM type: NRG; PAM sequence: GAG
gagaggaagagagagggtgg

SEQ ID NO: 16698 - DNA, 20 bp, Artificial Sequence
  Description of Artificial Sequence: Synthetic oligonucleotide
  Target: COL7A1; (+) strand; PAM type: NRG; PAM sequence: AGG
agaggaagagagagggtggg

SEQ ID NO: 16699 - DNA, 20 bp, Artificial Sequence
  Description of Artificial Sequence: Synthetic oligonucleotide
  Target: COL7A1; (+) strand; PAM type: NRG; PAM sequence: TAG
ggaagagagagggtgggagg

SEQ ID NO: 16700 - DNA, 20 bp, Artificial Sequence
  Description of Artificial Sequence: Synthetic oligonucleotide
  Target: COL7A1; (+) strand; PAM type: NRG; PAM sequence: TAG
gagagagggtgggaggtaga

SEQ ID NO: 16701 - DNA, 20 bp, Artificial Sequence
  Description of Artificial Sequence: Synthetic oligonucleotide
  Target: COL7A1; (+) strand; PAM type: NRG; PAM sequence: GAG
gagagggtgggaggtagata

SEQ ID NO: 16702 - DNA, 20 bp, Artificial Sequence
  Description of Artificial Sequence: Synthetic oligonucleotide
  Target: COL7A1; (+) strand; PAM type: NRG; PAM sequence: GAG
gagggtgggaggtagataga

SEQ ID NO: 16703 - DNA, 20 bp, Artificial Sequence
  Description of Artificial Sequence: Synthetic oligonucleotide
  Target: COL7A1; (+) strand; PAM type: NRG; PAM sequence: TGG
gtgggaggtagatagagaga

SEQ ID NO: 16704 - DNA, 20 bp, Artificial Sequence
  Description of Artificial Sequence: Synthetic oligonucleotide
  Target: COL7A1; (+) strand; PAM type: NRG; PAM sequence: AAG
ggtagatagagagatggaaa

SEQ ID NO: 16705 - DNA, 20 bp, Artificial Sequence
  Description of Artificial Sequence: Synthetic oligonucleotide
  Target: COL7A1; (+) strand; PAM type: NRG; PAM sequence: GAG
tagatagagagatggaaaaa

SEQ ID NO: 16706 - DNA, 20 bp, Artificial Sequence
  Description of Artificial Sequence: Synthetic oligonucleotide
  Target: COL7A1; (+) strand; PAM type: NRG; PAM sequence: AAG
atagagagatggaaaaagag

SEQ ID NO: 16707 - DNA, 20 bp, Artificial Sequence
  Description of Artificial Sequence: Synthetic oligonucleotide
  Target: COL7A1; (+) strand; PAM type: NRG; PAM sequence: AAG
gagagatggaaaaagagaag

SEQ ID NO: 16708 - DNA, 20 bp, Artificial Sequence
  Description of Artificial Sequence: Synthetic oligonucleotide
  Target: COL7A1; (+) strand; PAM type: NRG; PAM sequence: AGG
agagatggaaaaagagaaga

SEQ ID NO: 16709 - DNA, 20 bp, Artificial Sequence
  Description of Artificial Sequence: Synthetic oligonucleotide
  Target: COL7A1; (+) strand; PAM type: NRG; PAM sequence: CAG
gatggaaaaagagaagaagg

SEQ ID NO: 16710 - DNA, 20 bp, Artificial Sequence
  Description of Artificial Sequence: Synthetic oligonucleotide
  Target: COL7A1; (+) strand; PAM type: NRG; PAM sequence: GAG
tggaaaaagagaagaaggca

SEQ ID NO: 16711 - DNA, 20 bp, Artificial Sequence
  Description of Artificial Sequence: Synthetic oligonucleotide
  Target: COL7A1; (+) strand; PAM type: NRG; PAM sequence: AGG
ggaaaaagagaagaaggcag

SEQ ID NO: 16712 - DNA, 20 bp, Artificial Sequence
  Description of Artificial Sequence: Synthetic oligonucleotide
  Target: COL7A1; (+) strand; PAM type: NRG; PAM sequence: GAG
aaaaagagaagaaggcagag

SEQ ID NO: 16713 - DNA, 20 bp, Artificial Sequence
  Description of Artificial Sequence: Synthetic oligonucleotide
  Target: COL7A1; (+) strand; PAM type: NRG; PAM sequence: GAG
aaagagaagaaggcagagga

SEQ ID NO: 16714 - DNA, 20 bp, Artificial Sequence
  Description of Artificial Sequence: Synthetic oligonucleotide
  Target: COL7A1; (+) strand; PAM type: NRG; PAM sequence: AGG
aagagaagaaggcagaggag

SEQ ID NO: 16715 - DNA, 20 bp, Artificial Sequence
  Description of Artificial Sequence: Synthetic oligonucleotide
  Target: COL7A1; (+) strand; PAM type: NRG; PAM sequence: GGG
agagaagaaggcagaggaga

SEQ ID NO: 16716 - DNA, 20 bp, Artificial Sequence
  Description of Artificial Sequence: Synthetic oligonucleotide
  Target: COL7A1; (+) strand; PAM type: NRG; PAM sequence: AAG
gaagaaggcagaggagaggg

SEQ ID NO: 16717 - DNA, 20 bp, Artificial Sequence
  Description of Artificial Sequence: Synthetic oligonucleotide
  Target: COL7A1; (+) strand; PAM type: NRG; PAM sequence: TGG
aaggcagaggagagggaagt

SEQ ID NO: 16718 - DNA, 20 bp, Artificial Sequence
  Description of Artificial Sequence: Synthetic oligonucleotide
  Target: COL7A1; (+) strand; PAM type: NRG; PAM sequence: GGG
aggcagaggagagggaagtt

SEQ ID NO: 16719 - DNA, 20 bp, Artificial Sequence
  Description of Artificial Sequence: Synthetic oligonucleotide
  Target: COL7A1; (+) strand; PAM type: NRG; PAM sequence: CAG
gaggagagggaagttgggaa

SEQ ID NO: 16720 - DNA, 20 bp, Artificial Sequence
  Description of Artificial Sequence: Synthetic oligonucleotide
  Target: COL7A1; (+) strand; PAM type: NRG; PAM sequence: AGG
aggagagggaagttgggaac

SEQ ID NO: 16721 - DNA, 20 bp, Artificial Sequence
  Description of Artificial Sequence: Synthetic oligonucleotide
  Target: COL7A1; (+) strand; PAM type: NRG; PAM sequence: AAG
agttgggaacaggccaacaa

SEQ ID NO: 16722 - DNA, 20 bp, Artificial Sequence
  Description of Artificial Sequence: Synthetic oligonucleotide
  Target: COL7A1; (+) strand; PAM type: NRG; PAM sequence: AGG
gttgggaacaggccaacaaa

SEQ ID NO: 16723 - DNA, 20 bp, Artificial Sequence
  Description of Artificial Sequence: Synthetic oligonucleotide
  Target: COL7A1; (+) strand; PAM type: NRG; PAM sequence: AAG
ggaacaggccaacaaaaggc

SEQ ID NO: 16724 - DNA, 20 bp, Artificial Sequence
  Description of Artificial Sequence: Synthetic oligonucleotide
  Target: COL7A1; (+) strand; PAM type: NRG; PAM sequence: GAG
aacaggccaacaaaaggcaa

SEQ ID NO: 16725 - DNA, 20 bp, Artificial Sequence
  Description of Artificial Sequence: Synthetic oligonucleotide
  Target: COL7A1; (+) strand; PAM type: NRG; PAM sequence: CAG
ggccaacaaaaggcaagaga

SEQ ID NO: 16726 - DNA, 20 bp, Artificial Sequence
  Description of Artificial Sequence: Synthetic oligonucleotide
  Target: COL7A1; (+) strand; PAM type: NRG; PAM sequence: AAG
caacaaaaggcaagagacag

SEQ ID NO: 16727 - DNA, 20 bp, Artificial Sequence
  Description of Artificial Sequence: Synthetic oligonucleotide
  Target: COL7A1; (+) strand; PAM type: NRG; PAM sequence: CAG
caaaaggcaagagacagaag

SEQ ID NO: 16728 - DNA, 20 bp, Artificial Sequence
  Description of Artificial Sequence: Synthetic oligonucleotide
  Target: COL7A1; (+) strand; PAM type: NRG; PAM sequence: AGG
aaaaggcaagagacagaagc

SEQ ID NO: 16729 - DNA, 20 bp, Artificial Sequence
  Description of Artificial Sequence: Synthetic oligonucleotide
  Target: COL7A1; (+) strand; PAM type: NRG; PAM sequence: CAG
ggcaagagacagaagcaggc

SEQ ID NO: 16730 - DNA, 20 bp, Artificial Sequence
  Description of Artificial Sequence: Synthetic oligonucleotide
  Target: COL7A1; (+) strand; PAM type: NRG; PAM sequence: CAG
agacagaagcaggccagaca

SEQ ID NO: 16731 - DNA, 20 bp, Artificial Sequence
  Description of Artificial Sequence: Synthetic oligonucleotide
  Target: COL7A1; (+) strand; PAM type: NRG; PAM sequence: CAG
aagcaggccagacacagaaa

SEQ ID NO: 16732 - DNA, 20 bp, Artificial Sequence
  Description of Artificial Sequence: Synthetic oligonucleotide
  Target: COL7A1; (+) strand; PAM type: NRG; PAM sequence: AGG
agcaggccagacacagaaac

SEQ ID NO: 16733 - DNA, 20 bp, Artificial Sequence
  Description of Artificial Sequence: Synthetic oligonucleotide
  Target: COL7A1; (+) strand; PAM type: NRG; PAM sequence: CAG
aggccagacacagaaacagg

SEQ ID NO: 16734 - DNA, 20 bp, Artificial Sequence
  Description of Artificial Sequence: Synthetic oligonucleotide
  Target: COL7A1; (+) strand; PAM type: NRG; PAM sequence: AGG
ggccagacacagaaacaggc

SEQ ID NO: 16735 - DNA, 20 bp, Artificial Sequence
  Description of Artificial Sequence: Synthetic oligonucleotide
  Target: COL7A1; (+) strand; PAM type: NRG; PAM sequence: TGG
cagacacagaaacaggcagg

SEQ ID NO: 16736 - DNA, 20 bp, Artificial Sequence
  Description of Artificial Sequence: Synthetic oligonucleotide
  Target: COL7A1; (+) strand; PAM type: NRG; PAM sequence: CAG
acagaaacaggcaggtggtg

SEQ ID NO: 16737 - DNA, 20 bp, Artificial Sequence
  Description of Artificial Sequence: Synthetic oligonucleotide
  Target: COL7A1; (+) strand; PAM type: NRG; PAM sequence: CAG
aaacaggcaggtggtgcaga

SEQ ID NO: 16738 - DNA, 20 bp, Artificial Sequence
  Description of Artificial Sequence: Synthetic oligonucleotide
  Target: COL7A1; (+) strand; PAM type: NRG; PAM sequence: GAG
acaggcaggtggtgcagaca

SEQ ID NO: 16739 - DNA, 20 bp, Artificial Sequence
  Description of Artificial Sequence: Synthetic oligonucleotide
  Target: COL7A1; (+) strand; PAM type: NRG; PAM sequence: CGG
gcaggtggtgcagacagaga

SEQ ID NO: 16740 - DNA, 20 bp, Artificial Sequence
  Description of Artificial Sequence: Synthetic oligonucleotide
  Target: COL7A1; (+) strand; PAM type: NRG; PAM sequence: GGG
caggtggtgcagacagagac

SEQ ID NO: 16741 - DNA, 20 bp, Artificial Sequence
  Description of Artificial Sequence: Synthetic oligonucleotide
  Target: COL7A1; (+) strand; PAM type: NRG; PAM sequence: AAG
gtggtgcagacagagacggg

SEQ ID NO: 16742 - DNA, 20 bp, Artificial Sequence
  Description of Artificial Sequence: Synthetic oligonucleotide
  Target: COL7A1; (+) strand; PAM type: NRG; PAM sequence: GAG
ggtgcagacagagacgggaa

SEQ ID NO: 16743 - DNA, 20 bp, Artificial Sequence
  Description of Artificial Sequence: Synthetic oligonucleotide
  Target: COL7A1; (+) strand; PAM type: NRG; PAM sequence: CAG
cagacagagacgggaagaga

SEQ ID NO: 16744 - DNA, 20 bp, Artificial Sequence
  Description of Artificial Sequence: Synthetic oligonucleotide
  Target: COL7A1; (+) strand; PAM type: NRG; PAM sequence: CGG
cactctgatgcccctcccac

SEQ ID NO: 16745 - DNA, 20 bp, Artificial Sequence
  Description of Artificial Sequence: Synthetic oligonucleotide
  Target: COL7A1; (+) strand; PAM type: NRG; PAM sequence: GGG
actctgatgcccctcccacc

SEQ ID NO: 16746 - DNA, 20 bp, Artificial Sequence
  Description of Artificial Sequence: Synthetic oligonucleotide
  Target: COL7A1; (+) strand; PAM type: NRG; PAM sequence: CAG
gatgcccctcccaccgggtc

SEQ ID NO: 16747 - DNA, 20 bp, Artificial Sequence
  Description of Artificial Sequence: Synthetic oligonucleotide
  Target: COL7A1; (+) strand; PAM type: NRG; PAM sequence: AGG
atgcccctcccaccgggtcc

SEQ ID NO: 16748 - DNA, 20 bp, Artificial Sequence
  Description of Artificial Sequence: Synthetic oligonucleotide
  Target: COL7A1; (+) strand; PAM type: NRG; PAM sequence: CAG
ccctcccaccgggtccaggt

SEQ ID NO: 16749 - DNA, 20 bp, Artificial Sequence
  Description of Artificial Sequence: Synthetic oligonucleotide
  Target: COL7A1; (+) strand; PAM type: NRG; PAM sequence: AGG
cctcccaccgggtccaggtc

SEQ ID NO: 16750 - DNA, 20 bp, Artificial Sequence
  Description of Artificial Sequence: Synthetic oligonucleotide
  Target: COL7A1; (+) strand; PAM type: NRG; PAM sequence: AAG
accgggtccaggtcaggccc

SEQ ID NO: 16751 - DNA, 20 bp, Artificial Sequence
  Description of Artificial Sequence: Synthetic oligonucleotide
  Target: COL7A1; (+) strand; PAM type: NRG; PAM sequence: AGG
ccgggtccaggtcaggccca

SEQ ID NO: 16752 - DNA, 20 bp, Artificial Sequence
  Description of Artificial Sequence: Synthetic oligonucleotide
  Target: COL7A1; (+) strand; PAM type: NRG; PAM sequence: GGG
cgggtccaggtcaggcccaa

SEQ ID NO: 16753 - DNA, 20 bp, Artificial Sequence
  Description of Artificial Sequence: Synthetic oligonucleotide
  Target: COL7A1; (+) strand; PAM type: NRG; PAM sequence: GGG
gggtccaggtcaggcccaag

SEQ ID NO: 16754 - DNA, 20 bp, Artificial Sequence
  Description of Artificial Sequence: Synthetic oligonucleotide
  Target: COL7A1; (+) strand; PAM type: NRG; PAM sequence: CAG
caggtcaggcccaaggggac

SEQ ID NO: 16755 - DNA, 20 bp, Artificial Sequence
  Description of Artificial Sequence: Synthetic oligonucleotide
  Target: COL7A1; (+) strand; PAM type: NRG; PAM sequence: CAG
ccatcatcccactccccaca

SEQ ID NO: 16756 - DNA, 20 bp, Artificial Sequence
  Description of Artificial Sequence: Synthetic oligonucleotide
  Target: COL7A1; (+) strand; PAM type: NRG; PAM sequence: AAG
atcccactccccacacagcc

SEQ ID NO: 16757 - DNA, 20 bp, Artificial Sequence
  Description of Artificial Sequence: Synthetic oligonucleotide
  Target: COL7A1; (+) strand; PAM type: NRG; PAM sequence: TGG
cactccccacacagccaagc

SEQ ID NO: 16758 - DNA, 20 bp, Artificial Sequence
  Description of Artificial Sequence: Synthetic oligonucleotide
  Target: COL7A1; (+) strand; PAM type: NRG; PAM sequence: GAG
cacagccaagctggacatct

SEQ ID NO: 16759 - DNA, 20 bp, Artificial Sequence
  Description of Artificial Sequence: Synthetic oligonucleotide
  Target: COL7A1; (+) strand; PAM type: NRG; PAM sequence: GAG
cagccaagctggacatctga

SEQ ID NO: 16760 - DNA, 20 bp, Artificial Sequence
  Description of Artificial Sequence: Synthetic oligonucleotide
  Target: COL7A1; (+) strand; PAM type: NRG; PAM sequence: TGG
ggacatctgagagcactgca

SEQ ID NO: 16761 - DNA, 20 bp, Artificial Sequence
  Description of Artificial Sequence: Synthetic oligonucleotide
  Target: COL7A1; (+) strand; PAM type: NRG; PAM sequence: TGG
gcctgtgtgtctccctccac

SEQ ID NO: 16762 - DNA, 20 bp, Artificial Sequence
  Description of Artificial Sequence: Synthetic oligonucleotide
  Target: COL7A1; (+) strand; PAM type: NRG; PAM sequence: GGG
cctgtgtgtctccctccact

SEQ ID NO: 16763 - DNA, 20 bp, Artificial Sequence
  Description of Artificial Sequence: Synthetic oligonucleotide
  Target: COL7A1; (+) strand; PAM type: NRG; PAM sequence: GGG
ctgtgtgtctccctccactg

SEQ ID NO: 16764 - DNA, 20 bp, Artificial Sequence
  Description of Artificial Sequence: Synthetic oligonucleotide
  Target: COL7A1; (+) strand; PAM type: NRG; PAM sequence: CAG
tggggacacatgtcatgtgt

SEQ ID NO: 16765 - DNA, 20 bp, Artificial Sequence
  Description of Artificial Sequence: Synthetic oligonucleotide
  Target: COL7A1; (+) strand; PAM type: NRG; PAM sequence: CAG
catgtcatgtgtcagtcctg

SEQ ID NO: 16766 - DNA, 20 bp, Artificial Sequence
  Description of Artificial Sequence: Synthetic oligonucleotide
  Target: COL7A1; (+) strand; PAM type: NRG; PAM sequence: AAG
ttcttgactgcttgccctgt

SEQ ID NO: 16767 - DNA, 20 bp, Artificial Sequence
  Description of Artificial Sequence: Synthetic oligonucleotide
  Target: COL7A1; (+) strand; PAM type: NRG; PAM sequence: TAG
actgcttgccctgtaagttc

SEQ ID NO: 16768 - DNA, 20 bp, Artificial Sequence
  Description of Artificial Sequence: Synthetic oligonucleotide
  Target: COL7A1; (+) strand; PAM type: NRG; PAM sequence: AGG
ctgcttgccctgtaagttct

SEQ ID NO: 16769 - DNA, 20 bp, Artificial Sequence
  Description of Artificial Sequence: Synthetic oligonucleotide
  Target: COL7A1; (+) strand; PAM type: NRG; PAM sequence: GGG
tgcttgccctgtaagttcta

SEQ ID NO: 16770 - DNA, 20 bp, Artificial Sequence
  Description of Artificial Sequence: Synthetic oligonucleotide
  Target: COL7A1; (+) strand; PAM type: NRG; PAM sequence: GGG
gcttgccctgtaagttctag

SEQ ID NO: 16771 - DNA, 20 bp, Artificial Sequence
  Description of Artificial Sequence: Synthetic oligonucleotide
  Target: COL7A1; (+) strand; PAM type: NRG; PAM sequence: TAG
ggggcctgcctgcccttgcc

SEQ ID NO: 16772 - DNA, 20 bp, Artificial Sequence
  Description of Artificial Sequence: Synthetic oligonucleotide
  Target: COL7A1; (+) strand; PAM type: NRG; PAM sequence: AGG
gggcctgcctgcccttgcct

SEQ ID NO: 16773 - DNA, 20 bp, Artificial Sequence
  Description of Artificial Sequence: Synthetic oligonucleotide
  Target: COL7A1; (+) strand; PAM type: NRG; PAM sequence: GGG
ggcctgcctgcccttgccta

SEQ ID NO: 16774 - DNA, 20 bp, Artificial Sequence
  Description of Artificial Sequence: Synthetic oligonucleotide
  Target: COL7A1; (+) strand; PAM type: NRG; PAM sequence: TGG
cctgcccttgcctagggtgc

SEQ ID NO: 16775 - DNA, 20 bp, Artificial Sequence
  Description of Artificial Sequence: Synthetic oligonucleotide
  Target: COL7A1; (+) strand; PAM type: NRG; PAM sequence: GGG
ctgcccttgcctagggtgct

SEQ ID NO: 16776 - DNA, 20 bp, Artificial Sequence
  Description of Artificial Sequence: Synthetic oligonucleotide
  Target: COL7A1; (+) strand; PAM type: NRG; PAM sequence: GGG
tgcccttgcctagggtgctg

SEQ ID NO: 16777 - DNA, 20 bp, Artificial Sequence
  Description of Artificial Sequence: Synthetic oligonucleotide
  Target: COL7A1; (+) strand; PAM type: NRG; PAM sequence: TGG
ccttgcctagggtgctgggg

SEQ ID NO: 16778 - DNA, 20 bp, Artificial Sequence
  Description of Artificial Sequence: Synthetic oligonucleotide
  Target: COL7A1; (+) strand; PAM type: NRG; PAM sequence: GAG
ttgcctagggtgctggggtg

SEQ ID NO: 16779 - DNA, 20 bp, Artificial Sequence
  Description of Artificial Sequence: Synthetic oligonucleotide
  Target: COL7A1; (+) strand; PAM type: NRG; PAM sequence: TGG
cctagggtgctggggtggag

SEQ ID NO: 16780 - DNA, 20 bp, Artificial Sequence
  Description of Artificial Sequence: Synthetic oligonucleotide
  Target: COL7A1; (+) strand; PAM type: NRG; PAM sequence: GGG
ctagggtgctggggtggagt

SEQ ID NO: 16781 - DNA, 20 bp, Artificial Sequence
  Description of Artificial Sequence: Synthetic oligonucleotide
  Target: COL7A1; (+) strand; PAM type: NRG; PAM sequence: GAG
agggtgctggggtggagtgg

SEQ ID NO: 16782 - DNA, 20 bp, Artificial Sequence
  Description of Artificial Sequence: Synthetic oligonucleotide
  Target: COL7A1; (+) strand; PAM type: NRG; PAM sequence: CGG
tggggtggagtgggagactg

SEQ ID NO: 16783 - DNA, 20 bp, Artificial Sequence
  Description of Artificial Sequence: Synthetic oligonucleotide
  Target: COL7A1; (+) strand; PAM type: NRG; PAM sequence: GGG
ggggtggagtgggagactgc

SEQ ID NO: 16784 - DNA, 20 bp, Artificial Sequence
  Description of Artificial Sequence: Synthetic oligonucleotide
  Target: COL7A1; (+) strand; PAM type: NRG; PAM sequence: TGG
tggagtgggagactgcgggc

SEQ ID NO: 16785 - DNA, 20 bp, Artificial Sequence
  Description of Artificial Sequence: Synthetic oligonucleotide
  Target: COL7A1; (+) strand; PAM type: NRG; PAM sequence: GGG
ggagtgggagactgcgggct

SEQ ID NO: 16786 - DNA, 20 bp, Artificial Sequence
  Description of Artificial Sequence: Synthetic oligonucleotide
  Target: COL7A1; (+) strand; PAM type: NRG; PAM sequence: CAG
gggctgggcaccactcacca

SEQ ID NO: 16787 - DNA, 20 bp, Artificial Sequence
  Description of Artificial Sequence: Synthetic oligonucleotide
  Target: COL7A1; (+) strand; PAM type: NRG; PAM sequence: TGG
cacagtgctgactcatctct

SEQ ID NO: 16788 - DNA, 20 bp, Artificial Sequence
  Description of Artificial Sequence: Synthetic oligonucleotide
  Target: COL7A1; (+) strand; PAM type: NRG; PAM sequence: AAG
gactcatctcttggcgcaca

SEQ ID NO: 16789 - DNA, 20 bp, Artificial Sequence
  Description of Artificial Sequence: Synthetic oligonucleotide
  Target: COL7A1; (+) strand; PAM type: NRG; PAM sequence: CGG
tctcttggcgcacaaagccc

SEQ ID NO: 16790 - DNA, 20 bp, Artificial Sequence
  Description of Artificial Sequence: Synthetic oligonucleotide
  Target: COL7A1; (+) strand; PAM type: NRG; PAM sequence: TGG
agccccggatgtcatcctcc

SEQ ID NO: 16791 - DNA, 20 bp, Artificial Sequence
  Description of Artificial Sequence: Synthetic oligonucleotide
  Target: COL7A1; (+) strand; PAM type: NRG; PAM sequence: GGG
gccccggatgtcatcctcct

SEQ ID NO: 16792 - DNA, 20 bp, Artificial Sequence
  Description of Artificial Sequence: Synthetic oligonucleotide
  Target: COL7A1; (+) strand; PAM type: NRG; PAM sequence: GAG
cccggatgtcatcctcctgg

SEQ ID NO: 16793 - DNA, 20 bp, Artificial Sequence
  Description of Artificial Sequence: Synthetic oligonucleotide
  Target: COL7A1; (+) strand; PAM type: NRG; PAM sequence: CAG
ggatgtcatcctcctgggag

SEQ ID NO: 16794 - DNA, 20 bp, Artificial Sequence
  Description of Artificial Sequence: Synthetic oligonucleotide
  Target: COL7A1; (+) strand; PAM type: NRG; PAM sequence: AAG
tgtcatcctcctgggagcag

SEQ ID NO: 16795 - DNA, 20 bp, Artificial Sequence
  Description of Artificial Sequence: Synthetic oligonucleotide
  Target: COL7A1; (+) strand; PAM type: NRG; PAM sequence: CAG
ctcctgggagcagaagacca

SEQ ID NO: 16796 - DNA, 20 bp, Artificial Sequence
  Description of Artificial Sequence: Synthetic oligonucleotide
  Target: COL7A1; (+) strand; PAM type: NRG; PAM sequence: AGG
tcctgggagcagaagaccac

SEQ ID NO: 16797 - DNA, 20 bp, Artificial Sequence
  Description of Artificial Sequence: Synthetic oligonucleotide
  Target: COL7A1; (+) strand; PAM type: NRG; PAM sequence: GGG
cctgggagcagaagaccaca

SEQ ID NO: 16798 - DNA, 20 bp, Artificial Sequence
  Description of Artificial Sequence: Synthetic oligonucleotide
  Target: COL7A1; (+) strand; PAM type: NRG; PAM sequence: AAG
agaagaccacagggaccata

SEQ ID NO: 16799 - DNA, 20 bp, Artificial Sequence
  Description of Artificial Sequence: Synthetic oligonucleotide
  Target: COL7A1; (+) strand; PAM type: NRG; PAM sequence: TGG
cagggaccataaagaaccca

SEQ ID NO: 16800 - DNA, 20 bp, Artificial Sequence
  Description of Artificial Sequence: Synthetic oligonucleotide
  Target: COL7A1; (+) strand; PAM type: NRG; PAM sequence: CAG
cataaagaacccatggccca

SEQ ID NO: 16801 - DNA, 20 bp, Artificial Sequence
  Description of Artificial Sequence: Synthetic oligonucleotide
  Target: COL7A1; (+) strand; PAM type: NRG; PAM sequence: AGG
ataaagaacccatggcccac

SEQ ID NO: 16802 - DNA, 20 bp, Artificial Sequence
  Description of Artificial Sequence: Synthetic oligonucleotide
  Target: COL7A1; (+) strand; PAM type: NRG; PAM sequence: AAG
aagaacccatggcccacagg

SEQ ID NO: 16803 - DNA, 20 bp, Artificial Sequence
  Description of Artificial Sequence: Synthetic oligonucleotide
  Target: COL7A1; (+) strand; PAM type: NRG; PAM sequence: AGG
agaacccatggcccacagga

SEQ ID NO: 16804 - DNA, 20 bp, Artificial Sequence
  Description of Artificial Sequence: Synthetic oligonucleotide
  Target: COL7A1; (+) strand; PAM type: NRG; PAM sequence: TAG
catggcccacaggaaggaca

SEQ ID NO: 16805 - DNA, 20 bp, Artificial Sequence
  Description of Artificial Sequence: Synthetic oligonucleotide
  Target: COL7A1; (+) strand; PAM type: NRG; PAM sequence: AGG
atggcccacaggaaggacat

SEQ ID NO: 16806 - DNA, 20 bp, Artificial Sequence
  Description of Artificial Sequence: Synthetic oligonucleotide
  Target: COL7A1; (+) strand; PAM type: NRG; PAM sequence: GGG
tggcccacaggaaggacata

SEQ ID NO: 16807 - DNA, 20 bp, Artificial Sequence
  Description of Artificial Sequence: Synthetic oligonucleotide
  Target: COL7A1; (+) strand; PAM type: NRG; PAM sequence: CAG
aggacatagggcacataata

SEQ ID NO: 16808 - DNA, 20 bp, Artificial Sequence
  Description of Artificial Sequence: Synthetic oligonucleotide
  Target: COL7A1; (+) strand; PAM type: NRG; PAM sequence: AGG
ggacatagggcacataatac

SEQ ID NO: 16809 - DNA, 20 bp, Artificial Sequence
  Description of Artificial Sequence: Synthetic oligonucleotide
  Target: COL7A1; (+) strand; PAM type: NRG; PAM sequence: GGG
gacatagggcacataataca

SEQ ID NO: 16810 - DNA, 20 bp, Artificial Sequence
  Description of Artificial Sequence: Synthetic oligonucleotide
  Target: COL7A1; (+) strand; PAM type: NRG; PAM sequence: TGG
ggcacataatacagggacta

SEQ ID NO: 16811 - DNA, 20 bp, Artificial Sequence
  Description of Artificial Sequence: Synthetic oligonucleotide
  Target: COL7A1; (+) strand; PAM type: NRG; PAM sequence: GAG
cataatacagggactatggt

SEQ ID NO: 16812 - DNA, 20 bp, Artificial Sequence
  Description of Artificial Sequence: Synthetic oligonucleotide
  Target: COL7A1; (+) strand; PAM type: NRG; PAM sequence: TGG
gggactatggtgagactgca

SEQ ID NO: 16813 - DNA, 20 bp, Artificial Sequence
  Description of Artificial Sequence: Synthetic oligonucleotide
  Target: COL7A1; (+) strand; PAM type: NRG; PAM sequence: GAG
gactatggtgagactgcatg

SEQ ID NO: 16814 - DNA, 20 bp, Artificial Sequence
  Description of Artificial Sequence: Synthetic oligonucleotide
  Target: COL7A1; (+) strand; PAM type: NRG; PAM sequence: CAG
atggtgagactgcatggagc

SEQ ID NO: 16815 - DNA, 20 bp, Artificial Sequence
  Description of Artificial Sequence: Synthetic oligonucleotide
  Target: COL7A1; (+) strand; PAM type: NRG; PAM sequence: AGG
tggtgagactgcatggagcc

SEQ ID NO: 16816 - DNA, 20 bp, Artificial Sequence
  Description of Artificial Sequence: Synthetic oligonucleotide
  Target: COL7A1; (+) strand; PAM type: NRG; PAM sequence: GGG
ggtgagactgcatggagcca

SEQ ID NO: 16817 - DNA, 20 bp, Artificial Sequence
  Description of Artificial Sequence: Synthetic oligonucleotide
  Target: COL7A1; (+) strand; PAM type: NRG; PAM sequence: CAG
gactgcatggagccagggcc

SEQ ID NO: 16818 - DNA, 20 bp, Artificial Sequence
  Description of Artificial Sequence: Synthetic oligonucleotide
  Target: COL7A1; (+) strand; PAM type: NRG; PAM sequence: AGG
actgcatggagccagggccc

SEQ ID NO: 16819 - DNA, 20 bp, Artificial Sequence
  Description of Artificial Sequence: Synthetic oligonucleotide
  Target: COL7A1; (+) strand; PAM type: NRG; PAM sequence: GGG
ctgcatggagccagggccca

SEQ ID NO: 16820 - DNA, 20 bp, Artificial Sequence
  Description of Artificial Sequence: Synthetic oligonucleotide
  Target: COL7A1; (+) strand; PAM type: NRG; PAM sequence: GGG
tgcatggagccagggcccag

SEQ ID NO: 16821 - DNA, 20 bp, Artificial Sequence
  Description of Artificial Sequence: Synthetic oligonucleotide
  Target: COL7A1; (+) strand; PAM type: NRG; PAM sequence: CAG
tggagccagggcccaggggt

SEQ ID NO: 16822 - DNA, 20 bp, Artificial Sequence
  Description of Artificial Sequence: Synthetic oligonucleotide
  Target: COL7A1; (+) strand; PAM type: NRG; PAM sequence: AGG
ggagccagggcccaggggtc

SEQ ID NO: 16823 - DNA, 20 bp, Artificial Sequence
  Description of Artificial Sequence: Synthetic oligonucleotide
  Target: COL7A1; (+) strand; PAM type: NRG; PAM sequence: GGG
gagccagggcccaggggtca

SEQ ID NO: 16824 - DNA, 20 bp, Artificial Sequence
  Description of Artificial Sequence: Synthetic oligonucleotide
  Target: COL7A1; (+) strand; PAM type: NRG; PAM sequence: TGG
gggcccaggggtcagggtgc

SEQ ID NO: 16825 - DNA, 20 bp, Artificial Sequence
  Description of Artificial Sequence: Synthetic oligonucleotide
  Target: COL7A1; (+) strand; PAM type: NRG; PAM sequence: GGG
ggcccaggggtcagggtgct

SEQ ID NO: 16826 - DNA, 20 bp, Artificial Sequence
  Description of Artificial Sequence: Synthetic oligonucleotide
  Target: COL7A1; (+) strand; PAM type: NRG; PAM sequence: GAG
caggggtcagggtgctgggt

SEQ ID NO: 16827 - DNA, 20 bp, Artificial Sequence
  Description of Artificial Sequence: Synthetic oligonucleotide
  Target: COL7A1; (+) strand; PAM type: NRG; PAM sequence: AGG
aggggtcagggtgctgggtg

SEQ ID NO: 16828 - DNA, 20 bp, Artificial Sequence
  Description of Artificial Sequence: Synthetic oligonucleotide
  Target: COL7A1; (+) strand; PAM type: NRG; PAM sequence: GGG
ggggtcagggtgctgggtga

SEQ ID NO: 16829 - DNA, 20 bp, Artificial Sequence
  Description of Artificial Sequence: Synthetic oligonucleotide
  Target: COL7A1; (+) strand; PAM type: NRG; PAM sequence: GAG
ggtcagggtgctgggtgagg

SEQ ID NO: 16830 - DNA, 20 bp, Artificial Sequence
  Description of Artificial Sequence: Synthetic oligonucleotide
  Target: COL7A1; (+) strand; PAM type: NRG; PAM sequence: AGG
gtcagggtgctgggtgaggg

SEQ ID NO: 16831 - DNA, 20 bp, Artificial Sequence
  Description of Artificial Sequence: Synthetic oligonucleotide
  Target: COL7A1; (+) strand; PAM type: NRG; PAM sequence: TAG
agggtgctgggtgagggagg

SEQ ID NO: 16832 - DNA, 20 bp, Artificial Sequence
  Description of Artificial Sequence: Synthetic oligonucleotide
  Target: COL7A1; (+) strand; PAM type: NRG; PAM sequence: AGG
gggtgctgggtgagggaggt

SEQ ID NO: 16833 - DNA, 20 bp, Artificial Sequence
  Description of Artificial Sequence: Synthetic oligonucleotide
  Target: COL7A1; (+) strand; PAM type: NRG; PAM sequence: GGG
ggtgctgggtgagggaggta

SEQ ID NO: 16834 - DNA, 20 bp, Artificial Sequence
  Description of Artificial Sequence: Synthetic oligonucleotide
  Target: COL7A1; (+) strand; PAM type: NRG; PAM sequence: CAG
gggtgagggaggtagggccc

SEQ ID NO: 16835 - DNA, 20 bp, Artificial Sequence
  Description of Artificial Sequence: Synthetic oligonucleotide
  Target: COL7A1; (+) strand; PAM type: NRG; PAM sequence: CAG
aggtagggccccagcccacc

SEQ ID NO: 16836 - DNA, 20 bp, Artificial Sequence
  Description of Artificial Sequence: Synthetic oligonucleotide
  Target: COL7A1; (+) strand; PAM type: NRG; PAM sequence: AGG
ggtagggccccagcccaccc

SEQ ID NO: 16837 - DNA, 20 bp, Artificial Sequence
  Description of Artificial Sequence: Synthetic oligonucleotide
  Target: COL7A1; (+) strand; PAM type: NRG; PAM sequence: CAG
ccagcccacccaggcccacc

SEQ ID NO: 16838 - DNA, 20 bp, Artificial Sequence
  Description of Artificial Sequence: Synthetic oligonucleotide
  Target: COL7A1; (+) strand; PAM type: NRG; PAM sequence: AGG
cagcccacccaggcccaccc

SEQ ID NO: 16839 - DNA, 20 bp, Artificial Sequence
  Description of Artificial Sequence: Synthetic oligonucleotide
  Target: COL7A1; (+) strand; PAM type: NRG; PAM sequence: CAG
caggcccacccaggccctcc

SEQ ID NO: 16840 - DNA, 20 bp, Artificial Sequence
  Description of Artificial Sequence: Synthetic oligonucleotide
  Target: COL7A1; (+) strand; PAM type: NRG; PAM sequence: AGG
aggcccacccaggccctccc

SEQ ID NO: 16841 - DNA, 20 bp, Artificial Sequence
  Description of Artificial Sequence: Synthetic oligonucleotide
  Target: COL7A1; (+) strand; PAM type: NRG; PAM sequence: CAG
caggccctcccaggcccatc

SEQ ID NO: 16842 - DNA, 20 bp, Artificial Sequence
  Description of Artificial Sequence: Synthetic oligonucleotide
  Target: COL7A1; (+) strand; PAM type: NRG; PAM sequence: AGG
aggccctcccaggcccatcc

SEQ ID NO: 16843 - DNA, 20 bp, Artificial Sequence
  Description of Artificial Sequence: Synthetic oligonucleotide
  Target: COL7A1; (+) strand; PAM type: NRG; PAM sequence: CAG
tccaggcccacactcaccgt

SEQ ID NO: 16844 - DNA, 20 bp, Artificial Sequence
  Description of Artificial Sequence: Synthetic oligonucleotide
  Target: COL7A1; (+) strand; PAM type: NRG; PAM sequence: CAG
gcccacactcaccgtcagtg

SEQ ID NO: 16845 - DNA, 20 bp, Artificial Sequence
  Description of Artificial Sequence: Synthetic oligonucleotide
  Target: COL7A1; (+) strand; PAM type: NRG; PAM sequence: GAG
agcttctcccttctcgcctc

SEQ ID NO: 16846 - DNA, 20 bp, Artificial Sequence
  Description of Artificial Sequence: Synthetic oligonucleotide
  Target: COL7A1; (+) strand; PAM type: NRG; PAM sequence: AGG
gcttctcccttctcgcctcg

SEQ ID NO: 16847 - DNA, 20 bp, Artificial Sequence
  Description of Artificial Sequence: Synthetic oligonucleotide
  Target: COL7A1; (+) strand; PAM type: NRG; PAM sequence: CGG
tcccttctcgcctcgaggac

SEQ ID NO: 16848 - DNA, 20 bp, Artificial Sequence
  Description of Artificial Sequence: Synthetic oligonucleotide
  Target: COL7A1; (+) strand; PAM type: NRG; PAM sequence: CAG
cttctcgcctcgaggaccgg

SEQ ID NO: 16849 - DNA, 20 bp, Artificial Sequence
  Description of Artificial Sequence: Synthetic oligonucleotide
  Target: COL7A1; (+) strand; PAM type: NRG; PAM sequence: AGG
ttctcgcctcgaggaccggc

SEQ ID NO: 16850 - DNA, 20 bp, Artificial Sequence
  Description of Artificial Sequence: Synthetic oligonucleotide
  Target: COL7A1; (+) strand; PAM type: NRG; PAM sequence: TGG
cctcgaggaccggcaggccc

SEQ ID NO: 16851 - DNA, 20 bp, Artificial Sequence
  Description of Artificial Sequence: Synthetic oligonucleotide
  Target: COL7A1; (+) strand; PAM type: NRG; PAM sequence: CAG
ctggccgcccctatgtgcaa

SEQ ID NO: 16852 - DNA, 20 bp, Artificial Sequence
  Description of Artificial Sequence: Synthetic oligonucleotide
  Target: COL7A1; (+) strand; PAM type: NRG; PAM sequence: TGG
ccgcccctatgtgcaacaga

SEQ ID NO: 16853 - DNA, 20 bp, Artificial Sequence
  Description of Artificial Sequence: Synthetic oligonucleotide
  Target: COL7A1; (+) strand; PAM type: NRG; PAM sequence: GGG
cgcccctatgtgcaacagat

SEQ ID NO: 16854 - DNA, 20 bp, Artificial Sequence
  Description of Artificial Sequence: Synthetic oligonucleotide
  Target: COL7A1; (+) strand; PAM type: NRG; PAM sequence: CAG
ctatgtgcaacagatgggac

SEQ ID NO: 16855 - DNA, 20 bp, Artificial Sequence
  Description of Artificial Sequence: Synthetic oligonucleotide
  Target: COL7A1; (+) strand; PAM type: NRG; PAM sequence: AGG
tatgtgcaacagatgggacc

SEQ ID NO: 16856 - DNA, 20 bp, Artificial Sequence
  Description of Artificial Sequence: Synthetic oligonucleotide
  Target: COL7A1; (+) strand; PAM type: NRG; PAM sequence: CAG
caggctgtgacctctgacct

SEQ ID NO: 16857 - DNA, 20 bp, Artificial Sequence
  Description of Artificial Sequence: Synthetic oligonucleotide
  Target: COL7A1; (+) strand; PAM type: NRG; PAM sequence: AGG
aggctgtgacctctgacctc

SEQ ID NO: 16858 - DNA, 20 bp, Artificial Sequence
  Description of Artificial Sequence: Synthetic oligonucleotide
  Target: COL7A1; (+) strand; PAM type: NRG; PAM sequence: GGG
ggctgtgacctctgacctca

SEQ ID NO: 16859 - DNA, 20 bp, Artificial Sequence
  Description of Artificial Sequence: Synthetic oligonucleotide
  Target: COL7A1; (+) strand; PAM type: NRG; PAM sequence: CAG
acctctgacctcagggacaa

SEQ ID NO: 16860 - DNA, 20 bp, Artificial Sequence
  Description of Artificial Sequence: Synthetic oligonucleotide
  Target: COL7A1; (+) strand; PAM type: NRG; PAM sequence: AAG
tctgacctcagggacaacag

SEQ ID NO: 16861 - DNA, 20 bp, Artificial Sequence
  Description of Artificial Sequence: Synthetic oligonucleotide
  Target: COL7A1; (+) strand; PAM type: NRG; PAM sequence: AAG
gtcaccccgatctctgaccc

SEQ ID NO: 16862 - DNA, 20 bp, Artificial Sequence
  Description of Artificial Sequence: Synthetic oligonucleotide
  Target: COL7A1; (+) strand; PAM type: NRG; PAM sequence: TGG
ccgatctctgacccaagcct

SEQ ID NO: 16863 - DNA, 20 bp, Artificial Sequence
  Description of Artificial Sequence: Synthetic oligonucleotide
  Target: COL7A1; (+) strand; PAM type: NRG; PAM sequence: CAG
cacctgctcccctctctcgc

SEQ ID NO: 16864 - DNA, 20 bp, Artificial Sequence
  Description of Artificial Sequence: Synthetic oligonucleotide
  Target: COL7A1; (+) strand; PAM type: NRG; PAM sequence: AGG
acctgctcccctctctcgcc

SEQ ID NO: 16865 - DNA, 20 bp, Artificial Sequence
  Description of Artificial Sequence: Synthetic oligonucleotide
  Target: COL7A1; (+) strand; PAM type: NRG; PAM sequence: GAG
ctgctcccctctctcgccag

SEQ ID NO: 16866 - DNA, 20 bp, Artificial Sequence
  Description of Artificial Sequence: Synthetic oligonucleotide
  Target: COL7A1; (+) strand; PAM type: NRG; PAM sequence: CAG
ccctctctcgccaggagctc

SEQ ID NO: 16867 - DNA, 20 bp, Artificial Sequence
  Description of Artificial Sequence: Synthetic oligonucleotide
  Target: COL7A1; (+) strand; PAM type: NRG; PAM sequence: AGG
cctctctcgccaggagctcc

SEQ ID NO: 16868 - DNA, 20 bp, Artificial Sequence
  Description of Artificial Sequence: Synthetic oligonucleotide
  Target: COL7A1; (+) strand; PAM type: NRG; PAM sequence: GGG
ctctctcgccaggagctcca

SEQ ID NO: 16869 - DNA, 20 bp, Artificial Sequence
  Description of Artificial Sequence: Synthetic oligonucleotide
  Target: COL7A1; (+) strand; PAM type: NRG; PAM sequence: CAG
gccaggagctccagggaccc

SEQ ID NO: 16870 - DNA, 20 bp, Artificial Sequence
  Description of Artificial Sequence: Synthetic oligonucleotide
  Target: COL7A1; (+) strand; PAM type: NRG; PAM sequence: AGG
ccaggagctccagggacccc

SEQ ID NO: 16871 - DNA, 20 bp, Artificial Sequence
  Description of Artificial Sequence: Synthetic oligonucleotide
  Target: COL7A1; (+) strand; PAM type: NRG; PAM sequence: GAG
aggagctccagggaccccag

SEQ ID NO: 16872 - DNA, 20 bp, Artificial Sequence
  Description of Artificial Sequence: Synthetic oligonucleotide
  Target: COL7A1; (+) strand; PAM type: NRG; PAM sequence: CGG
agcccccaccactctctctc

SEQ ID NO: 16873 - DNA, 20 bp, Artificial Sequence
  Description of Artificial Sequence: Synthetic oligonucleotide
  Target: COL7A1; (+) strand; PAM type: NRG; PAM sequence: GGG
gcccccaccactctctctcc

SEQ ID NO: 16874 - DNA, 20 bp, Artificial Sequence
  Description of Artificial Sequence: Synthetic oligonucleotide
  Target: COL7A1; (+) strand; PAM type: NRG; PAM sequence: GGG
cccccaccactctctctccg

SEQ ID NO: 16875 - DNA, 20 bp, Artificial Sequence
  Description of Artificial Sequence: Synthetic oligonucleotide
  Target: COL7A1; (+) strand; PAM type: NRG; PAM sequence: GGG
ccccaccactctctctccgg

SEQ ID NO: 16876 - DNA, 20 bp, Artificial Sequence
  Description of Artificial Sequence: Synthetic oligonucleotide
  Target: COL7A1; (+) strand; PAM type: NRG; PAM sequence: GGG
cccaccactctctctccggg

SEQ ID NO: 16877 - DNA, 20 bp, Artificial Sequence
  Description of Artificial Sequence: Synthetic oligonucleotide
  Target: COL7A1; (+) strand; PAM type: NRG; PAM sequence: CAG
ggggacctcgctcaccctgt

SEQ ID NO: 16878 - DNA, 20 bp, Artificial Sequence
  Description of Artificial Sequence: Synthetic oligonucleotide
  Target: COL7A1; (+) strand; PAM type: NRG; PAM sequence: CAG
ctcgctcaccctgtcagaca

SEQ ID NO: 16879 - DNA, 20 bp, Artificial Sequence
  Description of Artificial Sequence: Synthetic oligonucleotide
  Target: COL7A1; (+) strand; PAM type: NRG; PAM sequence: AGG
tcgctcaccctgtcagacac

SEQ ID NO: 16880 - DNA, 20 bp, Artificial Sequence
  Description of Artificial Sequence: Synthetic oligonucleotide
  Target: COL7A1; (+) strand; PAM type: NRG; PAM sequence: GGG
cgctcaccctgtcagacaca

SEQ ID NO: 16881 - DNA, 20 bp, Artificial Sequence
  Description of Artificial Sequence: Synthetic oligonucleotide
  Target: COL7A1; (+) strand; PAM type: NRG; PAM sequence: AAG
ccctgtcagacacagggacc

SEQ ID NO: 16882 - DNA, 20 bp, Artificial Sequence
  Description of Artificial Sequence: Synthetic oligonucleotide
  Target: COL7A1; (+) strand; PAM type: NRG; PAM sequence: GAG
gtcagacacagggaccaagt

SEQ ID NO: 16883 - DNA, 20 bp, Artificial Sequence
  Description of Artificial Sequence: Synthetic oligonucleotide
  Target: COL7A1; (+) strand; PAM type: NRG; PAM sequence: CAG
agacacagggaccaagtgag

SEQ ID NO: 16884 - DNA, 20 bp, Artificial Sequence
  Description of Artificial Sequence: Synthetic oligonucleotide
  Target: COL7A1; (+) strand; PAM type: NRG; PAM sequence: AGG
gacacagggaccaagtgagc

SEQ ID NO: 16885 - DNA, 20 bp, Artificial Sequence
  Description of Artificial Sequence: Synthetic oligonucleotide
  Target: COL7A1; (+) strand; PAM type: NRG; PAM sequence: GGG
acacagggaccaagtgagca

SEQ ID NO: 16886 - DNA, 20 bp, Artificial Sequence
  Description of Artificial Sequence: Synthetic oligonucleotide
  Target: COL7A1; (+) strand; PAM type: NRG; PAM sequence: CAG
agggaccaagtgagcagggt

SEQ ID NO: 16887 - DNA, 20 bp, Artificial Sequence
  Description of Artificial Sequence: Synthetic oligonucleotide
  Target: COL7A1; (+) strand; PAM type: NRG; PAM sequence: GAG
ggaccaagtgagcagggtca

SEQ ID NO: 16888 - DNA, 20 bp, Artificial Sequence
  Description of Artificial Sequence: Synthetic oligonucleotide
  Target: COL7A1; (+) strand; PAM type: NRG; PAM sequence: AGG
gaccaagtgagcagggtcag

SEQ ID NO: 16889 - DNA, 20 bp, Artificial Sequence
  Description of Artificial Sequence: Synthetic oligonucleotide
  Target: COL7A1; (+) strand; PAM type: NRG; PAM sequence: CAG
caagtgagcagggtcagagg

SEQ ID NO: 16890 - DNA, 20 bp, Artificial Sequence
  Description of Artificial Sequence: Synthetic oligonucleotide
  Target: COL7A1; (+) strand; PAM type: NRG; PAM sequence: TGG
gtgagcagggtcagaggcag

SEQ ID NO: 16891 - DNA, 20 bp, Artificial Sequence
  Description of Artificial Sequence: Synthetic oligonucleotide
  Target: COL7A1; (+) strand; PAM type: NRG; PAM sequence: GGG
tgagcagggtcagaggcagt

SEQ ID NO: 16892 - DNA, 20 bp, Artificial Sequence
  Description of Artificial Sequence: Synthetic oligonucleotide
  Target: COL7A1; (+) strand; PAM type: NRG; PAM sequence: GGG
gagcagggtcagaggcagtg

SEQ ID NO: 16893 - DNA, 20 bp, Artificial Sequence
  Description of Artificial Sequence: Synthetic oligonucleotide
  Target: COL7A1; (+) strand; PAM type: NRG; PAM sequence: CAG
gggtcagaggcagtggggat

SEQ ID NO: 16894 - DNA, 20 bp, Artificial Sequence
  Description of Artificial Sequence: Synthetic oligonucleotide
  Target: COL7A1; (+) strand; PAM type: NRG; PAM sequence: GAG
gtcagaggcagtggggatca

SEQ ID NO: 16895 - DNA, 20 bp, Artificial Sequence
  Description of Artificial Sequence: Synthetic oligonucleotide
  Target: COL7A1; (+) strand; PAM type: NRG; PAM sequence: CAG
gaggcagtggggatcagagt

SEQ ID NO: 16896 - DNA, 20 bp, Artificial Sequence
  Description of Artificial Sequence: Synthetic oligonucleotide
  Target: COL7A1; (+) strand; PAM type: NRG; PAM sequence: AGG
aggcagtggggatcagagtc

SEQ ID NO: 16897 - DNA, 20 bp, Artificial Sequence
  Description of Artificial Sequence: Synthetic oligonucleotide
  Target: COL7A1; (+) strand; PAM type: NRG; PAM sequence: CAG
cagtggggatcagagtcagg

SEQ ID NO: 16898 - DNA, 20 bp, Artificial Sequence
  Description of Artificial Sequence: Synthetic oligonucleotide
  Target: COL7A1; (+) strand; PAM type: NRG; PAM sequence: AGG
agtggggatcagagtcaggc

SEQ ID NO: 16899 - DNA, 20 bp, Artificial Sequence
  Description of Artificial Sequence: Synthetic oligonucleotide
  Target: COL7A1; (+) strand; PAM type: NRG; PAM sequence: TGG
gggatcagagtcaggcaggt

SEQ ID NO: 16900 - DNA, 20 bp, Artificial Sequence
  Description of Artificial Sequence: Synthetic oligonucleotide
  Target: COL7A1; (+) strand; PAM type: NRG; PAM sequence: GGG
ggatcagagtcaggcaggtt

SEQ ID NO: 16901 - DNA, 20 bp, Artificial Sequence
  Description of Artificial Sequence: Synthetic oligonucleotide
  Target: COL7A1; (+) strand; PAM type: NRG; PAM sequence: GGG
gatcagagtcaggcaggttg

SEQ ID NO: 16902 - DNA, 20 bp, Artificial Sequence
  Description of Artificial Sequence: Synthetic oligonucleotide
  Target: COL7A1; (+) strand; PAM type: NRG; PAM sequence: GGG
atcagagtcaggcaggttgg

SEQ ID NO: 16903 - DNA, 20 bp, Artificial Sequence
  Description of Artificial Sequence: Synthetic oligonucleotide
  Target: COL7A1; (+) strand; PAM type: NRG; PAM sequence: CAG
gtcaggcaggttgggggcca

SEQ ID NO: 16904 - DNA, 20 bp, Artificial Sequence
  Description of Artificial Sequence: Synthetic oligonucleotide
  Target: COL7A1; (+) strand; PAM type: NRG; PAM sequence: CAG
caggttgggggccacagctt

SEQ ID NO: 16905 - DNA, 20 bp, Artificial Sequence
  Description of Artificial Sequence: Synthetic oligonucleotide
  Target: COL7A1; (+) strand; PAM type: NRG; PAM sequence: GAG
ggttgggggccacagcttca

SEQ ID NO: 16906 - DNA, 20 bp, Artificial Sequence
  Description of Artificial Sequence: Synthetic oligonucleotide
  Target: COL7A1; (+) strand; PAM type: NRG; PAM sequence: AGG
gttgggggccacagcttcag

SEQ ID NO: 16907 - DNA, 20 bp, Artificial Sequence
  Description of Artificial Sequence: Synthetic oligonucleotide
  Target: COL7A1; (+) strand; PAM type: NRG; PAM sequence: TGG
ggggccacagcttcagaggt

SEQ ID NO: 16908 - DNA, 20 bp, Artificial Sequence
  Description of Artificial Sequence: Synthetic oligonucleotide
  Target: COL7A1; (+) strand; PAM type: NRG; PAM sequence: GGG
gggccacagcttcagaggtt

SEQ ID NO: 16909 - DNA, 20 bp, Artificial Sequence
  Description of Artificial Sequence: Synthetic oligonucleotide
  Target: COL7A1; (+) strand; PAM type: NRG; PAM sequence: GGG
ggccacagcttcagaggttg

SEQ ID NO: 16910 - DNA, 20 bp, Artificial Sequence
  Description of Artificial Sequence: Synthetic oligonucleotide
  Target: COL7A1; (+) strand; PAM type: NRG; PAM sequence: CAG
cacagcttcagaggttgggg

SEQ ID NO: 16911 - DNA, 20 bp, Artificial Sequence
  Description of Artificial Sequence: Synthetic oligonucleotide
  Target: COL7A1; (+) strand; PAM type: NRG; PAM sequence: AGG
acagcttcagaggttggggc

SEQ ID NO: 16912 - DNA, 20 bp, Artificial Sequence
  Description of Artificial Sequence: Synthetic oligonucleotide
  Target: COL7A1; (+) strand; PAM type: NRG; PAM sequence: CAG
gcttcagaggttggggcagg

SEQ ID NO: 16913 - DNA, 20 bp, Artificial Sequence
  Description of Artificial Sequence: Synthetic oligonucleotide
  Target: COL7A1; (+) strand; PAM type: NRG; PAM sequence: AGG
cttcagaggttggggcaggc

SEQ ID NO: 16914 - DNA, 20 bp, Artificial Sequence
  Description of Artificial Sequence: Synthetic oligonucleotide
  Target: COL7A1; (+) strand; PAM type: NRG; PAM sequence: TGG
agaggttggggcaggcaggc

SEQ ID NO: 16915 - DNA, 20 bp, Artificial Sequence
  Description of Artificial Sequence: Synthetic oligonucleotide
  Target: COL7A1; (+) strand; PAM type: NRG; PAM sequence: AAG
ggttggggcaggcaggctgg

SEQ ID NO: 16916 - DNA, 20 bp, Artificial Sequence
  Description of Artificial Sequence: Synthetic oligonucleotide
  Target: COL7A1; (+) strand; PAM type: NRG; PAM sequence: TGG
ggggcaggcaggctggaaga

SEQ ID NO: 16917 - DNA, 20 bp, Artificial Sequence
  Description of Artificial Sequence: Synthetic oligonucleotide
  Target: COL7A1; (+) strand; PAM type: NRG; PAM sequence: GAG
gcaggctggaagatggttat

SEQ ID NO: 16918 - DNA, 20 bp, Artificial Sequence
  Description of Artificial Sequence: Synthetic oligonucleotide
  Target: COL7A1; (+) strand; PAM type: NRG; PAM sequence: AGG
caggctggaagatggttatg

SEQ ID NO: 16919 - DNA, 20 bp, Artificial Sequence
  Description of Artificial Sequence: Synthetic oligonucleotide
  Target: COL7A1; (+) strand; PAM type: NRG; PAM sequence: TGG
ctggaagatggttatgaggt

SEQ ID NO: 16920 - DNA, 20 bp, Artificial Sequence
  Description of Artificial Sequence: Synthetic oligonucleotide
  Target: COL7A1; (+) strand; PAM type: NRG; PAM sequence: AAG
gaagatggttatgaggttgg

SEQ ID NO: 16921 - DNA, 20 bp, Artificial Sequence
  Description of Artificial Sequence: Synthetic oligonucleotide
  Target: COL7A1; (+) strand; PAM type: NRG; PAM sequence: AGG
aagatggttatgaggttgga

SEQ ID NO: 16922 - DNA, 20 bp, Artificial Sequence
  Description of Artificial Sequence: Synthetic oligonucleotide
  Target: COL7A1; (+) strand; PAM type: NRG; PAM sequence: GGG
agatggttatgaggttggaa

SEQ ID NO: 16923 - DNA, 20 bp, Artificial Sequence
  Description of Artificial Sequence: Synthetic oligonucleotide
  Target: COL7A1; (+) strand; PAM type: NRG; PAM sequence: TAG
tggttatgaggttggaaggg

SEQ ID NO: 16924 - DNA, 20 bp, Artificial Sequence
  Description of Artificial Sequence: Synthetic oligonucleotide
  Target: COL7A1; (+) strand; PAM type: NRG; PAM sequence: AGG
ggttatgaggttggaagggt

SEQ ID NO: 16925 - DNA, 20 bp, Artificial Sequence
  Description of Artificial Sequence: Synthetic oligonucleotide
  Target: COL7A1; (+) strand; PAM type: NRG; PAM sequence: GGG
gttatgaggttggaagggta

SEQ ID NO: 16926 - DNA, 20 bp, Artificial Sequence
  Description of Artificial Sequence: Synthetic oligonucleotide
  Target: COL7A1; (+) strand; PAM type: NRG; PAM sequence: AAG
atgaggttggaagggtaggg

SEQ ID NO: 16927 - DNA, 20 bp, Artificial Sequence
  Description of Artificial Sequence: Synthetic oligonucleotide
  Target: COL7A1; (+) strand; PAM type: NRG; PAM sequence: AGG
tgaggttggaagggtaggga

SEQ ID NO: 16928 - DNA, 20 bp, Artificial Sequence
  Description of Artificial Sequence: Synthetic oligonucleotide
  Target: COL7A1; (+) strand; PAM type: NRG; PAM sequence: CAG
ttggaagggtagggaaggtt

SEQ ID NO: 16929 - DNA, 20 bp, Artificial Sequence
  Description of Artificial Sequence: Synthetic oligonucleotide
  Target: COL7A1; (+) strand; PAM type: NRG; PAM sequence: AGG
tggaagggtagggaaggttc

SEQ ID NO: 16930 - DNA, 20 bp, Artificial Sequence
  Description of Artificial Sequence: Synthetic oligonucleotide
  Target: COL7A1; (+) strand; PAM type: NRG; PAM sequence: GGG
ggaagggtagggaaggttca

SEQ ID NO: 16931 - DNA, 20 bp, Artificial Sequence
  Description of Artificial Sequence: Synthetic oligonucleotide
  Target: COL7A1; (+) strand; PAM type: NRG; PAM sequence: CAG
ggtagggaaggttcagggat

SEQ ID NO: 16932 - DNA, 20 bp, Artificial Sequence
  Description of Artificial Sequence: Synthetic oligonucleotide
  Target: COL7A1; (+) strand; PAM type: NRG; PAM sequence: AGG
gtagggaaggttcagggatc

SEQ ID NO: 16933 - DNA, 20 bp, Artificial Sequence
  Description of Artificial Sequence: Synthetic oligonucleotide
  Target: COL7A1; (+) strand; PAM type: NRG; PAM sequence: GAG
agggaaggttcagggatcag

SEQ ID NO: 16934 - DNA, 20 bp, Artificial Sequence
  Description of Artificial Sequence: Synthetic oligonucleotide
  Target: COL7A1; (+) strand; PAM type: NRG; PAM sequence: CAG
aaggttcagggatcaggagt

SEQ ID NO: 16935 - DNA, 20 bp, Artificial Sequence
  Description of Artificial Sequence: Synthetic oligonucleotide
  Target: COL7A1; (+) strand; PAM type: NRG; PAM sequence: GAG
ggttcagggatcaggagtca

SEQ ID NO: 16936 - DNA, 20 bp, Artificial Sequence
  Description of Artificial Sequence: Synthetic oligonucleotide
  Target: COL7A1; (+) strand; PAM type: NRG; PAM sequence: TGG
cagggatcaggagtcagagc

SEQ ID NO: 16937 - DNA, 20 bp, Artificial Sequence
  Description of Artificial Sequence: Synthetic oligonucleotide
  Target: COL7A1; (+) strand; PAM type: NRG; PAM sequence: GGG
agggatcaggagtcagagct

SEQ ID NO: 16938 - DNA, 20 bp, Artificial Sequence
  Description of Artificial Sequence: Synthetic oligonucleotide
  Target: COL7A1; (+) strand; PAM type: NRG; PAM sequence: GGG
gggatcaggagtcagagctg

SEQ ID NO: 16939 - DNA, 20 bp, Artificial Sequence
  Description of Artificial Sequence: Synthetic oligonucleotide
  Target: COL7A1; (+) strand; PAM type: NRG; PAM sequence: TGG
agctggggccccttaccttc

SEQ ID NO: 16940 - DNA, 20 bp, Artificial Sequence
  Description of Artificial Sequence: Synthetic oligonucleotide
  Target: COL7A1; (+) strand; PAM type: NRG; PAM sequence: AAG
ccccttaccttctggccctg

SEQ ID NO: 16941 - DNA, 20 bp, Artificial Sequence
  Description of Artificial Sequence: Synthetic oligonucleotide
  Target: COL7A1; (+) strand; PAM type: NRG; PAM sequence: CGG
cttctggccctgaagtcctt

SEQ ID NO: 16942 - DNA, 20 bp, Artificial Sequence
  Description of Artificial Sequence: Synthetic oligonucleotide
  Target: COL7A1; (+) strand; PAM type: NRG; PAM sequence: GGG
ttctggccctgaagtccttc

SEQ ID NO: 16943 - DNA, 20 bp, Artificial Sequence
  Description of Artificial Sequence: Synthetic oligonucleotide
  Target: COL7A1; (+) strand; PAM type: NRG; PAM sequence: GGG
tctggccctgaagtccttcg

SEQ ID NO: 16944 - DNA, 20 bp, Artificial Sequence
  Description of Artificial Sequence: Synthetic oligonucleotide
  Target: COL7A1; (+) strand; PAM type: NRG; PAM sequence: TGG
ctgaagtccttcggggcctc

SEQ ID NO: 16945 - DNA, 20 bp, Artificial Sequence
  Description of Artificial Sequence: Synthetic oligonucleotide
  Target: COL7A1; (+) strand; PAM type: NRG; PAM sequence: GGG
tgaagtccttcggggcctct

SEQ ID NO: 16946 - DNA, 20 bp, Artificial Sequence
  Description of Artificial Sequence: Synthetic oligonucleotide
  Target: COL7A1; (+) strand; PAM type: NRG; PAM sequence: CAG
gcctctgggaccaacactgc

SEQ ID NO: 16947 - DNA, 20 bp, Artificial Sequence
  Description of Artificial Sequence: Synthetic oligonucleotide
  Target: COL7A1; (+) strand; PAM type: NRG; PAM sequence: AGG
cctctgggaccaacactgcc

SEQ ID NO: 16948 - DNA, 20 bp, Artificial Sequence
  Description of Artificial Sequence: Synthetic oligonucleotide
  Target: COL7A1; (+) strand; PAM type: NRG; PAM sequence: TGG
ctgggaccaacactgccagg

SEQ ID NO: 16949 - DNA, 20 bp, Artificial Sequence
  Description of Artificial Sequence: Synthetic oligonucleotide
  Target: COL7A1; (+) strand; PAM type: NRG; PAM sequence: TGG
ccaacactgccaggtggccc

SEQ ID NO: 16950 - DNA, 20 bp, Artificial Sequence
  Description of Artificial Sequence: Synthetic oligonucleotide
  Target: COL7A1; (+) strand; PAM type: NRG; PAM sequence: GGG
caacactgccaggtggccct

SEQ ID NO: 16951 - DNA, 20 bp, Artificial Sequence
  Description of Artificial Sequence: Synthetic oligonucleotide
  Target: COL7A1; (+) strand; PAM type: NRG; PAM sequence: GGG
aacactgccaggtggccctg

SEQ ID NO: 16952 - DNA, 20 bp, Artificial Sequence
  Description of Artificial Sequence: Synthetic oligonucleotide
  Target: COL7A1; (+) strand; PAM type: NRG; PAM sequence: GGG
acactgccaggtggccctgg

SEQ ID NO: 16953 - DNA, 20 bp, Artificial Sequence
  Description of Artificial Sequence: Synthetic oligonucleotide
  Target: COL7A1; (+) strand; PAM type: NRG; PAM sequence: CAG
gccaggtggccctgggggac

SEQ ID NO: 16954 - DNA, 20 bp, Artificial Sequence
  Description of Artificial Sequence: Synthetic oligonucleotide
  Target: COL7A1; (+) strand; PAM type: NRG; PAM sequence: CAG
aggtggccctgggggaccag

SEQ ID NO: 16955 - DNA, 20 bp, Artificial Sequence
  Description of Artificial Sequence: Synthetic oligonucleotide
  Target: COL7A1; (+) strand; PAM type: NRG; PAM sequence: GAG
gtggccctgggggaccagca

SEQ ID NO: 16956 - DNA, 20 bp, Artificial Sequence
  Description of Artificial Sequence: Synthetic oligonucleotide
  Target: COL7A1; (+) strand; PAM type: NRG; PAM sequence: TGG
agcagagccatcatttccac

SEQ ID NO: 16957 - DNA, 20 bp, Artificial Sequence
  Description of Artificial Sequence: Synthetic oligonucleotide
  Target: COL7A1; (+) strand; PAM type: NRG; PAM sequence: GGG
gcagagccatcatttccact

SEQ ID NO: 16958 - DNA, 20 bp, Artificial Sequence
  Description of Artificial Sequence: Synthetic oligonucleotide
  Target: COL7A1; (+) strand; PAM type: NRG; PAM sequence: GGG
cagagccatcatttccactg

SEQ ID NO: 16959 - DNA, 20 bp, Artificial Sequence
  Description of Artificial Sequence: Synthetic oligonucleotide
  Target: COL7A1; (+) strand; PAM type: NRG; PAM sequence: TGG
ccatcatttccactggggcc

SEQ ID NO: 16960 - DNA, 20 bp, Artificial Sequence
  Description of Artificial Sequence: Synthetic oligonucleotide
  Target: COL7A1; (+) strand; PAM type: NRG; PAM sequence: GGG
catcatttccactggggcct

SEQ ID NO: 16961 - DNA, 20 bp, Artificial Sequence
  Description of Artificial Sequence: Synthetic oligonucleotide
  Target: COL7A1; (+) strand; PAM type: NRG; PAM sequence: AAG
catttccactggggcctggg

SEQ ID NO: 16962 - DNA, 20 bp, Artificial Sequence
  Description of Artificial Sequence: Synthetic oligonucleotide
  Target: COL7A1; (+) strand; PAM type: NRG; PAM sequence: TGG
cctgggaagcccccaattcc

SEQ ID NO: 16963 - DNA, 20 bp, Artificial Sequence
  Description of Artificial Sequence: Synthetic oligonucleotide
  Target: COL7A1; (+) strand; PAM type: NRG; PAM sequence: GGG
ctgggaagcccccaattcct

SEQ ID NO: 16964 - DNA, 20 bp, Artificial Sequence
  Description of Artificial Sequence: Synthetic oligonucleotide
  Target: COL7A1; (+) strand; PAM type: NRG; PAM sequence: GGG
tgggaagcccccaattcctg

SEQ ID NO: 16965 - DNA, 20 bp, Artificial Sequence
  Description of Artificial Sequence: Synthetic oligonucleotide
  Target: COL7A1; (+) strand; PAM type: NRG; PAM sequence: TGG
ccccaattcctggggttccc

SEQ ID NO: 16966 - DNA, 20 bp, Artificial Sequence
  Description of Artificial Sequence: Synthetic oligonucleotide
  Target: COL7A1; (+) strand; PAM type: NRG; PAM sequence: GGG
cccaattcctggggttccct

SEQ ID NO: 16967 - DNA, 20 bp, Artificial Sequence
  Description of Artificial Sequence: Synthetic oligonucleotide
  Target: COL7A1; (+) strand; PAM type: NRG; PAM sequence: GGG
ccaattcctggggttccctg

SEQ ID NO: 16968 - DNA, 20 bp, Artificial Sequence
  Description of Artificial Sequence: Synthetic oligonucleotide
  Target: COL7A1; (+) strand; PAM type: NRG; PAM sequence: GAG
aattcctggggttccctggg

SEQ ID NO: 16969 - DNA, 20 bp, Artificial Sequence
  Description of Artificial Sequence: Synthetic oligonucleotide
  Target: COL7A1; (+) strand; PAM type: NRG; PAM sequence: TAG
tggggttccctggggagata

SEQ ID NO: 16970 - DNA, 20 bp, Artificial Sequence
  Description of Artificial Sequence: Synthetic oligonucleotide
  Target: COL7A1; (+) strand; PAM type: NRG; PAM sequence: AGG
ggggttccctggggagatat

SEQ ID NO: 16971 - DNA, 20 bp, Artificial Sequence
  Description of Artificial Sequence: Synthetic oligonucleotide
  Target: COL7A1; (+) strand; PAM type: NRG; PAM sequence: CAG
ttccctggggagatatagga

SEQ ID NO: 16972 - DNA, 20 bp, Artificial Sequence
  Description of Artificial Sequence: Synthetic oligonucleotide
  Target: COL7A1; (+) strand; PAM type: NRG; PAM sequence: GAG
ccctggggagatataggaca

SEQ ID NO: 16973 - DNA, 20 bp, Artificial Sequence
  Description of Artificial Sequence: Synthetic oligonucleotide
  Target: COL7A1; (+) strand; PAM type: NRG; PAM sequence: CAG
ggggagatataggacagagt

SEQ ID NO: 16974 - DNA, 20 bp, Artificial Sequence
  Description of Artificial Sequence: Synthetic oligonucleotide
  Target: COL7A1; (+) strand; PAM type: NRG; PAM sequence: CAG
tataggacagagtcagtaat

SEQ ID NO: 16975 - DNA, 20 bp, Artificial Sequence
  Description of Artificial Sequence: Synthetic oligonucleotide
  Target: COL7A1; (+) strand; PAM type: NRG; PAM sequence: GAG
taggacagagtcagtaatca

SEQ ID NO: 16976 - DNA, 20 bp, Artificial Sequence
  Description of Artificial Sequence: Synthetic oligonucleotide
  Target: COL7A1; (+) strand; PAM type: NRG; PAM sequence: AGG
aggacagagtcagtaatcag

SEQ ID NO: 16977 - DNA, 20 bp, Artificial Sequence
  Description of Artificial Sequence: Synthetic oligonucleotide
  Target: COL7A1; (+) strand; PAM type: NRG; PAM sequence: CAG
gagtcagtaatcagaggccc

SEQ ID NO: 16978 - DNA, 20 bp, Artificial Sequence
  Description of Artificial Sequence: Synthetic oligonucleotide
  Target: COL7A1; (+) strand; PAM type: NRG; PAM sequence: GAG
gtcagtaatcagaggcccca

SEQ ID NO: 16979 - DNA, 20 bp, Artificial Sequence
  Description of Artificial Sequence: Synthetic oligonucleotide
  Target: COL7A1; (+) strand; PAM type: NRG; PAM sequence: TGG
gtaatcagaggccccagaga

SEQ ID NO: 16980 - DNA, 20 bp, Artificial Sequence
  Description of Artificial Sequence: Synthetic oligonucleotide
  Target: COL7A1; (+) strand; PAM type: NRG; PAM sequence: AAG
cagagatggaccctctccca

SEQ ID NO: 16981 - DNA, 20 bp, Artificial Sequence
  Description of Artificial Sequence: Synthetic oligonucleotide
  Target: COL7A1; (+) strand; PAM type: NRG; PAM sequence: TGG
ccctcaattcaccatgacca

SEQ ID NO: 16982 - DNA, 20 bp, Artificial Sequence
  Description of Artificial Sequence: Synthetic oligonucleotide
  Target: COL7A1; (+) strand; PAM type: NRG; PAM sequence: TGG
cccgctcccctttctcgccc

SEQ ID NO: 16983 - DNA, 20 bp, Artificial Sequence
  Description of Artificial Sequence: Synthetic oligonucleotide
  Target: COL7A1; (+) strand; PAM type: NRG; PAM sequence: TGG
tttctcgccctggtcaccct

SEQ ID NO: 16984 - DNA, 20 bp, Artificial Sequence
  Description of Artificial Sequence: Synthetic oligonucleotide
  Target: COL7A1; (+) strand; PAM type: NRG; PAM sequence: GGG
ttctcgccctggtcaccctt

SEQ ID NO: 16985 - DNA, 20 bp, Artificial Sequence
  Description of Artificial Sequence: Synthetic oligonucleotide
  Target: COL7A1; (+) strand; PAM type: NRG; PAM sequence: GGG
tctcgccctggtcacccttg

SEQ ID NO: 16986 - DNA, 20 bp, Artificial Sequence
  Description of Artificial Sequence: Synthetic oligonucleotide
  Target: COL7A1; (+) strand; PAM type: NRG; PAM sequence: TGG
ccctggtcacccttggggcc

SEQ ID NO: 16987 - DNA, 20 bp, Artificial Sequence
  Description of Artificial Sequence: Synthetic oligonucleotide
  Target: COL7A1; (+) strand; PAM type: NRG; PAM sequence: AAG
tggggcctggctgcccgtca

SEQ ID NO: 16988 - DNA, 20 bp, Artificial Sequence
  Description of Artificial Sequence: Synthetic oligonucleotide
  Target: COL7A1; (+) strand; PAM type: NRG; PAM sequence: CGG
ctggctgcccgtcaaagcct

SEQ ID NO: 16989 - DNA, 20 bp, Artificial Sequence
  Description of Artificial Sequence: Synthetic oligonucleotide
  Target: COL7A1; (+) strand; PAM type: NRG; PAM sequence: TGG
cgtcaaagcctcggtcaccc

SEQ ID NO: 16990 - DNA, 20 bp, Artificial Sequence
  Description of Artificial Sequence: Synthetic oligonucleotide
  Target: COL7A1; (+) strand; PAM type: NRG; PAM sequence: GGG
gtcaaagcctcggtcaccct

SEQ ID NO: 16991 - DNA, 20 bp, Artificial Sequence
  Description of Artificial Sequence: Synthetic oligonucleotide
  Target: COL7A1; (+) strand; PAM type: NRG; PAM sequence: CAG
agcctcggtcaccctgggaa

SEQ ID NO: 16992 - DNA, 20 bp, Artificial Sequence
  Description of Artificial Sequence: Synthetic oligonucleotide
  Target: COL7A1; (+) strand; PAM type: NRG; PAM sequence: AAG
ctcggtcaccctgggaacag

SEQ ID NO: 16993 - DNA, 20 bp, Artificial Sequence
  Description of Artificial Sequence: Synthetic oligonucleotide
  Target: COL7A1; (+) strand; PAM type: NRG; PAM sequence: AAG
ggtcaccctgggaacagaag

SEQ ID NO: 16994 - DNA, 20 bp, Artificial Sequence
  Description of Artificial Sequence: Synthetic oligonucleotide
  Target: COL7A1; (+) strand; PAM type: NRG; PAM sequence: GAG
cctgggaacagaagaagcat

SEQ ID NO: 16995 - DNA, 20 bp, Artificial Sequence
  Description of Artificial Sequence: Synthetic oligonucleotide
  Target: COL7A1; (+) strand; PAM type: NRG; PAM sequence: GAG
tgggaacagaagaagcatga

SEQ ID NO: 16996 - DNA, 20 bp, Artificial Sequence
  Description of Artificial Sequence: Synthetic oligonucleotide
  Target: COL7A1; (+) strand; PAM type: NRG; PAM sequence: CAG
ccttctgccctgacctccct

SEQ ID NO: 16997 - DNA, 20 bp, Artificial Sequence
  Description of Artificial Sequence: Synthetic oligonucleotide
  Target: COL7A1; (+) strand; PAM type: NRG; PAM sequence: TGG
gccctgacctccctcagctc

SEQ ID NO: 16998 - DNA, 20 bp, Artificial Sequence
  Description of Artificial Sequence: Synthetic oligonucleotide
  Target: COL7A1; (+) strand; PAM type: NRG; PAM sequence: GAG
gaacctccctgaactcccat

SEQ ID NO: 16999 - DNA, 20 bp, Artificial Sequence
  Description of Artificial Sequence: Synthetic oligonucleotide
  Target: COL7A1; (+) strand; PAM type: NRG; PAM sequence: TGG
ctgaactcccatgagctccc

SEQ ID NO: 17000 - DNA, 20 bp, Artificial Sequence
  Description of Artificial Sequence: Synthetic oligonucleotide
  Target: COL7A1; (+) strand; PAM type: NRG; PAM sequence: AAG
gcccaaaccttctgtaaccc

SEQ ID NO: 17001 - DNA, 20 bp, Artificial Sequence
  Description of Artificial Sequence: Synthetic oligonucleotide
  Target: COL7A1; (+) strand; PAM type: NRG; PAM sequence: GAG
tctgtaacccaagcacctgt

SEQ ID NO: 17002 - DNA, 20 bp, Artificial Sequence
  Description of Artificial Sequence: Synthetic oligonucleotide
  Target: COL7A1; (+) strand; PAM type: NRG; PAM sequence: CAG
ccaagcacctgtgagccaac

SEQ ID NO: 17003 - DNA, 20 bp, Artificial Sequence
  Description of Artificial Sequence: Synthetic oligonucleotide
  Target: COL7A1; (+) strand; PAM type: NRG; PAM sequence: TAG
ccatgactccaactccacta

SEQ ID NO: 17004 - DNA, 20 bp, Artificial Sequence
  Description of Artificial Sequence: Synthetic oligonucleotide
  Target: COL7A1; (+) strand; PAM type: NRG; PAM sequence: GAG
ccaacccaccttgacacctc

SEQ ID NO: 17005 - DNA, 20 bp, Artificial Sequence
  Description of Artificial Sequence: Synthetic oligonucleotide
  Target: COL7A1; (+) strand; PAM type: NRG; PAM sequence: CAG
ccaccttgacacctcgagac

SEQ ID NO: 17006 - DNA, 20 bp, Artificial Sequence
  Description of Artificial Sequence: Synthetic oligonucleotide
  Target: COL7A1; (+) strand; PAM type: NRG; PAM sequence: CAG
cctcgagaccagccccactt

SEQ ID NO: 17007 - DNA, 20 bp, Artificial Sequence
  Description of Artificial Sequence: Synthetic oligonucleotide
  Target: COL7A1; (+) strand; PAM type: NRG; PAM sequence: AAG
cagccccacttcagccccca

SEQ ID NO: 17008 - DNA, 20 bp, Artificial Sequence
  Description of Artificial Sequence: Synthetic oligonucleotide
  Target: COL7A1; (+) strand; PAM type: NRG; PAM sequence: CAG
cccaaagtcccaaccctcta

SEQ ID NO: 17009 - DNA, 20 bp, Artificial Sequence
  Description of Artificial Sequence: Synthetic oligonucleotide
  Target: COL7A1; (+) strand; PAM type: NRG; PAM sequence: GAG
cacccccatgacccgaccat

SEQ ID NO: 17010 - DNA, 20 bp, Artificial Sequence
  Description of Artificial Sequence: Synthetic oligonucleotide
  Target: COL7A1; (+) strand; PAM type: NRG; PAM sequence: CAG
cctgtcatgtccactgtcca

SEQ ID NO: 17011 - DNA, 20 bp, Artificial Sequence
  Description of Artificial Sequence: Synthetic oligonucleotide
  Target: COL7A1; (+) strand; PAM type: NRG; PAM sequence: TGG
tgtccacagaccctgtacct

SEQ ID NO: 17012 - DNA, 20 bp, Artificial Sequence
  Description of Artificial Sequence: Synthetic oligonucleotide
  Target: COL7A1; (+) strand; PAM type: NRG; PAM sequence: GGG
gtccacagaccctgtacctt

SEQ ID NO: 17013 - DNA, 20 bp, Artificial Sequence
  Description of Artificial Sequence: Synthetic oligonucleotide
  Target: COL7A1; (+) strand; PAM type: NRG; PAM sequence: CAG
ccctgtaccttgggaccgat

SEQ ID NO: 17014 - DNA, 20 bp, Artificial Sequence
  Description of Artificial Sequence: Synthetic oligonucleotide
  Target: COL7A1; (+) strand; PAM type: NRG; PAM sequence: AGG
cctgtaccttgggaccgatc

SEQ ID NO: 17015 - DNA, 20 bp, Artificial Sequence
  Description of Artificial Sequence: Synthetic oligonucleotide
  Target: COL7A1; (+) strand; PAM type: NRG; PAM sequence: CAG
accgatcaggccctccttgc

SEQ ID NO: 17016 - DNA, 20 bp, Artificial Sequence
  Description of Artificial Sequence: Synthetic oligonucleotide
  Target: COL7A1; (+) strand; PAM type: NRG; PAM sequence: AGG
ccgatcaggccctccttgcc

SEQ ID NO: 17017 - DNA, 20 bp, Artificial Sequence
  Description of Artificial Sequence: Synthetic oligonucleotide
  Target: COL7A1; (+) strand; PAM type: NRG; PAM sequence: GGG
cgatcaggccctccttgcca

SEQ ID NO: 17018 - DNA, 20 bp, Artificial Sequence
  Description of Artificial Sequence: Synthetic oligonucleotide
  Target: COL7A1; (+) strand; PAM type: NRG; PAM sequence: GGG
gatcaggccctccttgccag

SEQ ID NO: 17019 - DNA, 20 bp, Artificial Sequence
  Description of Artificial Sequence: Synthetic oligonucleotide
  Target: COL7A1; (+) strand; PAM type: NRG; PAM sequence: TGG
ccttgccaggggcccccgac

SEQ ID NO: 17020 - DNA, 20 bp, Artificial Sequence
  Description of Artificial Sequence: Synthetic oligonucleotide
  Target: COL7A1; (+) strand; PAM type: NRG; PAM sequence: CGG
ccaggggcccccgactggcc

SEQ ID NO: 17021 - DNA, 20 bp, Artificial Sequence
  Description of Artificial Sequence: Synthetic oligonucleotide
  Target: COL7A1; (+) strand; PAM type: NRG; PAM sequence: CAG
ccccgactggcccggcacac

SEQ ID NO: 17022 - DNA, 20 bp, Artificial Sequence
  Description of Artificial Sequence: Synthetic oligonucleotide
  Target: COL7A1; (+) strand; PAM type: NRG; PAM sequence: AGG
cccgactggcccggcacacc

SEQ ID NO: 17023 - DNA, 20 bp, Artificial Sequence
  Description of Artificial Sequence: Synthetic oligonucleotide
  Target: COL7A1; (+) strand; PAM type: NRG; PAM sequence: TGG
ccggcacaccaggctccccc

SEQ ID NO: 17024 - DNA, 20 bp, Artificial Sequence
  Description of Artificial Sequence: Synthetic oligonucleotide
  Target: COL7A1; (+) strand; PAM type: NRG; PAM sequence: GAG
ggcacaccaggctccccctg

SEQ ID NO: 17025 - DNA, 20 bp, Artificial Sequence
  Description of Artificial Sequence: Synthetic oligonucleotide
  Target: COL7A1; (+) strand; PAM type: NRG; PAM sequence: AAG
aggctccccctggagaaaaa

SEQ ID NO: 17026 - DNA, 20 bp, Artificial Sequence
  Description of Artificial Sequence: Synthetic oligonucleotide
  Target: COL7A1; (+) strand; PAM type: NRG; PAM sequence: TGG
gagaaaaaaagacatgaact

SEQ ID NO: 17027 - DNA, 20 bp, Artificial Sequence
  Description of Artificial Sequence: Synthetic oligonucleotide
  Target: COL7A1; (+) strand; PAM type: NRG; PAM sequence: TGG
acttggcccccgtccacccg

SEQ ID NO: 17028 - DNA, 20 bp, Artificial Sequence
  Description of Artificial Sequence: Synthetic oligonucleotide
  Target: COL7A1; (+) strand; PAM type: NRG; PAM sequence: GAG
acccgtggccccctcattct

SEQ ID NO: 17029 - DNA, 20 bp, Artificial Sequence
  Description of Artificial Sequence: Synthetic oligonucleotide
  Target: COL7A1; (+) strand; PAM type: NRG; PAM sequence: CAG
atctctcctttgtgtcctgc

SEQ ID NO: 17030 - DNA, 20 bp, Artificial Sequence
  Description of Artificial Sequence: Synthetic oligonucleotide
  Target: COL7A1; (+) strand; PAM type: NRG; PAM sequence: CGG
tcctttgtgtcctgccagcc

SEQ ID NO: 17031 - DNA, 20 bp, Artificial Sequence
  Description of Artificial Sequence: Synthetic oligonucleotide
  Target: COL7A1; (+) strand; PAM type: NRG; PAM sequence: GGG
cctttgtgtcctgccagccc

SEQ ID NO: 17032 - DNA, 20 bp, Artificial Sequence
  Description of Artificial Sequence: Synthetic oligonucleotide
  Target: COL7A1; (+) strand; PAM type: NRG; PAM sequence: GGG
ctttgtgtcctgccagcccg

SEQ ID NO: 17033 - DNA, 20 bp, Artificial Sequence
  Description of Artificial Sequence: Synthetic oligonucleotide
  Target: COL7A1; (+) strand; PAM type: NRG; PAM sequence: CGG
tgtgtcctgccagcccgggg

SEQ ID NO: 17034 - DNA, 20 bp, Artificial Sequence
  Description of Artificial Sequence: Synthetic oligonucleotide
  Target: COL7A1; (+) strand; PAM type: NRG; PAM sequence: TGG
cctgccagcccggggcggcc

SEQ ID NO: 17035 - DNA, 20 bp, Artificial Sequence
  Description of Artificial Sequence: Synthetic oligonucleotide
  Target: COL7A1; (+) strand; PAM type: NRG; PAM sequence: GGG
ctgccagcccggggcggcct

SEQ ID NO: 17036 - DNA, 20 bp, Artificial Sequence
  Description of Artificial Sequence: Synthetic oligonucleotide
  Target: COL7A1; (+) strand; PAM type: NRG; PAM sequence: GGG
tgccagcccggggcggcctg

SEQ ID NO: 17037 - DNA, 20 bp, Artificial Sequence
  Description of Artificial Sequence: Synthetic oligonucleotide
  Target: COL7A1; (+) strand; PAM type: NRG; PAM sequence: GGG
gccagcccggggcggcctgg

SEQ ID NO: 17038 - DNA, 20 bp, Artificial Sequence
  Description of Artificial Sequence: Synthetic oligonucleotide
  Target: COL7A1; (+) strand; PAM type: NRG; PAM sequence: CAG
cccggggcggcctgggggac

SEQ ID NO: 17039 - DNA, 20 bp, Artificial Sequence
  Description of Artificial Sequence: Synthetic oligonucleotide
  Target: COL7A1; (+) strand; PAM type: NRG; PAM sequence: CAG
gggggaccagcttctccctg

SEQ ID NO: 17040 - DNA, 20 bp, Artificial Sequence
  Description of Artificial Sequence: Synthetic oligonucleotide
  Target: COL7A1; (+) strand; PAM type: NRG; PAM sequence: AGG
ggggaccagcttctccctgc

SEQ ID NO: 17041 - DNA, 20 bp, Artificial Sequence
  Description of Artificial Sequence: Synthetic oligonucleotide
  Target: COL7A1; (+) strand; PAM type: NRG; PAM sequence: CAG
cagcttctccctgcaggcat

SEQ ID NO: 17042 - DNA, 20 bp, Artificial Sequence
  Description of Artificial Sequence: Synthetic oligonucleotide
  Target: COL7A1; (+) strand; PAM type: NRG; PAM sequence: AGG
agcttctccctgcaggcatc

SEQ ID NO: 17043 - DNA, 20 bp, Artificial Sequence
  Description of Artificial Sequence: Synthetic oligonucleotide
  Target: COL7A1; (+) strand; PAM type: NRG; PAM sequence: CAG
ttctccctgcaggcatcagg

SEQ ID NO: 17044 - DNA, 20 bp, Artificial Sequence
  Description of Artificial Sequence: Synthetic oligonucleotide
  Target: COL7A1; (+) strand; PAM type: NRG; PAM sequence: TGG
tccctgcaggcatcaggcag

SEQ ID NO: 17045 - DNA, 20 bp, Artificial Sequence
  Description of Artificial Sequence: Synthetic oligonucleotide
  Target: COL7A1; (+) strand; PAM type: NRG; PAM sequence: GGG
ccctgcaggcatcaggcagt

SEQ ID NO: 17046 - DNA, 20 bp, Artificial Sequence
  Description of Artificial Sequence: Synthetic oligonucleotide
  Target: COL7A1; (+) strand; PAM type: NRG; PAM sequence: GGG
cctgcaggcatcaggcagtg

SEQ ID NO: 17047 - DNA, 20 bp, Artificial Sequence
  Description of Artificial Sequence: Synthetic oligonucleotide
  Target: COL7A1; (+) strand; PAM type: NRG; PAM sequence: GAG
caggcatcaggcagtggggt

SEQ ID NO: 17048 - DNA, 20 bp, Artificial Sequence
  Description of Artificial Sequence: Synthetic oligonucleotide
  Target: COL7A1; (+) strand; PAM type: NRG; PAM sequence: TAG
tcaggcagtggggtgagcct

SEQ ID NO: 17049 - DNA, 20 bp, Artificial Sequence
  Description of Artificial Sequence: Synthetic oligonucleotide
  Target: COL7A1; (+) strand; PAM type: NRG; PAM sequence: AGG
caggcagtggggtgagcctt

SEQ ID NO: 17050 - DNA, 20 bp, Artificial Sequence
  Description of Artificial Sequence: Synthetic oligonucleotide
  Target: COL7A1; (+) strand; PAM type: NRG; PAM sequence: CAG
gtggggtgagccttaggccc

SEQ ID NO: 17051 - DNA, 20 bp, Artificial Sequence
  Description of Artificial Sequence: Synthetic oligonucleotide
  Target: COL7A1; (+) strand; PAM type: NRG; PAM sequence: AGG
tggggtgagccttaggcccc

SEQ ID NO: 17052 - DNA, 20 bp, Artificial Sequence
  Description of Artificial Sequence: Synthetic oligonucleotide
  Target: COL7A1; (+) strand; PAM type: NRG; PAM sequence: TAG
gccttaggccccaggccacg

SEQ ID NO: 17053 - DNA, 20 bp, Artificial Sequence
  Description of Artificial Sequence: Synthetic oligonucleotide
  Target: COL7A1; (+) strand; PAM type: NRG; PAM sequence: CAG
ccccaggccacgtagccccc

SEQ ID NO: 17054 - DNA, 20 bp, Artificial Sequence
  Description of Artificial Sequence: Synthetic oligonucleotide
  Target: COL7A1; (+) strand; PAM type: NRG; PAM sequence: AAG
ttgtctcccttctctccatc

SEQ ID NO: 17055 - DNA, 20 bp, Artificial Sequence
  Description of Artificial Sequence: Synthetic oligonucleotide
  Target: COL7A1; (+) strand; PAM type: NRG; PAM sequence: AGG
tgtctcccttctctccatca

SEQ ID NO: 17056 - DNA, 20 bp, Artificial Sequence
  Description of Artificial Sequence: Synthetic oligonucleotide
  Target: COL7A1; (+) strand; PAM type: NRG; PAM sequence: CAG
ccttctctccatcaaggcca

SEQ ID NO: 17057 - DNA, 20 bp, Artificial Sequence
  Description of Artificial Sequence: Synthetic oligonucleotide
  Target: COL7A1; (+) strand; PAM type: NRG; PAM sequence: AGG
cttctctccatcaaggccac

SEQ ID NO: 17058 - DNA, 20 bp, Artificial Sequence
  Description of Artificial Sequence: Synthetic oligonucleotide
  Target: COL7A1; (+) strand; PAM type: NRG; PAM sequence: GAG
cttcactccccgttcaccct

SEQ ID NO: 17059 - DNA, 20 bp, Artificial Sequence
  Description of Artificial Sequence: Synthetic oligonucleotide
  Target: COL7A1; (+) strand; PAM type: NRG; PAM sequence: AGG
ttcactccccgttcaccctg

SEQ ID NO: 17060 - DNA, 20 bp, Artificial Sequence
  Description of Artificial Sequence: Synthetic oligonucleotide
  Target: COL7A1; (+) strand; PAM type: NRG; PAM sequence: GGG
tcactccccgttcaccctga

SEQ ID NO: 17061 - DNA, 20 bp, Artificial Sequence
  Description of Artificial Sequence: Synthetic oligonucleotide
  Target: COL7A1; (+) strand; PAM type: NRG; PAM sequence: GAG
actccccgttcaccctgagg

SEQ ID NO: 17062 - DNA, 20 bp, Artificial Sequence
  Description of Artificial Sequence: Synthetic oligonucleotide
  Target: COL7A1; (+) strand; PAM type: NRG; PAM sequence: AAG
ccgttcaccctgagggagaa

SEQ ID NO: 17063 - DNA, 20 bp, Artificial Sequence
  Description of Artificial Sequence: Synthetic oligonucleotide
  Target: COL7A1; (+) strand; PAM type: NRG; PAM sequence: CAG
ttcaccctgagggagaaaag

SEQ ID NO: 17064 - DNA, 20 bp, Artificial Sequence
  Description of Artificial Sequence: Synthetic oligonucleotide
  Target: COL7A1; (+) strand; PAM type: NRG; PAM sequence: AAG
ctgagggagaaaagcagatg

SEQ ID NO: 17065 - DNA, 20 bp, Artificial Sequence
  Description of Artificial Sequence: Synthetic oligonucleotide
  Target: COL7A1; (+) strand; PAM type: NRG; PAM sequence: AAG
agggagaaaagcagatgaag

SEQ ID NO: 17066 - DNA, 20 bp, Artificial Sequence
  Description of Artificial Sequence: Synthetic oligonucleotide
  Target: COL7A1; (+) strand; PAM type: NRG; PAM sequence: CAG
gcagatgaagaagtgattcc

SEQ ID NO: 17067 - DNA, 20 bp, Artificial Sequence
  Description of Artificial Sequence: Synthetic oligonucleotide
  Target: COL7A1; (+) strand; PAM type: NRG; PAM sequence: CAG
cctgaaactaactctccaaa

SEQ ID NO: 17068 - DNA, 20 bp, Artificial Sequence
  Description of Artificial Sequence: Synthetic oligonucleotide
  Target: COL7A1; (+) strand; PAM type: NRG; PAM sequence: AGG
ctgaaactaactctccaaac

SEQ ID NO: 17069 - DNA, 20 bp, Artificial Sequence
  Description of Artificial Sequence: Synthetic oligonucleotide
  Target: COL7A1; (+) strand; PAM type: NRG; PAM sequence: CAG
ctaactctccaaacaggcct

SEQ ID NO: 17070 - DNA, 20 bp, Artificial Sequence
  Description of Artificial Sequence: Synthetic oligonucleotide
  Target: COL7A1; (+) strand; PAM type: NRG; PAM sequence: CAG
agctactccaacctctgacc

SEQ ID NO: 17071 - DNA, 20 bp, Artificial Sequence
  Description of Artificial Sequence: Synthetic oligonucleotide
  Target: COL7A1; (+) strand; PAM type: NRG; PAM sequence: CAG
agtgccctaatatctgaccc

SEQ ID NO: 17072 - DNA, 20 bp, Artificial Sequence
  Description of Artificial Sequence: Synthetic oligonucleotide
  Target: COL7A1; (+) strand; PAM type: NRG; PAM sequence: AGG
gtgccctaatatctgacccc

SEQ ID NO: 17073 - DNA, 20 bp, Artificial Sequence
  Description of Artificial Sequence: Synthetic oligonucleotide
  Target: COL7A1; (+) strand; PAM type: NRG; PAM sequence: TAG
ggtccctcgcccttcaacat

SEQ ID NO: 17074 - DNA, 20 bp, Artificial Sequence
  Description of Artificial Sequence: Synthetic oligonucleotide
  Target: COL7A1; (+) strand; PAM type: NRG; PAM sequence: AGG
gtccctcgcccttcaacatt

SEQ ID NO: 17075 - DNA, 20 bp, Artificial Sequence
  Description of Artificial Sequence: Synthetic oligonucleotide
  Target: COL7A1; (+) strand; PAM type: NRG; PAM sequence: CAG
caacattaggccttcctgac

SEQ ID NO: 17076 - DNA, 20 bp, Artificial Sequence
  Description of Artificial Sequence: Synthetic oligonucleotide
  Target: COL7A1; (+) strand; PAM type: NRG; PAM sequence: GAG
tcttgtttctttcctacctt

SEQ ID NO: 17077 - DNA, 20 bp, Artificial Sequence
  Description of Artificial Sequence: Synthetic oligonucleotide
  Target: COL7A1; (+) strand; PAM type: NRG; PAM sequence: AGG
cttgtttctttcctaccttg

SEQ ID NO: 17078 - DNA, 20 bp, Artificial Sequence
  Description of Artificial Sequence: Synthetic oligonucleotide
  Target: COL7A1; (+) strand; PAM type: NRG; PAM sequence: CGG
tctttcctaccttgaggccc

SEQ ID NO: 17079 - DNA, 20 bp, Artificial Sequence
  Description of Artificial Sequence: Synthetic oligonucleotide
  Target: COL7A1; (+) strand; PAM type: NRG; PAM sequence: GGG
ctttcctaccttgaggcccc

SEQ ID NO: 17080 - DNA, 20 bp, Artificial Sequence
  Description of Artificial Sequence: Synthetic oligonucleotide
  Target: COL7A1; (+) strand; PAM type: NRG; PAM sequence: GGG
tttcctaccttgaggccccg

SEQ ID NO: 17081 - DNA, 20 bp, Artificial Sequence
  Description of Artificial Sequence: Synthetic oligonucleotide
  Target: COL7A1; (+) strand; PAM type: NRG; PAM sequence: AAG
tgaggccccggggacccatg

SEQ ID NO: 17082 - DNA, 20 bp, Artificial Sequence
  Description of Artificial Sequence: Synthetic oligonucleotide
  Target: COL7A1; (+) strand; PAM type: NRG; PAM sequence: CGG
caacatctcctttttctcct

SEQ ID NO: 17083 - DNA, 20 bp, Artificial Sequence
  Description of Artificial Sequence: Synthetic oligonucleotide
  Target: COL7A1; (+) strand; PAM type: NRG; PAM sequence: CAG
tcctttttctcctcggatac

SEQ ID NO: 17084 - DNA, 20 bp, Artificial Sequence
  Description of Artificial Sequence: Synthetic oligonucleotide
  Target: COL7A1; (+) strand; PAM type: NRG; PAM sequence: AGG
cctttttctcctcggatacc

SEQ ID NO: 17085 - DNA, 20 bp, Artificial Sequence
  Description of Artificial Sequence: Synthetic oligonucleotide
  Target: COL7A1; (+) strand; PAM type: NRG; PAM sequence: TGG
ccaggcactccatcctttcc

SEQ ID NO: 17086 - DNA, 20 bp, Artificial Sequence
  Description of Artificial Sequence: Synthetic oligonucleotide
  Target: COL7A1; (+) strand; PAM type: NRG; PAM sequence: GGG
caggcactccatcctttcct

SEQ ID NO: 17087 - DNA, 20 bp, Artificial Sequence
  Description of Artificial Sequence: Synthetic oligonucleotide
  Target: COL7A1; (+) strand; PAM type: NRG; PAM sequence: GGG
aggcactccatcctttcctg

SEQ ID NO: 17088 - DNA, 20 bp, Artificial Sequence
  Description of Artificial Sequence: Synthetic oligonucleotide
  Target: COL7A1; (+) strand; PAM type: NRG; PAM sequence: TAG
catcctttcctggggatccc

SEQ ID NO: 17089 - DNA, 20 bp, Artificial Sequence
  Description of Artificial Sequence: Synthetic oligonucleotide
  Target: COL7A1; (+) strand; PAM type: NRG; PAM sequence: CAG
cctttcctggggatccctag

SEQ ID NO: 17090 - DNA, 20 bp, Artificial Sequence
  Description of Artificial Sequence: Synthetic oligonucleotide
  Target: COL7A1; (+) strand; PAM type: NRG; PAM sequence: AGG
ctttcctggggatccctagc

SEQ ID NO: 17091 - DNA, 20 bp, Artificial Sequence
  Description of Artificial Sequence: Synthetic oligonucleotide
  Target: COL7A1; (+) strand; PAM type: NRG; PAM sequence: GGG
tttcctggggatccctagca

SEQ ID NO: 17092 - DNA, 20 bp, Artificial Sequence
  Description of Artificial Sequence: Synthetic oligonucleotide
  Target: COL7A1; (+) strand; PAM type: NRG; PAM sequence: GAG
tcctggggatccctagcagg

SEQ ID NO: 17093 - DNA, 20 bp, Artificial Sequence
  Description of Artificial Sequence: Synthetic oligonucleotide
  Target: COL7A1; (+) strand; PAM type: NRG; PAM sequence: GAG
ctggggatccctagcaggga

SEQ ID NO: 17094 - DNA, 20 bp, Artificial Sequence
  Description of Artificial Sequence: Synthetic oligonucleotide
  Target: COL7A1; (+) strand; PAM type: NRG; PAM sequence: AGG
tggggatccctagcagggag

SEQ ID NO: 17095 - DNA, 20 bp, Artificial Sequence
  Description of Artificial Sequence: Synthetic oligonucleotide
  Target: COL7A1; (+) strand; PAM type: NRG; PAM sequence: GGG
ggggatccctagcagggaga

SEQ ID NO: 17096 - DNA, 20 bp, Artificial Sequence
  Description of Artificial Sequence: Synthetic oligonucleotide
  Target: COL7A1; (+) strand; PAM type: NRG; PAM sequence: GAG
agcagggagagggtccatgt

SEQ ID NO: 17097 - DNA, 20 bp, Artificial Sequence
  Description of Artificial Sequence: Synthetic oligonucleotide
  Target: COL7A1; (+) strand; PAM type: NRG; PAM sequence: AGG
gcagggagagggtccatgtg

SEQ ID NO: 17098 - DNA, 20 bp, Artificial Sequence
  Description of Artificial Sequence: Synthetic oligonucleotide
  Target: COL7A1; (+) strand; PAM type: NRG; PAM sequence: CAG
ggagagggtccatgtgaggt

SEQ ID NO: 17099 - DNA, 20 bp, Artificial Sequence
  Description of Artificial Sequence: Synthetic oligonucleotide
  Target: COL7A1; (+) strand; PAM type: NRG; PAM sequence: GAG
agagggtccatgtgaggtca

SEQ ID NO: 17100 - DNA, 20 bp, Artificial Sequence
  Description of Artificial Sequence: Synthetic oligonucleotide
  Target: COL7A1; (+) strand; PAM type: NRG; PAM sequence: AGG
gagggtccatgtgaggtcag

SEQ ID NO: 17101 - DNA, 20 bp, Artificial Sequence
  Description of Artificial Sequence: Synthetic oligonucleotide
  Target: COL7A1; (+) strand; PAM type: NRG; PAM sequence: GAG
gggtccatgtgaggtcagag

SEQ ID NO: 17102 - DNA, 20 bp, Artificial Sequence
  Description of Artificial Sequence: Synthetic oligonucleotide
  Target: COL7A1; (+) strand; PAM type: NRG; PAM sequence: AGG
ggtccatgtgaggtcagagg

SEQ ID NO: 17103 - DNA, 20 bp, Artificial Sequence
  Description of Artificial Sequence: Synthetic oligonucleotide
  Target: COL7A1; (+) strand; PAM type: NRG; PAM sequence: CAG
catgtgaggtcagaggaggt

SEQ ID NO: 17104 - DNA, 20 bp, Artificial Sequence
  Description of Artificial Sequence: Synthetic oligonucleotide
  Target: COL7A1; (+) strand; PAM type: NRG; PAM sequence: GAG
tgaggtcagaggaggtcagt

SEQ ID NO: 17105 - DNA, 20 bp, Artificial Sequence
  Description of Artificial Sequence: Synthetic oligonucleotide
  Target: COL7A1; (+) strand; PAM type: NRG; PAM sequence: AGG
gaggtcagaggaggtcagtg

SEQ ID NO: 17106 - DNA, 20 bp, Artificial Sequence
  Description of Artificial Sequence: Synthetic oligonucleotide
  Target: COL7A1; (+) strand; PAM type: NRG; PAM sequence: GGG
aggtcagaggaggtcagtga

SEQ ID NO: 17107 - DNA, 20 bp, Artificial Sequence
  Description of Artificial Sequence: Synthetic oligonucleotide
  Target: COL7A1; (+) strand; PAM type: NRG; PAM sequence: AAG
aggaggtcagtgagggacca

SEQ ID NO: 17108 - DNA, 20 bp, Artificial Sequence
  Description of Artificial Sequence: Synthetic oligonucleotide
  Target: COL7A1; (+) strand; PAM type: NRG; PAM sequence: GAG
gaggtcagtgagggaccaaa

SEQ ID NO: 17109 - DNA, 20 bp, Artificial Sequence
  Description of Artificial Sequence: Synthetic oligonucleotide
  Target: COL7A1; (+) strand; PAM type: NRG; PAM sequence: TGG
gggaccaaagagaatcgccc

SEQ ID NO: 17110 - DNA, 20 bp, Artificial Sequence
  Description of Artificial Sequence: Synthetic oligonucleotide
  Target: COL7A1; (+) strand; PAM type: NRG; PAM sequence: TAG
ccaaagagaatcgccctgga

SEQ ID NO: 17111 - DNA, 20 bp, Artificial Sequence
  Description of Artificial Sequence: Synthetic oligonucleotide
  Target: COL7A1; (+) strand; PAM type: NRG; PAM sequence: TGG
aagagaatcgccctggatag

SEQ ID NO: 17112 - DNA, 20 bp, Artificial Sequence
  Description of Artificial Sequence: Synthetic oligonucleotide
  Target: COL7A1; (+) strand; PAM type: NRG; PAM sequence: GGG
agagaatcgccctggatagt

SEQ ID NO: 17113 - DNA, 20 bp, Artificial Sequence
  Description of Artificial Sequence: Synthetic oligonucleotide
  Target: COL7A1; (+) strand; PAM type: NRG; PAM sequence: TAG
gaatcgccctggatagtggg

SEQ ID NO: 17114 - DNA, 20 bp, Artificial Sequence
  Description of Artificial Sequence: Synthetic oligonucleotide
  Target: COL7A1; (+) strand; PAM type: NRG; PAM sequence: AGG
aatcgccctggatagtgggt

SEQ ID NO: 17115 - DNA, 20 bp, Artificial Sequence
  Description of Artificial Sequence: Synthetic oligonucleotide
  Target: COL7A1; (+) strand; PAM type: NRG; PAM sequence: GGG
atcgccctggatagtgggta

SEQ ID NO: 17116 - DNA, 20 bp, Artificial Sequence
  Description of Artificial Sequence: Synthetic oligonucleotide
  Target: COL7A1; (+) strand; PAM type: NRG; PAM sequence: TGG
atagtgggtagggaacacca

SEQ ID NO: 17117 - DNA, 20 bp, Artificial Sequence
  Description of Artificial Sequence: Synthetic oligonucleotide
  Target: COL7A1; (+) strand; PAM type: NRG; PAM sequence: GGG
tagtgggtagggaacaccat

SEQ ID NO: 17118 - DNA, 20 bp, Artificial Sequence
  Description of Artificial Sequence: Synthetic oligonucleotide
  Target: COL7A1; (+) strand; PAM type: NRG; PAM sequence: GGG
agtgggtagggaacaccatg

SEQ ID NO: 17119 - DNA, 20 bp, Artificial Sequence
  Description of Artificial Sequence: Synthetic oligonucleotide
  Target: COL7A1; (+) strand; PAM type: NRG; PAM sequence: TGG
gggtagggaacaccatgggg

SEQ ID NO: 17120 - DNA, 20 bp, Artificial Sequence
  Description of Artificial Sequence: Synthetic oligonucleotide
  Target: COL7A1; (+) strand; PAM type: NRG; PAM sequence: GGG
ggtagggaacaccatggggt

SEQ ID NO: 17121 - DNA, 20 bp, Artificial Sequence
  Description of Artificial Sequence: Synthetic oligonucleotide
  Target: COL7A1; (+) strand; PAM type: NRG; PAM sequence: GAG
tagggaacaccatggggtgg

SEQ ID NO: 17122 - DNA, 20 bp, Artificial Sequence
  Description of Artificial Sequence: Synthetic oligonucleotide
  Target: COL7A1; (+) strand; PAM type: NRG; PAM sequence: TGG
catggggtgggagtcacctc

SEQ ID NO: 17123 - DNA, 20 bp, Artificial Sequence
  Description of Artificial Sequence: Synthetic oligonucleotide
  Target: COL7A1; (+) strand; PAM type: NRG; PAM sequence: GAG
tggggtgggagtcacctctg

SEQ ID NO: 17124 - DNA, 20 bp, Artificial Sequence
  Description of Artificial Sequence: Synthetic oligonucleotide
  Target: COL7A1; (+) strand; PAM type: NRG; PAM sequence: AGG
ggggtgggagtcacctctgg

SEQ ID NO: 17125 - DNA, 20 bp, Artificial Sequence
  Description of Artificial Sequence: Synthetic oligonucleotide
  Target: COL7A1; (+) strand; PAM type: NRG; PAM sequence: CAG
tgggagtcacctctggaggc

SEQ ID NO: 17126 - DNA, 20 bp, Artificial Sequence
  Description of Artificial Sequence: Synthetic oligonucleotide
  Target: COL7A1; (+) strand; PAM type: NRG; PAM sequence: GAG
ggagtcacctctggaggcca

SEQ ID NO: 17127 - DNA, 20 bp, Artificial Sequence
  Description of Artificial Sequence: Synthetic oligonucleotide
  Target: COL7A1; (+) strand; PAM type: NRG; PAM sequence: TGG
cctctggaggccagagccac

SEQ ID NO: 17128 - DNA, 20 bp, Artificial Sequence
  Description of Artificial Sequence: Synthetic oligonucleotide
  Target: COL7A1; (+) strand; PAM type: NRG; PAM sequence: GGG
ctctggaggccagagccact

SEQ ID NO: 17129 - DNA, 20 bp, Artificial Sequence
  Description of Artificial Sequence: Synthetic oligonucleotide
  Target: COL7A1; (+) strand; PAM type: NRG; PAM sequence: GGG
tctggaggccagagccactg

SEQ ID NO: 17130 - DNA, 20 bp, Artificial Sequence
  Description of Artificial Sequence: Synthetic oligonucleotide
  Target: COL7A1; (+) strand; PAM type: NRG; PAM sequence: TGG
agagccactggggcttgcca

SEQ ID NO: 17131 - DNA, 20 bp, Artificial Sequence
  Description of Artificial Sequence: Synthetic oligonucleotide
  Target: COL7A1; (+) strand; PAM type: NRG; PAM sequence: GGG
gagccactggggcttgccat

SEQ ID NO: 17132 - DNA, 20 bp, Artificial Sequence
  Description of Artificial Sequence: Synthetic oligonucleotide
  Target: COL7A1; (+) strand; PAM type: NRG; PAM sequence: GGG
agccactggggcttgccatg

SEQ ID NO: 17133 - DNA, 20 bp, Artificial Sequence
  Description of Artificial Sequence: Synthetic oligonucleotide
  Target: COL7A1; (+) strand; PAM type: NRG; PAM sequence: AAG
ctggggcttgccatggggac

SEQ ID NO: 17134 - DNA, 20 bp, Artificial Sequence
  Description of Artificial Sequence: Synthetic oligonucleotide
  Target: COL7A1; (+) strand; PAM type: NRG; PAM sequence: AGG
tggggcttgccatggggaca

SEQ ID NO: 17135 - DNA, 20 bp, Artificial Sequence
  Description of Artificial Sequence: Synthetic oligonucleotide
  Target: COL7A1; (+) strand; PAM type: NRG; PAM sequence: GGG
ggggcttgccatggggacaa

SEQ ID NO: 17136 - DNA, 20 bp, Artificial Sequence
  Description of Artificial Sequence: Synthetic oligonucleotide
  Target: COL7A1; (+) strand; PAM type: NRG; PAM sequence: TAG
catggggacaagggtcacca

SEQ ID NO: 17137 - DNA, 20 bp, Artificial Sequence
  Description of Artificial Sequence: Synthetic oligonucleotide
  Target: COL7A1; (+) strand; PAM type: NRG; PAM sequence: AGG
atggggacaagggtcaccat

SEQ ID NO: 17138 - DNA, 20 bp, Artificial Sequence
  Description of Artificial Sequence: Synthetic oligonucleotide
  Target: COL7A1; (+) strand; PAM type: NRG; PAM sequence: CAG
gggacaagggtcaccatagg

SEQ ID NO: 17139 - DNA, 20 bp, Artificial Sequence
  Description of Artificial Sequence: Synthetic oligonucleotide
  Target: COL7A1; (+) strand; PAM type: NRG; PAM sequence: AGG
ggacaagggtcaccataggc

SEQ ID NO: 17140 - DNA, 20 bp, Artificial Sequence
  Description of Artificial Sequence: Synthetic oligonucleotide
  Target: COL7A1; (+) strand; PAM type: NRG; PAM sequence: GGG
gacaagggtcaccataggca

SEQ ID NO: 17141 - DNA, 20 bp, Artificial Sequence
  Description of Artificial Sequence: Synthetic oligonucleotide
  Target: COL7A1; (+) strand; PAM type: NRG; PAM sequence: GGG
acaagggtcaccataggcag

SEQ ID NO: 17142 - DNA, 20 bp, Artificial Sequence
  Description of Artificial Sequence: Synthetic oligonucleotide
  Target: COL7A1; (+) strand; PAM type: NRG; PAM sequence: TAG
ataggcaggggacaccatca

SEQ ID NO: 17143 - DNA, 20 bp, Artificial Sequence
  Description of Artificial Sequence: Synthetic oligonucleotide
  Target: COL7A1; (+) strand; PAM type: NRG; PAM sequence: AGG
taggcaggggacaccatcat

SEQ ID NO: 17144 - DNA, 20 bp, Artificial Sequence
  Description of Artificial Sequence: Synthetic oligonucleotide
  Target: COL7A1; (+) strand; PAM type: NRG; PAM sequence: CGG
gcaggggacaccatcatagg

SEQ ID NO: 17145 - DNA, 20 bp, Artificial Sequence
  Description of Artificial Sequence: Synthetic oligonucleotide
  Target: COL7A1; (+) strand; PAM type: NRG; PAM sequence: TGG
accatcataggcggctactg

SEQ ID NO: 17146 - DNA, 20 bp, Artificial Sequence
  Description of Artificial Sequence: Synthetic oligonucleotide
  Target: COL7A1; (+) strand; PAM type: NRG; PAM sequence: GAG
catcataggcggctactgtg

SEQ ID NO: 17147 - DNA, 20 bp, Artificial Sequence
  Description of Artificial Sequence: Synthetic oligonucleotide
  Target: COL7A1; (+) strand; PAM type: NRG; PAM sequence: AGG
atcataggcggctactgtgg

SEQ ID NO: 17148 - DNA, 20 bp, Artificial Sequence
  Description of Artificial Sequence: Synthetic oligonucleotide
  Target: COL7A1; (+) strand; PAM type: NRG; PAM sequence: TGG
ataggcggctactgtggagg

SEQ ID NO: 17149 - DNA, 20 bp, Artificial Sequence
  Description of Artificial Sequence: Synthetic oligonucleotide
  Target: COL7A1; (+) strand; PAM type: NRG; PAM sequence: GGG
taggcggctactgtggaggt

SEQ ID NO: 17150 - DNA, 20 bp, Artificial Sequence
  Description of Artificial Sequence: Synthetic oligonucleotide
  Target: COL7A1; (+) strand; PAM type: NRG; PAM sequence: GGG
aggcggctactgtggaggtg

SEQ ID NO: 17151 - DNA, 20 bp, Artificial Sequence
  Description of Artificial Sequence: Synthetic oligonucleotide
  Target: COL7A1; (+) strand; PAM type: NRG; PAM sequence: GGG
ggcggctactgtggaggtgg

SEQ ID NO: 17152 - DNA, 20 bp, Artificial Sequence
  Description of Artificial Sequence: Synthetic oligonucleotide
  Target: COL7A1; (+) strand; PAM type: NRG; PAM sequence: TGG
actgtggaggtgggggaccc

SEQ ID NO: 17153 - DNA, 20 bp, Artificial Sequence
  Description of Artificial Sequence: Synthetic oligonucleotide
  Target: COL7A1; (+) strand; PAM type: NRG; PAM sequence: GGG
ctgtggaggtgggggaccct

SEQ ID NO: 17154 - DNA, 20 bp, Artificial Sequence
  Description of Artificial Sequence: Synthetic oligonucleotide
  Target: COL7A1; (+) strand; PAM type: NRG; PAM sequence: GAG
tgggggaccctgggtgacat

SEQ ID NO: 17155 - DNA, 20 bp, Artificial Sequence
  Description of Artificial Sequence: Synthetic oligonucleotide
  Target: COL7A1; (+) strand; PAM type: NRG; PAM sequence: AGG
gggggaccctgggtgacatg

SEQ ID NO: 17156 - DNA, 20 bp, Artificial Sequence
  Description of Artificial Sequence: Synthetic oligonucleotide
  Target: COL7A1; (+) strand; PAM type: NRG; PAM sequence: GAG
gggtgacatgaggacaccat

SEQ ID NO: 17157 - DNA, 20 bp, Artificial Sequence
  Description of Artificial Sequence: Synthetic oligonucleotide
  Target: COL7A1; (+) strand; PAM type: NRG; PAM sequence: GAG
gtgacatgaggacaccatga

SEQ ID NO: 17158 - DNA, 20 bp, Artificial Sequence
  Description of Artificial Sequence: Synthetic oligonucleotide
  Target: COL7A1; (+) strand; PAM type: NRG; PAM sequence: TGG
tgaggacaccatgagagcac

SEQ ID NO: 17159 - DNA, 20 bp, Artificial Sequence
  Description of Artificial Sequence: Synthetic oligonucleotide
  Target: COL7A1; (+) strand; PAM type: NRG; PAM sequence: GGG
gaggacaccatgagagcact

SEQ ID NO: 17160 - DNA, 20 bp, Artificial Sequence
  Description of Artificial Sequence: Synthetic oligonucleotide
  Target: COL7A1; (+) strand; PAM type: NRG; PAM sequence: AAG
tgagagcactgggtcactat

SEQ ID NO: 17161 - DNA, 20 bp, Artificial Sequence
  Description of Artificial Sequence: Synthetic oligonucleotide
  Target: COL7A1; (+) strand; PAM type: NRG; PAM sequence: AGG
gagagcactgggtcactata

SEQ ID NO: 17162 - DNA, 20 bp, Artificial Sequence
  Description of Artificial Sequence: Synthetic oligonucleotide
  Target: COL7A1; (+) strand; PAM type: NRG; PAM sequence: AAG
ctgggtcactataaggtcaa

SEQ ID NO: 17163 - DNA, 20 bp, Artificial Sequence
  Description of Artificial Sequence: Synthetic oligonucleotide
  Target: COL7A1; (+) strand; PAM type: NRG; PAM sequence: TGG
aaggtcaaaagctaccacac

SEQ ID NO: 17164 - DNA, 20 bp, Artificial Sequence
  Description of Artificial Sequence: Synthetic oligonucleotide
  Target: COL7A1; (+) strand; PAM type: NRG; PAM sequence: TGG
gtcaaaagctaccacactgg

SEQ ID NO: 17165 - DNA, 20 bp, Artificial Sequence
  Description of Artificial Sequence: Synthetic oligonucleotide
  Target: COL7A1; (+) strand; PAM type: NRG; PAM sequence: GGG
tcaaaagctaccacactggt

SEQ ID NO: 17166 - DNA, 20 bp, Artificial Sequence
  Description of Artificial Sequence: Synthetic oligonucleotide
  Target: COL7A1; (+) strand; PAM type: NRG; PAM sequence: TGG
ccacactggtgggaccacca

SEQ ID NO: 17167 - DNA, 20 bp, Artificial Sequence
  Description of Artificial Sequence: Synthetic oligonucleotide
  Target: COL7A1; (+) strand; PAM type: NRG; PAM sequence: CGG
tggtgggaccaccatggtga

SEQ ID NO: 17168 - DNA, 20 bp, Artificial Sequence
  Description of Artificial Sequence: Synthetic oligonucleotide
  Target: COL7A1; (+) strand; PAM type: NRG; PAM sequence: GGG
ggtgggaccaccatggtgac

SEQ ID NO: 17169 - DNA, 20 bp, Artificial Sequence
  Description of Artificial Sequence: Synthetic oligonucleotide
  Target: COL7A1; (+) strand; PAM type: NRG; PAM sequence: GGG
gtgggaccaccatggtgacg

SEQ ID NO: 17170 - DNA, 20 bp, Artificial Sequence
  Description of Artificial Sequence: Synthetic oligonucleotide
  Target: COL7A1; (+) strand; PAM type: NRG; PAM sequence: GGG
tgggaccaccatggtgacgg

SEQ ID NO: 17171 - DNA, 20 bp, Artificial Sequence
  Description of Artificial Sequence: Synthetic oligonucleotide
  Target: COL7A1; (+) strand; PAM type: NRG; PAM sequence: TGG
ccatggtgacgggggccctc

SEQ ID NO: 17172 - DNA, 20 bp, Artificial Sequence
  Description of Artificial Sequence: Synthetic oligonucleotide
  Target: COL7A1; (+) strand; PAM type: NRG; PAM sequence: GGG
catggtgacgggggccctct

SEQ ID NO: 17173 - DNA, 20 bp, Artificial Sequence
  Description of Artificial Sequence: Synthetic oligonucleotide
  Target: COL7A1; (+) strand; PAM type: NRG; PAM sequence: GGG
atggtgacgggggccctctg

SEQ ID NO: 17174 - DNA, 20 bp, Artificial Sequence
  Description of Artificial Sequence: Synthetic oligonucleotide
  Target: COL7A1; (+) strand; PAM type: NRG; PAM sequence: CAG
tgacgggggccctctgggga

SEQ ID NO: 17175 - DNA, 20 bp, Artificial Sequence
  Description of Artificial Sequence: Synthetic oligonucleotide
  Target: COL7A1; (+) strand; PAM type: NRG; PAM sequence: AGG
gacgggggccctctggggac

SEQ ID NO: 17176 - DNA, 20 bp, Artificial Sequence
  Description of Artificial Sequence: Synthetic oligonucleotide
  Target: COL7A1; (+) strand; PAM type: NRG; PAM sequence: GGG
acgggggccctctggggaca

SEQ ID NO: 17177 - DNA, 20 bp, Artificial Sequence
  Description of Artificial Sequence: Synthetic oligonucleotide
  Target: COL7A1; (+) strand; PAM type: NRG; PAM sequence: GGG
cgggggccctctggggacag

SEQ ID NO: 17178 - DNA, 20 bp, Artificial Sequence
  Description of Artificial Sequence: Synthetic oligonucleotide
  Target: COL7A1; (+) strand; PAM type: NRG; PAM sequence: GGG
gggggccctctggggacagg

SEQ ID NO: 17179 - DNA, 20 bp, Artificial Sequence
  Description of Artificial Sequence: Synthetic oligonucleotide
  Target: COL7A1; (+) strand; PAM type: NRG; PAM sequence: TGG
ctggggacagggggcccctg

SEQ ID NO: 17180 - DNA, 20 bp, Artificial Sequence
  Description of Artificial Sequence: Synthetic oligonucleotide
  Target: COL7A1; (+) strand; PAM type: NRG; PAM sequence: GGG
tggggacagggggcccctgt

SEQ ID NO: 17181 - DNA, 20 bp, Artificial Sequence
  Description of Artificial Sequence: Synthetic oligonucleotide
  Target: COL7A1; (+) strand; PAM type: NRG; PAM sequence: GAG
gggacagggggcccctgtgg

SEQ ID NO: 17182 - DNA, 20 bp, Artificial Sequence
  Description of Artificial Sequence: Synthetic oligonucleotide
  Target: COL7A1; (+) strand; PAM type: NRG; PAM sequence: CAG
acagggggcccctgtgggag

SEQ ID NO: 17183 - DNA, 20 bp, Artificial Sequence
  Description of Artificial Sequence: Synthetic oligonucleotide
  Target: COL7A1; (+) strand; PAM type: NRG; PAM sequence: AGG
cagggggcccctgtgggagc

SEQ ID NO: 17184 - DNA, 20 bp, Artificial Sequence
  Description of Artificial Sequence: Synthetic oligonucleotide
  Target: COL7A1; (+) strand; PAM type: NRG; PAM sequence: GGG
agggggcccctgtgggagca

SEQ ID NO: 17185 - DNA, 20 bp, Artificial Sequence
  Description of Artificial Sequence: Synthetic oligonucleotide
  Target: COL7A1; (+) strand; PAM type: NRG; PAM sequence: GGG
gggggcccctgtgggagcag

SEQ ID NO: 17186 - DNA, 20 bp, Artificial Sequence
  Description of Artificial Sequence: Synthetic oligonucleotide
  Target: COL7A1; (+) strand; PAM type: NRG; PAM sequence: CGG
tgggagcaggggcatcttac

SEQ ID NO: 17187 - DNA, 20 bp, Artificial Sequence
  Description of Artificial Sequence: Synthetic oligonucleotide
  Target: COL7A1; (+) strand; PAM type: NRG; PAM sequence: GGG
gggagcaggggcatcttacc

SEQ ID NO: 17188 - DNA, 20 bp, Artificial Sequence
  Description of Artificial Sequence: Synthetic oligonucleotide
  Target: COL7A1; (+) strand; PAM type: NRG; PAM sequence: CAG
ggggcatcttaccgggtcac

SEQ ID NO: 17189 - DNA, 20 bp, Artificial Sequence
  Description of Artificial Sequence: Synthetic oligonucleotide
  Target: COL7A1; (+) strand; PAM type: NRG; PAM sequence: AGG
gggcatcttaccgggtcacc

SEQ ID NO: 17190 - DNA, 20 bp, Artificial Sequence
  Description of Artificial Sequence: Synthetic oligonucleotide
  Target: COL7A1; (+) strand; PAM type: NRG; PAM sequence: GGG
ggcatcttaccgggtcacca

SEQ ID NO: 17191 - DNA, 20 bp, Artificial Sequence
  Description of Artificial Sequence: Synthetic oligonucleotide
  Target: COL7A1; (+) strand; PAM type: NRG; PAM sequence: CAG
accagggatccctgctgcac

SEQ ID NO: 17192 - DNA, 20 bp, Artificial Sequence
  Description of Artificial Sequence: Synthetic oligonucleotide
  Target: COL7A1; (+) strand; PAM type: NRG; PAM sequence: AGG
ccagggatccctgctgcacc

SEQ ID NO: 17193 - DNA, 20 bp, Artificial Sequence
  Description of Artificial Sequence: Synthetic oligonucleotide
  Target: COL7A1; (+) strand; PAM type: NRG; PAM sequence: GAG
ctgcaccaggttgaccctgt

SEQ ID NO: 17194 - DNA, 20 bp, Artificial Sequence
  Description of Artificial Sequence: Synthetic oligonucleotide
  Target: COL7A1; (+) strand; PAM type: NRG; PAM sequence: CAG
ggttgaccctgtgagaaaca

SEQ ID NO: 17195 - DNA, 20 bp, Artificial Sequence
  Description of Artificial Sequence: Synthetic oligonucleotide
  Target: COL7A1; (+) strand; PAM type: NRG; PAM sequence: TGG
gaccctgtgagaaacacaga

SEQ ID NO: 17196 - DNA, 20 bp, Artificial Sequence
  Description of Artificial Sequence: Synthetic oligonucleotide
  Target: COL7A1; (+) strand; PAM type: NRG; PAM sequence: GGG
accctgtgagaaacacagat

SEQ ID NO: 17197 - DNA, 20 bp, Artificial Sequence
  Description of Artificial Sequence: Synthetic oligonucleotide
  Target: COL7A1; (+) strand; PAM type: NRG; PAM sequence: GGG
ccctgtgagaaacacagatg

SEQ ID NO: 17198 - DNA, 20 bp, Artificial Sequence
  Description of Artificial Sequence: Synthetic oligonucleotide
  Target: COL7A1; (+) strand; PAM type: NRG; PAM sequence: GGG
cctgtgagaaacacagatgg

SEQ ID NO: 17199 - DNA, 20 bp, Artificial Sequence
  Description of Artificial Sequence: Synthetic oligonucleotide
  Target: COL7A1; (+) strand; PAM type: NRG; PAM sequence: GAG
tgtgagaaacacagatgggg

SEQ ID NO: 17200 - DNA, 20 bp, Artificial Sequence
  Description of Artificial Sequence: Synthetic oligonucleotide
  Target: COL7A1; (+) strand; PAM type: NRG; PAM sequence: CAG
acacagatgggggagccctt

SEQ ID NO: 17201 - DNA, 20 bp, Artificial Sequence
  Description of Artificial Sequence: Synthetic oligonucleotide
  Target: COL7A1; (+) strand; PAM type: NRG; PAM sequence: TGG
cagatgggggagcccttcag

SEQ ID NO: 17202 - DNA, 20 bp, Artificial Sequence
  Description of Artificial Sequence: Synthetic oligonucleotide
  Target: COL7A1; (+) strand; PAM type: NRG; PAM sequence: GGG
agatgggggagcccttcagt

SEQ ID NO: 17203 - DNA, 20 bp, Artificial Sequence
  Description of Artificial Sequence: Synthetic oligonucleotide
  Target: COL7A1; (+) strand; PAM type: NRG; PAM sequence: TGG
agtgggactgtccccaacac

SEQ ID NO: 17204 - DNA, 20 bp, Artificial Sequence
  Description of Artificial Sequence: Synthetic oligonucleotide
  Target: COL7A1; (+) strand; PAM type: NRG; PAM sequence: TGG
tggcccatccgctgcatgtg

SEQ ID NO: 17205 - DNA, 20 bp, Artificial Sequence
  Description of Artificial Sequence: Synthetic oligonucleotide
  Target: COL7A1; (+) strand; PAM type: NRG; PAM sequence: CAG
ccgctgcatgtgtggccact

SEQ ID NO: 17206 - DNA, 20 bp, Artificial Sequence
  Description of Artificial Sequence: Synthetic oligonucleotide
  Target: COL7A1; (+) strand; PAM type: NRG; PAM sequence: CAG
tgtgtggccactcagatgct

SEQ ID NO: 17207 - DNA, 20 bp, Artificial Sequence
  Description of Artificial Sequence: Synthetic oligonucleotide
  Target: COL7A1; (+) strand; PAM type: NRG; PAM sequence: CGG
gtggccactcagatgctcag

SEQ ID NO: 17208 - DNA, 20 bp, Artificial Sequence
  Description of Artificial Sequence: Synthetic oligonucleotide
  Target: COL7A1; (+) strand; PAM type: NRG; PAM sequence: CAG
ccactcagatgctcagcggc

SEQ ID NO: 17209 - DNA, 20 bp, Artificial Sequence
  Description of Artificial Sequence: Synthetic oligonucleotide
  Target: COL7A1; (+) strand; PAM type: NRG; PAM sequence: AGG
cactcagatgctcagcggcc

SEQ ID NO: 17210 - DNA, 20 bp, Artificial Sequence
  Description of Artificial Sequence: Synthetic oligonucleotide
  Target: COL7A1; (+) strand; PAM type: NRG; PAM sequence: GGG
actcagatgctcagcggcca

SEQ ID NO: 17211 - DNA, 20 bp, Artificial Sequence
  Description of Artificial Sequence: Synthetic oligonucleotide
  Target: COL7A1; (+) strand; PAM type: NRG; PAM sequence: CAG
gatgctcagcggccagggcc

SEQ ID NO: 17212 - DNA, 20 bp, Artificial Sequence
  Description of Artificial Sequence: Synthetic oligonucleotide
  Target: COL7A1; (+) strand; PAM type: NRG; PAM sequence: AGG
atgctcagcggccagggccc

SEQ ID NO: 17213 - DNA, 20 bp, Artificial Sequence
  Description of Artificial Sequence: Synthetic oligonucleotide
  Target: COL7A1; (+) strand; PAM type: NRG; PAM sequence: CAG
gccagggcccaggccacaca

SEQ ID NO: 17214 - DNA, 20 bp, Artificial Sequence
  Description of Artificial Sequence: Synthetic oligonucleotide
  Target: COL7A1; (+) strand; PAM type: NRG; PAM sequence: CGG
cccaggccacacacagatcc

SEQ ID NO: 17215 - DNA, 20 bp, Artificial Sequence
  Description of Artificial Sequence: Synthetic oligonucleotide
  Target: COL7A1; (+) strand; PAM type: NRG; PAM sequence: GGG
ccaggccacacacagatccc

SEQ ID NO: 17216 - DNA, 20 bp, Artificial Sequence
  Description of Artificial Sequence: Synthetic oligonucleotide
  Target: COL7A1; (+) strand; PAM type: NRG; PAM sequence: TGG
agatcccgggtgaacacaca

SEQ ID NO: 17217 - DNA, 20 bp, Artificial Sequence
  Description of Artificial Sequence: Synthetic oligonucleotide
  Target: COL7A1; (+) strand; PAM type: NRG; PAM sequence: GGG
gatcccgggtgaacacacat

SEQ ID NO: 17218 - DNA, 20 bp, Artificial Sequence
  Description of Artificial Sequence: Synthetic oligonucleotide
  Target: COL7A1; (+) strand; PAM type: NRG; PAM sequence: GGG
atcccgggtgaacacacatg

SEQ ID NO: 17219 - DNA, 20 bp, Artificial Sequence
  Description of Artificial Sequence: Synthetic oligonucleotide
  Target: COL7A1; (+) strand; PAM type: NRG; PAM sequence: CGG
cgggtgaacacacatggggc

SEQ ID NO: 17220 - DNA, 20 bp, Artificial Sequence
  Description of Artificial Sequence: Synthetic oligonucleotide
  Target: COL7A1; (+) strand; PAM type: NRG; PAM sequence: CAG
gtgaacacacatggggccgg

SEQ ID NO: 17221 - DNA, 20 bp, Artificial Sequence
  Description of Artificial Sequence: Synthetic oligonucleotide
  Target: COL7A1; (+) strand; PAM type: NRG; PAM sequence: AAG
acacacatggggccggcagc

SEQ ID NO: 17222 - DNA, 20 bp, Artificial Sequence
  Description of Artificial Sequence: Synthetic oligonucleotide
  Target: COL7A1; (+) strand; PAM type: NRG; PAM sequence: AGG
cacacatggggccggcagca

SEQ ID NO: 17223 - DNA, 20 bp, Artificial Sequence
  Description of Artificial Sequence: Synthetic oligonucleotide
  Target: COL7A1; (+) strand; PAM type: NRG; PAM sequence: GGG
acacatggggccggcagcaa

SEQ ID NO: 17224 - DNA, 20 bp, Artificial Sequence
  Description of Artificial Sequence: Synthetic oligonucleotide
  Target: COL7A1; (+) strand; PAM type: NRG; PAM sequence: GAG
acatggggccggcagcaagg

SEQ ID NO: 17225 - DNA, 20 bp, Artificial Sequence
  Description of Artificial Sequence: Synthetic oligonucleotide
  Target: COL7A1; (+) strand; PAM type: NRG; PAM sequence: CAG
ggggccggcagcaagggagc

SEQ ID NO: 17226 - DNA, 20 bp, Artificial Sequence
  Description of Artificial Sequence: Synthetic oligonucleotide
  Target: COL7A1; (+) strand; PAM type: NRG; PAM sequence: CAG
agcaagggagccagaacccc

SEQ ID NO: 17227 - DNA, 20 bp, Artificial Sequence
  Description of Artificial Sequence: Synthetic oligonucleotide
  Target: COL7A1; (+) strand; PAM type: NRG; PAM sequence: AAG
agccagaacccccagcactt

SEQ ID NO: 17228 - DNA, 20 bp, Artificial Sequence
  Description of Artificial Sequence: Synthetic oligonucleotide
  Target: COL7A1; (+) strand; PAM type: NRG; PAM sequence: GAG
ccagaacccccagcacttaa

SEQ ID NO: 17229 - DNA, 20 bp, Artificial Sequence
  Description of Artificial Sequence: Synthetic oligonucleotide
  Target: COL7A1; (+) strand; PAM type: NRG; PAM sequence: AGG
cagaacccccagcacttaag

SEQ ID NO: 17230 - DNA, 20 bp, Artificial Sequence
  Description of Artificial Sequence: Synthetic oligonucleotide
  Target: COL7A1; (+) strand; PAM type: NRG; PAM sequence: CAG
ccagcacttaagaggacccc

SEQ ID NO: 17231 - DNA, 20 bp, Artificial Sequence
  Description of Artificial Sequence: Synthetic oligonucleotide
  Target: COL7A1; (+) strand; PAM type: NRG; PAM sequence: AGG
cagcacttaagaggaccccc

SEQ ID NO: 17232 - DNA, 20 bp, Artificial Sequence
  Description of Artificial Sequence: Synthetic oligonucleotide
  Target: COL7A1; (+) strand; PAM type: NRG; PAM sequence: TGG
gatatgtgtgtgtgtgatgc

SEQ ID NO: 17233 - DNA, 20 bp, Artificial Sequence
  Description of Artificial Sequence: Synthetic oligonucleotide
  Target: COL7A1; (+) strand; PAM type: NRG; PAM sequence: TGG
tgtgtgtgtgatgctggctc

SEQ ID NO: 17234 - DNA, 20 bp, Artificial Sequence
  Description of Artificial Sequence: Synthetic oligonucleotide
  Target: COL7A1; (+) strand; PAM type: NRG; PAM sequence: TGG
tgtgatgctggctctggacc

SEQ ID NO: 17235 - DNA, 20 bp, Artificial Sequence
  Description of Artificial Sequence: Synthetic oligonucleotide
  Target: COL7A1; (+) strand; PAM type: NRG; PAM sequence: GGG
gtgatgctggctctggacct

SEQ ID NO: 17236 - DNA, 20 bp, Artificial Sequence
  Description of Artificial Sequence: Synthetic oligonucleotide
  Target: COL7A1; (+) strand; PAM type: NRG; PAM sequence: TGG
gctggctctggacctgggcc

SEQ ID NO: 17237 - DNA, 20 bp, Artificial Sequence
  Description of Artificial Sequence: Synthetic oligonucleotide
  Target: COL7A1; (+) strand; PAM type: NRG; PAM sequence: GGG
ctggctctggacctgggcct

SEQ ID NO: 17238 - DNA, 20 bp, Artificial Sequence
  Description of Artificial Sequence: Synthetic oligonucleotide
  Target: COL7A1; (+) strand; PAM type: NRG; PAM sequence: TGG
tctggacctgggcctgggcc

SEQ ID NO: 17239 - DNA, 20 bp, Artificial Sequence
  Description of Artificial Sequence: Synthetic oligonucleotide
  Target: COL7A1; (+) strand; PAM type: NRG; PAM sequence: GGG
ctggacctgggcctgggcct

SEQ ID NO: 17240 - DNA, 20 bp, Artificial Sequence
  Description of Artificial Sequence: Synthetic oligonucleotide
  Target: COL7A1; (+) strand; PAM type: NRG; PAM sequence: TGG
cctgggcctgggcctgggcc

SEQ ID NO: 17241 - DNA, 20 bp, Artificial Sequence
  Description of Artificial Sequence: Synthetic oligonucleotide
  Target: COL7A1; (+) strand; PAM type: NRG; PAM sequence: GGG
ctgggcctgggcctgggcct

SEQ ID NO: 17242 - DNA, 20 bp, Artificial Sequence
  Description of Artificial Sequence: Synthetic oligonucleotide
  Target: COL7A1; (+) strand; PAM type: NRG; PAM sequence: GGG
tgggcctgggcctgggcctg

SEQ ID NO: 17243 - DNA, 20 bp, Artificial Sequence
  Description of Artificial Sequence: Synthetic oligonucleotide
  Target: COL7A1; (+) strand; PAM type: NRG; PAM sequence: CAG
gcctgggcctgggcctgggg

SEQ ID NO: 17244 - DNA, 20 bp, Artificial Sequence
  Description of Artificial Sequence: Synthetic oligonucleotide
  Target: COL7A1; (+) strand; PAM type: NRG; PAM sequence: TGG
ggcctggggcagaacttgcc

SEQ ID NO: 17245 - DNA, 20 bp, Artificial Sequence
  Description of Artificial Sequence: Synthetic oligonucleotide
  Target: COL7A1; (+) strand; PAM type: NRG; PAM sequence: GGG
gcctggggcagaacttgcct

SEQ ID NO: 17246 - DNA, 20 bp, Artificial Sequence
  Description of Artificial Sequence: Synthetic oligonucleotide
  Target: COL7A1; (+) strand; PAM type: NRG; PAM sequence: GGG
cctggggcagaacttgcctg

SEQ ID NO: 17247 - DNA, 20 bp, Artificial Sequence
  Description of Artificial Sequence: Synthetic oligonucleotide
  Target: COL7A1; (+) strand; PAM type: NRG; PAM sequence: CAG
gcagaacttgcctggggtcc

SEQ ID NO: 17248 - DNA, 20 bp, Artificial Sequence
  Description of Artificial Sequence: Synthetic oligonucleotide
  Target: COL7A1; (+) strand; PAM type: NRG; PAM sequence: AGG
cagaacttgcctggggtccc

SEQ ID NO: 17249 - DNA, 20 bp, Artificial Sequence
  Description of Artificial Sequence: Synthetic oligonucleotide
  Target: COL7A1; (+) strand; PAM type: NRG; PAM sequence: GAG
gaacttgcctggggtcccag

SEQ ID NO: 17250 - DNA, 20 bp, Artificial Sequence
  Description of Artificial Sequence: Synthetic oligonucleotide
  Target: COL7A1; (+) strand; PAM type: NRG; PAM sequence: CAG
tggggtcccaggagtccacg

SEQ ID NO: 17251 - DNA, 20 bp, Artificial Sequence
  Description of Artificial Sequence: Synthetic oligonucleotide
  Target: COL7A1; (+) strand; PAM type: NRG; PAM sequence: TGG
cccaggagtccacgcagtcc

SEQ ID NO: 17252 - DNA, 20 bp, Artificial Sequence
  Description of Artificial Sequence: Synthetic oligonucleotide
  Target: COL7A1; (+) strand; PAM type: NRG; PAM sequence: CGG
tccacgcagtcctggcaacc

SEQ ID NO: 17253 - DNA, 20 bp, Artificial Sequence
  Description of Artificial Sequence: Synthetic oligonucleotide
  Target: COL7A1; (+) strand; PAM type: NRG; PAM sequence: GAG
gcagtcctggcaacccggct

SEQ ID NO: 17254 - DNA, 20 bp, Artificial Sequence
  Description of Artificial Sequence: Synthetic oligonucleotide
  Target: COL7A1; (+) strand; PAM type: NRG; PAM sequence: CAG
cccggctgagcccttgtcac

SEQ ID NO: 17255 - DNA, 20 bp, Artificial Sequence
  Description of Artificial Sequence: Synthetic oligonucleotide
  Target: COL7A1; (+) strand; PAM type: NRG; PAM sequence: AGG
ccggctgagcccttgtcacc

SEQ ID NO: 17256 - DNA, 20 bp, Artificial Sequence
  Description of Artificial Sequence: Synthetic oligonucleotide
  Target: COL7A1; (+) strand; PAM type: NRG; PAM sequence: TGG
ggctctcccttgctgccctg

SEQ ID NO: 17257 - DNA, 20 bp, Artificial Sequence
  Description of Artificial Sequence: Synthetic oligonucleotide
  Target: COL7A1; (+) strand; PAM type: NRG; PAM sequence: GGG
gctctcccttgctgccctgt

SEQ ID NO: 17258 - DNA, 20 bp, Artificial Sequence
  Description of Artificial Sequence: Synthetic oligonucleotide
  Target: COL7A1; (+) strand; PAM type: NRG; PAM sequence: GAG
tctcccttgctgccctgtgg

SEQ ID NO: 17259 - DNA, 20 bp, Artificial Sequence
  Description of Artificial Sequence: Synthetic oligonucleotide
  Target: COL7A1; (+) strand; PAM type: NRG; PAM sequence: CAG
tgctgccctgtgggagtgac

SEQ ID NO: 17260 - DNA, 20 bp, Artificial Sequence
  Description of Artificial Sequence: Synthetic oligonucleotide
  Target: COL7A1; (+) strand; PAM type: NRG; PAM sequence: AGG
gctgccctgtgggagtgacc

SEQ ID NO: 17261 - DNA, 20 bp, Artificial Sequence
  Description of Artificial Sequence: Synthetic oligonucleotide
  Target: COL7A1; (+) strand; PAM type: NRG; PAM sequence: GAG
tgccctgtgggagtgaccag

SEQ ID NO: 17262 - DNA, 20 bp, Artificial Sequence
  Description of Artificial Sequence: Synthetic oligonucleotide
  Target: COL7A1; (+) strand; PAM type: NRG; PAM sequence: GAG
ccctgtgggagtgaccagga

SEQ ID NO: 17263 - DNA, 20 bp, Artificial Sequence
  Description of Artificial Sequence: Synthetic oligonucleotide
  Target: COL7A1; (+) strand; PAM type: NRG; PAM sequence: AGG
cctgtgggagtgaccaggag

SEQ ID NO: 17264 - DNA, 20 bp, Artificial Sequence
  Description of Artificial Sequence: Synthetic oligonucleotide
  Target: COL7A1; (+) strand; PAM type: NRG; PAM sequence: GGG
ctgtgggagtgaccaggaga

SEQ ID NO: 17265 - DNA, 20 bp, Artificial Sequence
  Description of Artificial Sequence: Synthetic oligonucleotide
  Target: COL7A1; (+) strand; PAM type: NRG; PAM sequence: CAG
gagtgaccaggagagggatt

SEQ ID NO: 17266 - DNA, 20 bp, Artificial Sequence
  Description of Artificial Sequence: Synthetic oligonucleotide
  Target: COL7A1; (+) strand; PAM type: NRG; PAM sequence: CAG
gaccaggagagggattcagt

SEQ ID NO: 17267 - DNA, 20 bp, Artificial Sequence
  Description of Artificial Sequence: Synthetic oligonucleotide
  Target: COL7A1; (+) strand; PAM type: NRG; PAM sequence: AGG
accaggagagggattcagtc

SEQ ID NO: 17268 - DNA, 20 bp, Artificial Sequence
  Description of Artificial Sequence: Synthetic oligonucleotide
  Target: COL7A1; (+) strand; PAM type: NRG; PAM sequence: CAG
gagagggattcagtcaggac

SEQ ID NO: 17269 - DNA, 20 bp, Artificial Sequence
  Description of Artificial Sequence: Synthetic oligonucleotide
  Target: COL7A1; (+) strand; PAM type: NRG; PAM sequence: CAG
ggattcagtcaggaccagat

SEQ ID NO: 17270 - DNA, 20 bp, Artificial Sequence
  Description of Artificial Sequence: Synthetic oligonucleotide
  Target: COL7A1; (+) strand; PAM type: NRG; PAM sequence: AGG
gattcagtcaggaccagatc

SEQ ID NO: 17271 - DNA, 20 bp, Artificial Sequence
  Description of Artificial Sequence: Synthetic oligonucleotide
  Target: COL7A1; (+) strand; PAM type: NRG; PAM sequence: TGG
cagtcaggaccagatcaggc

SEQ ID NO: 17272 - DNA, 20 bp, Artificial Sequence
  Description of Artificial Sequence: Synthetic oligonucleotide
  Target: COL7A1; (+) strand; PAM type: NRG; PAM sequence: GGG
agtcaggaccagatcaggct

SEQ ID NO: 17273 - DNA, 20 bp, Artificial Sequence
  Description of Artificial Sequence: Synthetic oligonucleotide
  Target: COL7A1; (+) strand; PAM type: NRG; PAM sequence: GGG
gtcaggaccagatcaggctg

SEQ ID NO: 17274 - DNA, 20 bp, Artificial Sequence
  Description of Artificial Sequence: Synthetic oligonucleotide
  Target: COL7A1; (+) strand; PAM type: NRG; PAM sequence: GGG
tcaggaccagatcaggctgg

SEQ ID NO: 17275 - DNA, 20 bp, Artificial Sequence
  Description of Artificial Sequence: Synthetic oligonucleotide
  Target: COL7A1; (+) strand; PAM type: NRG; PAM sequence: TAG
accagatcaggctgggggct

SEQ ID NO: 17276 - DNA, 20 bp, Artificial Sequence
  Description of Artificial Sequence: Synthetic oligonucleotide
  Target: COL7A1; (+) strand; PAM type: NRG; PAM sequence: GAG
ctgggggcttagaatacaac

SEQ ID NO: 17277 - DNA, 20 bp, Artificial Sequence
  Description of Artificial Sequence: Synthetic oligonucleotide
  Target: COL7A1; (+) strand; PAM type: NRG; PAM sequence: CAG
ttagaatacaacgagcccgc

SEQ ID NO: 17278 - DNA, 20 bp, Artificial Sequence
  Description of Artificial Sequence: Synthetic oligonucleotide
  Target: COL7A1; (+) strand; PAM type: NRG; PAM sequence: TGG
aatacaacgagcccgccagc

SEQ ID NO: 17279 - DNA, 20 bp, Artificial Sequence
  Description of Artificial Sequence: Synthetic oligonucleotide
  Target: COL7A1; (+) strand; PAM type: NRG; PAM sequence: GGG
atacaacgagcccgccagct

SEQ ID NO: 17280 - DNA, 20 bp, Artificial Sequence
  Description of Artificial Sequence: Synthetic oligonucleotide
  Target: COL7A1; (+) strand; PAM type: NRG; PAM sequence: GGG
tacaacgagcccgccagctg

SEQ ID NO: 17281 - DNA, 20 bp, Artificial Sequence
  Description of Artificial Sequence: Synthetic oligonucleotide
  Target: COL7A1; (+) strand; PAM type: NRG; PAM sequence: CAG
aacgagcccgccagctgggg

SEQ ID NO: 17282 - DNA, 20 bp, Artificial Sequence
  Description of Artificial Sequence: Synthetic oligonucleotide
  Target: COL7A1; (+) strand; PAM type: NRG; PAM sequence: GAG
cgagcccgccagctggggca

SEQ ID NO: 17283 - DNA, 20 bp, Artificial Sequence
  Description of Artificial Sequence: Synthetic oligonucleotide
  Target: COL7A1; (+) strand; PAM type: NRG; PAM sequence: AAG
cgccagctggggcagagctc

SEQ ID NO: 17284 - DNA, 20 bp, Artificial Sequence
  Description of Artificial Sequence: Synthetic oligonucleotide
  Target: COL7A1; (+) strand; PAM type: NRG; PAM sequence: CGG
gagctcaagtcactcccgaa

SEQ ID NO: 17285 - DNA, 20 bp, Artificial Sequence
  Description of Artificial Sequence: Synthetic oligonucleotide
  Target: COL7A1; (+) strand; PAM type: NRG; PAM sequence: TAG
aagtcactcccgaacggccc

SEQ ID NO: 17286 - DNA, 20 bp, Artificial Sequence
  Description of Artificial Sequence: Synthetic oligonucleotide
  Target: COL7A1; (+) strand; PAM type: NRG; PAM sequence: CAG
tcactcccgaacggccctag

SEQ ID NO: 17287 - DNA, 20 bp, Artificial Sequence
  Description of Artificial Sequence: Synthetic oligonucleotide
  Target: COL7A1; (+) strand; PAM type: NRG; PAM sequence: CAG
gccctagcagcacgtcctcc

SEQ ID NO: 17288 - DNA, 20 bp, Artificial Sequence
  Description of Artificial Sequence: Synthetic oligonucleotide
  Target: COL7A1; (+) strand; PAM type: NRG; PAM sequence: TAG
cgtcctcccagcctgtgcca

SEQ ID NO: 17289 - DNA, 20 bp, Artificial Sequence
  Description of Artificial Sequence: Synthetic oligonucleotide
  Target: COL7A1; (+) strand; PAM type: NRG; PAM sequence: CGG
cctcccagcctgtgccatag

SEQ ID NO: 17290 - DNA, 20 bp, Artificial Sequence
  Description of Artificial Sequence: Synthetic oligonucleotide
  Target: COL7A1; (+) strand; PAM type: NRG; PAM sequence: GGG
ctcccagcctgtgccatagc

SEQ ID NO: 17291 - DNA, 20 bp, Artificial Sequence
  Description of Artificial Sequence: Synthetic oligonucleotide
  Target: COL7A1; (+) strand; PAM type: NRG; PAM sequence: TGG
ccagcctgtgccatagcggg

SEQ ID NO: 17292 - DNA, 20 bp, Artificial Sequence
  Description of Artificial Sequence: Synthetic oligonucleotide
  Target: COL7A1; (+) strand; PAM type: NRG; PAM sequence: TGG
tgtgccatagcgggtggaac

SEQ ID NO: 17293 - DNA, 20 bp, Artificial Sequence
  Description of Artificial Sequence: Synthetic oligonucleotide
  Target: COL7A1; (+) strand; PAM type: NRG; PAM sequence: GGG
gtgccatagcgggtggaact

SEQ ID NO: 17294 - DNA, 20 bp, Artificial Sequence
  Description of Artificial Sequence: Synthetic oligonucleotide
  Target: COL7A1; (+) strand; PAM type: NRG; PAM sequence: GGG
tgccatagcgggtggaactg

SEQ ID NO: 17295 - DNA, 20 bp, Artificial Sequence
  Description of Artificial Sequence: Synthetic oligonucleotide
  Target: COL7A1; (+) strand; PAM type: NRG; PAM sequence: GGG
gccatagcgggtggaactgg

SEQ ID NO: 17296 - DNA, 20 bp, Artificial Sequence
  Description of Artificial Sequence: Synthetic oligonucleotide
  Target: COL7A1; (+) strand; PAM type: NRG; PAM sequence: TAG
gcgggtggaactgggggctg

SEQ ID NO: 17297 - DNA, 20 bp, Artificial Sequence
  Description of Artificial Sequence: Synthetic oligonucleotide
  Target: COL7A1; (+) strand; PAM type: NRG; PAM sequence: CAG
gaactgggggctgtagtcca

SEQ ID NO: 17298 - DNA, 20 bp, Artificial Sequence
  Description of Artificial Sequence: Synthetic oligonucleotide
  Target: COL7A1; (+) strand; PAM type: NRG; PAM sequence: TGG
gggggctgtagtccacagac

SEQ ID NO: 17299 - DNA, 20 bp, Artificial Sequence
  Description of Artificial Sequence: Synthetic oligonucleotide
  Target: COL7A1; (+) strand; PAM type: NRG; PAM sequence: AAG
actggctcatttctcacccc

SEQ ID NO: 17300 - DNA, 20 bp, Artificial Sequence
  Description of Artificial Sequence: Synthetic oligonucleotide
  Target: COL7A1; (+) strand; PAM type: NRG; PAM sequence: AGG
ctggctcatttctcacccca

SEQ ID NO: 17301 - DNA, 20 bp, Artificial Sequence
  Description of Artificial Sequence: Synthetic oligonucleotide
  Target: COL7A1; (+) strand; PAM type: NRG; PAM sequence: CAG
atttctcaccccaaggactc

SEQ ID NO: 17302 - DNA, 20 bp, Artificial Sequence
  Description of Artificial Sequence: Synthetic oligonucleotide
  Target: COL7A1; (+) strand; PAM type: NRG; PAM sequence: TGG
ttgccccgccctcttatcac

SEQ ID NO: 17303 - DNA, 20 bp, Artificial Sequence
  Description of Artificial Sequence: Synthetic oligonucleotide
  Target: COL7A1; (+) strand; PAM type: NRG; PAM sequence: GGG
tgccccgccctcttatcact

SEQ ID NO: 17304 - DNA, 20 bp, Artificial Sequence
  Description of Artificial Sequence: Synthetic oligonucleotide
  Target: COL7A1; (+) strand; PAM type: NRG; PAM sequence: AAG
tgggttcctcatcccatctg

SEQ ID NO: 17305 - DNA, 20 bp, Artificial Sequence
  Description of Artificial Sequence: Synthetic oligonucleotide
  Target: COL7A1; (+) strand; PAM type: NRG; PAM sequence: CAG
catcccatctgaagcacctt

SEQ ID NO: 17306 - DNA, 20 bp, Artificial Sequence
  Description of Artificial Sequence: Synthetic oligonucleotide
  Target: COL7A1; (+) strand; PAM type: NRG; PAM sequence: TGG
ccatctgaagcaccttcaga

SEQ ID NO: 17307 - DNA, 20 bp, Artificial Sequence
  Description of Artificial Sequence: Synthetic oligonucleotide
  Target: COL7A1; (+) strand; PAM type: NRG; PAM sequence: GGG
catctgaagcaccttcagat

SEQ ID NO: 17308 - DNA, 20 bp, Artificial Sequence
  Description of Artificial Sequence: Synthetic oligonucleotide
  Target: COL7A1; (+) strand; PAM type: NRG; PAM sequence: GGG
atctgaagcaccttcagatg

SEQ ID NO: 17309 - DNA, 20 bp, Artificial Sequence
  Description of Artificial Sequence: Synthetic oligonucleotide
  Target: COL7A1; (+) strand; PAM type: NRG; PAM sequence: AAG
accttcagatggggacaccc

SEQ ID NO: 17310 - DNA, 20 bp, Artificial Sequence
  Description of Artificial Sequence: Synthetic oligonucleotide
  Target: COL7A1; (+) strand; PAM type: NRG; PAM sequence: AGG
ccttcagatggggacaccca

SEQ ID NO: 17311 - DNA, 20 bp, Artificial Sequence
  Description of Artificial Sequence: Synthetic oligonucleotide
  Target: COL7A1; (+) strand; PAM type: NRG; PAM sequence: GAG
ttcagatggggacacccaag

SEQ ID NO: 17312 - DNA, 20 bp, Artificial Sequence
  Description of Artificial Sequence: Synthetic oligonucleotide
  Target: COL7A1; (+) strand; PAM type: NRG; PAM sequence: TAG
gagcccctttcctgtcccta

SEQ ID NO: 17313 - DNA, 20 bp, Artificial Sequence
  Description of Artificial Sequence: Synthetic oligonucleotide
  Target: COL7A1; (+) strand; PAM type: NRG; PAM sequence: AGG
agcccctttcctgtccctat

SEQ ID NO: 17314 - DNA, 20 bp, Artificial Sequence
  Description of Artificial Sequence: Synthetic oligonucleotide
  Target: COL7A1; (+) strand; PAM type: NRG; PAM sequence: GGG
gcccctttcctgtccctata

SEQ ID NO: 17315 - DNA, 20 bp, Artificial Sequence
  Description of Artificial Sequence: Synthetic oligonucleotide
  Target: COL7A1; (+) strand; PAM type: NRG; PAM sequence: TAG
gtccctatagggccccttca

SEQ ID NO: 17316 - DNA, 20 bp, Artificial Sequence
  Description of Artificial Sequence: Synthetic oligonucleotide
  Target: COL7A1; (+) strand; PAM type: NRG; PAM sequence: AGG
tccctatagggccccttcat

SEQ ID NO: 17317 - DNA, 20 bp, Artificial Sequence
  Description of Artificial Sequence: Synthetic oligonucleotide
  Target: COL7A1; (+) strand; PAM type: NRG; PAM sequence: GGG
ccctatagggccccttcata

SEQ ID NO: 17318 - DNA, 20 bp, Artificial Sequence
  Description of Artificial Sequence: Synthetic oligonucleotide
  Target: COL7A1; (+) strand; PAM type: NRG; PAM sequence: CAG
atagggccccttcatagggc

SEQ ID NO: 17319 - DNA, 20 bp, Artificial Sequence
  Description of Artificial Sequence: Synthetic oligonucleotide
  Target: COL7A1; (+) strand; PAM type: NRG; PAM sequence: CAG
cccttcatagggccagtcca

SEQ ID NO: 17320 - DNA, 20 bp, Artificial Sequence
  Description of Artificial Sequence: Synthetic oligonucleotide
  Target: COL7A1; (+) strand; PAM type: NRG; PAM sequence: GAG
cttcatagggccagtccaca

SEQ ID NO: 17321 - DNA, 20 bp, Artificial Sequence
  Description of Artificial Sequence: Synthetic oligonucleotide
  Target: COL7A1; (+) strand; PAM type: NRG; PAM sequence: AAG
agctctcctaacctcacacc

SEQ ID NO: 17322 - DNA, 20 bp, Artificial Sequence
  Description of Artificial Sequence: Synthetic oligonucleotide
  Target: COL7A1; (+) strand; PAM type: NRG; PAM sequence: AGG
gctctcctaacctcacacca

SEQ ID NO: 17323 - DNA, 20 bp, Artificial Sequence
  Description of Artificial Sequence: Synthetic oligonucleotide
  Target: COL7A1; (+) strand; PAM type: NRG; PAM sequence: GAG
taacctcacaccaaggcctt

SEQ ID NO: 17324 - DNA, 20 bp, Artificial Sequence
  Description of Artificial Sequence: Synthetic oligonucleotide
  Target: COL7A1; (+) strand; PAM type: NRG; PAM sequence: TAG
ccaaggccttgagccctccc

SEQ ID NO: 17325 - DNA, 20 bp, Artificial Sequence
  Description of Artificial Sequence: Synthetic oligonucleotide
  Target: COL7A1; (+) strand; PAM type: NRG; PAM sequence: GAG
aaggccttgagccctcccta

SEQ ID NO: 17326 - DNA, 20 bp, Artificial Sequence
  Description of Artificial Sequence: Synthetic oligonucleotide
  Target: COL7A1; (+) strand; PAM type: NRG; PAM sequence: CGG
ctccctagagcccctcctct

SEQ ID NO: 17327 - DNA, 20 bp, Artificial Sequence
  Description of Artificial Sequence: Synthetic oligonucleotide
  Target: COL7A1; (+) strand; PAM type: NRG; PAM sequence: TAG
ccctcctctcggccactcca

SEQ ID NO: 17328 - DNA, 20 bp, Artificial Sequence
  Description of Artificial Sequence: Synthetic oligonucleotide
  Target: COL7A1; (+) strand; PAM type: NRG; PAM sequence: CAG
cctctcggccactccatagt

SEQ ID NO: 17329 - DNA, 20 bp, Artificial Sequence
  Description of Artificial Sequence: Synthetic oligonucleotide
  Target: COL7A1; (+) strand; PAM type: NRG; PAM sequence: CAG
ggccactccatagtcagcca

SEQ ID NO: 17330 - DNA, 20 bp, Artificial Sequence
  Description of Artificial Sequence: Synthetic oligonucleotide
  Target: COL7A1; (+) strand; PAM type: NRG; PAM sequence: CAG
aaccccttccccctaaaccc

SEQ ID NO: 17331 - DNA, 20 bp, Artificial Sequence
  Description of Artificial Sequence: Synthetic oligonucleotide
  Target: COL7A1; (+) strand; PAM type: NRG; PAM sequence: AAG
ccttccccctaaaccccaga

SEQ ID NO: 17332 - DNA, 20 bp, Artificial Sequence
  Description of Artificial Sequence: Synthetic oligonucleotide
  Target: COL7A1; (+) strand; PAM type: NRG; PAM sequence: CAG
gtcctcccctcctgccctca

SEQ ID NO: 17333 - DNA, 20 bp, Artificial Sequence
  Description of Artificial Sequence: Synthetic oligonucleotide
  Target: COL7A1; (+) strand; PAM type: NRG; PAM sequence: TGG
tcctgccctcacagatgctg

SEQ ID NO: 17334 - DNA, 20 bp, Artificial Sequence
  Description of Artificial Sequence: Synthetic oligonucleotide
  Target: COL7A1; (+) strand; PAM type: NRG; PAM sequence: CAG
cagatgctgtggaaccacca

SEQ ID NO: 17335 - DNA, 20 bp, Artificial Sequence
  Description of Artificial Sequence: Synthetic oligonucleotide
  Target: COL7A1; (+) strand; PAM type: NRG; PAM sequence: CAG
ctgtggaaccaccacagcca

SEQ ID NO: 17336 - DNA, 20 bp, Artificial Sequence
  Description of Artificial Sequence: Synthetic oligonucleotide
  Target: COL7A1; (+) strand; PAM type: NRG; PAM sequence: AGG
tgtggaaccaccacagccac

SEQ ID NO: 17337 - DNA, 20 bp, Artificial Sequence
  Description of Artificial Sequence: Synthetic oligonucleotide
  Target: COL7A1; (+) strand; PAM type: NRG; PAM sequence: CAG
accacagccacaggacccca

SEQ ID NO: 17338 - DNA, 20 bp, Artificial Sequence
  Description of Artificial Sequence: Synthetic oligonucleotide
  Target: COL7A1; (+) strand; PAM type: NRG; PAM sequence: GAG
cacagccacaggaccccaca

SEQ ID NO: 17339 - DNA, 20 bp, Artificial Sequence
  Description of Artificial Sequence: Synthetic oligonucleotide
  Target: COL7A1; (+) strand; PAM type: NRG; PAM sequence: GAG
cagccacaggaccccacaga

SEQ ID NO: 17340 - DNA, 20 bp, Artificial Sequence
  Description of Artificial Sequence: Synthetic oligonucleotide
  Target: COL7A1; (+) strand; PAM type: NRG; PAM sequence: CAG
tcttccctgtaccttgtcac

SEQ ID NO: 17341 - DNA, 20 bp, Artificial Sequence
  Description of Artificial Sequence: Synthetic oligonucleotide
  Target: COL7A1; (+) strand; PAM type: NRG; PAM sequence: AGG
cttccctgtaccttgtcacc

SEQ ID NO: 17342 - DNA, 20 bp, Artificial Sequence
  Description of Artificial Sequence: Synthetic oligonucleotide
  Target: COL7A1; (+) strand; PAM type: NRG; PAM sequence: GGG
ttccctgtaccttgtcacca

SEQ ID NO: 17343 - DNA, 20 bp, Artificial Sequence
  Description of Artificial Sequence: Synthetic oligonucleotide
  Target: COL7A1; (+) strand; PAM type: NRG; PAM sequence: GAG
agggtccccattgtctcccc

SEQ ID NO: 17344 - DNA, 20 bp, Artificial Sequence
  Description of Artificial Sequence: Synthetic oligonucleotide
  Target: COL7A1; (+) strand; PAM type: NRG; PAM sequence: AGG
gggtccccattgtctccccg

SEQ ID NO: 17345 - DNA, 20 bp, Artificial Sequence
  Description of Artificial Sequence: Synthetic oligonucleotide
  Target: COL7A1; (+) strand; PAM type: NRG; PAM sequence: AAG
gaggtcctttgtcaccatcc

SEQ ID NO: 17346 - DNA, 20 bp, Artificial Sequence
  Description of Artificial Sequence: Synthetic oligonucleotide
  Target: COL7A1; (+) strand; PAM type: NRG; PAM sequence: GAG
tttgtcaccatccaagcccc

SEQ ID NO: 17347 - DNA, 20 bp, Artificial Sequence
  Description of Artificial Sequence: Synthetic oligonucleotide
  Target: COL7A1; (+) strand; PAM type: NRG; PAM sequence: AGG
ttgtcaccatccaagccccg

SEQ ID NO: 17348 - DNA, 20 bp, Artificial Sequence
  Description of Artificial Sequence: Synthetic oligonucleotide
  Target: COL7A1; (+) strand; PAM type: NRG; PAM sequence: TGG
cccgaggccctcgttcaccc

SEQ ID NO: 17349 - DNA, 20 bp, Artificial Sequence
  Description of Artificial Sequence: Synthetic oligonucleotide
  Target: COL7A1; (+) strand; PAM type: NRG; PAM sequence: GGG
ccgaggccctcgttcaccct

SEQ ID NO: 17350 - DNA, 20 bp, Artificial Sequence
  Description of Artificial Sequence: Synthetic oligonucleotide
  Target: COL7A1; (+) strand; PAM type: NRG; PAM sequence: TGG
ggccctcgttcaccctgggt

SEQ ID NO: 17351 - DNA, 20 bp, Artificial Sequence
  Description of Artificial Sequence: Synthetic oligonucleotide
  Target: COL7A1; (+) strand; PAM type: NRG; PAM sequence: TGG
tcgttcaccctgggttggtt

SEQ ID NO: 17352 - DNA, 20 bp, Artificial Sequence
  Description of Artificial Sequence: Synthetic oligonucleotide
  Target: COL7A1; (+) strand; PAM type: NRG; PAM sequence: GGG
cgttcaccctgggttggttt

SEQ ID NO: 17353 - DNA, 20 bp, Artificial Sequence
  Description of Artificial Sequence: Synthetic oligonucleotide
  Target: COL7A1; (+) strand; PAM type: NRG; PAM sequence: AAG
caccctgggttggtttgggt

SEQ ID NO: 17354 - DNA, 20 bp, Artificial Sequence
  Description of Artificial Sequence: Synthetic oligonucleotide
  Target: COL7A1; (+) strand; PAM type: NRG; PAM sequence: AAG
cctgggttggtttgggtaag

SEQ ID NO: 17355 - DNA, 20 bp, Artificial Sequence
  Description of Artificial Sequence: Synthetic oligonucleotide
  Target: COL7A1; (+) strand; PAM type: NRG; PAM sequence: CGG
ttggtttgggtaagaagtca

SEQ ID NO: 17356 - DNA, 20 bp, Artificial Sequence
  Description of Artificial Sequence: Synthetic oligonucleotide
  Target: COL7A1; (+) strand; PAM type: NRG; PAM sequence: AAG
tttgggtaagaagtcacggt

SEQ ID NO: 17357 - DNA, 20 bp, Artificial Sequence
  Description of Artificial Sequence: Synthetic oligonucleotide
  Target: COL7A1; (+) strand; PAM type: NRG; PAM sequence: AGG
ttgggtaagaagtcacggta

SEQ ID NO: 17358 - DNA, 20 bp, Artificial Sequence
  Description of Artificial Sequence: Synthetic oligonucleotide
  Target: COL7A1; (+) strand; PAM type: NRG; PAM sequence: GGG
tgggtaagaagtcacggtaa

SEQ ID NO: 17359 - DNA, 20 bp, Artificial Sequence
  Description of Artificial Sequence: Synthetic oligonucleotide
  Target: COL7A1; (+) strand; PAM type: NRG; PAM sequence: GGG
gggtaagaagtcacggtaag

SEQ ID NO: 17360 - DNA, 20 bp, Artificial Sequence
  Description of Artificial Sequence: Synthetic oligonucleotide
  Target: COL7A1; (+) strand; PAM type: NRG; PAM sequence: AAG
gaagtcacggtaaggggctg

SEQ ID NO: 17361 - DNA, 20 bp, Artificial Sequence
  Description of Artificial Sequence: Synthetic oligonucleotide
  Target: COL7A1; (+) strand; PAM type: NRG; PAM sequence: AGG
aagtcacggtaaggggctga

SEQ ID NO: 17362 - DNA, 20 bp, Artificial Sequence
  Description of Artificial Sequence: Synthetic oligonucleotide
  Target: COL7A1; (+) strand; PAM type: NRG; PAM sequence: TGG
gctgaaggtccctcaccctc

SEQ ID NO: 17363 - DNA, 20 bp, Artificial Sequence
  Description of Artificial Sequence: Synthetic oligonucleotide
  Target: COL7A1; (+) strand; PAM type: NRG; PAM sequence: GGG
ctgaaggtccctcaccctct

SEQ ID NO: 17364 - DNA, 20 bp, Artificial Sequence
  Description of Artificial Sequence: Synthetic oligonucleotide
  Target: COL7A1; (+) strand; PAM type: NRG; PAM sequence: GAG
gaaggtccctcaccctctgg

SEQ ID NO: 17365 - DNA, 20 bp, Artificial Sequence
  Description of Artificial Sequence: Synthetic oligonucleotide
  Target: COL7A1; (+) strand; PAM type: NRG; PAM sequence: GAG
ccctcaccctctgggagttt

SEQ ID NO: 17366 - DNA, 20 bp, Artificial Sequence
  Description of Artificial Sequence: Synthetic oligonucleotide
  Target: COL7A1; (+) strand; PAM type: NRG; PAM sequence: CAG
cctctgggagtttgagctct

SEQ ID NO: 17367 - DNA, 20 bp, Artificial Sequence
  Description of Artificial Sequence: Synthetic oligonucleotide
  Target: COL7A1; (+) strand; PAM type: NRG; PAM sequence: TGG
gtttgagctctcagatgccc

SEQ ID NO: 17368 - DNA, 20 bp, Artificial Sequence
  Description of Artificial Sequence: Synthetic oligonucleotide
  Target: COL7A1; (+) strand; PAM type: NRG; PAM sequence: GGG
tttgagctctcagatgccct

SEQ ID NO: 17369 - DNA, 20 bp, Artificial Sequence
  Description of Artificial Sequence: Synthetic oligonucleotide
  Target: COL7A1; (+) strand; PAM type: NRG; PAM sequence: CAG
agctctcagatgccctgggc

SEQ ID NO: 17370 - DNA, 20 bp, Artificial Sequence
  Description of Artificial Sequence: Synthetic oligonucleotide
  Target: COL7A1; (+) strand; PAM type: NRG; PAM sequence: CGG
gatgccctgggccagcccca

SEQ ID NO: 17371 - DNA, 20 bp, Artificial Sequence
  Description of Artificial Sequence: Synthetic oligonucleotide
  Target: COL7A1; (+) strand; PAM type: NRG; PAM sequence: GGG
atgccctgggccagccccac

SEQ ID NO: 17372 - DNA, 20 bp, Artificial Sequence
  Description of Artificial Sequence: Synthetic oligonucleotide
  Target: COL7A1; (+) strand; PAM type: NRG; PAM sequence: GGG
tgccctgggccagccccacg

SEQ ID NO: 17373 - DNA, 20 bp, Artificial Sequence
  Description of Artificial Sequence: Synthetic oligonucleotide
  Target: COL7A1; (+) strand; PAM type: NRG; PAM sequence: CAG
cacggggtccctctcgcacc

SEQ ID NO: 17374 - DNA, 20 bp, Artificial Sequence
  Description of Artificial Sequence: Synthetic oligonucleotide
  Target: COL7A1; (+) strand; PAM type: NRG; PAM sequence: AGG
acggggtccctctcgcaccc

SEQ ID NO: 17375 - DNA, 20 bp, Artificial Sequence
  Description of Artificial Sequence: Synthetic oligonucleotide
  Target: COL7A1; (+) strand; PAM type: NRG; PAM sequence: GGG
cggggtccctctcgcaccca

SEQ ID NO: 17376 - DNA, 20 bp, Artificial Sequence
  Description of Artificial Sequence: Synthetic oligonucleotide
  Target: COL7A1; (+) strand; PAM type: NRG; PAM sequence: GGG
ggggtccctctcgcacccag

SEQ ID NO: 17377 - DNA, 20 bp, Artificial Sequence
  Description of Artificial Sequence: Synthetic oligonucleotide
  Target: COL7A1; (+) strand; PAM type: NRG; PAM sequence: GAG
ggtccctctcgcacccaggg

SEQ ID NO: 17378 - DNA, 20 bp, Artificial Sequence
  Description of Artificial Sequence: Synthetic oligonucleotide
  Target: COL7A1; (+) strand; PAM type: NRG; PAM sequence: CAG
tctcgcacccaggggagacc

SEQ ID NO: 17379 - DNA, 20 bp, Artificial Sequence
  Description of Artificial Sequence: Synthetic oligonucleotide
  Target: COL7A1; (+) strand; PAM type: NRG; PAM sequence: TGG
ggggagacccagtccacacg

SEQ ID NO: 17380 - DNA, 20 bp, Artificial Sequence
  Description of Artificial Sequence: Synthetic oligonucleotide
  Target: COL7A1; (+) strand; PAM type: NRG; PAM sequence: GGG
gggagacccagtccacacgt

SEQ ID NO: 17381 - DNA, 20 bp, Artificial Sequence
  Description of Artificial Sequence: Synthetic oligonucleotide
  Target: COL7A1; (+) strand; PAM type: NRG; PAM sequence: TGG
cccactcaccatgtccccct

SEQ ID NO: 17382 - DNA, 20 bp, Artificial Sequence
  Description of Artificial Sequence: Synthetic oligonucleotide
  Target: COL7A1; (+) strand; PAM type: NRG; PAM sequence: TGG
atgtcccccttggcaccccg

SEQ ID NO: 17383 - DNA, 20 bp, Artificial Sequence
  Description of Artificial Sequence: Synthetic oligonucleotide
  Target: COL7A1; (+) strand; PAM type: NRG; PAM sequence: GGG
tgtcccccttggcaccccgt

SEQ ID NO: 17384 - DNA, 20 bp, Artificial Sequence
  Description of Artificial Sequence: Synthetic oligonucleotide
  Target: COL7A1; (+) strand; PAM type: NRG; PAM sequence: TGG
cccttggcaccccgtgggcc

SEQ ID NO: 17385 - DNA, 20 bp, Artificial Sequence
  Description of Artificial Sequence: Synthetic oligonucleotide
  Target: COL7A1; (+) strand; PAM type: NRG; PAM sequence: GAG
cttggcaccccgtgggcctg

SEQ ID NO: 17386 - DNA, 20 bp, Artificial Sequence
  Description of Artificial Sequence: Synthetic oligonucleotide
  Target: COL7A1; (+) strand; PAM type: NRG; PAM sequence: AGG
ttggcaccccgtgggcctgg

SEQ ID NO: 17387 - DNA, 20 bp, Artificial Sequence
  Description of Artificial Sequence: Synthetic oligonucleotide
  Target: COL7A1; (+) strand; PAM type: NRG; PAM sequence: CAG
ccccgtgggcctggaggccc

SEQ ID NO: 17388 - DNA, 20 bp, Artificial Sequence
  Description of Artificial Sequence: Synthetic oligonucleotide
  Target: COL7A1; (+) strand; PAM type: NRG; PAM sequence: AGG
cccgtgggcctggaggcccc

SEQ ID NO: 17389 - DNA, 20 bp, Artificial Sequence
  Description of Artificial Sequence: Synthetic oligonucleotide
  Target: COL7A1; (+) strand; PAM type: NRG; PAM sequence: CAG
gcctggaggccccaggatca

SEQ ID NO: 17390 - DNA, 20 bp, Artificial Sequence
  Description of Artificial Sequence: Synthetic oligonucleotide
  Target: COL7A1; (+) strand; PAM type: NRG; PAM sequence: GAG
gaggccccaggatcacagct

SEQ ID NO: 17391 - DNA, 20 bp, Artificial Sequence
  Description of Artificial Sequence: Synthetic oligonucleotide
  Target: COL7A1; (+) strand; PAM type: NRG; PAM sequence: GAG
gatcacagctgagtctccct

SEQ ID NO: 17392 - DNA, 20 bp, Artificial Sequence
  Description of Artificial Sequence: Synthetic oligonucleotide
  Target: COL7A1; (+) strand; PAM type: NRG; PAM sequence: AGG
atcacagctgagtctccctg

SEQ ID NO: 17393 - DNA, 20 bp, Artificial Sequence
  Description of Artificial Sequence: Synthetic oligonucleotide
  Target: COL7A1; (+) strand; PAM type: NRG; PAM sequence: GGG
tcacagctgagtctccctga

SEQ ID NO: 17394 - DNA, 20 bp, Artificial Sequence
  Description of Artificial Sequence: Synthetic oligonucleotide
  Target: COL7A1; (+) strand; PAM type: NRG; PAM sequence: GGG
cacagctgagtctccctgag

SEQ ID NO: 17395 - DNA, 20 bp, Artificial Sequence
  Description of Artificial Sequence: Synthetic oligonucleotide
  Target: COL7A1; (+) strand; PAM type: NRG; PAM sequence: GGG
acagctgagtctccctgagg

SEQ ID NO: 17396 - DNA, 20 bp, Artificial Sequence
  Description of Artificial Sequence: Synthetic oligonucleotide
  Target: COL7A1; (+) strand; PAM type: NRG; PAM sequence: CAG
gctgagtctccctgaggggg

SEQ ID NO: 17397 - DNA, 20 bp, Artificial Sequence
  Description of Artificial Sequence: Synthetic oligonucleotide
  Target: COL7A1; (+) strand; PAM type: NRG; PAM sequence: AGG
ctgagtctccctgagggggc

SEQ ID NO: 17398 - DNA, 20 bp, Artificial Sequence
  Description of Artificial Sequence: Synthetic oligonucleotide
  Target: COL7A1; (+) strand; PAM type: NRG; PAM sequence: CAG
agtctccctgagggggcagg

SEQ ID NO: 17399 - DNA, 20 bp, Artificial Sequence
  Description of Artificial Sequence: Synthetic oligonucleotide
  Target: COL7A1; (+) strand; PAM type: NRG; PAM sequence: AGG
gtctccctgagggggcaggc

SEQ ID NO: 17400 - DNA, 20 bp, Artificial Sequence
  Description of Artificial Sequence: Synthetic oligonucleotide
  Target: COL7A1; (+) strand; PAM type: NRG; PAM sequence: CAG
ctgagggggcaggcaggaat

SEQ ID NO: 17401 - DNA, 20 bp, Artificial Sequence
  Description of Artificial Sequence: Synthetic oligonucleotide
  Target: COL7A1; (+) strand; PAM type: NRG; PAM sequence: GAG
gagggggcaggcaggaatca

SEQ ID NO: 17402 - DNA, 20 bp, Artificial Sequence
  Description of Artificial Sequence: Synthetic oligonucleotide
  Target: COL7A1; (+) strand; PAM type: NRG; PAM sequence: AGG
agggggcaggcaggaatcag

SEQ ID NO: 17403 - DNA, 20 bp, Artificial Sequence
  Description of Artificial Sequence: Synthetic oligonucleotide
  Target: COL7A1; (+) strand; PAM type: NRG; PAM sequence: GAG
ggggcaggcaggaatcagag

SEQ ID NO: 17404 - DNA, 20 bp, Artificial Sequence
  Description of Artificial Sequence: Synthetic oligonucleotide
  Target: COL7A1; (+) strand; PAM type: NRG; PAM sequence: CGG
caggcaggaatcagaggagt

SEQ ID NO: 17405 - DNA, 20 bp, Artificial Sequence
  Description of Artificial Sequence: Synthetic oligonucleotide
  Target: COL7A1; (+) strand; PAM type: NRG; PAM sequence: GGG
aggcaggaatcagaggagtc

SEQ ID NO: 17406 - DNA, 20 bp, Artificial Sequence
  Description of Artificial Sequence: Synthetic oligonucleotide
  Target: COL7A1; (+) strand; PAM type: NRG; PAM sequence: GAG
gcaggaatcagaggagtcgg

SEQ ID NO: 17407 - DNA, 20 bp, Artificial Sequence
  Description of Artificial Sequence: Synthetic oligonucleotide
  Target: COL7A1; (+) strand; PAM type: NRG; PAM sequence: TGG
cagaggagtcgggagcaccc

SEQ ID NO: 17408 - DNA, 20 bp, Artificial Sequence
  Description of Artificial Sequence: Synthetic oligonucleotide
  Target: COL7A1; (+) strand; PAM type: NRG; PAM sequence: TAG
acactcaccttgtcaccctt

SEQ ID NO: 17409 - DNA, 20 bp, Artificial Sequence
  Description of Artificial Sequence: Synthetic oligonucleotide
  Target: COL7A1; (+) strand; PAM type: NRG; PAM sequence: TGG
cactcccaacatcaccctat

SEQ ID NO: 17410 - DNA, 20 bp, Artificial Sequence
  Description of Artificial Sequence: Synthetic oligonucleotide
  Target: COL7A1; (+) strand; PAM type: NRG; PAM sequence: GGG
actcccaacatcaccctatt

SEQ ID NO: 17411 - DNA, 20 bp, Artificial Sequence
  Description of Artificial Sequence: Synthetic oligonucleotide
  Target: COL7A1; (+) strand; PAM type: NRG; PAM sequence: AAG
aacatcaccctattgggcaa

SEQ ID NO: 17412 - DNA, 20 bp, Artificial Sequence
  Description of Artificial Sequence: Synthetic oligonucleotide
  Target: COL7A1; (+) strand; PAM type: NRG; PAM sequence: GAG
catcaccctattgggcaaaa

SEQ ID NO: 17413 - DNA, 20 bp, Artificial Sequence
  Description of Artificial Sequence: Synthetic oligonucleotide
  Target: COL7A1; (+) strand; PAM type: NRG; PAM sequence: GAG
cctattgggcaaaagagtgt

SEQ ID NO: 17414 - DNA, 20 bp, Artificial Sequence
  Description of Artificial Sequence: Synthetic oligonucleotide
  Target: COL7A1; (+) strand; PAM type: NRG; PAM sequence: TGG
agtgtgagtcccgcccaaac

SEQ ID NO: 17415 - DNA, 20 bp, Artificial Sequence
  Description of Artificial Sequence: Synthetic oligonucleotide
  Target: COL7A1; (+) strand; PAM type: NRG; PAM sequence: GGG
gtgtgagtcccgcccaaact

SEQ ID NO: 17416 - DNA, 20 bp, Artificial Sequence
  Description of Artificial Sequence: Synthetic oligonucleotide
  Target: COL7A1; (+) strand; PAM type: NRG; PAM sequence: GGG
tgtgagtcccgcccaaactg

SEQ ID NO: 17417 - DNA, 20 bp, Artificial Sequence
  Description of Artificial Sequence: Synthetic oligonucleotide
  Target: COL7A1; (+) strand; PAM type: NRG; PAM sequence: GAG
tgagtcccgcccaaactggg

SEQ ID NO: 17418 - DNA, 20 bp, Artificial Sequence
  Description of Artificial Sequence: Synthetic oligonucleotide
  Target: COL7A1; (+) strand; PAM type: NRG; PAM sequence: AGG
gagtcccgcccaaactgggg

SEQ ID NO: 17419 - DNA, 20 bp, Artificial Sequence
  Description of Artificial Sequence: Synthetic oligonucleotide
  Target: COL7A1; (+) strand; PAM type: NRG; PAM sequence: AAG
cctgaattctaatatcatac

SEQ ID NO: 17420 - DNA, 20 bp, Artificial Sequence
  Description of Artificial Sequence: Synthetic oligonucleotide
  Target: COL7A1; (+) strand; PAM type: NRG; PAM sequence: CAG
actcacccccccactcatgc

SEQ ID NO: 17421 - DNA, 20 bp, Artificial Sequence
  Description of Artificial Sequence: Synthetic oligonucleotide
  Target: COL7A1; (+) strand; PAM type: NRG; PAM sequence: AGG
ctcacccccccactcatgcc

SEQ ID NO: 17422 - DNA, 20 bp, Artificial Sequence
  Description of Artificial Sequence: Synthetic oligonucleotide
  Target: COL7A1; (+) strand; PAM type: NRG; PAM sequence: CAG
cccacgctctcccctgctgc

SEQ ID NO: 17423 - DNA, 20 bp, Artificial Sequence
  Description of Artificial Sequence: Synthetic oligonucleotide
  Target: COL7A1; (+) strand; PAM type: NRG; PAM sequence: AGG
ccacgctctcccctgctgcc

SEQ ID NO: 17424 - DNA, 20 bp, Artificial Sequence
  Description of Artificial Sequence: Synthetic oligonucleotide
  Target: COL7A1; (+) strand; PAM type: NRG; PAM sequence: GGG
cacgctctcccctgctgcca

SEQ ID NO: 17425 - DNA, 20 bp, Artificial Sequence
  Description of Artificial Sequence: Synthetic oligonucleotide
  Target: COL7A1; (+) strand; PAM type: NRG; PAM sequence: GGG
acgctctcccctgctgccag

SEQ ID NO: 17426 - DNA, 20 bp, Artificial Sequence
  Description of Artificial Sequence: Synthetic oligonucleotide
  Target: COL7A1; (+) strand; PAM type: NRG; PAM sequence: GGG
cgctctcccctgctgccagg

SEQ ID NO: 17427 - DNA, 20 bp, Artificial Sequence
  Description of Artificial Sequence: Synthetic oligonucleotide
  Target: COL7A1; (+) strand; PAM type: NRG; PAM sequence: GAG
ctgccagggggcccctgtgt

SEQ ID NO: 17428 - DNA, 20 bp, Artificial Sequence
  Description of Artificial Sequence: Synthetic oligonucleotide
  Target: COL7A1; (+) strand; PAM type: NRG; PAM sequence: GAG
gccagggggcccctgtgtga

SEQ ID NO: 17429 - DNA, 20 bp, Artificial Sequence
  Description of Artificial Sequence: Synthetic oligonucleotide
  Target: COL7A1; (+) strand; PAM type: NRG; PAM sequence: AAG
agggggcccctgtgtgagag

SEQ ID NO: 17430 - DNA, 20 bp, Artificial Sequence
  Description of Artificial Sequence: Synthetic oligonucleotide
  Target: COL7A1; (+) strand; PAM type: NRG; PAM sequence: AGG
gggggcccctgtgtgagaga

SEQ ID NO: 17431 - DNA, 20 bp, Artificial Sequence
  Description of Artificial Sequence: Synthetic oligonucleotide
  Target: COL7A1; (+) strand; PAM type: NRG; PAM sequence: GAG
gtgtgagagaaggtgaccgt

SEQ ID NO: 17432 - DNA, 20 bp, Artificial Sequence
  Description of Artificial Sequence: Synthetic oligonucleotide
  Target: COL7A1; (+) strand; PAM type: NRG; PAM sequence: CAG
gagaaggtgaccgtgagcta

SEQ ID NO: 17433 - DNA, 20 bp, Artificial Sequence
  Description of Artificial Sequence: Synthetic oligonucleotide
  Target: COL7A1; (+) strand; PAM type: NRG; PAM sequence: AGG
agaaggtgaccgtgagctac

SEQ ID NO: 17434 - DNA, 20 bp, Artificial Sequence
  Description of Artificial Sequence: Synthetic oligonucleotide
  Target: COL7A1; (+) strand; PAM type: NRG; PAM sequence: CAG
tgaccgtgagctacaggaac

SEQ ID NO: 17435 - DNA, 20 bp, Artificial Sequence
  Description of Artificial Sequence: Synthetic oligonucleotide
  Target: COL7A1; (+) strand; PAM type: NRG; PAM sequence: AGG
gaccgtgagctacaggaacc

SEQ ID NO: 17436 - DNA, 20 bp, Artificial Sequence
  Description of Artificial Sequence: Synthetic oligonucleotide
  Target: COL7A1; (+) strand; PAM type: NRG; PAM sequence: GGG
accgtgagctacaggaacca

SEQ ID NO: 17437 - DNA, 20 bp, Artificial Sequence
  Description of Artificial Sequence: Synthetic oligonucleotide
  Target: COL7A1; (+) strand; PAM type: NRG; PAM sequence: CAG
gtgagctacaggaaccaggg

SEQ ID NO: 17438 - DNA, 20 bp, Artificial Sequence
  Description of Artificial Sequence: Synthetic oligonucleotide
  Target: COL7A1; (+) strand; PAM type: NRG; PAM sequence: TGG
agctacaggaaccagggcag

SEQ ID NO: 17439 - DNA, 20 bp, Artificial Sequence
  Description of Artificial Sequence: Synthetic oligonucleotide
  Target: COL7A1; (+) strand; PAM type: NRG; PAM sequence: GAG
ctacaggaaccagggcagtg

SEQ ID NO: 17440 - DNA, 20 bp, Artificial Sequence
  Description of Artificial Sequence: Synthetic oligonucleotide
  Target: COL7A1; (+) strand; PAM type: NRG; PAM sequence: AGG
tacaggaaccagggcagtgg

SEQ ID NO: 17441 - DNA, 20 bp, Artificial Sequence
  Description of Artificial Sequence: Synthetic oligonucleotide
  Target: COL7A1; (+) strand; PAM type: NRG; PAM sequence: CGG
ggaaccagggcagtggagga

SEQ ID NO: 17442 - DNA, 20 bp, Artificial Sequence
  Description of Artificial Sequence: Synthetic oligonucleotide
  Target: COL7A1; (+) strand; PAM type: NRG; PAM sequence: GAG
aaccagggcagtggaggacg

SEQ ID NO: 17443 - DNA, 20 bp, Artificial Sequence
  Description of Artificial Sequence: Synthetic oligonucleotide
  Target: COL7A1; (+) strand; PAM type: NRG; PAM sequence: AGG
accagggcagtggaggacgg

SEQ ID NO: 17444 - DNA, 20 bp, Artificial Sequence
  Description of Artificial Sequence: Synthetic oligonucleotide
  Target: COL7A1; (+) strand; PAM type: NRG; PAM sequence: GAG
cagggcagtggaggacggag

SEQ ID NO: 17445 - DNA, 20 bp, Artificial Sequence
  Description of Artificial Sequence: Synthetic oligonucleotide
  Target: COL7A1; (+) strand; PAM type: NRG; PAM sequence: AGG
agggcagtggaggacggagg

SEQ ID NO: 17446 - DNA, 20 bp, Artificial Sequence
  Description of Artificial Sequence: Synthetic oligonucleotide
  Target: COL7A1; (+) strand; PAM type: NRG; PAM sequence: CAG
agtggaggacggaggaggat

SEQ ID NO: 17447 - DNA, 20 bp, Artificial Sequence
  Description of Artificial Sequence: Synthetic oligonucleotide
  Target: COL7A1; (+) strand; PAM type: NRG; PAM sequence: AGG
gtggaggacggaggaggatc

SEQ ID NO: 17448 - DNA, 20 bp, Artificial Sequence
  Description of Artificial Sequence: Synthetic oligonucleotide
  Target: COL7A1; (+) strand; PAM type: NRG; PAM sequence: GGG
tggaggacggaggaggatca

SEQ ID NO: 17449 - DNA, 20 bp, Artificial Sequence
  Description of Artificial Sequence: Synthetic oligonucleotide
  Target: COL7A1; (+) strand; PAM type: NRG; PAM sequence: GGG
ggaggacggaggaggatcag

SEQ ID NO: 17450 - DNA, 20 bp, Artificial Sequence
  Description of Artificial Sequence: Synthetic oligonucleotide
  Target: COL7A1; (+) strand; PAM type: NRG; PAM sequence: GGG
gaggacggaggaggatcagg

SEQ ID NO: 17451 - DNA, 20 bp, Artificial Sequence
  Description of Artificial Sequence: Synthetic oligonucleotide
  Target: COL7A1; (+) strand; PAM type: NRG; PAM sequence: GAG
ggacggaggaggatcagggg

SEQ ID NO: 17452 - DNA, 20 bp, Artificial Sequence
  Description of Artificial Sequence: Synthetic oligonucleotide
  Target: COL7A1; (+) strand; PAM type: NRG; PAM sequence: AGG
gacggaggaggatcaggggg

SEQ ID NO: 17453 - DNA, 20 bp, Artificial Sequence
  Description of Artificial Sequence: Synthetic oligonucleotide
  Target: COL7A1; (+) strand; PAM type: NRG; PAM sequence: GAG
cggaggaggatcagggggag

SEQ ID NO: 17454 - DNA, 20 bp, Artificial Sequence
  Description of Artificial Sequence: Synthetic oligonucleotide
  Target: COL7A1; (+) strand; PAM type: NRG; PAM sequence: AGG
ggaggaggatcagggggagg

SEQ ID NO: 17455 - DNA, 20 bp, Artificial Sequence
  Description of Artificial Sequence: Synthetic oligonucleotide
  Target: COL7A1; (+) strand; PAM type: NRG; PAM sequence: GGG
gaggaggatcagggggagga

SEQ ID NO: 17456 - DNA, 20 bp, Artificial Sequence
  Description of Artificial Sequence: Synthetic oligonucleotide
  Target: COL7A1; (+) strand; PAM type: NRG; PAM sequence: CAG
gatcagggggaggagggaaa

SEQ ID NO: 17457 - DNA, 20 bp, Artificial Sequence
  Description of Artificial Sequence: Synthetic oligonucleotide
  Target: COL7A1; (+) strand; PAM type: NRG; PAM sequence: TGG
cagggggaggagggaaacag

SEQ ID NO: 17458 - DNA, 20 bp, Artificial Sequence
  Description of Artificial Sequence: Synthetic oligonucleotide
  Target: COL7A1; (+) strand; PAM type: NRG; PAM sequence: GGG
agggggaggagggaaacagt

SEQ ID NO: 17459 - DNA, 20 bp, Artificial Sequence
  Description of Artificial Sequence: Synthetic oligonucleotide
  Target: COL7A1; (+) strand; PAM type: NRG; PAM sequence: GGG
gggggaggagggaaacagtg

SEQ ID NO: 17460 - DNA, 20 bp, Artificial Sequence
  Description of Artificial Sequence: Synthetic oligonucleotide
  Target: COL7A1; (+) strand; PAM type: NRG; PAM sequence: CAG
aggagggaaacagtggggac

SEQ ID NO: 17461 - DNA, 20 bp, Artificial Sequence
  Description of Artificial Sequence: Synthetic oligonucleotide
  Target: COL7A1; (+) strand; PAM type: NRG; PAM sequence: AAG
gaaacagtggggaccagaca

SEQ ID NO: 17462 - DNA, 20 bp, Artificial Sequence
  Description of Artificial Sequence: Synthetic oligonucleotide
  Target: COL7A1; (+) strand; PAM type: NRG; PAM sequence: AGG
aaacagtggggaccagacaa

SEQ ID NO: 17463 - DNA, 20 bp, Artificial Sequence
  Description of Artificial Sequence: Synthetic oligonucleotide
  Target: COL7A1; (+) strand; PAM type: NRG; PAM sequence: GGG
aacagtggggaccagacaaa

SEQ ID NO: 17464 - DNA, 20 bp, Artificial Sequence
  Description of Artificial Sequence: Synthetic oligonucleotide
  Target: COL7A1; (+) strand; PAM type: NRG; PAM sequence: GGG
acagtggggaccagacaaag

SEQ ID NO: 17465 - DNA, 20 bp, Artificial Sequence
  Description of Artificial Sequence: Synthetic oligonucleotide
  Target: COL7A1; (+) strand; PAM type: NRG; PAM sequence: CAG
tggggaccagacaaagggga

SEQ ID NO: 17466 - DNA, 20 bp, Artificial Sequence
  Description of Artificial Sequence: Synthetic oligonucleotide
  Target: COL7A1; (+) strand; PAM type: NRG; PAM sequence: AGG
ggggaccagacaaaggggac

SEQ ID NO: 17467 - DNA, 20 bp, Artificial Sequence
  Description of Artificial Sequence: Synthetic oligonucleotide
  Target: COL7A1; (+) strand; PAM type: NRG; PAM sequence: GGG
gggaccagacaaaggggaca

SEQ ID NO: 17468 - DNA, 20 bp, Artificial Sequence
  Description of Artificial Sequence: Synthetic oligonucleotide
  Target: COL7A1; (+) strand; PAM type: NRG; PAM sequence: GGG
ggaccagacaaaggggacag

SEQ ID NO: 17469 - DNA, 20 bp, Artificial Sequence
  Description of Artificial Sequence: Synthetic oligonucleotide
  Target: COL7A1; (+) strand; PAM type: NRG; PAM sequence: TAG
ccagacaaaggggacagggg

SEQ ID NO: 17470 - DNA, 20 bp, Artificial Sequence
  Description of Artificial Sequence: Synthetic oligonucleotide
  Target: COL7A1; (+) strand; PAM type: NRG; PAM sequence: GAG
caaaggggacaggggtagac

SEQ ID NO: 17471 - DNA, 20 bp, Artificial Sequence
  Description of Artificial Sequence: Synthetic oligonucleotide
  Target: COL7A1; (+) strand; PAM type: NRG; PAM sequence: AGG
aaaggggacaggggtagacg

SEQ ID NO: 17472 - DNA, 20 bp, Artificial Sequence
  Description of Artificial Sequence: Synthetic oligonucleotide
  Target: COL7A1; (+) strand; PAM type: NRG; PAM sequence: GAG
aggggacaggggtagacgag

SEQ ID NO: 17473 - DNA, 20 bp, Artificial Sequence
  Description of Artificial Sequence: Synthetic oligonucleotide
  Target: COL7A1; (+) strand; PAM type: NRG; PAM sequence: AGG
ggggacaggggtagacgagg

SEQ ID NO: 17474 - DNA, 20 bp, Artificial Sequence
  Description of Artificial Sequence: Synthetic oligonucleotide
  Target: COL7A1; (+) strand; PAM type: NRG; PAM sequence: GGG
gggacaggggtagacgagga

SEQ ID NO: 17475 - DNA, 20 bp, Artificial Sequence
  Description of Artificial Sequence: Synthetic oligonucleotide
  Target: COL7A1; (+) strand; PAM type: NRG; PAM sequence: CAG
caggggtagacgaggagggc

SEQ ID NO: 17476 - DNA, 20 bp, Artificial Sequence
  Description of Artificial Sequence: Synthetic oligonucleotide
  Target: COL7A1; (+) strand; PAM type: NRG; PAM sequence: GAG
ggggtagacgaggagggcca

SEQ ID NO: 17477 - DNA, 20 bp, Artificial Sequence
  Description of Artificial Sequence: Synthetic oligonucleotide
  Target: COL7A1; (+) strand; PAM type: NRG; PAM sequence: AGG
gggtagacgaggagggccag

SEQ ID NO: 17478 - DNA, 20 bp, Artificial Sequence
  Description of Artificial Sequence: Synthetic oligonucleotide
  Target: COL7A1; (+) strand; PAM type: NRG; PAM sequence: GGG
ggtagacgaggagggccaga

SEQ ID NO: 17479 - DNA, 20 bp, Artificial Sequence
  Description of Artificial Sequence: Synthetic oligonucleotide
  Target: COL7A1; (+) strand; PAM type: NRG; PAM sequence: TAG
gacgaggagggccagagggc

SEQ ID NO: 17480 - DNA, 20 bp, Artificial Sequence
  Description of Artificial Sequence: Synthetic oligonucleotide
  Target: COL7A1; (+) strand; PAM type: NRG; PAM sequence: AGG
acgaggagggccagagggct

SEQ ID NO: 17481 - DNA, 20 bp, Artificial Sequence
  Description of Artificial Sequence: Synthetic oligonucleotide
  Target: COL7A1; (+) strand; PAM type: NRG; PAM sequence: GGG
cgaggagggccagagggcta

SEQ ID NO: 17482 - DNA, 20 bp, Artificial Sequence
  Description of Artificial Sequence: Synthetic oligonucleotide
  Target: COL7A1; (+) strand; PAM type: NRG; PAM sequence: GAG
aggagggccagagggctagg

SEQ ID NO: 17483 - DNA, 20 bp, Artificial Sequence
  Description of Artificial Sequence: Synthetic oligonucleotide
  Target: COL7A1; (+) strand; PAM type: NRG; PAM sequence: AGG
ggagggccagagggctaggg

SEQ ID NO: 17484 - DNA, 20 bp, Artificial Sequence
  Description of Artificial Sequence: Synthetic oligonucleotide
  Target: COL7A1; (+) strand; PAM type: NRG; PAM sequence: TGG
ggccagagggctagggagga

SEQ ID NO: 17485 - DNA, 20 bp, Artificial Sequence
  Description of Artificial Sequence: Synthetic oligonucleotide
  Target: COL7A1; (+) strand; PAM type: NRG; PAM sequence: CAG
cagagggctagggaggatgg

SEQ ID NO: 17486 - DNA, 20 bp, Artificial Sequence
  Description of Artificial Sequence: Synthetic oligonucleotide
  Target: COL7A1; (+) strand; PAM type: NRG; PAM sequence: GAG
gagggctagggaggatggca

SEQ ID NO: 17487 - DNA, 20 bp, Artificial Sequence
  Description of Artificial Sequence: Synthetic oligonucleotide
  Target: COL7A1; (+) strand; PAM type: NRG; PAM sequence: GAG
gggctagggaggatggcaga

SEQ ID NO: 17488 - DNA, 20 bp, Artificial Sequence
  Description of Artificial Sequence: Synthetic oligonucleotide
  Target: COL7A1; (+) strand; PAM type: NRG; PAM sequence: TGG
gggaggatggcagagagtcc

SEQ ID NO: 17489 - DNA, 20 bp, Artificial Sequence
  Description of Artificial Sequence: Synthetic oligonucleotide
  Target: COL7A1; (+) strand; PAM type: NRG; PAM sequence: GGG
ggaggatggcagagagtcct

SEQ ID NO: 17490 - DNA, 20 bp, Artificial Sequence
  Description of Artificial Sequence: Synthetic oligonucleotide
  Target: COL7A1; (+) strand; PAM type: NRG; PAM sequence: GGG
gaggatggcagagagtcctg

SEQ ID NO: 17491 - DNA, 20 bp, Artificial Sequence
  Description of Artificial Sequence: Synthetic oligonucleotide
  Target: COL7A1; (+) strand; PAM type: NRG; PAM sequence: AAG
gcagagagtcctggggtaca

SEQ ID NO: 17492 - DNA, 20 bp, Artificial Sequence
  Description of Artificial Sequence: Synthetic oligonucleotide
  Target: COL7A1; (+) strand; PAM type: NRG; PAM sequence: AGG
cagagagtcctggggtacaa

SEQ ID NO: 17493 - DNA, 20 bp, Artificial Sequence
  Description of Artificial Sequence: Synthetic oligonucleotide
  Target: COL7A1; (+) strand; PAM type: NRG; PAM sequence: GGG
agagagtcctggggtacaaa

SEQ ID NO: 17494 - DNA, 20 bp, Artificial Sequence
  Description of Artificial Sequence: Synthetic oligonucleotide
  Target: COL7A1; (+) strand; PAM type: NRG; PAM sequence: CAG
gtcctggggtacaaagggca

SEQ ID NO: 17495 - DNA, 20 bp, Artificial Sequence
  Description of Artificial Sequence: Synthetic oligonucleotide
  Target: COL7A1; (+) strand; PAM type: NRG; PAM sequence: AGG
tcctggggtacaaagggcac

SEQ ID NO: 17496 - DNA, 20 bp, Artificial Sequence
  Description of Artificial Sequence: Synthetic oligonucleotide
  Target: COL7A1; (+) strand; PAM type: NRG; PAM sequence: CAG
tggggtacaaagggcacagg

SEQ ID NO: 17497 - DNA, 20 bp, Artificial Sequence
  Description of Artificial Sequence: Synthetic oligonucleotide
  Target: COL7A1; (+) strand; PAM type: NRG; PAM sequence: AGG
ggggtacaaagggcacaggc

SEQ ID NO: 17498 - DNA, 20 bp, Artificial Sequence
  Description of Artificial Sequence: Synthetic oligonucleotide
  Target: COL7A1; (+) strand; PAM type: NRG; PAM sequence: GGG
gggtacaaagggcacaggca

SEQ ID NO: 17499 - DNA, 20 bp, Artificial Sequence
  Description of Artificial Sequence: Synthetic oligonucleotide
  Target: COL7A1; (+) strand; PAM type: NRG; PAM sequence: GGG
ggtacaaagggcacaggcag

SEQ ID NO: 17500 - DNA, 20 bp, Artificial Sequence
  Description of Artificial Sequence: Synthetic oligonucleotide
  Target: COL7A1; (+) strand; PAM type: NRG; PAM sequence: AAG
agggcacaggcaggggactg

SEQ ID NO: 17501 - DNA, 20 bp, Artificial Sequence
  Description of Artificial Sequence: Synthetic oligonucleotide
  Target: COL7A1; (+) strand; PAM type: NRG; PAM sequence: CAG
caggcaggggactgaagtca

SEQ ID NO: 17502 - DNA, 20 bp, Artificial Sequence
  Description of Artificial Sequence: Synthetic oligonucleotide
  Target: COL7A1; (+) strand; PAM type: NRG; PAM sequence: CAG
cacagcactgtcactttccc

SEQ ID NO: 17503 - DNA, 20 bp, Artificial Sequence
  Description of Artificial Sequence: Synthetic oligonucleotide
  Target: COL7A1; (+) strand; PAM type: NRG; PAM sequence: CGG
agcactgtcactttccccag

SEQ ID NO: 17504 - DNA, 20 bp, Artificial Sequence
  Description of Artificial Sequence: Synthetic oligonucleotide
  Target: COL7A1; (+) strand; PAM type: NRG; PAM sequence: GGG
gcactgtcactttccccagc

SEQ ID NO: 17505 - DNA, 20 bp, Artificial Sequence
  Description of Artificial Sequence: Synthetic oligonucleotide
  Target: COL7A1; (+) strand; PAM type: NRG; PAM sequence: GAG
tccccagcgggacccaccgt

SEQ ID NO: 17506 - DNA, 20 bp, Artificial Sequence
  Description of Artificial Sequence: Synthetic oligonucleotide
  Target: COL7A1; (+) strand; PAM type: NRG; PAM sequence: CGG
cgggacccaccgtgagtcct

SEQ ID NO: 17507 - DNA, 20 bp, Artificial Sequence
  Description of Artificial Sequence: Synthetic oligonucleotide
  Target: COL7A1; (+) strand; PAM type: NRG; PAM sequence: GGG
gggacccaccgtgagtcctc

SEQ ID NO: 17508 - DNA, 20 bp, Artificial Sequence
  Description of Artificial Sequence: Synthetic oligonucleotide
  Target: COL7A1; (+) strand; PAM type: NRG; PAM sequence: GGG
ggacccaccgtgagtcctcg

SEQ ID NO: 17509 - DNA, 20 bp, Artificial Sequence
  Description of Artificial Sequence: Synthetic oligonucleotide
  Target: COL7A1; (+) strand; PAM type: NRG; PAM sequence: TGG
tgagtcctcggggtccctcc

SEQ ID NO: 17510 - DNA, 20 bp, Artificial Sequence
  Description of Artificial Sequence: Synthetic oligonucleotide
  Target: COL7A1; (+) strand; PAM type: NRG; PAM sequence: CGG
tcctcggggtccctcctggc

SEQ ID NO: 17511 - DNA, 20 bp, Artificial Sequence
  Description of Artificial Sequence: Synthetic oligonucleotide
  Target: COL7A1; (+) strand; PAM type: NRG; PAM sequence: GGG
cctcggggtccctcctggcc

SEQ ID NO: 17512 - DNA, 20 bp, Artificial Sequence
  Description of Artificial Sequence: Synthetic oligonucleotide
  Target: COL7A1; (+) strand; PAM type: NRG; PAM sequence: GGG
ctcggggtccctcctggccg

SEQ ID NO: 17513 - DNA, 20 bp, Artificial Sequence
  Description of Artificial Sequence: Synthetic oligonucleotide
  Target: COL7A1; (+) strand; PAM type: NRG; PAM sequence: CGG
ggggtccctcctggccgggg

SEQ ID NO: 17514 - DNA, 20 bp, Artificial Sequence
  Description of Artificial Sequence: Synthetic oligonucleotide
  Target: COL7A1; (+) strand; PAM type: NRG; PAM sequence: TGG
cggggcggccatcttcaccc

SEQ ID NO: 17515 - DNA, 20 bp, Artificial Sequence
  Description of Artificial Sequence: Synthetic oligonucleotide
  Target: COL7A1; (+) strand; PAM type: NRG; PAM sequence: TGG
gcggccatcttcaccctgga

SEQ ID NO: 17516 - DNA, 20 bp, Artificial Sequence
  Description of Artificial Sequence: Synthetic oligonucleotide
  Target: COL7A1; (+) strand; PAM type: NRG; PAM sequence: TAG
ttcaccctggatggtgacat

SEQ ID NO: 17517 - DNA, 20 bp, Artificial Sequence
  Description of Artificial Sequence: Synthetic oligonucleotide
  Target: COL7A1; (+) strand; PAM type: NRG; PAM sequence: AGG
tcaccctggatggtgacatt

SEQ ID NO: 17518 - DNA, 20 bp, Artificial Sequence
  Description of Artificial Sequence: Synthetic oligonucleotide
  Target: COL7A1; (+) strand; PAM type: NRG; PAM sequence: CAG
tgacattaggttcattgact

SEQ ID NO: 17519 - DNA, 20 bp, Artificial Sequence
  Description of Artificial Sequence: Synthetic oligonucleotide
  Target: COL7A1; (+) strand; PAM type: NRG; PAM sequence: GAG
acattaggttcattgactca

SEQ ID NO: 17520 - DNA, 20 bp, Artificial Sequence
  Description of Artificial Sequence: Synthetic oligonucleotide
  Target: COL7A1; (+) strand; PAM type: NRG; PAM sequence: AGG
cattaggttcattgactcag

SEQ ID NO: 17521 - DNA, 20 bp, Artificial Sequence
  Description of Artificial Sequence: Synthetic oligonucleotide
  Target: COL7A1; (+) strand; PAM type: NRG; PAM sequence: TGG
aggttcattgactcagaggt

SEQ ID NO: 17522 - DNA, 20 bp, Artificial Sequence
  Description of Artificial Sequence: Synthetic oligonucleotide
  Target: COL7A1; (+) strand; PAM type: NRG; PAM sequence: CAG
ttgactcagaggttggaaat

SEQ ID NO: 17523 - DNA, 20 bp, Artificial Sequence
  Description of Artificial Sequence: Synthetic oligonucleotide
  Target: COL7A1; (+) strand; PAM type: NRG; PAM sequence: GAG
gactcagaggttggaaatca

SEQ ID NO: 17524 - DNA, 20 bp, Artificial Sequence
  Description of Artificial Sequence: Synthetic oligonucleotide
  Target: COL7A1; (+) strand; PAM type: NRG; PAM sequence: AGG
actcagaggttggaaatcag

SEQ ID NO: 17525 - DNA, 20 bp, Artificial Sequence
  Description of Artificial Sequence: Synthetic oligonucleotide
  Target: COL7A1; (+) strand; PAM type: NRG; PAM sequence: AAG
agaggttggaaatcagaggc

SEQ ID NO: 17526 - DNA, 20 bp, Artificial Sequence
  Description of Artificial Sequence: Synthetic oligonucleotide
  Target: COL7A1; (+) strand; PAM type: NRG; PAM sequence: GAG
aggttggaaatcagaggcaa

SEQ ID NO: 17527 - DNA, 20 bp, Artificial Sequence
  Description of Artificial Sequence: Synthetic oligonucleotide
  Target: COL7A1; (+) strand; PAM type: NRG; PAM sequence: TGG
tggaaatcagaggcaagagc

SEQ ID NO: 17528 - DNA, 20 bp, Artificial Sequence
  Description of Artificial Sequence: Synthetic oligonucleotide
  Target: COL7A1; (+) strand; PAM type: NRG; PAM sequence: GGG
ggaaatcagaggcaagagct

SEQ ID NO: 17529 - DNA, 20 bp, Artificial Sequence
  Description of Artificial Sequence: Synthetic oligonucleotide
  Target: COL7A1; (+) strand; PAM type: NRG; PAM sequence: AAG
cagaggcaagagctgggatg

SEQ ID NO: 17530 - DNA, 20 bp, Artificial Sequence
  Description of Artificial Sequence: Synthetic oligonucleotide
  Target: COL7A1; (+) strand; PAM type: NRG; PAM sequence: AGG
agaggcaagagctgggatga

SEQ ID NO: 17531 - DNA, 20 bp, Artificial Sequence
  Description of Artificial Sequence: Synthetic oligonucleotide
  Target: COL7A1; (+) strand; PAM type: NRG; PAM sequence: GGG
gaggcaagagctgggatgaa

SEQ ID NO: 17532 - DNA, 20 bp, Artificial Sequence
  Description of Artificial Sequence: Synthetic oligonucleotide
  Target: COL7A1; (+) strand; PAM type: NRG; PAM sequence: GAG
ggcaagagctgggatgaagg

SEQ ID NO: 17533 - DNA, 20 bp, Artificial Sequence
  Description of Artificial Sequence: Synthetic oligonucleotide
  Target: COL7A1; (+) strand; PAM type: NRG; PAM sequence: CGG
gagctgggatgaagggagtt

SEQ ID NO: 17534 - DNA, 20 bp, Artificial Sequence
  Description of Artificial Sequence: Synthetic oligonucleotide
  Target: COL7A1; (+) strand; PAM type: NRG; PAM sequence: TGG
ggatgaagggagttcggctg

SEQ ID NO: 17535 - DNA, 20 bp, Artificial Sequence
  Description of Artificial Sequence: Synthetic oligonucleotide
  Target: COL7A1; (+) strand; PAM type: NRG; PAM sequence: GAG
atgaagggagttcggctgtg

SEQ ID NO: 17536 - DNA, 20 bp, Artificial Sequence
  Description of Artificial Sequence: Synthetic oligonucleotide
  Target: COL7A1; (+) strand; PAM type: NRG; PAM sequence: AAG
agggagttcggctgtggagt

SEQ ID NO: 17537 - DNA, 20 bp, Artificial Sequence
  Description of Artificial Sequence: Synthetic oligonucleotide
  Target: COL7A1; (+) strand; PAM type: NRG; PAM sequence: CGG
tggagtaagacatacgtacc

SEQ ID NO: 17538 - DNA, 20 bp, Artificial Sequence
  Description of Artificial Sequence: Synthetic oligonucleotide
  Target: COL7A1; (+) strand; PAM type: NRG; PAM sequence: TGG
gacatacgtacccggatgcc

SEQ ID NO: 17539 - DNA, 20 bp, Artificial Sequence
  Description of Artificial Sequence: Synthetic oligonucleotide
  Target: COL7A1; (+) strand; PAM type: NRG; PAM sequence: CGG
ctggctccccacgctcgcct

SEQ ID NO: 17540 - DNA, 20 bp, Artificial Sequence
  Description of Artificial Sequence: Synthetic oligonucleotide
  Target: COL7A1; (+) strand; PAM type: NRG; PAM sequence: GGG
tggctccccacgctcgcctc

SEQ ID NO: 17541 - DNA, 20 bp, Artificial Sequence
  Description of Artificial Sequence: Synthetic oligonucleotide
  Target: COL7A1; (+) strand; PAM type: NRG; PAM sequence: GGG
ggctccccacgctcgcctcg

SEQ ID NO: 17542 - DNA, 20 bp, Artificial Sequence
  Description of Artificial Sequence: Synthetic oligonucleotide
  Target: COL7A1; (+) strand; PAM type: NRG; PAM sequence: CAG
cccacgctcgcctcggggcc

SEQ ID NO: 17543 - DNA, 20 bp, Artificial Sequence
  Description of Artificial Sequence: Synthetic oligonucleotide
  Target: COL7A1; (+) strand; PAM type: NRG; PAM sequence: AGG
ccacgctcgcctcggggccc

SEQ ID NO: 17544 - DNA, 20 bp, Artificial Sequence
  Description of Artificial Sequence: Synthetic oligonucleotide
  Target: COL7A1; (+) strand; PAM type: NRG; PAM sequence: CAG
cgctcgcctcggggcccagg

SEQ ID NO: 17545 - DNA, 20 bp, Artificial Sequence
  Description of Artificial Sequence: Synthetic oligonucleotide
  Target: COL7A1; (+) strand; PAM type: NRG; PAM sequence: CAG
gggcccaggcagccctactc

SEQ ID NO: 17546 - DNA, 20 bp, Artificial Sequence
  Description of Artificial Sequence: Synthetic oligonucleotide
  Target: COL7A1; (+) strand; PAM type: NRG; PAM sequence: AGG
ggcccaggcagccctactcc

SEQ ID NO: 17547 - DNA, 20 bp, Artificial Sequence
  Description of Artificial Sequence: Synthetic oligonucleotide
  Target: COL7A1; (+) strand; PAM type: NRG; PAM sequence: GGG
gcccaggcagccctactcca

SEQ ID NO: 17548 - DNA, 20 bp, Artificial Sequence
  Description of Artificial Sequence: Synthetic oligonucleotide
  Target: COL7A1; (+) strand; PAM type: NRG; PAM sequence: TGG
gccctactccagggtctccc

SEQ ID NO: 17549 - DNA, 20 bp, Artificial Sequence
  Description of Artificial Sequence: Synthetic oligonucleotide
  Target: COL7A1; (+) strand; PAM type: NRG; PAM sequence: GAG
cctactccagggtctccctg

SEQ ID NO: 17550 - DNA, 20 bp, Artificial Sequence
  Description of Artificial Sequence: Synthetic oligonucleotide
  Target: COL7A1; (+) strand; PAM type: NRG; PAM sequence: CAG
agggtctccctggagaccaa

SEQ ID NO: 17551 - DNA, 20 bp, Artificial Sequence
  Description of Artificial Sequence: Synthetic oligonucleotide
  Target: COL7A1; (+) strand; PAM type: NRG; PAM sequence: AGG
gggtctccctggagaccaac

SEQ ID NO: 17552 - DNA, 20 bp, Artificial Sequence
  Description of Artificial Sequence: Synthetic oligonucleotide
  Target: COL7A1; (+) strand; PAM type: NRG; PAM sequence: CGG
cctggagaccaacaggacac

SEQ ID NO: 17553 - DNA, 20 bp, Artificial Sequence
  Description of Artificial Sequence: Synthetic oligonucleotide
  Target: COL7A1; (+) strand; PAM type: NRG; PAM sequence: GGG
ctggagaccaacaggacacc

SEQ ID NO: 17554 - DNA, 20 bp, Artificial Sequence
  Description of Artificial Sequence: Synthetic oligonucleotide
  Target: COL7A1; (+) strand; PAM type: NRG; PAM sequence: GGG
tggagaccaacaggacaccg

SEQ ID NO: 17555 - DNA, 20 bp, Artificial Sequence
  Description of Artificial Sequence: Synthetic oligonucleotide
  Target: COL7A1; (+) strand; PAM type: NRG; PAM sequence: CAG
accaacaggacaccggggat

SEQ ID NO: 17556 - DNA, 20 bp, Artificial Sequence
  Description of Artificial Sequence: Synthetic oligonucleotide
  Target: COL7A1; (+) strand; PAM type: NRG; PAM sequence: GAG
acaggacaccggggatcagt

SEQ ID NO: 17557 - DNA, 20 bp, Artificial Sequence
  Description of Artificial Sequence: Synthetic oligonucleotide
  Target: COL7A1; (+) strand; PAM type: NRG; PAM sequence: AGG
caggacaccggggatcagtg

SEQ ID NO: 17558 - DNA, 20 bp, Artificial Sequence
  Description of Artificial Sequence: Synthetic oligonucleotide
  Target: COL7A1; (+) strand; PAM type: NRG; PAM sequence: GGG
aggacaccggggatcagtga

SEQ ID NO: 17559 - DNA, 20 bp, Artificial Sequence
  Description of Artificial Sequence: Synthetic oligonucleotide
  Target: COL7A1; (+) strand; PAM type: NRG; PAM sequence: GGG
ggacaccggggatcagtgag

SEQ ID NO: 17560 - DNA, 20 bp, Artificial Sequence
  Description of Artificial Sequence: Synthetic oligonucleotide
  Target: COL7A1; (+) strand; PAM type: NRG; PAM sequence: CAG
cggggatcagtgaggggaat

SEQ ID NO: 17561 - DNA, 20 bp, Artificial Sequence
  Description of Artificial Sequence: Synthetic oligonucleotide
  Target: COL7A1; (+) strand; PAM type: NRG; PAM sequence: TGG
ggatcagtgaggggaatcag

SEQ ID NO: 17562 - DNA, 20 bp, Artificial Sequence
  Description of Artificial Sequence: Synthetic oligonucleotide
  Target: COL7A1; (+) strand; PAM type: NRG; PAM sequence: GGG
gatcagtgaggggaatcagt

SEQ ID NO: 17563 - DNA, 20 bp, Artificial Sequence
  Description of Artificial Sequence: Synthetic oligonucleotide
  Target: COL7A1; (+) strand; PAM type: NRG; PAM sequence: GGG
atcagtgaggggaatcagtg

SEQ ID NO: 17564 - DNA, 20 bp, Artificial Sequence
  Description of Artificial Sequence: Synthetic oligonucleotide
  Target: COL7A1; (+) strand; PAM type: NRG; PAM sequence: GGG
tcagtgaggggaatcagtgg

SEQ ID NO: 17565 - DNA, 20 bp, Artificial Sequence
  Description of Artificial Sequence: Synthetic oligonucleotide
  Target: COL7A1; (+) strand; PAM type: NRG; PAM sequence: CAG
aggggaatcagtgggggacg

SEQ ID NO: 17566 - DNA, 20 bp, Artificial Sequence
  Description of Artificial Sequence: Synthetic oligonucleotide
  Target: COL7A1; (+) strand; PAM type: NRG; PAM sequence: AGG
ggggaatcagtgggggacgc

SEQ ID NO: 17567 - DNA, 20 bp, Artificial Sequence
  Description of Artificial Sequence: Synthetic oligonucleotide
  Target: COL7A1; (+) strand; PAM type: NRG; PAM sequence: GGG
gggaatcagtgggggacgca

SEQ ID NO: 17568 - DNA, 20 bp, Artificial Sequence
  Description of Artificial Sequence: Synthetic oligonucleotide
  Target: COL7A1; (+) strand; PAM type: NRG; PAM sequence: TGG
cagtgggggacgcagggtca

SEQ ID NO: 17569 - DNA, 20 bp, Artificial Sequence
  Description of Artificial Sequence: Synthetic oligonucleotide
  Target: COL7A1; (+) strand; PAM type: NRG; PAM sequence: GGG
agtgggggacgcagggtcat

SEQ ID NO: 17570 - DNA, 20 bp, Artificial Sequence
  Description of Artificial Sequence: Synthetic oligonucleotide
  Target: COL7A1; (+) strand; PAM type: NRG; PAM sequence: GAG
tgggggacgcagggtcatgg

SEQ ID NO: 17571 - DNA, 20 bp, Artificial Sequence
  Description of Artificial Sequence: Synthetic oligonucleotide
  Target: COL7A1; (+) strand; PAM type: NRG; PAM sequence: AGG
gggggacgcagggtcatggg

SEQ ID NO: 17572 - DNA, 20 bp, Artificial Sequence
  Description of Artificial Sequence: Synthetic oligonucleotide
  Target: COL7A1; (+) strand; PAM type: NRG; PAM sequence: CAG
gacgcagggtcatgggaggt

SEQ ID NO: 17573 - DNA, 20 bp, Artificial Sequence
  Description of Artificial Sequence: Synthetic oligonucleotide
  Target: COL7A1; (+) strand; PAM type: NRG; PAM sequence: TGG
gcagggtcatgggaggtcag

SEQ ID NO: 17574 - DNA, 20 bp, Artificial Sequence
  Description of Artificial Sequence: Synthetic oligonucleotide
  Target: COL7A1; (+) strand; PAM type: NRG; PAM sequence: GAG
agggtcatgggaggtcagtg

SEQ ID NO: 17575 - DNA, 20 bp, Artificial Sequence
  Description of Artificial Sequence: Synthetic oligonucleotide
  Target: COL7A1; (+) strand; PAM type: NRG; PAM sequence: AGG
gggtcatgggaggtcagtgg

SEQ ID NO: 17576 - DNA, 20 bp, Artificial Sequence
  Description of Artificial Sequence: Synthetic oligonucleotide
  Target: COL7A1; (+) strand; PAM type: NRG; PAM sequence: AAG
tgggaggtcagtggaggctg

SEQ ID NO: 17577 - DNA, 20 bp, Artificial Sequence
  Description of Artificial Sequence: Synthetic oligonucleotide
  Target: COL7A1; (+) strand; PAM type: NRG; PAM sequence: AGG
gggaggtcagtggaggctga

SEQ ID NO: 17578 - DNA, 20 bp, Artificial Sequence
  Description of Artificial Sequence: Synthetic oligonucleotide
  Target: COL7A1; (+) strand; PAM type: NRG; PAM sequence: GGG
ggaggtcagtggaggctgaa

SEQ ID NO: 17579 - DNA, 20 bp, Artificial Sequence
  Description of Artificial Sequence: Synthetic oligonucleotide
  Target: COL7A1; (+) strand; PAM type: NRG; PAM sequence: GGG
gaggtcagtggaggctgaag

SEQ ID NO: 17580 - DNA, 20 bp, Artificial Sequence
  Description of Artificial Sequence: Synthetic oligonucleotide
  Target: COL7A1; (+) strand; PAM type: NRG; PAM sequence: GGG
aggtcagtggaggctgaagg

SEQ ID NO: 17581 - DNA, 20 bp, Artificial Sequence
  Description of Artificial Sequence: Synthetic oligonucleotide
  Target: COL7A1; (+) strand; PAM type: NRG; PAM sequence: CAG
tggaggctgaagggggtgac

SEQ ID NO: 17582 - DNA, 20 bp, Artificial Sequence
  Description of Artificial Sequence: Synthetic oligonucleotide
  Target: COL7A1; (+) strand; PAM type: NRG; PAM sequence: AGG
ggaggctgaagggggtgacc

SEQ ID NO: 17583 - DNA, 20 bp, Artificial Sequence
  Description of Artificial Sequence: Synthetic oligonucleotide
  Target: COL7A1; (+) strand; PAM type: NRG; PAM sequence: GGG
gaggctgaagggggtgacca

SEQ ID NO: 17584 - DNA, 20 bp, Artificial Sequence
  Description of Artificial Sequence: Synthetic oligonucleotide
  Target: COL7A1; (+) strand; PAM type: NRG; PAM sequence: AAG
gaagggggtgaccagggcac

SEQ ID NO: 17585 - DNA, 20 bp, Artificial Sequence
  Description of Artificial Sequence: Synthetic oligonucleotide
  Target: COL7A1; (+) strand; PAM type: NRG; PAM sequence: GAG
agggggtgaccagggcacaa

SEQ ID NO: 17586 - DNA, 20 bp, Artificial Sequence
  Description of Artificial Sequence: Synthetic oligonucleotide
  Target: COL7A1; (+) strand; PAM type: NRG; PAM sequence: GAG
ggggtgaccagggcacaaga

SEQ ID NO: 17587 - DNA, 20 bp, Artificial Sequence
  Description of Artificial Sequence: Synthetic oligonucleotide
  Target: COL7A1; (+) strand; PAM type: NRG; PAM sequence: GAG
ggtgaccagggcacaagaga

SEQ ID NO: 17588 - DNA, 20 bp, Artificial Sequence
  Description of Artificial Sequence: Synthetic oligonucleotide
  Target: COL7A1; (+) strand; PAM type: NRG; PAM sequence: CAG
accagggcacaagagagagt

SEQ ID NO: 17589 - DNA, 20 bp, Artificial Sequence
  Description of Artificial Sequence: Synthetic oligonucleotide
  Target: COL7A1; (+) strand; PAM type: NRG; PAM sequence: CAG
agggcacaagagagagtcag

SEQ ID NO: 17590 - DNA, 20 bp, Artificial Sequence
  Description of Artificial Sequence: Synthetic oligonucleotide
  Target: COL7A1; (+) strand; PAM type: NRG; PAM sequence: GAG
ccacctaccttgtctccttt

SEQ ID NO: 17591 - DNA, 20 bp, Artificial Sequence
  Description of Artificial Sequence: Synthetic oligonucleotide
  Target: COL7A1; (+) strand; PAM type: NRG; PAM sequence: CAG
taccttgtctcctttgagtc

SEQ ID NO: 17592 - DNA, 20 bp, Artificial Sequence
  Description of Artificial Sequence: Synthetic oligonucleotide
  Target: COL7A1; (+) strand; PAM type: NRG; PAM sequence: GAG
ccttgtctcctttgagtcca

SEQ ID NO: 17593 - DNA, 20 bp, Artificial Sequence
  Description of Artificial Sequence: Synthetic oligonucleotide
  Target: COL7A1; (+) strand; PAM type: NRG; PAM sequence: AGG
cttgtctcctttgagtccag

SEQ ID NO: 17594 - DNA, 20 bp, Artificial Sequence
  Description of Artificial Sequence: Synthetic oligonucleotide
  Target: COL7A1; (+) strand; PAM type: NRG; PAM sequence: CAG
tcctttgagtccagaggccc

SEQ ID NO: 17595 - DNA, 20 bp, Artificial Sequence
  Description of Artificial Sequence: Synthetic oligonucleotide
  Target: COL7A1; (+) strand; PAM type: NRG; PAM sequence: AGG
cctttgagtccagaggcccc

SEQ ID NO: 17596 - DNA, 20 bp, Artificial Sequence
  Description of Artificial Sequence: Synthetic oligonucleotide
  Target: COL7A1; (+) strand; PAM type: NRG; PAM sequence: TGG
ttgagtccagaggccccagg

SEQ ID NO: 17597 - DNA, 20 bp, Artificial Sequence
  Description of Artificial Sequence: Synthetic oligonucleotide
  Target: COL7A1; (+) strand; PAM type: NRG; PAM sequence: TAG
gaggccccaggtggtccctg

SEQ ID NO: 17598 - DNA, 20 bp, Artificial Sequence
  Description of Artificial Sequence: Synthetic oligonucleotide
  Target: COL7A1; (+) strand; PAM type: NRG; PAM sequence: AGG
aggccccaggtggtccctgt

SEQ ID NO: 17599 - DNA, 20 bp, Artificial Sequence
  Description of Artificial Sequence: Synthetic oligonucleotide
  Target: COL7A1; (+) strand; PAM type: NRG; PAM sequence: CAG
cccaggtggtccctgtaggt

SEQ ID NO: 17600 - DNA, 20 bp, Artificial Sequence
  Description of Artificial Sequence: Synthetic oligonucleotide
  Target: COL7A1; (+) strand; PAM type: NRG; PAM sequence: GAG
caggtggtccctgtaggtca

SEQ ID NO: 17601 - DNA, 20 bp, Artificial Sequence
  Description of Artificial Sequence: Synthetic oligonucleotide
  Target: COL7A1; (+) strand; PAM type: NRG; PAM sequence: GAG
tggtccctgtaggtcagagt

SEQ ID NO: 17602 - DNA, 20 bp, Artificial Sequence
  Description of Artificial Sequence: Synthetic oligonucleotide
  Target: COL7A1; (+) strand; PAM type: NRG; PAM sequence: AGG
ggtccctgtaggtcagagtg

SEQ ID NO: 17603 - DNA, 20 bp, Artificial Sequence
  Description of Artificial Sequence: Synthetic oligonucleotide
  Target: COL7A1; (+) strand; PAM type: NRG; PAM sequence: GAG
cctgtaggtcagagtgaggt

SEQ ID NO: 17604 - DNA, 20 bp, Artificial Sequence
  Description of Artificial Sequence: Synthetic oligonucleotide
  Target: COL7A1; (+) strand; PAM type: NRG; PAM sequence: AGG
ctgtaggtcagagtgaggtg

SEQ ID NO: 17605 - DNA, 20 bp, Artificial Sequence
  Description of Artificial Sequence: Synthetic oligonucleotide
  Target: COL7A1; (+) strand; PAM type: NRG; PAM sequence: GGG
tgtaggtcagagtgaggtga

SEQ ID NO: 17606 - DNA, 20 bp, Artificial Sequence
  Description of Artificial Sequence: Synthetic oligonucleotide
  Target: COL7A1; (+) strand; PAM type: NRG; PAM sequence: TGG
agagtgaggtgagggtcctg

SEQ ID NO: 17607 - DNA, 20 bp, Artificial Sequence
  Description of Artificial Sequence: Synthetic oligonucleotide
  Target: COL7A1; (+) strand; PAM type: NRG; PAM sequence: AAG
tgagggtcctgtggctctca

SEQ ID NO: 17608 - DNA, 20 bp, Artificial Sequence
  Description of Artificial Sequence: Synthetic oligonucleotide
  Target: COL7A1; (+) strand; PAM type: NRG; PAM sequence: CAG
gcgcctcccccaacacccca

SEQ ID NO: 17609 - DNA, 20 bp, Artificial Sequence
  Description of Artificial Sequence: Synthetic oligonucleotide
  Target: COL7A1; (+) strand; PAM type: NRG; PAM sequence: TGG
tcccccaacaccccacagtg

SEQ ID NO: 17610 - DNA, 20 bp, Artificial Sequence
  Description of Artificial Sequence: Synthetic oligonucleotide
  Target: COL7A1; (+) strand; PAM type: NRG; PAM sequence: AAG
agtgtggcccgccccatcct

SEQ ID NO: 17611 - DNA, 20 bp, Artificial Sequence
  Description of Artificial Sequence: Synthetic oligonucleotide
  Target: COL7A1; (+) strand; PAM type: NRG; PAM sequence: GAG
gccccatcctaagtcctcac

SEQ ID NO: 17612 - DNA, 20 bp, Artificial Sequence
  Description of Artificial Sequence: Synthetic oligonucleotide
  Target: COL7A1; (+) strand; PAM type: NRG; PAM sequence: AGG
ccccatcctaagtcctcacg

SEQ ID NO: 17613 - DNA, 20 bp, Artificial Sequence
  Description of Artificial Sequence: Synthetic oligonucleotide
  Target: COL7A1; (+) strand; PAM type: NRG; PAM sequence: CAG
atcctaagtcctcacgagga

SEQ ID NO: 17614 - DNA, 20 bp, Artificial Sequence
  Description of Artificial Sequence: Synthetic oligonucleotide
  Target: COL7A1; (+) strand; PAM type: NRG; PAM sequence: AGG
tcctaagtcctcacgaggac

SEQ ID NO: 17615 - DNA, 20 bp, Artificial Sequence
  Description of Artificial Sequence: Synthetic oligonucleotide
  Target: COL7A1; (+) strand; PAM type: NRG; PAM sequence: TGG
aggacaggaaatcaaatacg

SEQ ID NO: 17616 - DNA, 20 bp, Artificial Sequence
  Description of Artificial Sequence: Synthetic oligonucleotide
  Target: COL7A1; (+) strand; PAM type: NRG; PAM sequence: GGG
ggacaggaaatcaaatacgt

SEQ ID NO: 17617 - DNA, 20 bp, Artificial Sequence
  Description of Artificial Sequence: Synthetic oligonucleotide
  Target: COL7A1; (+) strand; PAM type: NRG; PAM sequence: GGG
gacaggaaatcaaatacgtg

SEQ ID NO: 17618 - DNA, 20 bp, Artificial Sequence
  Description of Artificial Sequence: Synthetic oligonucleotide
  Target: COL7A1; (+) strand; PAM type: NRG; PAM sequence: TAG
aaatcaaatacgtggggctt

SEQ ID NO: 17619 - DNA, 20 bp, Artificial Sequence
  Description of Artificial Sequence: Synthetic oligonucleotide
  Target: COL7A1; (+) strand; PAM type: NRG; PAM sequence: AGG
aatcaaatacgtggggcttt

SEQ ID NO: 17620 - DNA, 20 bp, Artificial Sequence
  Description of Artificial Sequence: Synthetic oligonucleotide
  Target: COL7A1; (+) strand; PAM type: NRG; PAM sequence: GGG
atcaaatacgtggggcttta

SEQ ID NO: 17621 - DNA, 20 bp, Artificial Sequence
  Description of Artificial Sequence: Synthetic oligonucleotide
  Target: COL7A1; (+) strand; PAM type: NRG; PAM sequence: CGG
cctctactcaccactgaccc

SEQ ID NO: 17622 - DNA, 20 bp, Artificial Sequence
  Description of Artificial Sequence: Synthetic oligonucleotide
  Target: COL7A1; (+) strand; PAM type: NRG; PAM sequence: TGG
ctactcaccactgaccccgg

SEQ ID NO: 17623 - DNA, 20 bp, Artificial Sequence
  Description of Artificial Sequence: Synthetic oligonucleotide
  Target: COL7A1; (+) strand; PAM type: NRG; PAM sequence: CAG
caccactgaccccggtggtc

SEQ ID NO: 17624 - DNA, 20 bp, Artificial Sequence
  Description of Artificial Sequence: Synthetic oligonucleotide
  Target: COL7A1; (+) strand; PAM type: NRG; PAM sequence: AGG
accactgaccccggtggtcc

SEQ ID NO: 17625 - DNA, 20 bp, Artificial Sequence
  Description of Artificial Sequence: Synthetic oligonucleotide
  Target: COL7A1; (+) strand; PAM type: NRG; PAM sequence: TGG
actgaccccggtggtccagg

SEQ ID NO: 17626 - DNA, 20 bp, Artificial Sequence
  Description of Artificial Sequence: Synthetic oligonucleotide
  Target: COL7A1; (+) strand; PAM type: NRG; PAM sequence: CAG
cccggtggtccaggtggccc

SEQ ID NO: 17627 - DNA, 20 bp, Artificial Sequence
  Description of Artificial Sequence: Synthetic oligonucleotide
  Target: COL7A1; (+) strand; PAM type: NRG; PAM sequence: AGG
ccggtggtccaggtggcccc

SEQ ID NO: 17628 - DNA, 20 bp, Artificial Sequence
  Description of Artificial Sequence: Synthetic oligonucleotide
  Target: COL7A1; (+) strand; PAM type: NRG; PAM sequence: GGG
cggtggtccaggtggcccca

SEQ ID NO: 17629 - DNA, 20 bp, Artificial Sequence
  Description of Artificial Sequence: Synthetic oligonucleotide
  Target: COL7A1; (+) strand; PAM type: NRG; PAM sequence: GGG
ggtggtccaggtggccccag

SEQ ID NO: 17630 - DNA, 20 bp, Artificial Sequence
  Description of Artificial Sequence: Synthetic oligonucleotide
  Target: COL7A1; (+) strand; PAM type: NRG; PAM sequence: TGG
ccaggtggccccaggggtcc

SEQ ID NO: 17631 - DNA, 20 bp, Artificial Sequence
  Description of Artificial Sequence: Synthetic oligonucleotide
  Target: COL7A1; (+) strand; PAM type: NRG; PAM sequence: GGG
caggtggccccaggggtcct

SEQ ID NO: 17632 - DNA, 20 bp, Artificial Sequence
  Description of Artificial Sequence: Synthetic oligonucleotide
  Target: COL7A1; (+) strand; PAM type: NRG; PAM sequence: TGG
cctgggattccttctctccc

SEQ ID NO: 17633 - DNA, 20 bp, Artificial Sequence
  Description of Artificial Sequence: Synthetic oligonucleotide
  Target: COL7A1; (+) strand; PAM type: NRG; PAM sequence: GGG
ctgggattccttctctccct

SEQ ID NO: 17634 - DNA, 20 bp, Artificial Sequence
  Description of Artificial Sequence: Synthetic oligonucleotide
  Target: COL7A1; (+) strand; PAM type: NRG; PAM sequence: GGG
tgggattccttctctccctg

SEQ ID NO: 17635 - DNA, 20 bp, Artificial Sequence
  Description of Artificial Sequence: Synthetic oligonucleotide
  Target: COL7A1; (+) strand; PAM type: NRG; PAM sequence: GGG
gggattccttctctccctgg

SEQ ID NO: 17636 - DNA, 20 bp, Artificial Sequence
  Description of Artificial Sequence: Synthetic oligonucleotide
  Target: COL7A1; (+) strand; PAM type: NRG; PAM sequence: GGG
ggattccttctctccctggg

SEQ ID NO: 17637 - DNA, 20 bp, Artificial Sequence
  Description of Artificial Sequence: Synthetic oligonucleotide
  Target: COL7A1; (+) strand; PAM type: NRG; PAM sequence: CAG
tctctccctggggggcctgc

SEQ ID NO: 17638 - DNA, 20 bp, Artificial Sequence
  Description of Artificial Sequence: Synthetic oligonucleotide
  Target: COL7A1; (+) strand; PAM type: NRG; PAM sequence: CAG
gggggcctgccagaccctac

SEQ ID NO: 17639 - DNA, 20 bp, Artificial Sequence
  Description of Artificial Sequence: Synthetic oligonucleotide
  Target: COL7A1; (+) strand; PAM type: NRG; PAM sequence: TGG
gccagaccctaccagaaaaa

SEQ ID NO: 17640 - DNA, 20 bp, Artificial Sequence
  Description of Artificial Sequence: Synthetic oligonucleotide
  Target: COL7A1; (+) strand; PAM type: NRG; PAM sequence: GGG
ccagaccctaccagaaaaat

SEQ ID NO: 17641 - DNA, 20 bp, Artificial Sequence
  Description of Artificial Sequence: Synthetic oligonucleotide
  Target: COL7A1; (+) strand; PAM type: NRG; PAM sequence: GGG
cagaccctaccagaaaaatg

SEQ ID NO: 17642 - DNA, 20 bp, Artificial Sequence
  Description of Artificial Sequence: Synthetic oligonucleotide
  Target: COL7A1; (+) strand; PAM type: NRG; PAM sequence: AAG
ccctaccagaaaaatggggc

SEQ ID NO: 17643 - DNA, 20 bp, Artificial Sequence
  Description of Artificial Sequence: Synthetic oligonucleotide
  Target: COL7A1; (+) strand; PAM type: NRG; PAM sequence: GAG
ctaccagaaaaatggggcaa

SEQ ID NO: 17644 - DNA, 20 bp, Artificial Sequence
  Description of Artificial Sequence: Synthetic oligonucleotide
  Target: COL7A1; (+) strand; PAM type: NRG; PAM sequence: GAG
accagaaaaatggggcaaga

SEQ ID NO: 17645 - DNA, 20 bp, Artificial Sequence
  Description of Artificial Sequence: Synthetic oligonucleotide
  Target: COL7A1; (+) strand; PAM type: NRG; PAM sequence: AGG
ccagaaaaatggggcaagag

SEQ ID NO: 17646 - DNA, 20 bp, Artificial Sequence
  Description of Artificial Sequence: Synthetic oligonucleotide
  Target: COL7A1; (+) strand; PAM type: NRG; PAM sequence: CAG
gaaaaatggggcaagagagg

SEQ ID NO: 17647 - DNA, 20 bp, Artificial Sequence
  Description of Artificial Sequence: Synthetic oligonucleotide
  Target: COL7A1; (+) strand; PAM type: NRG; PAM sequence: GAG
aaaatggggcaagagaggca

SEQ ID NO: 17648 - DNA, 20 bp, Artificial Sequence
  Description of Artificial Sequence: Synthetic oligonucleotide
  Target: COL7A1; (+) strand; PAM type: NRG; PAM sequence: GAG
aatggggcaagagaggcaga

SEQ ID NO: 17649 - DNA, 20 bp, Artificial Sequence
  Description of Artificial Sequence: Synthetic oligonucleotide
  Target: COL7A1; (+) strand; PAM type: NRG; PAM sequence: TGG
aagagaggcagagagtgact

SEQ ID NO: 17650 - DNA, 20 bp, Artificial Sequence
  Description of Artificial Sequence: Synthetic oligonucleotide
  Target: COL7A1; (+) strand; PAM type: NRG; PAM sequence: GGG
agagaggcagagagtgactt

SEQ ID NO: 17651 - DNA, 20 bp, Artificial Sequence
  Description of Artificial Sequence: Synthetic oligonucleotide
  Target: COL7A1; (+) strand; PAM type: NRG; PAM sequence: AAG
ctcctaccctctgccccctc

SEQ ID NO: 17652 - DNA, 20 bp, Artificial Sequence
  Description of Artificial Sequence: Synthetic oligonucleotide
  Target: COL7A1; (+) strand; PAM type: NRG; PAM sequence: TGG
accctctgccccctcaagac

SEQ ID NO: 17653 - DNA, 20 bp, Artificial Sequence
  Description of Artificial Sequence: Synthetic oligonucleotide
  Target: COL7A1; (+) strand; PAM type: NRG; PAM sequence: GGG
ccctctgccccctcaagact

SEQ ID NO: 17654 - DNA, 20 bp, Artificial Sequence
  Description of Artificial Sequence: Synthetic oligonucleotide
  Target: COL7A1; (+) strand; PAM type: NRG; PAM sequence: AAG
cctcaagactgggaaccccc

SEQ ID NO: 17655 - DNA, 20 bp, Artificial Sequence
  Description of Artificial Sequence: Synthetic oligonucleotide
  Target: COL7A1; (+) strand; PAM type: NRG; PAM sequence: AGG
ctcaagactgggaaccccca

SEQ ID NO: 17656 - DNA, 20 bp, Artificial Sequence
  Description of Artificial Sequence: Synthetic oligonucleotide
  Target: COL7A1; (+) strand; PAM type: NRG; PAM sequence: CAG
aagactgggaacccccaagg

SEQ ID NO: 17657 - DNA, 20 bp, Artificial Sequence
  Description of Artificial Sequence: Synthetic oligonucleotide
  Target: COL7A1; (+) strand; PAM type: NRG; PAM sequence: AGG
agactgggaacccccaaggc

SEQ ID NO: 17658 - DNA, 20 bp, Artificial Sequence
  Description of Artificial Sequence: Synthetic oligonucleotide
  Target: COL7A1; (+) strand; PAM type: NRG; PAM sequence: GGG
gactgggaacccccaaggca

SEQ ID NO: 17659 - DNA, 20 bp, Artificial Sequence
  Description of Artificial Sequence: Synthetic oligonucleotide
  Target: COL7A1; (+) strand; PAM type: NRG; PAM sequence: TGG
ggccccctcctcacccacca

SEQ ID NO: 17660 - DNA, 20 bp, Artificial Sequence
  Description of Artificial Sequence: Synthetic oligonucleotide
  Target: COL7A1; (+) strand; PAM type: NRG; PAM sequence: CAG
atgcccctacatgctgttcc

SEQ ID NO: 17661 - DNA, 20 bp, Artificial Sequence
  Description of Artificial Sequence: Synthetic oligonucleotide
  Target: COL7A1; (+) strand; PAM type: NRG; PAM sequence: TAG
gcccctcacccgctctccac

SEQ ID NO: 17662 - DNA, 20 bp, Artificial Sequence
  Description of Artificial Sequence: Synthetic oligonucleotide
  Target: COL7A1; (+) strand; PAM type: NRG; PAM sequence: AGG
cccctcacccgctctccact

SEQ ID NO: 17663 - DNA, 20 bp, Artificial Sequence
  Description of Artificial Sequence: Synthetic oligonucleotide
  Target: COL7A1; (+) strand; PAM type: NRG; PAM sequence: GGG
ccctcacccgctctccacta

SEQ ID NO: 17664 - DNA, 20 bp, Artificial Sequence
  Description of Artificial Sequence: Synthetic oligonucleotide
  Target: COL7A1; (+) strand; PAM type: NRG; PAM sequence: TGG
acccgctctccactagggcc

SEQ ID NO: 17665 - DNA, 20 bp, Artificial Sequence
  Description of Artificial Sequence: Synthetic oligonucleotide
  Target: COL7A1; (+) strand; PAM type: NRG; PAM sequence: GAG
tggctgacccatctctcctc

SEQ ID NO: 17666 - DNA, 20 bp, Artificial Sequence
  Description of Artificial Sequence: Synthetic oligonucleotide
  Target: COL7A1; (+) strand; PAM type: NRG; PAM sequence: AGG
ggctgacccatctctcctcg

SEQ ID NO: 17667 - DNA, 20 bp, Artificial Sequence
  Description of Artificial Sequence: Synthetic oligonucleotide
  Target: COL7A1; (+) strand; PAM type: NRG; PAM sequence: GGG
gctgacccatctctcctcga

SEQ ID NO: 17668 - DNA, 20 bp, Artificial Sequence
  Description of Artificial Sequence: Synthetic oligonucleotide
  Target: COL7A1; (+) strand; PAM type: NRG; PAM sequence: CGG
cctcgagggcctgtctgacc

SEQ ID NO: 17669 - DNA, 20 bp, Artificial Sequence
  Description of Artificial Sequence: Synthetic oligonucleotide
  Target: COL7A1; (+) strand; PAM type: NRG; PAM sequence: GGG
ctcgagggcctgtctgaccc

SEQ ID NO: 17670 - DNA, 20 bp, Artificial Sequence
  Description of Artificial Sequence: Synthetic oligonucleotide
  Target: COL7A1; (+) strand; PAM type: NRG; PAM sequence: CAG
acccgggaacccaacaacac

SEQ ID NO: 17671 - DNA, 20 bp, Artificial Sequence
  Description of Artificial Sequence: Synthetic oligonucleotide
  Target: COL7A1; (+) strand; PAM type: NRG; PAM sequence: AGG
cccgggaacccaacaacacc

SEQ ID NO: 17672 - DNA, 20 bp, Artificial Sequence
  Description of Artificial Sequence: Synthetic oligonucleotide
  Target: COL7A1; (+) strand; PAM type: NRG; PAM sequence: GAG
cgggaacccaacaacaccag

SEQ ID NO: 17673 - DNA, 20 bp, Artificial Sequence
  Description of Artificial Sequence: Synthetic oligonucleotide
  Target: COL7A1; (+) strand; PAM type: NRG; PAM sequence: CGG
cccaacaacaccaggagcac

SEQ ID NO: 17674 - DNA, 20 bp, Artificial Sequence
  Description of Artificial Sequence: Synthetic oligonucleotide
  Target: COL7A1; (+) strand; PAM type: NRG; PAM sequence: GGG
ccaacaacaccaggagcacc

SEQ ID NO: 17675 - DNA, 20 bp, Artificial Sequence
  Description of Artificial Sequence: Synthetic oligonucleotide
  Target: COL7A1; (+) strand; PAM type: NRG; PAM sequence: CAG
acaacaccaggagcaccggg

SEQ ID NO: 17676 - DNA, 20 bp, Artificial Sequence
  Description of Artificial Sequence: Synthetic oligonucleotide
  Target: COL7A1; (+) strand; PAM type: NRG; PAM sequence: AGG
caacaccaggagcaccgggc

SEQ ID NO: 17677 - DNA, 20 bp, Artificial Sequence
  Description of Artificial Sequence: Synthetic oligonucleotide
  Target: COL7A1; (+) strand; PAM type: NRG; PAM sequence: CAG
accaggagcaccgggcaggc

SEQ ID NO: 17678 - DNA, 20 bp, Artificial Sequence
  Description of Artificial Sequence: Synthetic oligonucleotide
  Target: COL7A1; (+) strand; PAM type: NRG; PAM sequence: AGG
ccaggagcaccgggcaggcc

SEQ ID NO: 17679 - DNA, 20 bp, Artificial Sequence
  Description of Artificial Sequence: Synthetic oligonucleotide
  Target: COL7A1; (+) strand; PAM type: NRG; PAM sequence: GGG
caggagcaccgggcaggcca

SEQ ID NO: 17680 - DNA, 20 bp, Artificial Sequence
  Description of Artificial Sequence: Synthetic oligonucleotide
  Target: COL7A1; (+) strand; PAM type: NRG; PAM sequence: GAG
ggagcaccgggcaggccagg

SEQ ID NO: 17681 - DNA, 20 bp, Artificial Sequence
  Description of Artificial Sequence: Synthetic oligonucleotide
  Target: COL7A1; (+) strand; PAM type: NRG; PAM sequence: AGG
gagcaccgggcaggccaggg

SEQ ID NO: 17682 - DNA, 20 bp, Artificial Sequence
  Description of Artificial Sequence: Synthetic oligonucleotide
  Target: COL7A1; (+) strand; PAM type: NRG; PAM sequence: CAG
ccgggcaggccagggaggcc

SEQ ID NO: 17683 - DNA, 20 bp, Artificial Sequence
  Description of Artificial Sequence: Synthetic oligonucleotide
  Target: COL7A1; (+) strand; PAM type: NRG; PAM sequence: CAG
agatctccctgaaataaaaa

SEQ ID NO: 17684 - DNA, 20 bp, Artificial Sequence
  Description of Artificial Sequence: Synthetic oligonucleotide
  Target: COL7A1; (+) strand; PAM type: NRG; PAM sequence: AAG
tccctgaaataaaaacagca

SEQ ID NO: 17685 - DNA, 20 bp, Artificial Sequence
  Description of Artificial Sequence: Synthetic oligonucleotide
  Target: COL7A1; (+) strand; PAM type: NRG; PAM sequence: AGG
ccctgaaataaaaacagcaa

SEQ ID NO: 17686 - DNA, 20 bp, Artificial Sequence
  Description of Artificial Sequence: Synthetic oligonucleotide
  Target: COL7A1; (+) strand; PAM type: NRG; PAM sequence: GGG
cctgaaataaaaacagcaaa

SEQ ID NO: 17687 - DNA, 20 bp, Artificial Sequence
  Description of Artificial Sequence: Synthetic oligonucleotide
  Target: COL7A1; (+) strand; PAM type: NRG; PAM sequence: GAG
tgaaataaaaacagcaaagg

SEQ ID NO: 17688 - DNA, 20 bp, Artificial Sequence
  Description of Artificial Sequence: Synthetic oligonucleotide
  Target: COL7A1; (+) strand; PAM type: NRG; PAM sequence: AGG
gaaataaaaacagcaaaggg

SEQ ID NO: 17689 - DNA, 20 bp, Artificial Sequence
  Description of Artificial Sequence: Synthetic oligonucleotide
  Target: COL7A1; (+) strand; PAM type: NRG; PAM sequence: GGG
aaataaaaacagcaaaggga

SEQ ID NO: 17690 - DNA, 20 bp, Artificial Sequence
  Description of Artificial Sequence: Synthetic oligonucleotide
  Target: COL7A1; (+) strand; PAM type: NRG; PAM sequence: TGG
aaaacagcaaagggagggaa

SEQ ID NO: 17691 - DNA, 20 bp, Artificial Sequence
  Description of Artificial Sequence: Synthetic oligonucleotide
  Target: COL7A1; (+) strand; PAM type: NRG; PAM sequence: CAG
aagggagggaatggtcaatg

SEQ ID NO: 17692 - DNA, 20 bp, Artificial Sequence
  Description of Artificial Sequence: Synthetic oligonucleotide
  Target: COL7A1; (+) strand; PAM type: NRG; PAM sequence: AGG
agggagggaatggtcaatgc

SEQ ID NO: 17693 - DNA, 20 bp, Artificial Sequence
  Description of Artificial Sequence: Synthetic oligonucleotide
  Target: COL7A1; (+) strand; PAM type: NRG; PAM sequence: CAG
ggtcaatgcaggacccctcc

SEQ ID NO: 17694 - DNA, 20 bp, Artificial Sequence
  Description of Artificial Sequence: Synthetic oligonucleotide
  Target: COL7A1; (+) strand; PAM type: NRG; PAM sequence: AGG
gtcaatgcaggacccctccc

SEQ ID NO: 17695 - DNA, 20 bp, Artificial Sequence
  Description of Artificial Sequence: Synthetic oligonucleotide
  Target: COL7A1; (+) strand; PAM type: NRG; PAM sequence: CAG
acccctcccaggactctcat

SEQ ID NO: 17696 - DNA, 20 bp, Artificial Sequence
  Description of Artificial Sequence: Synthetic oligonucleotide
  Target: COL7A1; (+) strand; PAM type: NRG; PAM sequence: TGG
agaactccctcttcctcctg

SEQ ID NO: 17697 - DNA, 20 bp, Artificial Sequence
  Description of Artificial Sequence: Synthetic oligonucleotide
  Target: COL7A1; (+) strand; PAM type: NRG; PAM sequence: GGG
gaactccctcttcctcctgt

SEQ ID NO: 17698 - DNA, 20 bp, Artificial Sequence
  Description of Artificial Sequence: Synthetic oligonucleotide
  Target: COL7A1; (+) strand; PAM type: NRG; PAM sequence: GGG
aactccctcttcctcctgtg

SEQ ID NO: 17699 - DNA, 20 bp, Artificial Sequence
  Description of Artificial Sequence: Synthetic oligonucleotide
  Target: COL7A1; (+) strand; PAM type: NRG; PAM sequence: GGG
actccctcttcctcctgtgg

SEQ ID NO: 17700 - DNA, 20 bp, Artificial Sequence
  Description of Artificial Sequence: Synthetic oligonucleotide
  Target: COL7A1; (+) strand; PAM type: NRG; PAM sequence: CGG
ctcttcctcctgtgggggcc

SEQ ID NO: 17701 - DNA, 20 bp, Artificial Sequence
  Description of Artificial Sequence: Synthetic oligonucleotide
  Target: COL7A1; (+) strand; PAM type: NRG; PAM sequence: TGG
cggcctgctgcccctacaac

SEQ ID NO: 17702 - DNA, 20 bp, Artificial Sequence
  Description of Artificial Sequence: Synthetic oligonucleotide
  Target: COL7A1; (+) strand; PAM type: NRG; PAM sequence: TGG
gctgcccctacaactggtga

SEQ ID NO: 17703 - DNA, 20 bp, Artificial Sequence
  Description of Artificial Sequence: Synthetic oligonucleotide
  Target: COL7A1; (+) strand; PAM type: NRG; PAM sequence: GGG
ctgcccctacaactggtgat

SEQ ID NO: 17704 - DNA, 20 bp, Artificial Sequence
  Description of Artificial Sequence: Synthetic oligonucleotide
  Target: COL7A1; (+) strand; PAM type: NRG; PAM sequence: GGG
tgcccctacaactggtgatg

SEQ ID NO: 17705 - DNA, 20 bp, Artificial Sequence
  Description of Artificial Sequence: Synthetic oligonucleotide
  Target: COL7A1; (+) strand; PAM type: NRG; PAM sequence: TGG
cattgacttaccttcacacc

SEQ ID NO: 17706 - DNA, 20 bp, Artificial Sequence
  Description of Artificial Sequence: Synthetic oligonucleotide
  Target: COL7A1; (+) strand; PAM type: NRG; PAM sequence: GAG
ttgacttaccttcacacctg

SEQ ID NO: 17707 - DNA, 20 bp, Artificial Sequence
  Description of Artificial Sequence: Synthetic oligonucleotide
  Target: COL7A1; (+) strand; PAM type: NRG; PAM sequence: AGG
tgacttaccttcacacctgg

SEQ ID NO: 17708 - DNA, 20 bp, Artificial Sequence
  Description of Artificial Sequence: Synthetic oligonucleotide
  Target: COL7A1; (+) strand; PAM type: NRG; PAM sequence: GGG
gacttaccttcacacctgga

SEQ ID NO: 17709 - DNA, 20 bp, Artificial Sequence
  Description of Artificial Sequence: Synthetic oligonucleotide
  Target: COL7A1; (+) strand; PAM type: NRG; PAM sequence: CAG
taccttcacacctggagggc

SEQ ID NO: 17710 - DNA, 20 bp, Artificial Sequence
  Description of Artificial Sequence: Synthetic oligonucleotide
  Target: COL7A1; (+) strand; PAM type: NRG; PAM sequence: AGG
accttcacacctggagggcc

SEQ ID NO: 17711 - DNA, 20 bp, Artificial Sequence
  Description of Artificial Sequence: Synthetic oligonucleotide
  Target: COL7A1; (+) strand; PAM type: NRG; PAM sequence: GAG
cttcacacctggagggccag

SEQ ID NO: 17712 - DNA, 20 bp, Artificial Sequence
  Description of Artificial Sequence: Synthetic oligonucleotide
  Target: COL7A1; (+) strand; PAM type: NRG; PAM sequence: AGG
ttcacacctggagggccagg

SEQ ID NO: 17713 - DNA, 20 bp, Artificial Sequence
  Description of Artificial Sequence: Synthetic oligonucleotide
  Target: COL7A1; (+) strand; PAM type: NRG; PAM sequence: CAG
acctggagggccaggaggcc

SEQ ID NO: 17714 - DNA, 20 bp, Artificial Sequence
  Description of Artificial Sequence: Synthetic oligonucleotide
  Target: COL7A1; (+) strand; PAM type: NRG; PAM sequence: AGG
cctggagggccaggaggccc

SEQ ID NO: 17715 - DNA, 20 bp, Artificial Sequence
  Description of Artificial Sequence: Synthetic oligonucleotide
  Target: COL7A1; (+) strand; PAM type: NRG; PAM sequence: GGG
ctggagggccaggaggccca

SEQ ID NO: 17716 - DNA, 20 bp, Artificial Sequence
  Description of Artificial Sequence: Synthetic oligonucleotide
  Target: COL7A1; (+) strand; PAM type: NRG; PAM sequence: GGG
tggagggccaggaggcccag

SEQ ID NO: 17717 - DNA, 20 bp, Artificial Sequence
  Description of Artificial Sequence: Synthetic oligonucleotide
  Target: COL7A1; (+) strand; PAM type: NRG; PAM sequence: GAG
gagggccaggaggcccaggg

SEQ ID NO: 17718 - DNA, 20 bp, Artificial Sequence
  Description of Artificial Sequence: Synthetic oligonucleotide
  Target: COL7A1; (+) strand; PAM type: NRG; PAM sequence: CGG
ccaggaggcccaggggagcc

SEQ ID NO: 17719 - DNA, 20 bp, Artificial Sequence
  Description of Artificial Sequence: Synthetic oligonucleotide
  Target: COL7A1; (+) strand; PAM type: NRG; PAM sequence: GGG
caggaggcccaggggagccc

SEQ ID NO: 17720 - DNA, 20 bp, Artificial Sequence
  Description of Artificial Sequence: Synthetic oligonucleotide
  Target: COL7A1; (+) strand; PAM type: NRG; PAM sequence: TGG
gagcccgggaccccgactcc

SEQ ID NO: 17721 - DNA, 20 bp, Artificial Sequence
  Description of Artificial Sequence: Synthetic oligonucleotide
  Target: COL7A1; (+) strand; PAM type: NRG; PAM sequence: GGG
agcccgggaccccgactcct

SEQ ID NO: 17722 - DNA, 20 bp, Artificial Sequence
  Description of Artificial Sequence: Synthetic oligonucleotide
  Target: COL7A1; (+) strand; PAM type: NRG; PAM sequence: GAG
cgactcctgggtcacccttt

SEQ ID NO: 17723 - DNA, 20 bp, Artificial Sequence
  Description of Artificial Sequence: Synthetic oligonucleotide
  Target: COL7A1; (+) strand; PAM type: NRG; PAM sequence: AGG
gactcctgggtcaccctttg

SEQ ID NO: 17724 - DNA, 20 bp, Artificial Sequence
  Description of Artificial Sequence: Synthetic oligonucleotide
  Target: COL7A1; (+) strand; PAM type: NRG; PAM sequence: AAG
ctgggtcaccctttgaggaa

SEQ ID NO: 17725 - DNA, 20 bp, Artificial Sequence
  Description of Artificial Sequence: Synthetic oligonucleotide
  Target: COL7A1; (+) strand; PAM type: NRG; PAM sequence: GAG
gggtcaccctttgaggaaaa

SEQ ID NO: 17726 - DNA, 20 bp, Artificial Sequence
  Description of Artificial Sequence: Synthetic oligonucleotide
  Target: COL7A1; (+) strand; PAM type: NRG; PAM sequence: AGG
ggtcaccctttgaggaaaag

SEQ ID NO: 17727 - DNA, 20 bp, Artificial Sequence
  Description of Artificial Sequence: Synthetic oligonucleotide
  Target: COL7A1; (+) strand; PAM type: NRG; PAM sequence: CGG
cctttgaggaaaagaggcat

SEQ ID NO: 17728 - DNA, 20 bp, Artificial Sequence
  Description of Artificial Sequence: Synthetic oligonucleotide
  Target: COL7A1; (+) strand; PAM type: NRG; PAM sequence: AAG
aggaaaagaggcatcggatc

SEQ ID NO: 17729 - DNA, 20 bp, Artificial Sequence
  Description of Artificial Sequence: Synthetic oligonucleotide
  Target: COL7A1; (+) strand; PAM type: NRG; PAM sequence: CAG
aagaggcatcggatcaagct

SEQ ID NO: 17730 - DNA, 20 bp, Artificial Sequence
  Description of Artificial Sequence: Synthetic oligonucleotide
  Target: COL7A1; (+) strand; PAM type: NRG; PAM sequence: AGG
agaggcatcggatcaagctc

SEQ ID NO: 17731 - DNA, 20 bp, Artificial Sequence
  Description of Artificial Sequence: Synthetic oligonucleotide
  Target: COL7A1; (+) strand; PAM type: NRG; PAM sequence: GGG
gaggcatcggatcaagctca

SEQ ID NO: 17732 - DNA, 20 bp, Artificial Sequence
  Description of Artificial Sequence: Synthetic oligonucleotide
  Target: COL7A1; (+) strand; PAM type: NRG; PAM sequence: GAG
ggcatcggatcaagctcagg

SEQ ID NO: 17733 - DNA, 20 bp, Artificial Sequence
  Description of Artificial Sequence: Synthetic oligonucleotide
  Target: COL7A1; (+) strand; PAM type: NRG; PAM sequence: CAG
agctcagggagtctcacgac

SEQ ID NO: 17734 - DNA, 20 bp, Artificial Sequence
  Description of Artificial Sequence: Synthetic oligonucleotide
  Target: COL7A1; (+) strand; PAM type: NRG; PAM sequence: AGG
gctcagggagtctcacgacc

SEQ ID NO: 17735 - DNA, 20 bp, Artificial Sequence
  Description of Artificial Sequence: Synthetic oligonucleotide
  Target: COL7A1; (+) strand; PAM type: NRG; PAM sequence: CAG
gagtctcacgaccaggaccc

SEQ ID NO: 17736 - DNA, 20 bp, Artificial Sequence
  Description of Artificial Sequence: Synthetic oligonucleotide
  Target: COL7A1; (+) strand; PAM type: NRG; PAM sequence: CAG
tctcacgaccaggaccccag

SEQ ID NO: 17737 - DNA, 20 bp, Artificial Sequence
  Description of Artificial Sequence: Synthetic oligonucleotide
  Target: COL7A1; (+) strand; PAM type: NRG; PAM sequence: AGG
ctcacgaccaggaccccagc

SEQ ID NO: 17738 - DNA, 20 bp, Artificial Sequence
  Description of Artificial Sequence: Synthetic oligonucleotide
  Target: COL7A1; (+) strand; PAM type: NRG; PAM sequence: GGG
tcacgaccaggaccccagca

SEQ ID NO: 17739 - DNA, 20 bp, Artificial Sequence
  Description of Artificial Sequence: Synthetic oligonucleotide
  Target: COL7A1; (+) strand; PAM type: NRG; PAM sequence: TGG
gaccccagcagggacccttc

SEQ ID NO: 17740 - DNA, 20 bp, Artificial Sequence
  Description of Artificial Sequence: Synthetic oligonucleotide
  Target: COL7A1; (+) strand; PAM type: NRG; PAM sequence: GGG
accccagcagggacccttct

SEQ ID NO: 17741 - DNA, 20 bp, Artificial Sequence
  Description of Artificial Sequence: Synthetic oligonucleotide
  Target: COL7A1; (+) strand; PAM type: NRG; PAM sequence: TGG
tacacataccttgaaacctt

SEQ ID NO: 17742 - DNA, 20 bp, Artificial Sequence
  Description of Artificial Sequence: Synthetic oligonucleotide
  Target: COL7A1; (+) strand; PAM type: NRG; PAM sequence: GGG
acacataccttgaaaccttt

SEQ ID NO: 17743 - DNA, 20 bp, Artificial Sequence
  Description of Artificial Sequence: Synthetic oligonucleotide
  Target: COL7A1; (+) strand; PAM type: NRG; PAM sequence: TGG
accttgaaacctttgggtcc

SEQ ID NO: 17744 - DNA, 20 bp, Artificial Sequence
  Description of Artificial Sequence: Synthetic oligonucleotide
  Target: COL7A1; (+) strand; PAM type: NRG; PAM sequence: GAG
cttgaaacctttgggtcctg

SEQ ID NO: 17745 - DNA, 20 bp, Artificial Sequence
  Description of Artificial Sequence: Synthetic oligonucleotide
  Target: COL7A1; (+) strand; PAM type: NRG; PAM sequence: AAG
tggagcccctttctgaccct

SEQ ID NO: 17746 - DNA, 20 bp, Artificial Sequence
  Description of Artificial Sequence: Synthetic oligonucleotide
  Target: COL7A1; (+) strand; PAM type: NRG; PAM sequence: CAG
tttctgaccctaagaaaacc

SEQ ID NO: 17747 - DNA, 20 bp, Artificial Sequence
  Description of Artificial Sequence: Synthetic oligonucleotide
  Target: COL7A1; (+) strand; PAM type: NRG; PAM sequence: CAG
ccctaagaaaacccagcaaa

SEQ ID NO: 17748 - DNA, 20 bp, Artificial Sequence
  Description of Artificial Sequence: Synthetic oligonucleotide
  Target: COL7A1; (+) strand; PAM type: NRG; PAM sequence: GAG
aaacccagcaaacagcattt

SEQ ID NO: 17749 - DNA, 20 bp, Artificial Sequence
  Description of Artificial Sequence: Synthetic oligonucleotide
  Target: COL7A1; (+) strand; PAM type: NRG; PAM sequence: GAG
acccagcaaacagcatttga

SEQ ID NO: 17750 - DNA, 20 bp, Artificial Sequence
  Description of Artificial Sequence: Synthetic oligonucleotide
  Target: COL7A1; (+) strand; PAM type: NRG; PAM sequence: AGG
cccagcaaacagcatttgag

SEQ ID NO: 17751 - DNA, 20 bp, Artificial Sequence
  Description of Artificial Sequence: Synthetic oligonucleotide
  Target: COL7A1; (+) strand; PAM type: NRG; PAM sequence: GGG
ccagcaaacagcatttgaga

SEQ ID NO: 17752 - DNA, 20 bp, Artificial Sequence
  Description of Artificial Sequence: Synthetic oligonucleotide
  Target: COL7A1; (+) strand; PAM type: NRG; PAM sequence: TAG
gcaaacagcatttgagaggg

SEQ ID NO: 17753 - DNA, 20 bp, Artificial Sequence
  Description of Artificial Sequence: Synthetic oligonucleotide
  Target: COL7A1; (+) strand; PAM type: NRG; PAM sequence: AGG
caaacagcatttgagagggt

SEQ ID NO: 17754 - DNA, 20 bp, Artificial Sequence
  Description of Artificial Sequence: Synthetic oligonucleotide
  Target: COL7A1; (+) strand; PAM type: NRG; PAM sequence: GAG
atttgagagggtaggaacat

SEQ ID NO: 17755 - DNA, 20 bp, Artificial Sequence
  Description of Artificial Sequence: Synthetic oligonucleotide
  Target: COL7A1; (+) strand; PAM type: NRG; PAM sequence: CAG
agagggtaggaacatgagca

SEQ ID NO: 17756 - DNA, 20 bp, Artificial Sequence
  Description of Artificial Sequence: Synthetic oligonucleotide
  Target: COL7A1; (+) strand; PAM type: NRG; PAM sequence: GAG
agggtaggaacatgagcaca

SEQ ID NO: 17757 - DNA, 20 bp, Artificial Sequence
  Description of Artificial Sequence: Synthetic oligonucleotide
  Target: COL7A1; (+) strand; PAM type: NRG; PAM sequence: CAG
aggaacatgagcacagagtt

SEQ ID NO: 17758 - DNA, 20 bp, Artificial Sequence
  Description of Artificial Sequence: Synthetic oligonucleotide
  Target: COL7A1; (+) strand; PAM type: NRG; PAM sequence: CGG
atgagcacagagttcagaca

SEQ ID NO: 17759 - DNA, 20 bp, Artificial Sequence
  Description of Artificial Sequence: Synthetic oligonucleotide
  Target: COL7A1; (+) strand; PAM type: NRG; PAM sequence: GGG
tgagcacagagttcagacac

SEQ ID NO: 17760 - DNA, 20 bp, Artificial Sequence
  Description of Artificial Sequence: Synthetic oligonucleotide
  Target: COL7A1; (+) strand; PAM type: NRG; PAM sequence: CAG
acacgggctgaaaatattcc

SEQ ID NO: 17761 - DNA, 20 bp, Artificial Sequence
  Description of Artificial Sequence: Synthetic oligonucleotide
  Target: COL7A1; (+) strand; PAM type: NRG; PAM sequence: AGG
cacgggctgaaaatattccc

SEQ ID NO: 17762 - DNA, 20 bp, Artificial Sequence
  Description of Artificial Sequence: Synthetic oligonucleotide
  Target: COL7A1; (+) strand; PAM type: NRG; PAM sequence: GGG
acgggctgaaaatattccca

SEQ ID NO: 17763 - DNA, 20 bp, Artificial Sequence
  Description of Artificial Sequence: Synthetic oligonucleotide
  Target: COL7A1; (+) strand; PAM type: NRG; PAM sequence: GGG
cgggctgaaaatattcccag

SEQ ID NO: 17764 - DNA, 20 bp, Artificial Sequence
  Description of Artificial Sequence: Synthetic oligonucleotide
  Target: COL7A1; (+) strand; PAM type: NRG; PAM sequence: GAG
ggctgaaaatattcccaggg

SEQ ID NO: 17765 - DNA, 20 bp, Artificial Sequence
  Description of Artificial Sequence: Synthetic oligonucleotide
  Target: COL7A1; (+) strand; PAM type: NRG; PAM sequence: TGG
ctgatgtgaccatgaacaca

SEQ ID NO: 17766 - DNA, 20 bp, Artificial Sequence
  Description of Artificial Sequence: Synthetic oligonucleotide
  Target: COL7A1; (+) strand; PAM type: NRG; PAM sequence: GGG
tgatgtgaccatgaacacat

SEQ ID NO: 17767 - DNA, 20 bp, Artificial Sequence
  Description of Artificial Sequence: Synthetic oligonucleotide
  Target: COL7A1; (+) strand; PAM type: NRG; PAM sequence: CAG
accatgaacacatgggaact

SEQ ID NO: 17768 - DNA, 20 bp, Artificial Sequence
  Description of Artificial Sequence: Synthetic oligonucleotide
  Target: COL7A1; (+) strand; PAM type: NRG; PAM sequence: AAG
gggaactcagacatgcgacc

SEQ ID NO: 17769 - DNA, 20 bp, Artificial Sequence
  Description of Artificial Sequence: Synthetic oligonucleotide
  Target: COL7A1; (+) strand; PAM type: NRG; PAM sequence: TGG
tcagacatgcgaccaagaat

SEQ ID NO: 17770 - DNA, 20 bp, Artificial Sequence
  Description of Artificial Sequence: Synthetic oligonucleotide
  Target: COL7A1; (+) strand; PAM type: NRG; PAM sequence: CAG
tgcgaccaagaattggctca

SEQ ID NO: 17771 - DNA, 20 bp, Artificial Sequence
  Description of Artificial Sequence: Synthetic oligonucleotide
  Target: COL7A1; (+) strand; PAM type: NRG; PAM sequence: AGG
gcgaccaagaattggctcac

SEQ ID NO: 17772 - DNA, 20 bp, Artificial Sequence
  Description of Artificial Sequence: Synthetic oligonucleotide
  Target: COL7A1; (+) strand; PAM type: NRG; PAM sequence: GAG
gaccaagaattggctcacag

SEQ ID NO: 17773 - DNA, 20 bp, Artificial Sequence
  Description of Artificial Sequence: Synthetic oligonucleotide
  Target: COL7A1; (+) strand; PAM type: NRG; PAM sequence: CAG
agaattggctcacaggagct

SEQ ID NO: 17774 - DNA, 20 bp, Artificial Sequence
  Description of Artificial Sequence: Synthetic oligonucleotide
  Target: COL7A1; (+) strand; PAM type: NRG; PAM sequence: TGG
caggagctcagacatgacca

SEQ ID NO: 17775 - DNA, 20 bp, Artificial Sequence
  Description of Artificial Sequence: Synthetic oligonucleotide
  Target: COL7A1; (+) strand; PAM type: NRG; PAM sequence: CAG
gacatgaccatggcctatct

SEQ ID NO: 17776 - DNA, 20 bp, Artificial Sequence
  Description of Artificial Sequence: Synthetic oligonucleotide
  Target: COL7A1; (+) strand; PAM type: NRG; PAM sequence: AGG
acatgaccatggcctatctc

SEQ ID NO: 17777 - DNA, 20 bp, Artificial Sequence
  Description of Artificial Sequence: Synthetic oligonucleotide
  Target: COL7A1; (+) strand; PAM type: NRG; PAM sequence: CAG
gaccatggcctatctcagga

SEQ ID NO: 17778 - DNA, 20 bp, Artificial Sequence
  Description of Artificial Sequence: Synthetic oligonucleotide
  Target: COL7A1; (+) strand; PAM type: NRG; PAM sequence: CAG
tggcctatctcaggacagca

SEQ ID NO: 17779 - DNA, 20 bp, Artificial Sequence
  Description of Artificial Sequence: Synthetic oligonucleotide
  Target: COL7A1; (+) strand; PAM type: NRG; PAM sequence: CAG
ctatctcaggacagcacaga

SEQ ID NO: 17780 - DNA, 20 bp, Artificial Sequence
  Description of Artificial Sequence: Synthetic oligonucleotide
  Target: COL7A1; (+) strand; PAM type: NRG; PAM sequence: GAG
atctcaggacagcacagaca

SEQ ID NO: 17781 - DNA, 20 bp, Artificial Sequence
  Description of Artificial Sequence: Synthetic oligonucleotide
  Target: COL7A1; (+) strand; PAM type: NRG; PAM sequence: AGG
tctcaggacagcacagacag

SEQ ID NO: 17782 - DNA, 20 bp, Artificial Sequence
  Description of Artificial Sequence: Synthetic oligonucleotide
  Target: COL7A1; (+) strand; PAM type: NRG; PAM sequence: GGG
ctcaggacagcacagacaga

SEQ ID NO: 17783 - DNA, 20 bp, Artificial Sequence
  Description of Artificial Sequence: Synthetic oligonucleotide
  Target: COL7A1; (+) strand; PAM type: NRG; PAM sequence: CAG
agcacagacagagggacgct

SEQ ID NO: 17784 - DNA, 20 bp, Artificial Sequence
  Description of Artificial Sequence: Synthetic oligonucleotide
  Target: COL7A1; (+) strand; PAM type: NRG; PAM sequence: TAG
gggacgctcagatactacca

SEQ ID NO: 17785 - DNA, 20 bp, Artificial Sequence
  Description of Artificial Sequence: Synthetic oligonucleotide
  Target: COL7A1; (+) strand; PAM type: NRG; PAM sequence: CAG
cgctcagatactaccataga

SEQ ID NO: 17786 - DNA, 20 bp, Artificial Sequence
  Description of Artificial Sequence: Synthetic oligonucleotide
  Target: COL7A1; (+) strand; PAM type: NRG; PAM sequence: AGG
gctcagatactaccatagac

SEQ ID NO: 17787 - DNA, 20 bp, Artificial Sequence
  Description of Artificial Sequence: Synthetic oligonucleotide
  Target: COL7A1; (+) strand; PAM type: NRG; PAM sequence: TGG
cagatactaccatagacagg

SEQ ID NO: 17788 - DNA, 20 bp, Artificial Sequence
  Description of Artificial Sequence: Synthetic oligonucleotide
  Target: COL7A1; (+) strand; PAM type: NRG; PAM sequence: GGG
agatactaccatagacaggt

SEQ ID NO: 17789 - DNA, 20 bp, Artificial Sequence
  Description of Artificial Sequence: Synthetic oligonucleotide
  Target: COL7A1; (+) strand; PAM type: NRG; PAM sequence: GAG
atactaccatagacaggtgg

SEQ ID NO: 17790 - DNA, 20 bp, Artificial Sequence
  Description of Artificial Sequence: Synthetic oligonucleotide
  Target: COL7A1; (+) strand; PAM type: NRG; PAM sequence: CAG
accatagacaggtgggagtt

SEQ ID NO: 17791 - DNA, 20 bp, Artificial Sequence
  Description of Artificial Sequence: Synthetic oligonucleotide
  Target: COL7A1; (+) strand; PAM type: NRG; PAM sequence: AGG
ccatagacaggtgggagttc

SEQ ID NO: 17792 - DNA, 20 bp, Artificial Sequence
  Description of Artificial Sequence: Synthetic oligonucleotide
  Target: COL7A1; (+) strand; PAM type: NRG; PAM sequence: TGG
gacaggtgggagttcaggca

SEQ ID NO: 17793 - DNA, 20 bp, Artificial Sequence
  Description of Artificial Sequence: Synthetic oligonucleotide
  Target: COL7A1; (+) strand; PAM type: NRG; PAM sequence: CAG
gtgggagttcaggcatggca

SEQ ID NO: 17794 - DNA, 20 bp, Artificial Sequence
  Description of Artificial Sequence: Synthetic oligonucleotide
  Target: COL7A1; (+) strand; PAM type: NRG; PAM sequence: AGG
tgggagttcaggcatggcac

SEQ ID NO: 17795 - DNA, 20 bp, Artificial Sequence
  Description of Artificial Sequence: Synthetic oligonucleotide
  Target: COL7A1; (+) strand; PAM type: NRG; PAM sequence: CAG
gttcaggcatggcacaggca

SEQ ID NO: 17796 - DNA, 20 bp, Artificial Sequence
  Description of Artificial Sequence: Synthetic oligonucleotide
  Target: COL7A1; (+) strand; PAM type: NRG; PAM sequence: AGG
ttcaggcatggcacaggcac

SEQ ID NO: 17797 - DNA, 20 bp, Artificial Sequence
  Description of Artificial Sequence: Synthetic oligonucleotide
  Target: COL7A1; (+) strand; PAM type: NRG; PAM sequence: GGG
tcaggcatggcacaggcaca

SEQ ID NO: 17798 - DNA, 20 bp, Artificial Sequence
  Description of Artificial Sequence: Synthetic oligonucleotide
  Target: COL7A1; (+) strand; PAM type: NRG; PAM sequence: GAG
aggcatggcacaggcacagg

SEQ ID NO: 17799 - DNA, 20 bp, Artificial Sequence
  Description of Artificial Sequence: Synthetic oligonucleotide
  Target: COL7A1; (+) strand; PAM type: NRG; PAM sequence: GAG
ggcacagggagcccacacgc

SEQ ID NO: 17800 - DNA, 20 bp, Artificial Sequence
  Description of Artificial Sequence: Synthetic oligonucleotide
  Target: COL7A1; (+) strand; PAM type: NRG; PAM sequence: CAG
agggagcccacacgcgagtg

SEQ ID NO: 17801 - DNA, 20 bp, Artificial Sequence
  Description of Artificial Sequence: Synthetic oligonucleotide
  Target: COL7A1; (+) strand; PAM type: NRG; PAM sequence: TGG
cacacgcgagtgcagacatc

SEQ ID NO: 17802 - DNA, 20 bp, Artificial Sequence
  Description of Artificial Sequence: Synthetic oligonucleotide
  Target: COL7A1; (+) strand; PAM type: NRG; PAM sequence: CAG
agtgcagacatctggctcca

SEQ ID NO: 17803 - DNA, 20 bp, Artificial Sequence
  Description of Artificial Sequence: Synthetic oligonucleotide
  Target: COL7A1; (+) strand; PAM type: NRG; PAM sequence: GAG
acatctggctccacagacgt

SEQ ID NO: 17804 - DNA, 20 bp, Artificial Sequence
  Description of Artificial Sequence: Synthetic oligonucleotide
  Target: COL7A1; (+) strand; PAM type: NRG; PAM sequence: CGG
tggctccacagacgtgagtg

SEQ ID NO: 17805 - DNA, 20 bp, Artificial Sequence
  Description of Artificial Sequence: Synthetic oligonucleotide
  Target: COL7A1; (+) strand; PAM type: NRG; PAM sequence: CGG
cagacgtgagtgcggacaca

SEQ ID NO: 17806 - DNA, 20 bp, Artificial Sequence
  Description of Artificial Sequence: Synthetic oligonucleotide
  Target: COL7A1; (+) strand; PAM type: NRG; PAM sequence: GGG
agacgtgagtgcggacacac

SEQ ID NO: 17807 - DNA, 20 bp, Artificial Sequence
  Description of Artificial Sequence: Synthetic oligonucleotide
  Target: COL7A1; (+) strand; PAM type: NRG; PAM sequence: CAG
agtgcggacacacgggcgct

SEQ ID NO: 17808 - DNA, 20 bp, Artificial Sequence
  Description of Artificial Sequence: Synthetic oligonucleotide
  Target: COL7A1; (+) strand; PAM type: NRG; PAM sequence: GAG
tgcggacacacgggcgctca

SEQ ID NO: 17809 - DNA, 20 bp, Artificial Sequence
  Description of Artificial Sequence: Synthetic oligonucleotide
  Target: COL7A1; (+) strand; PAM type: NRG; PAM sequence: AGG
gcggacacacgggcgctcag

SEQ ID NO: 17810 - DNA, 20 bp, Artificial Sequence
  Description of Artificial Sequence: Synthetic oligonucleotide
  Target: COL7A1; (+) strand; PAM type: NRG; PAM sequence: GGG
cggacacacgggcgctcaga

SEQ ID NO: 17811 - DNA, 20 bp, Artificial Sequence
  Description of Artificial Sequence: Synthetic oligonucleotide
  Target: COL7A1; (+) strand; PAM type: NRG; PAM sequence: GGG
ggacacacgggcgctcagag

SEQ ID NO: 17812 - DNA, 20 bp, Artificial Sequence
  Description of Artificial Sequence: Synthetic oligonucleotide
  Target: COL7A1; (+) strand; PAM type: NRG; PAM sequence: CGG
aaccccaacacgtccactcc

SEQ ID NO: 17813 - DNA, 20 bp, Artificial Sequence
  Description of Artificial Sequence: Synthetic oligonucleotide
  Target: COL7A1; (+) strand; PAM type: NRG; PAM sequence: GGG
accccaacacgtccactccc

SEQ ID NO: 17814 - DNA, 20 bp, Artificial Sequence
  Description of Artificial Sequence: Synthetic oligonucleotide
  Target: COL7A1; (+) strand; PAM type: NRG; PAM sequence: TAG
ccaacacgtccactcccggg

SEQ ID NO: 17815 - DNA, 20 bp, Artificial Sequence
  Description of Artificial Sequence: Synthetic oligonucleotide
  Target: COL7A1; (+) strand; PAM type: NRG; PAM sequence: GAG
aacacgtccactcccgggta

SEQ ID NO: 17816 - DNA, 20 bp, Artificial Sequence
  Description of Artificial Sequence: Synthetic oligonucleotide
  Target: COL7A1; (+) strand; PAM type: NRG; PAM sequence: CAG
acgtccactcccgggtagag

SEQ ID NO: 17817 - DNA, 20 bp, Artificial Sequence
  Description of Artificial Sequence: Synthetic oligonucleotide
  Target: COL7A1; (+) strand; PAM type: NRG; PAM sequence: AGG
cgtccactcccgggtagagc

SEQ ID NO: 17818 - DNA, 20 bp, Artificial Sequence
  Description of Artificial Sequence: Synthetic oligonucleotide
  Target: COL7A1; (+) strand; PAM type: NRG; PAM sequence: TGG
actcccgggtagagcaggca

SEQ ID NO: 17819 - DNA, 20 bp, Artificial Sequence
  Description of Artificial Sequence: Synthetic oligonucleotide
  Target: COL7A1; (+) strand; PAM type: NRG; PAM sequence: CAG
gggtagagcaggcatggcca

SEQ ID NO: 17820 - DNA, 20 bp, Artificial Sequence
  Description of Artificial Sequence: Synthetic oligonucleotide
  Target: COL7A1; (+) strand; PAM type: NRG; PAM sequence: AGG
ggtagagcaggcatggccac

SEQ ID NO: 17821 - DNA, 20 bp, Artificial Sequence
  Description of Artificial Sequence: Synthetic oligonucleotide
  Target: COL7A1; (+) strand; PAM type: NRG; PAM sequence: TGG
catggccacaggctgaacgc

SEQ ID NO: 17822 - DNA, 20 bp, Artificial Sequence
  Description of Artificial Sequence: Synthetic oligonucleotide
  Target: COL7A1; (+) strand; PAM type: NRG; PAM sequence: CAG
ggccacaggctgaacgctgg

SEQ ID NO: 17823 - DNA, 20 bp, Artificial Sequence
  Description of Artificial Sequence: Synthetic oligonucleotide
  Target: COL7A1; (+) strand; PAM type: NRG; PAM sequence: CAG
acaggctgaacgctggcagc

SEQ ID NO: 17824 - DNA, 20 bp, Artificial Sequence
  Description of Artificial Sequence: Synthetic oligonucleotide
  Target: COL7A1; (+) strand; PAM type: NRG; PAM sequence: AGG
caggctgaacgctggcagcc

SEQ ID NO: 17825 - DNA, 20 bp, Artificial Sequence
  Description of Artificial Sequence: Synthetic oligonucleotide
  Target: COL7A1; (+) strand; PAM type: NRG; PAM sequence: GGG
aggctgaacgctggcagcca

SEQ ID NO: 17826 - DNA, 20 bp, Artificial Sequence
  Description of Artificial Sequence: Synthetic oligonucleotide
  Target: COL7A1; (+) strand; PAM type: NRG; PAM sequence: GGG
ggctgaacgctggcagccag

SEQ ID NO: 17827 - DNA, 20 bp, Artificial Sequence
  Description of Artificial Sequence: Synthetic oligonucleotide
  Target: COL7A1; (+) strand; PAM type: NRG; PAM sequence: CAG
tgaacgctggcagccagggg

SEQ ID NO: 17828 - DNA, 20 bp, Artificial Sequence
  Description of Artificial Sequence: Synthetic oligonucleotide
  Target: COL7A1; (+) strand; PAM type: NRG; PAM sequence: AGG
gaacgctggcagccaggggc

SEQ ID NO: 17829 - DNA, 20 bp, Artificial Sequence
  Description of Artificial Sequence: Synthetic oligonucleotide
  Target: COL7A1; (+) strand; PAM type: NRG; PAM sequence: GGG
aacgctggcagccaggggca

SEQ ID NO: 17830 - DNA, 20 bp, Artificial Sequence
  Description of Artificial Sequence: Synthetic oligonucleotide
  Target: COL7A1; (+) strand; PAM type: NRG; PAM sequence: GGG
acgctggcagccaggggcag

SEQ ID NO: 17831 - DNA, 20 bp, Artificial Sequence
  Description of Artificial Sequence: Synthetic oligonucleotide
  Target: COL7A1; (+) strand; PAM type: NRG; PAM sequence: AAG
tggcagccaggggcagggga

SEQ ID NO: 17832 - DNA, 20 bp, Artificial Sequence
  Description of Artificial Sequence: Synthetic oligonucleotide
  Target: COL7A1; (+) strand; PAM type: NRG; PAM sequence: AGG
ggcagccaggggcaggggaa

SEQ ID NO: 17833 - DNA, 20 bp, Artificial Sequence
  Description of Artificial Sequence: Synthetic oligonucleotide
  Target: COL7A1; (+) strand; PAM type: NRG; PAM sequence: GAG
cagccaggggcaggggaaag

SEQ ID NO: 17834 - DNA, 20 bp, Artificial Sequence
  Description of Artificial Sequence: Synthetic oligonucleotide
  Target: COL7A1; (+) strand; PAM type: NRG; PAM sequence: AGG
agccaggggcaggggaaagg

SEQ ID NO: 17835 - DNA, 20 bp, Artificial Sequence
  Description of Artificial Sequence: Synthetic oligonucleotide
  Target: COL7A1; (+) strand; PAM type: NRG; PAM sequence: CAG
ggaaaggaggattgtaaaca

SEQ ID NO: 17836 - DNA, 20 bp, Artificial Sequence
  Description of Artificial Sequence: Synthetic oligonucleotide
  Target: COL7A1; (+) strand; PAM type: NRG; PAM sequence: AGG
gaaaggaggattgtaaacac

SEQ ID NO: 17837 - DNA, 20 bp, Artificial Sequence
  Description of Artificial Sequence: Synthetic oligonucleotide
  Target: COL7A1; (+) strand; PAM type: NRG; PAM sequence: AAG
aggattgtaaacacaggacc

SEQ ID NO: 17838 - DNA, 20 bp, Artificial Sequence
  Description of Artificial Sequence: Synthetic oligonucleotide
  Target: COL7A1; (+) strand; PAM type: NRG; PAM sequence: AGG
ggattgtaaacacaggacca

SEQ ID NO: 17839 - DNA, 20 bp, Artificial Sequence
  Description of Artificial Sequence: Synthetic oligonucleotide
  Target: COL7A1; (+) strand; PAM type: NRG; PAM sequence: GAG
attgtaaacacaggaccaag

SEQ ID NO: 17840 - DNA, 20 bp, Artificial Sequence
  Description of Artificial Sequence: Synthetic oligonucleotide
  Target: COL7A1; (+) strand; PAM type: NRG; PAM sequence: GAG
tgtaaacacaggaccaagga

SEQ ID NO: 17841 - DNA, 20 bp, Artificial Sequence
  Description of Artificial Sequence: Synthetic oligonucleotide
  Target: COL7A1; (+) strand; PAM type: NRG; PAM sequence: AGG
gtaaacacaggaccaaggag

SEQ ID NO: 17842 - DNA, 20 bp, Artificial Sequence
  Description of Artificial Sequence: Synthetic oligonucleotide
  Target: COL7A1; (+) strand; PAM type: NRG; PAM sequence: AAG
aggaccaaggagaggttcac

SEQ ID NO: 17843 - DNA, 20 bp, Artificial Sequence
  Description of Artificial Sequence: Synthetic oligonucleotide
  Target: COL7A1; (+) strand; PAM type: NRG; PAM sequence: CAG
aggagaggttcacaagaact

SEQ ID NO: 17844 - DNA, 20 bp, Artificial Sequence
  Description of Artificial Sequence: Synthetic oligonucleotide
  Target: COL7A1; (+) strand; PAM type: NRG; PAM sequence: AGG
ggagaggttcacaagaactc

SEQ ID NO: 17845 - DNA, 20 bp, Artificial Sequence
  Description of Artificial Sequence: Synthetic oligonucleotide
  Target: COL7A1; (+) strand; PAM type: NRG; PAM sequence: TGG
acaagaactcaggtgtgtcc

SEQ ID NO: 17846 - DNA, 20 bp, Artificial Sequence
  Description of Artificial Sequence: Synthetic oligonucleotide
  Target: COL7A1; (+) strand; PAM type: NRG; PAM sequence: GGG
caagaactcaggtgtgtcct

SEQ ID NO: 17847 - DNA, 20 bp, Artificial Sequence
  Description of Artificial Sequence: Synthetic oligonucleotide
  Target: COL7A1; (+) strand; PAM type: NRG; PAM sequence: TGG
ctcaggtgtgtcctgggatc

SEQ ID NO: 17848 - DNA, 20 bp, Artificial Sequence
  Description of Artificial Sequence: Synthetic oligonucleotide
  Target: COL7A1; (+) strand; PAM type: NRG; PAM sequence: GGG
tcaggtgtgtcctgggatct

SEQ ID NO: 17849 - DNA, 20 bp, Artificial Sequence
  Description of Artificial Sequence: Synthetic oligonucleotide
  Target: COL7A1; (+) strand; PAM type: NRG; PAM sequence: GAG
aggtgtgtcctgggatctgg

SEQ ID NO: 17850 - DNA, 20 bp, Artificial Sequence
  Description of Artificial Sequence: Synthetic oligonucleotide
  Target: COL7A1; (+) strand; PAM type: NRG; PAM sequence: CAG
tgtcctgggatctgggagat

SEQ ID NO: 17851 - DNA, 20 bp, Artificial Sequence
  Description of Artificial Sequence: Synthetic oligonucleotide
  Target: COL7A1; (+) strand; PAM type: NRG; PAM sequence: CAG
tgggatctgggagatcagac

SEQ ID NO: 17852 - DNA, 20 bp, Artificial Sequence
  Description of Artificial Sequence: Synthetic oligonucleotide
  Target: COL7A1; (+) strand; PAM type: NRG; PAM sequence: GAG
ggatctgggagatcagacca

SEQ ID NO: 17853 - DNA, 20 bp, Artificial Sequence
  Description of Artificial Sequence: Synthetic oligonucleotide
  Target: COL7A1; (+) strand; PAM type: NRG; PAM sequence: CAG
gaccagagcacacgtgtgcc

SEQ ID NO: 17854 - DNA, 20 bp, Artificial Sequence
  Description of Artificial Sequence: Synthetic oligonucleotide
  Target: COL7A1; (+) strand; PAM type: NRG; PAM sequence: TGG
agcacacgtgtgcccagatg

SEQ ID NO: 17855 - DNA, 20 bp, Artificial Sequence
  Description of Artificial Sequence: Synthetic oligonucleotide
  Target: COL7A1; (+) strand; PAM type: NRG; PAM sequence: GAG
cacgtgtgcccagatgtggt

SEQ ID NO: 17856 - DNA, 20 bp, Artificial Sequence
  Description of Artificial Sequence: Synthetic oligonucleotide
  Target: COL7A1; (+) strand; PAM type: NRG; PAM sequence: CAG
tgcccagatgtggtgagaaa

SEQ ID NO: 17857 - DNA, 20 bp, Artificial Sequence
  Description of Artificial Sequence: Synthetic oligonucleotide
  Target: COL7A1; (+) strand; PAM type: NRG; PAM sequence: AAG
gatgtggtgagaaacagacc

SEQ ID NO: 17858 - DNA, 20 bp, Artificial Sequence
  Description of Artificial Sequence: Synthetic oligonucleotide
  Target: COL7A1; (+) strand; PAM type: NRG; PAM sequence: AGG
atgtggtgagaaacagacca

SEQ ID NO: 17859 - DNA, 20 bp, Artificial Sequence
  Description of Artificial Sequence: Synthetic oligonucleotide
  Target: COL7A1; (+) strand; PAM type: NRG; PAM sequence: TGG
ggtgagaaacagaccaagga

SEQ ID NO: 17860 - DNA, 20 bp, Artificial Sequence
  Description of Artificial Sequence: Synthetic oligonucleotide
  Target: COL7A1; (+) strand; PAM type: NRG; PAM sequence: GGG
gtgagaaacagaccaaggat

SEQ ID NO: 17861 - DNA, 20 bp, Artificial Sequence
  Description of Artificial Sequence: Synthetic oligonucleotide
  Target: COL7A1; (+) strand; PAM type: NRG; PAM sequence: CAG
acagaccaaggatgggcaca

SEQ ID NO: 17862 - DNA, 20 bp, Artificial Sequence
  Description of Artificial Sequence: Synthetic oligonucleotide
  Target: COL7A1; (+) strand; PAM type: NRG; PAM sequence: AAG
gaccaaggatgggcacacag

SEQ ID NO: 17863 - DNA, 20 bp, Artificial Sequence
  Description of Artificial Sequence: Synthetic oligonucleotide
  Target: COL7A1; (+) strand; PAM type: NRG; PAM sequence: AAG
aggatgggcacacagaagcc

SEQ ID NO: 17864 - DNA, 20 bp, Artificial Sequence
  Description of Artificial Sequence: Synthetic oligonucleotide
  Target: COL7A1; (+) strand; PAM type: NRG; PAM sequence: CAG
tgggcacacagaagccaaga

SEQ ID NO: 17865 - DNA, 20 bp, Artificial Sequence
  Description of Artificial Sequence: Synthetic oligonucleotide
  Target: COL7A1; (+) strand; PAM type: NRG; PAM sequence: AGG
gggcacacagaagccaagac

SEQ ID NO: 17866 - DNA, 20 bp, Artificial Sequence
  Description of Artificial Sequence: Synthetic oligonucleotide
  Target: COL7A1; (+) strand; PAM type: NRG; PAM sequence: GGG
ggcacacagaagccaagaca

SEQ ID NO: 17867 - DNA, 20 bp, Artificial Sequence
  Description of Artificial Sequence: Synthetic oligonucleotide
  Target: COL7A1; (+) strand; PAM type: NRG; PAM sequence: CAG
agaagccaagacagggcccc

SEQ ID NO: 17868 - DNA, 20 bp, Artificial Sequence
  Description of Artificial Sequence: Synthetic oligonucleotide
  Target: COL7A1; (+) strand; PAM type: NRG; PAM sequence: GAG
aagccaagacagggccccca

SEQ ID NO: 17869 - DNA, 20 bp, Artificial Sequence
  Description of Artificial Sequence: Synthetic oligonucleotide
  Target: COL7A1; (+) strand; PAM type: NRG; PAM sequence: CAG
aagacagggcccccagagct

SEQ ID NO: 17870 - DNA, 20 bp, Artificial Sequence
  Description of Artificial Sequence: Synthetic oligonucleotide
  Target: COL7A1; (+) strand; PAM type: NRG; PAM sequence: GAG
gacagggcccccagagctca

SEQ ID NO: 17871 - DNA, 20 bp, Artificial Sequence
  Description of Artificial Sequence: Synthetic oligonucleotide
  Target: COL7A1; (+) strand; PAM type: NRG; PAM sequence: TGG
ggcccccagagctcagagtg

SEQ ID NO: 17872 - DNA, 20 bp, Artificial Sequence
  Description of Artificial Sequence: Synthetic oligonucleotide
  Target: COL7A1; (+) strand; PAM type: NRG; PAM sequence: AAG
ccccagagctcagagtgtgg

SEQ ID NO: 17873 - DNA, 20 bp, Artificial Sequence
  Description of Artificial Sequence: Synthetic oligonucleotide
  Target: COL7A1; (+) strand; PAM type: NRG; PAM sequence: CAG
gctcagagtgtggaagccga

SEQ ID NO: 17874 - DNA, 20 bp, Artificial Sequence
  Description of Artificial Sequence: Synthetic oligonucleotide
  Target: COL7A1; (+) strand; PAM type: NRG; PAM sequence: TGG
gtgtggaagccgacagtgtg

SEQ ID NO: 17875 - DNA, 20 bp, Artificial Sequence
  Description of Artificial Sequence: Synthetic oligonucleotide
  Target: COL7A1; (+) strand; PAM type: NRG; PAM sequence: CAG
gtgtgtggctccctgtgatc

SEQ ID NO: 17876 - DNA, 20 bp, Artificial Sequence
  Description of Artificial Sequence: Synthetic oligonucleotide
  Target: COL7A1; (+) strand; PAM type: NRG; PAM sequence: GAG
gtgtggctccctgtgatcca

SEQ ID NO: 17877 - DNA, 20 bp, Artificial Sequence
  Description of Artificial Sequence: Synthetic oligonucleotide
  Target: COL7A1; (+) strand; PAM type: NRG; PAM sequence: GAG
gtggctccctgtgatccaga

SEQ ID NO: 17878 - DNA, 20 bp, Artificial Sequence
  Description of Artificial Sequence: Synthetic oligonucleotide
  Target: COL7A1; (+) strand; PAM type: NRG; PAM sequence: CAG
gctccctgtgatccagagag

SEQ ID NO: 17879 - DNA, 20 bp, Artificial Sequence
  Description of Artificial Sequence: Synthetic oligonucleotide
  Target: COL7A1; (+) strand; PAM type: NRG; PAM sequence: AGG
ctccctgtgatccagagagc

SEQ ID NO: 17880 - DNA, 20 bp, Artificial Sequence
  Description of Artificial Sequence: Synthetic oligonucleotide
  Target: COL7A1; (+) strand; PAM type: NRG; PAM sequence: TGG
tgatccagagagcaggctcc

SEQ ID NO: 17881 - DNA, 20 bp, Artificial Sequence
  Description of Artificial Sequence: Synthetic oligonucleotide
  Target: COL7A1; (+) strand; PAM type: NRG; PAM sequence: TGG
gagagcaggctcctggatgt

SEQ ID NO: 17882 - DNA, 20 bp, Artificial Sequence
  Description of Artificial Sequence: Synthetic oligonucleotide
  Target: COL7A1; (+) strand; PAM type: NRG; PAM sequence: GGG
agagcaggctcctggatgtt

SEQ ID NO: 17883 - DNA, 20 bp, Artificial Sequence
  Description of Artificial Sequence: Synthetic oligonucleotide
  Target: COL7A1; (+) strand; PAM type: NRG; PAM sequence: CAG
ctcctggatgttgggacatg

SEQ ID NO: 17884 - DNA, 20 bp, Artificial Sequence
  Description of Artificial Sequence: Synthetic oligonucleotide
  Target: COL7A1; (+) strand; PAM type: NRG; PAM sequence: CAG
ttgggacatgcagcccgact

SEQ ID NO: 17885 - DNA, 20 bp, Artificial Sequence
  Description of Artificial Sequence: Synthetic oligonucleotide
  Target: COL7A1; (+) strand; PAM type: NRG; PAM sequence: AGG
tgggacatgcagcccgactc

SEQ ID NO: 17886 - DNA, 20 bp, Artificial Sequence
  Description of Artificial Sequence: Synthetic oligonucleotide
  Target: COL7A1; (+) strand; PAM type: NRG; PAM sequence: GGG
gggacatgcagcccgactca

SEQ ID NO: 17887 - DNA, 20 bp, Artificial Sequence
  Description of Artificial Sequence: Synthetic oligonucleotide
  Target: COL7A1; (+) strand; PAM type: NRG; PAM sequence: GGG
ggacatgcagcccgactcag

SEQ ID NO: 17888 - DNA, 20 bp, Artificial Sequence
  Description of Artificial Sequence: Synthetic oligonucleotide
  Target: COL7A1; (+) strand; PAM type: NRG; PAM sequence: CAG
tgcagcccgactcaggggct

SEQ ID NO: 17889 - DNA, 20 bp, Artificial Sequence
  Description of Artificial Sequence: Synthetic oligonucleotide
  Target: COL7A1; (+) strand; PAM type: NRG; PAM sequence: CGG
aggggctcagacatgtgccc

SEQ ID NO: 17890 - DNA, 20 bp, Artificial Sequence
  Description of Artificial Sequence: Synthetic oligonucleotide
  Target: COL7A1; (+) strand; PAM type: NRG; PAM sequence: AAG
tcagacatgtgccccggccc

SEQ ID NO: 17891 - DNA, 20 bp, Artificial Sequence
  Description of Artificial Sequence: Synthetic oligonucleotide
  Target: COL7A1; (+) strand; PAM type: NRG; PAM sequence: GAG
agacatgtgccccggcccaa

SEQ ID NO: 17892 - DNA, 20 bp, Artificial Sequence
  Description of Artificial Sequence: Synthetic oligonucleotide
  Target: COL7A1; (+) strand; PAM type: NRG; PAM sequence: TGG
catgtgccccggcccaagag

SEQ ID NO: 17893 - DNA, 20 bp, Artificial Sequence
  Description of Artificial Sequence: Synthetic oligonucleotide
  Target: COL7A1; (+) strand; PAM type: NRG; PAM sequence: CAG
atgcccgccatcacactcct

SEQ ID NO: 17894 - DNA, 20 bp, Artificial Sequence
  Description of Artificial Sequence: Synthetic oligonucleotide
  Target: COL7A1; (+) strand; PAM type: NRG; PAM sequence: AGG
tgcccgccatcacactcctc

SEQ ID NO: 17895 - DNA, 20 bp, Artificial Sequence
  Description of Artificial Sequence: Synthetic oligonucleotide
  Target: COL7A1; (+) strand; PAM type: NRG; PAM sequence: CAG
cgccatcacactcctcaggc

SEQ ID NO: 17896 - DNA, 20 bp, Artificial Sequence
  Description of Artificial Sequence: Synthetic oligonucleotide
  Target: COL7A1; (+) strand; PAM type: NRG; PAM sequence: AGG
gccatcacactcctcaggcc

SEQ ID NO: 17897 - DNA, 20 bp, Artificial Sequence
  Description of Artificial Sequence: Synthetic oligonucleotide
  Target: COL7A1; (+) strand; PAM type: NRG; PAM sequence: TAG
aggccaggctcgcccttgcc

SEQ ID NO: 17898 - DNA, 20 bp, Artificial Sequence
  Description of Artificial Sequence: Synthetic oligonucleotide
  Target: COL7A1; (+) strand; PAM type: NRG; PAM sequence: AGG
ggccaggctcgcccttgcct

SEQ ID NO: 17899 - DNA, 20 bp, Artificial Sequence
  Description of Artificial Sequence: Synthetic oligonucleotide
  Target: COL7A1; (+) strand; PAM type: NRG; PAM sequence: CGG
gctcgcccttgcctaggccc

SEQ ID NO: 17900 - DNA, 20 bp, Artificial Sequence
  Description of Artificial Sequence: Synthetic oligonucleotide
  Target: COL7A1; (+) strand; PAM type: NRG; PAM sequence: CAG
ccccggactcacatcttccc

SEQ ID NO: 17901 - DNA, 20 bp, Artificial Sequence
  Description of Artificial Sequence: Synthetic oligonucleotide
  Target: COL7A1; (+) strand; PAM type: NRG; PAM sequence: AGG
cccggactcacatcttcccc

SEQ ID NO: 17902 - DNA, 20 bp, Artificial Sequence
  Description of Artificial Sequence: Synthetic oligonucleotide
  Target: COL7A1; (+) strand; PAM type: NRG; PAM sequence: GGG
ccggactcacatcttcccca

SEQ ID NO: 17903 - DNA, 20 bp, Artificial Sequence
  Description of Artificial Sequence: Synthetic oligonucleotide
  Target: COL7A1; (+) strand; PAM type: NRG; PAM sequence: CGG
cacatcttccccagggtctc

SEQ ID NO: 17904 - DNA, 20 bp, Artificial Sequence
  Description of Artificial Sequence: Synthetic oligonucleotide
  Target: COL7A1; (+) strand; PAM type: NRG; PAM sequence: GGG
acatcttccccagggtctcc

SEQ ID NO: 17905 - DNA, 20 bp, Artificial Sequence
  Description of Artificial Sequence: Synthetic oligonucleotide
  Target: COL7A1; (+) strand; PAM type: NRG; PAM sequence: CGG
ggtctccgggctcccctgca

SEQ ID NO: 17906 - DNA, 20 bp, Artificial Sequence
  Description of Artificial Sequence: Synthetic oligonucleotide
  Target: COL7A1; (+) strand; PAM type: NRG; PAM sequence: CAG
tccgggctcccctgcacggc

SEQ ID NO: 17907 - DNA, 20 bp, Artificial Sequence
  Description of Artificial Sequence: Synthetic oligonucleotide
  Target: COL7A1; (+) strand; PAM type: NRG; PAM sequence: CAG
acggccagcttcaccctgca

SEQ ID NO: 17908 - DNA, 20 bp, Artificial Sequence
  Description of Artificial Sequence: Synthetic oligonucleotide
  Target: COL7A1; (+) strand; PAM type: NRG; PAM sequence: TGG
cagcttcaccctgcacagaa

SEQ ID NO: 17909 - DNA, 20 bp, Artificial Sequence
  Description of Artificial Sequence: Synthetic oligonucleotide
  Target: COL7A1; (+) strand; PAM type: NRG; PAM sequence: CAG
cttcaccctgcacagaatgg

SEQ ID NO: 17910 - DNA, 20 bp, Artificial Sequence
  Description of Artificial Sequence: Synthetic oligonucleotide
  Target: COL7A1; (+) strand; PAM type: NRG; PAM sequence: AGG
ttcaccctgcacagaatggc

SEQ ID NO: 17911 - DNA, 20 bp, Artificial Sequence
  Description of Artificial Sequence: Synthetic oligonucleotide
  Target: COL7A1; (+) strand; PAM type: NRG; PAM sequence: GAG
ccctgcacagaatggcaggt

SEQ ID NO: 17912 - DNA, 20 bp, Artificial Sequence
  Description of Artificial Sequence: Synthetic oligonucleotide
  Target: COL7A1; (+) strand; PAM type: NRG; PAM sequence: AGG
cctgcacagaatggcaggtg

SEQ ID NO: 17913 - DNA, 20 bp, Artificial Sequence
  Description of Artificial Sequence: Synthetic oligonucleotide
  Target: COL7A1; (+) strand; PAM type: NRG; PAM sequence: GGG
ctgcacagaatggcaggtga

SEQ ID NO: 17914 - DNA, 20 bp, Artificial Sequence
  Description of Artificial Sequence: Synthetic oligonucleotide
  Target: COL7A1; (+) strand; PAM type: NRG; PAM sequence: GGG
tgcacagaatggcaggtgag

SEQ ID NO: 17915 - DNA, 20 bp, Artificial Sequence
  Description of Artificial Sequence: Synthetic oligonucleotide
  Target: COL7A1; (+) strand; PAM type: NRG; PAM sequence: TGG
aatggcaggtgaggggtgtc

SEQ ID NO: 17916 - DNA, 20 bp, Artificial Sequence
  Description of Artificial Sequence: Synthetic oligonucleotide
  Target: COL7A1; (+) strand; PAM type: NRG; PAM sequence: GAG
aggtgaggggtgtctggact

SEQ ID NO: 17917 - DNA, 20 bp, Artificial Sequence
  Description of Artificial Sequence: Synthetic oligonucleotide
  Target: COL7A1; (+) strand; PAM type: NRG; PAM sequence: CAG
tggactgagccttctctgct

SEQ ID NO: 17918 - DNA, 20 bp, Artificial Sequence
  Description of Artificial Sequence: Synthetic oligonucleotide
  Target: COL7A1; (+) strand; PAM type: NRG; PAM sequence: TAG
actgagccttctctgctcag

SEQ ID NO: 17919 - DNA, 20 bp, Artificial Sequence
  Description of Artificial Sequence: Synthetic oligonucleotide
  Target: COL7A1; (+) strand; PAM type: NRG; PAM sequence: CAG
agccttctctgctcagtagt

SEQ ID NO: 17920 - DNA, 20 bp, Artificial Sequence
  Description of Artificial Sequence: Synthetic oligonucleotide
  Target: COL7A1; (+) strand; PAM type: NRG; PAM sequence: AGG
gccttctctgctcagtagtc

SEQ ID NO: 17921 - DNA, 20 bp, Artificial Sequence
  Description of Artificial Sequence: Synthetic oligonucleotide
  Target: COL7A1; (+) strand; PAM type: NRG; PAM sequence: CAG
tctgctcagtagtcaggccc

SEQ ID NO: 17922 - DNA, 20 bp, Artificial Sequence
  Description of Artificial Sequence: Synthetic oligonucleotide
  Target: COL7A1; (+) strand; PAM type: NRG; PAM sequence: AGG
ctgctcagtagtcaggcccc

SEQ ID NO: 17923 - DNA, 20 bp, Artificial Sequence
  Description of Artificial Sequence: Synthetic oligonucleotide
  Target: COL7A1; (+) strand; PAM type: NRG; PAM sequence: GGG
tgctcagtagtcaggcccca

SEQ ID NO: 17924 - DNA, 20 bp, Artificial Sequence
  Description of Artificial Sequence: Synthetic oligonucleotide
  Target: COL7A1; (+) strand; PAM type: NRG; PAM sequence: CGG
cacctcaccttctcgcctcg

SEQ ID NO: 17925 - DNA, 20 bp, Artificial Sequence
  Description of Artificial Sequence: Synthetic oligonucleotide
  Target: COL7A1; (+) strand; PAM type: NRG; PAM sequence: TGG
accttctcgcctcgcggccc

SEQ ID NO: 17926 - DNA, 20 bp, Artificial Sequence
  Description of Artificial Sequence: Synthetic oligonucleotide
  Target: COL7A1; (+) strand; PAM type: NRG; PAM sequence: CAG
ttctcgcctcgcggccctgg

SEQ ID NO: 17927 - DNA, 20 bp, Artificial Sequence
  Description of Artificial Sequence: Synthetic oligonucleotide
  Target: COL7A1; (+) strand; PAM type: NRG; PAM sequence: CGG
ctcgcggccctggcagtcct

SEQ ID NO: 17928 - DNA, 20 bp, Artificial Sequence
  Description of Artificial Sequence: Synthetic oligonucleotide
  Target: COL7A1; (+) strand; PAM type: NRG; PAM sequence: TGG
tggcagtcctcggtcacctt

SEQ ID NO: 17929 - DNA, 20 bp, Artificial Sequence
  Description of Artificial Sequence: Synthetic oligonucleotide
  Target: COL7A1; (+) strand; PAM type: NRG; PAM sequence: CAG
cacctttggctccctgttga

SEQ ID NO: 17930 - DNA, 20 bp, Artificial Sequence
  Description of Artificial Sequence: Synthetic oligonucleotide
  Target: COL7A1; (+) strand; PAM type: NRG; PAM sequence: GAG
cctttggctccctgttgaca

SEQ ID NO: 17931 - DNA, 20 bp, Artificial Sequence
  Description of Artificial Sequence: Synthetic oligonucleotide
  Target: COL7A1; (+) strand; PAM type: NRG; PAM sequence: AGG
ctttggctccctgttgacag

SEQ ID NO: 17932 - DNA, 20 bp, Artificial Sequence
  Description of Artificial Sequence: Synthetic oligonucleotide
  Target: COL7A1; (+) strand; PAM type: NRG; PAM sequence: CAG
ggctccctgttgacagaggt

SEQ ID NO: 17933 - DNA, 20 bp, Artificial Sequence
  Description of Artificial Sequence: Synthetic oligonucleotide
  Target: COL7A1; (+) strand; PAM type: NRG; PAM sequence: AGG
gctccctgttgacagaggtc

SEQ ID NO: 17934 - DNA, 20 bp, Artificial Sequence
  Description of Artificial Sequence: Synthetic oligonucleotide
  Target: COL7A1; (+) strand; PAM type: NRG; PAM sequence: GAG
tccctgttgacagaggtcag

SEQ ID NO: 17935 - DNA, 20 bp, Artificial Sequence
  Description of Artificial Sequence: Synthetic oligonucleotide
  Target: COL7A1; (+) strand; PAM type: NRG; PAM sequence: AGG
ccctgttgacagaggtcagg

SEQ ID NO: 17936 - DNA, 20 bp, Artificial Sequence
  Description of Artificial Sequence: Synthetic oligonucleotide
  Target: COL7A1; (+) strand; PAM type: NRG; PAM sequence: CAG
acagaggtcaggaggcaaca

SEQ ID NO: 17937 - DNA, 20 bp, Artificial Sequence
  Description of Artificial Sequence: Synthetic oligonucleotide
  Target: COL7A1; (+) strand; PAM type: NRG; PAM sequence: AGG
cagaggtcaggaggcaacac

SEQ ID NO: 17938 - DNA, 20 bp, Artificial Sequence
  Description of Artificial Sequence: Synthetic oligonucleotide
  Target: COL7A1; (+) strand; PAM type: NRG; PAM sequence: CAG
tcaggaggcaacacaggcat

SEQ ID NO: 17939 - DNA, 20 bp, Artificial Sequence
  Description of Artificial Sequence: Synthetic oligonucleotide
  Target: COL7A1; (+) strand; PAM type: NRG; PAM sequence: CAG
ggcaacacaggcatcagtca

SEQ ID NO: 17940 - DNA, 20 bp, Artificial Sequence
  Description of Artificial Sequence: Synthetic oligonucleotide
  Target: COL7A1; (+) strand; PAM type: NRG; PAM sequence: AAG
acacaggcatcagtcacaga

SEQ ID NO: 17941 - DNA, 20 bp, Artificial Sequence
  Description of Artificial Sequence: Synthetic oligonucleotide
  Target: COL7A1; (+) strand; PAM type: NRG; PAM sequence: GAG
ggcatcagtcacagaaagat

SEQ ID NO: 17942 - DNA, 20 bp, Artificial Sequence
  Description of Artificial Sequence: Synthetic oligonucleotide
  Target: COL7A1; (+) strand; PAM type: NRG; PAM sequence: CGG
gtcacagaaagatgagactc

SEQ ID NO: 17943 - DNA, 20 bp, Artificial Sequence
  Description of Artificial Sequence: Synthetic oligonucleotide
  Target: COL7A1; (+) strand; PAM type: NRG; PAM sequence: GAG
cacagaaagatgagactccg

SEQ ID NO: 17944 - DNA, 20 bp, Artificial Sequence
  Description of Artificial Sequence: Synthetic oligonucleotide
  Target: COL7A1; (+) strand; PAM type: NRG; PAM sequence: AGG
acagaaagatgagactccgg

SEQ ID NO: 17945 - DNA, 20 bp, Artificial Sequence
  Description of Artificial Sequence: Synthetic oligonucleotide
  Target: COL7A1; (+) strand; PAM type: NRG; PAM sequence: GGG
cagaaagatgagactccgga

SEQ ID NO: 17946 - DNA, 20 bp, Artificial Sequence
  Description of Artificial Sequence: Synthetic oligonucleotide
  Target: COL7A1; (+) strand; PAM type: NRG; PAM sequence: GAG
gaaagatgagactccggagg

SEQ ID NO: 17947 - DNA, 20 bp, Artificial Sequence
  Description of Artificial Sequence: Synthetic oligonucleotide
  Target: COL7A1; (+) strand; PAM type: NRG; PAM sequence: AGG
aaagatgagactccggaggg

SEQ ID NO: 17948 - DNA, 20 bp, Artificial Sequence
  Description of Artificial Sequence: Synthetic oligonucleotide
  Target: COL7A1; (+) strand; PAM type: NRG; PAM sequence: TGG
tgagactccggagggaggca

SEQ ID NO: 17949 - DNA, 20 bp, Artificial Sequence
  Description of Artificial Sequence: Synthetic oligonucleotide
  Target: COL7A1; (+) strand; PAM type: NRG; PAM sequence: GGG
gagactccggagggaggcat

SEQ ID NO: 17950 - DNA, 20 bp, Artificial Sequence
  Description of Artificial Sequence: Synthetic oligonucleotide
  Target: COL7A1; (+) strand; PAM type: NRG; PAM sequence: GGG
agactccggagggaggcatg

SEQ ID NO: 17951 - DNA, 20 bp, Artificial Sequence
  Description of Artificial Sequence: Synthetic oligonucleotide
  Target: COL7A1; (+) strand; PAM type: NRG; PAM sequence: CAG
tccggagggaggcatggggc

SEQ ID NO: 17952 - DNA, 20 bp, Artificial Sequence
  Description of Artificial Sequence: Synthetic oligonucleotide
  Target: COL7A1; (+) strand; PAM type: NRG; PAM sequence: GAG
cggagggaggcatggggcca

SEQ ID NO: 17953 - DNA, 20 bp, Artificial Sequence
  Description of Artificial Sequence: Synthetic oligonucleotide
  Target: COL7A1; (+) strand; PAM type: NRG; PAM sequence: CGG
ggggccagagcttaaatatg

SEQ ID NO: 17954 - DNA, 20 bp, Artificial Sequence
  Description of Artificial Sequence: Synthetic oligonucleotide
  Target: COL7A1; (+) strand; PAM type: NRG; PAM sequence: AAG
aaatatgcggtctactatga

SEQ ID NO: 17955 - DNA, 20 bp, Artificial Sequence
  Description of Artificial Sequence: Synthetic oligonucleotide
  Target: COL7A1; (+) strand; PAM type: NRG; PAM sequence: GAG
tgcggtctactatgaaagct

SEQ ID NO: 17956 - DNA, 20 bp, Artificial Sequence
  Description of Artificial Sequence: Synthetic oligonucleotide
  Target: COL7A1; (+) strand; PAM type: NRG; PAM sequence: AGG
gcggtctactatgaaagctg

SEQ ID NO: 17957 - DNA, 20 bp, Artificial Sequence
  Description of Artificial Sequence: Synthetic oligonucleotide
  Target: COL7A1; (+) strand; PAM type: NRG; PAM sequence: GGG
cggtctactatgaaagctga

SEQ ID NO: 17958 - DNA, 20 bp, Artificial Sequence
  Description of Artificial Sequence: Synthetic oligonucleotide
  Target: COL7A1; (+) strand; PAM type: NRG; PAM sequence: GAG
ctatgaaagctgagggtcat

SEQ ID NO: 17959 - DNA, 20 bp, Artificial Sequence
  Description of Artificial Sequence: Synthetic oligonucleotide
  Target: COL7A1; (+) strand; PAM type: NRG; PAM sequence: AGG
tatgaaagctgagggtcatg

SEQ ID NO: 17960 - DNA, 20 bp, Artificial Sequence
  Description of Artificial Sequence: Synthetic oligonucleotide
  Target: COL7A1; (+) strand; PAM type: NRG; PAM sequence: GGG
atgaaagctgagggtcatga

SEQ ID NO: 17961 - DNA, 20 bp, Artificial Sequence
  Description of Artificial Sequence: Synthetic oligonucleotide
  Target: COL7A1; (+) strand; PAM type: NRG; PAM sequence: TGG
aaagctgagggtcatgaggg

SEQ ID NO: 17962 - DNA, 20 bp, Artificial Sequence
  Description of Artificial Sequence: Synthetic oligonucleotide
  Target: COL7A1; (+) strand; PAM type: NRG; PAM sequence: GGG
aagctgagggtcatgagggt

SEQ ID NO: 17963 - DNA, 20 bp, Artificial Sequence
  Description of Artificial Sequence: Synthetic oligonucleotide
  Target: COL7A1; (+) strand; PAM type: NRG; PAM sequence: TGG
tcatgagggtgggtaaacta

SEQ ID NO: 17964 - DNA, 20 bp, Artificial Sequence
  Description of Artificial Sequence: Synthetic oligonucleotide
  Target: COL7A1; (+) strand; PAM type: NRG; PAM sequence: GGG
catgagggtgggtaaactat

SEQ ID NO: 17965 - DNA, 20 bp, Artificial Sequence
  Description of Artificial Sequence: Synthetic oligonucleotide
  Target: COL7A1; (+) strand; PAM type: NRG; PAM sequence: AAG
ggtgggtaaactatgggtcg

SEQ ID NO: 17966 - DNA, 20 bp, Artificial Sequence
  Description of Artificial Sequence: Synthetic oligonucleotide
  Target: COL7A1; (+) strand; PAM type: NRG; PAM sequence: AGG
gtgggtaaactatgggtcga

SEQ ID NO: 17967 - DNA, 20 bp, Artificial Sequence
  Description of Artificial Sequence: Synthetic oligonucleotide
  Target: COL7A1; (+) strand; PAM type: NRG; PAM sequence: CAG
gtaaactatgggtcgaaggt

SEQ ID NO: 17968 - DNA, 20 bp, Artificial Sequence
  Description of Artificial Sequence: Synthetic oligonucleotide
  Target: COL7A1; (+) strand; PAM type: NRG; PAM sequence: AAG
aactatgggtcgaaggtcag

SEQ ID NO: 17969 - DNA, 20 bp, Artificial Sequence
  Description of Artificial Sequence: Synthetic oligonucleotide
  Target: COL7A1; (+) strand; PAM type: NRG; PAM sequence: TAG
atgggtcgaaggtcagaagt

SEQ ID NO: 17970 - DNA, 20 bp, Artificial Sequence
  Description of Artificial Sequence: Synthetic oligonucleotide
  Target: COL7A1; (+) strand; PAM type: NRG; PAM sequence: AGG
tgggtcgaaggtcagaagtt

SEQ ID NO: 17971 - DNA, 20 bp, Artificial Sequence
  Description of Artificial Sequence: Synthetic oligonucleotide
  Target: COL7A1; (+) strand; PAM type: NRG; PAM sequence: TGG
aaggtcagaagttaggccac

SEQ ID NO: 17972 - DNA, 20 bp, Artificial Sequence
  Description of Artificial Sequence: Synthetic oligonucleotide
  Target: COL7A1; (+) strand; PAM type: NRG; PAM sequence: GAG
ggtcagaagttaggccactg

SEQ ID NO: 17973 - DNA, 20 bp, Artificial Sequence
  Description of Artificial Sequence: Synthetic oligonucleotide
  Target: COL7A1; (+) strand; PAM type: NRG; PAM sequence: GAG
tcagaagttaggccactgga

SEQ ID NO: 17974 - DNA, 20 bp, Artificial Sequence
  Description of Artificial Sequence: Synthetic oligonucleotide
  Target: COL7A1; (+) strand; PAM type: NRG; PAM sequence: CAG
aagttaggccactggagaga

SEQ ID NO: 17975 - DNA, 20 bp, Artificial Sequence
  Description of Artificial Sequence: Synthetic oligonucleotide
  Target: COL7A1; (+) strand; PAM type: NRG; PAM sequence: AGG
agttaggccactggagagac

SEQ ID NO: 17976 - DNA, 20 bp, Artificial Sequence
  Description of Artificial Sequence: Synthetic oligonucleotide
  Target: COL7A1; (+) strand; PAM type: NRG; PAM sequence: CAG
cactggagagacaggacccc

SEQ ID NO: 17977 - DNA, 20 bp, Artificial Sequence
  Description of Artificial Sequence: Synthetic oligonucleotide
  Target: COL7A1; (+) strand; PAM type: NRG; PAM sequence: CAG
acccccagaacatctgctgt

SEQ ID NO: 17978 - DNA, 20 bp, Artificial Sequence
  Description of Artificial Sequence: Synthetic oligonucleotide
  Target: COL7A1; (+) strand; PAM type: NRG; PAM sequence: AAG
cccagaacatctgctgtcag

SEQ ID NO: 17979 - DNA, 20 bp, Artificial Sequence
  Description of Artificial Sequence: Synthetic oligonucleotide
  Target: COL7A1; (+) strand; PAM type: NRG; PAM sequence: CGG
gtcagaagttccctacttac

SEQ ID NO: 17980 - DNA, 20 bp, Artificial Sequence
  Description of Artificial Sequence: Synthetic oligonucleotide
  Target: COL7A1; (+) strand; PAM type: NRG; PAM sequence: CAG
ctacttaccggctcacccac

SEQ ID NO: 17981 - DNA, 20 bp, Artificial Sequence
  Description of Artificial Sequence: Synthetic oligonucleotide
  Target: COL7A1; (+) strand; PAM type: NRG; PAM sequence: AGG
tacttaccggctcacccacc

SEQ ID NO: 17982 - DNA, 20 bp, Artificial Sequence
  Description of Artificial Sequence: Synthetic oligonucleotide
  Target: COL7A1; (+) strand; PAM type: NRG; PAM sequence: CAG
cggctcacccaccaggtctc

SEQ ID NO: 17983 - DNA, 20 bp, Artificial Sequence
  Description of Artificial Sequence: Synthetic oligonucleotide
  Target: COL7A1; (+) strand; PAM type: NRG; PAM sequence: AAG
tcacccaccaggtctccagc

SEQ ID NO: 17984 - DNA, 20 bp, Artificial Sequence
  Description of Artificial Sequence: Synthetic oligonucleotide
  Target: COL7A1; (+) strand; PAM type: NRG; PAM sequence: AGG
cacccaccaggtctccagca

SEQ ID NO: 17985 - DNA, 20 bp, Artificial Sequence
  Description of Artificial Sequence: Synthetic oligonucleotide
  Target: COL7A1; (+) strand; PAM type: NRG; PAM sequence: CAG
caggtctccagcaaggcctc

SEQ ID NO: 17986 - DNA, 20 bp, Artificial Sequence
  Description of Artificial Sequence: Synthetic oligonucleotide
  Target: COL7A1; (+) strand; PAM type: NRG; PAM sequence: AGG
aggtctccagcaaggcctcc

SEQ ID NO: 17987 - DNA, 20 bp, Artificial Sequence
  Description of Artificial Sequence: Synthetic oligonucleotide
  Target: COL7A1; (+) strand; PAM type: NRG; PAM sequence: GGG
ggtctccagcaaggcctcca

SEQ ID NO: 17988 - DNA, 20 bp, Artificial Sequence
  Description of Artificial Sequence: Synthetic oligonucleotide
  Target: COL7A1; (+) strand; PAM type: NRG; PAM sequence: GGG
gtctccagcaaggcctccag

SEQ ID NO: 17989 - DNA, 20 bp, Artificial Sequence
  Description of Artificial Sequence: Synthetic oligonucleotide
  Target: COL7A1; (+) strand; PAM type: NRG; PAM sequence: TGG
caaggcctccaggggctccc

SEQ ID NO: 17990 - DNA, 20 bp, Artificial Sequence
  Description of Artificial Sequence: Synthetic oligonucleotide
  Target: COL7A1; (+) strand; PAM type: NRG; PAM sequence: AAG
gcctccaggggctccctggt

SEQ ID NO: 17991 - DNA, 20 bp, Artificial Sequence
  Description of Artificial Sequence: Synthetic oligonucleotide
  Target: COL7A1; (+) strand; PAM type: NRG; PAM sequence: AGG
cctccaggggctccctggta

SEQ ID NO: 17992 - DNA, 20 bp, Artificial Sequence
  Description of Artificial Sequence: Synthetic oligonucleotide
  Target: COL7A1; (+) strand; PAM type: NRG; PAM sequence: GGG
ctccaggggctccctggtaa

SEQ ID NO: 17993 - DNA, 20 bp, Artificial Sequence
  Description of Artificial Sequence: Synthetic oligonucleotide
  Target: COL7A1; (+) strand; PAM type: NRG; PAM sequence: GGG
tccaggggctccctggtaag

SEQ ID NO: 17994 - DNA, 20 bp, Artificial Sequence
  Description of Artificial Sequence: Synthetic oligonucleotide
  Target: COL7A1; (+) strand; PAM type: NRG; PAM sequence: GGG
ccaggggctccctggtaagg

SEQ ID NO: 17995 - DNA, 20 bp, Artificial Sequence
  Description of Artificial Sequence: Synthetic oligonucleotide
  Target: COL7A1; (+) strand; PAM type: NRG; PAM sequence: GAG
aggggctccctggtaagggg

SEQ ID NO: 17996 - DNA, 20 bp, Artificial Sequence
  Description of Artificial Sequence: Synthetic oligonucleotide
  Target: COL7A1; (+) strand; PAM type: NRG; PAM sequence: GAG
gggctccctggtaaggggga

SEQ ID NO: 17997 - DNA, 20 bp, Artificial Sequence
  Description of Artificial Sequence: Synthetic oligonucleotide
  Target: COL7A1; (+) strand; PAM type: NRG; PAM sequence: AGG
ggctccctggtaagggggag

SEQ ID NO: 17998 - DNA, 20 bp, Artificial Sequence
  Description of Artificial Sequence: Synthetic oligonucleotide
  Target: COL7A1; (+) strand; PAM type: NRG; PAM sequence: CAG
ccctggtaagggggagaggt

SEQ ID NO: 17999 - DNA, 20 bp, Artificial Sequence
  Description of Artificial Sequence: Synthetic oligonucleotide
  Target: COL7A1; (+) strand; PAM type: NRG; PAM sequence: TGG
tggtaagggggagaggtcag

SEQ ID NO: 18000 - DNA, 20 bp, Artificial Sequence
  Description of Artificial Sequence: Synthetic oligonucleotide
  Target: COL7A1; (+) strand; PAM type: NRG; PAM sequence: GGG
ggtaagggggagaggtcagt

SEQ ID NO: 18001 - DNA, 20 bp, Artificial Sequence
  Description of Artificial Sequence: Synthetic oligonucleotide
  Target: COL7A1; (+) strand; PAM type: NRG; PAM sequence: TGG
gagaggtcagtgggattcct

SEQ ID NO: 18002 - DNA, 20 bp, Artificial Sequence
  Description of Artificial Sequence: Synthetic oligonucleotide
  Target: COL7A1; (+) strand; PAM type: NRG; PAM sequence: CAG
tgggattccttggcccccac

SEQ ID NO: 18003 - DNA, 20 bp, Artificial Sequence
  Description of Artificial Sequence: Synthetic oligonucleotide
  Target: COL7A1; (+) strand; PAM type: NRG; PAM sequence: TGG
accagttgaccccccctcac

SEQ ID NO: 18004 - DNA, 20 bp, Artificial Sequence
  Description of Artificial Sequence: Synthetic oligonucleotide
  Target: COL7A1; (+) strand; PAM type: NRG; PAM sequence: CAG
agttgaccccccctcactgg

SEQ ID NO: 18005 - DNA, 20 bp, Artificial Sequence
  Description of Artificial Sequence: Synthetic oligonucleotide
  Target: COL7A1; (+) strand; PAM type: NRG; PAM sequence: CAG
caccttctctccctttgctc

SEQ ID NO: 18006 - DNA, 20 bp, Artificial Sequence
  Description of Artificial Sequence: Synthetic oligonucleotide
  Target: COL7A1; (+) strand; PAM type: NRG; PAM sequence: AGG
accttctctccctttgctcc

SEQ ID NO: 18007 - DNA, 20 bp, Artificial Sequence
  Description of Artificial Sequence: Synthetic oligonucleotide
  Target: COL7A1; (+) strand; PAM type: NRG; PAM sequence: GGG
ccttctctccctttgctcca

SEQ ID NO: 18008 - DNA, 20 bp, Artificial Sequence
  Description of Artificial Sequence: Synthetic oligonucleotide
  Target: COL7A1; (+) strand; PAM type: NRG; PAM sequence: GAG
ttctctccctttgctccagg

SEQ ID NO: 18009 - DNA, 20 bp, Artificial Sequence
  Description of Artificial Sequence: Synthetic oligonucleotide
  Target: COL7A1; (+) strand; PAM type: NRG; PAM sequence: CAG
tgctccagggagcccgacca

SEQ ID NO: 18010 - DNA, 20 bp, Artificial Sequence
  Description of Artificial Sequence: Synthetic oligonucleotide
  Target: COL7A1; (+) strand; PAM type: NRG; PAM sequence: TGG
gggagcccgaccacagcctg

SEQ ID NO: 18011 - DNA, 20 bp, Artificial Sequence
  Description of Artificial Sequence: Synthetic oligonucleotide
  Target: COL7A1; (+) strand; PAM type: NRG; PAM sequence: GGG
ggagcccgaccacagcctgt

SEQ ID NO: 18012 - DNA, 20 bp, Artificial Sequence
  Description of Artificial Sequence: Synthetic oligonucleotide
  Target: COL7A1; (+) strand; PAM type: NRG; PAM sequence: GGG
gagcccgaccacagcctgtg

SEQ ID NO: 18013 - DNA, 20 bp, Artificial Sequence
  Description of Artificial Sequence: Synthetic oligonucleotide
  Target: COL7A1; (+) strand; PAM type: NRG; PAM sequence: TAG
ccacagcctgtggggaatgc

SEQ ID NO: 18014 - DNA, 20 bp, Artificial Sequence
  Description of Artificial Sequence: Synthetic oligonucleotide
  Target: COL7A1; (+) strand; PAM type: NRG; PAM sequence: GAG
agcctgtggggaatgctagt

SEQ ID NO: 18015 - DNA, 20 bp, Artificial Sequence
  Description of Artificial Sequence: Synthetic oligonucleotide
  Target: COL7A1; (+) strand; PAM type: NRG; PAM sequence: TGG
cccccaccctgccaccccca

SEQ ID NO: 18016 - DNA, 20 bp, Artificial Sequence
  Description of Artificial Sequence: Synthetic oligonucleotide
  Target: COL7A1; (+) strand; PAM type: NRG; PAM sequence: TGG
cctgccacccccatggcatt

SEQ ID NO: 18017 - DNA, 20 bp, Artificial Sequence
  Description of Artificial Sequence: Synthetic oligonucleotide
  Target: COL7A1; (+) strand; PAM type: NRG; PAM sequence: CAG
acccccatggcatttggaaa

SEQ ID NO: 18018 - DNA, 20 bp, Artificial Sequence
  Description of Artificial Sequence: Synthetic oligonucleotide
  Target: COL7A1; (+) strand; PAM type: NRG; PAM sequence: AGG
cccccatggcatttggaaac

SEQ ID NO: 18019 - DNA, 20 bp, Artificial Sequence
  Description of Artificial Sequence: Synthetic oligonucleotide
  Target: COL7A1; (+) strand; PAM type: NRG; PAM sequence: TGG
ggcatttggaaacaggcttg

SEQ ID NO: 18020 - DNA, 20 bp, Artificial Sequence
  Description of Artificial Sequence: Synthetic oligonucleotide
  Target: COL7A1; (+) strand; PAM type: NRG; PAM sequence: GGG
gcatttggaaacaggcttgt

SEQ ID NO: 18021 - DNA, 20 bp, Artificial Sequence
  Description of Artificial Sequence: Synthetic oligonucleotide
  Target: COL7A1; (+) strand; PAM type: NRG; PAM sequence: GAG
ttggaaacaggcttgtgggt

SEQ ID NO: 18022 - DNA, 20 bp, Artificial Sequence
  Description of Artificial Sequence: Synthetic oligonucleotide
  Target: COL7A1; (+) strand; PAM type: NRG; PAM sequence: AGG
tggaaacaggcttgtgggtg

SEQ ID NO: 18023 - DNA, 20 bp, Artificial Sequence
  Description of Artificial Sequence: Synthetic oligonucleotide
  Target: COL7A1; (+) strand; PAM type: NRG; PAM sequence: CAG
aaacaggcttgtgggtgagg

SEQ ID NO: 18024 - DNA, 20 bp, Artificial Sequence
  Description of Artificial Sequence: Synthetic oligonucleotide
  Target: COL7A1; (+) strand; PAM type: NRG; PAM sequence: GAG
acaggcttgtgggtgaggca

SEQ ID NO: 18025 - DNA, 20 bp, Artificial Sequence
  Description of Artificial Sequence: Synthetic oligonucleotide
  Target: COL7A1; (+) strand; PAM type: NRG; PAM sequence: AGG
caggcttgtgggtgaggcag

SEQ ID NO: 18026 - DNA, 20 bp, Artificial Sequence
  Description of Artificial Sequence: Synthetic oligonucleotide
  Target: COL7A1; (+) strand; PAM type: NRG; PAM sequence: GAG
ggcttgtgggtgaggcagag

SEQ ID NO: 18027 - DNA, 20 bp, Artificial Sequence
  Description of Artificial Sequence: Synthetic oligonucleotide
  Target: COL7A1; (+) strand; PAM type: NRG; PAM sequence: CAG
gtgaggcagaggagttgctg

SEQ ID NO: 18028 - DNA, 20 bp, Artificial Sequence
  Description of Artificial Sequence: Synthetic oligonucleotide
  Target: COL7A1; (+) strand; PAM type: NRG; PAM sequence: AGG
tgaggcagaggagttgctgc

SEQ ID NO: 18029 - DNA, 20 bp, Artificial Sequence
  Description of Artificial Sequence: Synthetic oligonucleotide
  Target: COL7A1; (+) strand; PAM type: NRG; PAM sequence: GGG
gaggcagaggagttgctgca

SEQ ID NO: 18030 - DNA, 20 bp, Artificial Sequence
  Description of Artificial Sequence: Synthetic oligonucleotide
  Target: COL7A1; (+) strand; PAM type: NRG; PAM sequence: GGG
aggcagaggagttgctgcag

SEQ ID NO: 18031 - DNA, 20 bp, Artificial Sequence
  Description of Artificial Sequence: Synthetic oligonucleotide
  Target: COL7A1; (+) strand; PAM type: NRG; PAM sequence: GGG
ggcagaggagttgctgcagg

SEQ ID NO: 18032 - DNA, 20 bp, Artificial Sequence
  Description of Artificial Sequence: Synthetic oligonucleotide
  Target: COL7A1; (+) strand; PAM type: NRG; PAM sequence: TGG
agaggagttgctgcaggggg

SEQ ID NO: 18033 - DNA, 20 bp, Artificial Sequence
  Description of Artificial Sequence: Synthetic oligonucleotide
  Target: COL7A1; (+) strand; PAM type: NRG; PAM sequence: AAG
ggagttgctgcagggggtgg

SEQ ID NO: 18034 - DNA, 20 bp, Artificial Sequence
  Description of Artificial Sequence: Synthetic oligonucleotide
  Target: COL7A1; (+) strand; PAM type: NRG; PAM sequence: CAG
ttgctgcagggggtggaagt

SEQ ID NO: 18035 - DNA, 20 bp, Artificial Sequence
  Description of Artificial Sequence: Synthetic oligonucleotide
  Target: COL7A1; (+) strand; PAM type: NRG; PAM sequence: AGG
tgctgcagggggtggaagtc

SEQ ID NO: 18036 - DNA, 20 bp, Artificial Sequence
  Description of Artificial Sequence: Synthetic oligonucleotide
  Target: COL7A1; (+) strand; PAM type: NRG; PAM sequence: GGG
gctgcagggggtggaagtca

SEQ ID NO: 18037 - DNA, 20 bp, Artificial Sequence
  Description of Artificial Sequence: Synthetic oligonucleotide
  Target: COL7A1; (+) strand; PAM type: NRG; PAM sequence: AAG
gggggtggaagtcagggtca

SEQ ID NO: 18038 - DNA, 20 bp, Artificial Sequence
  Description of Artificial Sequence: Synthetic oligonucleotide
  Target: COL7A1; (+) strand; PAM type: NRG; PAM sequence: CAG
agggtcaaagatcacctgtc

SEQ ID NO: 18039 - DNA, 20 bp, Artificial Sequence
  Description of Artificial Sequence: Synthetic oligonucleotide
  Target: COL7A1; (+) strand; PAM type: NRG; PAM sequence: AGG
gggtcaaagatcacctgtcc

SEQ ID NO: 18040 - DNA, 20 bp, Artificial Sequence
  Description of Artificial Sequence: Synthetic oligonucleotide
  Target: COL7A1; (+) strand; PAM type: NRG; PAM sequence: GGG
ggtcaaagatcacctgtcca

SEQ ID NO: 18041 - DNA, 20 bp, Artificial Sequence
  Description of Artificial Sequence: Synthetic oligonucleotide
  Target: COL7A1; (+) strand; PAM type: NRG; PAM sequence: GGG
gtcaaagatcacctgtccag

SEQ ID NO: 18042 - DNA, 20 bp, Artificial Sequence
  Description of Artificial Sequence: Synthetic oligonucleotide
  Target: COL7A1; (+) strand; PAM type: NRG; PAM sequence: TGG
cacctgtccaggggcccccg

SEQ ID NO: 18043 - DNA, 20 bp, Artificial Sequence
  Description of Artificial Sequence: Synthetic oligonucleotide
  Target: COL7A1; (+) strand; PAM type: NRG; PAM sequence: GGG
acctgtccaggggcccccgt

SEQ ID NO: 18044 - DNA, 20 bp, Artificial Sequence
  Description of Artificial Sequence: Synthetic oligonucleotide
  Target: COL7A1; (+) strand; PAM type: NRG; PAM sequence: GGG
cctgtccaggggcccccgtg

SEQ ID NO: 18045 - DNA, 20 bp, Artificial Sequence
  Description of Artificial Sequence: Synthetic oligonucleotide
  Target: COL7A1; (+) strand; PAM type: NRG; PAM sequence: CAG
tccaggggcccccgtggggc

SEQ ID NO: 18046 - DNA, 20 bp, Artificial Sequence
  Description of Artificial Sequence: Synthetic oligonucleotide
  Target: COL7A1; (+) strand; PAM type: NRG; PAM sequence: AGG
ccaggggcccccgtggggcc

SEQ ID NO: 18047 - DNA, 20 bp, Artificial Sequence
  Description of Artificial Sequence: Synthetic oligonucleotide
  Target: COL7A1; (+) strand; PAM type: NRG; PAM sequence: TAG
cgtggggccaggttctcctt

SEQ ID NO: 18048 - DNA, 20 bp, Artificial Sequence
  Description of Artificial Sequence: Synthetic oligonucleotide
  Target: COL7A1; (+) strand; PAM type: NRG; PAM sequence: AGG
gtggggccaggttctccttt

SEQ ID NO: 18049 - DNA, 20 bp, Artificial Sequence
  Description of Artificial Sequence: Synthetic oligonucleotide
  Target: COL7A1; (+) strand; PAM type: NRG; PAM sequence: CAG
aggttctcctttaggtccga

SEQ ID NO: 18050 - DNA, 20 bp, Artificial Sequence
  Description of Artificial Sequence: Synthetic oligonucleotide
  Target: COL7A1; (+) strand; PAM type: NRG; PAM sequence: AGG
ggttctcctttaggtccgac

SEQ ID NO: 18051 - DNA, 20 bp, Artificial Sequence
  Description of Artificial Sequence: Synthetic oligonucleotide
  Target: COL7A1; (+) strand; PAM type: NRG; PAM sequence: GGG
gttctcctttaggtccgaca

SEQ ID NO: 18052 - DNA, 20 bp, Artificial Sequence
  Description of Artificial Sequence: Synthetic oligonucleotide
  Target: COL7A1; (+) strand; PAM type: NRG; PAM sequence: CAG
tcctttaggtccgacagggc

SEQ ID NO: 18053 - DNA, 20 bp, Artificial Sequence
  Description of Artificial Sequence: Synthetic oligonucleotide
  Target: COL7A1; (+) strand; PAM type: NRG; PAM sequence: AGG
cctttaggtccgacagggcc

SEQ ID NO: 18054 - DNA, 20 bp, Artificial Sequence
  Description of Artificial Sequence: Synthetic oligonucleotide
  Target: COL7A1; (+) strand; PAM type: NRG; PAM sequence: CAG
ttaggtccgacagggccagg

SEQ ID NO: 18055 - DNA, 20 bp, Artificial Sequence
  Description of Artificial Sequence: Synthetic oligonucleotide
  Target: COL7A1; (+) strand; PAM type: NRG; PAM sequence: TGG
ccgacagggccaggcagacc

SEQ ID NO: 18056 - DNA, 20 bp, Artificial Sequence
  Description of Artificial Sequence: Synthetic oligonucleotide
  Target: COL7A1; (+) strand; PAM type: NRG; PAM sequence: TGG
ggcagacctggtgaccccta

SEQ ID NO: 18057 - DNA, 20 bp, Artificial Sequence
  Description of Artificial Sequence: Synthetic oligonucleotide
  Target: COL7A1; (+) strand; PAM type: NRG; PAM sequence: CAG
agacctggtgacccctatgg

SEQ ID NO: 18058 - DNA, 20 bp, Artificial Sequence
  Description of Artificial Sequence: Synthetic oligonucleotide
  Target: COL7A1; (+) strand; PAM type: NRG; PAM sequence: GAG
acctggtgacccctatggca

SEQ ID NO: 18059 - DNA, 20 bp, Artificial Sequence
  Description of Artificial Sequence: Synthetic oligonucleotide
  Target: COL7A1; (+) strand; PAM type: NRG; PAM sequence: CAG
tggtgacccctatggcagag

SEQ ID NO: 18060 - DNA, 20 bp, Artificial Sequence
  Description of Artificial Sequence: Synthetic oligonucleotide
  Target: COL7A1; (+) strand; PAM type: NRG; PAM sequence: GAG
cccctatggcagagcagcgt

SEQ ID NO: 18061 - DNA, 20 bp, Artificial Sequence
  Description of Artificial Sequence: Synthetic oligonucleotide
  Target: COL7A1; (+) strand; PAM type: NRG; PAM sequence: AGG
ccctatggcagagcagcgtg

SEQ ID NO: 18062 - DNA, 20 bp, Artificial Sequence
  Description of Artificial Sequence: Synthetic oligonucleotide
  Target: COL7A1; (+) strand; PAM type: NRG; PAM sequence: CAG
gcagagcagcgtgaggaact

SEQ ID NO: 18063 - DNA, 20 bp, Artificial Sequence
  Description of Artificial Sequence: Synthetic oligonucleotide
  Target: COL7A1; (+) strand; PAM type: NRG; PAM sequence: CAG
ctgccccactcctcatattt

SEQ ID NO: 18064 - DNA, 20 bp, Artificial Sequence
  Description of Artificial Sequence: Synthetic oligonucleotide
  Target: COL7A1; (+) strand; PAM type: NRG; PAM sequence: AGG
tgccccactcctcatatttc

SEQ ID NO: 18065 - DNA, 20 bp, Artificial Sequence
  Description of Artificial Sequence: Synthetic oligonucleotide
  Target: COL7A1; (+) strand; PAM type: NRG; PAM sequence: CAG
ctcctcatatttcaggccca

SEQ ID NO: 18066 - DNA, 20 bp, Artificial Sequence
  Description of Artificial Sequence: Synthetic oligonucleotide
  Target: COL7A1; (+) strand; PAM type: NRG; PAM sequence: TGG
tcatatttcaggcccacagc

SEQ ID NO: 18067 - DNA, 20 bp, Artificial Sequence
  Description of Artificial Sequence: Synthetic oligonucleotide
  Target: COL7A1; (+) strand; PAM type: NRG; PAM sequence: GGG
catatttcaggcccacagct

SEQ ID NO: 18068 - DNA, 20 bp, Artificial Sequence
  Description of Artificial Sequence: Synthetic oligonucleotide
  Target: COL7A1; (+) strand; PAM type: NRG; PAM sequence: TAG
cacagctgggcaccacaccc

SEQ ID NO: 18069 - DNA, 20 bp, Artificial Sequence
  Description of Artificial Sequence: Synthetic oligonucleotide
  Target: COL7A1; (+) strand; PAM type: NRG; PAM sequence: GAG
gctgggcaccacaccctagc

SEQ ID NO: 18070 - DNA, 20 bp, Artificial Sequence
  Description of Artificial Sequence: Synthetic oligonucleotide
  Target: COL7A1; (+) strand; PAM type: NRG; PAM sequence: CAG
acaccctagcgagctgcccc

SEQ ID NO: 18071 - DNA, 20 bp, Artificial Sequence
  Description of Artificial Sequence: Synthetic oligonucleotide
  Target: COL7A1; (+) strand; PAM type: NRG; PAM sequence: TGG
gctgcccccagaacacatac

SEQ ID NO: 18072 - DNA, 20 bp, Artificial Sequence
  Description of Artificial Sequence: Synthetic oligonucleotide
  Target: COL7A1; (+) strand; PAM type: NRG; PAM sequence: CAG
cagaacacatactggcacac

SEQ ID NO: 18073 - DNA, 20 bp, Artificial Sequence
  Description of Artificial Sequence: Synthetic oligonucleotide
  Target: COL7A1; (+) strand; PAM type: NRG; PAM sequence: AGG
agaacacatactggcacacc

SEQ ID NO: 18074 - DNA, 20 bp, Artificial Sequence
  Description of Artificial Sequence: Synthetic oligonucleotide
  Target: COL7A1; (+) strand; PAM type: NRG; PAM sequence: GGG
gaacacatactggcacacca

SEQ ID NO: 18075 - DNA, 20 bp, Artificial Sequence
  Description of Artificial Sequence: Synthetic oligonucleotide
  Target: COL7A1; (+) strand; PAM type: NRG; PAM sequence: TGG
tctgtctccatcttttccac

SEQ ID NO: 18076 - DNA, 20 bp, Artificial Sequence
  Description of Artificial Sequence: Synthetic oligonucleotide
  Target: COL7A1; (+) strand; PAM type: NRG; PAM sequence: TGG
ccactggcaccatctcgacc

SEQ ID NO: 18077 - DNA, 20 bp, Artificial Sequence
  Description of Artificial Sequence: Synthetic oligonucleotide
  Target: COL7A1; (+) strand; PAM type: NRG; PAM sequence: GGG
cactggcaccatctcgacct

SEQ ID NO: 18078 - DNA, 20 bp, Artificial Sequence
  Description of Artificial Sequence: Synthetic oligonucleotide
  Target: COL7A1; (+) strand; PAM type: NRG; PAM sequence: GGG
actggcaccatctcgacctg

SEQ ID NO: 18079 - DNA, 20 bp, Artificial Sequence
  Description of Artificial Sequence: Synthetic oligonucleotide
  Target: COL7A1; (+) strand; PAM type: NRG; PAM sequence: CGG
ccatctcgacctggggctcc

SEQ ID NO: 18080 - DNA, 20 bp, Artificial Sequence
  Description of Artificial Sequence: Synthetic oligonucleotide
  Target: COL7A1; (+) strand; PAM type: NRG; PAM sequence: GAG
cggcttccctgtctccccct

SEQ ID NO: 18081 - DNA, 20 bp, Artificial Sequence
  Description of Artificial Sequence: Synthetic oligonucleotide
  Target: COL7A1; (+) strand; PAM type: NRG; PAM sequence: GAG
gcttccctgtctccccctga

SEQ ID NO: 18082 - DNA, 20 bp, Artificial Sequence
  Description of Artificial Sequence: Synthetic oligonucleotide
  Target: COL7A1; (+) strand; PAM type: NRG; PAM sequence: AGG
cttccctgtctccccctgag

SEQ ID NO: 18083 - DNA, 20 bp, Artificial Sequence
  Description of Artificial Sequence: Synthetic oligonucleotide
  Target: COL7A1; (+) strand; PAM type: NRG; PAM sequence: GGG
ttccctgtctccccctgaga

SEQ ID NO: 18084 - DNA, 20 bp, Artificial Sequence
  Description of Artificial Sequence: Synthetic oligonucleotide
  Target: COL7A1; (+) strand; PAM type: NRG; PAM sequence: AAG
cctgtctccccctgagaggg

SEQ ID NO: 18085 - DNA, 20 bp, Artificial Sequence
  Description of Artificial Sequence: Synthetic oligonucleotide
  Target: COL7A1; (+) strand; PAM type: NRG; PAM sequence: GAG
tgtctccccctgagagggaa

SEQ ID NO: 18086 - DNA, 20 bp, Artificial Sequence
  Description of Artificial Sequence: Synthetic oligonucleotide
  Target: COL7A1; (+) strand; PAM type: NRG; PAM sequence: CAG
ctgagagggaagagctctgt

SEQ ID NO: 18087 - DNA, 20 bp, Artificial Sequence
  Description of Artificial Sequence: Synthetic oligonucleotide
  Target: COL7A1; (+) strand; PAM type: NRG; PAM sequence: AGG
tgagagggaagagctctgtc

SEQ ID NO: 18088 - DNA, 20 bp, Artificial Sequence
  Description of Artificial Sequence: Synthetic oligonucleotide
  Target: COL7A1; (+) strand; PAM type: NRG; PAM sequence: GGG
gagagggaagagctctgtca

SEQ ID NO: 18089 - DNA, 20 bp, Artificial Sequence
  Description of Artificial Sequence: Synthetic oligonucleotide
  Target: COL7A1; (+) strand; PAM type: NRG; PAM sequence: TGG
gcctgtcgacccttgacccc

SEQ ID NO: 18090 - DNA, 20 bp, Artificial Sequence
  Description of Artificial Sequence: Synthetic oligonucleotide
  Target: COL7A1; (+) strand; PAM type: NRG; PAM sequence: GAG
ctgtcgacccttgacccctg

SEQ ID NO: 18091 - DNA, 20 bp, Artificial Sequence
  Description of Artificial Sequence: Synthetic oligonucleotide
  Target: COL7A1; (+) strand; PAM type: NRG; PAM sequence: CAG
ggagcccaacccttgacccc

SEQ ID NO: 18092 - DNA, 20 bp, Artificial Sequence
  Description of Artificial Sequence: Synthetic oligonucleotide
  Target: COL7A1; (+) strand; PAM type: NRG; PAM sequence: CAG
cccagaactcaccacttgtc

SEQ ID NO: 18093 - DNA, 20 bp, Artificial Sequence
  Description of Artificial Sequence: Synthetic oligonucleotide
  Target: COL7A1; (+) strand; PAM type: NRG; PAM sequence: AGG
ccagaactcaccacttgtcc

SEQ ID NO: 18094 - DNA, 20 bp, Artificial Sequence
  Description of Artificial Sequence: Synthetic oligonucleotide
  Target: COL7A1; (+) strand; PAM type: NRG; PAM sequence: TGG
accacttgtccaggcaaacc

SEQ ID NO: 18095 - DNA, 20 bp, Artificial Sequence
  Description of Artificial Sequence: Synthetic oligonucleotide
  Target: COL7A1; (+) strand; PAM type: NRG; PAM sequence: GAG
cacttgtccaggcaaacctg

SEQ ID NO: 18096 - DNA, 20 bp, Artificial Sequence
  Description of Artificial Sequence: Synthetic oligonucleotide
  Target: COL7A1; (+) strand; PAM type: NRG; PAM sequence: TGG
ggcaaacctggagacccctg

SEQ ID NO: 18097 - DNA, 20 bp, Artificial Sequence
  Description of Artificial Sequence: Synthetic oligonucleotide
  Target: COL7A1; (+) strand; PAM type: NRG; PAM sequence: CGG
gagacccctgtggaccctga

SEQ ID NO: 18098 - DNA, 20 bp, Artificial Sequence
  Description of Artificial Sequence: Synthetic oligonucleotide
  Target: COL7A1; (+) strand; PAM type: NRG; PAM sequence: GAG
gacccctgtggaccctgacg

SEQ ID NO: 18099 - DNA, 20 bp, Artificial Sequence
  Description of Artificial Sequence: Synthetic oligonucleotide
  Target: COL7A1; (+) strand; PAM type: NRG; PAM sequence: AAG
tgtggaccctgacggagaac

SEQ ID NO: 18100 - DNA, 20 bp, Artificial Sequence
  Description of Artificial Sequence: Synthetic oligonucleotide
  Target: COL7A1; (+) strand; PAM type: NRG; PAM sequence: CGG
gaccctgacggagaacaagt

SEQ ID NO: 18101 - DNA, 20 bp, Artificial Sequence
  Description of Artificial Sequence: Synthetic oligonucleotide
  Target: COL7A1; (+) strand; PAM type: NRG; PAM sequence: CAG
acggagaacaagtcggatgt

SEQ ID NO: 18102 - DNA, 20 bp, Artificial Sequence
  Description of Artificial Sequence: Synthetic oligonucleotide
  Target: COL7A1; (+) strand; PAM type: NRG; PAM sequence: AGG
cggagaacaagtcggatgtc

SEQ ID NO: 18103 - DNA, 20 bp, Artificial Sequence
  Description of Artificial Sequence: Synthetic oligonucleotide
  Target: COL7A1; (+) strand; PAM type: NRG; PAM sequence: GGG
ggagaacaagtcggatgtca

SEQ ID NO: 18104 - DNA, 20 bp, Artificial Sequence
  Description of Artificial Sequence: Synthetic oligonucleotide
  Target: COL7A1; (+) strand; PAM type: NRG; PAM sequence: TGG
gtcggatgtcagggtgacaa

SEQ ID NO: 18105 - DNA, 20 bp, Artificial Sequence
  Description of Artificial Sequence: Synthetic oligonucleotide
  Target: COL7A1; (+) strand; PAM type: NRG; PAM sequence: CAG
tgtcagggtgacaatggaca

SEQ ID NO: 18106 - DNA, 20 bp, Artificial Sequence
  Description of Artificial Sequence: Synthetic oligonucleotide
  Target: COL7A1; (+) strand; PAM type: NRG; PAM sequence: AGG
gtcagggtgacaatggacac

SEQ ID NO: 18107 - DNA, 20 bp, Artificial Sequence
  Description of Artificial Sequence: Synthetic oligonucleotide
  Target: COL7A1; (+) strand; PAM type: NRG; PAM sequence: GAG
caatggacacaggacgacat

SEQ ID NO: 18108 - DNA, 20 bp, Artificial Sequence
  Description of Artificial Sequence: Synthetic oligonucleotide
  Target: COL7A1; (+) strand; PAM type: NRG; PAM sequence: GAG
atggacacaggacgacatga

SEQ ID NO: 18109 - DNA, 20 bp, Artificial Sequence
  Description of Artificial Sequence: Synthetic oligonucleotide
  Target: COL7A1; (+) strand; PAM type: NRG; PAM sequence: TGG
caggacgacatgagagaaca

SEQ ID NO: 18110 - DNA, 20 bp, Artificial Sequence
  Description of Artificial Sequence: Synthetic oligonucleotide
  Target: COL7A1; (+) strand; PAM type: NRG; PAM sequence: GGG
aggacgacatgagagaacat

SEQ ID NO: 18111 - DNA, 20 bp, Artificial Sequence
  Description of Artificial Sequence: Synthetic oligonucleotide
  Target: COL7A1; (+) strand; PAM type: NRG; PAM sequence: AAG
catgagagaacatgggcccc

SEQ ID NO: 18112 - DNA, 20 bp, Artificial Sequence
  Description of Artificial Sequence: Synthetic oligonucleotide
  Target: COL7A1; (+) strand; PAM type: NRG; PAM sequence: AGG
atgagagaacatgggcccca

SEQ ID NO: 18113 - DNA, 20 bp, Artificial Sequence
  Description of Artificial Sequence: Synthetic oligonucleotide
  Target: COL7A1; (+) strand; PAM type: NRG; PAM sequence: GAG
gagagaacatgggccccaag

SEQ ID NO: 18114 - DNA, 20 bp, Artificial Sequence
  Description of Artificial Sequence: Synthetic oligonucleotide
  Target: COL7A1; (+) strand; PAM type: NRG; PAM sequence: CGG
ggccccaaggagtgaaaaca

SEQ ID NO: 18115 - DNA, 20 bp, Artificial Sequence
  Description of Artificial Sequence: Synthetic oligonucleotide
  Target: COL7A1; (+) strand; PAM type: NRG; PAM sequence: CAG
gtgaaaacacggtgtcccta

SEQ ID NO: 18116 - DNA, 20 bp, Artificial Sequence
  Description of Artificial Sequence: Synthetic oligonucleotide
  Target: COL7A1; (+) strand; PAM type: NRG; PAM sequence: AGG
tgaaaacacggtgtccctac

SEQ ID NO: 18117 - DNA, 20 bp, Artificial Sequence
  Description of Artificial Sequence: Synthetic oligonucleotide
  Target: COL7A1; (+) strand; PAM type: NRG; PAM sequence: GGG
gaaaacacggtgtccctaca

SEQ ID NO: 18118 - DNA, 20 bp, Artificial Sequence
  Description of Artificial Sequence: Synthetic oligonucleotide
  Target: COL7A1; (+) strand; PAM type: NRG; PAM sequence: GGG
aaaacacggtgtccctacag

SEQ ID NO: 18119 - DNA, 20 bp, Artificial Sequence
  Description of Artificial Sequence: Synthetic oligonucleotide
  Target: COL7A1; (+) strand; PAM type: NRG; PAM sequence: CAG
cggtgtccctacaggggcca

SEQ ID NO: 18120 - DNA, 20 bp, Artificial Sequence
  Description of Artificial Sequence: Synthetic oligonucleotide
  Target: COL7A1; (+) strand; PAM type: NRG; PAM sequence: AGG
ggtgtccctacaggggccac

SEQ ID NO: 18121 - DNA, 20 bp, Artificial Sequence
  Description of Artificial Sequence: Synthetic oligonucleotide
  Target: COL7A1; (+) strand; PAM type: NRG; PAM sequence: GGG
gtgtccctacaggggccaca

SEQ ID NO: 18122 - DNA, 20 bp, Artificial Sequence
  Description of Artificial Sequence: Synthetic oligonucleotide
  Target: COL7A1; (+) strand; PAM type: NRG; PAM sequence: AAG
cacagggactcactcaccac

SEQ ID NO: 18123 - DNA, 20 bp, Artificial Sequence
  Description of Artificial Sequence: Synthetic oligonucleotide
  Target: COL7A1; (+) strand; PAM type: NRG; PAM sequence: AGG
acagggactcactcaccaca

SEQ ID NO: 18124 - DNA, 20 bp, Artificial Sequence
  Description of Artificial Sequence: Synthetic oligonucleotide
  Target: COL7A1; (+) strand; PAM type: NRG; PAM sequence: AAG
ctcactcaccacaaggcctg

SEQ ID NO: 18125 - DNA, 20 bp, Artificial Sequence
  Description of Artificial Sequence: Synthetic oligonucleotide
  Target: COL7A1; (+) strand; PAM type: NRG; PAM sequence: AGG
tcactcaccacaaggcctga

SEQ ID NO: 18126 - DNA, 20 bp, Artificial Sequence
  Description of Artificial Sequence: Synthetic oligonucleotide
  Target: COL7A1; (+) strand; PAM type: NRG; PAM sequence: GGG
cactcaccacaaggcctgaa

SEQ ID NO: 18127 - DNA, 20 bp, Artificial Sequence
  Description of Artificial Sequence: Synthetic oligonucleotide
  Target: COL7A1; (+) strand; PAM type: NRG; PAM sequence: CGG
caccacaaggcctgaagggc

SEQ ID NO: 18128 - DNA, 20 bp, Artificial Sequence
  Description of Artificial Sequence: Synthetic oligonucleotide
  Target: COL7A1; (+) strand; PAM type: NRG; PAM sequence: GGG
accacaaggcctgaagggcc

SEQ ID NO: 18129 - DNA, 20 bp, Artificial Sequence
  Description of Artificial Sequence: Synthetic oligonucleotide
  Target: COL7A1; (+) strand; PAM type: NRG; PAM sequence: GGG
ccacaaggcctgaagggccg

SEQ ID NO: 18130 - DNA, 20 bp, Artificial Sequence
  Description of Artificial Sequence: Synthetic oligonucleotide
  Target: COL7A1; (+) strand; PAM type: NRG; PAM sequence: GGG
cacaaggcctgaagggccgg

SEQ ID NO: 18131 - DNA, 20 bp, Artificial Sequence
  Description of Artificial Sequence: Synthetic oligonucleotide
  Target: COL7A1; (+) strand; PAM type: NRG; PAM sequence: GGG
acaaggcctgaagggccggg

SEQ ID NO: 18132 - DNA, 20 bp, Artificial Sequence
  Description of Artificial Sequence: Synthetic oligonucleotide
  Target: COL7A1; (+) strand; PAM type: NRG; PAM sequence: CAG
gcctgaagggccggggggtc

SEQ ID NO: 18133 - DNA, 20 bp, Artificial Sequence
  Description of Artificial Sequence: Synthetic oligonucleotide
  Target: COL7A1; (+) strand; PAM type: NRG; PAM sequence: AGG
cctgaagggccggggggtcc

SEQ ID NO: 18134 - DNA, 20 bp, Artificial Sequence
  Description of Artificial Sequence: Synthetic oligonucleotide
  Target: COL7A1; (+) strand; PAM type: NRG; PAM sequence: AAG
gaagggccggggggtccagg

SEQ ID NO: 18135 - DNA, 20 bp, Artificial Sequence
  Description of Artificial Sequence: Synthetic oligonucleotide
  Target: COL7A1; (+) strand; PAM type: NRG; PAM sequence: CAG
ggggggtccaggaagtccca

SEQ ID NO: 18136 - DNA, 20 bp, Artificial Sequence
  Description of Artificial Sequence: Synthetic oligonucleotide
  Target: COL7A1; (+) strand; PAM type: NRG; PAM sequence: CAG
tccaggaagtcccacagctc

SEQ ID NO: 18137 - DNA, 20 bp, Artificial Sequence
  Description of Artificial Sequence: Synthetic oligonucleotide
  Target: COL7A1; (+) strand; PAM type: NRG; PAM sequence: TAG
aggaagtcccacagctccag

SEQ ID NO: 18138 - DNA, 20 bp, Artificial Sequence
  Description of Artificial Sequence: Synthetic oligonucleotide
  Target: COL7A1; (+) strand; PAM type: NRG; PAM sequence: AGG
ggaagtcccacagctccagt

SEQ ID NO: 18139 - DNA, 20 bp, Artificial Sequence
  Description of Artificial Sequence: Synthetic oligonucleotide
  Target: COL7A1; (+) strand; PAM type: NRG; PAM sequence: CAG
tcccacagctccagtaggtc

SEQ ID NO: 18140 - DNA, 20 bp, Artificial Sequence
  Description of Artificial Sequence: Synthetic oligonucleotide
  Target: COL7A1; (+) strand; PAM type: NRG; PAM sequence: CAG
acagctccagtaggtccagt

SEQ ID NO: 18141 - DNA, 20 bp, Artificial Sequence
  Description of Artificial Sequence: Synthetic oligonucleotide
  Target: COL7A1; (+) strand; PAM type: NRG; PAM sequence: AGG
cagctccagtaggtccagtc

SEQ ID NO: 18142 - DNA, 20 bp, Artificial Sequence
  Description of Artificial Sequence: Synthetic oligonucleotide
  Target: COL7A1; (+) strand; PAM type: NRG; PAM sequence: TGG
cagtaggtccagtcaggccc

SEQ ID NO: 18143 - DNA, 20 bp, Artificial Sequence
  Description of Artificial Sequence: Synthetic oligonucleotide
  Target: COL7A1; (+) strand; PAM type: NRG; PAM sequence: GAG
gtaggtccagtcaggccctg

SEQ ID NO: 18144 - DNA, 20 bp, Artificial Sequence
  Description of Artificial Sequence: Synthetic oligonucleotide
  Target: COL7A1; (+) strand; PAM type: NRG; PAM sequence: AGG
taggtccagtcaggccctgg

SEQ ID NO: 18145 - DNA, 20 bp, Artificial Sequence
  Description of Artificial Sequence: Synthetic oligonucleotide
  Target: COL7A1; (+) strand; PAM type: NRG; PAM sequence: AAG
gtccagtcaggccctggagg

SEQ ID NO: 18146 - DNA, 20 bp, Artificial Sequence
  Description of Artificial Sequence: Synthetic oligonucleotide
  Target: COL7A1; (+) strand; PAM type: NRG; PAM sequence: GAG
ccagtcaggccctggaggaa

SEQ ID NO: 18147 - DNA, 20 bp, Artificial Sequence
  Description of Artificial Sequence: Synthetic oligonucleotide
  Target: COL7A1; (+) strand; PAM type: NRG; PAM sequence: AAG
tcaggccctggaggaagaga

SEQ ID NO: 18148 - DNA, 20 bp, Artificial Sequence
  Description of Artificial Sequence: Synthetic oligonucleotide
  Target: COL7A1; (+) strand; PAM type: NRG; PAM sequence: CAG
ccctggaggaagagaaagtt

SEQ ID NO: 18149 - DNA, 20 bp, Artificial Sequence
  Description of Artificial Sequence: Synthetic oligonucleotide
  Target: COL7A1; (+) strand; PAM type: NRG; PAM sequence: AGG
cctggaggaagagaaagttc

SEQ ID NO: 18150 - DNA, 20 bp, Artificial Sequence
  Description of Artificial Sequence: Synthetic oligonucleotide
  Target: COL7A1; (+) strand; PAM type: NRG; PAM sequence: GGG
ctggaggaagagaaagttca

SEQ ID NO: 18151 - DNA, 20 bp, Artificial Sequence
  Description of Artificial Sequence: Synthetic oligonucleotide
  Target: COL7A1; (+) strand; PAM type: NRG; PAM sequence: CAG
gaggaagagaaagttcaggg

SEQ ID NO: 18152 - DNA, 20 bp, Artificial Sequence
  Description of Artificial Sequence: Synthetic oligonucleotide
  Target: COL7A1; (+) strand; PAM type: NRG; PAM sequence: GAG
tccctatgaccctaacctgt

SEQ ID NO: 18153 - DNA, 20 bp, Artificial Sequence
  Description of Artificial Sequence: Synthetic oligonucleotide
  Target: COL7A1; (+) strand; PAM type: NRG; PAM sequence: TAG
tatgaccctaacctgtgagc

SEQ ID NO: 18154 - DNA, 20 bp, Artificial Sequence
  Description of Artificial Sequence: Synthetic oligonucleotide
  Target: COL7A1; (+) strand; PAM type: NRG; PAM sequence: AGG
atgaccctaacctgtgagct

SEQ ID NO: 18155 - DNA, 20 bp, Artificial Sequence
  Description of Artificial Sequence: Synthetic oligonucleotide
  Target: COL7A1; (+) strand; PAM type: NRG; PAM sequence: TGG
gctaggccactcacccgtcc

SEQ ID NO: 18156 - DNA, 20 bp, Artificial Sequence
  Description of Artificial Sequence: Synthetic oligonucleotide
  Target: COL7A1; (+) strand; PAM type: NRG; PAM sequence: GAG
taggccactcacccgtcctg

SEQ ID NO: 18157 - DNA, 20 bp, Artificial Sequence
  Description of Artificial Sequence: Synthetic oligonucleotide
  Target: COL7A1; (+) strand; PAM type: NRG; PAM sequence: AGG
aggccactcacccgtcctgg

SEQ ID NO: 18158 - DNA, 20 bp, Artificial Sequence
  Description of Artificial Sequence: Synthetic oligonucleotide
  Target: COL7A1; (+) strand; PAM type: NRG; PAM sequence: CAG
tcctggaggtcctgtctctc

SEQ ID NO: 18159 - DNA, 20 bp, Artificial Sequence
  Description of Artificial Sequence: Synthetic oligonucleotide
  Target: COL7A1; (+) strand; PAM type: NRG; PAM sequence: AGG
cctggaggtcctgtctctcc

SEQ ID NO: 18160 - DNA, 20 bp, Artificial Sequence
  Description of Artificial Sequence: Synthetic oligonucleotide
  Target: COL7A1; (+) strand; PAM type: NRG; PAM sequence: CAG
ggctccccctgcaaacaacc

SEQ ID NO: 18161 - DNA, 20 bp, Artificial Sequence
  Description of Artificial Sequence: Synthetic oligonucleotide
  Target: COL7A1; (+) strand; PAM type: NRG; PAM sequence: GAG
ctccccctgcaaacaaccca

SEQ ID NO: 18162 - DNA, 20 bp, Artificial Sequence
  Description of Artificial Sequence: Synthetic oligonucleotide
  Target: COL7A1; (+) strand; PAM type: NRG; PAM sequence: GAG
aaacaacccagagactgcat

SEQ ID NO: 18163 - DNA, 20 bp, Artificial Sequence
  Description of Artificial Sequence: Synthetic oligonucleotide
  Target: COL7A1; (+) strand; PAM type: NRG; PAM sequence: CAG
caacccagagactgcatgag

SEQ ID NO: 18164 - DNA, 20 bp, Artificial Sequence
  Description of Artificial Sequence: Synthetic oligonucleotide
  Target: COL7A1; (+) strand; PAM type: NRG; PAM sequence: GAG
acccagagactgcatgagca

SEQ ID NO: 18165 - DNA, 20 bp, Artificial Sequence
  Description of Artificial Sequence: Synthetic oligonucleotide
  Target: COL7A1; (+) strand; PAM type: NRG; PAM sequence: TGG
ctgcatgagcagagcccacg

SEQ ID NO: 18166 - DNA, 20 bp, Artificial Sequence
  Description of Artificial Sequence: Synthetic oligonucleotide
  Target: COL7A1; (+) strand; PAM type: NRG; PAM sequence: CAG
atgagcagagcccacgtggc

SEQ ID NO: 18167 - DNA, 20 bp, Artificial Sequence
  Description of Artificial Sequence: Synthetic oligonucleotide
  Target: COL7A1; (+) strand; PAM type: NRG; PAM sequence: AGG
tgagcagagcccacgtggcc

SEQ ID NO: 18168 - DNA, 20 bp, Artificial Sequence
  Description of Artificial Sequence: Synthetic oligonucleotide
  Target: COL7A1; (+) strand; PAM type: NRG; PAM sequence: GGG
gagcagagcccacgtggcca

SEQ ID NO: 18169 - DNA, 20 bp, Artificial Sequence
  Description of Artificial Sequence: Synthetic oligonucleotide
  Target: COL7A1; (+) strand; PAM type: NRG; PAM sequence: TGG
gcccacgtggccagggctcc

SEQ ID NO: 18170 - DNA, 20 bp, Artificial Sequence
  Description of Artificial Sequence: Synthetic oligonucleotide
  Target: COL7A1; (+) strand; PAM type: NRG; PAM sequence: GAG
ccacgtggccagggctcctg

SEQ ID NO: 18171 - DNA, 20 bp, Artificial Sequence
  Description of Artificial Sequence: Synthetic oligonucleotide
  Target: COL7A1; (+) strand; PAM type: NRG; PAM sequence: CAG
cctggagctcatcctcattg

SEQ ID NO: 18172 - DNA, 20 bp, Artificial Sequence
  Description of Artificial Sequence: Synthetic oligonucleotide
  Target: COL7A1; (+) strand; PAM type: NRG; PAM sequence: AGG
ctggagctcatcctcattgc

SEQ ID NO: 18173 - DNA, 20 bp, Artificial Sequence
  Description of Artificial Sequence: Synthetic oligonucleotide
  Target: COL7A1; (+) strand; PAM type: NRG; PAM sequence: GAG
ggagctcatcctcattgcag

SEQ ID NO: 18174 - DNA, 20 bp, Artificial Sequence
  Description of Artificial Sequence: Synthetic oligonucleotide
  Target: COL7A1; (+) strand; PAM type: NRG; PAM sequence: CAG
atcctcattgcaggagatga

SEQ ID NO: 18175 - DNA, 20 bp, Artificial Sequence
  Description of Artificial Sequence: Synthetic oligonucleotide
  Target: COL7A1; (+) strand; PAM type: NRG; PAM sequence: CAG
cattgcaggagatgacagcc

SEQ ID NO: 18176 - DNA, 20 bp, Artificial Sequence
  Description of Artificial Sequence: Synthetic oligonucleotide
  Target: COL7A1; (+) strand; PAM type: NRG; PAM sequence: AGG
attgcaggagatgacagccc

SEQ ID NO: 18177 - DNA, 20 bp, Artificial Sequence
  Description of Artificial Sequence: Synthetic oligonucleotide
  Target: COL7A1; (+) strand; PAM type: NRG; PAM sequence: GAG
tgcaggagatgacagcccag

SEQ ID NO: 18178 - DNA, 20 bp, Artificial Sequence
  Description of Artificial Sequence: Synthetic oligonucleotide
  Target: COL7A1; (+) strand; PAM type: NRG; PAM sequence: AGG
gcaggagatgacagcccagg

SEQ ID NO: 18179 - DNA, 20 bp, Artificial Sequence
  Description of Artificial Sequence: Synthetic oligonucleotide
  Target: COL7A1; (+) strand; PAM type: NRG; PAM sequence: TGG
gagatgacagcccaggaggt

SEQ ID NO: 18180 - DNA, 20 bp, Artificial Sequence
  Description of Artificial Sequence: Synthetic oligonucleotide
  Target: COL7A1; (+) strand; PAM type: NRG; PAM sequence: CAG
gaggttggcgcacactaccc

SEQ ID NO: 18181 - DNA, 20 bp, Artificial Sequence
  Description of Artificial Sequence: Synthetic oligonucleotide
  Target: COL7A1; (+) strand; PAM type: NRG; PAM sequence: AGG
aggttggcgcacactacccc

SEQ ID NO: 18182 - DNA, 20 bp, Artificial Sequence
  Description of Artificial Sequence: Synthetic oligonucleotide
  Target: COL7A1; (+) strand; PAM type: NRG; PAM sequence: TGG
ggcgcacactaccccaggca

SEQ ID NO: 18183 - DNA, 20 bp, Artificial Sequence
  Description of Artificial Sequence: Synthetic oligonucleotide
  Target: COL7A1; (+) strand; PAM type: NRG; PAM sequence: CAG
cactaccccaggcatggaca

SEQ ID NO: 18184 - DNA, 20 bp, Artificial Sequence
  Description of Artificial Sequence: Synthetic oligonucleotide
  Target: COL7A1; (+) strand; PAM type: NRG; PAM sequence: AAG
ccaggcatggacacagcttg

SEQ ID NO: 18185 - DNA, 20 bp, Artificial Sequence
  Description of Artificial Sequence: Synthetic oligonucleotide
  Target: COL7A1; (+) strand; PAM type: NRG; PAM sequence: AGG
caggcatggacacagcttga

SEQ ID NO: 18186 - DNA, 20 bp, Artificial Sequence
  Description of Artificial Sequence: Synthetic oligonucleotide
  Target: COL7A1; (+) strand; PAM type: NRG; PAM sequence: GAG
ggcatggacacagcttgaag

SEQ ID NO: 18187 - DNA, 20 bp, Artificial Sequence
  Description of Artificial Sequence: Synthetic oligonucleotide
  Target: COL7A1; (+) strand; PAM type: NRG; PAM sequence: TAG
cctcctcctatccacacacc

SEQ ID NO: 18188 - DNA, 20 bp, Artificial Sequence
  Description of Artificial Sequence: Synthetic oligonucleotide
  Target: COL7A1; (+) strand; PAM type: NRG; PAM sequence: CAG
cacacacctagactcacctt

SEQ ID NO: 18189 - DNA, 20 bp, Artificial Sequence
  Description of Artificial Sequence: Synthetic oligonucleotide
  Target: COL7A1; (+) strand; PAM type: NRG; PAM sequence: AGG
acacacctagactcaccttc

SEQ ID NO: 18190 - DNA, 20 bp, Artificial Sequence
  Description of Artificial Sequence: Synthetic oligonucleotide
  Target: COL7A1; (+) strand; PAM type: NRG; PAM sequence: CAG
acctagactcaccttcaggc

SEQ ID NO: 18191 - DNA, 20 bp, Artificial Sequence
  Description of Artificial Sequence: Synthetic oligonucleotide
  Target: COL7A1; (+) strand; PAM type: NRG; PAM sequence: AAG
tagactcaccttcaggccag

SEQ ID NO: 18192 - DNA, 20 bp, Artificial Sequence
  Description of Artificial Sequence: Synthetic oligonucleotide
  Target: COL7A1; (+) strand; PAM type: NRG; PAM sequence: AGG
agactcaccttcaggccaga

SEQ ID NO: 18193 - DNA, 20 bp, Artificial Sequence
  Description of Artificial Sequence: Synthetic oligonucleotide
  Target: COL7A1; (+) strand; PAM type: NRG; PAM sequence: TGG
ccttcaggccagaaggtcct

SEQ ID NO: 18194 - DNA, 20 bp, Artificial Sequence
  Description of Artificial Sequence: Synthetic oligonucleotide
  Target: COL7A1; (+) strand; PAM type: NRG; PAM sequence: GGG
cttcaggccagaaggtcctt

SEQ ID NO: 18195 - DNA, 20 bp, Artificial Sequence
  Description of Artificial Sequence: Synthetic oligonucleotide
  Target: COL7A1; (+) strand; PAM type: NRG; PAM sequence: GGG
ttcaggccagaaggtccttg

SEQ ID NO: 18196 - DNA, 20 bp, Artificial Sequence
  Description of Artificial Sequence: Synthetic oligonucleotide
  Target: COL7A1; (+) strand; PAM type: NRG; PAM sequence: CAG
agaaggtccttggggtcctg

SEQ ID NO: 18197 - DNA, 20 bp, Artificial Sequence
  Description of Artificial Sequence: Synthetic oligonucleotide
  Target: COL7A1; (+) strand; PAM type: NRG; PAM sequence: AGG
gaaggtccttggggtcctgc

SEQ ID NO: 18198 - DNA, 20 bp, Artificial Sequence
  Description of Artificial Sequence: Synthetic oligonucleotide
  Target: COL7A1; (+) strand; PAM type: NRG; PAM sequence: GGG
aaggtccttggggtcctgca

SEQ ID NO: 18199 - DNA, 20 bp, Artificial Sequence
  Description of Artificial Sequence: Synthetic oligonucleotide
  Target: COL7A1; (+) strand; PAM type: NRG; PAM sequence: CAG
tccttggggtcctgcagggc

SEQ ID NO: 18200 - DNA, 20 bp, Artificial Sequence
  Description of Artificial Sequence: Synthetic oligonucleotide
  Target: COL7A1; (+) strand; PAM type: NRG; PAM sequence: AAG
tggggtcctgcagggccagc

SEQ ID NO: 18201 - DNA, 20 bp, Artificial Sequence
  Description of Artificial Sequence: Synthetic oligonucleotide
  Target: COL7A1; (+) strand; PAM type: NRG; PAM sequence: TAG
ctgcagggccagcaagaccc

SEQ ID NO: 18202 - DNA, 20 bp, Artificial Sequence
  Description of Artificial Sequence: Synthetic oligonucleotide
  Target: COL7A1; (+) strand; PAM type: NRG; PAM sequence: GAG
gcagggccagcaagacccta

SEQ ID NO: 18203 - DNA, 20 bp, Artificial Sequence
  Description of Artificial Sequence: Synthetic oligonucleotide
  Target: COL7A1; (+) strand; PAM type: NRG; PAM sequence: AAG
gccagcaagaccctagagaa

SEQ ID NO: 18204 - DNA, 20 bp, Artificial Sequence
  Description of Artificial Sequence: Synthetic oligonucleotide
  Target: COL7A1; (+) strand; PAM type: NRG; PAM sequence: AGG
ccagcaagaccctagagaaa

SEQ ID NO: 18205 - DNA, 20 bp, Artificial Sequence
  Description of Artificial Sequence: Synthetic oligonucleotide
  Target: COL7A1; (+) strand; PAM type: NRG; PAM sequence: GGG
cagcaagaccctagagaaaa

SEQ ID NO: 18206 - DNA, 20 bp, Artificial Sequence
  Description of Artificial Sequence: Synthetic oligonucleotide
  Target: COL7A1; (+) strand; PAM type: NRG; PAM sequence: AAG
agaccctagagaaaagggtc

SEQ ID NO: 18207 - DNA, 20 bp, Artificial Sequence
  Description of Artificial Sequence: Synthetic oligonucleotide
  Target: COL7A1; (+) strand; PAM type: NRG; PAM sequence: AGG
gaccctagagaaaagggtca

SEQ ID NO: 18208 - DNA, 20 bp, Artificial Sequence
  Description of Artificial Sequence: Synthetic oligonucleotide
  Target: COL7A1; (+) strand; PAM type: NRG; PAM sequence: GGG
accctagagaaaagggtcaa

SEQ ID NO: 18209 - DNA, 20 bp, Artificial Sequence
  Description of Artificial Sequence: Synthetic oligonucleotide
  Target: COL7A1; (+) strand; PAM type: NRG; PAM sequence: CAG
ctagagaaaagggtcaaggg

SEQ ID NO: 18210 - DNA, 20 bp, Artificial Sequence
  Description of Artificial Sequence: Synthetic oligonucleotide
  Target: COL7A1; (+) strand; PAM type: NRG; PAM sequence: AGG
tagagaaaagggtcaagggc

SEQ ID NO: 18211 - DNA, 20 bp, Artificial Sequence
  Description of Artificial Sequence: Synthetic oligonucleotide
  Target: COL7A1; (+) strand; PAM type: NRG; PAM sequence: GGG
agagaaaagggtcaagggca

SEQ ID NO: 18212 - DNA, 20 bp, Artificial Sequence
  Description of Artificial Sequence: Synthetic oligonucleotide
  Target: COL7A1; (+) strand; PAM type: NRG; PAM sequence: CAG
aaagggtcaagggcagggaa

SEQ ID NO: 18213 - DNA, 20 bp, Artificial Sequence
  Description of Artificial Sequence: Synthetic oligonucleotide
  Target: COL7A1; (+) strand; PAM type: NRG; PAM sequence: AGG
aagggtcaagggcagggaac

SEQ ID NO: 18214 - DNA, 20 bp, Artificial Sequence
  Description of Artificial Sequence: Synthetic oligonucleotide
  Target: COL7A1; (+) strand; PAM type: NRG; PAM sequence: GGG
agggtcaagggcagggaaca

SEQ ID NO: 18215 - DNA, 20 bp, Artificial Sequence
  Description of Artificial Sequence: Synthetic oligonucleotide
  Target: COL7A1; (+) strand; PAM type: NRG; PAM sequence: CAG
caagggcagggaacagggct

SEQ ID NO: 18216 - DNA, 20 bp, Artificial Sequence
  Description of Artificial Sequence: Synthetic oligonucleotide
  Target: COL7A1; (+) strand; PAM type: NRG; PAM sequence: AGG
aagggcagggaacagggctc

SEQ ID NO: 18217 - DNA, 20 bp, Artificial Sequence
  Description of Artificial Sequence: Synthetic oligonucleotide
  Target: COL7A1; (+) strand; PAM type: NRG; PAM sequence: GGG
agggcagggaacagggctca

SEQ ID NO: 18218 - DNA, 20 bp, Artificial Sequence
  Description of Artificial Sequence: Synthetic oligonucleotide
  Target: COL7A1; (+) strand; PAM type: NRG; PAM sequence: CAG
acagggctcagggattaaca

SEQ ID NO: 18219 - DNA, 20 bp, Artificial Sequence
  Description of Artificial Sequence: Synthetic oligonucleotide
  Target: COL7A1; (+) strand; PAM type: NRG; PAM sequence: GAG
agggctcagggattaacaca

SEQ ID NO: 18220 - DNA, 20 bp, Artificial Sequence
  Description of Artificial Sequence: Synthetic oligonucleotide
  Target: COL7A1; (+) strand; PAM type: NRG; PAM sequence: AAG
gctcagggattaacacagag

SEQ ID NO: 18221 - DNA, 20 bp, Artificial Sequence
  Description of Artificial Sequence: Synthetic oligonucleotide
  Target: COL7A1; (+) strand; PAM type: NRG; PAM sequence: AGG
ctcagggattaacacagaga

SEQ ID NO: 18222 - DNA, 20 bp, Artificial Sequence
  Description of Artificial Sequence: Synthetic oligonucleotide
  Target: COL7A1; (+) strand; PAM type: NRG; PAM sequence: TGG
ggattaacacagagaaggcc

SEQ ID NO: 18223 - DNA, 20 bp, Artificial Sequence
  Description of Artificial Sequence: Synthetic oligonucleotide
  Target: COL7A1; (+) strand; PAM type: NRG; PAM sequence: CAG
acagagaaggcctggctcat

SEQ ID NO: 18224 - DNA, 20 bp, Artificial Sequence
  Description of Artificial Sequence: Synthetic oligonucleotide
  Target: COL7A1; (+) strand; PAM type: NRG; PAM sequence: TGG
aaggcctggctcatcagctg

SEQ ID NO: 18225 - DNA, 20 bp, Artificial Sequence
  Description of Artificial Sequence: Synthetic oligonucleotide
  Target: COL7A1; (+) strand; PAM type: NRG; PAM sequence: CAG
gctgtggccaatgcctatcc

SEQ ID NO: 18226 - DNA, 20 bp, Artificial Sequence
  Description of Artificial Sequence: Synthetic oligonucleotide
  Target: COL7A1; (+) strand; PAM type: NRG; PAM sequence: CAG
aatgcctatcccagcccttc

SEQ ID NO: 18227 - DNA, 20 bp, Artificial Sequence
  Description of Artificial Sequence: Synthetic oligonucleotide
  Target: COL7A1; (+) strand; PAM type: NRG; PAM sequence: CAG
cagcccttccagaccctcac

SEQ ID NO: 18228 - DNA, 20 bp, Artificial Sequence
  Description of Artificial Sequence: Synthetic oligonucleotide
  Target: COL7A1; (+) strand; PAM type: NRG; PAM sequence: AGG
agcccttccagaccctcacc

SEQ ID NO: 18229 - DNA, 20 bp, Artificial Sequence
  Description of Artificial Sequence: Synthetic oligonucleotide
  Target: COL7A1; (+) strand; PAM type: NRG; PAM sequence: CAG
ccttccagaccctcaccagg

SEQ ID NO: 18230 - DNA, 20 bp, Artificial Sequence
  Description of Artificial Sequence: Synthetic oligonucleotide
  Target: COL7A1; (+) strand; PAM type: NRG; PAM sequence: TGG
cctcaccaggcagtgttccc

SEQ ID NO: 18231 - DNA, 20 bp, Artificial Sequence
  Description of Artificial Sequence: Synthetic oligonucleotide
  Target: COL7A1; (+) strand; PAM type: NRG; PAM sequence: CGG
agtgttccctggtcactcac

SEQ ID NO: 18232 - DNA, 20 bp, Artificial Sequence
  Description of Artificial Sequence: Synthetic oligonucleotide
  Target: COL7A1; (+) strand; PAM type: NRG; PAM sequence: GGG
gtgttccctggtcactcacc

SEQ ID NO: 18233 - DNA, 20 bp, Artificial Sequence
  Description of Artificial Sequence: Synthetic oligonucleotide
  Target: COL7A1; (+) strand; PAM type: NRG; PAM sequence: GGG
tgttccctggtcactcaccg

SEQ ID NO: 18234 - DNA, 20 bp, Artificial Sequence
  Description of Artificial Sequence: Synthetic oligonucleotide
  Target: COL7A1; (+) strand; PAM type: NRG; PAM sequence: CAG
ctggtcactcaccggggcac

SEQ ID NO: 18235 - DNA, 20 bp, Artificial Sequence
  Description of Artificial Sequence: Synthetic oligonucleotide
  Target: COL7A1; (+) strand; PAM type: NRG; PAM sequence: AGG
tggtcactcaccggggcacc

SEQ ID NO: 18236 - DNA, 20 bp, Artificial Sequence
  Description of Artificial Sequence: Synthetic oligonucleotide
  Target: COL7A1; (+) strand; PAM type: NRG; PAM sequence: TGG
tcactcaccggggcaccagg

SEQ ID NO: 18237 - DNA, 20 bp, Artificial Sequence
  Description of Artificial Sequence: Synthetic oligonucleotide
  Target: COL7A1; (+) strand; PAM type: NRG; PAM sequence: CAG
caccggggcaccaggtggtc

SEQ ID NO: 18238 - DNA, 20 bp, Artificial Sequence
  Description of Artificial Sequence: Synthetic oligonucleotide
  Target: COL7A1; (+) strand; PAM type: NRG; PAM sequence: AGG
accggggcaccaggtggtcc

SEQ ID NO: 18239 - DNA, 20 bp, Artificial Sequence
  Description of Artificial Sequence: Synthetic oligonucleotide
  Target: COL7A1; (+) strand; PAM type: NRG; PAM sequence: GGG
ccggggcaccaggtggtcca

SEQ ID NO: 18240 - DNA, 20 bp, Artificial Sequence
  Description of Artificial Sequence: Synthetic oligonucleotide
  Target: COL7A1; (+) strand; PAM type: NRG; PAM sequence: TGG
tctccatgaccaccctgttg

SEQ ID NO: 18241 - DNA, 20 bp, Artificial Sequence
  Description of Artificial Sequence: Synthetic oligonucleotide
  Target: COL7A1; (+) strand; PAM type: NRG; PAM sequence: AAG
accaccctgttgtggcgaaa

SEQ ID NO: 18242 - DNA, 20 bp, Artificial Sequence
  Description of Artificial Sequence: Synthetic oligonucleotide
  Target: COL7A1; (+) strand; PAM type: NRG; PAM sequence: GAG
caccctgttgtggcgaaaaa

SEQ ID NO: 18243 - DNA, 20 bp, Artificial Sequence
  Description of Artificial Sequence: Synthetic oligonucleotide
  Target: COL7A1; (+) strand; PAM type: NRG; PAM sequence: GAG
gtggcgaaaaagagtctgat

SEQ ID NO: 18244 - DNA, 20 bp, Artificial Sequence
  Description of Artificial Sequence: Synthetic oligonucleotide
  Target: COL7A1; (+) strand; PAM type: NRG; PAM sequence: AGG
tggcgaaaaagagtctgatg

SEQ ID NO: 18245 - DNA, 20 bp, Artificial Sequence
  Description of Artificial Sequence: Synthetic oligonucleotide
  Target: COL7A1; (+) strand; PAM type: NRG; PAM sequence: GGG
ggcgaaaaagagtctgatga

SEQ ID NO: 18246 - DNA, 20 bp, Artificial Sequence
  Description of Artificial Sequence: Synthetic oligonucleotide
  Target: COL7A1; (+) strand; PAM type: NRG; PAM sequence: GGG
gcgaaaaagagtctgatgag

SEQ ID NO: 18247 - DNA, 20 bp, Artificial Sequence
  Description of Artificial Sequence: Synthetic oligonucleotide
  Target: COL7A1; (+) strand; PAM type: NRG; PAM sequence: GGG
cgaaaaagagtctgatgagg

SEQ ID NO: 18248 - DNA, 20 bp, Artificial Sequence
  Description of Artificial Sequence: Synthetic oligonucleotide
  Target: COL7A1; (+) strand; PAM type: NRG; PAM sequence: GAG
aaaaagagtctgatgagggg

SEQ ID NO: 18249 - DNA, 20 bp, Artificial Sequence
  Description of Artificial Sequence: Synthetic oligonucleotide
  Target: COL7A1; (+) strand; PAM type: NRG; PAM sequence: TAG
agagtctgatgagggggagt

SEQ ID NO: 18250 - DNA, 20 bp, Artificial Sequence
  Description of Artificial Sequence: Synthetic oligonucleotide
  Target: COL7A1; (+) strand; PAM type: NRG; PAM sequence: AAG
ggagttagccgcaccccacc

SEQ ID NO: 18251 - DNA, 20 bp, Artificial Sequence
  Description of Artificial Sequence: Synthetic oligonucleotide
  Target: COL7A1; (+) strand; PAM type: NRG; PAM sequence: AGG
gagttagccgcaccccacca

SEQ ID NO: 18252 - DNA, 20 bp, Artificial Sequence
  Description of Artificial Sequence: Synthetic oligonucleotide
  Target: COL7A1; (+) strand; PAM type: NRG; PAM sequence: GAG
cgcaccccaccaaggaaact

SEQ ID NO: 18253 - DNA, 20 bp, Artificial Sequence
  Description of Artificial Sequence: Synthetic oligonucleotide
  Target: COL7A1; (+) strand; PAM type: NRG; PAM sequence: AGG
gcaccccaccaaggaaactg

SEQ ID NO: 18254 - DNA, 20 bp, Artificial Sequence
  Description of Artificial Sequence: Synthetic oligonucleotide
  Target: COL7A1; (+) strand; PAM type: NRG; PAM sequence: CAG
ccccaccaaggaaactgagg

SEQ ID NO: 18255 - DNA, 20 bp, Artificial Sequence
  Description of Artificial Sequence: Synthetic oligonucleotide
  Target: COL7A1; (+) strand; PAM type: NRG; PAM sequence: TGG
caaggaaactgaggcagtac

SEQ ID NO: 18256 - DNA, 20 bp, Artificial Sequence
  Description of Artificial Sequence: Synthetic oligonucleotide
  Target: COL7A1; (+) strand; PAM type: NRG; PAM sequence: TGG
actgaggcagtactggtcac

SEQ ID NO: 18257 - DNA, 20 bp, Artificial Sequence
  Description of Artificial Sequence: Synthetic oligonucleotide
  Target: COL7A1; (+) strand; PAM type: NRG; PAM sequence: GGG
ctgaggcagtactggtcact

SEQ ID NO: 18258 - DNA, 20 bp, Artificial Sequence
  Description of Artificial Sequence: Synthetic oligonucleotide
  Target: COL7A1; (+) strand; PAM type: NRG; PAM sequence: GGG
tgaggcagtactggtcactg

SEQ ID NO: 18259 - DNA, 20 bp, Artificial Sequence
  Description of Artificial Sequence: Synthetic oligonucleotide
  Target: COL7A1; (+) strand; PAM type: NRG; PAM sequence: CAG
ggcagtactggtcactgggg

SEQ ID NO: 18260 - DNA, 20 bp, Artificial Sequence
  Description of Artificial Sequence: Synthetic oligonucleotide
  Target: COL7A1; (+) strand; PAM type: NRG; PAM sequence: AGG
gcagtactggtcactggggc

SEQ ID NO: 18261 - DNA, 20 bp, Artificial Sequence
  Description of Artificial Sequence: Synthetic oligonucleotide
  Target: COL7A1; (+) strand; PAM type: NRG; PAM sequence: GGG
cagtactggtcactggggca

SEQ ID NO: 18262 - DNA, 20 bp, Artificial Sequence
  Description of Artificial Sequence: Synthetic oligonucleotide
  Target: COL7A1; (+) strand; PAM type: NRG; PAM sequence: CAG
ctggtcactggggcagggca

SEQ ID NO: 18263 - DNA, 20 bp, Artificial Sequence
  Description of Artificial Sequence: Synthetic oligonucleotide
  Target: COL7A1; (+) strand; PAM type: NRG; PAM sequence: AGG
tggtcactggggcagggcac

SEQ ID NO: 18264 - DNA, 20 bp, Artificial Sequence
  Description of Artificial Sequence: Synthetic oligonucleotide
  Target: COL7A1; (+) strand; PAM type: NRG; PAM sequence: TGG
cactggggcagggcacagga

SEQ ID NO: 18265 - DNA, 20 bp, Artificial Sequence
  Description of Artificial Sequence: Synthetic oligonucleotide
  Target: COL7A1; (+) strand; PAM type: NRG; PAM sequence: GGG
actggggcagggcacaggat

SEQ ID NO: 18266 - DNA, 20 bp, Artificial Sequence
  Description of Artificial Sequence: Synthetic oligonucleotide
  Target: COL7A1; (+) strand; PAM type: NRG; PAM sequence: GGG
ctggggcagggcacaggatg

SEQ ID NO: 18267 - DNA, 20 bp, Artificial Sequence
  Description of Artificial Sequence: Synthetic oligonucleotide
  Target: COL7A1; (+) strand; PAM type: NRG; PAM sequence: GGG
tggggcagggcacaggatgg

SEQ ID NO: 18268 - DNA, 20 bp, Artificial Sequence
  Description of Artificial Sequence: Synthetic oligonucleotide
  Target: COL7A1; (+) strand; PAM type: NRG; PAM sequence: AAG
gcagggcacaggatgggggc

SEQ ID NO: 18269 - DNA, 20 bp, Artificial Sequence
  Description of Artificial Sequence: Synthetic oligonucleotide
  Target: COL7A1; (+) strand; PAM type: NRG; PAM sequence: CAG
ggcacaggatgggggcaaga

SEQ ID NO: 18270 - DNA, 20 bp, Artificial Sequence
  Description of Artificial Sequence: Synthetic oligonucleotide
  Target: COL7A1; (+) strand; PAM type: NRG; PAM sequence: AGG
gcacaggatgggggcaagac

SEQ ID NO: 18271 - DNA, 20 bp, Artificial Sequence
  Description of Artificial Sequence: Synthetic oligonucleotide
  Target: COL7A1; (+) strand; PAM type: NRG; PAM sequence: AAG
ggatgggggcaagacaggtg

SEQ ID NO: 18272 - DNA, 20 bp, Artificial Sequence
  Description of Artificial Sequence: Synthetic oligonucleotide
  Target: COL7A1; (+) strand; PAM type: NRG; PAM sequence: AGG
gatgggggcaagacaggtga

SEQ ID NO: 18273 - DNA, 20 bp, Artificial Sequence
  Description of Artificial Sequence: Synthetic oligonucleotide
  Target: COL7A1; (+) strand; PAM type: NRG; PAM sequence: TGG
gcaagacaggtgaaggttct

SEQ ID NO: 18274 - DNA, 20 bp, Artificial Sequence
  Description of Artificial Sequence: Synthetic oligonucleotide
  Target: COL7A1; (+) strand; PAM type: NRG; PAM sequence: GGG
caagacaggtgaaggttctt

SEQ ID NO: 18275 - DNA, 20 bp, Artificial Sequence
  Description of Artificial Sequence: Synthetic oligonucleotide
  Target: COL7A1; (+) strand; PAM type: NRG; PAM sequence: TGG
ggttcttgggtactcaccac

SEQ ID NO: 18276 - DNA, 20 bp, Artificial Sequence
  Description of Artificial Sequence: Synthetic oligonucleotide
  Target: COL7A1; (+) strand; PAM type: NRG; PAM sequence: GGG
gttcttgggtactcaccact

SEQ ID NO: 18277 - DNA, 20 bp, Artificial Sequence
  Description of Artificial Sequence: Synthetic oligonucleotide
  Target: COL7A1; (+) strand; PAM type: NRG; PAM sequence: CAG
ttgggtactcaccactgggc

SEQ ID NO: 18278 - DNA, 20 bp, Artificial Sequence
  Description of Artificial Sequence: Synthetic oligonucleotide
  Target: COL7A1; (+) strand; PAM type: NRG; PAM sequence: AGG
tgggtactcaccactgggcc

SEQ ID NO: 18279 - DNA, 20 bp, Artificial Sequence
  Description of Artificial Sequence: Synthetic oligonucleotide
  Target: COL7A1; (+) strand; PAM type: NRG; PAM sequence: GGG
gggtactcaccactgggcca

SEQ ID NO: 18280 - DNA, 20 bp, Artificial Sequence
  Description of Artificial Sequence: Synthetic oligonucleotide
  Target: COL7A1; (+) strand; PAM type: NRG; PAM sequence: GGG
ggtactcaccactgggccag

SEQ ID NO: 18281 - DNA, 20 bp, Artificial Sequence
  Description of Artificial Sequence: Synthetic oligonucleotide
  Target: COL7A1; (+) strand; PAM type: NRG; PAM sequence: GGG
gtactcaccactgggccagg

SEQ ID NO: 18282 - DNA, 20 bp, Artificial Sequence
  Description of Artificial Sequence: Synthetic oligonucleotide
  Target: COL7A1; (+) strand; PAM type: NRG; PAM sequence: GGG
tactcaccactgggccaggg

SEQ ID NO: 18283 - DNA, 20 bp, Artificial Sequence
  Description of Artificial Sequence: Synthetic oligonucleotide
  Target: COL7A1; (+) strand; PAM type: NRG; PAM sequence: TGG
actgggccaggggggcctct

SEQ ID NO: 18284 - DNA, 20 bp, Artificial Sequence
  Description of Artificial Sequence: Synthetic oligonucleotide
  Target: COL7A1; (+) strand; PAM type: NRG; PAM sequence: CAG
ggggggcctcttggaccctg

SEQ ID NO: 18285 - DNA, 20 bp, Artificial Sequence
  Description of Artificial Sequence: Synthetic oligonucleotide
  Target: COL7A1; (+) strand; PAM type: NRG; PAM sequence: TAG
tggaccctgcagaccctaca

SEQ ID NO: 18286 - DNA, 20 bp, Artificial Sequence
  Description of Artificial Sequence: Synthetic oligonucleotide
  Target: COL7A1; (+) strand; PAM type: NRG; PAM sequence: GAG
gaccctgcagaccctacata

SEQ ID NO: 18287 - DNA, 20 bp, Artificial Sequence
  Description of Artificial Sequence: Synthetic oligonucleotide
  Target: COL7A1; (+) strand; PAM type: NRG; PAM sequence: GAG
ccctgcagaccctacataga

SEQ ID NO: 18288 - DNA, 20 bp, Artificial Sequence
  Description of Artificial Sequence: Synthetic oligonucleotide
  Target: COL7A1; (+) strand; PAM type: NRG; PAM sequence: AGG
cctgcagaccctacatagag

SEQ ID NO: 18289 - DNA, 20 bp, Artificial Sequence
  Description of Artificial Sequence: Synthetic oligonucleotide
  Target: COL7A1; (+) strand; PAM type: NRG; PAM sequence: GGG
ctgcagaccctacatagaga

SEQ ID NO: 18290 - DNA, 20 bp, Artificial Sequence
  Description of Artificial Sequence: Synthetic oligonucleotide
  Target: COL7A1; (+) strand; PAM type: NRG; PAM sequence: GAG
tacatagagagggcactgat

SEQ ID NO: 18291 - DNA, 20 bp, Artificial Sequence
  Description of Artificial Sequence: Synthetic oligonucleotide
  Target: COL7A1; (+) strand; PAM type: NRG; PAM sequence: TGG
ggcactgatgagcctcaatc

SEQ ID NO: 18292 - DNA, 20 bp, Artificial Sequence
  Description of Artificial Sequence: Synthetic oligonucleotide
  Target: COL7A1; (+) strand; PAM type: NRG; PAM sequence: GGG
gcactgatgagcctcaatct

SEQ ID NO: 18293 - DNA, 20 bp, Artificial Sequence
  Description of Artificial Sequence: Synthetic oligonucleotide
  Target: COL7A1; (+) strand; PAM type: NRG; PAM sequence: TGG
gcctcaatctgggcctcact

SEQ ID NO: 18294 - DNA, 20 bp, Artificial Sequence
  Description of Artificial Sequence: Synthetic oligonucleotide
  Target: COL7A1; (+) strand; PAM type: NRG; PAM sequence: GGG
cctcaatctgggcctcactt

SEQ ID NO: 18295 - DNA, 20 bp, Artificial Sequence
  Description of Artificial Sequence: Synthetic oligonucleotide
  Target: COL7A1; (+) strand; PAM type: NRG; PAM sequence: TGG
ttgggcctgttcccaacctc

SEQ ID NO: 18296 - DNA, 20 bp, Artificial Sequence
  Description of Artificial Sequence: Synthetic oligonucleotide
  Target: COL7A1; (+) strand; PAM type: NRG; PAM sequence: GGG
tgggcctgttcccaacctct

SEQ ID NO: 18297 - DNA, 20 bp, Artificial Sequence
  Description of Artificial Sequence: Synthetic oligonucleotide
  Target: COL7A1; (+) strand; PAM type: NRG; PAM sequence: GGG
gggcctgttcccaacctctg

SEQ ID NO: 18298 - DNA, 20 bp, Artificial Sequence
  Description of Artificial Sequence: Synthetic oligonucleotide
  Target: COL7A1; (+) strand; PAM type: NRG; PAM sequence: GGG
ggcctgttcccaacctctgg

SEQ ID NO: 18299 - DNA, 20 bp, Artificial Sequence
  Description of Artificial Sequence: Synthetic oligonucleotide
  Target: COL7A1; (+) strand; PAM type: NRG; PAM sequence: TGG
acctctgggggctttttcct

SEQ ID NO: 18300 - DNA, 20 bp, Artificial Sequence
  Description of Artificial Sequence: Synthetic oligonucleotide
  Target: COL7A1; (+) strand; PAM type: NRG; PAM sequence: GGG
cctctgggggctttttcctt

SEQ ID NO: 18301 - DNA, 20 bp, Artificial Sequence
  Description of Artificial Sequence: Synthetic oligonucleotide
  Target: COL7A1; (+) strand; PAM type: NRG; PAM sequence: GGG
ctctgggggctttttccttg

SEQ ID NO: 18302 - DNA, 20 bp, Artificial Sequence
  Description of Artificial Sequence: Synthetic oligonucleotide
  Target: COL7A1; (+) strand; PAM type: NRG; PAM sequence: GGG
tctgggggctttttccttgg

SEQ ID NO: 18303 - DNA, 20 bp, Artificial Sequence
  Description of Artificial Sequence: Synthetic oligonucleotide
  Target: COL7A1; (+) strand; PAM type: NRG; PAM sequence: CAG
tttccatacctcaccctttc

SEQ ID NO: 18304 - DNA, 20 bp, Artificial Sequence
  Description of Artificial Sequence: Synthetic oligonucleotide
  Target: COL7A1; (+) strand; PAM type: NRG; PAM sequence: CAG
tacctcaccctttccagtca

SEQ ID NO: 18305 - DNA, 20 bp, Artificial Sequence
  Description of Artificial Sequence: Synthetic oligonucleotide
  Target: COL7A1; (+) strand; PAM type: NRG; PAM sequence: TGG
tcacagataatacctaccca

SEQ ID NO: 18306 - DNA, 20 bp, Artificial Sequence
  Description of Artificial Sequence: Synthetic oligonucleotide
  Target: COL7A1; (+) strand; PAM type: NRG; PAM sequence: TAG
tacccatggactgcctctca

SEQ ID NO: 18307 - DNA, 20 bp, Artificial Sequence
  Description of Artificial Sequence: Synthetic oligonucleotide
  Target: COL7A1; (+) strand; PAM type: NRG; PAM sequence: TAG
catggactgcctctcataga

SEQ ID NO: 18308 - DNA, 20 bp, Artificial Sequence
  Description of Artificial Sequence: Synthetic oligonucleotide
  Target: COL7A1; (+) strand; PAM type: NRG; PAM sequence: CGG
cctctcatagatagcacaca

SEQ ID NO: 18309 - DNA, 20 bp, Artificial Sequence
  Description of Artificial Sequence: Synthetic oligonucleotide
  Target: COL7A1; (+) strand; PAM type: NRG; PAM sequence: GGG
ctctcatagatagcacacac

SEQ ID NO: 18310 - DNA, 20 bp, Artificial Sequence
  Description of Artificial Sequence: Synthetic oligonucleotide
  Target: COL7A1; (+) strand; PAM type: NRG; PAM sequence: CAG
catccacatacaaccacaca

SEQ ID NO: 18311 - DNA, 20 bp, Artificial Sequence
  Description of Artificial Sequence: Synthetic oligonucleotide
  Target: COL7A1; (+) strand; PAM type: NRG; PAM sequence: CAG
catacaaccacacacagaca

SEQ ID NO: 18312 - DNA, 20 bp, Artificial Sequence
  Description of Artificial Sequence: Synthetic oligonucleotide
  Target: COL7A1; (+) strand; PAM type: NRG; PAM sequence: AGG
atacaaccacacacagacac

SEQ ID NO: 18313 - DNA, 20 bp, Artificial Sequence
  Description of Artificial Sequence: Synthetic oligonucleotide
  Target: COL7A1; (+) strand; PAM type: NRG; PAM sequence: CAG
cacacagacacaggcacaca

SEQ ID NO: 18314 - DNA, 20 bp, Artificial Sequence
  Description of Artificial Sequence: Synthetic oligonucleotide
  Target: COL7A1; (+) strand; PAM type: NRG; PAM sequence: AGG
acacagacacaggcacacac

SEQ ID NO: 18315 - DNA, 20 bp, Artificial Sequence
  Description of Artificial Sequence: Synthetic oligonucleotide
  Target: COL7A1; (+) strand; PAM type: NRG; PAM sequence: CAG
caggcacacacaggcacaca

SEQ ID NO: 18316 - DNA, 20 bp, Artificial Sequence
  Description of Artificial Sequence: Synthetic oligonucleotide
  Target: COL7A1; (+) strand; PAM type: NRG; PAM sequence: CAG
cacacaggcacacacagaca

SEQ ID NO: 18317 - DNA, 20 bp, Artificial Sequence
  Description of Artificial Sequence: Synthetic oligonucleotide
  Target: COL7A1; (+) strand; PAM type: NRG; PAM sequence: AGG
acacaggcacacacagacac

SEQ ID NO: 18318 - DNA, 20 bp, Artificial Sequence
  Description of Artificial Sequence: Synthetic oligonucleotide
  Target: COL7A1; (+) strand; PAM type: NRG; PAM sequence: AAG
acacagacacaggcacacac

SEQ ID NO: 18319 - DNA, 20 bp, Artificial Sequence
  Description of Artificial Sequence: Synthetic oligonucleotide
  Target: COL7A1; (+) strand; PAM type: NRG; PAM sequence: CAG
cagacacaggcacacacaag

SEQ ID NO: 18320 - DNA, 20 bp, Artificial Sequence
  Description of Artificial Sequence: Synthetic oligonucleotide
  Target: COL7A1; (+) strand; PAM type: NRG; PAM sequence: AGG
agacacaggcacacacaagc

SEQ ID NO: 18321 - DNA, 20 bp, Artificial Sequence
  Description of Artificial Sequence: Synthetic oligonucleotide
  Target: COL7A1; (+) strand; PAM type: NRG; PAM sequence: CAG
cacacacaagcaggcacaca

SEQ ID NO: 18322 - DNA, 20 bp, Artificial Sequence
  Description of Artificial Sequence: Synthetic oligonucleotide
  Target: COL7A1; (+) strand; PAM type: NRG; PAM sequence: GAG
cacacaagcaggcacacaca

SEQ ID NO: 18323 - DNA, 20 bp, Artificial Sequence
  Description of Artificial Sequence: Synthetic oligonucleotide
  Target: COL7A1; (+) strand; PAM type: NRG; PAM sequence: GAG
cacaagcaggcacacacaga

SEQ ID NO: 18324 - DNA, 20 bp, Artificial Sequence
  Description of Artificial Sequence: Synthetic oligonucleotide
  Target: COL7A1; (+) strand; PAM type: NRG; PAM sequence: AGG
acaagcaggcacacacagag

SEQ ID NO: 18325 - DNA, 20 bp, Artificial Sequence
  Description of Artificial Sequence: Synthetic oligonucleotide
  Target: COL7A1; (+) strand; PAM type: NRG; PAM sequence: CAG
ggcacacacagagaggcaca

SEQ ID NO: 18326 - DNA, 20 bp, Artificial Sequence
  Description of Artificial Sequence: Synthetic oligonucleotide
  Target: COL7A1; (+) strand; PAM type: NRG; PAM sequence: CAG
cacagagaggcacacagaca

SEQ ID NO: 18327 - DNA, 20 bp, Artificial Sequence
  Description of Artificial Sequence: Synthetic oligonucleotide
  Target: COL7A1; (+) strand; PAM type: NRG; PAM sequence: AGG
acagagaggcacacagacac

SEQ ID NO: 18328 - DNA, 20 bp, Artificial Sequence
  Description of Artificial Sequence: Synthetic oligonucleotide
  Target: COL7A1; (+) strand; PAM type: NRG; PAM sequence: CAG
tacacacaaacacacacaca

SEQ ID NO: 18329 - DNA, 20 bp, Artificial Sequence
  Description of Artificial Sequence: Synthetic oligonucleotide
  Target: COL7A1; (+) strand; PAM type: NRG; PAM sequence: CAG
cacacagacatgcacacaca

SEQ ID NO: 18330 - DNA, 20 bp, Artificial Sequence
  Description of Artificial Sequence: Synthetic oligonucleotide
  Target: COL7A1; (+) strand; PAM type: NRG; PAM sequence: CAG
acagacatgcacacacacag

SEQ ID NO: 18331 - DNA, 20 bp, Artificial Sequence
  Description of Artificial Sequence: Synthetic oligonucleotide
  Target: COL7A1; (+) strand; PAM type: NRG; PAM sequence: CAG
gacatgcacacacacagcag

SEQ ID NO: 18332 - DNA, 20 bp, Artificial Sequence
  Description of Artificial Sequence: Synthetic oligonucleotide
  Target: COL7A1; (+) strand; PAM type: NRG; PAM sequence: CAG
atgcacacacacagcagcag

SEQ ID NO: 18333 - DNA, 20 bp, Artificial Sequence
  Description of Artificial Sequence: Synthetic oligonucleotide
  Target: COL7A1; (+) strand; PAM type: NRG; PAM sequence: TAG
cacacagcagcagcagcacc

SEQ ID NO: 18334 - DNA, 20 bp, Artificial Sequence
  Description of Artificial Sequence: Synthetic oligonucleotide
  Target: COL7A1; (+) strand; PAM type: NRG; PAM sequence: CGG
acagcagcagcagcacctag

SEQ ID NO: 18335 - DNA, 20 bp, Artificial Sequence
  Description of Artificial Sequence: Synthetic oligonucleotide
  Target: COL7A1; (+) strand; PAM type: NRG; PAM sequence: GAG
agcagcagcagcacctagcg

SEQ ID NO: 18336 - DNA, 20 bp, Artificial Sequence
  Description of Artificial Sequence: Synthetic oligonucleotide
  Target: COL7A1; (+) strand; PAM type: NRG; PAM sequence: AGG
gcagcagcagcacctagcgg

SEQ ID NO: 18337 - DNA, 20 bp, Artificial Sequence
  Description of Artificial Sequence: Synthetic oligonucleotide
  Target: COL7A1; (+) strand; PAM type: NRG; PAM sequence: GGG
cagcagcagcacctagcgga

SEQ ID NO: 18338 - DNA, 20 bp, Artificial Sequence
  Description of Artificial Sequence: Synthetic oligonucleotide
  Target: COL7A1; (+) strand; PAM type: NRG; PAM sequence: CGG
gcagcacctagcggagggtc

SEQ ID NO: 18339 - DNA, 20 bp, Artificial Sequence
  Description of Artificial Sequence: Synthetic oligonucleotide
  Target: COL7A1; (+) strand; PAM type: NRG; PAM sequence: GAG
agcacctagcggagggtccg

SEQ ID NO: 18340 - DNA, 20 bp, Artificial Sequence
  Description of Artificial Sequence: Synthetic oligonucleotide
  Target: COL7A1; (+) strand; PAM type: NRG; PAM sequence: TGG
ctagcggagggtccggagcc

SEQ ID NO: 18341 - DNA, 20 bp, Artificial Sequence
  Description of Artificial Sequence: Synthetic oligonucleotide
  Target: COL7A1; (+) strand; PAM type: NRG; PAM sequence: GGG
tagcggagggtccggagcct

SEQ ID NO: 18342 - DNA, 20 bp, Artificial Sequence
  Description of Artificial Sequence: Synthetic oligonucleotide
  Target: COL7A1; (+) strand; PAM type: NRG; PAM sequence: GGG
agcggagggtccggagcctg

SEQ ID NO: 18343 - DNA, 20 bp, Artificial Sequence
  Description of Artificial Sequence: Synthetic oligonucleotide
  Target: COL7A1; (+) strand; PAM type: NRG; PAM sequence: CAG
gagggtccggagcctggggc

SEQ ID NO: 18344 - DNA, 20 bp, Artificial Sequence
  Description of Artificial Sequence: Synthetic oligonucleotide
  Target: COL7A1; (+) strand; PAM type: NRG; PAM sequence: AGG
agggtccggagcctggggcc

SEQ ID NO: 18345 - DNA, 20 bp, Artificial Sequence
  Description of Artificial Sequence: Synthetic oligonucleotide
  Target: COL7A1; (+) strand; PAM type: NRG; PAM sequence: CAG
gagcctggggccaggtgctt

SEQ ID NO: 18346 - DNA, 20 bp, Artificial Sequence
  Description of Artificial Sequence: Synthetic oligonucleotide
  Target: COL7A1; (+) strand; PAM type: NRG; PAM sequence: CGG
gtgcttcagccaccactcac

SEQ ID NO: 18347 - DNA, 20 bp, Artificial Sequence
  Description of Artificial Sequence: Synthetic oligonucleotide
  Target: COL7A1; (+) strand; PAM type: NRG; PAM sequence: CAG
accactcaccggcttccctt

SEQ ID NO: 18348 - DNA, 20 bp, Artificial Sequence
  Description of Artificial Sequence: Synthetic oligonucleotide
  Target: COL7A1; (+) strand; PAM type: NRG; PAM sequence: AGG
ccactcaccggcttcccttc

SEQ ID NO: 18349 - DNA, 20 bp, Artificial Sequence
  Description of Artificial Sequence: Synthetic oligonucleotide
  Target: COL7A1; (+) strand; PAM type: NRG; PAM sequence: CAG
caccggcttcccttcaggcc

SEQ ID NO: 18350 - DNA, 20 bp, Artificial Sequence
  Description of Artificial Sequence: Synthetic oligonucleotide
  Target: COL7A1; (+) strand; PAM type: NRG; PAM sequence: TGG
ccagccataccacgctctcc

SEQ ID NO: 18351 - DNA, 20 bp, Artificial Sequence
  Description of Artificial Sequence: Synthetic oligonucleotide
  Target: COL7A1; (+) strand; PAM type: NRG; PAM sequence: TAG
gccataccacgctctcctgg

SEQ ID NO: 18352 - DNA, 20 bp, Artificial Sequence
  Description of Artificial Sequence: Synthetic oligonucleotide
  Target: COL7A1; (+) strand; PAM type: NRG; PAM sequence: CAG
cgctctcctggtagaccctg

SEQ ID NO: 18353 - DNA, 20 bp, Artificial Sequence
  Description of Artificial Sequence: Synthetic oligonucleotide
  Target: COL7A1; (+) strand; PAM type: NRG; PAM sequence: GAG
ctctcctggtagaccctgca

SEQ ID NO: 18354 - DNA, 20 bp, Artificial Sequence
  Description of Artificial Sequence: Synthetic oligonucleotide
  Target: COL7A1; (+) strand; PAM type: NRG; PAM sequence: TAG
ctggtagaccctgcagagaa

SEQ ID NO: 18355 - DNA, 20 bp, Artificial Sequence
  Description of Artificial Sequence: Synthetic oligonucleotide
  Target: COL7A1; (+) strand; PAM type: NRG; PAM sequence: AGG
tggtagaccctgcagagaat

SEQ ID NO: 18356 - DNA, 20 bp, Artificial Sequence
  Description of Artificial Sequence: Synthetic oligonucleotide
  Target: COL7A1; (+) strand; PAM type: NRG; PAM sequence: AAG
accctgcagagaataggttt

SEQ ID NO: 18357 - DNA, 20 bp, Artificial Sequence
  Description of Artificial Sequence: Synthetic oligonucleotide
  Target: COL7A1; (+) strand; PAM type: NRG; PAM sequence: AGG
ccctgcagagaataggttta

SEQ ID NO: 18358 - DNA, 20 bp, Artificial Sequence
  Description of Artificial Sequence: Synthetic oligonucleotide
  Target: COL7A1; (+) strand; PAM type: NRG; PAM sequence: TAG
agagaataggtttaaggcct

SEQ ID NO: 18359 - DNA, 20 bp, Artificial Sequence
  Description of Artificial Sequence: Synthetic oligonucleotide
  Target: COL7A1; (+) strand; PAM type: NRG; PAM sequence: CAG
ggtttaaggccttagtttcc

SEQ ID NO: 18360 - DNA, 20 bp, Artificial Sequence
  Description of Artificial Sequence: Synthetic oligonucleotide
  Target: COL7A1; (+) strand; PAM type: NRG; PAM sequence: TAG
ccctccacccaccatccccc

SEQ ID NO: 18361 - DNA, 20 bp, Artificial Sequence
  Description of Artificial Sequence: Synthetic oligonucleotide
  Target: COL7A1; (+) strand; PAM type: NRG; PAM sequence: CAG
ccacccaccatccccctaga

SEQ ID NO: 18362 - DNA, 20 bp, Artificial Sequence
  Description of Artificial Sequence: Synthetic oligonucleotide
  Target: COL7A1; (+) strand; PAM type: NRG; PAM sequence: GAG
acccaccatccccctagaca

SEQ ID NO: 18363 - DNA, 20 bp, Artificial Sequence
  Description of Artificial Sequence: Synthetic oligonucleotide
  Target: COL7A1; (+) strand; PAM type: NRG; PAM sequence: CAG
accatccccctagacagagt

SEQ ID NO: 18364 - DNA, 20 bp, Artificial Sequence
  Description of Artificial Sequence: Synthetic oligonucleotide
  Target: COL7A1; (+) strand; PAM type: NRG; PAM sequence: AGG
ccatccccctagacagagtc

SEQ ID NO: 18365 - DNA, 20 bp, Artificial Sequence
  Description of Artificial Sequence: Synthetic oligonucleotide
  Target: COL7A1; (+) strand; PAM type: NRG; PAM sequence: CAG
ccctagacagagtcaggacc

SEQ ID NO: 18366 - DNA, 20 bp, Artificial Sequence
  Description of Artificial Sequence: Synthetic oligonucleotide
  Target: COL7A1; (+) strand; PAM type: NRG; PAM sequence: CAG
agacagagtcaggacccaga

SEQ ID NO: 18367 - DNA, 20 bp, Artificial Sequence
  Description of Artificial Sequence: Synthetic oligonucleotide
  Target: COL7A1; (+) strand; PAM type: NRG; PAM sequence: CAG
agtcaggacccagacagtcc

SEQ ID NO: 18368 - DNA, 20 bp, Artificial Sequence
  Description of Artificial Sequence: Synthetic oligonucleotide
  Target: COL7A1; (+) strand; PAM type: NRG; PAM sequence: AGG
gtcaggacccagacagtccc

SEQ ID NO: 18369 - DNA, 20 bp, Artificial Sequence
  Description of Artificial Sequence: Synthetic oligonucleotide
  Target: COL7A1; (+) strand; PAM type: NRG; PAM sequence: CAG
aggacccagacagtcccagg

SEQ ID NO: 18370 - DNA, 20 bp, Artificial Sequence
  Description of Artificial Sequence: Synthetic oligonucleotide
  Target: COL7A1; (+) strand; PAM type: NRG; PAM sequence: CAG
ccagacagtcccaggcagta

SEQ ID NO: 18371 - DNA, 20 bp, Artificial Sequence
  Description of Artificial Sequence: Synthetic oligonucleotide
  Target: COL7A1; (+) strand; PAM type: NRG; PAM sequence: CAG
gtcccaggcagtacagaccc

SEQ ID NO: 18372 - DNA, 20 bp, Artificial Sequence
  Description of Artificial Sequence: Synthetic oligonucleotide
  Target: COL7A1; (+) strand; PAM type: NRG; PAM sequence: CAG
acagaccccagccctgcaca

SEQ ID NO: 18373 - DNA, 20 bp, Artificial Sequence
  Description of Artificial Sequence: Synthetic oligonucleotide
  Target: COL7A1; (+) strand; PAM type: NRG; PAM sequence: AGG
cagaccccagccctgcacac

SEQ ID NO: 18374 - DNA, 20 bp, Artificial Sequence
  Description of Artificial Sequence: Synthetic oligonucleotide
  Target: COL7A1; (+) strand; PAM type: NRG; PAM sequence: GAG
gcacacaggacaatacatgt

SEQ ID NO: 18375 - DNA, 20 bp, Artificial Sequence
  Description of Artificial Sequence: Synthetic oligonucleotide
  Target: COL7A1; (+) strand; PAM type: NRG; PAM sequence: GAG
acacaggacaatacatgtga

SEQ ID NO: 18376 - DNA, 20 bp, Artificial Sequence
  Description of Artificial Sequence: Synthetic oligonucleotide
  Target: COL7A1; (+) strand; PAM type: NRG; PAM sequence: TGG
gccaccttcttgcacatgtg

SEQ ID NO: 18377 - DNA, 20 bp, Artificial Sequence
  Description of Artificial Sequence: Synthetic oligonucleotide
  Target: COL7A1; (+) strand; PAM type: NRG; PAM sequence: TGG
tcttgcacatgtgtggctgt

SEQ ID NO: 18378 - DNA, 20 bp, Artificial Sequence
  Description of Artificial Sequence: Synthetic oligonucleotide
  Target: COL7A1; (+) strand; PAM type: NRG; PAM sequence: GGG
cttgcacatgtgtggctgtt

SEQ ID NO: 18379 - DNA, 20 bp, Artificial Sequence
  Description of Artificial Sequence: Synthetic oligonucleotide
  Target: COL7A1; (+) strand; PAM type: NRG; PAM sequence: AAG
cacatgtgtggctgttgggc

SEQ ID NO: 18380 - DNA, 20 bp, Artificial Sequence
  Description of Artificial Sequence: Synthetic oligonucleotide
  Target: COL7A1; (+) strand; PAM type: NRG; PAM sequence: AGG
acatgtgtggctgttgggca

SEQ ID NO: 18381 - DNA, 20 bp, Artificial Sequence
  Description of Artificial Sequence: Synthetic oligonucleotide
  Target: COL7A1; (+) strand; PAM type: NRG; PAM sequence: CGG
gctgttgggcaaggacttac

SEQ ID NO: 18382 - DNA, 20 bp, Artificial Sequence
  Description of Artificial Sequence: Synthetic oligonucleotide
  Target: COL7A1; (+) strand; PAM type: NRG; PAM sequence: GGG
ctgttgggcaaggacttacc

SEQ ID NO: 18383 - DNA, 20 bp, Artificial Sequence
  Description of Artificial Sequence: Synthetic oligonucleotide
  Target: COL7A1; (+) strand; PAM type: NRG; PAM sequence: CGG
gggttgccgtcctgacccct

SEQ ID NO: 18384 - DNA, 20 bp, Artificial Sequence
  Description of Artificial Sequence: Synthetic oligonucleotide
  Target: COL7A1; (+) strand; PAM type: NRG; PAM sequence: CAG
gccgtcctgacccctcggtc

SEQ ID NO: 18385 - DNA, 20 bp, Artificial Sequence
  Description of Artificial Sequence: Synthetic oligonucleotide
  Target: COL7A1; (+) strand; PAM type: NRG; PAM sequence: AGG
ccgtcctgacccctcggtcc

SEQ ID NO: 18386 - DNA, 20 bp, Artificial Sequence
  Description of Artificial Sequence: Synthetic oligonucleotide
  Target: COL7A1; (+) strand; PAM type: NRG; PAM sequence: CGG
ccctcggtccaggctctccc

SEQ ID NO: 18387 - DNA, 20 bp, Artificial Sequence
  Description of Artificial Sequence: Synthetic oligonucleotide
  Target: COL7A1; (+) strand; PAM type: NRG; PAM sequence: TGG
ccccggtctcctttgatgcc

SEQ ID NO: 18388 - DNA, 20 bp, Artificial Sequence
  Description of Artificial Sequence: Synthetic oligonucleotide
  Target: COL7A1; (+) strand; PAM type: NRG; PAM sequence: AAG
ttgatgcctggcacaccctg

SEQ ID NO: 18389 - DNA, 20 bp, Artificial Sequence
  Description of Artificial Sequence: Synthetic oligonucleotide
  Target: COL7A1; (+) strand; PAM type: NRG; PAM sequence: AGG
tgatgcctggcacaccctga

SEQ ID NO: 18390 - DNA, 20 bp, Artificial Sequence
  Description of Artificial Sequence: Synthetic oligonucleotide
  Target: COL7A1; (+) strand; PAM type: NRG; PAM sequence: CAG
tgcctggcacaccctgaagg

SEQ ID NO: 18391 - DNA, 20 bp, Artificial Sequence
  Description of Artificial Sequence: Synthetic oligonucleotide
  Target: COL7A1; (+) strand; PAM type: NRG; PAM sequence: GAG
cctggcacaccctgaaggca

SEQ ID NO: 18392 - DNA, 20 bp, Artificial Sequence
  Description of Artificial Sequence: Synthetic oligonucleotide
  Target: COL7A1; (+) strand; PAM type: NRG; PAM sequence: GAG
aaggcagagtgtcgtgccct

SEQ ID NO: 18393 - DNA, 20 bp, Artificial Sequence
  Description of Artificial Sequence: Synthetic oligonucleotide
  Target: COL7A1; (+) strand; PAM type: NRG; PAM sequence: CAG
agtgtcgtgccctgagcccc

SEQ ID NO: 18394 - DNA, 20 bp, Artificial Sequence
  Description of Artificial Sequence: Synthetic oligonucleotide
  Target: COL7A1; (+) strand; PAM type: NRG; PAM sequence: CAG
cccagtccctgccacgtgcc

SEQ ID NO: 18395 - DNA, 20 bp, Artificial Sequence
  Description of Artificial Sequence: Synthetic oligonucleotide
  Target: COL7A1; (+) strand; PAM type: NRG; PAM sequence: AGG
ccagtccctgccacgtgccc

SEQ ID NO: 18396 - DNA, 20 bp, Artificial Sequence
  Description of Artificial Sequence: Synthetic oligonucleotide
  Target: COL7A1; (+) strand; PAM type: NRG; PAM sequence: TAG
gtgcatatgcacaccacctc

SEQ ID NO: 18397 - DNA, 20 bp, Artificial Sequence
  Description of Artificial Sequence: Synthetic oligonucleotide
  Target: COL7A1; (+) strand; PAM type: NRG; PAM sequence: CAG
caccacctctagtgtgcccc

SEQ ID NO: 18398 - DNA, 20 bp, Artificial Sequence
  Description of Artificial Sequence: Synthetic oligonucleotide
  Target: COL7A1; (+) strand; PAM type: NRG; PAM sequence: AAG
acctctagtgtgcccccaga

SEQ ID NO: 18399 - DNA, 20 bp, Artificial Sequence
  Description of Artificial Sequence: Synthetic oligonucleotide
  Target: COL7A1; (+) strand; PAM type: NRG; PAM sequence: AGG
cctctagtgtgcccccagaa

SEQ ID NO: 18400 - DNA, 20 bp, Artificial Sequence
  Description of Artificial Sequence: Synthetic oligonucleotide
  Target: COL7A1; (+) strand; PAM type: NRG; PAM sequence: GAG
tctagtgtgcccccagaaag

SEQ ID NO: 18401 - DNA, 20 bp, Artificial Sequence
  Description of Artificial Sequence: Synthetic oligonucleotide
  Target: COL7A1; (+) strand; PAM type: NRG; PAM sequence: AGG
ctagtgtgcccccagaaagg

SEQ ID NO: 18402 - DNA, 20 bp, Artificial Sequence
  Description of Artificial Sequence: Synthetic oligonucleotide
  Target: COL7A1; (+) strand; PAM type: NRG; PAM sequence: GGG
tagtgtgcccccagaaagga

SEQ ID NO: 18403 - DNA, 20 bp, Artificial Sequence
  Description of Artificial Sequence: Synthetic oligonucleotide
  Target: COL7A1; (+) strand; PAM type: NRG; PAM sequence: GGG
agtgtgcccccagaaaggag

SEQ ID NO: 18404 - DNA, 20 bp, Artificial Sequence
  Description of Artificial Sequence: Synthetic oligonucleotide
  Target: COL7A1; (+) strand; PAM type: NRG; PAM sequence: GGG
gtgtgcccccagaaaggagg

SEQ ID NO: 18405 - DNA, 20 bp, Artificial Sequence
  Description of Artificial Sequence: Synthetic oligonucleotide
  Target: COL7A1; (+) strand; PAM type: NRG; PAM sequence: TGG
cagaaaggagggggactcta

SEQ ID NO: 18406 - DNA, 20 bp, Artificial Sequence
  Description of Artificial Sequence: Synthetic oligonucleotide
  Target: COL7A1; (+) strand; PAM type: NRG; PAM sequence: AAG
aaaggagggggactctatgg

SEQ ID NO: 18407 - DNA, 20 bp, Artificial Sequence
  Description of Artificial Sequence: Synthetic oligonucleotide
  Target: COL7A1; (+) strand; PAM type: NRG; PAM sequence: AGG
aaggagggggactctatgga

SEQ ID NO: 18408 - DNA, 20 bp, Artificial Sequence
  Description of Artificial Sequence: Synthetic oligonucleotide
  Target: COL7A1; (+) strand; PAM type: NRG; PAM sequence: GGG
aggagggggactctatggaa

SEQ ID NO: 18409 - DNA, 20 bp, Artificial Sequence
  Description of Artificial Sequence: Synthetic oligonucleotide
  Target: COL7A1; (+) strand; PAM type: NRG; PAM sequence: TGG
agggggactctatggaaggg

SEQ ID NO: 18410 - DNA, 20 bp, Artificial Sequence
  Description of Artificial Sequence: Synthetic oligonucleotide
  Target: COL7A1; (+) strand; PAM type: NRG; PAM sequence: GAG
ggggactctatggaagggtg

SEQ ID NO: 18411 - DNA, 20 bp, Artificial Sequence
  Description of Artificial Sequence: Synthetic oligonucleotide
  Target: COL7A1; (+) strand; PAM type: NRG; PAM sequence: GAG
ggactctatggaagggtgga

SEQ ID NO: 18412 - DNA, 20 bp, Artificial Sequence
  Description of Artificial Sequence: Synthetic oligonucleotide
  Target: COL7A1; (+) strand; PAM type: NRG; PAM sequence: GAG
actctatggaagggtggaga

SEQ ID NO: 18413 - DNA, 20 bp, Artificial Sequence
  Description of Artificial Sequence: Synthetic oligonucleotide
  Target: COL7A1; (+) strand; PAM type: NRG; PAM sequence: AGG
ctctatggaagggtggagag

SEQ ID NO: 18414 - DNA, 20 bp, Artificial Sequence
  Description of Artificial Sequence: Synthetic oligonucleotide
  Target: COL7A1; (+) strand; PAM type: NRG; PAM sequence: TGG
aggcctcaccctgtctcctt

SEQ ID NO: 18415 - DNA, 20 bp, Artificial Sequence
  Description of Artificial Sequence: Synthetic oligonucleotide
  Target: COL7A1; (+) strand; PAM type: NRG; PAM sequence: GGG
ggcctcaccctgtctccttt

SEQ ID NO: 18416 - DNA, 20 bp, Artificial Sequence
  Description of Artificial Sequence: Synthetic oligonucleotide
  Target: COL7A1; (+) strand; PAM type: NRG; PAM sequence: TGG
ccctgtctcctttgggacct

SEQ ID NO: 18417 - DNA, 20 bp, Artificial Sequence
  Description of Artificial Sequence: Synthetic oligonucleotide
  Target: COL7A1; (+) strand; PAM type: NRG; PAM sequence: CGG
ccttggtcaccattgctgcc

SEQ ID NO: 18418 - DNA, 20 bp, Artificial Sequence
  Description of Artificial Sequence: Synthetic oligonucleotide
  Target: COL7A1; (+) strand; PAM type: NRG; PAM sequence: TGG
ttgctgcccggctccccctg

SEQ ID NO: 18419 - DNA, 20 bp, Artificial Sequence
  Description of Artificial Sequence: Synthetic oligonucleotide
  Target: COL7A1; (+) strand; PAM type: NRG; PAM sequence: GGG
tgctgcccggctccccctgt

SEQ ID NO: 18420 - DNA, 20 bp, Artificial Sequence
  Description of Artificial Sequence: Synthetic oligonucleotide
  Target: COL7A1; (+) strand; PAM type: NRG; PAM sequence: GGG
gctgcccggctccccctgtg

SEQ ID NO: 18421 - DNA, 20 bp, Artificial Sequence
  Description of Artificial Sequence: Synthetic oligonucleotide
  Target: COL7A1; (+) strand; PAM type: NRG; PAM sequence: GAG
ccggctccccctgtggggat

SEQ ID NO: 18422 - DNA, 20 bp, Artificial Sequence
  Description of Artificial Sequence: Synthetic oligonucleotide
  Target: COL7A1; (+) strand; PAM type: NRG; PAM sequence: AAG
ccctgtggggatgagatgtc

SEQ ID NO: 18423 - DNA, 20 bp, Artificial Sequence
  Description of Artificial Sequence: Synthetic oligonucleotide
  Target: COL7A1; (+) strand; PAM type: NRG; PAM sequence: CAG
gtggggatgagatgtcaagt

SEQ ID NO: 18424 - DNA, 20 bp, Artificial Sequence
  Description of Artificial Sequence: Synthetic oligonucleotide
  Target: COL7A1; (+) strand; PAM type: NRG; PAM sequence: TAG
tgagatgtcaagtcagtccc

SEQ ID NO: 18425 - DNA, 20 bp, Artificial Sequence
  Description of Artificial Sequence: Synthetic oligonucleotide
  Target: COL7A1; (+) strand; PAM type: NRG; PAM sequence: TGG
caagtcagtccctagtgcca

SEQ ID NO: 18426 - DNA, 20 bp, Artificial Sequence
  Description of Artificial Sequence: Synthetic oligonucleotide
  Target: COL7A1; (+) strand; PAM type: NRG; PAM sequence: CAG
gtcagtccctagtgccatgg

SEQ ID NO: 18427 - DNA, 20 bp, Artificial Sequence
  Description of Artificial Sequence: Synthetic oligonucleotide
  Target: COL7A1; (+) strand; PAM type: NRG; PAM sequence: GAG
cagtccctagtgccatggca

SEQ ID NO: 18428 - DNA, 20 bp, Artificial Sequence
  Description of Artificial Sequence: Synthetic oligonucleotide
  Target: COL7A1; (+) strand; PAM type: NRG; PAM sequence: AGG
agtccctagtgccatggcag

SEQ ID NO: 18429 - DNA, 20 bp, Artificial Sequence
  Description of Artificial Sequence: Synthetic oligonucleotide
  Target: COL7A1; (+) strand; PAM type: NRG; PAM sequence: GGG
gtccctagtgccatggcaga

SEQ ID NO: 18430 - DNA, 20 bp, Artificial Sequence
  Description of Artificial Sequence: Synthetic oligonucleotide
  Target: COL7A1; (+) strand; PAM type: NRG; PAM sequence: TGG
cctagtgccatggcagaggg

SEQ ID NO: 18431 - DNA, 20 bp, Artificial Sequence
  Description of Artificial Sequence: Synthetic oligonucleotide
  Target: COL7A1; (+) strand; PAM type: NRG; PAM sequence: GAG
ccatggcagagggtggcccc

SEQ ID NO: 18432 - DNA, 20 bp, Artificial Sequence
  Description of Artificial Sequence: Synthetic oligonucleotide
  Target: COL7A1; (+) strand; PAM type: NRG; PAM sequence: TAG
ctgattccacacactgacct

SEQ ID NO: 18433 - DNA, 20 bp, Artificial Sequence
  Description of Artificial Sequence: Synthetic oligonucleotide
  Target: COL7A1; (+) strand; PAM type: NRG; PAM sequence: GAG
acactgaccttagcaccctt

SEQ ID NO: 18434 - DNA, 20 bp, Artificial Sequence
  Description of Artificial Sequence: Synthetic oligonucleotide
  Target: COL7A1; (+) strand; PAM type: NRG; PAM sequence: CAG
gaccttagcacccttgagtc

SEQ ID NO: 18435 - DNA, 20 bp, Artificial Sequence
  Description of Artificial Sequence: Synthetic oligonucleotide
  Target: COL7A1; (+) strand; PAM type: NRG; PAM sequence: AGG
accttagcacccttgagtcc

SEQ ID NO: 18436 - DNA, 20 bp, Artificial Sequence
  Description of Artificial Sequence: Synthetic oligonucleotide
  Target: COL7A1; (+) strand; PAM type: NRG; PAM sequence: GGG
ccttagcacccttgagtcca

SEQ ID NO: 18437 - DNA, 20 bp, Artificial Sequence
  Description of Artificial Sequence: Synthetic oligonucleotide
  Target: COL7A1; (+) strand; PAM type: NRG; PAM sequence: GGG
cttagcacccttgagtccag

SEQ ID NO: 18438 - DNA, 20 bp, Artificial Sequence
  Description of Artificial Sequence: Synthetic oligonucleotide
  Target: COL7A1; (+) strand; PAM type: NRG; PAM sequence: GGG
ttagcacccttgagtccagg

SEQ ID NO: 18439 - DNA, 20 bp, Artificial Sequence
  Description of Artificial Sequence: Synthetic oligonucleotide
  Target: COL7A1; (+) strand; PAM type: NRG; PAM sequence: CAG
tccagggggtccctgttctc

SEQ ID NO: 18440 - DNA, 20 bp, Artificial Sequence
  Description of Artificial Sequence: Synthetic oligonucleotide
  Target: COL7A1; (+) strand; PAM type: NRG; PAM sequence: GAG
cagggggtccctgttctcca

SEQ ID NO: 18441 - DNA, 20 bp, Artificial Sequence
  Description of Artificial Sequence: Synthetic oligonucleotide
  Target: COL7A1; (+) strand; PAM type: NRG; PAM sequence: GAG
gggggtccctgttctccaga

SEQ ID NO: 18442 - DNA, 20 bp, Artificial Sequence
  Description of Artificial Sequence: Synthetic oligonucleotide
  Target: COL7A1; (+) strand; PAM type: NRG; PAM sequence: CAG
tccctgttctccagagagtc

SEQ ID NO: 18443 - DNA, 20 bp, Artificial Sequence
  Description of Artificial Sequence: Synthetic oligonucleotide
  Target: COL7A1; (+) strand; PAM type: NRG; PAM sequence: AGG
ccctgttctccagagagtcc

SEQ ID NO: 18444 - DNA, 20 bp, Artificial Sequence
  Description of Artificial Sequence: Synthetic oligonucleotide
  Target: COL7A1; (+) strand; PAM type: NRG; PAM sequence: TGG
tctccagagagtccaggacc

SEQ ID NO: 18445 - DNA, 20 bp, Artificial Sequence
  Description of Artificial Sequence: Synthetic oligonucleotide
  Target: COL7A1; (+) strand; PAM type: NRG; PAM sequence: CAG
tccaggacctggctcatcca

SEQ ID NO: 18446 - DNA, 20 bp, Artificial Sequence
  Description of Artificial Sequence: Synthetic oligonucleotide
  Target: COL7A1; (+) strand; PAM type: NRG; PAM sequence: AAG
ccacagacacctacaaacac

SEQ ID NO: 18447 - DNA, 20 bp, Artificial Sequence
  Description of Artificial Sequence: Synthetic oligonucleotide
  Target: COL7A1; (+) strand; PAM type: NRG; PAM sequence: AGG
cacagacacctacaaacaca

SEQ ID NO: 18448 - DNA, 20 bp, Artificial Sequence
  Description of Artificial Sequence: Synthetic oligonucleotide
  Target: COL7A1; (+) strand; PAM type: NRG; PAM sequence: CAG
cacctacaaacacaaggtca

SEQ ID NO: 18449 - DNA, 20 bp, Artificial Sequence
  Description of Artificial Sequence: Synthetic oligonucleotide
  Target: COL7A1; (+) strand; PAM type: NRG; PAM sequence: AGG
acctacaaacacaaggtcac

SEQ ID NO: 18450 - DNA, 20 bp, Artificial Sequence
  Description of Artificial Sequence: Synthetic oligonucleotide
  Target: COL7A1; (+) strand; PAM type: NRG; PAM sequence: GGG
cctacaaacacaaggtcaca

SEQ ID NO: 18451 - DNA, 20 bp, Artificial Sequence
  Description of Artificial Sequence: Synthetic oligonucleotide
  Target: COL7A1; (+) strand; PAM type: NRG; PAM sequence: GGG
ctacaaacacaaggtcacag

SEQ ID NO: 18452 - DNA, 20 bp, Artificial Sequence
  Description of Artificial Sequence: Synthetic oligonucleotide
  Target: COL7A1; (+) strand; PAM type: NRG; PAM sequence: GAG
acaaacacaaggtcacaggg

SEQ ID NO: 18453 - DNA, 20 bp, Artificial Sequence
  Description of Artificial Sequence: Synthetic oligonucleotide
  Target: COL7A1; (+) strand; PAM type: NRG; PAM sequence: GAG
aaacacaaggtcacagggga

SEQ ID NO: 18454 - DNA, 20 bp, Artificial Sequence
  Description of Artificial Sequence: Synthetic oligonucleotide
  Target: COL7A1; (+) strand; PAM type: NRG; PAM sequence: TAG
ggggagagatgtctctgtca

SEQ ID NO: 18455 - DNA, 20 bp, Artificial Sequence
  Description of Artificial Sequence: Synthetic oligonucleotide
  Target: COL7A1; (+) strand; PAM type: NRG; PAM sequence: GAG
ggagagatgtctctgtcata

SEQ ID NO: 18456 - DNA, 20 bp, Artificial Sequence
  Description of Artificial Sequence: Synthetic oligonucleotide
  Target: COL7A1; (+) strand; PAM type: NRG; PAM sequence: AGG
gagagatgtctctgtcatag

SEQ ID NO: 18457 - DNA, 20 bp, Artificial Sequence
  Description of Artificial Sequence: Synthetic oligonucleotide
  Target: COL7A1; (+) strand; PAM type: NRG; PAM sequence: TGG
atgtctctgtcatagaggca

SEQ ID NO: 18458 - DNA, 20 bp, Artificial Sequence
  Description of Artificial Sequence: Synthetic oligonucleotide
  Target: COL7A1; (+) strand; PAM type: NRG; PAM sequence: GGG
tgtctctgtcatagaggcat

SEQ ID NO: 18459 - DNA, 20 bp, Artificial Sequence
  Description of Artificial Sequence: Synthetic oligonucleotide
  Target: COL7A1; (+) strand; PAM type: NRG; PAM sequence: GGG
gtctctgtcatagaggcatg

SEQ ID NO: 18460 - DNA, 20 bp, Artificial Sequence
  Description of Artificial Sequence: Synthetic oligonucleotide
  Target: COL7A1; (+) strand; PAM type: NRG; PAM sequence: GGG
tctctgtcatagaggcatgg

SEQ ID NO: 18461 - DNA, 20 bp, Artificial Sequence
  Description of Artificial Sequence: Synthetic oligonucleotide
  Target: COL7A1; (+) strand; PAM type: NRG; PAM sequence: GAG
tctgtcatagaggcatgggg

SEQ ID NO: 18462 - DNA, 20 bp, Artificial Sequence
  Description of Artificial Sequence: Synthetic oligonucleotide
  Target: COL7A1; (+) strand; PAM type: NRG; PAM sequence: CAG
gaggcatgggggagtcatca

SEQ ID NO: 18463 - DNA, 20 bp, Artificial Sequence
  Description of Artificial Sequence: Synthetic oligonucleotide
  Target: COL7A1; (+) strand; PAM type: NRG; PAM sequence: CAG
gggggagtcatcacagatct

SEQ ID NO: 18464 - DNA, 20 bp, Artificial Sequence
  Description of Artificial Sequence: Synthetic oligonucleotide
  Target: COL7A1; (+) strand; PAM type: NRG; PAM sequence: AGG
ggggagtcatcacagatctc

SEQ ID NO: 18465 - DNA, 20 bp, Artificial Sequence
  Description of Artificial Sequence: Synthetic oligonucleotide
  Target: COL7A1; (+) strand; PAM type: NRG; PAM sequence: CAG
catcacagatctcaggatca

SEQ ID NO: 18466 - DNA, 20 bp, Artificial Sequence
  Description of Artificial Sequence: Synthetic oligonucleotide
  Target: COL7A1; (+) strand; PAM type: NRG; PAM sequence: GAG
tcacagatctcaggatcaca

SEQ ID NO: 18467 - DNA, 20 bp, Artificial Sequence
  Description of Artificial Sequence: Synthetic oligonucleotide
  Target: COL7A1; (+) strand; PAM type: NRG; PAM sequence: AGG
cacagatctcaggatcacag

SEQ ID NO: 18468 - DNA, 20 bp, Artificial Sequence
  Description of Artificial Sequence: Synthetic oligonucleotide
  Target: COL7A1; (+) strand; PAM type: NRG; PAM sequence: GGG
acagatctcaggatcacaga

SEQ ID NO: 18469 - DNA, 20 bp, Artificial Sequence
  Description of Artificial Sequence: Synthetic oligonucleotide
  Target: COL7A1; (+) strand; PAM type: NRG; PAM sequence: TAG
ctcaggatcacagagggtta

SEQ ID NO: 18470 - DNA, 20 bp, Artificial Sequence
  Description of Artificial Sequence: Synthetic oligonucleotide
  Target: COL7A1; (+) strand; PAM type: NRG; PAM sequence: AGG
tcaggatcacagagggttat

SEQ ID NO: 18471 - DNA, 20 bp, Artificial Sequence
  Description of Artificial Sequence: Synthetic oligonucleotide
  Target: COL7A1; (+) strand; PAM type: NRG; PAM sequence: GGG
caggatcacagagggttata

SEQ ID NO: 18472 - DNA, 20 bp, Artificial Sequence
  Description of Artificial Sequence: Synthetic oligonucleotide
  Target: COL7A1; (+) strand; PAM type: NRG; PAM sequence: CAG
atcacagagggttatagggt

SEQ ID NO: 18473 - DNA, 20 bp, Artificial Sequence
  Description of Artificial Sequence: Synthetic oligonucleotide
  Target: COL7A1; (+) strand; PAM type: NRG; PAM sequence: CAG
ggttatagggtcagaaattc

SEQ ID NO: 18474 - DNA, 20 bp, Artificial Sequence
  Description of Artificial Sequence: Synthetic oligonucleotide
  Target: COL7A1; (+) strand; PAM type: NRG; PAM sequence: AGG
gttatagggtcagaaattcc

SEQ ID NO: 18475 - DNA, 20 bp, Artificial Sequence
  Description of Artificial Sequence: Synthetic oligonucleotide
  Target: COL7A1; (+) strand; PAM type: NRG; PAM sequence: GGG
ttatagggtcagaaattcca

SEQ ID NO: 18476 - DNA, 20 bp, Artificial Sequence
  Description of Artificial Sequence: Synthetic oligonucleotide
  Target: COL7A1; (+) strand; PAM type: NRG; PAM sequence: TGG
ggtcagaaattccagggtta

SEQ ID NO: 18477 - DNA, 20 bp, Artificial Sequence
  Description of Artificial Sequence: Synthetic oligonucleotide
  Target: COL7A1; (+) strand; PAM type: NRG; PAM sequence: TGG
ggcacacactaccatatttc

SEQ ID NO: 18478 - DNA, 20 bp, Artificial Sequence
  Description of Artificial Sequence: Synthetic oligonucleotide
  Target: COL7A1; (+) strand; PAM type: NRG; PAM sequence: GGG
gcacacactaccatatttct

SEQ ID NO: 18479 - DNA, 20 bp, Artificial Sequence
  Description of Artificial Sequence: Synthetic oligonucleotide
  Target: COL7A1; (+) strand; PAM type: NRG; PAM sequence: GGG
cacacactaccatatttctg

SEQ ID NO: 18480 - DNA, 20 bp, Artificial Sequence
  Description of Artificial Sequence: Synthetic oligonucleotide
  Target: COL7A1; (+) strand; PAM type: NRG; PAM sequence: AAG
ctaccatatttctggggacc

SEQ ID NO: 18481 - DNA, 20 bp, Artificial Sequence
  Description of Artificial Sequence: Synthetic oligonucleotide
  Target: COL7A1; (+) strand; PAM type: NRG; PAM sequence: AAG
atatttctggggaccaagct

SEQ ID NO: 18482 - DNA, 20 bp, Artificial Sequence
  Description of Artificial Sequence: Synthetic oligonucleotide
  Target: COL7A1; (+) strand; PAM type: NRG; PAM sequence: AGG
tatttctggggaccaagcta

SEQ ID NO: 18483 - DNA, 20 bp, Artificial Sequence
  Description of Artificial Sequence: Synthetic oligonucleotide
  Target: COL7A1; (+) strand; PAM type: NRG; PAM sequence: GGG
atttctggggaccaagctaa

SEQ ID NO: 18484 - DNA, 20 bp, Artificial Sequence
  Description of Artificial Sequence: Synthetic oligonucleotide
  Target: COL7A1; (+) strand; PAM type: NRG; PAM sequence: TGG
tctggggaccaagctaaggg

SEQ ID NO: 18485 - DNA, 20 bp, Artificial Sequence
  Description of Artificial Sequence: Synthetic oligonucleotide
  Target: COL7A1; (+) strand; PAM type: NRG; PAM sequence: TGG
ccaagctaagggtggcttcc

SEQ ID NO: 18486 - DNA, 20 bp, Artificial Sequence
  Description of Artificial Sequence: Synthetic oligonucleotide
  Target: COL7A1; (+) strand; PAM type: NRG; PAM sequence: TAG
aagggtggcttcctggtcac

SEQ ID NO: 18487 - DNA, 20 bp, Artificial Sequence
  Description of Artificial Sequence: Synthetic oligonucleotide
  Target: COL7A1; (+) strand; PAM type: NRG; PAM sequence: CAG
ggcttcctggtcactagtca

SEQ ID NO: 18488 - DNA, 20 bp, Artificial Sequence
  Description of Artificial Sequence: Synthetic oligonucleotide
  Target: COL7A1; (+) strand; PAM type: NRG; PAM sequence: AGG
gcttcctggtcactagtcac

SEQ ID NO: 18489 - DNA, 20 bp, Artificial Sequence
  Description of Artificial Sequence: Synthetic oligonucleotide
  Target: COL7A1; (+) strand; PAM type: NRG; PAM sequence: AAG
tggtcactagtcacaggact

SEQ ID NO: 18490 - DNA, 20 bp, Artificial Sequence
  Description of Artificial Sequence: Synthetic oligonucleotide
  Target: COL7A1; (+) strand; PAM type: NRG; PAM sequence: AGG
ggtcactagtcacaggacta

SEQ ID NO: 18491 - DNA, 20 bp, Artificial Sequence
  Description of Artificial Sequence: Synthetic oligonucleotide
  Target: COL7A1; (+) strand; PAM type: NRG; PAM sequence: CAG
cactagtcacaggactaagg

SEQ ID NO: 18492 - DNA, 20 bp, Artificial Sequence
  Description of Artificial Sequence: Synthetic oligonucleotide
  Target: COL7A1; (+) strand; PAM type: NRG; PAM sequence: AGG
actagtcacaggactaaggc

SEQ ID NO: 18493 - DNA, 20 bp, Artificial Sequence
  Description of Artificial Sequence: Synthetic oligonucleotide
  Target: COL7A1; (+) strand; PAM type: NRG; PAM sequence: GGG
ctagtcacaggactaaggca

SEQ ID NO: 18494 - DNA, 20 bp, Artificial Sequence
  Description of Artificial Sequence: Synthetic oligonucleotide
  Target: COL7A1; (+) strand; PAM type: NRG; PAM sequence: TGG
tcacaggactaaggcaggga

SEQ ID NO: 18495 - DNA, 20 bp, Artificial Sequence
  Description of Artificial Sequence: Synthetic oligonucleotide
  Target: COL7A1; (+) strand; PAM type: NRG; PAM sequence: GGG
cacaggactaaggcagggat

SEQ ID NO: 18496 - DNA, 20 bp, Artificial Sequence
  Description of Artificial Sequence: Synthetic oligonucleotide
  Target: COL7A1; (+) strand; PAM type: NRG; PAM sequence: GGG
acaggactaaggcagggatg

SEQ ID NO: 18497 - DNA, 20 bp, Artificial Sequence
  Description of Artificial Sequence: Synthetic oligonucleotide
  Target: COL7A1; (+) strand; PAM type: NRG; PAM sequence: TGG
cagggatggggtgatcacct

SEQ ID NO: 18498 - DNA, 20 bp, Artificial Sequence
  Description of Artificial Sequence: Synthetic oligonucleotide
  Target: COL7A1; (+) strand; PAM type: NRG; PAM sequence: GGG
agggatggggtgatcacctt

SEQ ID NO: 18499 - DNA, 20 bp, Artificial Sequence
  Description of Artificial Sequence: Synthetic oligonucleotide
  Target: COL7A1; (+) strand; PAM type: NRG; PAM sequence: GGG
gggatggggtgatcaccttg

SEQ ID NO: 18500 - DNA, 20 bp, Artificial Sequence
  Description of Artificial Sequence: Synthetic oligonucleotide
  Target: COL7A1; (+) strand; PAM type: NRG; PAM sequence: CAG
tggggtgatcaccttggggc

SEQ ID NO: 18501 - DNA, 20 bp, Artificial Sequence
  Description of Artificial Sequence: Synthetic oligonucleotide
  Target: COL7A1; (+) strand; PAM type: NRG; PAM sequence: AGG
ggggtgatcaccttggggcc

SEQ ID NO: 18502 - DNA, 20 bp, Artificial Sequence
  Description of Artificial Sequence: Synthetic oligonucleotide
  Target: COL7A1; (+) strand; PAM type: NRG; PAM sequence: GGG
gggtgatcaccttggggcca

SEQ ID NO: 18503 - DNA, 20 bp, Artificial Sequence
  Description of Artificial Sequence: Synthetic oligonucleotide
  Target: COL7A1; (+) strand; PAM type: NRG; PAM sequence: GGG
ggtgatcaccttggggccag

SEQ ID NO: 18504 - DNA, 20 bp, Artificial Sequence
  Description of Artificial Sequence: Synthetic oligonucleotide
  Target: COL7A1; (+) strand; PAM type: NRG; PAM sequence: GGG
gtgatcaccttggggccagg

SEQ ID NO: 18505 - DNA, 20 bp, Artificial Sequence
  Description of Artificial Sequence: Synthetic oligonucleotide
  Target: COL7A1; (+) strand; PAM type: NRG; PAM sequence: CGG
caccttggggccagggggtc

SEQ ID NO: 18506 - DNA, 20 bp, Artificial Sequence
  Description of Artificial Sequence: Synthetic oligonucleotide
  Target: COL7A1; (+) strand; PAM type: NRG; PAM sequence: GGG
accttggggccagggggtcc

SEQ ID NO: 18507 - DNA, 20 bp, Artificial Sequence
  Description of Artificial Sequence: Synthetic oligonucleotide
  Target: COL7A1; (+) strand; PAM type: NRG; PAM sequence: GGG
ccttggggccagggggtccg

SEQ ID NO: 18508 - DNA, 20 bp, Artificial Sequence
  Description of Artificial Sequence: Synthetic oligonucleotide
  Target: COL7A1; (+) strand; PAM type: NRG; PAM sequence: GGG
cttggggccagggggtccgg

SEQ ID NO: 18509 - DNA, 20 bp, Artificial Sequence
  Description of Artificial Sequence: Synthetic oligonucleotide
  Target: COL7A1; (+) strand; PAM type: NRG; PAM sequence: GGG
ttggggccagggggtccggg

SEQ ID NO: 18510 - DNA, 20 bp, Artificial Sequence
  Description of Artificial Sequence: Synthetic oligonucleotide
  Target: COL7A1; (+) strand; PAM type: NRG; PAM sequence: CAG
gccagggggtccggggggcc

SEQ ID NO: 18511 - DNA, 20 bp, Artificial Sequence
  Description of Artificial Sequence: Synthetic oligonucleotide
  Target: COL7A1; (+) strand; PAM type: NRG; PAM sequence: AGG
ccagggggtccggggggccc

SEQ ID NO: 18512 - DNA, 20 bp, Artificial Sequence
  Description of Artificial Sequence: Synthetic oligonucleotide
  Target: COL7A1; (+) strand; PAM type: NRG; PAM sequence: GGG
cagggggtccggggggccca

SEQ ID NO: 18513 - DNA, 20 bp, Artificial Sequence
  Description of Artificial Sequence: Synthetic oligonucleotide
  Target: COL7A1; (+) strand; PAM type: NRG; PAM sequence: GGG
agggggtccggggggcccag

SEQ ID NO: 18514 - DNA, 20 bp, Artificial Sequence
  Description of Artificial Sequence: Synthetic oligonucleotide
  Target: COL7A1; (+) strand; PAM type: NRG; PAM sequence: CAG
tccggggggcccaggggttc

SEQ ID NO: 18515 - DNA, 20 bp, Artificial Sequence
  Description of Artificial Sequence: Synthetic oligonucleotide
  Target: COL7A1; (+) strand; PAM type: NRG; PAM sequence: AGG
ccggggggcccaggggttcc

SEQ ID NO: 18516 - DNA, 20 bp, Artificial Sequence
  Description of Artificial Sequence: Synthetic oligonucleotide
  Target: COL7A1; (+) strand; PAM type: NRG; PAM sequence: GGG
cggggggcccaggggttcca

SEQ ID NO: 18517 - DNA, 20 bp, Artificial Sequence
  Description of Artificial Sequence: Synthetic oligonucleotide
  Target: COL7A1; (+) strand; PAM type: NRG; PAM sequence: GAG
gggggcccaggggttccagg

SEQ ID NO: 18518 - DNA, 20 bp, Artificial Sequence
  Description of Artificial Sequence: Synthetic oligonucleotide
  Target: COL7A1; (+) strand; PAM type: NRG; PAM sequence: CAG
cccaggggttccagggagtc

SEQ ID NO: 18519 - DNA, 20 bp, Artificial Sequence
  Description of Artificial Sequence: Synthetic oligonucleotide
  Target: COL7A1; (+) strand; PAM type: NRG; PAM sequence: AGG
ccaggggttccagggagtcc

SEQ ID NO: 18520 - DNA, 20 bp, Artificial Sequence
  Description of Artificial Sequence: Synthetic oligonucleotide
  Target: COL7A1; (+) strand; PAM type: NRG; PAM sequence: GAG
aggggttccagggagtccag

SEQ ID NO: 18521 - DNA, 20 bp, Artificial Sequence
  Description of Artificial Sequence: Synthetic oligonucleotide
  Target: COL7A1; (+) strand; PAM type: NRG; PAM sequence: AGG
ggggttccagggagtccagg

SEQ ID NO: 18522 - DNA, 20 bp, Artificial Sequence
  Description of Artificial Sequence: Synthetic oligonucleotide
  Target: COL7A1; (+) strand; PAM type: NRG; PAM sequence: GGG
gggttccagggagtccagga

SEQ ID NO: 18523 - DNA, 20 bp, Artificial Sequence
  Description of Artificial Sequence: Synthetic oligonucleotide
  Target: COL7A1; (+) strand; PAM type: NRG; PAM sequence: CAG
ggagggccatctctgccctg

SEQ ID NO: 18524 - DNA, 20 bp, Artificial Sequence
  Description of Artificial Sequence: Synthetic oligonucleotide
  Target: COL7A1; (+) strand; PAM type: NRG; PAM sequence: AGG
gagggccatctctgccctgc

SEQ ID NO: 18525 - DNA, 20 bp, Artificial Sequence
  Description of Artificial Sequence: Synthetic oligonucleotide
  Target: COL7A1; (+) strand; PAM type: NRG; PAM sequence: AAG
atctctgccctgcaggaaac

SEQ ID NO: 18526 - DNA, 20 bp, Artificial Sequence
  Description of Artificial Sequence: Synthetic oligonucleotide
  Target: COL7A1; (+) strand; PAM type: NRG; PAM sequence: TGG
ccctgcaggaaacaagaaaa

SEQ ID NO: 18527 - DNA, 20 bp, Artificial Sequence
  Description of Artificial Sequence: Synthetic oligonucleotide
  Target: COL7A1; (+) strand; PAM type: NRG; PAM sequence: GGG
cctgcaggaaacaagaaaat

SEQ ID NO: 18528 - DNA, 20 bp, Artificial Sequence
  Description of Artificial Sequence: Synthetic oligonucleotide
  Target: COL7A1; (+) strand; PAM type: NRG; PAM sequence: GGG
ctgcaggaaacaagaaaatg

SEQ ID NO: 18529 - DNA, 20 bp, Artificial Sequence
  Description of Artificial Sequence: Synthetic oligonucleotide
  Target: COL7A1; (+) strand; PAM type: NRG; PAM sequence: TGG
caggaaacaagaaaatgggg

SEQ ID NO: 18530 - DNA, 20 bp, Artificial Sequence
  Description of Artificial Sequence: Synthetic oligonucleotide
  Target: COL7A1; (+) strand; PAM type: NRG; PAM sequence: CAG
gaaacaagaaaatggggtgg

SEQ ID NO: 18531 - DNA, 20 bp, Artificial Sequence
  Description of Artificial Sequence: Synthetic oligonucleotide
  Target: COL7A1; (+) strand; PAM type: NRG; PAM sequence: CAG
agaaaatggggtggcagccc

SEQ ID NO: 18532 - DNA, 20 bp, Artificial Sequence
  Description of Artificial Sequence: Synthetic oligonucleotide
  Target: COL7A1; (+) strand; PAM type: NRG; PAM sequence: CAG
atggggtggcagccccagca

SEQ ID NO: 18533 - DNA, 20 bp, Artificial Sequence
  Description of Artificial Sequence: Synthetic oligonucleotide
  Target: COL7A1; (+) strand; PAM type: NRG; PAM sequence: CAG
ggcagccccagcacagcctc

SEQ ID NO: 18534 - DNA, 20 bp, Artificial Sequence
  Description of Artificial Sequence: Synthetic oligonucleotide
  Target: COL7A1; (+) strand; PAM type: NRG; PAM sequence: CAG
gccccagcacagcctccaga

SEQ ID NO: 18535 - DNA, 20 bp, Artificial Sequence
  Description of Artificial Sequence: Synthetic oligonucleotide
  Target: COL7A1; (+) strand; PAM type: NRG; PAM sequence: AAG
tccagacagcctgccccacg

SEQ ID NO: 18536 - DNA, 20 bp, Artificial Sequence
  Description of Artificial Sequence: Synthetic oligonucleotide
  Target: COL7A1; (+) strand; PAM type: NRG; PAM sequence: CAG
ctgccccacgaagcccatcg

SEQ ID NO: 18537 - DNA, 20 bp, Artificial Sequence
  Description of Artificial Sequence: Synthetic oligonucleotide
  Target: COL7A1; (+) strand; PAM type: NRG; PAM sequence: TAG
cgttctccctgaaatgcaaa

SEQ ID NO: 18538 - DNA, 20 bp, Artificial Sequence
  Description of Artificial Sequence: Synthetic oligonucleotide
  Target: COL7A1; (+) strand; PAM type: NRG; PAM sequence: CGG
tctccctgaaatgcaaatag

SEQ ID NO: 18539 - DNA, 20 bp, Artificial Sequence
  Description of Artificial Sequence: Synthetic oligonucleotide
  Target: COL7A1; (+) strand; PAM type: NRG; PAM sequence: GGG
ctccctgaaatgcaaatagc

SEQ ID NO: 18540 - DNA, 20 bp, Artificial Sequence
  Description of Artificial Sequence: Synthetic oligonucleotide
  Target: COL7A1; (+) strand; PAM type: NRG; PAM sequence: GAG
ctgaaatgcaaatagcgggt

SEQ ID NO: 18541 - DNA, 20 bp, Artificial Sequence
  Description of Artificial Sequence: Synthetic oligonucleotide
  Target: COL7A1; (+) strand; PAM type: NRG; PAM sequence: AGG
tgaaatgcaaatagcgggtg

SEQ ID NO: 18542 - DNA, 20 bp, Artificial Sequence
  Description of Artificial Sequence: Synthetic oligonucleotide
  Target: COL7A1; (+) strand; PAM type: NRG; PAM sequence: GGG
gaaatgcaaatagcgggtga

SEQ ID NO: 18543 - DNA, 20 bp, Artificial Sequence
  Description of Artificial Sequence: Synthetic oligonucleotide
  Target: COL7A1; (+) strand; PAM type: NRG; PAM sequence: AAG
gcaaatagcgggtgagggcc

SEQ ID NO: 18544 - DNA, 20 bp, Artificial Sequence
  Description of Artificial Sequence: Synthetic oligonucleotide
  Target: COL7A1; (+) strand; PAM type: NRG; PAM sequence: TGG
gcgggtgagggccaagccca

SEQ ID NO: 18545 - DNA, 20 bp, Artificial Sequence
  Description of Artificial Sequence: Synthetic oligonucleotide
  Target: COL7A1; (+) strand; PAM type: NRG; PAM sequence: GGG
cgggtgagggccaagcccat

SEQ ID NO: 18546 - DNA, 20 bp, Artificial Sequence
  Description of Artificial Sequence: Synthetic oligonucleotide
  Target: COL7A1; (+) strand; PAM type: NRG; PAM sequence: GGG
gggtgagggccaagcccatg

SEQ ID NO: 18547 - DNA, 20 bp, Artificial Sequence
  Description of Artificial Sequence: Synthetic oligonucleotide
  Target: COL7A1; (+) strand; PAM type: NRG; PAM sequence: GGG
ggtgagggccaagcccatgg

SEQ ID NO: 18548 - DNA, 20 bp, Artificial Sequence
  Description of Artificial Sequence: Synthetic oligonucleotide
  Target: COL7A1; (+) strand; PAM type: NRG; PAM sequence: GGG
gtgagggccaagcccatggg

SEQ ID NO: 18549 - DNA, 20 bp, Artificial Sequence
  Description of Artificial Sequence: Synthetic oligonucleotide
  Target: COL7A1; (+) strand; PAM type: NRG; PAM sequence: TGG
cccctcttccctcactctcc

SEQ ID NO: 18550 - DNA, 20 bp, Artificial Sequence
  Description of Artificial Sequence: Synthetic oligonucleotide
  Target: COL7A1; (+) strand; PAM type: NRG; PAM sequence: CAG
tcttccctcactctcctggc

SEQ ID NO: 18551 - DNA, 20 bp, Artificial Sequence
  Description of Artificial Sequence: Synthetic oligonucleotide
  Target: COL7A1; (+) strand; PAM type: NRG; PAM sequence: CAG
tcactctcctggccagcccc

SEQ ID NO: 18552 - DNA, 20 bp, Artificial Sequence
  Description of Artificial Sequence: Synthetic oligonucleotide
  Target: COL7A1; (+) strand; PAM type: NRG; PAM sequence: TGG
cccagcctcaccctctctcc

SEQ ID NO: 18553 - DNA, 20 bp, Artificial Sequence
  Description of Artificial Sequence: Synthetic oligonucleotide
  Target: COL7A1; (+) strand; PAM type: NRG; PAM sequence: CAG
tcctgcctctcccacacccc

SEQ ID NO: 18554 - DNA, 20 bp, Artificial Sequence
  Description of Artificial Sequence: Synthetic oligonucleotide
  Target: COL7A1; (+) strand; PAM type: NRG; PAM sequence: TGG
cccacacccccagccctgcc

SEQ ID NO: 18555 - DNA, 20 bp, Artificial Sequence
  Description of Artificial Sequence: Synthetic oligonucleotide
  Target: COL7A1; (+) strand; PAM type: NRG; PAM sequence: GGG
ccacacccccagccctgcct

SEQ ID NO: 18556 - DNA, 20 bp, Artificial Sequence
  Description of Artificial Sequence: Synthetic oligonucleotide
  Target: COL7A1; (+) strand; PAM type: NRG; PAM sequence: GAG
acacccccagccctgcctgg

SEQ ID NO: 18557 - DNA, 20 bp, Artificial Sequence
  Description of Artificial Sequence: Synthetic oligonucleotide
  Target: COL7A1; (+) strand; PAM type: NRG; PAM sequence: CGG
cccagccctgcctgggagcc

SEQ ID NO: 18558 - DNA, 20 bp, Artificial Sequence
  Description of Artificial Sequence: Synthetic oligonucleotide
  Target: COL7A1; (+) strand; PAM type: NRG; PAM sequence: GGG
ccagccctgcctgggagccc

SEQ ID NO: 18559 - DNA, 20 bp, Artificial Sequence
  Description of Artificial Sequence: Synthetic oligonucleotide
  Target: COL7A1; (+) strand; PAM type: NRG; PAM sequence: CAG
gcctgggagcccgggaatac

SEQ ID NO: 18560 - DNA, 20 bp, Artificial Sequence
  Description of Artificial Sequence: Synthetic oligonucleotide
  Target: COL7A1; (+) strand; PAM type: NRG; PAM sequence: AGG
cctgggagcccgggaatacc

SEQ ID NO: 18561 - DNA, 20 bp, Artificial Sequence
  Description of Artificial Sequence: Synthetic oligonucleotide
  Target: COL7A1; (+) strand; PAM type: NRG; PAM sequence: CAG
cccgggaataccaggctttc

SEQ ID NO: 18562 - DNA, 20 bp, Artificial Sequence
  Description of Artificial Sequence: Synthetic oligonucleotide
  Target: COL7A1; (+) strand; PAM type: NRG; PAM sequence: AGG
ccgggaataccaggctttcc

SEQ ID NO: 18563 - DNA, 20 bp, Artificial Sequence
  Description of Artificial Sequence: Synthetic oligonucleotide
  Target: COL7A1; (+) strand; PAM type: NRG; PAM sequence: CGG
accaggctttccaggctccc

SEQ ID NO: 18564 - DNA, 20 bp, Artificial Sequence
  Description of Artificial Sequence: Synthetic oligonucleotide
  Target: COL7A1; (+) strand; PAM type: NRG; PAM sequence: AAG
ggctttccaggctccccggc

SEQ ID NO: 18565 - DNA, 20 bp, Artificial Sequence
  Description of Artificial Sequence: Synthetic oligonucleotide
  Target: COL7A1; (+) strand; PAM type: NRG; PAM sequence: AGG
gctttccaggctccccggca

SEQ ID NO: 18566 - DNA, 20 bp, Artificial Sequence
  Description of Artificial Sequence: Synthetic oligonucleotide
  Target: COL7A1; (+) strand; PAM type: NRG; PAM sequence: CGG
tccaggctccccggcaaggc

SEQ ID NO: 18567 - DNA, 20 bp, Artificial Sequence
  Description of Artificial Sequence: Synthetic oligonucleotide
  Target: COL7A1; (+) strand; PAM type: NRG; PAM sequence: AAG
aggctccccggcaaggccgg

SEQ ID NO: 18568 - DNA, 20 bp, Artificial Sequence
  Description of Artificial Sequence: Synthetic oligonucleotide
  Target: COL7A1; (+) strand; PAM type: NRG; PAM sequence: AGG
ggctccccggcaaggccgga

SEQ ID NO: 18569 - DNA, 20 bp, Artificial Sequence
  Description of Artificial Sequence: Synthetic oligonucleotide
  Target: COL7A1; (+) strand; PAM type: NRG; PAM sequence: CGG
cccggcaaggccggaaggcc

SEQ ID NO: 18570 - DNA, 20 bp, Artificial Sequence
  Description of Artificial Sequence: Synthetic oligonucleotide
  Target: COL7A1; (+) strand; PAM type: NRG; PAM sequence: GGG
ccggcaaggccggaaggccc

SEQ ID NO: 18571 - DNA, 20 bp, Artificial Sequence
  Description of Artificial Sequence: Synthetic oligonucleotide
  Target: COL7A1; (+) strand; PAM type: NRG; PAM sequence: GGG
cggcaaggccggaaggcccg

SEQ ID NO: 18572 - DNA, 20 bp, Artificial Sequence
  Description of Artificial Sequence: Synthetic oligonucleotide
  Target: COL7A1; (+) strand; PAM type: NRG; PAM sequence: GGG
ggcaaggccggaaggcccgg

SEQ ID NO: 18573 - DNA, 20 bp, Artificial Sequence
  Description of Artificial Sequence: Synthetic oligonucleotide
  Target: COL7A1; (+) strand; PAM type: NRG; PAM sequence: GGG
gcaaggccggaaggcccggg

SEQ ID NO: 18574 - DNA, 20 bp, Artificial Sequence
  Description of Artificial Sequence: Synthetic oligonucleotide
  Target: COL7A1; (+) strand; PAM type: NRG; PAM sequence: GGG
caaggccggaaggcccgggg

SEQ ID NO: 18575 - DNA, 20 bp, Artificial Sequence
  Description of Artificial Sequence: Synthetic oligonucleotide
  Target: COL7A1; (+) strand; PAM type: NRG; PAM sequence: AAG
ccgggggggcccctctcccc

SEQ ID NO: 18576 - DNA, 20 bp, Artificial Sequence
  Description of Artificial Sequence: Synthetic oligonucleotide
  Target: COL7A1; (+) strand; PAM type: NRG; PAM sequence: AGG
cgggggggcccctctcccca

SEQ ID NO: 18577 - DNA, 20 bp, Artificial Sequence
  Description of Artificial Sequence: Synthetic oligonucleotide
  Target: COL7A1; (+) strand; PAM type: NRG; PAM sequence: GGG
gggggggcccctctccccaa

SEQ ID NO: 18578 - DNA, 20 bp, Artificial Sequence
  Description of Artificial Sequence: Synthetic oligonucleotide
  Target: COL7A1; (+) strand; PAM type: NRG; PAM sequence: CAG
gggcccctctccccaagggc

SEQ ID NO: 18579 - DNA, 20 bp, Artificial Sequence
  Description of Artificial Sequence: Synthetic oligonucleotide
  Target: COL7A1; (+) strand; PAM type: NRG; PAM sequence: CAG
cctctccccaagggccagac

SEQ ID NO: 18580 - DNA, 20 bp, Artificial Sequence
  Description of Artificial Sequence: Synthetic oligonucleotide
  Target: COL7A1; (+) strand; PAM type: NRG; PAM sequence: AGG
ctctccccaagggccagacc

SEQ ID NO: 18581 - DNA, 20 bp, Artificial Sequence
  Description of Artificial Sequence: Synthetic oligonucleotide
  Target: COL7A1; (+) strand; PAM type: NRG; PAM sequence: TGG
tccccaagggccagaccagg

SEQ ID NO: 18582 - DNA, 20 bp, Artificial Sequence
  Description of Artificial Sequence: Synthetic oligonucleotide
  Target: COL7A1; (+) strand; PAM type: NRG; PAM sequence: GAG
ggccagaccaggtggcccct

SEQ ID NO: 18583 - DNA, 20 bp, Artificial Sequence
  Description of Artificial Sequence: Synthetic oligonucleotide
  Target: COL7A1; (+) strand; PAM type: NRG; PAM sequence: AGG
gccagaccaggtggcccctg

SEQ ID NO: 18584 - DNA, 20 bp, Artificial Sequence
  Description of Artificial Sequence: Synthetic oligonucleotide
  Target: COL7A1; (+) strand; PAM type: NRG; PAM sequence: GGG
ccagaccaggtggcccctga

SEQ ID NO: 18585 - DNA, 20 bp, Artificial Sequence
  Description of Artificial Sequence: Synthetic oligonucleotide
  Target: COL7A1; (+) strand; PAM type: NRG; PAM sequence: CAG
accaggtggcccctgagggc

SEQ ID NO: 18586 - DNA, 20 bp, Artificial Sequence
  Description of Artificial Sequence: Synthetic oligonucleotide
  Target: COL7A1; (+) strand; PAM type: NRG; PAM sequence: AGG
ccaggtggcccctgagggcc

SEQ ID NO: 18587 - DNA, 20 bp, Artificial Sequence
  Description of Artificial Sequence: Synthetic oligonucleotide
  Target: COL7A1; (+) strand; PAM type: NRG; PAM sequence: GGG
caggtggcccctgagggcca

SEQ ID NO: 18588 - DNA, 20 bp, Artificial Sequence
  Description of Artificial Sequence: Synthetic oligonucleotide
  Target: COL7A1; (+) strand; PAM type: NRG; PAM sequence: CGG
cctgagggccagggtctcca

SEQ ID NO: 18589 - DNA, 20 bp, Artificial Sequence
  Description of Artificial Sequence: Synthetic oligonucleotide
  Target: COL7A1; (+) strand; PAM type: NRG; PAM sequence: CAG
gggtctccacggtcgccctt

SEQ ID NO: 18590 - DNA, 20 bp, Artificial Sequence
  Description of Artificial Sequence: Synthetic oligonucleotide
  Target: COL7A1; (+) strand; PAM type: NRG; PAM sequence: CAG
gcccttcagcccgcgttctc

SEQ ID NO: 18591 - DNA, 20 bp, Artificial Sequence
  Description of Artificial Sequence: Synthetic oligonucleotide
  Target: COL7A1; (+) strand; PAM type: NRG; PAM sequence: AGG
cccttcagcccgcgttctcc

SEQ ID NO: 18592 - DNA, 20 bp, Artificial Sequence
  Description of Artificial Sequence: Synthetic oligonucleotide
  Target: COL7A1; (+) strand; PAM type: NRG; PAM sequence: AAG
tcagcccgcgttctccagga

SEQ ID NO: 18593 - DNA, 20 bp, Artificial Sequence
  Description of Artificial Sequence: Synthetic oligonucleotide
  Target: COL7A1; (+) strand; PAM type: NRG; PAM sequence: TGG
gcgttctccaggaaagccga

SEQ ID NO: 18594 - DNA, 20 bp, Artificial Sequence
  Description of Artificial Sequence: Synthetic oligonucleotide
  Target: COL7A1; (+) strand; PAM type: NRG; PAM sequence: GGG
cgttctccaggaaagccgat

SEQ ID NO: 18595 - DNA, 20 bp, Artificial Sequence
  Description of Artificial Sequence: Synthetic oligonucleotide
  Target: COL7A1; (+) strand; PAM type: NRG; PAM sequence: GGG
gttctccaggaaagccgatg

SEQ ID NO: 18596 - DNA, 20 bp, Artificial Sequence
  Description of Artificial Sequence: Synthetic oligonucleotide
  Target: COL7A1; (+) strand; PAM type: NRG; PAM sequence: CAG
ggaaagccgatggggccctg

SEQ ID NO: 18597 - DNA, 20 bp, Artificial Sequence
  Description of Artificial Sequence: Synthetic oligonucleotide
  Target: COL7A1; (+) strand; PAM type: NRG; PAM sequence: AGG
gaaagccgatggggccctgc

SEQ ID NO: 18598 - DNA, 20 bp, Artificial Sequence
  Description of Artificial Sequence: Synthetic oligonucleotide
  Target: COL7A1; (+) strand; PAM type: NRG; PAM sequence: GAG
aagccgatggggccctgcag

SEQ ID NO: 18599 - DNA, 20 bp, Artificial Sequence
  Description of Artificial Sequence: Synthetic oligonucleotide
  Target: COL7A1; (+) strand; PAM type: NRG; PAM sequence: TGG
ccgatggggccctgcaggag

SEQ ID NO: 18600 - DNA, 20 bp, Artificial Sequence
  Description of Artificial Sequence: Synthetic oligonucleotide
  Target: COL7A1; (+) strand; PAM type: NRG; PAM sequence: AAG
atggggccctgcaggagtgg

SEQ ID NO: 18601 - DNA, 20 bp, Artificial Sequence
  Description of Artificial Sequence: Synthetic oligonucleotide
  Target: COL7A1; (+) strand; PAM type: NRG; PAM sequence: GAG
ggggccctgcaggagtggaa

SEQ ID NO: 18602 - DNA, 20 bp, Artificial Sequence
  Description of Artificial Sequence: Synthetic oligonucleotide
  Target: COL7A1; (+) strand; PAM type: NRG; PAM sequence: GAG
ggccctgcaggagtggaaga

SEQ ID NO: 18603 - DNA, 20 bp, Artificial Sequence
  Description of Artificial Sequence: Synthetic oligonucleotide
  Target: COL7A1; (+) strand; PAM type: NRG; PAM sequence: TGG
aggagtggaagagagaatgc

SEQ ID NO: 18604 - DNA, 20 bp, Artificial Sequence
  Description of Artificial Sequence: Synthetic oligonucleotide
  Target: COL7A1; (+) strand; PAM type: NRG; PAM sequence: TGG
agtggaagagagaatgctgg

SEQ ID NO: 18605 - DNA, 20 bp, Artificial Sequence
  Description of Artificial Sequence: Synthetic oligonucleotide
  Target: COL7A1; (+) strand; PAM type: NRG; PAM sequence: CAG
agagaatgctggtggctgta

SEQ ID NO: 18606 - DNA, 20 bp, Artificial Sequence
  Description of Artificial Sequence: Synthetic oligonucleotide
  Target: COL7A1; (+) strand; PAM type: NRG; PAM sequence: CGG
tacagctacaccccactcca

SEQ ID NO: 18607 - DNA, 20 bp, Artificial Sequence
  Description of Artificial Sequence: Synthetic oligonucleotide
  Target: COL7A1; (+) strand; PAM type: NRG; PAM sequence: GGG
acagctacaccccactccac

SEQ ID NO: 18608 - DNA, 20 bp, Artificial Sequence
  Description of Artificial Sequence: Synthetic oligonucleotide
  Target: COL7A1; (+) strand; PAM type: NRG; PAM sequence: GGG
cagctacaccccactccacg

SEQ ID NO: 18609 - DNA, 20 bp, Artificial Sequence
  Description of Artificial Sequence: Synthetic oligonucleotide
  Target: COL7A1; (+) strand; PAM type: NRG; PAM sequence: GAG
tccacggggcacaacccact

SEQ ID NO: 18610 - DNA, 20 bp, Artificial Sequence
  Description of Artificial Sequence: Synthetic oligonucleotide
  Target: COL7A1; (+) strand; PAM type: NRG; PAM sequence: TGG
cttctgctcacctccttgcc

SEQ ID NO: 18611 - DNA, 20 bp, Artificial Sequence
  Description of Artificial Sequence: Synthetic oligonucleotide
  Target: COL7A1; (+) strand; PAM type: NRG; PAM sequence: GGG
ttctgctcacctccttgcct

SEQ ID NO: 18612 - DNA, 20 bp, Artificial Sequence
  Description of Artificial Sequence: Synthetic oligonucleotide
  Target: COL7A1; (+) strand; PAM type: NRG; PAM sequence: GGG
tctgctcacctccttgcctg

SEQ ID NO: 18613 - DNA, 20 bp, Artificial Sequence
  Description of Artificial Sequence: Synthetic oligonucleotide
  Target: COL7A1; (+) strand; PAM type: NRG; PAM sequence: GGG
ctgctcacctccttgcctgg

SEQ ID NO: 18614 - DNA, 20 bp, Artificial Sequence
  Description of Artificial Sequence: Synthetic oligonucleotide
  Target: COL7A1; (+) strand; PAM type: NRG; PAM sequence: GGG
tgctcacctccttgcctggg

SEQ ID NO: 18615 - DNA, 20 bp, Artificial Sequence
  Description of Artificial Sequence: Synthetic oligonucleotide
  Target: COL7A1; (+) strand; PAM type: NRG; PAM sequence: GAG
ctggggggccctgttcgcct

SEQ ID NO: 18616 - DNA, 20 bp, Artificial Sequence
  Description of Artificial Sequence: Synthetic oligonucleotide
  Target: COL7A1; (+) strand; PAM type: NRG; PAM sequence: TGG
ctgttcgcctgagtccccct

SEQ ID NO: 18617 - DNA, 20 bp, Artificial Sequence
  Description of Artificial Sequence: Synthetic oligonucleotide
  Target: COL7A1; (+) strand; PAM type: NRG; PAM sequence: GGG
tgttcgcctgagtccccctt

SEQ ID NO: 18618 - DNA, 20 bp, Artificial Sequence
  Description of Artificial Sequence: Synthetic oligonucleotide
  Target: COL7A1; (+) strand; PAM type: NRG; PAM sequence: GGG
gttcgcctgagtcccccttg

SEQ ID NO: 18619 - DNA, 20 bp, Artificial Sequence
  Description of Artificial Sequence: Synthetic oligonucleotide
  Target: COL7A1; (+) strand; PAM type: NRG; PAM sequence: CGG
cttggggcctcgacgccgtt

SEQ ID NO: 18620 - DNA, 20 bp, Artificial Sequence
  Description of Artificial Sequence: Synthetic oligonucleotide
  Target: COL7A1; (+) strand; PAM type: NRG; PAM sequence: GGG
ttggggcctcgacgccgttc

SEQ ID NO: 18621 - DNA, 20 bp, Artificial Sequence
  Description of Artificial Sequence: Synthetic oligonucleotide
  Target: COL7A1; (+) strand; PAM type: NRG; PAM sequence: CAG
gcctcgacgccgttcgggca

SEQ ID NO: 18622 - DNA, 20 bp, Artificial Sequence
  Description of Artificial Sequence: Synthetic oligonucleotide
  Target: COL7A1; (+) strand; PAM type: NRG; PAM sequence: AGG
cctcgacgccgttcgggcac

SEQ ID NO: 18623 - DNA, 20 bp, Artificial Sequence
  Description of Artificial Sequence: Synthetic oligonucleotide
  Target: COL7A1; (+) strand; PAM type: NRG; PAM sequence: CAG
cgacgccgttcgggcacagg

SEQ ID NO: 18624 - DNA, 20 bp, Artificial Sequence
  Description of Artificial Sequence: Synthetic oligonucleotide
  Target: COL7A1; (+) strand; PAM type: NRG; PAM sequence: AGG
gacgccgttcgggcacaggc

SEQ ID NO: 18625 - DNA, 20 bp, Artificial Sequence
  Description of Artificial Sequence: Synthetic oligonucleotide
  Target: COL7A1; (+) strand; PAM type: NRG; PAM sequence: AAG
gccgttcgggcacaggcagg

SEQ ID NO: 18626 - DNA, 20 bp, Artificial Sequence
  Description of Artificial Sequence: Synthetic oligonucleotide
  Target: COL7A1; (+) strand; PAM type: NRG; PAM sequence: CAG
gggcacaggcaggaagctac

SEQ ID NO: 18627 - DNA, 20 bp, Artificial Sequence
  Description of Artificial Sequence: Synthetic oligonucleotide
  Target: COL7A1; (+) strand; PAM type: NRG; PAM sequence: GAG
gcacaggcaggaagctacca

SEQ ID NO: 18628 - DNA, 20 bp, Artificial Sequence
  Description of Artificial Sequence: Synthetic oligonucleotide
  Target: COL7A1; (+) strand; PAM type: NRG; PAM sequence: CAG
agctaccagagctctcatcc

SEQ ID NO: 18629 - DNA, 20 bp, Artificial Sequence
  Description of Artificial Sequence: Synthetic oligonucleotide
  Target: COL7A1; (+) strand; PAM type: NRG; PAM sequence: AGG
gctaccagagctctcatccc

SEQ ID NO: 18630 - DNA, 20 bp, Artificial Sequence
  Description of Artificial Sequence: Synthetic oligonucleotide
  Target: COL7A1; (+) strand; PAM type: NRG; PAM sequence: CAG
caggtctccacgatctcccg

SEQ ID NO: 18631 - DNA, 20 bp, Artificial Sequence
  Description of Artificial Sequence: Synthetic oligonucleotide
  Target: COL7A1; (+) strand; PAM type: NRG; PAM sequence: AGG
aggtctccacgatctcccgc

SEQ ID NO: 18632 - DNA, 20 bp, Artificial Sequence
  Description of Artificial Sequence: Synthetic oligonucleotide
  Target: COL7A1; (+) strand; PAM type: NRG; PAM sequence: GGG
ggtctccacgatctcccgca

SEQ ID NO: 18633 - DNA, 20 bp, Artificial Sequence
  Description of Artificial Sequence: Synthetic oligonucleotide
  Target: COL7A1; (+) strand; PAM type: NRG; PAM sequence: CAG
ctccacgatctcccgcaggg

SEQ ID NO: 18634 - DNA, 20 bp, Artificial Sequence
  Description of Artificial Sequence: Synthetic oligonucleotide
  Target: COL7A1; (+) strand; PAM type: NRG; PAM sequence: GAG
ctcccgcagggcagatgcct

SEQ ID NO: 18635 - DNA, 20 bp, Artificial Sequence
  Description of Artificial Sequence: Synthetic oligonucleotide
  Target: COL7A1; (+) strand; PAM type: NRG; PAM sequence: AGG
tcccgcagggcagatgcctg

SEQ ID NO: 18636 - DNA, 20 bp, Artificial Sequence
  Description of Artificial Sequence: Synthetic oligonucleotide
  Target: COL7A1; (+) strand; PAM type: NRG; PAM sequence: GGG
cccgcagggcagatgcctga

SEQ ID NO: 18637 - DNA, 20 bp, Artificial Sequence
  Description of Artificial Sequence: Synthetic oligonucleotide
  Target: COL7A1; (+) strand; PAM type: NRG; PAM sequence: CAG
cagggcagatgcctgaggga

SEQ ID NO: 18638 - DNA, 20 bp, Artificial Sequence
  Description of Artificial Sequence: Synthetic oligonucleotide
  Target: COL7A1; (+) strand; PAM type: NRG; PAM sequence: AAG
gcagatgcctgagggacagc

SEQ ID NO: 18639 - DNA, 20 bp, Artificial Sequence
  Description of Artificial Sequence: Synthetic oligonucleotide
  Target: COL7A1; (+) strand; PAM type: NRG; PAM sequence: GAG
agatgcctgagggacagcaa

SEQ ID NO: 18640 - DNA, 20 bp, Artificial Sequence
  Description of Artificial Sequence: Synthetic oligonucleotide
  Target: COL7A1; (+) strand; PAM type: NRG; PAM sequence: AGG
gatgcctgagggacagcaag

SEQ ID NO: 18641 - DNA, 20 bp, Artificial Sequence
  Description of Artificial Sequence: Synthetic oligonucleotide
  Target: COL7A1; (+) strand; PAM type: NRG; PAM sequence: CAG
cctgagggacagcaagaggt

SEQ ID NO: 18642 - DNA, 20 bp, Artificial Sequence
  Description of Artificial Sequence: Synthetic oligonucleotide
  Target: COL7A1; (+) strand; PAM type: NRG; PAM sequence: GAG
tgagggacagcaagaggtca

SEQ ID NO: 18643 - DNA, 20 bp, Artificial Sequence
  Description of Artificial Sequence: Synthetic oligonucleotide
  Target: COL7A1; (+) strand; PAM type: NRG; PAM sequence: AGG
gagggacagcaagaggtcag

SEQ ID NO: 18644 - DNA, 20 bp, Artificial Sequence
  Description of Artificial Sequence: Synthetic oligonucleotide
  Target: COL7A1; (+) strand; PAM type: NRG; PAM sequence: GAG
gggacagcaagaggtcagag

SEQ ID NO: 18645 - DNA, 20 bp, Artificial Sequence
  Description of Artificial Sequence: Synthetic oligonucleotide
  Target: COL7A1; (+) strand; PAM type: NRG; PAM sequence: CGG
acagcaagaggtcagaggag

SEQ ID NO: 18646 - DNA, 20 bp, Artificial Sequence
  Description of Artificial Sequence: Synthetic oligonucleotide
  Target: COL7A1; (+) strand; PAM type: NRG; PAM sequence: GGG
cagcaagaggtcagaggagc

SEQ ID NO: 18647 - DNA, 20 bp, Artificial Sequence
  Description of Artificial Sequence: Synthetic oligonucleotide
  Target: COL7A1; (+) strand; PAM type: NRG; PAM sequence: GGG
agcaagaggtcagaggagcg

SEQ ID NO: 18648 - DNA, 20 bp, Artificial Sequence
  Description of Artificial Sequence: Synthetic oligonucleotide
  Target: COL7A1; (+) strand; PAM type: NRG; PAM sequence: CAG
aggagcggggtgcgtcgccg

SEQ ID NO: 18649 - DNA, 20 bp, Artificial Sequence
  Description of Artificial Sequence: Synthetic oligonucleotide
  Target: COL7A1; (+) strand; PAM type: NRG; PAM sequence: TGG
cgccgcagcccctatgcctg

SEQ ID NO: 18650 - DNA, 20 bp, Artificial Sequence
  Description of Artificial Sequence: Synthetic oligonucleotide
  Target: COL7A1; (+) strand; PAM type: NRG; PAM sequence: GGG
gccgcagcccctatgcctgt

SEQ ID NO: 18651 - DNA, 20 bp, Artificial Sequence
  Description of Artificial Sequence: Synthetic oligonucleotide
  Target: COL7A1; (+) strand; PAM type: NRG; PAM sequence: TAG
cctatgcctgtgggcaccac

SEQ ID NO: 18652 - DNA, 20 bp, Artificial Sequence
  Description of Artificial Sequence: Synthetic oligonucleotide
  Target: COL7A1; (+) strand; PAM type: NRG; PAM sequence: AAG
ctgtgggcaccactagcccc

SEQ ID NO: 18653 - DNA, 20 bp, Artificial Sequence
  Description of Artificial Sequence: Synthetic oligonucleotide
  Target: COL7A1; (+) strand; PAM type: NRG; PAM sequence: AGG
tgtgggcaccactagcccca

SEQ ID NO: 18654 - DNA, 20 bp, Artificial Sequence
  Description of Artificial Sequence: Synthetic oligonucleotide
  Target: COL7A1; (+) strand; PAM type: NRG; PAM sequence: GGG
gtgggcaccactagccccaa

SEQ ID NO: 18655 - DNA, 20 bp, Artificial Sequence
  Description of Artificial Sequence: Synthetic oligonucleotide
  Target: COL7A1; (+) strand; PAM type: NRG; PAM sequence: CAG
cccccacttgtccctacccc

SEQ ID NO: 18656 - DNA, 20 bp, Artificial Sequence
  Description of Artificial Sequence: Synthetic oligonucleotide
  Target: COL7A1; (+) strand; PAM type: NRG; PAM sequence: CAG
taaacaacccaccttgatgc

SEQ ID NO: 18657 - DNA, 20 bp, Artificial Sequence
  Description of Artificial Sequence: Synthetic oligonucleotide
  Target: COL7A1; (+) strand; PAM type: NRG; PAM sequence: CAG
acaacccaccttgatgccag

SEQ ID NO: 18658 - DNA, 20 bp, Artificial Sequence
  Description of Artificial Sequence: Synthetic oligonucleotide
  Target: COL7A1; (+) strand; PAM type: NRG; PAM sequence: CAG
accttgatgccagcagtttc

SEQ ID NO: 18659 - DNA, 20 bp, Artificial Sequence
  Description of Artificial Sequence: Synthetic oligonucleotide
  Target: COL7A1; (+) strand; PAM type: NRG; PAM sequence: TGG
ccagcaaccgatccacattc

SEQ ID NO: 18660 - DNA, 20 bp, Artificial Sequence
  Description of Artificial Sequence: Synthetic oligonucleotide
  Target: COL7A1; (+) strand; PAM type: NRG; PAM sequence: GGG
cagcaaccgatccacattct

SEQ ID NO: 18661 - DNA, 20 bp, Artificial Sequence
  Description of Artificial Sequence: Synthetic oligonucleotide
  Target: COL7A1; (+) strand; PAM type: NRG; PAM sequence: GGG
agcaaccgatccacattctg

SEQ ID NO: 18662 - DNA, 20 bp, Artificial Sequence
  Description of Artificial Sequence: Synthetic oligonucleotide
  Target: COL7A1; (+) strand; PAM type: NRG; PAM sequence: AAG
cgatccacattctggggaca

SEQ ID NO: 18663 - DNA, 20 bp, Artificial Sequence
  Description of Artificial Sequence: Synthetic oligonucleotide
  Target: COL7A1; (+) strand; PAM type: NRG; PAM sequence: TGG
cacattctggggacaaagtc

SEQ ID NO: 18664 - DNA, 20 bp, Artificial Sequence
  Description of Artificial Sequence: Synthetic oligonucleotide
  Target: COL7A1; (+) strand; PAM type: NRG; PAM sequence: GGG
acattctggggacaaagtct

SEQ ID NO: 18665 - DNA, 20 bp, Artificial Sequence
  Description of Artificial Sequence: Synthetic oligonucleotide
  Target: COL7A1; (+) strand; PAM type: NRG; PAM sequence: AAG
ctggggacaaagtctgggtg

SEQ ID NO: 18666 - DNA, 20 bp, Artificial Sequence
  Description of Artificial Sequence: Synthetic oligonucleotide
  Target: COL7A1; (+) strand; PAM type: NRG; PAM sequence: AGG
tggggacaaagtctgggtga

SEQ ID NO: 18667 - DNA, 20 bp, Artificial Sequence
  Description of Artificial Sequence: Synthetic oligonucleotide
  Target: COL7A1; (+) strand; PAM type: NRG; PAM sequence: GGG
ggggacaaagtctgggtgaa

SEQ ID NO: 18668 - DNA, 20 bp, Artificial Sequence
  Description of Artificial Sequence: Synthetic oligonucleotide
  Target: COL7A1; (+) strand; PAM type: NRG; PAM sequence: CAG
gggtgaagggctgcccatga

SEQ ID NO: 18669 - DNA, 20 bp, Artificial Sequence
  Description of Artificial Sequence: Synthetic oligonucleotide
  Target: COL7A1; (+) strand; PAM type: NRG; PAM sequence: GAG
gtgaagggctgcccatgaca

SEQ ID NO: 18670 - DNA, 20 bp, Artificial Sequence
  Description of Artificial Sequence: Synthetic oligonucleotide
  Target: COL7A1; (+) strand; PAM type: NRG; PAM sequence: AAG
aagggctgcccatgacagag

SEQ ID NO: 18671 - DNA, 20 bp, Artificial Sequence
  Description of Artificial Sequence: Synthetic oligonucleotide
  Target: COL7A1; (+) strand; PAM type: NRG; PAM sequence: CGG
ctcctgccttctgccccgca

SEQ ID NO: 18672 - DNA, 20 bp, Artificial Sequence
  Description of Artificial Sequence: Synthetic oligonucleotide
  Target: COL7A1; (+) strand; PAM type: NRG; PAM sequence: CAG
ccttctgccccgcacggcct

SEQ ID NO: 18673 - DNA, 20 bp, Artificial Sequence
  Description of Artificial Sequence: Synthetic oligonucleotide
  Target: COL7A1; (+) strand; PAM type: NRG; PAM sequence: AGG
cttctgccccgcacggcctc

SEQ ID NO: 18674 - DNA, 20 bp, Artificial Sequence
  Description of Artificial Sequence: Synthetic oligonucleotide
  Target: COL7A1; (+) strand; PAM type: NRG; PAM sequence: AAG
tgccccgcacggcctcagga

SEQ ID NO: 18675 - DNA, 20 bp, Artificial Sequence
  Description of Artificial Sequence: Synthetic oligonucleotide
  Target: COL7A1; (+) strand; PAM type: NRG; PAM sequence: TAG
caccttcacacccttttccc

SEQ ID NO: 18676 - DNA, 20 bp, Artificial Sequence
  Description of Artificial Sequence: Synthetic oligonucleotide
  Target: COL7A1; (+) strand; PAM type: NRG; PAM sequence: AGG
accttcacacccttttccct

SEQ ID NO: 18677 - DNA, 20 bp, Artificial Sequence
  Description of Artificial Sequence: Synthetic oligonucleotide
  Target: COL7A1; (+) strand; PAM type: NRG; PAM sequence: CAG
ttttccctaggcctcttgcc

SEQ ID NO: 18678 - DNA, 20 bp, Artificial Sequence
  Description of Artificial Sequence: Synthetic oligonucleotide
  Target: COL7A1; (+) strand; PAM type: NRG; PAM sequence: GAG
ttccctaggcctcttgccca

SEQ ID NO: 18679 - DNA, 20 bp, Artificial Sequence
  Description of Artificial Sequence: Synthetic oligonucleotide
  Target: COL7A1; (+) strand; PAM type: NRG; PAM sequence: TAG
ctcttgcccagagcaccctt

SEQ ID NO: 18680 - DNA, 20 bp, Artificial Sequence
  Description of Artificial Sequence: Synthetic oligonucleotide
  Target: COL7A1; (+) strand; PAM type: NRG; PAM sequence: TGG
ccagagcaccctttagcact

SEQ ID NO: 18681 - DNA, 20 bp, Artificial Sequence
  Description of Artificial Sequence: Synthetic oligonucleotide
  Target: COL7A1; (+) strand; PAM type: NRG; PAM sequence: GAG
gcaccctttagcacttggtt

SEQ ID NO: 18682 - DNA, 20 bp, Artificial Sequence
  Description of Artificial Sequence: Synthetic oligonucleotide
  Target: COL7A1; (+) strand; PAM type: NRG; PAM sequence: AGG
caccctttagcacttggttg

SEQ ID NO: 18683 - DNA, 20 bp, Artificial Sequence
  Description of Artificial Sequence: Synthetic oligonucleotide
  Target: COL7A1; (+) strand; PAM type: NRG; PAM sequence: TGG
tttagcacttggttgaggca

SEQ ID NO: 18684 - DNA, 20 bp, Artificial Sequence
  Description of Artificial Sequence: Synthetic oligonucleotide
  Target: COL7A1; (+) strand; PAM type: NRG; PAM sequence: TGG
gcacttggttgaggcatggc

SEQ ID NO: 18685 - DNA, 20 bp, Artificial Sequence
  Description of Artificial Sequence: Synthetic oligonucleotide
  Target: COL7A1; (+) strand; PAM type: NRG; PAM sequence: GAG
acttggttgaggcatggctg

SEQ ID NO: 18686 - DNA, 20 bp, Artificial Sequence
  Description of Artificial Sequence: Synthetic oligonucleotide
  Target: COL7A1; (+) strand; PAM type: NRG; PAM sequence: TGG
gaggcatggctggagactcc

SEQ ID NO: 18687 - DNA, 20 bp, Artificial Sequence
  Description of Artificial Sequence: Synthetic oligonucleotide
  Target: COL7A1; (+) strand; PAM type: NRG; PAM sequence: GGG
aggcatggctggagactcct

SEQ ID NO: 18688 - DNA, 20 bp, Artificial Sequence
  Description of Artificial Sequence: Synthetic oligonucleotide
  Target: COL7A1; (+) strand; PAM type: NRG; PAM sequence: GAG
gcatggctggagactcctgg

SEQ ID NO: 18689 - DNA, 20 bp, Artificial Sequence
  Description of Artificial Sequence: Synthetic oligonucleotide
  Target: COL7A1; (+) strand; PAM type: NRG; PAM sequence: TGG
gactcctgggagcccctttc

SEQ ID NO: 18690 - DNA, 20 bp, Artificial Sequence
  Description of Artificial Sequence: Synthetic oligonucleotide
  Target: COL7A1; (+) strand; PAM type: NRG; PAM sequence: AAG
ctggtgtgtccccactgccc

SEQ ID NO: 18691 - DNA, 20 bp, Artificial Sequence
  Description of Artificial Sequence: Synthetic oligonucleotide
  Target: COL7A1; (+) strand; PAM type: NRG; PAM sequence: GAG
cccactgcccaagttccctt

SEQ ID NO: 18692 - DNA, 20 bp, Artificial Sequence
  Description of Artificial Sequence: Synthetic oligonucleotide
  Target: COL7A1; (+) strand; PAM type: NRG; PAM sequence: TGG
tgcccaagttcccttgagtg

SEQ ID NO: 18693 - DNA, 20 bp, Artificial Sequence
  Description of Artificial Sequence: Synthetic oligonucleotide
  Target: COL7A1; (+) strand; PAM type: NRG; PAM sequence: GGG
gcccaagttcccttgagtgt

SEQ ID NO: 18694 - DNA, 20 bp, Artificial Sequence
  Description of Artificial Sequence: Synthetic oligonucleotide
  Target: COL7A1; (+) strand; PAM type: NRG; PAM sequence: AAG
ttcccttgagtgtgggctac

SEQ ID NO: 18695 - DNA, 20 bp, Artificial Sequence
  Description of Artificial Sequence: Synthetic oligonucleotide
  Target: COL7A1; (+) strand; PAM type: NRG; PAM sequence: TGG
gtgggctacaagaaccccaa

SEQ ID NO: 18696 - DNA, 20 bp, Artificial Sequence
  Description of Artificial Sequence: Synthetic oligonucleotide
  Target: COL7A1; (+) strand; PAM type: NRG; PAM sequence: GGG
tgggctacaagaaccccaat

SEQ ID NO: 18697 - DNA, 20 bp, Artificial Sequence
  Description of Artificial Sequence: Synthetic oligonucleotide
  Target: COL7A1; (+) strand; PAM type: NRG; PAM sequence: GGG
gggctacaagaaccccaatg

SEQ ID NO: 18698 - DNA, 20 bp, Artificial Sequence
  Description of Artificial Sequence: Synthetic oligonucleotide
  Target: COL7A1; (+) strand; PAM type: NRG; PAM sequence: CAG
ctacaagaaccccaatgggg

SEQ ID NO: 18699 - DNA, 20 bp, Artificial Sequence
  Description of Artificial Sequence: Synthetic oligonucleotide
  Target: COL7A1; (+) strand; PAM type: NRG; PAM sequence: AGG
tacaagaaccccaatggggc

SEQ ID NO: 18700 - DNA, 20 bp, Artificial Sequence
  Description of Artificial Sequence: Synthetic oligonucleotide
  Target: COL7A1; (+) strand; PAM type: NRG; PAM sequence: GGG
acaagaaccccaatggggca

SEQ ID NO: 18701 - DNA, 20 bp, Artificial Sequence
  Description of Artificial Sequence: Synthetic oligonucleotide
  Target: COL7A1; (+) strand; PAM type: NRG; PAM sequence: CAG
ggggcagggcactgaacaca

SEQ ID NO: 18702 - DNA, 20 bp, Artificial Sequence
  Description of Artificial Sequence: Synthetic oligonucleotide
  Target: COL7A1; (+) strand; PAM type: NRG; PAM sequence: CAG
agggcactgaacacacagca

SEQ ID NO: 18703 - DNA, 20 bp, Artificial Sequence
  Description of Artificial Sequence: Synthetic oligonucleotide
  Target: COL7A1; (+) strand; PAM type: NRG; PAM sequence: TGG
aacacacagcacagaaccta

SEQ ID NO: 18704 - DNA, 20 bp, Artificial Sequence
  Description of Artificial Sequence: Synthetic oligonucleotide
  Target: COL7A1; (+) strand; PAM type: NRG; PAM sequence: GAG
cacacagcacagaacctatg

SEQ ID NO: 18705 - DNA, 20 bp, Artificial Sequence
  Description of Artificial Sequence: Synthetic oligonucleotide
  Target: COL7A1; (+) strand; PAM type: NRG; PAM sequence: TGG
acagaacctatggagcctca

SEQ ID NO: 18706 - DNA, 20 bp, Artificial Sequence
  Description of Artificial Sequence: Synthetic oligonucleotide
  Target: COL7A1; (+) strand; PAM type: NRG; PAM sequence: AAG
aacctatggagcctcatggc

SEQ ID NO: 18707 - DNA, 20 bp, Artificial Sequence
  Description of Artificial Sequence: Synthetic oligonucleotide
  Target: COL7A1; (+) strand; PAM type: NRG; PAM sequence: AGG
acctatggagcctcatggca

SEQ ID NO: 18708 - DNA, 20 bp, Artificial Sequence
  Description of Artificial Sequence: Synthetic oligonucleotide
  Target: COL7A1; (+) strand; PAM type: NRG; PAM sequence: GGG
cctatggagcctcatggcaa

SEQ ID NO: 18709 - DNA, 20 bp, Artificial Sequence
  Description of Artificial Sequence: Synthetic oligonucleotide
  Target: COL7A1; (+) strand; PAM type: NRG; PAM sequence: GGG
ctatggagcctcatggcaag

SEQ ID NO: 18710 - DNA, 20 bp, Artificial Sequence
  Description of Artificial Sequence: Synthetic oligonucleotide
  Target: COL7A1; (+) strand; PAM type: NRG; PAM sequence: AAG
tggagcctcatggcaagggg

SEQ ID NO: 18711 - DNA, 20 bp, Artificial Sequence
  Description of Artificial Sequence: Synthetic oligonucleotide
  Target: COL7A1; (+) strand; PAM type: NRG; PAM sequence: AGG
ggagcctcatggcaagggga

SEQ ID NO: 18712 - DNA, 20 bp, Artificial Sequence
  Description of Artificial Sequence: Synthetic oligonucleotide
  Target: COL7A1; (+) strand; PAM type: NRG; PAM sequence: GGG
gagcctcatggcaaggggaa

SEQ ID NO: 18713 - DNA, 20 bp, Artificial Sequence
  Description of Artificial Sequence: Synthetic oligonucleotide
  Target: COL7A1; (+) strand; PAM type: NRG; PAM sequence: GGG
agcctcatggcaaggggaag

SEQ ID NO: 18714 - DNA, 20 bp, Artificial Sequence
  Description of Artificial Sequence: Synthetic oligonucleotide
  Target: COL7A1; (+) strand; PAM type: NRG; PAM sequence: TGG
tcatggcaaggggaagggga

SEQ ID NO: 18715 - DNA, 20 bp, Artificial Sequence
  Description of Artificial Sequence: Synthetic oligonucleotide
  Target: COL7A1; (+) strand; PAM type: NRG; PAM sequence: AAG
ggcaaggggaaggggatggc

SEQ ID NO: 18716 - DNA, 20 bp, Artificial Sequence
  Description of Artificial Sequence: Synthetic oligonucleotide
  Target: COL7A1; (+) strand; PAM type: NRG; PAM sequence: AGG
gcaaggggaaggggatggca

SEQ ID NO: 18717 - DNA, 20 bp, Artificial Sequence
  Description of Artificial Sequence: Synthetic oligonucleotide
  Target: COL7A1; (+) strand; PAM type: NRG; PAM sequence: TGG
aggggaaggggatggcaagg

SEQ ID NO: 18718 - DNA, 20 bp, Artificial Sequence
  Description of Artificial Sequence: Synthetic oligonucleotide
  Target: COL7A1; (+) strand; PAM type: NRG; PAM sequence: TGG
ggatggcaaggtggccccaa

SEQ ID NO: 18719 - DNA, 20 bp, Artificial Sequence
  Description of Artificial Sequence: Synthetic oligonucleotide
  Target: COL7A1; (+) strand; PAM type: NRG; PAM sequence: GGG
gatggcaaggtggccccaat

SEQ ID NO: 18720 - DNA, 20 bp, Artificial Sequence
  Description of Artificial Sequence: Synthetic oligonucleotide
  Target: COL7A1; (+) strand; PAM type: NRG; PAM sequence: CAG
gccccaatgggcatgcaaaa

SEQ ID NO: 18721 - DNA, 20 bp, Artificial Sequence
  Description of Artificial Sequence: Synthetic oligonucleotide
  Target: COL7A1; (+) strand; PAM type: NRG; PAM sequence: GAG
cccaatgggcatgcaaaaca

SEQ ID NO: 18722 - DNA, 20 bp, Artificial Sequence
  Description of Artificial Sequence: Synthetic oligonucleotide
  Target: COL7A1; (+) strand; PAM type: NRG; PAM sequence: AAG
tgggcatgcaaaacagagtc

SEQ ID NO: 18723 - DNA, 20 bp, Artificial Sequence
  Description of Artificial Sequence: Synthetic oligonucleotide
  Target: COL7A1; (+) strand; PAM type: NRG; PAM sequence: AGG
gggcatgcaaaacagagtca

SEQ ID NO: 18724 - DNA, 20 bp, Artificial Sequence
  Description of Artificial Sequence: Synthetic oligonucleotide
  Target: COL7A1; (+) strand; PAM type: NRG; PAM sequence: GGG
ggcatgcaaaacagagtcaa

SEQ ID NO: 18725 - DNA, 20 bp, Artificial Sequence
  Description of Artificial Sequence: Synthetic oligonucleotide
  Target: COL7A1; (+) strand; PAM type: NRG; PAM sequence: GGG
gcatgcaaaacagagtcaag

SEQ ID NO: 18726 - DNA, 20 bp, Artificial Sequence
  Description of Artificial Sequence: Synthetic oligonucleotide
  Target: COL7A1; (+) strand; PAM type: NRG; PAM sequence: AAG
cagagtcaaggggacatccc

SEQ ID NO: 18727 - DNA, 20 bp, Artificial Sequence
  Description of Artificial Sequence: Synthetic oligonucleotide
  Target: COL7A1; (+) strand; PAM type: NRG; PAM sequence: TGG
tcaaggggacatcccaagcc

SEQ ID NO: 18728 - DNA, 20 bp, Artificial Sequence
  Description of Artificial Sequence: Synthetic oligonucleotide
  Target: COL7A1; (+) strand; PAM type: NRG; PAM sequence: CGG
acatcccaagcctggctcac

SEQ ID NO: 18729 - DNA, 20 bp, Artificial Sequence
  Description of Artificial Sequence: Synthetic oligonucleotide
  Target: COL7A1; (+) strand; PAM type: NRG; PAM sequence: CAG
ctggctcaccggcacacttc

SEQ ID NO: 18730 - DNA, 20 bp, Artificial Sequence
  Description of Artificial Sequence: Synthetic oligonucleotide
  Target: COL7A1; (+) strand; PAM type: NRG; PAM sequence: AGG
tggctcaccggcacacttcc

SEQ ID NO: 18731 - DNA, 20 bp, Artificial Sequence
  Description of Artificial Sequence: Synthetic oligonucleotide
  Target: COL7A1; (+) strand; PAM type: NRG; PAM sequence: CAG
acacttccaggctctcctcg

SEQ ID NO: 18732 - DNA, 20 bp, Artificial Sequence
  Description of Artificial Sequence: Synthetic oligonucleotide
  Target: COL7A1; (+) strand; PAM type: NRG; PAM sequence: AGG
cacttccaggctctcctcgc

SEQ ID NO: 18733 - DNA, 20 bp, Artificial Sequence
  Description of Artificial Sequence: Synthetic oligonucleotide
  Target: COL7A1; (+) strand; PAM type: NRG; PAM sequence: CAG
tcctcgcaggccacgctctc

SEQ ID NO: 18734 - DNA, 20 bp, Artificial Sequence
  Description of Artificial Sequence: Synthetic oligonucleotide
  Target: COL7A1; (+) strand; PAM type: NRG; PAM sequence: AGG
cctcgcaggccacgctctcc

SEQ ID NO: 18735 - DNA, 20 bp, Artificial Sequence
  Description of Artificial Sequence: Synthetic oligonucleotide
  Target: COL7A1; (+) strand; PAM type: NRG; PAM sequence: GGG
ctcgcaggccacgctctcca

SEQ ID NO: 18736 - DNA, 20 bp, Artificial Sequence
  Description of Artificial Sequence: Synthetic oligonucleotide
  Target: COL7A1; (+) strand; PAM type: NRG; PAM sequence: GAG
cgcaggccacgctctccagg

SEQ ID NO: 18737 - DNA, 20 bp, Artificial Sequence
  Description of Artificial Sequence: Synthetic oligonucleotide
  Target: COL7A1; (+) strand; PAM type: NRG; PAM sequence: AGG
gcaggccacgctctccaggg

SEQ ID NO: 18738 - DNA, 20 bp, Artificial Sequence
  Description of Artificial Sequence: Synthetic oligonucleotide
  Target: COL7A1; (+) strand; PAM type: NRG; PAM sequence: TGG
cacgctctccagggaggccc

SEQ ID NO: 18739 - DNA, 20 bp, Artificial Sequence
  Description of Artificial Sequence: Synthetic oligonucleotide
  Target: COL7A1; (+) strand; PAM type: NRG; PAM sequence: GAG
cgctctccagggaggccctg

SEQ ID NO: 18740 - DNA, 20 bp, Artificial Sequence
  Description of Artificial Sequence: Synthetic oligonucleotide
  Target: COL7A1; (+) strand; PAM type: NRG; PAM sequence: GAG
ctctccagggaggccctgga

SEQ ID NO: 18741 - DNA, 20 bp, Artificial Sequence
  Description of Artificial Sequence: Synthetic oligonucleotide
  Target: COL7A1; (+) strand; PAM type: NRG; PAM sequence: AAG
agggaggccctggagagatg

SEQ ID NO: 18742 - DNA, 20 bp, Artificial Sequence
  Description of Artificial Sequence: Synthetic oligonucleotide
  Target: COL7A1; (+) strand; PAM type: NRG; PAM sequence: TAG
gagagatgaagacaaactgc

SEQ ID NO: 18743 - DNA, 20 bp, Artificial Sequence
  Description of Artificial Sequence: Synthetic oligonucleotide
  Target: COL7A1; (+) strand; PAM type: NRG; PAM sequence: AGG
agagatgaagacaaactgct

SEQ ID NO: 18744 - DNA, 20 bp, Artificial Sequence
  Description of Artificial Sequence: Synthetic oligonucleotide
  Target: COL7A1; (+) strand; PAM type: NRG; PAM sequence: CAG
gaagacaaactgctaggaac

SEQ ID NO: 18745 - DNA, 20 bp, Artificial Sequence
  Description of Artificial Sequence: Synthetic oligonucleotide
  Target: COL7A1; (+) strand; PAM type: NRG; PAM sequence: TGG
aactgctaggaaccagccta

SEQ ID NO: 18746 - DNA, 20 bp, Artificial Sequence
  Description of Artificial Sequence: Synthetic oligonucleotide
  Target: COL7A1; (+) strand; PAM type: NRG; PAM sequence: GGG
actgctaggaaccagcctat

SEQ ID NO: 18747 - DNA, 20 bp, Artificial Sequence
  Description of Artificial Sequence: Synthetic oligonucleotide
  Target: COL7A1; (+) strand; PAM type: NRG; PAM sequence: TGG
tgggtgtgcatgtgcacatg

SEQ ID NO: 18748 - DNA, 20 bp, Artificial Sequence
  Description of Artificial Sequence: Synthetic oligonucleotide
  Target: COL7A1; (+) strand; PAM type: NRG; PAM sequence: GGG
gggtgtgcatgtgcacatgt

SEQ ID NO: 18749 - DNA, 20 bp, Artificial Sequence
  Description of Artificial Sequence: Synthetic oligonucleotide
  Target: COL7A1; (+) strand; PAM type: NRG; PAM sequence: TGG
atgtgcacatgtgggtgctg

SEQ ID NO: 18750 - DNA, 20 bp, Artificial Sequence
  Description of Artificial Sequence: Synthetic oligonucleotide
  Target: COL7A1; (+) strand; PAM type: NRG; PAM sequence: TGG
atgtgggtgctgtggctacc

SEQ ID NO: 18751 - DNA, 20 bp, Artificial Sequence
  Description of Artificial Sequence: Synthetic oligonucleotide
  Target: COL7A1; (+) strand; PAM type: NRG; PAM sequence: GGG
tgtgggtgctgtggctacct

SEQ ID NO: 18752 - DNA, 20 bp, Artificial Sequence
  Description of Artificial Sequence: Synthetic oligonucleotide
  Target: COL7A1; (+) strand; PAM type: NRG; PAM sequence: TGG
gctgtggctacctgggcatg

SEQ ID NO: 18753 - DNA, 20 bp, Artificial Sequence
  Description of Artificial Sequence: Synthetic oligonucleotide
  Target: COL7A1; (+) strand; PAM type: NRG; PAM sequence: AAG
ggctacctgggcatgtggaa

SEQ ID NO: 18754 - DNA, 20 bp, Artificial Sequence
  Description of Artificial Sequence: Synthetic oligonucleotide
  Target: COL7A1; (+) strand; PAM type: NRG; PAM sequence: AGG
gctacctgggcatgtggaaa

SEQ ID NO: 18755 - DNA, 20 bp, Artificial Sequence
  Description of Artificial Sequence: Synthetic oligonucleotide
  Target: COL7A1; (+) strand; PAM type: NRG; PAM sequence: TGG
acctgggcatgtggaaaagg

SEQ ID NO: 18756 - DNA, 20 bp, Artificial Sequence
  Description of Artificial Sequence: Synthetic oligonucleotide
  Target: COL7A1; (+) strand; PAM type: NRG; PAM sequence: GGG
cctgggcatgtggaaaaggt

SEQ ID NO: 18757 - DNA, 20 bp, Artificial Sequence
  Description of Artificial Sequence: Synthetic oligonucleotide
  Target: COL7A1; (+) strand; PAM type: NRG; PAM sequence: GGG
ctgggcatgtggaaaaggtg

SEQ ID NO: 18758 - DNA, 20 bp, Artificial Sequence
  Description of Artificial Sequence: Synthetic oligonucleotide
  Target: COL7A1; (+) strand; PAM type: NRG; PAM sequence: GGG
tgggcatgtggaaaaggtgg

SEQ ID NO: 18759 - DNA, 20 bp, Artificial Sequence
  Description of Artificial Sequence: Synthetic oligonucleotide
  Target: COL7A1; (+) strand; PAM type: NRG; PAM sequence: TGG
gggcctcacctgctcccctt

SEQ ID NO: 18760 - DNA, 20 bp, Artificial Sequence
  Description of Artificial Sequence: Synthetic oligonucleotide
  Target: COL7A1; (+) strand; PAM type: NRG; PAM sequence: CAG
cacctgctcccctttggatc

SEQ ID NO: 18761 - DNA, 20 bp, Artificial Sequence
  Description of Artificial Sequence: Synthetic oligonucleotide
  Target: COL7A1; (+) strand; PAM type: NRG; PAM sequence: CGG
ctttggatccagtctcccca

SEQ ID NO: 18762 - DNA, 20 bp, Artificial Sequence
  Description of Artificial Sequence: Synthetic oligonucleotide
  Target: COL7A1; (+) strand; PAM type: NRG; PAM sequence: AAG
cccacggtcaccctgaaaac

SEQ ID NO: 18763 - DNA, 20 bp, Artificial Sequence
  Description of Artificial Sequence: Synthetic oligonucleotide
  Target: COL7A1; (+) strand; PAM type: NRG; PAM sequence: CAG
accctgaaaacaagaatgac

SEQ ID NO: 18764 - DNA, 20 bp, Artificial Sequence
  Description of Artificial Sequence: Synthetic oligonucleotide
  Target: COL7A1; (+) strand; PAM type: NRG; PAM sequence: AGG
ccctgaaaacaagaatgacc

SEQ ID NO: 18765 - DNA, 20 bp, Artificial Sequence
  Description of Artificial Sequence: Synthetic oligonucleotide
  Target: COL7A1; (+) strand; PAM type: NRG; PAM sequence: TGG
tgaaaacaagaatgaccagg

SEQ ID NO: 18766 - DNA, 20 bp, Artificial Sequence
  Description of Artificial Sequence: Synthetic oligonucleotide
  Target: COL7A1; (+) strand; PAM type: NRG; PAM sequence: GGG
gaaaacaagaatgaccaggt

SEQ ID NO: 18767 - DNA, 20 bp, Artificial Sequence
  Description of Artificial Sequence: Synthetic oligonucleotide
  Target: COL7A1; (+) strand; PAM type: NRG; PAM sequence: GGG
aaaacaagaatgaccaggtg

SEQ ID NO: 18768 - DNA, 20 bp, Artificial Sequence
  Description of Artificial Sequence: Synthetic oligonucleotide
  Target: COL7A1; (+) strand; PAM type: NRG; PAM sequence: TGG
agaatgaccaggtggggaaa

SEQ ID NO: 18769 - DNA, 20 bp, Artificial Sequence
  Description of Artificial Sequence: Synthetic oligonucleotide
  Target: COL7A1; (+) strand; PAM type: NRG; PAM sequence: CAG
ccaggtggggaaatggcccc

SEQ ID NO: 18770 - DNA, 20 bp, Artificial Sequence
  Description of Artificial Sequence: Synthetic oligonucleotide
  Target: COL7A1; (+) strand; PAM type: NRG; PAM sequence: TGG
tggggaaatggcccccagcc

SEQ ID NO: 18771 - DNA, 20 bp, Artificial Sequence
  Description of Artificial Sequence: Synthetic oligonucleotide
  Target: COL7A1; (+) strand; PAM type: NRG; PAM sequence: CAG
gaaatggcccccagcctggt

SEQ ID NO: 18772 - DNA, 20 bp, Artificial Sequence
  Description of Artificial Sequence: Synthetic oligonucleotide
  Target: COL7A1; (+) strand; PAM type: NRG; PAM sequence: TGG
cccaacatccgcactcacct

SEQ ID NO: 18773 - DNA, 20 bp, Artificial Sequence
  Description of Artificial Sequence: Synthetic oligonucleotide
  Target: COL7A1; (+) strand; PAM type: NRG; PAM sequence: GGG
ccaacatccgcactcacctt

SEQ ID NO: 18774 - DNA, 20 bp, Artificial Sequence
  Description of Artificial Sequence: Synthetic oligonucleotide
  Target: COL7A1; (+) strand; PAM type: NRG; PAM sequence: GGG
caacatccgcactcaccttg

SEQ ID NO: 18775 - DNA, 20 bp, Artificial Sequence
  Description of Artificial Sequence: Synthetic oligonucleotide
  Target: COL7A1; (+) strand; PAM type: NRG; PAM sequence: TGG
accttggggcccgtgcctcc

SEQ ID NO: 18776 - DNA, 20 bp, Artificial Sequence
  Description of Artificial Sequence: Synthetic oligonucleotide
  Target: COL7A1; (+) strand; PAM type: NRG; PAM sequence: GGG
ccttggggcccgtgcctcct

SEQ ID NO: 18777 - DNA, 20 bp, Artificial Sequence
  Description of Artificial Sequence: Synthetic oligonucleotide
  Target: COL7A1; (+) strand; PAM type: NRG; PAM sequence: CAG
gcccgtgcctcctgggacac

SEQ ID NO: 18778 - DNA, 20 bp, Artificial Sequence
  Description of Artificial Sequence: Synthetic oligonucleotide
  Target: COL7A1; (+) strand; PAM type: NRG; PAM sequence: AGG
cccgtgcctcctgggacacc

SEQ ID NO: 18779 - DNA, 20 bp, Artificial Sequence
  Description of Artificial Sequence: Synthetic oligonucleotide
  Target: COL7A1; (+) strand; PAM type: NRG; PAM sequence: GAG
tgggacaccaggaaaaccct

SEQ ID NO: 18780 - DNA, 20 bp, Artificial Sequence
  Description of Artificial Sequence: Synthetic oligonucleotide
  Target: COL7A1; (+) strand; PAM type: NRG; PAM sequence: CGG
accaggaaaaccctgagata

SEQ ID NO: 18781 - DNA, 20 bp, Artificial Sequence
  Description of Artificial Sequence: Synthetic oligonucleotide
  Target: COL7A1; (+) strand; PAM type: NRG; PAM sequence: CAG
aggaaaaccctgagatacgg

SEQ ID NO: 18782 - DNA, 20 bp, Artificial Sequence
  Description of Artificial Sequence: Synthetic oligonucleotide
  Target: COL7A1; (+) strand; PAM type: NRG; PAM sequence: AAG
ctgagatacggcagaacaca

SEQ ID NO: 18783 - DNA, 20 bp, Artificial Sequence
  Description of Artificial Sequence: Synthetic oligonucleotide
  Target: COL7A1; (+) strand; PAM type: NRG; PAM sequence: AGG
tgagatacggcagaacacaa

SEQ ID NO: 18784 - DNA, 20 bp, Artificial Sequence
  Description of Artificial Sequence: Synthetic oligonucleotide
  Target: COL7A1; (+) strand; PAM type: NRG; PAM sequence: GGG
gagatacggcagaacacaaa

SEQ ID NO: 18785 - DNA, 20 bp, Artificial Sequence
  Description of Artificial Sequence: Synthetic oligonucleotide
  Target: COL7A1; (+) strand; PAM type: NRG; PAM sequence: GGG
agatacggcagaacacaaag

SEQ ID NO: 18786 - DNA, 20 bp, Artificial Sequence
  Description of Artificial Sequence: Synthetic oligonucleotide
  Target: COL7A1; (+) strand; PAM type: NRG; PAM sequence: AAG
cagaacacaaaggggtcaca

SEQ ID NO: 18787 - DNA, 20 bp, Artificial Sequence
  Description of Artificial Sequence: Synthetic oligonucleotide
  Target: COL7A1; (+) strand; PAM type: NRG; PAM sequence: AGG
agaacacaaaggggtcacaa

SEQ ID NO: 18788 - DNA, 20 bp, Artificial Sequence
  Description of Artificial Sequence: Synthetic oligonucleotide
  Target: COL7A1; (+) strand; PAM type: NRG; PAM sequence: TGG
aaaggggtcacaaaggccca

SEQ ID NO: 18789 - DNA, 20 bp, Artificial Sequence
  Description of Artificial Sequence: Synthetic oligonucleotide
  Target: COL7A1; (+) strand; PAM type: NRG; PAM sequence: CAG
cacaaaggcccatggcttcc

SEQ ID NO: 18790 - DNA, 20 bp, Artificial Sequence
  Description of Artificial Sequence: Synthetic oligonucleotide
  Target: COL7A1; (+) strand; PAM type: NRG; PAM sequence: AGG
acaaaggcccatggcttccc

SEQ ID NO: 18791 - DNA, 20 bp, Artificial Sequence
  Description of Artificial Sequence: Synthetic oligonucleotide
  Target: COL7A1; (+) strand; PAM type: NRG; PAM sequence: GAG
aaaggcccatggcttcccag

SEQ ID NO: 18792 - DNA, 20 bp, Artificial Sequence
  Description of Artificial Sequence: Synthetic oligonucleotide
  Target: COL7A1; (+) strand; PAM type: NRG; PAM sequence: AGG
aaggcccatggcttcccagg

SEQ ID NO: 18793 - DNA, 20 bp, Artificial Sequence
  Description of Artificial Sequence: Synthetic oligonucleotide
  Target: COL7A1; (+) strand; PAM type: NRG; PAM sequence: GGG
aggcccatggcttcccagga

SEQ ID NO: 18794 - DNA, 20 bp, Artificial Sequence
  Description of Artificial Sequence: Synthetic oligonucleotide
  Target: COL7A1; (+) strand; PAM type: NRG; PAM sequence: TGG
ggttgcccattgaaacatca

SEQ ID NO: 18795 - DNA, 20 bp, Artificial Sequence
  Description of Artificial Sequence: Synthetic oligonucleotide
  Target: COL7A1; (+) strand; PAM type: NRG; PAM sequence: AAG
tcatggcttctaatgctctg

SEQ ID NO: 18796 - DNA, 20 bp, Artificial Sequence
  Description of Artificial Sequence: Synthetic oligonucleotide
  Target: COL7A1; (+) strand; PAM type: NRG; PAM sequence: CAG
cttctaatgctctgaagtcc

SEQ ID NO: 18797 - DNA, 20 bp, Artificial Sequence
  Description of Artificial Sequence: Synthetic oligonucleotide
  Target: COL7A1; (+) strand; PAM type: NRG; PAM sequence: CAG
tctgaagtcccagaatgacc

SEQ ID NO: 18798 - DNA, 20 bp, Artificial Sequence
  Description of Artificial Sequence: Synthetic oligonucleotide
  Target: COL7A1; (+) strand; PAM type: NRG; PAM sequence: AGG
ctgaagtcccagaatgaccc

SEQ ID NO: 18799 - DNA, 20 bp, Artificial Sequence
  Description of Artificial Sequence: Synthetic oligonucleotide
  Target: COL7A1; (+) strand; PAM type: NRG; PAM sequence: TGG
aatgacccaggacactcacc

SEQ ID NO: 18800 - DNA, 20 bp, Artificial Sequence
  Description of Artificial Sequence: Synthetic oligonucleotide
  Target: COL7A1; (+) strand; PAM type: NRG; PAM sequence: CAG
acccaggacactcacctggc

SEQ ID NO: 18801 - DNA, 20 bp, Artificial Sequence
  Description of Artificial Sequence: Synthetic oligonucleotide
  Target: COL7A1; (+) strand; PAM type: NRG; PAM sequence: AGG
cccaggacactcacctggcc

SEQ ID NO: 18802 - DNA, 20 bp, Artificial Sequence
  Description of Artificial Sequence: Synthetic oligonucleotide
  Target: COL7A1; (+) strand; PAM type: NRG; PAM sequence: GAG
caggacactcacctggccag

SEQ ID NO: 18803 - DNA, 20 bp, Artificial Sequence
  Description of Artificial Sequence: Synthetic oligonucleotide
  Target: COL7A1; (+) strand; PAM type: NRG; PAM sequence: AGG
aggacactcacctggccagg

SEQ ID NO: 18804 - DNA, 20 bp, Artificial Sequence
  Description of Artificial Sequence: Synthetic oligonucleotide
  Target: COL7A1; (+) strand; PAM type: NRG; PAM sequence: GGG
ggacactcacctggccagga

SEQ ID NO: 18805 - DNA, 20 bp, Artificial Sequence
  Description of Artificial Sequence: Synthetic oligonucleotide
  Target: COL7A1; (+) strand; PAM type: NRG; PAM sequence: TGG
acctggccaggagggcccac

SEQ ID NO: 18806 - DNA, 20 bp, Artificial Sequence
  Description of Artificial Sequence: Synthetic oligonucleotide
  Target: COL7A1; (+) strand; PAM type: NRG; PAM sequence: TGG
ccaggagggcccactggccc

SEQ ID NO: 18807 - DNA, 20 bp, Artificial Sequence
  Description of Artificial Sequence: Synthetic oligonucleotide
  Target: COL7A1; (+) strand; PAM type: NRG; PAM sequence: GGG
caggagggcccactggccct

SEQ ID NO: 18808 - DNA, 20 bp, Artificial Sequence
  Description of Artificial Sequence: Synthetic oligonucleotide
  Target: COL7A1; (+) strand; PAM type: NRG; PAM sequence: GAG
ggagggcccactggccctgg

SEQ ID NO: 18809 - DNA, 20 bp, Artificial Sequence
  Description of Artificial Sequence: Synthetic oligonucleotide
  Target: COL7A1; (+) strand; PAM type: NRG; PAM sequence: AGG
gagggcccactggccctggg

SEQ ID NO: 18810 - DNA, 20 bp, Artificial Sequence
  Description of Artificial Sequence: Synthetic oligonucleotide
  Target: COL7A1; (+) strand; PAM type: NRG; PAM sequence: TGG
cccactggccctgggaggcc

SEQ ID NO: 18811 - DNA, 20 bp, Artificial Sequence
  Description of Artificial Sequence: Synthetic oligonucleotide
  Target: COL7A1; (+) strand; PAM type: NRG; PAM sequence: GAG
cactggccctgggaggcctg

SEQ ID NO: 18812 - DNA, 20 bp, Artificial Sequence
  Description of Artificial Sequence: Synthetic oligonucleotide
  Target: COL7A1; (+) strand; PAM type: NRG; PAM sequence: AGG
actggccctgggaggcctgg

SEQ ID NO: 18813 - DNA, 20 bp, Artificial Sequence
  Description of Artificial Sequence: Synthetic oligonucleotide
  Target: COL7A1; (+) strand; PAM type: NRG; PAM sequence: TGG
ctgggaggcctggaggcccc

SEQ ID NO: 18814 - DNA, 20 bp, Artificial Sequence
  Description of Artificial Sequence: Synthetic oligonucleotide
  Target: COL7A1; (+) strand; PAM type: NRG; PAM sequence: GGG
tgggaggcctggaggcccct

SEQ ID NO: 18815 - DNA, 20 bp, Artificial Sequence
  Description of Artificial Sequence: Synthetic oligonucleotide
  Target: COL7A1; (+) strand; PAM type: NRG; PAM sequence: GGG
gggaggcctggaggcccctg

SEQ ID NO: 18816 - DNA, 20 bp, Artificial Sequence
  Description of Artificial Sequence: Synthetic oligonucleotide
  Target: COL7A1; (+) strand; PAM type: NRG; PAM sequence: AAG
cctggaggcccctggggtcc

SEQ ID NO: 18817 - DNA, 20 bp, Artificial Sequence
  Description of Artificial Sequence: Synthetic oligonucleotide
  Target: COL7A1; (+) strand; PAM type: NRG; PAM sequence: AGG
ctggaggcccctggggtcca

SEQ ID NO: 18818 - DNA, 20 bp, Artificial Sequence
  Description of Artificial Sequence: Synthetic oligonucleotide
  Target: COL7A1; (+) strand; PAM type: NRG; PAM sequence: CAG
cccctggggtccaaggatac

SEQ ID NO: 18819 - DNA, 20 bp, Artificial Sequence
  Description of Artificial Sequence: Synthetic oligonucleotide
  Target: COL7A1; (+) strand; PAM type: NRG; PAM sequence: AGG
ccctggggtccaaggatacc

SEQ ID NO: 18820 - DNA, 20 bp, Artificial Sequence
  Description of Artificial Sequence: Synthetic oligonucleotide
  Target: COL7A1; (+) strand; PAM type: NRG; PAM sequence: GAG
ctggggtccaaggataccag

SEQ ID NO: 18821 - DNA, 20 bp, Artificial Sequence
  Description of Artificial Sequence: Synthetic oligonucleotide
  Target: COL7A1; (+) strand; PAM type: NRG; PAM sequence: TGG
aggagctccacgctcaccct

SEQ ID NO: 18822 - DNA, 20 bp, Artificial Sequence
  Description of Artificial Sequence: Synthetic oligonucleotide
  Target: COL7A1; (+) strand; PAM type: NRG; PAM sequence: GGG
ggagctccacgctcaccctt

SEQ ID NO: 18823 - DNA, 20 bp, Artificial Sequence
  Description of Artificial Sequence: Synthetic oligonucleotide
  Target: COL7A1; (+) strand; PAM type: NRG; PAM sequence: GGG
gagctccacgctcacccttg

SEQ ID NO: 18824 - DNA, 20 bp, Artificial Sequence
  Description of Artificial Sequence: Synthetic oligonucleotide
  Target: COL7A1; (+) strand; PAM type: NRG; PAM sequence: AAG
ggggccatcacgaccctgtg

SEQ ID NO: 18825 - DNA, 20 bp, Artificial Sequence
  Description of Artificial Sequence: Synthetic oligonucleotide
  Target: COL7A1; (+) strand; PAM type: NRG; PAM sequence: AGG
gggccatcacgaccctgtga

SEQ ID NO: 18826 - DNA, 20 bp, Artificial Sequence
  Description of Artificial Sequence: Synthetic oligonucleotide
  Target: COL7A1; (+) strand; PAM type: NRG; PAM sequence: CAG
tcacgaccctgtgaaggatg

SEQ ID NO: 18827 - DNA, 20 bp, Artificial Sequence
  Description of Artificial Sequence: Synthetic oligonucleotide
  Target: COL7A1; (+) strand; PAM type: NRG; PAM sequence: CAG
gaccctgtgaaggatgcagc

SEQ ID NO: 18828 - DNA, 20 bp, Artificial Sequence
  Description of Artificial Sequence: Synthetic oligonucleotide
  Target: COL7A1; (+) strand; PAM type: NRG; PAM sequence: CAG
gtgaaggatgcagccagcat

SEQ ID NO: 18829 - DNA, 20 bp, Artificial Sequence
  Description of Artificial Sequence: Synthetic oligonucleotide
  Target: COL7A1; (+) strand; PAM type: NRG; PAM sequence: GAG
gcagccagcatcagcaccct

SEQ ID NO: 18830 - DNA, 20 bp, Artificial Sequence
  Description of Artificial Sequence: Synthetic oligonucleotide
  Target: COL7A1; (+) strand; PAM type: NRG; PAM sequence: CAG
gcatcagcaccctgagacct

SEQ ID NO: 18831 - DNA, 20 bp, Artificial Sequence
  Description of Artificial Sequence: Synthetic oligonucleotide
  Target: COL7A1; (+) strand; PAM type: NRG; PAM sequence: AAG
agcaccctgagacctcagaa

SEQ ID NO: 18832 - DNA, 20 bp, Artificial Sequence
  Description of Artificial Sequence: Synthetic oligonucleotide
  Target: COL7A1; (+) strand; PAM type: NRG; PAM sequence: GAG
caccctgagacctcagaaaa

SEQ ID NO: 18833 - DNA, 20 bp, Artificial Sequence
  Description of Artificial Sequence: Synthetic oligonucleotide
  Target: COL7A1; (+) strand; PAM type: NRG; PAM sequence: TGG
cctgagacctcagaaaagag

SEQ ID NO: 18834 - DNA, 20 bp, Artificial Sequence
  Description of Artificial Sequence: Synthetic oligonucleotide
  Target: COL7A1; (+) strand; PAM type: NRG; PAM sequence: GAG
tgagacctcagaaaagagtg

SEQ ID NO: 18835 - DNA, 20 bp, Artificial Sequence
  Description of Artificial Sequence: Synthetic oligonucleotide
  Target: COL7A1; (+) strand; PAM type: NRG; PAM sequence: CAG
agagtggagtcatattcccc

SEQ ID NO: 18836 - DNA, 20 bp, Artificial Sequence
  Description of Artificial Sequence: Synthetic oligonucleotide
  Target: COL7A1; (+) strand; PAM type: NRG; PAM sequence: AGG
gagtggagtcatattccccc

SEQ ID NO: 18837 - DNA, 20 bp, Artificial Sequence
  Description of Artificial Sequence: Synthetic oligonucleotide
  Target: COL7A1; (+) strand; PAM type: NRG; PAM sequence: GGG
agtggagtcatattccccca

SEQ ID NO: 18838 - DNA, 20 bp, Artificial Sequence
  Description of Artificial Sequence: Synthetic oligonucleotide
  Target: COL7A1; (+) strand; PAM type: NRG; PAM sequence: CAG
gagtcatattcccccagggt

SEQ ID NO: 18839 - DNA, 20 bp, Artificial Sequence
  Description of Artificial Sequence: Synthetic oligonucleotide
  Target: COL7A1; (+) strand; PAM type: NRG; PAM sequence: AGG
agtcatattcccccagggtc

SEQ ID NO: 18840 - DNA, 20 bp, Artificial Sequence
  Description of Artificial Sequence: Synthetic oligonucleotide
  Target: COL7A1; (+) strand; PAM type: NRG; PAM sequence: GGG
gtcatattcccccagggtca

SEQ ID NO: 18841 - DNA, 20 bp, Artificial Sequence
  Description of Artificial Sequence: Synthetic oligonucleotide
  Target: COL7A1; (+) strand; PAM type: NRG; PAM sequence: CAG
tattcccccagggtcagggt

SEQ ID NO: 18842 - DNA, 20 bp, Artificial Sequence
  Description of Artificial Sequence: Synthetic oligonucleotide
  Target: COL7A1; (+) strand; PAM type: NRG; PAM sequence: AGG
attcccccagggtcagggtc

SEQ ID NO: 18843 - DNA, 20 bp, Artificial Sequence
  Description of Artificial Sequence: Synthetic oligonucleotide
  Target: COL7A1; (+) strand; PAM type: NRG; PAM sequence: GGG
ttcccccagggtcagggtca

SEQ ID NO: 18844 - DNA, 20 bp, Artificial Sequence
  Description of Artificial Sequence: Synthetic oligonucleotide
  Target: COL7A1; (+) strand; PAM type: NRG; PAM sequence: GGG
tcccccagggtcagggtcag

SEQ ID NO: 18845 - DNA, 20 bp, Artificial Sequence
  Description of Artificial Sequence: Synthetic oligonucleotide
  Target: COL7A1; (+) strand; PAM type: NRG; PAM sequence: CAG
ccagggtcagggtcaggggt

SEQ ID NO: 18846 - DNA, 20 bp, Artificial Sequence
  Description of Artificial Sequence: Synthetic oligonucleotide
  Target: COL7A1; (+) strand; PAM type: NRG; PAM sequence: GAG
agggtcagggtcaggggtca

SEQ ID NO: 18847 - DNA, 20 bp, Artificial Sequence
  Description of Artificial Sequence: Synthetic oligonucleotide
  Target: COL7A1; (+) strand; PAM type: NRG; PAM sequence: AGG
gggtcagggtcaggggtcag

SEQ ID NO: 18848 - DNA, 20 bp, Artificial Sequence
  Description of Artificial Sequence: Synthetic oligonucleotide
  Target: COL7A1; (+) strand; PAM type: NRG; PAM sequence: CAG
gggtcaggggtcagaggttg

SEQ ID NO: 18849 - DNA, 20 bp, Artificial Sequence
  Description of Artificial Sequence: Synthetic oligonucleotide
  Target: COL7A1; (+) strand; PAM type: NRG; PAM sequence: CAG
tccaatactcacttctctcc

SEQ ID NO: 18850 - DNA, 20 bp, Artificial Sequence
  Description of Artificial Sequence: Synthetic oligonucleotide
  Target: COL7A1; (+) strand; PAM type: NRG; PAM sequence: GAG
caatactcacttctctccca

SEQ ID NO: 18851 - DNA, 20 bp, Artificial Sequence
  Description of Artificial Sequence: Synthetic oligonucleotide
  Target: COL7A1; (+) strand; PAM type: NRG; PAM sequence: AGG
aatactcacttctctcccag

SEQ ID NO: 18852 - DNA, 20 bp, Artificial Sequence
  Description of Artificial Sequence: Synthetic oligonucleotide
  Target: COL7A1; (+) strand; PAM type: NRG; PAM sequence: AAG
tgaatctcctttctctccct

SEQ ID NO: 18853 - DNA, 20 bp, Artificial Sequence
  Description of Artificial Sequence: Synthetic oligonucleotide
  Target: COL7A1; (+) strand; PAM type: NRG; PAM sequence: AGG
gaatctcctttctctcccta

SEQ ID NO: 18854 - DNA, 20 bp, Artificial Sequence
  Description of Artificial Sequence: Synthetic oligonucleotide
  Target: COL7A1; (+) strand; PAM type: NRG; PAM sequence: AAG
tctcctttctctccctaagg

SEQ ID NO: 18855 - DNA, 20 bp, Artificial Sequence
  Description of Artificial Sequence: Synthetic oligonucleotide
  Target: COL7A1; (+) strand; PAM type: NRG; PAM sequence: AAG
tttctctccctaaggaagac

SEQ ID NO: 18856 - DNA, 20 bp, Artificial Sequence
  Description of Artificial Sequence: Synthetic oligonucleotide
  Target: COL7A1; (+) strand; PAM type: NRG; PAM sequence: AGG
ttctctccctaaggaagaca

SEQ ID NO: 18857 - DNA, 20 bp, Artificial Sequence
  Description of Artificial Sequence: Synthetic oligonucleotide
  Target: COL7A1; (+) strand; PAM type: NRG; PAM sequence: CAG
taaggaagacaaggatgctt

SEQ ID NO: 18858 - DNA, 20 bp, Artificial Sequence
  Description of Artificial Sequence: Synthetic oligonucleotide
  Target: COL7A1; (+) strand; PAM type: NRG; PAM sequence: AGG
aaggaagacaaggatgcttc

SEQ ID NO: 18859 - DNA, 20 bp, Artificial Sequence
  Description of Artificial Sequence: Synthetic oligonucleotide
  Target: COL7A1; (+) strand; PAM type: NRG; PAM sequence: TGG
agacaaggatgcttcaggca

SEQ ID NO: 18860 - DNA, 20 bp, Artificial Sequence
  Description of Artificial Sequence: Synthetic oligonucleotide
  Target: COL7A1; (+) strand; PAM type: NRG; PAM sequence: AAG
gatgcttcaggcatggctcc

SEQ ID NO: 18861 - DNA, 20 bp, Artificial Sequence
  Description of Artificial Sequence: Synthetic oligonucleotide
  Target: COL7A1; (+) strand; PAM type: NRG; PAM sequence: CAG
gcttcaggcatggctccaag

SEQ ID NO: 18862 - DNA, 20 bp, Artificial Sequence
  Description of Artificial Sequence: Synthetic oligonucleotide
  Target: COL7A1; (+) strand; PAM type: NRG; PAM sequence: GAG
ttcaggcatggctccaagca

SEQ ID NO: 18863 - DNA, 20 bp, Artificial Sequence
  Description of Artificial Sequence: Synthetic oligonucleotide
  Target: COL7A1; (+) strand; PAM type: NRG; PAM sequence: CAG
gcatggctccaagcagagac

SEQ ID NO: 18864 - DNA, 20 bp, Artificial Sequence
  Description of Artificial Sequence: Synthetic oligonucleotide
  Target: COL7A1; (+) strand; PAM type: NRG; PAM sequence: GAG
atggctccaagcagagacca

SEQ ID NO: 18865 - DNA, 20 bp, Artificial Sequence
  Description of Artificial Sequence: Synthetic oligonucleotide
  Target: COL7A1; (+) strand; PAM type: NRG; PAM sequence: GAG
ggctccaagcagagaccaga

SEQ ID NO: 18866 - DNA, 20 bp, Artificial Sequence
  Description of Artificial Sequence: Synthetic oligonucleotide
  Target: COL7A1; (+) strand; PAM type: NRG; PAM sequence: CAG
agcagagaccagagagaccc

SEQ ID NO: 18867 - DNA, 20 bp, Artificial Sequence
  Description of Artificial Sequence: Synthetic oligonucleotide
  Target: COL7A1; (+) strand; PAM type: NRG; PAM sequence: AGG
gcagagaccagagagacccc

SEQ ID NO: 18868 - DNA, 20 bp, Artificial Sequence
  Description of Artificial Sequence: Synthetic oligonucleotide
  Target: COL7A1; (+) strand; PAM type: NRG; PAM sequence: TGG
gagaccagagagaccccagg

SEQ ID NO: 18869 - DNA, 20 bp, Artificial Sequence
  Description of Artificial Sequence: Synthetic oligonucleotide
  Target: COL7A1; (+) strand; PAM type: NRG; PAM sequence: GGG
agaccagagagaccccaggt

SEQ ID NO: 18870 - DNA, 20 bp, Artificial Sequence
  Description of Artificial Sequence: Synthetic oligonucleotide
  Target: COL7A1; (+) strand; PAM type: NRG; PAM sequence: GGG
gaccagagagaccccaggtg

SEQ ID NO: 18871 - DNA, 20 bp, Artificial Sequence
  Description of Artificial Sequence: Synthetic oligonucleotide
  Target: COL7A1; (+) strand; PAM type: NRG; PAM sequence: GGG
accagagagaccccaggtgg

SEQ ID NO: 18872 - DNA, 20 bp, Artificial Sequence
  Description of Artificial Sequence: Synthetic oligonucleotide
  Target: COL7A1; (+) strand; PAM type: NRG; PAM sequence: CAG
taccttcctcccgtcttctc

SEQ ID NO: 18873 - DNA, 20 bp, Artificial Sequence
  Description of Artificial Sequence: Synthetic oligonucleotide
  Target: COL7A1; (+) strand; PAM type: NRG; PAM sequence: AGG
accttcctcccgtcttctcc

SEQ ID NO: 18874 - DNA, 20 bp, Artificial Sequence
  Description of Artificial Sequence: Synthetic oligonucleotide
  Target: COL7A1; (+) strand; PAM type: NRG; PAM sequence: GGG
ccttcctcccgtcttctcca

SEQ ID NO: 18875 - DNA, 20 bp, Artificial Sequence
  Description of Artificial Sequence: Synthetic oligonucleotide
  Target: COL7A1; (+) strand; PAM type: NRG; PAM sequence: CAG
cccgtcttctccagggtccc

SEQ ID NO: 18876 - DNA, 20 bp, Artificial Sequence
  Description of Artificial Sequence: Synthetic oligonucleotide
  Target: COL7A1; (+) strand; PAM type: NRG; PAM sequence: AGG
ccgtcttctccagggtcccc

SEQ ID NO: 18877 - DNA, 20 bp, Artificial Sequence
  Description of Artificial Sequence: Synthetic oligonucleotide
  Target: COL7A1; (+) strand; PAM type: NRG; PAM sequence: TGG
gggtccccaggttctccctg

SEQ ID NO: 18878 - DNA, 20 bp, Artificial Sequence
  Description of Artificial Sequence: Synthetic oligonucleotide
  Target: COL7A1; (+) strand; PAM type: NRG; PAM sequence: GGG
ggtccccaggttctccctgt

SEQ ID NO: 18879 - DNA, 20 bp, Artificial Sequence
  Description of Artificial Sequence: Synthetic oligonucleotide
  Target: COL7A1; (+) strand; PAM type: NRG; PAM sequence: CAG
ccccaggttctccctgtggg

SEQ ID NO: 18880 - DNA, 20 bp, Artificial Sequence
  Description of Artificial Sequence: Synthetic oligonucleotide
  Target: COL7A1; (+) strand; PAM type: NRG; PAM sequence: GAG
ccaggttctccctgtgggca

SEQ ID NO: 18881 - DNA, 20 bp, Artificial Sequence
  Description of Artificial Sequence: Synthetic oligonucleotide
  Target: COL7A1; (+) strand; PAM type: NRG; PAM sequence: AGG
caggttctccctgtgggcag

SEQ ID NO: 18882 - DNA, 20 bp, Artificial Sequence
  Description of Artificial Sequence: Synthetic oligonucleotide
  Target: COL7A1; (+) strand; PAM type: NRG; PAM sequence: CAG
tgtgggcagaggactcacat

SEQ ID NO: 18883 - DNA, 20 bp, Artificial Sequence
  Description of Artificial Sequence: Synthetic oligonucleotide
  Target: COL7A1; (+) strand; PAM type: NRG; PAM sequence: TGG
acatcagcccaaacattcac

SEQ ID NO: 18884 - DNA, 20 bp, Artificial Sequence
  Description of Artificial Sequence: Synthetic oligonucleotide
  Target: COL7A1; (+) strand; PAM type: NRG; PAM sequence: TGG
cccaaacattcactggtgtc

SEQ ID NO: 18885 - DNA, 20 bp, Artificial Sequence
  Description of Artificial Sequence: Synthetic oligonucleotide
  Target: COL7A1; (+) strand; PAM type: NRG; PAM sequence: AAG
attcactggtgtctggctgc

SEQ ID NO: 18886 - DNA, 20 bp, Artificial Sequence
  Description of Artificial Sequence: Synthetic oligonucleotide
  Target: COL7A1; (+) strand; PAM type: NRG; PAM sequence: TAG
gctgcaagacactaccttgc

SEQ ID NO: 18887 - DNA, 20 bp, Artificial Sequence
  Description of Artificial Sequence: Synthetic oligonucleotide
  Target: COL7A1; (+) strand; PAM type: NRG; PAM sequence: CAG
gacactaccttgctagattt

SEQ ID NO: 18888 - DNA, 20 bp, Artificial Sequence
  Description of Artificial Sequence: Synthetic oligonucleotide
  Target: COL7A1; (+) strand; PAM type: NRG; PAM sequence: TAG
tgactgtatttctgtgcctg

SEQ ID NO: 18889 - DNA, 20 bp, Artificial Sequence
  Description of Artificial Sequence: Synthetic oligonucleotide
  Target: COL7A1; (+) strand; PAM type: NRG; PAM sequence: TGG
tttctgtgcctgtagctcca

SEQ ID NO: 18890 - DNA, 20 bp, Artificial Sequence
  Description of Artificial Sequence: Synthetic oligonucleotide
  Target: COL7A1; (+) strand; PAM type: NRG; PAM sequence: TGG
ctccatggttgtgtgtgtct

SEQ ID NO: 18891 - DNA, 20 bp, Artificial Sequence
  Description of Artificial Sequence: Synthetic oligonucleotide
  Target: COL7A1; (+) strand; PAM type: NRG; PAM sequence: GAG
ccatggttgtgtgtgtcttg

SEQ ID NO: 18892 - DNA, 20 bp, Artificial Sequence
  Description of Artificial Sequence: Synthetic oligonucleotide
  Target: COL7A1; (+) strand; PAM type: NRG; PAM sequence: TGG
gttgtgtgtgtcttggagca

SEQ ID NO: 18893 - DNA, 20 bp, Artificial Sequence
  Description of Artificial Sequence: Synthetic oligonucleotide
  Target: COL7A1; (+) strand; PAM type: NRG; PAM sequence: TGG
gtgtcttggagcatggcctg

SEQ ID NO: 18894 - DNA, 20 bp, Artificial Sequence
  Description of Artificial Sequence: Synthetic oligonucleotide
  Target: COL7A1; (+) strand; PAM type: NRG; PAM sequence: GAG
agcatggcctgtggccgtct

SEQ ID NO: 18895 - DNA, 20 bp, Artificial Sequence
  Description of Artificial Sequence: Synthetic oligonucleotide
  Target: COL7A1; (+) strand; PAM type: NRG; PAM sequence: GAG
tggcctgtggccgtctgagt

SEQ ID NO: 18896 - DNA, 20 bp, Artificial Sequence
  Description of Artificial Sequence: Synthetic oligonucleotide
  Target: COL7A1; (+) strand; PAM type: NRG; PAM sequence: AAG
gagtgagctgctacatgtct

SEQ ID NO: 18897 - DNA, 20 bp, Artificial Sequence
  Description of Artificial Sequence: Synthetic oligonucleotide
  Target: COL7A1; (+) strand; PAM type: NRG; PAM sequence: AGG
agtgagctgctacatgtcta

SEQ ID NO: 18898 - DNA, 20 bp, Artificial Sequence
  Description of Artificial Sequence: Synthetic oligonucleotide
  Target: COL7A1; (+) strand; PAM type: NRG; PAM sequence: GGG
gtgagctgctacatgtctaa

SEQ ID NO: 18899 - DNA, 20 bp, Artificial Sequence
  Description of Artificial Sequence: Synthetic oligonucleotide
  Target: COL7A1; (+) strand; PAM type: NRG; PAM sequence: TAG
tgtctaagggtgtgcctgca

SEQ ID NO: 18900 - DNA, 20 bp, Artificial Sequence
  Description of Artificial Sequence: Synthetic oligonucleotide
  Target: COL7A1; (+) strand; PAM type: NRG; PAM sequence: AGG
gtctaagggtgtgcctgcat

SEQ ID NO: 18901 - DNA, 20 bp, Artificial Sequence
  Description of Artificial Sequence: Synthetic oligonucleotide
  Target: COL7A1; (+) strand; PAM type: NRG; PAM sequence: CAG
cataggcctgctcaccccaa

SEQ ID NO: 18902 - DNA, 20 bp, Artificial Sequence
  Description of Artificial Sequence: Synthetic oligonucleotide
  Target: COL7A1; (+) strand; PAM type: NRG; PAM sequence: AGG
ataggcctgctcaccccaac

SEQ ID NO: 18903 - DNA, 20 bp, Artificial Sequence
  Description of Artificial Sequence: Synthetic oligonucleotide
  Target: COL7A1; (+) strand; PAM type: NRG; PAM sequence: TGG
gcacacatgtcctttgactc

SEQ ID NO: 18904 - DNA, 20 bp, Artificial Sequence
  Description of Artificial Sequence: Synthetic oligonucleotide
  Target: COL7A1; (+) strand; PAM type: NRG; PAM sequence: TAG
gtcctttgactctggctctc

SEQ ID NO: 18905 - DNA, 20 bp, Artificial Sequence
  Description of Artificial Sequence: Synthetic oligonucleotide
  Target: COL7A1; (+) strand; PAM type: NRG; PAM sequence: GAG
cctttgactctggctctcta

SEQ ID NO: 18906 - DNA, 20 bp, Artificial Sequence
  Description of Artificial Sequence: Synthetic oligonucleotide
  Target: COL7A1; (+) strand; PAM type: NRG; PAM sequence: AGG
ctttgactctggctctctag

SEQ ID NO: 18907 - DNA, 20 bp, Artificial Sequence
  Description of Artificial Sequence: Synthetic oligonucleotide
  Target: COL7A1; (+) strand; PAM type: NRG; PAM sequence: TAG
tgactctggctctctagagg

SEQ ID NO: 18908 - DNA, 20 bp, Artificial Sequence
  Description of Artificial Sequence: Synthetic oligonucleotide
  Target: COL7A1; (+) strand; PAM type: NRG; PAM sequence: TGG
gctccacatttatgcatctc

SEQ ID NO: 18909 - DNA, 20 bp, Artificial Sequence
  Description of Artificial Sequence: Synthetic oligonucleotide
  Target: COL7A1; (+) strand; PAM type: NRG; PAM sequence: GGG
ctccacatttatgcatctct

SEQ ID NO: 18910 - DNA, 20 bp, Artificial Sequence
  Description of Artificial Sequence: Synthetic oligonucleotide
  Target: COL7A1; (+) strand; PAM type: NRG; PAM sequence: TGG
acatttatgcatctctgggt

SEQ ID NO: 18911 - DNA, 20 bp, Artificial Sequence
  Description of Artificial Sequence: Synthetic oligonucleotide
  Target: COL7A1; (+) strand; PAM type: NRG; PAM sequence: TGG
tggtgatcgtccacatgtcc

SEQ ID NO: 18912 - DNA, 20 bp, Artificial Sequence
  Description of Artificial Sequence: Synthetic oligonucleotide
  Target: COL7A1; (+) strand; PAM type: NRG; PAM sequence: GGG
ggtgatcgtccacatgtcct

SEQ ID NO: 18913 - DNA, 20 bp, Artificial Sequence
  Description of Artificial Sequence: Synthetic oligonucleotide
  Target: COL7A1; (+) strand; PAM type: NRG; PAM sequence: TAG
gtgcatatccatgtgtgtct

SEQ ID NO: 18914 - DNA, 20 bp, Artificial Sequence
  Description of Artificial Sequence: Synthetic oligonucleotide
  Target: COL7A1; (+) strand; PAM type: NRG; PAM sequence: TGG
tgtcttagtacatgtaccca

SEQ ID NO: 18915 - DNA, 20 bp, Artificial Sequence
  Description of Artificial Sequence: Synthetic oligonucleotide
  Target: COL7A1; (+) strand; PAM type: NRG; PAM sequence: GGG
gtcttagtacatgtacccat

SEQ ID NO: 18916 - DNA, 20 bp, Artificial Sequence
  Description of Artificial Sequence: Synthetic oligonucleotide
  Target: COL7A1; (+) strand; PAM type: NRG; PAM sequence: TGG
acccatgggtctgtgtgtcc

SEQ ID NO: 18917 - DNA, 20 bp, Artificial Sequence
  Description of Artificial Sequence: Synthetic oligonucleotide
  Target: COL7A1; (+) strand; PAM type: NRG; PAM sequence: TGG
cctggtctgtttgcacatct

SEQ ID NO: 18918 - DNA, 20 bp, Artificial Sequence
  Description of Artificial Sequence: Synthetic oligonucleotide
  Target: COL7A1; (+) strand; PAM type: NRG; PAM sequence: TGG
tcttggcccatgtctgcata

SEQ ID NO: 18919 - DNA, 20 bp, Artificial Sequence
  Description of Artificial Sequence: Synthetic oligonucleotide
  Target: COL7A1; (+) strand; PAM type: NRG; PAM sequence: GGG
cttggcccatgtctgcatat

SEQ ID NO: 18920 - DNA, 20 bp, Artificial Sequence
  Description of Artificial Sequence: Synthetic oligonucleotide
  Target: COL7A1; (+) strand; PAM type: NRG; PAM sequence: TGG
cccatgtctgcatatgggca

SEQ ID NO: 18921 - DNA, 20 bp, Artificial Sequence
  Description of Artificial Sequence: Synthetic oligonucleotide
  Target: COL7A1; (+) strand; PAM type: NRG; PAM sequence: GGG
ccatgtctgcatatgggcat

SEQ ID NO: 18922 - DNA, 20 bp, Artificial Sequence
  Description of Artificial Sequence: Synthetic oligonucleotide
  Target: COL7A1; (+) strand; PAM type: NRG; PAM sequence: AAG
tgggcttatacatgtctcca

SEQ ID NO: 18923 - DNA, 20 bp, Artificial Sequence
  Description of Artificial Sequence: Synthetic oligonucleotide
  Target: COL7A1; (+) strand; PAM type: NRG; PAM sequence: GAG
ggcttatacatgtctccaaa

SEQ ID NO: 18924 - DNA, 20 bp, Artificial Sequence
  Description of Artificial Sequence: Synthetic oligonucleotide
  Target: COL7A1; (+) strand; PAM type: NRG; PAM sequence: TGG
atacatgtctccaaagagca

SEQ ID NO: 18925 - DNA, 20 bp, Artificial Sequence
  Description of Artificial Sequence: Synthetic oligonucleotide
  Target: COL7A1; (+) strand; PAM type: NRG; PAM sequence: GGG
tacatgtctccaaagagcat

SEQ ID NO: 18926 - DNA, 20 bp, Artificial Sequence
  Description of Artificial Sequence: Synthetic oligonucleotide
  Target: COL7A1; (+) strand; PAM type: NRG; PAM sequence: GAG
catgggcttatacatgcctt

SEQ ID NO: 18927 - DNA, 20 bp, Artificial Sequence
  Description of Artificial Sequence: Synthetic oligonucleotide
  Target: COL7A1; (+) strand; PAM type: NRG; PAM sequence: GAG
tgggcttatacatgccttga

SEQ ID NO: 18928 - DNA, 20 bp, Artificial Sequence
  Description of Artificial Sequence: Synthetic oligonucleotide
  Target: COL7A1; (+) strand; PAM type: NRG; PAM sequence: TGG
gccttgagagccatgtgtct

SEQ ID NO: 18929 - DNA, 20 bp, Artificial Sequence
  Description of Artificial Sequence: Synthetic oligonucleotide
  Target: COL7A1; (+) strand; PAM type: NRG; PAM sequence: TAG
ctgtctgcaactcttgtgtg

SEQ ID NO: 18930 - DNA, 20 bp, Artificial Sequence
  Description of Artificial Sequence: Synthetic oligonucleotide
  Target: COL7A1; (+) strand; PAM type: NRG; PAM sequence: AAG
agctcaatgtgtatgaccat

SEQ ID NO: 18931 - DNA, 20 bp, Artificial Sequence
  Description of Artificial Sequence: Synthetic oligonucleotide
  Target: COL7A1; (+) strand; PAM type: NRG; PAM sequence: TGG
tgtgtatgaccataagcgtg

SEQ ID NO: 18932 - DNA, 20 bp, Artificial Sequence
  Description of Artificial Sequence: Synthetic oligonucleotide
  Target: COL7A1; (+) strand; PAM type: NRG; PAM sequence: GGG
gtgtatgaccataagcgtgt

SEQ ID NO: 18933 - DNA, 20 bp, Artificial Sequence
  Description of Artificial Sequence: Synthetic oligonucleotide
  Target: COL7A1; (+) strand; PAM type: NRG; PAM sequence: AAG
agcgtgtgggtgaccatata

SEQ ID NO: 18934 - DNA, 20 bp, Artificial Sequence
  Description of Artificial Sequence: Synthetic oligonucleotide
  Target: COL7A1; (+) strand; PAM type: NRG; PAM sequence: TGG
tgggtgaccatataaagtca

SEQ ID NO: 18935 - DNA, 20 bp, Artificial Sequence
  Description of Artificial Sequence: Synthetic oligonucleotide
  Target: COL7A1; (+) strand; PAM type: NRG; PAM sequence: GGG
gggtgaccatataaagtcat

SEQ ID NO: 18936 - DNA, 20 bp, Artificial Sequence
  Description of Artificial Sequence: Synthetic oligonucleotide
  Target: COL7A1; (+) strand; PAM type: NRG; PAM sequence: CAG
gaccatataaagtcatgggc

SEQ ID NO: 18937 - DNA, 20 bp, Artificial Sequence
  Description of Artificial Sequence: Synthetic oligonucleotide
  Target: COL7A1; (+) strand; PAM type: NRG; PAM sequence: TAG
agtcatgggccagcatgtcc

SEQ ID NO: 18938 - DNA, 20 bp, Artificial Sequence
  Description of Artificial Sequence: Synthetic oligonucleotide
  Target: COL7A1; (+) strand; PAM type: NRG; PAM sequence: CAG
gcatgtcctagcacatgtca

SEQ ID NO: 18939 - DNA, 20 bp, Artificial Sequence
  Description of Artificial Sequence: Synthetic oligonucleotide
  Target: COL7A1; (+) strand; PAM type: NRG; PAM sequence: AGG
catgtcctagcacatgtcac

SEQ ID NO: 18940 - DNA, 20 bp, Artificial Sequence
  Description of Artificial Sequence: Synthetic oligonucleotide
  Target: COL7A1; (+) strand; PAM type: NRG; PAM sequence: CAG
tcctagcacatgtcacaggt

SEQ ID NO: 18941 - DNA, 20 bp, Artificial Sequence
  Description of Artificial Sequence: Synthetic oligonucleotide
  Target: COL7A1; (+) strand; PAM type: NRG; PAM sequence: GAG
ctagcacatgtcacaggtca

SEQ ID NO: 18942 - DNA, 20 bp, Artificial Sequence
  Description of Artificial Sequence: Synthetic oligonucleotide
  Target: COL7A1; (+) strand; PAM type: NRG; PAM sequence: CAG
tgtctcaccatgtctcaaca

SEQ ID NO: 18943 - DNA, 20 bp, Artificial Sequence
  Description of Artificial Sequence: Synthetic oligonucleotide
  Target: COL7A1; (+) strand; PAM type: NRG; PAM sequence: AGG
gtctcaccatgtctcaacac

SEQ ID NO: 18944 - DNA, 20 bp, Artificial Sequence
  Description of Artificial Sequence: Synthetic oligonucleotide
  Target: COL7A1; (+) strand; PAM type: NRG; PAM sequence: CGG
tctcaacacaggtccacatg

SEQ ID NO: 18945 - DNA, 20 bp, Artificial Sequence
  Description of Artificial Sequence: Synthetic oligonucleotide
  Target: COL7A1; (+) strand; PAM type: NRG; PAM sequence: TGG
cacaggtccacatgcggtct

SEQ ID NO: 18946 - DNA, 20 bp, Artificial Sequence
  Description of Artificial Sequence: Synthetic oligonucleotide
  Target: COL7A1; (+) strand; PAM type: NRG; PAM sequence: GGG
acaggtccacatgcggtctt

SEQ ID NO: 18947 - DNA, 20 bp, Artificial Sequence
  Description of Artificial Sequence: Synthetic oligonucleotide
  Target: COL7A1; (+) strand; PAM type: NRG; PAM sequence: TAG
gcggtcttgggtccatgtct

SEQ ID NO: 18948 - DNA, 20 bp, Artificial Sequence
  Description of Artificial Sequence: Synthetic oligonucleotide
  Target: COL7A1; (+) strand; PAM type: NRG; PAM sequence: GAG
gggtccatgtcttagcacat

SEQ ID NO: 18949 - DNA, 20 bp, Artificial Sequence
  Description of Artificial Sequence: Synthetic oligonucleotide
  Target: COL7A1; (+) strand; PAM type: NRG; PAM sequence: TGG
catgtcttagcacatgagtc

SEQ ID NO: 18950 - DNA, 20 bp, Artificial Sequence
  Description of Artificial Sequence: Synthetic oligonucleotide
  Target: COL7A1; (+) strand; PAM type: NRG; PAM sequence: GGG
atgtcttagcacatgagtct

SEQ ID NO: 18951 - DNA, 20 bp, Artificial Sequence
  Description of Artificial Sequence: Synthetic oligonucleotide
  Target: COL7A1; (+) strand; PAM type: NRG; PAM sequence: TGG
tcttagcacatgagtctggg

SEQ ID NO: 18952 - DNA, 20 bp, Artificial Sequence
  Description of Artificial Sequence: Synthetic oligonucleotide
  Target: COL7A1; (+) strand; PAM type: NRG; PAM sequence: AAG
tagcacatgagtctgggtgg

SEQ ID NO: 18953 - DNA, 20 bp, Artificial Sequence
  Description of Artificial Sequence: Synthetic oligonucleotide
  Target: COL7A1; (+) strand; PAM type: NRG; PAM sequence: TGG
tgagtctgggtggaagtgtc

SEQ ID NO: 18954 - DNA, 20 bp, Artificial Sequence
  Description of Artificial Sequence: Synthetic oligonucleotide
  Target: COL7A1; (+) strand; PAM type: NRG; PAM sequence: GGG
gagtctgggtggaagtgtct

SEQ ID NO: 18955 - DNA, 20 bp, Artificial Sequence
  Description of Artificial Sequence: Synthetic oligonucleotide
  Target: COL7A1; (+) strand; PAM type: NRG; PAM sequence: AAG
ctgggtatcaacatgtctct

SEQ ID NO: 18956 - DNA, 20 bp, Artificial Sequence
  Description of Artificial Sequence: Synthetic oligonucleotide
  Target: COL7A1; (+) strand; PAM type: NRG; PAM sequence: TGG
gtctctaagtgccccaaatg

SEQ ID NO: 18957 - DNA, 20 bp, Artificial Sequence
  Description of Artificial Sequence: Synthetic oligonucleotide
  Target: COL7A1; (+) strand; PAM type: NRG; PAM sequence: CAG
ccccaaatgtggctacacac

SEQ ID NO: 18958 - DNA, 20 bp, Artificial Sequence
  Description of Artificial Sequence: Synthetic oligonucleotide
  Target: COL7A1; (+) strand; PAM type: NRG; PAM sequence: TGG
tgtgcctgtcgacctgtctg

SEQ ID NO: 18959 - DNA, 20 bp, Artificial Sequence
  Description of Artificial Sequence: Synthetic oligonucleotide
  Target: COL7A1; (+) strand; PAM type: NRG; PAM sequence: TGG
tggctcttcacctgtgccta

SEQ ID NO: 18960 - DNA, 20 bp, Artificial Sequence
  Description of Artificial Sequence: Synthetic oligonucleotide
  Target: COL7A1; (+) strand; PAM type: NRG; PAM sequence: TGG
ttcacctgtgcctatggctg

SEQ ID NO: 18961 - DNA, 20 bp, Artificial Sequence
  Description of Artificial Sequence: Synthetic oligonucleotide
  Target: COL7A1; (+) strand; PAM type: NRG; PAM sequence: GGG
tcacctgtgcctatggctgt

SEQ ID NO: 18962 - DNA, 20 bp, Artificial Sequence
  Description of Artificial Sequence: Synthetic oligonucleotide
  Target: COL7A1; (+) strand; PAM type: NRG; PAM sequence: TGG
gcctatggctgtgggttatc

SEQ ID NO: 18963 - DNA, 20 bp, Artificial Sequence
  Description of Artificial Sequence: Synthetic oligonucleotide
  Target: COL7A1; (+) strand; PAM type: NRG; PAM sequence: GGG
cctatggctgtgggttatct

SEQ ID NO: 18964 - DNA, 20 bp, Artificial Sequence
  Description of Artificial Sequence: Synthetic oligonucleotide
  Target: COL7A1; (+) strand; PAM type: NRG; PAM sequence: CAG
tgggttatctgggcatgtgt

SEQ ID NO: 18965 - DNA, 20 bp, Artificial Sequence
  Description of Artificial Sequence: Synthetic oligonucleotide
  Target: COL7A1; (+) strand; PAM type: NRG; PAM sequence: TGG
gggcatgtgtcagcccatcc

SEQ ID NO: 18966 - DNA, 20 bp, Artificial Sequence
  Description of Artificial Sequence: Synthetic oligonucleotide
  Target: COL7A1; (+) strand; PAM type: NRG; PAM sequence: TGG
cagcccatcctggcataaat

SEQ ID NO: 18967 - DNA, 20 bp, Artificial Sequence
  Description of Artificial Sequence: Synthetic oligonucleotide
  Target: COL7A1; (+) strand; PAM type: NRG; PAM sequence: GAG
ctaactccctatgtgtctgt

SEQ ID NO: 18968 - DNA, 20 bp, Artificial Sequence
  Description of Artificial Sequence: Synthetic oligonucleotide
  Target: COL7A1; (+) strand; PAM type: NRG; PAM sequence: AGG
taactccctatgtgtctgtg

SEQ ID NO: 18969 - DNA, 20 bp, Artificial Sequence
  Description of Artificial Sequence: Synthetic oligonucleotide
  Target: COL7A1; (+) strand; PAM type: NRG; PAM sequence: TAG
aggctgcctgtgtgtgcata

SEQ ID NO: 18970 - DNA, 20 bp, Artificial Sequence
  Description of Artificial Sequence: Synthetic oligonucleotide
  Target: COL7A1; (+) strand; PAM type: NRG; PAM sequence: CAG
tgcatatagaactatgtttc

SEQ ID NO: 18971 - DNA, 20 bp, Artificial Sequence
  Description of Artificial Sequence: Synthetic oligonucleotide
  Target: COL7A1; (+) strand; PAM type: NRG; PAM sequence: AGG
gcatatagaactatgtttcc

SEQ ID NO: 18972 - DNA, 20 bp, Artificial Sequence
  Description of Artificial Sequence: Synthetic oligonucleotide
  Target: COL7A1; (+) strand; PAM type: NRG; PAM sequence: TGG
tagaactatgtttccaggcc

SEQ ID NO: 18973 - DNA, 20 bp, Artificial Sequence
  Description of Artificial Sequence: Synthetic oligonucleotide
  Target: COL7A1; (+) strand; PAM type: NRG; PAM sequence: TGG
tgtttccaggcctggcgcaa

SEQ ID NO: 18974 - DNA, 20 bp, Artificial Sequence
  Description of Artificial Sequence: Synthetic oligonucleotide
  Target: COL7A1; (+) strand; PAM type: NRG; PAM sequence: CAG
atggctcacgcctgtaatcc

SEQ ID NO: 18975 - DNA, 20 bp, Artificial Sequence
  Description of Artificial Sequence: Synthetic oligonucleotide
  Target: COL7A1; (+) strand; PAM type: NRG; PAM sequence: TAG
cgcctgtaatcccagcactt

SEQ ID NO: 18976 - DNA, 20 bp, Artificial Sequence
  Description of Artificial Sequence: Synthetic oligonucleotide
  Target: COL7A1; (+) strand; PAM type: NRG; PAM sequence: AGG
gcctgtaatcccagcacttt

SEQ ID NO: 18977 - DNA, 20 bp, Artificial Sequence
  Description of Artificial Sequence: Synthetic oligonucleotide
  Target: COL7A1; (+) strand; PAM type: NRG; PAM sequence: GAG
ctgtaatcccagcactttag

SEQ ID NO: 18978 - DNA, 20 bp, Artificial Sequence
  Description of Artificial Sequence: Synthetic oligonucleotide
  Target: COL7A1; (+) strand; PAM type: NRG; PAM sequence: AGG
tgtaatcccagcactttagg

SEQ ID NO: 18979 - DNA, 20 bp, Artificial Sequence
  Description of Artificial Sequence: Synthetic oligonucleotide
  Target: COL7A1; (+) strand; PAM type: NRG; PAM sequence: GAG
tcccagcactttaggaggcc

SEQ ID NO: 18980 - DNA, 20 bp, Artificial Sequence
  Description of Artificial Sequence: Synthetic oligonucleotide
  Target: COL7A1; (+) strand; PAM type: NRG; PAM sequence: AGG
cccagcactttaggaggccg

SEQ ID NO: 18981 - DNA, 20 bp, Artificial Sequence
  Description of Artificial Sequence: Synthetic oligonucleotide
  Target: COL7A1; (+) strand; PAM type: NRG; PAM sequence: CGG
agcactttaggaggccgagg

SEQ ID NO: 18982 - DNA, 20 bp, Artificial Sequence
  Description of Artificial Sequence: Synthetic oligonucleotide
  Target: COL7A1; (+) strand; PAM type: NRG; PAM sequence: GGG
gcactttaggaggccgaggc

SEQ ID NO: 18983 - DNA, 20 bp, Artificial Sequence
  Description of Artificial Sequence: Synthetic oligonucleotide
  Target: COL7A1; (+) strand; PAM type: NRG; PAM sequence: CGG
ctttaggaggccgaggcggg

SEQ ID NO: 18984 - DNA, 20 bp, Artificial Sequence
  Description of Artificial Sequence: Synthetic oligonucleotide
  Target: COL7A1; (+) strand; PAM type: NRG; PAM sequence: GAG
ccgaggcgggcggatcacct

SEQ ID NO: 18985 - DNA, 20 bp, Artificial Sequence
  Description of Artificial Sequence: Synthetic oligonucleotide
  Target: COL7A1; (+) strand; PAM type: NRG; PAM sequence: AGG
cgaggcgggcggatcacctg

SEQ ID NO: 18986 - DNA, 20 bp, Artificial Sequence
  Description of Artificial Sequence: Synthetic oligonucleotide
  Target: COL7A1; (+) strand; PAM type: NRG; PAM sequence: CAG
gcgggcggatcacctgaggt

SEQ ID NO: 18987 - DNA, 20 bp, Artificial Sequence
  Description of Artificial Sequence: Synthetic oligonucleotide
  Target: COL7A1; (+) strand; PAM type: NRG; PAM sequence: CAG
acctgaggtcagtttgtgat

SEQ ID NO: 18988 - DNA, 20 bp, Artificial Sequence
  Description of Artificial Sequence: Synthetic oligonucleotide
  Target: COL7A1; (+) strand; PAM type: NRG; PAM sequence: TGG
tgtgatcagcctgactaaca

SEQ ID NO: 18989 - DNA, 20 bp, Artificial Sequence
  Description of Artificial Sequence: Synthetic oligonucleotide
  Target: COL7A1; (+) strand; PAM type: NRG; PAM sequence: GAG
tgatcagcctgactaacatg

SEQ ID NO: 18990 - DNA, 20 bp, Artificial Sequence
  Description of Artificial Sequence: Synthetic oligonucleotide
  Target: COL7A1; (+) strand; PAM type: NRG; PAM sequence: TAG
ctctactaaaaatacaaaat

SEQ ID NO: 18991 - DNA, 20 bp, Artificial Sequence
  Description of Artificial Sequence: Synthetic oligonucleotide
  Target: COL7A1; (+) strand; PAM type: NRG; PAM sequence: CAG
actaaaaatacaaaattagc

SEQ ID NO: 18992 - DNA, 20 bp, Artificial Sequence
  Description of Artificial Sequence: Synthetic oligonucleotide
  Target: COL7A1; (+) strand; PAM type: NRG; PAM sequence: AGG
ctaaaaatacaaaattagcc

SEQ ID NO: 18993 - DNA, 20 bp, Artificial Sequence
  Description of Artificial Sequence: Synthetic oligonucleotide
  Target: COL7A1; (+) strand; PAM type: NRG; PAM sequence: TGG
aatacaaaattagccaggca

SEQ ID NO: 18994 - DNA, 20 bp, Artificial Sequence
  Description of Artificial Sequence: Synthetic oligonucleotide
  Target: COL7A1; (+) strand; PAM type: NRG; PAM sequence: TGG
acaaaattagccaggcatgg

SEQ ID NO: 18995 - DNA, 20 bp, Artificial Sequence
  Description of Artificial Sequence: Synthetic oligonucleotide
  Target: COL7A1; (+) strand; PAM type: NRG; PAM sequence: CAG
gtggcgcatgcctgtaatcc

SEQ ID NO: 18996 - DNA, 20 bp, Artificial Sequence
  Description of Artificial Sequence: Synthetic oligonucleotide
  Target: COL7A1; (+) strand; PAM type: NRG; PAM sequence: CGG
tgcctgtaatcccagttact

SEQ ID NO: 18997 - DNA, 20 bp, Artificial Sequence
  Description of Artificial Sequence: Synthetic oligonucleotide
  Target: COL7A1; (+) strand; PAM type: NRG; PAM sequence: GGG
gcctgtaatcccagttactc

SEQ ID NO: 18998 - DNA, 20 bp, Artificial Sequence
  Description of Artificial Sequence: Synthetic oligonucleotide
  Target: COL7A1; (+) strand; PAM type: NRG; PAM sequence: GAG
ctgtaatcccagttactcgg

SEQ ID NO: 18999 - DNA, 20 bp, Artificial Sequence
  Description of Artificial Sequence: Synthetic oligonucleotide
  Target: COL7A1; (+) strand; PAM type: NRG; PAM sequence: AGG
tgtaatcccagttactcggg

SEQ ID NO: 19000 - DNA, 20 bp, Artificial Sequence
  Description of Artificial Sequence: Synthetic oligonucleotide
  Target: COL7A1; (+) strand; PAM type: NRG; PAM sequence: GAG
tcccagttactcgggaggtt

SEQ ID NO: 19001 - DNA, 20 bp, Artificial Sequence
  Description of Artificial Sequence: Synthetic oligonucleotide
  Target: COL7A1; (+) strand; PAM type: NRG; PAM sequence: AGG
cccagttactcgggaggttg

SEQ ID NO: 19002 - DNA, 20 bp, Artificial Sequence
  Description of Artificial Sequence: Synthetic oligonucleotide
  Target: COL7A1; (+) strand; PAM type: NRG; PAM sequence: CAG
agttactcgggaggttgagg

SEQ ID NO: 19003 - DNA, 20 bp, Artificial Sequence
  Description of Artificial Sequence: Synthetic oligonucleotide
  Target: COL7A1; (+) strand; PAM type: NRG; PAM sequence: AGG
gttactcgggaggttgaggc

SEQ ID NO: 19004 - DNA, 20 bp, Artificial Sequence
  Description of Artificial Sequence: Synthetic oligonucleotide
  Target: COL7A1; (+) strand; PAM type: NRG; PAM sequence: GAG
tactcgggaggttgaggcag

SEQ ID NO: 19005 - DNA, 20 bp, Artificial Sequence
  Description of Artificial Sequence: Synthetic oligonucleotide
  Target: COL7A1; (+) strand; PAM type: NRG; PAM sequence: GAG
caggagaatcacttgaaccc

SEQ ID NO: 19006 - DNA, 20 bp, Artificial Sequence
  Description of Artificial Sequence: Synthetic oligonucleotide
  Target: COL7A1; (+) strand; PAM type: NRG; PAM sequence: GAG
ggagaatcacttgaacccga

SEQ ID NO: 19007 - DNA, 20 bp, Artificial Sequence
  Description of Artificial Sequence: Synthetic oligonucleotide
  Target: COL7A1; (+) strand; PAM type: NRG; PAM sequence: AAG
tcacttgaacccgagagtcg

SEQ ID NO: 19008 - DNA, 20 bp, Artificial Sequence
  Description of Artificial Sequence: Synthetic oligonucleotide
  Target: COL7A1; (+) strand; PAM type: NRG; PAM sequence: AGG
cacttgaacccgagagtcga

SEQ ID NO: 19009 - DNA, 20 bp, Artificial Sequence
  Description of Artificial Sequence: Synthetic oligonucleotide
  Target: COL7A1; (+) strand; PAM type: NRG; PAM sequence: CAG
aacccgagagtcgaaggttg

SEQ ID NO: 19010 - DNA, 20 bp, Artificial Sequence
  Description of Artificial Sequence: Synthetic oligonucleotide
  Target: COL7A1; (+) strand; PAM type: NRG; PAM sequence: GAG
cgagagtcgaaggttgcagt

SEQ ID NO: 19011 - DNA, 20 bp, Artificial Sequence
  Description of Artificial Sequence: Synthetic oligonucleotide
  Target: COL7A1; (+) strand; PAM type: NRG; PAM sequence: GAG
gtcgaaggttgcagtgagct

SEQ ID NO: 19012 - DNA, 20 bp, Artificial Sequence
  Description of Artificial Sequence: Synthetic oligonucleotide
  Target: COL7A1; (+) strand; PAM type: NRG; PAM sequence: TGG
tgtgccactgcactccaacc

SEQ ID NO: 19013 - DNA, 20 bp, Artificial Sequence
  Description of Artificial Sequence: Synthetic oligonucleotide
  Target: COL7A1; (+) strand; PAM type: NRG; PAM sequence: GGG
gtgccactgcactccaacct

SEQ ID NO: 19014 - DNA, 20 bp, Artificial Sequence
  Description of Artificial Sequence: Synthetic oligonucleotide
  Target: COL7A1; (+) strand; PAM type: NRG; PAM sequence: AAG
tgcactccaacctgggcaac

SEQ ID NO: 19015 - DNA, 20 bp, Artificial Sequence
  Description of Artificial Sequence: Synthetic oligonucleotide
  Target: COL7A1; (+) strand; PAM type: NRG; PAM sequence: GAG
cactccaacctgggcaacaa

SEQ ID NO: 19016 - DNA, 20 bp, Artificial Sequence
  Description of Artificial Sequence: Synthetic oligonucleotide
  Target: COL7A1; (+) strand; PAM type: NRG; PAM sequence: TGG
aaaaaaaaaaactatgtttc

SEQ ID NO: 19017 - DNA, 20 bp, Artificial Sequence
  Description of Artificial Sequence: Synthetic oligonucleotide
  Target: COL7A1; (+) strand; PAM type: NRG; PAM sequence: TGG
tctggatgcatctgtatgtc

SEQ ID NO: 19018 - DNA, 20 bp, Artificial Sequence
  Description of Artificial Sequence: Synthetic oligonucleotide
  Target: COL7A1; (+) strand; PAM type: NRG; PAM sequence: GGG
ctggatgcatctgtatgtct

SEQ ID NO: 19019 - DNA, 20 bp, Artificial Sequence
  Description of Artificial Sequence: Synthetic oligonucleotide
  Target: COL7A1; (+) strand; PAM type: NRG; PAM sequence: CAG
atgcatctgtatgtctgggc

SEQ ID NO: 19020 - DNA, 20 bp, Artificial Sequence
  Description of Artificial Sequence: Synthetic oligonucleotide
  Target: COL7A1; (+) strand; PAM type: NRG; PAM sequence: AGG
tgcatctgtatgtctgggcc

SEQ ID NO: 19021 - DNA, 20 bp, Artificial Sequence
  Description of Artificial Sequence: Synthetic oligonucleotide
  Target: COL7A1; (+) strand; PAM type: NRG; PAM sequence: CAG
gtgtgcctcatgtgttgcta

SEQ ID NO: 19022 - DNA, 20 bp, Artificial Sequence
  Description of Artificial Sequence: Synthetic oligonucleotide
  Target: COL7A1; (+) strand; PAM type: NRG; PAM sequence: TGG
tcatgtgttgctacagatct

SEQ ID NO: 19023 - DNA, 20 bp, Artificial Sequence
  Description of Artificial Sequence: Synthetic oligonucleotide
  Target: COL7A1; (+) strand; PAM type: NRG; PAM sequence: TAG
tgctacagatcttggctgtg

SEQ ID NO: 19024 - DNA, 20 bp, Artificial Sequence
  Description of Artificial Sequence: Synthetic oligonucleotide
  Target: COL7A1; (+) strand; PAM type: NRG; PAM sequence: AGG
gctacagatcttggctgtgt

SEQ ID NO: 19025 - DNA, 20 bp, Artificial Sequence
  Description of Artificial Sequence: Synthetic oligonucleotide
  Target: COL7A1; (+) strand; PAM type: NRG; PAM sequence: TGG
tcttggctgtgtaggtgtgc

SEQ ID NO: 19026 - DNA, 20 bp, Artificial Sequence
  Description of Artificial Sequence: Synthetic oligonucleotide
  Target: COL7A1; (+) strand; PAM type: NRG; PAM sequence: TGG
gtaggtgtgctggcgtttct

SEQ ID NO: 19027 - DNA, 20 bp, Artificial Sequence
  Description of Artificial Sequence: Synthetic oligonucleotide
  Target: COL7A1; (+) strand; PAM type: NRG; PAM sequence: CAG
ggtgtgctggcgtttcttgg

SEQ ID NO: 19028 - DNA, 20 bp, Artificial Sequence
  Description of Artificial Sequence: Synthetic oligonucleotide
  Target: COL7A1; (+) strand; PAM type: NRG; PAM sequence: AGG
gtgtgctggcgtttcttggc

SEQ ID NO: 19029 - DNA, 20 bp, Artificial Sequence
  Description of Artificial Sequence: Synthetic oligonucleotide
  Target: COL7A1; (+) strand; PAM type: NRG; PAM sequence: CAG
tttcttggcaggtttcgccg

SEQ ID NO: 19030 - DNA, 20 bp, Artificial Sequence
  Description of Artificial Sequence: Synthetic oligonucleotide
  Target: COL7A1; (+) strand; PAM type: NRG; PAM sequence: TGG
aggtttcgccgcagctgccc

SEQ ID NO: 19031 - DNA, 20 bp, Artificial Sequence
  Description of Artificial Sequence: Synthetic oligonucleotide
  Target: COL7A1; (+) strand; PAM type: NRG; PAM sequence: CAG
acactcacgttttttccatt

SEQ ID NO: 19032 - DNA, 20 bp, Artificial Sequence
  Description of Artificial Sequence: Synthetic oligonucleotide
  Target: COL7A1; (+) strand; PAM type: NRG; PAM sequence: AGG
cactcacgttttttccattc

SEQ ID NO: 19033 - DNA, 20 bp, Artificial Sequence
  Description of Artificial Sequence: Synthetic oligonucleotide
  Target: COL7A1; (+) strand; PAM type: NRG; PAM sequence: CAG
cacgttttttccattcaggc

SEQ ID NO: 19034 - DNA, 20 bp, Artificial Sequence
  Description of Artificial Sequence: Synthetic oligonucleotide
  Target: COL7A1; (+) strand; PAM type: NRG; PAM sequence: AGG
acgttttttccattcaggcc

SEQ ID NO: 19035 - DNA, 20 bp, Artificial Sequence
  Description of Artificial Sequence: Synthetic oligonucleotide
  Target: COL7A1; (+) strand; PAM type: NRG; PAM sequence: TGG
ccaggtttgccatcctcgcc

SEQ ID NO: 19036 - DNA, 20 bp, Artificial Sequence
  Description of Artificial Sequence: Synthetic oligonucleotide
  Target: COL7A1; (+) strand; PAM type: NRG; PAM sequence: TGG
tcctcgcctggctttccctg

SEQ ID NO: 19037 - DNA, 20 bp, Artificial Sequence
  Description of Artificial Sequence: Synthetic oligonucleotide
  Target: COL7A1; (+) strand; PAM type: NRG; PAM sequence: GGG
cctcgcctggctttccctgt

SEQ ID NO: 19038 - DNA, 20 bp, Artificial Sequence
  Description of Artificial Sequence: Synthetic oligonucleotide
  Target: COL7A1; (+) strand; PAM type: NRG; PAM sequence: CAG
cctggctttccctgtgggaa

SEQ ID NO: 19039 - DNA, 20 bp, Artificial Sequence
  Description of Artificial Sequence: Synthetic oligonucleotide
  Target: COL7A1; (+) strand; PAM type: NRG; PAM sequence: TGG
tccctgtgggaacagatcac

SEQ ID NO: 19040 - DNA, 20 bp, Artificial Sequence
  Description of Artificial Sequence: Synthetic oligonucleotide
  Target: COL7A1; (+) strand; PAM type: NRG; PAM sequence: TGG
tgtgggaacagatcactggt

SEQ ID NO: 19041 - DNA, 20 bp, Artificial Sequence
  Description of Artificial Sequence: Synthetic oligonucleotide
  Target: COL7A1; (+) strand; PAM type: NRG; PAM sequence: CGG
acagatcactggttggatgt

SEQ ID NO: 19042 - DNA, 20 bp, Artificial Sequence
  Description of Artificial Sequence: Synthetic oligonucleotide
  Target: COL7A1; (+) strand; PAM type: NRG; PAM sequence: GGG
cagatcactggttggatgtc

SEQ ID NO: 19043 - DNA, 20 bp, Artificial Sequence
  Description of Artificial Sequence: Synthetic oligonucleotide
  Target: COL7A1; (+) strand; PAM type: NRG; PAM sequence: GGG
agatcactggttggatgtcg

SEQ ID NO: 19044 - DNA, 20 bp, Artificial Sequence
  Description of Artificial Sequence: Synthetic oligonucleotide
  Target: COL7A1; (+) strand; PAM type: NRG; PAM sequence: CGG
actggttggatgtcggggat

SEQ ID NO: 19045 - DNA, 20 bp, Artificial Sequence
  Description of Artificial Sequence: Synthetic oligonucleotide
  Target: COL7A1; (+) strand; PAM type: NRG; PAM sequence: GGG
ctggttggatgtcggggatc

SEQ ID NO: 19046 - DNA, 20 bp, Artificial Sequence
  Description of Artificial Sequence: Synthetic oligonucleotide
  Target: COL7A1; (+) strand; PAM type: NRG; PAM sequence: GAG
ttggatgtcggggatcgggt

SEQ ID NO: 19047 - DNA, 20 bp, Artificial Sequence
  Description of Artificial Sequence: Synthetic oligonucleotide
  Target: COL7A1; (+) strand; PAM type: NRG; PAM sequence: AGG
tggatgtcggggatcgggtg

SEQ ID NO: 19048 - DNA, 20 bp, Artificial Sequence
  Description of Artificial Sequence: Synthetic oligonucleotide
  Target: COL7A1; (+) strand; PAM type: NRG; PAM sequence: GGG
ggatgtcggggatcgggtga

SEQ ID NO: 19049 - DNA, 20 bp, Artificial Sequence
  Description of Artificial Sequence: Synthetic oligonucleotide
  Target: COL7A1; (+) strand; PAM type: NRG; PAM sequence: TAG
tgtcggggatcgggtgaggg

SEQ ID NO: 19050 - DNA, 20 bp, Artificial Sequence
  Description of Artificial Sequence: Synthetic oligonucleotide
  Target: COL7A1; (+) strand; PAM type: NRG; PAM sequence: AAG
ggggatcgggtgagggtagt

SEQ ID NO: 19051 - DNA, 20 bp, Artificial Sequence
  Description of Artificial Sequence: Synthetic oligonucleotide
  Target: COL7A1; (+) strand; PAM type: NRG; PAM sequence: AGG
gggatcgggtgagggtagta

SEQ ID NO: 19052 - DNA, 20 bp, Artificial Sequence
  Description of Artificial Sequence: Synthetic oligonucleotide
  Target: COL7A1; (+) strand; PAM type: NRG; PAM sequence: GGG
ggatcgggtgagggtagtaa

SEQ ID NO: 19053 - DNA, 20 bp, Artificial Sequence
  Description of Artificial Sequence: Synthetic oligonucleotide
  Target: COL7A1; (+) strand; PAM type: NRG; PAM sequence: GGG
gatcgggtgagggtagtaag

SEQ ID NO: 19054 - DNA, 20 bp, Artificial Sequence
  Description of Artificial Sequence: Synthetic oligonucleotide
  Target: COL7A1; (+) strand; PAM type: NRG; PAM sequence: GGG
atcgggtgagggtagtaagg

SEQ ID NO: 19055 - DNA, 20 bp, Artificial Sequence
  Description of Artificial Sequence: Synthetic oligonucleotide
  Target: COL7A1; (+) strand; PAM type: NRG; PAM sequence: AAG
gtgagggtagtaagggggaa

SEQ ID NO: 19056 - DNA, 20 bp, Artificial Sequence
  Description of Artificial Sequence: Synthetic oligonucleotide
  Target: COL7A1; (+) strand; PAM type: NRG; PAM sequence: AGG
tgagggtagtaagggggaaa

SEQ ID NO: 19057 - DNA, 20 bp, Artificial Sequence
  Description of Artificial Sequence: Synthetic oligonucleotide
  Target: COL7A1; (+) strand; PAM type: NRG; PAM sequence: GGG
gagggtagtaagggggaaaa

SEQ ID NO: 19058 - DNA, 20 bp, Artificial Sequence
  Description of Artificial Sequence: Synthetic oligonucleotide
  Target: COL7A1; (+) strand; PAM type: NRG; PAM sequence: GGG
agggtagtaagggggaaaag

SEQ ID NO: 19059 - DNA, 20 bp, Artificial Sequence
  Description of Artificial Sequence: Synthetic oligonucleotide
  Target: COL7A1; (+) strand; PAM type: NRG; PAM sequence: GGG
gggtagtaagggggaaaagg

SEQ ID NO: 19060 - DNA, 20 bp, Artificial Sequence
  Description of Artificial Sequence: Synthetic oligonucleotide
  Target: COL7A1; (+) strand; PAM type: NRG; PAM sequence: AAG
gggaaaagggggtaacatga

SEQ ID NO: 19061 - DNA, 20 bp, Artificial Sequence
  Description of Artificial Sequence: Synthetic oligonucleotide
  Target: COL7A1; (+) strand; PAM type: NRG; PAM sequence: TGG
aagggggtaacatgaaagtc

SEQ ID NO: 19062 - DNA, 20 bp, Artificial Sequence
  Description of Artificial Sequence: Synthetic oligonucleotide
  Target: COL7A1; (+) strand; PAM type: NRG; PAM sequence: CGG
acatgaaagtctggtctcac

SEQ ID NO: 19063 - DNA, 20 bp, Artificial Sequence
  Description of Artificial Sequence: Synthetic oligonucleotide
  Target: COL7A1; (+) strand; PAM type: NRG; PAM sequence: CAG
gtctggtctcaccggtaatc

SEQ ID NO: 19064 - DNA, 20 bp, Artificial Sequence
  Description of Artificial Sequence: Synthetic oligonucleotide
  Target: COL7A1; (+) strand; PAM type: NRG; PAM sequence: AGG
tctggtctcaccggtaatcc

SEQ ID NO: 19065 - DNA, 20 bp, Artificial Sequence
  Description of Artificial Sequence: Synthetic oligonucleotide
  Target: COL7A1; (+) strand; PAM type: NRG; PAM sequence: GGG
ctggtctcaccggtaatcca

SEQ ID NO: 19066 - DNA, 20 bp, Artificial Sequence
  Description of Artificial Sequence: Synthetic oligonucleotide
  Target: COL7A1; (+) strand; PAM type: NRG; PAM sequence: GGG
tggtctcaccggtaatccag

SEQ ID NO: 19067 - DNA, 20 bp, Artificial Sequence
  Description of Artificial Sequence: Synthetic oligonucleotide
  Target: COL7A1; (+) strand; PAM type: NRG; PAM sequence: GGG
ggtctcaccggtaatccagg

SEQ ID NO: 19068 - DNA, 20 bp, Artificial Sequence
  Description of Artificial Sequence: Synthetic oligonucleotide
  Target: COL7A1; (+) strand; PAM type: NRG; PAM sequence: CAG
caccggtaatccagggggac

SEQ ID NO: 19069 - DNA, 20 bp, Artificial Sequence
  Description of Artificial Sequence: Synthetic oligonucleotide
  Target: COL7A1; (+) strand; PAM type: NRG; PAM sequence: GAG
ccggtaatccagggggacca

SEQ ID NO: 19070 - DNA, 20 bp, Artificial Sequence
  Description of Artificial Sequence: Synthetic oligonucleotide
  Target: COL7A1; (+) strand; PAM type: NRG; PAM sequence: AGG
cggtaatccagggggaccag

SEQ ID NO: 19071 - DNA, 20 bp, Artificial Sequence
  Description of Artificial Sequence: Synthetic oligonucleotide
  Target: COL7A1; (+) strand; PAM type: NRG; PAM sequence: GGG
ggtaatccagggggaccaga

SEQ ID NO: 19072 - DNA, 20 bp, Artificial Sequence
  Description of Artificial Sequence: Synthetic oligonucleotide
  Target: COL7A1; (+) strand; PAM type: NRG; PAM sequence: GGG
gtaatccagggggaccagag

SEQ ID NO: 19073 - DNA, 20 bp, Artificial Sequence
  Description of Artificial Sequence: Synthetic oligonucleotide
  Target: COL7A1; (+) strand; PAM type: NRG; PAM sequence: CAG
tccagggggaccagaggggc

SEQ ID NO: 19074 - DNA, 20 bp, Artificial Sequence
  Description of Artificial Sequence: Synthetic oligonucleotide
  Target: COL7A1; (+) strand; PAM type: NRG; PAM sequence: AGG
ccagggggaccagaggggcc

SEQ ID NO: 19075 - DNA, 20 bp, Artificial Sequence
  Description of Artificial Sequence: Synthetic oligonucleotide
  Target: COL7A1; (+) strand; PAM type: NRG; PAM sequence: GGG
cagggggaccagaggggcca

SEQ ID NO: 19076 - DNA, 20 bp, Artificial Sequence
  Description of Artificial Sequence: Synthetic oligonucleotide
  Target: COL7A1; (+) strand; PAM type: NRG; PAM sequence: GAG
gggggaccagaggggccagg

SEQ ID NO: 19077 - DNA, 20 bp, Artificial Sequence
  Description of Artificial Sequence: Synthetic oligonucleotide
  Target: COL7A1; (+) strand; PAM type: NRG; PAM sequence: AGG
ggggaccagaggggccaggg

SEQ ID NO: 19078 - DNA, 20 bp, Artificial Sequence
  Description of Artificial Sequence: Synthetic oligonucleotide
  Target: COL7A1; (+) strand; PAM type: NRG; PAM sequence: CGG
cagggaggccctgttctcca

SEQ ID NO: 19079 - DNA, 20 bp, Artificial Sequence
  Description of Artificial Sequence: Synthetic oligonucleotide
  Target: COL7A1; (+) strand; PAM type: NRG; PAM sequence: GAG
gggaggccctgttctccacg

SEQ ID NO: 19080 - DNA, 20 bp, Artificial Sequence
  Description of Artificial Sequence: Synthetic oligonucleotide
  Target: COL7A1; (+) strand; PAM type: NRG; PAM sequence: AGG
ggaggccctgttctccacgg

SEQ ID NO: 19081 - DNA, 20 bp, Artificial Sequence
  Description of Artificial Sequence: Synthetic oligonucleotide
  Target: COL7A1; (+) strand; PAM type: NRG; PAM sequence: TGG
ccctgttctccacggaggcc

SEQ ID NO: 19082 - DNA, 20 bp, Artificial Sequence
  Description of Artificial Sequence: Synthetic oligonucleotide
  Target: COL7A1; (+) strand; PAM type: NRG; PAM sequence: AAG
tgttctccacggaggcctgg

SEQ ID NO: 19083 - DNA, 20 bp, Artificial Sequence
  Description of Artificial Sequence: Synthetic oligonucleotide
  Target: COL7A1; (+) strand; PAM type: NRG; PAM sequence: TGG
cacggaggcctggaagcccc

SEQ ID NO: 19084 - DNA, 20 bp, Artificial Sequence
  Description of Artificial Sequence: Synthetic oligonucleotide
  Target: COL7A1; (+) strand; PAM type: NRG; PAM sequence: AAG
ggcctggaagcccctggaaa

SEQ ID NO: 19085 - DNA, 20 bp, Artificial Sequence
  Description of Artificial Sequence: Synthetic oligonucleotide
  Target: COL7A1; (+) strand; PAM type: NRG; PAM sequence: AAG
ccctggaaaaagtctttgtt

SEQ ID NO: 19086 - DNA, 20 bp, Artificial Sequence
  Description of Artificial Sequence: Synthetic oligonucleotide
  Target: COL7A1; (+) strand; PAM type: NRG; PAM sequence: TAG
aaagtctttgttaagattta

SEQ ID NO: 19087 - DNA, 20 bp, Artificial Sequence
  Description of Artificial Sequence: Synthetic oligonucleotide
  Target: COL7A1; (+) strand; PAM type: NRG; PAM sequence: AGG
aagtctttgttaagatttat

SEQ ID NO: 19088 - DNA, 20 bp, Artificial Sequence
  Description of Artificial Sequence: Synthetic oligonucleotide
  Target: COL7A1; (+) strand; PAM type: NRG; PAM sequence: GGG
agtctttgttaagatttata

SEQ ID NO: 19089 - DNA, 20 bp, Artificial Sequence
  Description of Artificial Sequence: Synthetic oligonucleotide
  Target: COL7A1; (+) strand; PAM type: NRG; PAM sequence: GAG
ttaagatttatagggcctct

SEQ ID NO: 19090 - DNA, 20 bp, Artificial Sequence
  Description of Artificial Sequence: Synthetic oligonucleotide
  Target: COL7A1; (+) strand; PAM type: NRG; PAM sequence: TGG
agggcctctgagatatccct

SEQ ID NO: 19091 - DNA, 20 bp, Artificial Sequence
  Description of Artificial Sequence: Synthetic oligonucleotide
  Target: COL7A1; (+) strand; PAM type: NRG; PAM sequence: GGG
gggcctctgagatatccctt

SEQ ID NO: 19092 - DNA, 20 bp, Artificial Sequence
  Description of Artificial Sequence: Synthetic oligonucleotide
  Target: COL7A1; (+) strand; PAM type: NRG; PAM sequence: GGG
ggcctctgagatatcccttg

SEQ ID NO: 19093 - DNA, 20 bp, Artificial Sequence
  Description of Artificial Sequence: Synthetic oligonucleotide
  Target: COL7A1; (+) strand; PAM type: NRG; PAM sequence: TGG
atcccttggggcacacccca

SEQ ID NO: 19094 - DNA, 20 bp, Artificial Sequence
  Description of Artificial Sequence: Synthetic oligonucleotide
  Target: COL7A1; (+) strand; PAM type: NRG; PAM sequence: AAG
tggggcacaccccatggact

SEQ ID NO: 19095 - DNA, 20 bp, Artificial Sequence
  Description of Artificial Sequence: Synthetic oligonucleotide
  Target: COL7A1; (+) strand; PAM type: NRG; PAM sequence: GAG
gggcacaccccatggactaa

SEQ ID NO: 19096 - DNA, 20 bp, Artificial Sequence
  Description of Artificial Sequence: Synthetic oligonucleotide
  Target: COL7A1; (+) strand; PAM type: NRG; PAM sequence: AGG
ggcacaccccatggactaag

SEQ ID NO: 19097 - DNA, 20 bp, Artificial Sequence
  Description of Artificial Sequence: Synthetic oligonucleotide
  Target: COL7A1; (+) strand; PAM type: NRG; PAM sequence: AAG
tggactaagaggaccccaaa

SEQ ID NO: 19098 - DNA, 20 bp, Artificial Sequence
  Description of Artificial Sequence: Synthetic oligonucleotide
  Target: COL7A1; (+) strand; PAM type: NRG; PAM sequence: CAG
accccaaaaagatctccctc

SEQ ID NO: 19099 - DNA, 20 bp, Artificial Sequence
  Description of Artificial Sequence: Synthetic oligonucleotide
  Target: COL7A1; (+) strand; PAM type: NRG; PAM sequence: AGG
ccccaaaaagatctccctcc

SEQ ID NO: 19100 - DNA, 20 bp, Artificial Sequence
  Description of Artificial Sequence: Synthetic oligonucleotide
  Target: COL7A1; (+) strand; PAM type: NRG; PAM sequence: GGG
cccaaaaagatctccctcca

SEQ ID NO: 19101 - DNA, 20 bp, Artificial Sequence
  Description of Artificial Sequence: Synthetic oligonucleotide
  Target: COL7A1; (+) strand; PAM type: NRG; PAM sequence: TAG
aaaaagatctccctccaggg

SEQ ID NO: 19102 - DNA, 20 bp, Artificial Sequence
  Description of Artificial Sequence: Synthetic oligonucleotide
  Target: COL7A1; (+) strand; PAM type: NRG; PAM sequence: GAG
aaagatctccctccagggta

SEQ ID NO: 19103 - DNA, 20 bp, Artificial Sequence
  Description of Artificial Sequence: Synthetic oligonucleotide
  Target: COL7A1; (+) strand; PAM type: NRG; PAM sequence: CAG
ccctccagggtagagacccc

SEQ ID NO: 19104 - DNA, 20 bp, Artificial Sequence
  Description of Artificial Sequence: Synthetic oligonucleotide
  Target: COL7A1; (+) strand; PAM type: NRG; PAM sequence: AGG
cctccagggtagagaccccc

SEQ ID NO: 19105 - DNA, 20 bp, Artificial Sequence
  Description of Artificial Sequence: Synthetic oligonucleotide
  Target: COL7A1; (+) strand; PAM type: NRG; PAM sequence: GAG
gggtagagacccccaggact

SEQ ID NO: 19106 - DNA, 20 bp, Artificial Sequence
  Description of Artificial Sequence: Synthetic oligonucleotide
  Target: COL7A1; (+) strand; PAM type: NRG; PAM sequence: GAG
gtagagacccccaggactga

SEQ ID NO: 19107 - DNA, 20 bp, Artificial Sequence
  Description of Artificial Sequence: Synthetic oligonucleotide
  Target: COL7A1; (+) strand; PAM type: NRG; PAM sequence: AGG
tagagacccccaggactgag

SEQ ID NO: 19108 - DNA, 20 bp, Artificial Sequence
  Description of Artificial Sequence: Synthetic oligonucleotide
  Target: COL7A1; (+) strand; PAM type: NRG; PAM sequence: GAG
caggactgagaggtcccatt

SEQ ID NO: 19109 - DNA, 20 bp, Artificial Sequence
  Description of Artificial Sequence: Synthetic oligonucleotide
  Target: COL7A1; (+) strand; PAM type: NRG; PAM sequence: CAG
gaggtcccattgagatccct

SEQ ID NO: 19110 - DNA, 20 bp, Artificial Sequence
  Description of Artificial Sequence: Synthetic oligonucleotide
  Target: COL7A1; (+) strand; PAM type: NRG; PAM sequence: AGG
aggtcccattgagatccctc

SEQ ID NO: 19111 - DNA, 20 bp, Artificial Sequence
  Description of Artificial Sequence: Synthetic oligonucleotide
  Target: COL7A1; (+) strand; PAM type: NRG; PAM sequence: CAG
ccattgagatccctcaggca

SEQ ID NO: 19112 - DNA, 20 bp, Artificial Sequence
  Description of Artificial Sequence: Synthetic oligonucleotide
  Target: COL7A1; (+) strand; PAM type: NRG; PAM sequence: TGG
tccctcaggcacagacccca

SEQ ID NO: 19113 - DNA, 20 bp, Artificial Sequence
  Description of Artificial Sequence: Synthetic oligonucleotide
  Target: COL7A1; (+) strand; PAM type: NRG; PAM sequence: TGG
tcaggcacagaccccatgga

SEQ ID NO: 19114 - DNA, 20 bp, Artificial Sequence
  Description of Artificial Sequence: Synthetic oligonucleotide
  Target: COL7A1; (+) strand; PAM type: NRG; PAM sequence: GGG
caggcacagaccccatggat

SEQ ID NO: 19115 - DNA, 20 bp, Artificial Sequence
  Description of Artificial Sequence: Synthetic oligonucleotide
  Target: COL7A1; (+) strand; PAM type: NRG; PAM sequence: GGG
aggcacagaccccatggatg

SEQ ID NO: 19116 - DNA, 20 bp, Artificial Sequence
  Description of Artificial Sequence: Synthetic oligonucleotide
  Target: COL7A1; (+) strand; PAM type: NRG; PAM sequence: GGG
ggcacagaccccatggatgg

SEQ ID NO: 19117 - DNA, 20 bp, Artificial Sequence
  Description of Artificial Sequence: Synthetic oligonucleotide
  Target: COL7A1; (+) strand; PAM type: NRG; PAM sequence: GAG
catggatgggggcccctgct

SEQ ID NO: 19118 - DNA, 20 bp, Artificial Sequence
  Description of Artificial Sequence: Synthetic oligonucleotide
  Target: COL7A1; (+) strand; PAM type: NRG; PAM sequence: AAG
gggcccctgctgagactccc

SEQ ID NO: 19119 - DNA, 20 bp, Artificial Sequence
  Description of Artificial Sequence: Synthetic oligonucleotide
  Target: COL7A1; (+) strand; PAM type: NRG; PAM sequence: AGG
ggcccctgctgagactccca

SEQ ID NO: 19120 - DNA, 20 bp, Artificial Sequence
  Description of Artificial Sequence: Synthetic oligonucleotide
  Target: COL7A1; (+) strand; PAM type: NRG; PAM sequence: GGG
gcccctgctgagactcccaa

SEQ ID NO: 19121 - DNA, 20 bp, Artificial Sequence
  Description of Artificial Sequence: Synthetic oligonucleotide
  Target: COL7A1; (+) strand; PAM type: NRG; PAM sequence: AAG
cctgctgagactcccaaggg

SEQ ID NO: 19122 - DNA, 20 bp, Artificial Sequence
  Description of Artificial Sequence: Synthetic oligonucleotide
  Target: COL7A1; (+) strand; PAM type: NRG; PAM sequence: CAG
actcccaagggaagaacccc

SEQ ID NO: 19123 - DNA, 20 bp, Artificial Sequence
  Description of Artificial Sequence: Synthetic oligonucleotide
  Target: COL7A1; (+) strand; PAM type: NRG; PAM sequence: AGG
ctcccaagggaagaaccccc

SEQ ID NO: 19124 - DNA, 20 bp, Artificial Sequence
  Description of Artificial Sequence: Synthetic oligonucleotide
  Target: COL7A1; (+) strand; PAM type: NRG; PAM sequence: TGG
agggaagaacccccaggact

SEQ ID NO: 19125 - DNA, 20 bp, Artificial Sequence
  Description of Artificial Sequence: Synthetic oligonucleotide
  Target: COL7A1; (+) strand; PAM type: NRG; PAM sequence: GAG
ggaagaacccccaggacttg

SEQ ID NO: 19126 - DNA, 20 bp, Artificial Sequence
  Description of Artificial Sequence: Synthetic oligonucleotide
  Target: COL7A1; (+) strand; PAM type: NRG; PAM sequence: AGG
gaagaacccccaggacttgg

SEQ ID NO: 19127 - DNA, 20 bp, Artificial Sequence
  Description of Artificial Sequence: Synthetic oligonucleotide
  Target: COL7A1; (+) strand; PAM type: NRG; PAM sequence: GGG
aagaacccccaggacttgga

SEQ ID NO: 19128 - DNA, 20 bp, Artificial Sequence
  Description of Artificial Sequence: Synthetic oligonucleotide
  Target: COL7A1; (+) strand; PAM type: NRG; PAM sequence: AAG
caggacttggagggcctatg

SEQ ID NO: 19129 - DNA, 20 bp, Artificial Sequence
  Description of Artificial Sequence: Synthetic oligonucleotide
  Target: COL7A1; (+) strand; PAM type: NRG; PAM sequence: AAG
gagggcctatgaagaccccc

SEQ ID NO: 19130 - DNA, 20 bp, Artificial Sequence
  Description of Artificial Sequence: Synthetic oligonucleotide
  Target: COL7A1; (+) strand; PAM type: NRG; PAM sequence: AGG
agggcctatgaagaccccca

SEQ ID NO: 19131 - DNA, 20 bp, Artificial Sequence
  Description of Artificial Sequence: Synthetic oligonucleotide
  Target: COL7A1; (+) strand; PAM type: NRG; PAM sequence: AAG
ctatgaagacccccaaggca

SEQ ID NO: 19132 - DNA, 20 bp, Artificial Sequence
  Description of Artificial Sequence: Synthetic oligonucleotide
  Target: COL7A1; (+) strand; PAM type: NRG; PAM sequence: AAG
tgaagacccccaaggcaaag

SEQ ID NO: 19133 - DNA, 20 bp, Artificial Sequence
  Description of Artificial Sequence: Synthetic oligonucleotide
  Target: COL7A1; (+) strand; PAM type: NRG; PAM sequence: AGG
gaagacccccaaggcaaaga

SEQ ID NO: 19134 - DNA, 20 bp, Artificial Sequence
  Description of Artificial Sequence: Synthetic oligonucleotide
  Target: COL7A1; (+) strand; PAM type: NRG; PAM sequence: CAG
acccccaaggcaaagaaggt

SEQ ID NO: 19135 - DNA, 20 bp, Artificial Sequence
  Description of Artificial Sequence: Synthetic oligonucleotide
  Target: COL7A1; (+) strand; PAM type: NRG; PAM sequence: AAG
ccaaggcaaagaaggtcaga

SEQ ID NO: 19136 - DNA, 20 bp, Artificial Sequence
  Description of Artificial Sequence: Synthetic oligonucleotide
  Target: COL7A1; (+) strand; PAM type: NRG; PAM sequence: AGG
caaggcaaagaaggtcagaa

SEQ ID NO: 19137 - DNA, 20 bp, Artificial Sequence
  Description of Artificial Sequence: Synthetic oligonucleotide
  Target: COL7A1; (+) strand; PAM type: NRG; PAM sequence: GGG
aaggcaaagaaggtcagaaa

SEQ ID NO: 19138 - DNA, 20 bp, Artificial Sequence
  Description of Artificial Sequence: Synthetic oligonucleotide
  Target: COL7A1; (+) strand; PAM type: NRG; PAM sequence: GGG
aggcaaagaaggtcagaaag

SEQ ID NO: 19139 - DNA, 20 bp, Artificial Sequence
  Description of Artificial Sequence: Synthetic oligonucleotide
  Target: COL7A1; (+) strand; PAM type: NRG; PAM sequence: GGG
ggcaaagaaggtcagaaagg

SEQ ID NO: 19140 - DNA, 20 bp, Artificial Sequence
  Description of Artificial Sequence: Synthetic oligonucleotide
  Target: COL7A1; (+) strand; PAM type: NRG; PAM sequence: CAG
ttctactaaaacctgtgtgc

SEQ ID NO: 19141 - DNA, 20 bp, Artificial Sequence
  Description of Artificial Sequence: Synthetic oligonucleotide
  Target: COL7A1; (+) strand; PAM type: NRG; PAM sequence: AGG
tctactaaaacctgtgtgcc

SEQ ID NO: 19142 - DNA, 20 bp, Artificial Sequence
  Description of Artificial Sequence: Synthetic oligonucleotide
  Target: COL7A1; (+) strand; PAM type: NRG; PAM sequence: GGG
ctactaaaacctgtgtgcca

SEQ ID NO: 19143 - DNA, 20 bp, Artificial Sequence
  Description of Artificial Sequence: Synthetic oligonucleotide
  Target: COL7A1; (+) strand; PAM type: NRG; PAM sequence: GAG
aaacctgtgtgccagggact

SEQ ID NO: 19144 - DNA, 20 bp, Artificial Sequence
  Description of Artificial Sequence: Synthetic oligonucleotide
  Target: COL7A1; (+) strand; PAM type: NRG; PAM sequence: AAG
cagggactgagaccctccca

SEQ ID NO: 19145 - DNA, 20 bp, Artificial Sequence
  Description of Artificial Sequence: Synthetic oligonucleotide
  Target: COL7A1; (+) strand; PAM type: NRG; PAM sequence: AGG
agggactgagaccctcccaa

SEQ ID NO: 19146 - DNA, 20 bp, Artificial Sequence
  Description of Artificial Sequence: Synthetic oligonucleotide
  Target: COL7A1; (+) strand; PAM type: NRG; PAM sequence: AAG
actgagaccctcccaaaggc

SEQ ID NO: 19147 - DNA, 20 bp, Artificial Sequence
  Description of Artificial Sequence: Synthetic oligonucleotide
  Target: COL7A1; (+) strand; PAM type: NRG; PAM sequence: AGG
ctgagaccctcccaaaggca

SEQ ID NO: 19148 - DNA, 20 bp, Artificial Sequence
  Description of Artificial Sequence: Synthetic oligonucleotide
  Target: COL7A1; (+) strand; PAM type: NRG; PAM sequence: CGG
cgaccccccaccaactctct

SEQ ID NO: 19149 - DNA, 20 bp, Artificial Sequence
  Description of Artificial Sequence: Synthetic oligonucleotide
  Target: COL7A1; (+) strand; PAM type: NRG; PAM sequence: TGG
atgctgtgactatgatgatc

SEQ ID NO: 19150 - DNA, 20 bp, Artificial Sequence
  Description of Artificial Sequence: Synthetic oligonucleotide
  Target: COL7A1; (+) strand; PAM type: NRG; PAM sequence: TGG
tgtgactatgatgatctggt

SEQ ID NO: 19151 - DNA, 20 bp, Artificial Sequence
  Description of Artificial Sequence: Synthetic oligonucleotide
  Target: COL7A1; (+) strand; PAM type: NRG; PAM sequence: GAG
tgactatgatgatctggttg

SEQ ID NO: 19152 - DNA, 20 bp, Artificial Sequence
  Description of Artificial Sequence: Synthetic oligonucleotide
  Target: COL7A1; (+) strand; PAM type: NRG; PAM sequence: CAG
tgatctggttggagcttacg

SEQ ID NO: 19153 - DNA, 20 bp, Artificial Sequence
  Description of Artificial Sequence: Synthetic oligonucleotide
  Target: COL7A1; (+) strand; PAM type: NRG; PAM sequence: GAG
gttggagcttacgcagcccc

SEQ ID NO: 19154 - DNA, 20 bp, Artificial Sequence
  Description of Artificial Sequence: Synthetic oligonucleotide
  Target: COL7A1; (+) strand; PAM type: NRG; PAM sequence: CAG
gccccgagccccctctgtcc

SEQ ID NO: 19155 - DNA, 20 bp, Artificial Sequence
  Description of Artificial Sequence: Synthetic oligonucleotide
  Target: COL7A1; (+) strand; PAM type: NRG; PAM sequence: TGG
ccctcacttacgtctctccc

SEQ ID NO: 19156 - DNA, 20 bp, Artificial Sequence
  Description of Artificial Sequence: Synthetic oligonucleotide
  Target: COL7A1; (+) strand; PAM type: NRG; PAM sequence: GGG
cctcacttacgtctctccct

SEQ ID NO: 19157 - DNA, 20 bp, Artificial Sequence
  Description of Artificial Sequence: Synthetic oligonucleotide
  Target: COL7A1; (+) strand; PAM type: NRG; PAM sequence: CAG
tacgtctctccctgggtccc

SEQ ID NO: 19158 - DNA, 20 bp, Artificial Sequence
  Description of Artificial Sequence: Synthetic oligonucleotide
  Target: COL7A1; (+) strand; PAM type: NRG; PAM sequence: CAG
tgggtccccagctttgcctg

SEQ ID NO: 19159 - DNA, 20 bp, Artificial Sequence
  Description of Artificial Sequence: Synthetic oligonucleotide
  Target: COL7A1; (+) strand; PAM type: NRG; PAM sequence: GAG
agctttgcctgcagcaccct

SEQ ID NO: 19160 - DNA, 20 bp, Artificial Sequence
  Description of Artificial Sequence: Synthetic oligonucleotide
  Target: COL7A1; (+) strand; PAM type: NRG; PAM sequence: AGG
gctttgcctgcagcaccctg

SEQ ID NO: 19161 - DNA, 20 bp, Artificial Sequence
  Description of Artificial Sequence: Synthetic oligonucleotide
  Target: COL7A1; (+) strand; PAM type: NRG; PAM sequence: GAG
tttgcctgcagcaccctgag

SEQ ID NO: 19162 - DNA, 20 bp, Artificial Sequence
  Description of Artificial Sequence: Synthetic oligonucleotide
  Target: COL7A1; (+) strand; PAM type: NRG; PAM sequence: GAG
tgcctgcagcaccctgagga

SEQ ID NO: 19163 - DNA, 20 bp, Artificial Sequence
  Description of Artificial Sequence: Synthetic oligonucleotide
  Target: COL7A1; (+) strand; PAM type: NRG; PAM sequence: AAG
gcaccctgaggagagactca

SEQ ID NO: 19164 - DNA, 20 bp, Artificial Sequence
  Description of Artificial Sequence: Synthetic oligonucleotide
  Target: COL7A1; (+) strand; PAM type: NRG; PAM sequence: CAG
cctgaggagagactcaaagt

SEQ ID NO: 19165 - DNA, 20 bp, Artificial Sequence
  Description of Artificial Sequence: Synthetic oligonucleotide
  Target: COL7A1; (+) strand; PAM type: NRG; PAM sequence: TGG
gactcaaagtcagttcatca

SEQ ID NO: 19166 - DNA, 20 bp, Artificial Sequence
  Description of Artificial Sequence: Synthetic oligonucleotide
  Target: COL7A1; (+) strand; PAM type: NRG; PAM sequence: TGG
aagtcagttcatcatggtca

SEQ ID NO: 19167 - DNA, 20 bp, Artificial Sequence
  Description of Artificial Sequence: Synthetic oligonucleotide
  Target: COL7A1; (+) strand; PAM type: NRG; PAM sequence: GGG
agtcagttcatcatggtcat

SEQ ID NO: 19168 - DNA, 20 bp, Artificial Sequence
  Description of Artificial Sequence: Synthetic oligonucleotide
  Target: COL7A1; (+) strand; PAM type: NRG; PAM sequence: GGG
gtcagttcatcatggtcatg

SEQ ID NO: 19169 - DNA, 20 bp, Artificial Sequence
  Description of Artificial Sequence: Synthetic oligonucleotide
  Target: COL7A1; (+) strand; PAM type: NRG; PAM sequence: CAG
gttcatcatggtcatggggt

SEQ ID NO: 19170 - DNA, 20 bp, Artificial Sequence
  Description of Artificial Sequence: Synthetic oligonucleotide
  Target: COL7A1; (+) strand; PAM type: NRG; PAM sequence: AGG
ttcatcatggtcatggggtc

SEQ ID NO: 19171 - DNA, 20 bp, Artificial Sequence
  Description of Artificial Sequence: Synthetic oligonucleotide
  Target: COL7A1; (+) strand; PAM type: NRG; PAM sequence: GGG
tcatcatggtcatggggtca

SEQ ID NO: 19172 - DNA, 20 bp, Artificial Sequence
  Description of Artificial Sequence: Synthetic oligonucleotide
  Target: COL7A1; (+) strand; PAM type: NRG; PAM sequence: GGG
catcatggtcatggggtcag

SEQ ID NO: 19173 - DNA, 20 bp, Artificial Sequence
  Description of Artificial Sequence: Synthetic oligonucleotide
  Target: COL7A1; (+) strand; PAM type: NRG; PAM sequence: TAG
ggtcatggggtcaggggctc

SEQ ID NO: 19174 - DNA, 20 bp, Artificial Sequence
  Description of Artificial Sequence: Synthetic oligonucleotide
  Target: COL7A1; (+) strand; PAM type: NRG; PAM sequence: GAG
tcaggggctctagtccctgt

SEQ ID NO: 19175 - DNA, 20 bp, Artificial Sequence
  Description of Artificial Sequence: Synthetic oligonucleotide
  Target: COL7A1; (+) strand; PAM type: NRG; PAM sequence: AAG
gctctagtccctgtgagcct

SEQ ID NO: 19176 - DNA, 20 bp, Artificial Sequence
  Description of Artificial Sequence: Synthetic oligonucleotide
  Target: COL7A1; (+) strand; PAM type: NRG; PAM sequence: AGG
ctctagtccctgtgagccta

SEQ ID NO: 19177 - DNA, 20 bp, Artificial Sequence
  Description of Artificial Sequence: Synthetic oligonucleotide
  Target: COL7A1; (+) strand; PAM type: NRG; PAM sequence: TGG
ctgtgagcctaaggcctgca

SEQ ID NO: 19178 - DNA, 20 bp, Artificial Sequence
  Description of Artificial Sequence: Synthetic oligonucleotide
  Target: COL7A1; (+) strand; PAM type: NRG; PAM sequence: AAG
gagcctaaggcctgcatggc

SEQ ID NO: 19179 - DNA, 20 bp, Artificial Sequence
  Description of Artificial Sequence: Synthetic oligonucleotide
  Target: COL7A1; (+) strand; PAM type: NRG; PAM sequence: CAG
tggcaagaacatgccccacc

SEQ ID NO: 19180 - DNA, 20 bp, Artificial Sequence
  Description of Artificial Sequence: Synthetic oligonucleotide
  Target: COL7A1; (+) strand; PAM type: NRG; PAM sequence: AGG
ggcaagaacatgccccaccc

SEQ ID NO: 19181 - DNA, 20 bp, Artificial Sequence
  Description of Artificial Sequence: Synthetic oligonucleotide
  Target: COL7A1; (+) strand; PAM type: NRG; PAM sequence: CAG
aagaacatgccccacccagg

SEQ ID NO: 19182 - DNA, 20 bp, Artificial Sequence
  Description of Artificial Sequence: Synthetic oligonucleotide
  Target: COL7A1; (+) strand; PAM type: NRG; PAM sequence: AGG
agaacatgccccacccaggc

SEQ ID NO: 19183 - DNA, 20 bp, Artificial Sequence
  Description of Artificial Sequence: Synthetic oligonucleotide
  Target: COL7A1; (+) strand; PAM type: NRG; PAM sequence: GGG
gaacatgccccacccaggca

SEQ ID NO: 19184 - DNA, 20 bp, Artificial Sequence
  Description of Artificial Sequence: Synthetic oligonucleotide
  Target: COL7A1; (+) strand; PAM type: NRG; PAM sequence: TGG
gccccacccaggcagggctc

SEQ ID NO: 19185 - DNA, 20 bp, Artificial Sequence
  Description of Artificial Sequence: Synthetic oligonucleotide
  Target: COL7A1; (+) strand; PAM type: NRG; PAM sequence: GGG
ccccacccaggcagggctct

SEQ ID NO: 19186 - DNA, 20 bp, Artificial Sequence
  Description of Artificial Sequence: Synthetic oligonucleotide
  Target: COL7A1; (+) strand; PAM type: NRG; PAM sequence: GAG
ccacccaggcagggctctgg

SEQ ID NO: 19187 - DNA, 20 bp, Artificial Sequence
  Description of Artificial Sequence: Synthetic oligonucleotide
  Target: COL7A1; (+) strand; PAM type: NRG; PAM sequence: AAG
cccaggcagggctctgggag

SEQ ID NO: 19188 - DNA, 20 bp, Artificial Sequence
  Description of Artificial Sequence: Synthetic oligonucleotide
  Target: COL7A1; (+) strand; PAM type: NRG; PAM sequence: CAG
cagggctctgggagaagaca

SEQ ID NO: 19189 - DNA, 20 bp, Artificial Sequence
  Description of Artificial Sequence: Synthetic oligonucleotide
  Target: COL7A1; (+) strand; PAM type: NRG; PAM sequence: CAG
ctgggagaagacacagacaa

SEQ ID NO: 19190 - DNA, 20 bp, Artificial Sequence
  Description of Artificial Sequence: Synthetic oligonucleotide
  Target: COL7A1; (+) strand; PAM type: NRG; PAM sequence: AGG
tgggagaagacacagacaac

SEQ ID NO: 19191 - DNA, 20 bp, Artificial Sequence
  Description of Artificial Sequence: Synthetic oligonucleotide
  Target: COL7A1; (+) strand; PAM type: NRG; PAM sequence: CAG
acagacaacaggtctcgccc

SEQ ID NO: 19192 - DNA, 20 bp, Artificial Sequence
  Description of Artificial Sequence: Synthetic oligonucleotide
  Target: COL7A1; (+) strand; PAM type: NRG; PAM sequence: GAG
agacaacaggtctcgcccca

SEQ ID NO: 19193 - DNA, 20 bp, Artificial Sequence
  Description of Artificial Sequence: Synthetic oligonucleotide
  Target: COL7A1; (+) strand; PAM type: NRG; PAM sequence: AAG
gtctcgccccagagctcgtc

SEQ ID NO: 19194 - DNA, 20 bp, Artificial Sequence
  Description of Artificial Sequence: Synthetic oligonucleotide
  Target: COL7A1; (+) strand; PAM type: NRG; PAM sequence: AGG
tctcgccccagagctcgtca

SEQ ID NO: 19195 - DNA, 20 bp, Artificial Sequence
  Description of Artificial Sequence: Synthetic oligonucleotide
  Target: COL7A1; (+) strand; PAM type: NRG; PAM sequence: AAG
ccccagagctcgtcaaggcc

SEQ ID NO: 19196 - DNA, 20 bp, Artificial Sequence
  Description of Artificial Sequence: Synthetic oligonucleotide
  Target: COL7A1; (+) strand; PAM type: NRG; PAM sequence: GAG
caaggccaagaccaaccaat

SEQ ID NO: 19197 - DNA, 20 bp, Artificial Sequence
  Description of Artificial Sequence: Synthetic oligonucleotide
  Target: COL7A1; (+) strand; PAM type: NRG; PAM sequence: AGG
aaggccaagaccaaccaatg

SEQ ID NO: 19198 - DNA, 20 bp, Artificial Sequence
  Description of Artificial Sequence: Synthetic oligonucleotide
  Target: COL7A1; (+) strand; PAM type: NRG; PAM sequence: TGG
ccaagaccaaccaatgaggc

SEQ ID NO: 19199 - DNA, 20 bp, Artificial Sequence
  Description of Artificial Sequence: Synthetic oligonucleotide
  Target: COL7A1; (+) strand; PAM type: NRG; PAM sequence: GGG
caagaccaaccaatgaggct

SEQ ID NO: 19200 - DNA, 20 bp, Artificial Sequence
  Description of Artificial Sequence: Synthetic oligonucleotide
  Target: COL7A1; (+) strand; PAM type: NRG; PAM sequence: GGG
aagaccaaccaatgaggctg

SEQ ID NO: 19201 - DNA, 20 bp, Artificial Sequence
  Description of Artificial Sequence: Synthetic oligonucleotide
  Target: COL7A1; (+) strand; PAM type: NRG; PAM sequence: TAG
caaccaatgaggctggggtc

SEQ ID NO: 19202 - DNA, 20 bp, Artificial Sequence
  Description of Artificial Sequence: Synthetic oligonucleotide
  Target: COL7A1; (+) strand; PAM type: NRG; PAM sequence: AGG
aaccaatgaggctggggtct

SEQ ID NO: 19203 - DNA, 20 bp, Artificial Sequence
  Description of Artificial Sequence: Synthetic oligonucleotide
  Target: COL7A1; (+) strand; PAM type: NRG; PAM sequence: GGG
accaatgaggctggggtcta

SEQ ID NO: 19204 - DNA, 20 bp, Artificial Sequence
  Description of Artificial Sequence: Synthetic oligonucleotide
  Target: COL7A1; (+) strand; PAM type: NRG; PAM sequence: AAG
gggtctagggtcctcatgtg

SEQ ID NO: 19205 - DNA, 20 bp, Artificial Sequence
  Description of Artificial Sequence: Synthetic oligonucleotide
  Target: COL7A1; (+) strand; PAM type: NRG; PAM sequence: AGG
ggtctagggtcctcatgtga

SEQ ID NO: 19206 - DNA, 20 bp, Artificial Sequence
  Description of Artificial Sequence: Synthetic oligonucleotide
  Target: COL7A1; (+) strand; PAM type: NRG; PAM sequence: GGG
gtctagggtcctcatgtgaa

SEQ ID NO: 19207 - DNA, 20 bp, Artificial Sequence
  Description of Artificial Sequence: Synthetic oligonucleotide
  Target: COL7A1; (+) strand; PAM type: NRG; PAM sequence: GGG
tctagggtcctcatgtgaag

SEQ ID NO: 19208 - DNA, 20 bp, Artificial Sequence
  Description of Artificial Sequence: Synthetic oligonucleotide
  Target: COL7A1; (+) strand; PAM type: NRG; PAM sequence: TAG
agggtcctcatgtgaagggg

SEQ ID NO: 19209 - DNA, 20 bp, Artificial Sequence
  Description of Artificial Sequence: Synthetic oligonucleotide
  Target: COL7A1; (+) strand; PAM type: NRG; PAM sequence: AGG
gggtcctcatgtgaaggggt

SEQ ID NO: 19210 - DNA, 20 bp, Artificial Sequence
  Description of Artificial Sequence: Synthetic oligonucleotide
  Target: COL7A1; (+) strand; PAM type: NRG; PAM sequence: GGG
ggtcctcatgtgaaggggta

SEQ ID NO: 19211 - DNA, 20 bp, Artificial Sequence
  Description of Artificial Sequence: Synthetic oligonucleotide
  Target: COL7A1; (+) strand; PAM type: NRG; PAM sequence: GGG
gtcctcatgtgaaggggtag

SEQ ID NO: 19212 - DNA, 20 bp, Artificial Sequence
  Description of Artificial Sequence: Synthetic oligonucleotide
  Target: COL7A1; (+) strand; PAM type: NRG; PAM sequence: AAG
ctcatgtgaaggggtagggg

SEQ ID NO: 19213 - DNA, 20 bp, Artificial Sequence
  Description of Artificial Sequence: Synthetic oligonucleotide
  Target: COL7A1; (+) strand; PAM type: NRG; PAM sequence: AGG
tcatgtgaaggggtagggga

SEQ ID NO: 19214 - DNA, 20 bp, Artificial Sequence
  Description of Artificial Sequence: Synthetic oligonucleotide
  Target: COL7A1; (+) strand; PAM type: NRG; PAM sequence: GGG
catgtgaaggggtaggggaa

SEQ ID NO: 19215 - DNA, 20 bp, Artificial Sequence
  Description of Artificial Sequence: Synthetic oligonucleotide
  Target: COL7A1; (+) strand; PAM type: NRG; PAM sequence: GGG
atgtgaaggggtaggggaag

SEQ ID NO: 19216 - DNA, 20 bp, Artificial Sequence
  Description of Artificial Sequence: Synthetic oligonucleotide
  Target: COL7A1; (+) strand; PAM type: NRG; PAM sequence: CAG
gggtaggggaaggggacaac

SEQ ID NO: 19217 - DNA, 20 bp, Artificial Sequence
  Description of Artificial Sequence: Synthetic oligonucleotide
  Target: COL7A1; (+) strand; PAM type: NRG; PAM sequence: AGG
ggtaggggaaggggacaacc

SEQ ID NO: 19218 - DNA, 20 bp, Artificial Sequence
  Description of Artificial Sequence: Synthetic oligonucleotide
  Target: COL7A1; (+) strand; PAM type: NRG; PAM sequence: CAG
aggggaaggggacaaccagg

SEQ ID NO: 19219 - DNA, 20 bp, Artificial Sequence
  Description of Artificial Sequence: Synthetic oligonucleotide
  Target: COL7A1; (+) strand; PAM type: NRG; PAM sequence: AGG
ggggaaggggacaaccaggc

SEQ ID NO: 19220 - DNA, 20 bp, Artificial Sequence
  Description of Artificial Sequence: Synthetic oligonucleotide
  Target: COL7A1; (+) strand; PAM type: NRG; PAM sequence: AAG
gacaaccaggcaggactacc

SEQ ID NO: 19221 - DNA, 20 bp, Artificial Sequence
  Description of Artificial Sequence: Synthetic oligonucleotide
  Target: COL7A1; (+) strand; PAM type: NRG; PAM sequence: CGG
ggactaccaagactcacatt

SEQ ID NO: 19222 - DNA, 20 bp, Artificial Sequence
  Description of Artificial Sequence: Synthetic oligonucleotide
  Target: COL7A1; (+) strand; PAM type: NRG; PAM sequence: CAG
accaagactcacattcggcc

SEQ ID NO: 19223 - DNA, 20 bp, Artificial Sequence
  Description of Artificial Sequence: Synthetic oligonucleotide
  Target: COL7A1; (+) strand; PAM type: NRG; PAM sequence: GAG
caagactcacattcggccca

SEQ ID NO: 19224 - DNA, 20 bp, Artificial Sequence
  Description of Artificial Sequence: Synthetic oligonucleotide
  Target: COL7A1; (+) strand; PAM type: NRG; PAM sequence: AGG
aagactcacattcggcccag

SEQ ID NO: 19225 - DNA, 20 bp, Artificial Sequence
  Description of Artificial Sequence: Synthetic oligonucleotide
  Target: COL7A1; (+) strand; PAM type: NRG; PAM sequence: GGG
agactcacattcggcccaga

SEQ ID NO: 19226 - DNA, 20 bp, Artificial Sequence
  Description of Artificial Sequence: Synthetic oligonucleotide
  Target: COL7A1; (+) strand; PAM type: NRG; PAM sequence: CAG
cacattcggcccagagggcc

SEQ ID NO: 19227 - DNA, 20 bp, Artificial Sequence
  Description of Artificial Sequence: Synthetic oligonucleotide
  Target: COL7A1; (+) strand; PAM type: NRG; PAM sequence: CGG
attcggcccagagggcccag

SEQ ID NO: 19228 - DNA, 20 bp, Artificial Sequence
  Description of Artificial Sequence: Synthetic oligonucleotide
  Target: COL7A1; (+) strand; PAM type: NRG; PAM sequence: TGG
ccagagggcccagcggctcc

SEQ ID NO: 19229 - DNA, 20 bp, Artificial Sequence
  Description of Artificial Sequence: Synthetic oligonucleotide
  Target: COL7A1; (+) strand; PAM type: NRG; PAM sequence: CAG
gcggctcctggtttcccatc

SEQ ID NO: 19230 - DNA, 20 bp, Artificial Sequence
  Description of Artificial Sequence: Synthetic oligonucleotide
  Target: COL7A1; (+) strand; PAM type: NRG; PAM sequence: CGG
gtttcccatccagtccgctc

SEQ ID NO: 19231 - DNA, 20 bp, Artificial Sequence
  Description of Artificial Sequence: Synthetic oligonucleotide
  Target: COL7A1; (+) strand; PAM type: NRG; PAM sequence: CAG
tccagtccgctccggccatc

SEQ ID NO: 19232 - DNA, 20 bp, Artificial Sequence
  Description of Artificial Sequence: Synthetic oligonucleotide
  Target: COL7A1; (+) strand; PAM type: NRG; PAM sequence: CAG
tccgctccggccatccagcc

SEQ ID NO: 19233 - DNA, 20 bp, Artificial Sequence
  Description of Artificial Sequence: Synthetic oligonucleotide
  Target: COL7A1; (+) strand; PAM type: NRG; PAM sequence: AGG
ccgctccggccatccagccc

SEQ ID NO: 19234 - DNA, 20 bp, Artificial Sequence
  Description of Artificial Sequence: Synthetic oligonucleotide
  Target: COL7A1; (+) strand; PAM type: NRG; PAM sequence: GGG
cgctccggccatccagccca

SEQ ID NO: 19235 - DNA, 20 bp, Artificial Sequence
  Description of Artificial Sequence: Synthetic oligonucleotide
  Target: COL7A1; (+) strand; PAM type: NRG; PAM sequence: GGG
gctccggccatccagcccag

SEQ ID NO: 19236 - DNA, 20 bp, Artificial Sequence
  Description of Artificial Sequence: Synthetic oligonucleotide
  Target: COL7A1; (+) strand; PAM type: NRG; PAM sequence: GGG
ctccggccatccagcccagg

SEQ ID NO: 19237 - DNA, 20 bp, Artificial Sequence
  Description of Artificial Sequence: Synthetic oligonucleotide
  Target: COL7A1; (+) strand; PAM type: NRG; PAM sequence: CGG
catccagcccagggggaccc

SEQ ID NO: 19238 - DNA, 20 bp, Artificial Sequence
  Description of Artificial Sequence: Synthetic oligonucleotide
  Target: COL7A1; (+) strand; PAM type: NRG; PAM sequence: TGG
gggggaccccggtcaccctg

SEQ ID NO: 19239 - DNA, 20 bp, Artificial Sequence
  Description of Artificial Sequence: Synthetic oligonucleotide
  Target: COL7A1; (+) strand; PAM type: NRG; PAM sequence: TAG
cccggtcaccctgtggaaaa

SEQ ID NO: 19240 - DNA, 20 bp, Artificial Sequence
  Description of Artificial Sequence: Synthetic oligonucleotide
  Target: COL7A1; (+) strand; PAM type: NRG; PAM sequence: GAG
cggtcaccctgtggaaaata

SEQ ID NO: 19241 - DNA, 20 bp, Artificial Sequence
  Description of Artificial Sequence: Synthetic oligonucleotide
  Target: COL7A1; (+) strand; PAM type: NRG; PAM sequence: TGG
tcaccctgtggaaaatagag

SEQ ID NO: 19242 - DNA, 20 bp, Artificial Sequence
  Description of Artificial Sequence: Synthetic oligonucleotide
  Target: COL7A1; (+) strand; PAM type: NRG; PAM sequence: AAG
cctgtggaaaatagagtggt

SEQ ID NO: 19243 - DNA, 20 bp, Artificial Sequence
  Description of Artificial Sequence: Synthetic oligonucleotide
  Target: COL7A1; (+) strand; PAM type: NRG; PAM sequence: GAG
tgtggaaaatagagtggtaa

SEQ ID NO: 19244 - DNA, 20 bp, Artificial Sequence
  Description of Artificial Sequence: Synthetic oligonucleotide
  Target: COL7A1; (+) strand; PAM type: NRG; PAM sequence: AGG
gtggaaaatagagtggtaag

SEQ ID NO: 19245 - DNA, 20 bp, Artificial Sequence
  Description of Artificial Sequence: Synthetic oligonucleotide
  Target: COL7A1; (+) strand; PAM type: NRG; PAM sequence: AAG
tagagtggtaagaggccacc

SEQ ID NO: 19246 - DNA, 20 bp, Artificial Sequence
  Description of Artificial Sequence: Synthetic oligonucleotide
  Target: COL7A1; (+) strand; PAM type: NRG; PAM sequence: AGG
agagtggtaagaggccacca

SEQ ID NO: 19247 - DNA, 20 bp, Artificial Sequence
  Description of Artificial Sequence: Synthetic oligonucleotide
  Target: COL7A1; (+) strand; PAM type: NRG; PAM sequence: GAG
ggtaagaggccaccaaggct

SEQ ID NO: 19248 - DNA, 20 bp, Artificial Sequence
  Description of Artificial Sequence: Synthetic oligonucleotide
  Target: COL7A1; (+) strand; PAM type: NRG; PAM sequence: AGG
gtaagaggccaccaaggctg

SEQ ID NO: 19249 - DNA, 20 bp, Artificial Sequence
  Description of Artificial Sequence: Synthetic oligonucleotide
  Target: COL7A1; (+) strand; PAM type: NRG; PAM sequence: TGG
agaggccaccaaggctgagg

SEQ ID NO: 19250 - DNA, 20 bp, Artificial Sequence
  Description of Artificial Sequence: Synthetic oligonucleotide
  Target: COL7A1; (+) strand; PAM type: NRG; PAM sequence: CAG
ctgaggtggatctgataacc

SEQ ID NO: 19251 - DNA, 20 bp, Artificial Sequence
  Description of Artificial Sequence: Synthetic oligonucleotide
  Target: COL7A1; (+) strand; PAM type: NRG; PAM sequence: AGG
tgaggtggatctgataaccc

SEQ ID NO: 19252 - DNA, 20 bp, Artificial Sequence
  Description of Artificial Sequence: Synthetic oligonucleotide
  Target: COL7A1; (+) strand; PAM type: NRG; PAM sequence: GAG
ataacccaggctcatgtcct

SEQ ID NO: 19253 - DNA, 20 bp, Artificial Sequence
  Description of Artificial Sequence: Synthetic oligonucleotide
  Target: COL7A1; (+) strand; PAM type: NRG; PAM sequence: TGG
cctctcaccttttctcctgc

SEQ ID NO: 19254 - DNA, 20 bp, Artificial Sequence
  Description of Artificial Sequence: Synthetic oligonucleotide
  Target: COL7A1; (+) strand; PAM type: NRG; PAM sequence: GGG
ctctcaccttttctcctgct

SEQ ID NO: 19255 - DNA, 20 bp, Artificial Sequence
  Description of Artificial Sequence: Synthetic oligonucleotide
  Target: COL7A1; (+) strand; PAM type: NRG; PAM sequence: CGG
ccttttctcctgctgggcct

SEQ ID NO: 19256 - DNA, 20 bp, Artificial Sequence
  Description of Artificial Sequence: Synthetic oligonucleotide
  Target: COL7A1; (+) strand; PAM type: NRG; PAM sequence: TGG
cctgctgggcctcggacacc

SEQ ID NO: 19257 - DNA, 20 bp, Artificial Sequence
  Description of Artificial Sequence: Synthetic oligonucleotide
  Target: COL7A1; (+) strand; PAM type: NRG; PAM sequence: GGG
ctgctgggcctcggacacct

SEQ ID NO: 19258 - DNA, 20 bp, Artificial Sequence
  Description of Artificial Sequence: Synthetic oligonucleotide
  Target: COL7A1; (+) strand; PAM type: NRG; PAM sequence: TGG
ctcggacacctgggtccccc

SEQ ID NO: 19259 - DNA, 20 bp, Artificial Sequence
  Description of Artificial Sequence: Synthetic oligonucleotide
  Target: COL7A1; (+) strand; PAM type: NRG; PAM sequence: GAG
cggacacctgggtccccctg

SEQ ID NO: 19260 - DNA, 20 bp, Artificial Sequence
  Description of Artificial Sequence: Synthetic oligonucleotide
  Target: COL7A1; (+) strand; PAM type: NRG; PAM sequence: AGG
ggacacctgggtccccctgg

SEQ ID NO: 19261 - DNA, 20 bp, Artificial Sequence
  Description of Artificial Sequence: Synthetic oligonucleotide
  Target: COL7A1; (+) strand; PAM type: NRG; PAM sequence: GGG
gacacctgggtccccctgga

SEQ ID NO: 19262 - DNA, 20 bp, Artificial Sequence
  Description of Artificial Sequence: Synthetic oligonucleotide
  Target: COL7A1; (+) strand; PAM type: NRG; PAM sequence: CAG
ctgggtccccctggagggaa

SEQ ID NO: 19263 - DNA, 20 bp, Artificial Sequence
  Description of Artificial Sequence: Synthetic oligonucleotide
  Target: COL7A1; (+) strand; PAM type: NRG; PAM sequence: AGG
tgggtccccctggagggaac

SEQ ID NO: 19264 - DNA, 20 bp, Artificial Sequence
  Description of Artificial Sequence: Synthetic oligonucleotide
  Target: COL7A1; (+) strand; PAM type: NRG; PAM sequence: GGG
gggtccccctggagggaaca

SEQ ID NO: 19265 - DNA, 20 bp, Artificial Sequence
  Description of Artificial Sequence: Synthetic oligonucleotide
  Target: COL7A1; (+) strand; PAM type: NRG; PAM sequence: CAG
ccccctggagggaacagggt

SEQ ID NO: 19266 - DNA, 20 bp, Artificial Sequence
  Description of Artificial Sequence: Synthetic oligonucleotide
  Target: COL7A1; (+) strand; PAM type: NRG; PAM sequence: AAG
tggagggaacagggtcagat

SEQ ID NO: 19267 - DNA, 20 bp, Artificial Sequence
  Description of Artificial Sequence: Synthetic oligonucleotide
  Target: COL7A1; (+) strand; PAM type: NRG; PAM sequence: GAG
gagggaacagggtcagataa

SEQ ID NO: 19268 - DNA, 20 bp, Artificial Sequence
  Description of Artificial Sequence: Synthetic oligonucleotide
  Target: COL7A1; (+) strand; PAM type: NRG; PAM sequence: AGG
agggaacagggtcagataag

SEQ ID NO: 19269 - DNA, 20 bp, Artificial Sequence
  Description of Artificial Sequence: Synthetic oligonucleotide
  Target: COL7A1; (+) strand; PAM type: NRG; PAM sequence: GAG
aacagggtcagataagaggt

SEQ ID NO: 19270 - DNA, 20 bp, Artificial Sequence
  Description of Artificial Sequence: Synthetic oligonucleotide
  Target: COL7A1; (+) strand; PAM type: NRG; PAM sequence: AGG
acagggtcagataagaggtg

SEQ ID NO: 19271 - DNA, 20 bp, Artificial Sequence
  Description of Artificial Sequence: Synthetic oligonucleotide
  Target: COL7A1; (+) strand; PAM type: NRG; PAM sequence: GGG
cagggtcagataagaggtga

SEQ ID NO: 19272 - DNA, 20 bp, Artificial Sequence
  Description of Artificial Sequence: Synthetic oligonucleotide
  Target: COL7A1; (+) strand; PAM type: NRG; PAM sequence: AAG
gtcagataagaggtgagggt

SEQ ID NO: 19273 - DNA, 20 bp, Artificial Sequence
  Description of Artificial Sequence: Synthetic oligonucleotide
  Target: COL7A1; (+) strand; PAM type: NRG; PAM sequence: TGG
gataagaggtgagggtaaga

SEQ ID NO: 19274 - DNA, 20 bp, Artificial Sequence
  Description of Artificial Sequence: Synthetic oligonucleotide
  Target: COL7A1; (+) strand; PAM type: NRG; PAM sequence: GGG
ataagaggtgagggtaagat

SEQ ID NO: 19275 - DNA, 20 bp, Artificial Sequence
  Description of Artificial Sequence: Synthetic oligonucleotide
  Target: COL7A1; (+) strand; PAM type: NRG; PAM sequence: GGG
taagaggtgagggtaagatg

SEQ ID NO: 19276 - DNA, 20 bp, Artificial Sequence
  Description of Artificial Sequence: Synthetic oligonucleotide
  Target: COL7A1; (+) strand; PAM type: NRG; PAM sequence: TGG
gtgagggtaagatggggact

SEQ ID NO: 19277 - DNA, 20 bp, Artificial Sequence
  Description of Artificial Sequence: Synthetic oligonucleotide
  Target: COL7A1; (+) strand; PAM type: NRG; PAM sequence: CAG
agggtaagatggggacttgg

SEQ ID NO: 19278 - DNA, 20 bp, Artificial Sequence
  Description of Artificial Sequence: Synthetic oligonucleotide
  Target: COL7A1; (+) strand; PAM type: NRG; PAM sequence: CGG
taagatggggacttggcaga

SEQ ID NO: 19279 - DNA, 20 bp, Artificial Sequence
  Description of Artificial Sequence: Synthetic oligonucleotide
  Target: COL7A1; (+) strand; PAM type: NRG; PAM sequence: GGG
aagatggggacttggcagac

SEQ ID NO: 19280 - DNA, 20 bp, Artificial Sequence
  Description of Artificial Sequence: Synthetic oligonucleotide
  Target: COL7A1; (+) strand; PAM type: NRG; PAM sequence: GGG
agatggggacttggcagacg

SEQ ID NO: 19281 - DNA, 20 bp, Artificial Sequence
  Description of Artificial Sequence: Synthetic oligonucleotide
  Target: COL7A1; (+) strand; PAM type: NRG; PAM sequence: AAG
gggacttggcagacggggca

SEQ ID NO: 19282 - DNA, 20 bp, Artificial Sequence
  Description of Artificial Sequence: Synthetic oligonucleotide
  Target: COL7A1; (+) strand; PAM type: NRG; PAM sequence: TGG
caaagtgcatcactcacctg

SEQ ID NO: 19283 - DNA, 20 bp, Artificial Sequence
  Description of Artificial Sequence: Synthetic oligonucleotide
  Target: COL7A1; (+) strand; PAM type: NRG; PAM sequence: GGG
aaagtgcatcactcacctgt

SEQ ID NO: 19284 - DNA, 20 bp, Artificial Sequence
  Description of Artificial Sequence: Synthetic oligonucleotide
  Target: COL7A1; (+) strand; PAM type: NRG; PAM sequence: TGG
gcatcactcacctgtgggcc

SEQ ID NO: 19285 - DNA, 20 bp, Artificial Sequence
  Description of Artificial Sequence: Synthetic oligonucleotide
  Target: COL7A1; (+) strand; PAM type: NRG; PAM sequence: GGG
catcactcacctgtgggcct

SEQ ID NO: 19286 - DNA, 20 bp, Artificial Sequence
  Description of Artificial Sequence: Synthetic oligonucleotide
  Target: COL7A1; (+) strand; PAM type: NRG; PAM sequence: GGG
atcactcacctgtgggcctg

SEQ ID NO: 19287 - DNA, 20 bp, Artificial Sequence
  Description of Artificial Sequence: Synthetic oligonucleotide
  Target: COL7A1; (+) strand; PAM type: NRG; PAM sequence: GGG
tcactcacctgtgggcctgg

SEQ ID NO: 19288 - DNA, 20 bp, Artificial Sequence
  Description of Artificial Sequence: Synthetic oligonucleotide
  Target: COL7A1; (+) strand; PAM type: NRG; PAM sequence: GAG
ccgaaacccttcaatgccct

SEQ ID NO: 19289 - DNA, 20 bp, Artificial Sequence
  Description of Artificial Sequence: Synthetic oligonucleotide
  Target: COL7A1; (+) strand; PAM type: NRG; PAM sequence: AGG
cgaaacccttcaatgccctg

SEQ ID NO: 19290 - DNA, 20 bp, Artificial Sequence
  Description of Artificial Sequence: Synthetic oligonucleotide
  Target: COL7A1; (+) strand; PAM type: NRG; PAM sequence: TAG
acccttcaatgccctgagga

SEQ ID NO: 19291 - DNA, 20 bp, Artificial Sequence
  Description of Artificial Sequence: Synthetic oligonucleotide
  Target: COL7A1; (+) strand; PAM type: NRG; PAM sequence: AGG
cccttcaatgccctgaggat

SEQ ID NO: 19292 - DNA, 20 bp, Artificial Sequence
  Description of Artificial Sequence: Synthetic oligonucleotide
  Target: COL7A1; (+) strand; PAM type: NRG; PAM sequence: GGG
ccttcaatgccctgaggata

SEQ ID NO: 19293 - DNA, 20 bp, Artificial Sequence
  Description of Artificial Sequence: Synthetic oligonucleotide
  Target: COL7A1; (+) strand; PAM type: NRG; PAM sequence: GGG
cttcaatgccctgaggatag

SEQ ID NO: 19294 - DNA, 20 bp, Artificial Sequence
  Description of Artificial Sequence: Synthetic oligonucleotide
  Target: COL7A1; (+) strand; PAM type: NRG; PAM sequence: GAG
tcaatgccctgaggataggg

SEQ ID NO: 19295 - DNA, 20 bp, Artificial Sequence
  Description of Artificial Sequence: Synthetic oligonucleotide
  Target: COL7A1; (+) strand; PAM type: NRG; PAM sequence: AGG
caatgccctgaggatagggg

SEQ ID NO: 19296 - DNA, 20 bp, Artificial Sequence
  Description of Artificial Sequence: Synthetic oligonucleotide
  Target: COL7A1; (+) strand; PAM type: NRG; PAM sequence: AAG
tgccctgaggataggggagg

SEQ ID NO: 19297 - DNA, 20 bp, Artificial Sequence
  Description of Artificial Sequence: Synthetic oligonucleotide
  Target: COL7A1; (+) strand; PAM type: NRG; PAM sequence: CAG
aggataggggaggaagaaat

SEQ ID NO: 19298 - DNA, 20 bp, Artificial Sequence
  Description of Artificial Sequence: Synthetic oligonucleotide
  Target: COL7A1; (+) strand; PAM type: NRG; PAM sequence: GAG
gataggggaggaagaaatca

SEQ ID NO: 19299 - DNA, 20 bp, Artificial Sequence
  Description of Artificial Sequence: Synthetic oligonucleotide
  Target: COL7A1; (+) strand; PAM type: NRG; PAM sequence: CAG
aggggaggaagaaatcagag

SEQ ID NO: 19300 - DNA, 20 bp, Artificial Sequence
  Description of Artificial Sequence: Synthetic oligonucleotide
  Target: COL7A1; (+) strand; PAM type: NRG; PAM sequence: AGG
ggggaggaagaaatcagagc

SEQ ID NO: 19301 - DNA, 20 bp, Artificial Sequence
  Description of Artificial Sequence: Synthetic oligonucleotide
  Target: COL7A1; (+) strand; PAM type: NRG; PAM sequence: GAG
cctcccatgcctgcaccccc

SEQ ID NO: 19302 - DNA, 20 bp, Artificial Sequence
  Description of Artificial Sequence: Synthetic oligonucleotide
  Target: COL7A1; (+) strand; PAM type: NRG; PAM sequence: AGG
ctcccatgcctgcacccccg

SEQ ID NO: 19303 - DNA, 20 bp, Artificial Sequence
  Description of Artificial Sequence: Synthetic oligonucleotide
  Target: COL7A1; (+) strand; PAM type: NRG; PAM sequence: CAG
aatcacactcaccctttccc

SEQ ID NO: 19304 - DNA, 20 bp, Artificial Sequence
  Description of Artificial Sequence: Synthetic oligonucleotide
  Target: COL7A1; (+) strand; PAM type: NRG; PAM sequence: AGG
atcacactcaccctttcccc

SEQ ID NO: 19305 - DNA, 20 bp, Artificial Sequence
  Description of Artificial Sequence: Synthetic oligonucleotide
  Target: COL7A1; (+) strand; PAM type: NRG; PAM sequence: GGG
tcacactcaccctttcccca

SEQ ID NO: 19306 - DNA, 20 bp, Artificial Sequence
  Description of Artificial Sequence: Synthetic oligonucleotide
  Target: COL7A1; (+) strand; PAM type: NRG; PAM sequence: GGG
cacactcaccctttccccag

SEQ ID NO: 19307 - DNA, 20 bp, Artificial Sequence
  Description of Artificial Sequence: Synthetic oligonucleotide
  Target: COL7A1; (+) strand; PAM type: NRG; PAM sequence: CAG
caccctttccccaggggctc

SEQ ID NO: 19308 - DNA, 20 bp, Artificial Sequence
  Description of Artificial Sequence: Synthetic oligonucleotide
  Target: COL7A1; (+) strand; PAM type: NRG; PAM sequence: AGG
accctttccccaggggctcc

SEQ ID NO: 19309 - DNA, 20 bp, Artificial Sequence
  Description of Artificial Sequence: Synthetic oligonucleotide
  Target: COL7A1; (+) strand; PAM type: NRG; PAM sequence: GGG
ccctttccccaggggctcca

SEQ ID NO: 19310 - DNA, 20 bp, Artificial Sequence
  Description of Artificial Sequence: Synthetic oligonucleotide
  Target: COL7A1; (+) strand; PAM type: NRG; PAM sequence: GAG
ctttccccaggggctccagg

SEQ ID NO: 19311 - DNA, 20 bp, Artificial Sequence
  Description of Artificial Sequence: Synthetic oligonucleotide
  Target: COL7A1; (+) strand; PAM type: NRG; PAM sequence: AGG
tttccccaggggctccaggg

SEQ ID NO: 19312 - DNA, 20 bp, Artificial Sequence
  Description of Artificial Sequence: Synthetic oligonucleotide
  Target: COL7A1; (+) strand; PAM type: NRG; PAM sequence: CAG
cccaggggctccagggaggc

SEQ ID NO: 19313 - DNA, 20 bp, Artificial Sequence
  Description of Artificial Sequence: Synthetic oligonucleotide
  Target: COL7A1; (+) strand; PAM type: NRG; PAM sequence: AGG
ccaggggctccagggaggcc

SEQ ID NO: 19314 - DNA, 20 bp, Artificial Sequence
  Description of Artificial Sequence: Synthetic oligonucleotide
  Target: COL7A1; (+) strand; PAM type: NRG; PAM sequence: TGG
agggaggccaggatcaccct

SEQ ID NO: 19315 - DNA, 20 bp, Artificial Sequence
  Description of Artificial Sequence: Synthetic oligonucleotide
  Target: COL7A1; (+) strand; PAM type: NRG; PAM sequence: GGG
gggaggccaggatcaccctt

SEQ ID NO: 19316 - DNA, 20 bp, Artificial Sequence
  Description of Artificial Sequence: Synthetic oligonucleotide
  Target: COL7A1; (+) strand; PAM type: NRG; PAM sequence: GAG
aggatcacccttgggccctc

SEQ ID NO: 19317 - DNA, 20 bp, Artificial Sequence
  Description of Artificial Sequence: Synthetic oligonucleotide
  Target: COL7A1; (+) strand; PAM type: NRG; PAM sequence: AGG
ggatcacccttgggccctcg

SEQ ID NO: 19318 - DNA, 20 bp, Artificial Sequence
  Description of Artificial Sequence: Synthetic oligonucleotide
  Target: COL7A1; (+) strand; PAM type: NRG; PAM sequence: CGG
ctcgaggaccctcttgtccg

SEQ ID NO: 19319 - DNA, 20 bp, Artificial Sequence
  Description of Artificial Sequence: Synthetic oligonucleotide
  Target: COL7A1; (+) strand; PAM type: NRG; PAM sequence: CAG
accctcttgtccgcggtccc

SEQ ID NO: 19320 - DNA, 20 bp, Artificial Sequence
  Description of Artificial Sequence: Synthetic oligonucleotide
  Target: COL7A1; (+) strand; PAM type: NRG; PAM sequence: AGG
ccctcttgtccgcggtcccc

SEQ ID NO: 19321 - DNA, 20 bp, Artificial Sequence
  Description of Artificial Sequence: Synthetic oligonucleotide
  Target: COL7A1; (+) strand; PAM type: NRG; PAM sequence: TGG
cggtccccaggctctccctg

SEQ ID NO: 19322 - DNA, 20 bp, Artificial Sequence
  Description of Artificial Sequence: Synthetic oligonucleotide
  Target: COL7A1; (+) strand; PAM type: NRG; PAM sequence: CAG
tccccaggctctccctgtgg

SEQ ID NO: 19323 - DNA, 20 bp, Artificial Sequence
  Description of Artificial Sequence: Synthetic oligonucleotide
  Target: COL7A1; (+) strand; PAM type: NRG; PAM sequence: GAG
cccaggctctccctgtggca

SEQ ID NO: 19324 - DNA, 20 bp, Artificial Sequence
  Description of Artificial Sequence: Synthetic oligonucleotide
  Target: COL7A1; (+) strand; PAM type: NRG; PAM sequence: AAG
gctctccctgtggcagagat

SEQ ID NO: 19325 - DNA, 20 bp, Artificial Sequence
  Description of Artificial Sequence: Synthetic oligonucleotide
  Target: COL7A1; (+) strand; PAM type: NRG; PAM sequence: GAG
gtggcagagataagcttgct

SEQ ID NO: 19326 - DNA, 20 bp, Artificial Sequence
  Description of Artificial Sequence: Synthetic oligonucleotide
  Target: COL7A1; (+) strand; PAM type: NRG; PAM sequence: AGG
tggcagagataagcttgctg

SEQ ID NO: 19327 - DNA, 20 bp, Artificial Sequence
  Description of Artificial Sequence: Synthetic oligonucleotide
  Target: COL7A1; (+) strand; PAM type: NRG; PAM sequence: CAG
gagataagcttgctgaggaa

SEQ ID NO: 19328 - DNA, 20 bp, Artificial Sequence
  Description of Artificial Sequence: Synthetic oligonucleotide
  Target: COL7A1; (+) strand; PAM type: NRG; PAM sequence: AAG
cttgctgaggaacagccttg

SEQ ID NO: 19329 - DNA, 20 bp, Artificial Sequence
  Description of Artificial Sequence: Synthetic oligonucleotide
  Target: COL7A1; (+) strand; PAM type: NRG; PAM sequence: AAG
tgaggaacagccttgaagcc

SEQ ID NO: 19330 - DNA, 20 bp, Artificial Sequence
  Description of Artificial Sequence: Synthetic oligonucleotide
  Target: COL7A1; (+) strand; PAM type: NRG; PAM sequence: AAG
cttgaagccaagccatgccc

SEQ ID NO: 19331 - DNA, 20 bp, Artificial Sequence
  Description of Artificial Sequence: Synthetic oligonucleotide
  Target: COL7A1; (+) strand; PAM type: NRG; PAM sequence: AGG
ttgaagccaagccatgccca

SEQ ID NO: 19332 - DNA, 20 bp, Artificial Sequence
  Description of Artificial Sequence: Synthetic oligonucleotide
  Target: COL7A1; (+) strand; PAM type: NRG; PAM sequence: TAG
aagccaagccatgcccaagg

SEQ ID NO: 19333 - DNA, 20 bp, Artificial Sequence
  Description of Artificial Sequence: Synthetic oligonucleotide
  Target: COL7A1; (+) strand; PAM type: NRG; PAM sequence: TGG
atgcccaaggtagaacctgc

SEQ ID NO: 19334 - DNA, 20 bp, Artificial Sequence
  Description of Artificial Sequence: Synthetic oligonucleotide
  Target: COL7A1; (+) strand; PAM type: NRG; PAM sequence: GGG
tgcccaaggtagaacctgct

SEQ ID NO: 19335 - DNA, 20 bp, Artificial Sequence
  Description of Artificial Sequence: Synthetic oligonucleotide
  Target: COL7A1; (+) strand; PAM type: NRG; PAM sequence: GAG
cccaaggtagaacctgctgg

SEQ ID NO: 19336 - DNA, 20 bp, Artificial Sequence
  Description of Artificial Sequence: Synthetic oligonucleotide
  Target: COL7A1; (+) strand; PAM type: NRG; PAM sequence: AGG
ccaaggtagaacctgctggg

SEQ ID NO: 19337 - DNA, 20 bp, Artificial Sequence
  Description of Artificial Sequence: Synthetic oligonucleotide
  Target: COL7A1; (+) strand; PAM type: NRG; PAM sequence: GGG
caaggtagaacctgctggga

SEQ ID NO: 19338 - DNA, 20 bp, Artificial Sequence
  Description of Artificial Sequence: Synthetic oligonucleotide
  Target: COL7A1; (+) strand; PAM type: NRG; PAM sequence: GGG
aaggtagaacctgctgggag

SEQ ID NO: 19339 - DNA, 20 bp, Artificial Sequence
  Description of Artificial Sequence: Synthetic oligonucleotide
  Target: COL7A1; (+) strand; PAM type: NRG; PAM sequence: TGG
gaacctgctgggaggggcac

SEQ ID NO: 19340 - DNA, 20 bp, Artificial Sequence
  Description of Artificial Sequence: Synthetic oligonucleotide
  Target: COL7A1; (+) strand; PAM type: NRG; PAM sequence: GGG
aacctgctgggaggggcact

SEQ ID NO: 19341 - DNA, 20 bp, Artificial Sequence
  Description of Artificial Sequence: Synthetic oligonucleotide
  Target: COL7A1; (+) strand; PAM type: NRG; PAM sequence: GGG
acctgctgggaggggcactg

SEQ ID NO: 19342 - DNA, 20 bp, Artificial Sequence
  Description of Artificial Sequence: Synthetic oligonucleotide
  Target: COL7A1; (+) strand; PAM type: NRG; PAM sequence: CAG
tctttcttaccctccaccca

SEQ ID NO: 19343 - DNA, 20 bp, Artificial Sequence
  Description of Artificial Sequence: Synthetic oligonucleotide
  Target: COL7A1; (+) strand; PAM type: NRG; PAM sequence: TGG
agaccctaataccttctctc

SEQ ID NO: 19344 - DNA, 20 bp, Artificial Sequence
  Description of Artificial Sequence: Synthetic oligonucleotide
  Target: COL7A1; (+) strand; PAM type: NRG; PAM sequence: CAG
taataccttctctctggctc

SEQ ID NO: 19345 - DNA, 20 bp, Artificial Sequence
  Description of Artificial Sequence: Synthetic oligonucleotide
  Target: COL7A1; (+) strand; PAM type: NRG; PAM sequence: AGG
aataccttctctctggctcc

SEQ ID NO: 19346 - DNA, 20 bp, Artificial Sequence
  Description of Artificial Sequence: Synthetic oligonucleotide
  Target: COL7A1; (+) strand; PAM type: NRG; PAM sequence: TGG
ccaggtcctgtgtctacctg

SEQ ID NO: 19347 - DNA, 20 bp, Artificial Sequence
  Description of Artificial Sequence: Synthetic oligonucleotide
  Target: COL7A1; (+) strand; PAM type: NRG; PAM sequence: GGG
caggtcctgtgtctacctgt

SEQ ID NO: 19348 - DNA, 20 bp, Artificial Sequence
  Description of Artificial Sequence: Synthetic oligonucleotide
  Target: COL7A1; (+) strand; PAM type: NRG; PAM sequence: GGG
aggtcctgtgtctacctgtg

SEQ ID NO: 19349 - DNA, 20 bp, Artificial Sequence
  Description of Artificial Sequence: Synthetic oligonucleotide
  Target: COL7A1; (+) strand; PAM type: NRG; PAM sequence: GGG
ggtcctgtgtctacctgtgg

SEQ ID NO: 19350 - DNA, 20 bp, Artificial Sequence
  Description of Artificial Sequence: Synthetic oligonucleotide
  Target: COL7A1; (+) strand; PAM type: NRG; PAM sequence: GGG
gtcctgtgtctacctgtggg

SEQ ID NO: 19351 - DNA, 20 bp, Artificial Sequence
  Description of Artificial Sequence: Synthetic oligonucleotide
  Target: COL7A1; (+) strand; PAM type: NRG; PAM sequence: CAG
ctacctgtggggggaatgac

SEQ ID NO: 19352 - DNA, 20 bp, Artificial Sequence
  Description of Artificial Sequence: Synthetic oligonucleotide
  Target: COL7A1; (+) strand; PAM type: NRG; PAM sequence: GAG
ctgtggggggaatgaccagt

SEQ ID NO: 19353 - DNA, 20 bp, Artificial Sequence
  Description of Artificial Sequence: Synthetic oligonucleotide
  Target: COL7A1; (+) strand; PAM type: NRG; PAM sequence: AAG
tggggggaatgaccagtgag

SEQ ID NO: 19354 - DNA, 20 bp, Artificial Sequence
  Description of Artificial Sequence: Synthetic oligonucleotide
  Target: COL7A1; (+) strand; PAM type: NRG; PAM sequence: TGG
ggaatgaccagtgagaagaa

SEQ ID NO: 19355 - DNA, 20 bp, Artificial Sequence
  Description of Artificial Sequence: Synthetic oligonucleotide
  Target: COL7A1; (+) strand; PAM type: NRG; PAM sequence: AAG
agtgagaagaatggctcaac

SEQ ID NO: 19356 - DNA, 20 bp, Artificial Sequence
  Description of Artificial Sequence: Synthetic oligonucleotide
  Target: COL7A1; (+) strand; PAM type: NRG; PAM sequence: AGG
gtgagaagaatggctcaaca

SEQ ID NO: 19357 - DNA, 20 bp, Artificial Sequence
  Description of Artificial Sequence: Synthetic oligonucleotide
  Target: COL7A1; (+) strand; PAM type: NRG; PAM sequence: GGG
tgagaagaatggctcaacaa

SEQ ID NO: 19358 - DNA, 20 bp, Artificial Sequence
  Description of Artificial Sequence: Synthetic oligonucleotide
  Target: COL7A1; (+) strand; PAM type: NRG; PAM sequence: GGG
gagaagaatggctcaacaag

SEQ ID NO: 19359 - DNA, 20 bp, Artificial Sequence
  Description of Artificial Sequence: Synthetic oligonucleotide
  Target: COL7A1; (+) strand; PAM type: NRG; PAM sequence: AAG
aagaatggctcaacaagggg

SEQ ID NO: 19360 - DNA, 20 bp, Artificial Sequence
  Description of Artificial Sequence: Synthetic oligonucleotide
  Target: COL7A1; (+) strand; PAM type: NRG; PAM sequence: GAG
gaatggctcaacaaggggaa

SEQ ID NO: 19361 - DNA, 20 bp, Artificial Sequence
  Description of Artificial Sequence: Synthetic oligonucleotide
  Target: COL7A1; (+) strand; PAM type: NRG; PAM sequence: AGG
aatggctcaacaaggggaag

SEQ ID NO: 19362 - DNA, 20 bp, Artificial Sequence
  Description of Artificial Sequence: Synthetic oligonucleotide
  Target: COL7A1; (+) strand; PAM type: NRG; PAM sequence: GAG
tggctcaacaaggggaagag

SEQ ID NO: 19363 - DNA, 20 bp, Artificial Sequence
  Description of Artificial Sequence: Synthetic oligonucleotide
  Target: COL7A1; (+) strand; PAM type: NRG; PAM sequence: TGG
tcaacaaggggaagaggagt

SEQ ID NO: 19364 - DNA, 20 bp, Artificial Sequence
  Description of Artificial Sequence: Synthetic oligonucleotide
  Target: COL7A1; (+) strand; PAM type: NRG; PAM sequence: GAG
caaggggaagaggagttggc

SEQ ID NO: 19365 - DNA, 20 bp, Artificial Sequence
  Description of Artificial Sequence: Synthetic oligonucleotide
  Target: COL7A1; (+) strand; PAM type: NRG; PAM sequence: AGG
aaggggaagaggagttggcg

SEQ ID NO: 19366 - DNA, 20 bp, Artificial Sequence
  Description of Artificial Sequence: Synthetic oligonucleotide
  Target: COL7A1; (+) strand; PAM type: NRG; PAM sequence: GGG
aggggaagaggagttggcga

SEQ ID NO: 19367 - DNA, 20 bp, Artificial Sequence
  Description of Artificial Sequence: Synthetic oligonucleotide
  Target: COL7A1; (+) strand; PAM type: NRG; PAM sequence: GGG
ggggaagaggagttggcgag

SEQ ID NO: 19368 - DNA, 20 bp, Artificial Sequence
  Description of Artificial Sequence: Synthetic oligonucleotide
  Target: COL7A1; (+) strand; PAM type: NRG; PAM sequence: CAG
gaggagttggcgaggggata

SEQ ID NO: 19369 - DNA, 20 bp, Artificial Sequence
  Description of Artificial Sequence: Synthetic oligonucleotide
  Target: COL7A1; (+) strand; PAM type: NRG; PAM sequence: AGG
aggagttggcgaggggatac

SEQ ID NO: 19370 - DNA, 20 bp, Artificial Sequence
  Description of Artificial Sequence: Synthetic oligonucleotide
  Target: COL7A1; (+) strand; PAM type: NRG; PAM sequence: GGG
ggagttggcgaggggataca

SEQ ID NO: 19371 - DNA, 20 bp, Artificial Sequence
  Description of Artificial Sequence: Synthetic oligonucleotide
  Target: COL7A1; (+) strand; PAM type: NRG; PAM sequence: GAG
cgaggggatacagggtctgt

SEQ ID NO: 19372 - DNA, 20 bp, Artificial Sequence
  Description of Artificial Sequence: Synthetic oligonucleotide
  Target: COL7A1; (+) strand; PAM type: NRG; PAM sequence: AGG
gaggggatacagggtctgtg

SEQ ID NO: 19373 - DNA, 20 bp, Artificial Sequence
  Description of Artificial Sequence: Synthetic oligonucleotide
  Target: COL7A1; (+) strand; PAM type: NRG; PAM sequence: GGG
aggggatacagggtctgtga

SEQ ID NO: 19374 - DNA, 20 bp, Artificial Sequence
  Description of Artificial Sequence: Synthetic oligonucleotide
  Target: COL7A1; (+) strand; PAM type: NRG; PAM sequence: GGG
ggggatacagggtctgtgag

SEQ ID NO: 19375 - DNA, 20 bp, Artificial Sequence
  Description of Artificial Sequence: Synthetic oligonucleotide
  Target: COL7A1; (+) strand; PAM type: NRG; PAM sequence: CAG
acagggtctgtgaggggctc

SEQ ID NO: 19376 - DNA, 20 bp, Artificial Sequence
  Description of Artificial Sequence: Synthetic oligonucleotide
  Target: COL7A1; (+) strand; PAM type: NRG; PAM sequence: AGG
cagggtctgtgaggggctcc

SEQ ID NO: 19377 - DNA, 20 bp, Artificial Sequence
  Description of Artificial Sequence: Synthetic oligonucleotide
  Target: COL7A1; (+) strand; PAM type: NRG; PAM sequence: GGG
agggtctgtgaggggctcca

SEQ ID NO: 19378 - DNA, 20 bp, Artificial Sequence
  Description of Artificial Sequence: Synthetic oligonucleotide
  Target: COL7A1; (+) strand; PAM type: NRG; PAM sequence: CGG
tgaggggctccagggatccg

SEQ ID NO: 19379 - DNA, 20 bp, Artificial Sequence
  Description of Artificial Sequence: Synthetic oligonucleotide
  Target: COL7A1; (+) strand; PAM type: NRG; PAM sequence: GAG
aggggctccagggatccgcg

SEQ ID NO: 19380 - DNA, 20 bp, Artificial Sequence
  Description of Artificial Sequence: Synthetic oligonucleotide
  Target: COL7A1; (+) strand; PAM type: NRG; PAM sequence: AGG
ggggctccagggatccgcgg

SEQ ID NO: 19381 - DNA, 20 bp, Artificial Sequence
  Description of Artificial Sequence: Synthetic oligonucleotide
  Target: COL7A1; (+) strand; PAM type: NRG; PAM sequence: CAG
ccagggatccgcggaggttt

SEQ ID NO: 19382 - DNA, 20 bp, Artificial Sequence
  Description of Artificial Sequence: Synthetic oligonucleotide
  Target: COL7A1; (+) strand; PAM type: NRG; PAM sequence: GAG
agggatccgcggaggtttca

SEQ ID NO: 19383 - DNA, 20 bp, Artificial Sequence
  Description of Artificial Sequence: Synthetic oligonucleotide
  Target: COL7A1; (+) strand; PAM type: NRG; PAM sequence: AGG
gggatccgcggaggtttcag

SEQ ID NO: 19384 - DNA, 20 bp, Artificial Sequence
  Description of Artificial Sequence: Synthetic oligonucleotide
  Target: COL7A1; (+) strand; PAM type: NRG; PAM sequence: GGG
ggatccgcggaggtttcaga

SEQ ID NO: 19385 - DNA, 20 bp, Artificial Sequence
  Description of Artificial Sequence: Synthetic oligonucleotide
  Target: COL7A1; (+) strand; PAM type: NRG; PAM sequence: CAG
ccgcggaggtttcagaggga

SEQ ID NO: 19386 - DNA, 20 bp, Artificial Sequence
  Description of Artificial Sequence: Synthetic oligonucleotide
  Target: COL7A1; (+) strand; PAM type: NRG; PAM sequence: TGG
cggaggtttcagagggacag

SEQ ID NO: 19387 - DNA, 20 bp, Artificial Sequence
  Description of Artificial Sequence: Synthetic oligonucleotide
  Target: COL7A1; (+) strand; PAM type: NRG; PAM sequence: GGG
ggaggtttcagagggacagt

SEQ ID NO: 19388 - DNA, 20 bp, Artificial Sequence
  Description of Artificial Sequence: Synthetic oligonucleotide
  Target: COL7A1; (+) strand; PAM type: NRG; PAM sequence: GGG
gaggtttcagagggacagtg

SEQ ID NO: 19389 - DNA, 20 bp, Artificial Sequence
  Description of Artificial Sequence: Synthetic oligonucleotide
  Target: COL7A1; (+) strand; PAM type: NRG; PAM sequence: GGG
aggtttcagagggacagtgg

SEQ ID NO: 19390 - DNA, 20 bp, Artificial Sequence
  Description of Artificial Sequence: Synthetic oligonucleotide
  Target: COL7A1; (+) strand; PAM type: NRG; PAM sequence: AAG
tttcagagggacagtggggg

SEQ ID NO: 19391 - DNA, 20 bp, Artificial Sequence
  Description of Artificial Sequence: Synthetic oligonucleotide
  Target: COL7A1; (+) strand; PAM type: NRG; PAM sequence: TGG
cagagggacagtgggggaag

SEQ ID NO: 19392 - DNA, 20 bp, Artificial Sequence
  Description of Artificial Sequence: Synthetic oligonucleotide
  Target: COL7A1; (+) strand; PAM type: NRG; PAM sequence: GGG
agagggacagtgggggaagt

SEQ ID NO: 19393 - DNA, 20 bp, Artificial Sequence
  Description of Artificial Sequence: Synthetic oligonucleotide
  Target: COL7A1; (+) strand; PAM type: NRG; PAM sequence: GAG
agggacagtgggggaagtgg

SEQ ID NO: 19394 - DNA, 20 bp, Artificial Sequence
  Description of Artificial Sequence: Synthetic oligonucleotide
  Target: COL7A1; (+) strand; PAM type: NRG; PAM sequence: TAG
acagtgggggaagtgggagt

SEQ ID NO: 19395 - DNA, 20 bp, Artificial Sequence
  Description of Artificial Sequence: Synthetic oligonucleotide
  Target: COL7A1; (+) strand; PAM type: NRG; PAM sequence: TGG
gtgggggaagtgggagttag

SEQ ID NO: 19396 - DNA, 20 bp, Artificial Sequence
  Description of Artificial Sequence: Synthetic oligonucleotide
  Target: COL7A1; (+) strand; PAM type: NRG; PAM sequence: AAG
ggggaagtgggagttagtgg

SEQ ID NO: 19397 - DNA, 20 bp, Artificial Sequence
  Description of Artificial Sequence: Synthetic oligonucleotide
  Target: COL7A1; (+) strand; PAM type: NRG; PAM sequence: AGG
gggaagtgggagttagtgga

SEQ ID NO: 19398 - DNA, 20 bp, Artificial Sequence
  Description of Artificial Sequence: Synthetic oligonucleotide
  Target: COL7A1; (+) strand; PAM type: NRG; PAM sequence: GAG
tgggagttagtggaaggaat

SEQ ID NO: 19399 - DNA, 20 bp, Artificial Sequence
  Description of Artificial Sequence: Synthetic oligonucleotide
  Target: COL7A1; (+) strand; PAM type: NRG; PAM sequence: AGG
gggagttagtggaaggaatg

SEQ ID NO: 19400 - DNA, 20 bp, Artificial Sequence
  Description of Artificial Sequence: Synthetic oligonucleotide
  Target: COL7A1; (+) strand; PAM type: NRG; PAM sequence: GGG
ggagttagtggaaggaatga

SEQ ID NO: 19401 - DNA, 20 bp, Artificial Sequence
  Description of Artificial Sequence: Synthetic oligonucleotide
  Target: COL7A1; (+) strand; PAM type: NRG; PAM sequence: GGG
gagttagtggaaggaatgag

SEQ ID NO: 19402 - DNA, 20 bp, Artificial Sequence
  Description of Artificial Sequence: Synthetic oligonucleotide
  Target: COL7A1; (+) strand; PAM type: NRG; PAM sequence: TGG
aggaatgaggggacatgatg

SEQ ID NO: 19403 - DNA, 20 bp, Artificial Sequence
  Description of Artificial Sequence: Synthetic oligonucleotide
  Target: COL7A1; (+) strand; PAM type: NRG; PAM sequence: GAG
gaatgaggggacatgatgtg

SEQ ID NO: 19404 - DNA, 20 bp, Artificial Sequence
  Description of Artificial Sequence: Synthetic oligonucleotide
  Target: COL7A1; (+) strand; PAM type: NRG; PAM sequence: AAG
ggggacatgatgtggagcca

SEQ ID NO: 19405 - DNA, 20 bp, Artificial Sequence
  Description of Artificial Sequence: Synthetic oligonucleotide
  Target: COL7A1; (+) strand; PAM type: NRG; PAM sequence: AGG
gggacatgatgtggagccaa

SEQ ID NO: 19406 - DNA, 20 bp, Artificial Sequence
  Description of Artificial Sequence: Synthetic oligonucleotide
  Target: COL7A1; (+) strand; PAM type: NRG; PAM sequence: GGG
ggacatgatgtggagccaaa

SEQ ID NO: 19407 - DNA, 20 bp, Artificial Sequence
  Description of Artificial Sequence: Synthetic oligonucleotide
  Target: COL7A1; (+) strand; PAM type: NRG; PAM sequence: GGG
gacatgatgtggagccaaag

SEQ ID NO: 19408 - DNA, 20 bp, Artificial Sequence
  Description of Artificial Sequence: Synthetic oligonucleotide
  Target: COL7A1; (+) strand; PAM type: NRG; PAM sequence: AAG
tgatgtggagccaaaggggc

SEQ ID NO: 19409 - DNA, 20 bp, Artificial Sequence
  Description of Artificial Sequence: Synthetic oligonucleotide
  Target: COL7A1; (+) strand; PAM type: NRG; PAM sequence: GAG
gtggagccaaaggggcaagt

SEQ ID NO: 19410 - DNA, 20 bp, Artificial Sequence
  Description of Artificial Sequence: Synthetic oligonucleotide
  Target: COL7A1; (+) strand; PAM type: NRG; PAM sequence: CAG
ggggcaagtgagaacaatga

SEQ ID NO: 19411 - DNA, 20 bp, Artificial Sequence
  Description of Artificial Sequence: Synthetic oligonucleotide
  Target: COL7A1; (+) strand; PAM type: NRG; PAM sequence: GAG
ggcaagtgagaacaatgaca

SEQ ID NO: 19412 - DNA, 20 bp, Artificial Sequence
  Description of Artificial Sequence: Synthetic oligonucleotide
  Target: COL7A1; (+) strand; PAM type: NRG; PAM sequence: AGG
gcaagtgagaacaatgacag

SEQ ID NO: 19413 - DNA, 20 bp, Artificial Sequence
  Description of Artificial Sequence: Synthetic oligonucleotide
  Target: COL7A1; (+) strand; PAM type: NRG; PAM sequence: CAG
tgagaacaatgacagaggac

SEQ ID NO: 19414 - DNA, 20 bp, Artificial Sequence
  Description of Artificial Sequence: Synthetic oligonucleotide
  Target: COL7A1; (+) strand; PAM type: NRG; PAM sequence: CAG
caatgacagaggaccagacc

SEQ ID NO: 19415 - DNA, 20 bp, Artificial Sequence
  Description of Artificial Sequence: Synthetic oligonucleotide
  Target: COL7A1; (+) strand; PAM type: NRG; PAM sequence: CAG
acagaggaccagacccagcg

SEQ ID NO: 19416 - DNA, 20 bp, Artificial Sequence
  Description of Artificial Sequence: Synthetic oligonucleotide
  Target: COL7A1; (+) strand; PAM type: NRG; PAM sequence: CAG
agacccagcgcagcccttac

SEQ ID NO: 19417 - DNA, 20 bp, Artificial Sequence
  Description of Artificial Sequence: Synthetic oligonucleotide
  Target: COL7A1; (+) strand; PAM type: NRG; PAM sequence: CGG
gcagcccttaccagccgtcc

SEQ ID NO: 19418 - DNA, 20 bp, Artificial Sequence
  Description of Artificial Sequence: Synthetic oligonucleotide
  Target: COL7A1; (+) strand; PAM type: NRG; PAM sequence: GGG
cagcccttaccagccgtccc

SEQ ID NO: 19419 - DNA, 20 bp, Artificial Sequence
  Description of Artificial Sequence: Synthetic oligonucleotide
  Target: COL7A1; (+) strand; PAM type: NRG; PAM sequence: GGG
agcccttaccagccgtcccg

SEQ ID NO: 19420 - DNA, 20 bp, Artificial Sequence
  Description of Artificial Sequence: Synthetic oligonucleotide
  Target: COL7A1; (+) strand; PAM type: NRG; PAM sequence: GGG
gcccttaccagccgtcccgg

SEQ ID NO: 19421 - DNA, 20 bp, Artificial Sequence
  Description of Artificial Sequence: Synthetic oligonucleotide
  Target: COL7A1; (+) strand; PAM type: NRG; PAM sequence: TGG
accagccgtcccgggggtcc

SEQ ID NO: 19422 - DNA, 20 bp, Artificial Sequence
  Description of Artificial Sequence: Synthetic oligonucleotide
  Target: COL7A1; (+) strand; PAM type: NRG; PAM sequence: GGG
ccagccgtcccgggggtcct

SEQ ID NO: 19423 - DNA, 20 bp, Artificial Sequence
  Description of Artificial Sequence: Synthetic oligonucleotide
  Target: COL7A1; (+) strand; PAM type: NRG; PAM sequence: GGG
cagccgtcccgggggtcctg

SEQ ID NO: 19424 - DNA, 20 bp, Artificial Sequence
  Description of Artificial Sequence: Synthetic oligonucleotide
  Target: COL7A1; (+) strand; PAM type: NRG; PAM sequence: GGG
agccgtcccgggggtcctgg

SEQ ID NO: 19425 - DNA, 20 bp, Artificial Sequence
  Description of Artificial Sequence: Synthetic oligonucleotide
  Target: COL7A1; (+) strand; PAM type: NRG; PAM sequence: TGG
ccgggggtcctgggggaccc

SEQ ID NO: 19426 - DNA, 20 bp, Artificial Sequence
  Description of Artificial Sequence: Synthetic oligonucleotide
  Target: COL7A1; (+) strand; PAM type: NRG; PAM sequence: GGG
cgggggtcctgggggaccct

SEQ ID NO: 19427 - DNA, 20 bp, Artificial Sequence
  Description of Artificial Sequence: Synthetic oligonucleotide
  Target: COL7A1; (+) strand; PAM type: NRG; PAM sequence: AAG
ggtcctgggggaccctggga

SEQ ID NO: 19428 - DNA, 20 bp, Artificial Sequence
  Description of Artificial Sequence: Synthetic oligonucleotide
  Target: COL7A1; (+) strand; PAM type: NRG; PAM sequence: AGG
gtcctgggggaccctgggaa

SEQ ID NO: 19429 - DNA, 20 bp, Artificial Sequence
  Description of Artificial Sequence: Synthetic oligonucleotide
  Target: COL7A1; (+) strand; PAM type: NRG; PAM sequence: TAG
cctgggaaaggaaatgatta

SEQ ID NO: 19430 - DNA, 20 bp, Artificial Sequence
  Description of Artificial Sequence: Synthetic oligonucleotide
  Target: COL7A1; (+) strand; PAM type: NRG; PAM sequence: TAG
aaggaaatgattatagtcaa

SEQ ID NO: 19431 - DNA, 20 bp, Artificial Sequence
  Description of Artificial Sequence: Synthetic oligonucleotide
  Target: COL7A1; (+) strand; PAM type: NRG; PAM sequence: AGG
aggaaatgattatagtcaat

SEQ ID NO: 19432 - DNA, 20 bp, Artificial Sequence
  Description of Artificial Sequence: Synthetic oligonucleotide
  Target: COL7A1; (+) strand; PAM type: NRG; PAM sequence: GAG
gaaatgattatagtcaatag

SEQ ID NO: 19433 - DNA, 20 bp, Artificial Sequence
  Description of Artificial Sequence: Synthetic oligonucleotide
  Target: COL7A1; (+) strand; PAM type: NRG; PAM sequence: CAG
ttatagtcaataggagccct

SEQ ID NO: 19434 - DNA, 20 bp, Artificial Sequence
  Description of Artificial Sequence: Synthetic oligonucleotide
  Target: COL7A1; (+) strand; PAM type: NRG; PAM sequence: AGG
tatagtcaataggagccctc

SEQ ID NO: 19435 - DNA, 20 bp, Artificial Sequence
  Description of Artificial Sequence: Synthetic oligonucleotide
  Target: COL7A1; (+) strand; PAM type: NRG; PAM sequence: CAG
caataggagccctcaggtcc

SEQ ID NO: 19436 - DNA, 20 bp, Artificial Sequence
  Description of Artificial Sequence: Synthetic oligonucleotide
  Target: COL7A1; (+) strand; PAM type: NRG; PAM sequence: AGG
aataggagccctcaggtccc

SEQ ID NO: 19437 - DNA, 20 bp, Artificial Sequence
  Description of Artificial Sequence: Synthetic oligonucleotide
  Target: COL7A1; (+) strand; PAM type: NRG; PAM sequence: TGG
agccctcaggtcccaggcca

SEQ ID NO: 19438 - DNA, 20 bp, Artificial Sequence
  Description of Artificial Sequence: Synthetic oligonucleotide
  Target: COL7A1; (+) strand; PAM type: NRG; PAM sequence: TGG
caggtcccaggccatggctc

SEQ ID NO: 19439 - DNA, 20 bp, Artificial Sequence
  Description of Artificial Sequence: Synthetic oligonucleotide
  Target: COL7A1; (+) strand; PAM type: NRG; PAM sequence: CAG
gccatggctctggtttgccc

SEQ ID NO: 19440 - DNA, 20 bp, Artificial Sequence
  Description of Artificial Sequence: Synthetic oligonucleotide
  Target: COL7A1; (+) strand; PAM type: NRG; PAM sequence: AGG
ccatggctctggtttgcccc

SEQ ID NO: 19441 - DNA, 20 bp, Artificial Sequence
  Description of Artificial Sequence: Synthetic oligonucleotide
  Target: COL7A1; (+) strand; PAM type: NRG; PAM sequence: AAG
ccaggctcaactctgccccc

SEQ ID NO: 19442 - DNA, 20 bp, Artificial Sequence
  Description of Artificial Sequence: Synthetic oligonucleotide
  Target: COL7A1; (+) strand; PAM type: NRG; PAM sequence: AAG
ctctgcccccaagttccccg

SEQ ID NO: 19443 - DNA, 20 bp, Artificial Sequence
  Description of Artificial Sequence: Synthetic oligonucleotide
  Target: COL7A1; (+) strand; PAM type: NRG; PAM sequence: CAG
tccccgaagcaccccaatgc

SEQ ID NO: 19444 - DNA, 20 bp, Artificial Sequence
  Description of Artificial Sequence: Synthetic oligonucleotide
  Target: COL7A1; (+) strand; PAM type: NRG; PAM sequence: CAG
agcaccccaatgccagcccc

SEQ ID NO: 19445 - DNA, 20 bp, Artificial Sequence
  Description of Artificial Sequence: Synthetic oligonucleotide
  Target: COL7A1; (+) strand; PAM type: NRG; PAM sequence: CAG
accccaatgccagcccccag

SEQ ID NO: 19446 - DNA, 20 bp, Artificial Sequence
  Description of Artificial Sequence: Synthetic oligonucleotide
  Target: COL7A1; (+) strand; PAM type: NRG; PAM sequence: AGG
ccccaatgccagcccccagc

SEQ ID NO: 19447 - DNA, 20 bp, Artificial Sequence
  Description of Artificial Sequence: Synthetic oligonucleotide
  Target: COL7A1; (+) strand; PAM type: NRG; PAM sequence: TGG
atgccagcccccagcaggca

SEQ ID NO: 19448 - DNA, 20 bp, Artificial Sequence
  Description of Artificial Sequence: Synthetic oligonucleotide
  Target: COL7A1; (+) strand; PAM type: NRG; PAM sequence: GGG
tgccagcccccagcaggcat

SEQ ID NO: 19449 - DNA, 20 bp, Artificial Sequence
  Description of Artificial Sequence: Synthetic oligonucleotide
  Target: COL7A1; (+) strand; PAM type: NRG; PAM sequence: TGG
cagcccccagcaggcatggg

SEQ ID NO: 19450 - DNA, 20 bp, Artificial Sequence
  Description of Artificial Sequence: Synthetic oligonucleotide
  Target: COL7A1; (+) strand; PAM type: NRG; PAM sequence: TGG
ggccatccatgcttcccacc

SEQ ID NO: 19451 - DNA, 20 bp, Artificial Sequence
  Description of Artificial Sequence: Synthetic oligonucleotide
  Target: COL7A1; (+) strand; PAM type: NRG; PAM sequence: CAG
atgcttcccacctggacctc

SEQ ID NO: 19452 - DNA, 20 bp, Artificial Sequence
  Description of Artificial Sequence: Synthetic oligonucleotide
  Target: COL7A1; (+) strand; PAM type: NRG; PAM sequence: AAG
acctccagaccccttgtgtg

SEQ ID NO: 19453 - DNA, 20 bp, Artificial Sequence
  Description of Artificial Sequence: Synthetic oligonucleotide
  Target: COL7A1; (+) strand; PAM type: NRG; PAM sequence: AGG
cctccagaccccttgtgtga

SEQ ID NO: 19454 - DNA, 20 bp, Artificial Sequence
  Description of Artificial Sequence: Synthetic oligonucleotide
  Target: COL7A1; (+) strand; PAM type: NRG; PAM sequence: TGG
ccccttgtgtgaaggcacac

SEQ ID NO: 19455 - DNA, 20 bp, Artificial Sequence
  Description of Artificial Sequence: Synthetic oligonucleotide
  Target: COL7A1; (+) strand; PAM type: NRG; PAM sequence: CAG
cttgtgtgaaggcacactgg

SEQ ID NO: 19456 - DNA, 20 bp, Artificial Sequence
  Description of Artificial Sequence: Synthetic oligonucleotide
  Target: COL7A1; (+) strand; PAM type: NRG; PAM sequence: CAG
gtgtgaaggcacactggcag

SEQ ID NO: 19457 - DNA, 20 bp, Artificial Sequence
  Description of Artificial Sequence: Synthetic oligonucleotide
  Target: COL7A1; (+) strand; PAM type: NRG; PAM sequence: CAG
aggcacactggcagcagcgc

SEQ ID NO: 19458 - DNA, 20 bp, Artificial Sequence
  Description of Artificial Sequence: Synthetic oligonucleotide
  Target: COL7A1; (+) strand; PAM type: NRG; PAM sequence: AGG
ggcacactggcagcagcgcc

SEQ ID NO: 19459 - DNA, 20 bp, Artificial Sequence
  Description of Artificial Sequence: Synthetic oligonucleotide
  Target: COL7A1; (+) strand; PAM type: NRG; PAM sequence: GGG
gcacactggcagcagcgcca

SEQ ID NO: 19460 - DNA, 20 bp, Artificial Sequence
  Description of Artificial Sequence: Synthetic oligonucleotide
  Target: COL7A1; (+) strand; PAM type: NRG; PAM sequence: GGG
cacactggcagcagcgccag

SEQ ID NO: 19461 - DNA, 20 bp, Artificial Sequence
  Description of Artificial Sequence: Synthetic oligonucleotide
  Target: COL7A1; (+) strand; PAM type: NRG; PAM sequence: GAG
ggggaccctccatcccttct

SEQ ID NO: 19462 - DNA, 20 bp, Artificial Sequence
  Description of Artificial Sequence: Synthetic oligonucleotide
  Target: COL7A1; (+) strand; PAM type: NRG; PAM sequence: CAG
ccctccatcccttctgagcc

SEQ ID NO: 19463 - DNA, 20 bp, Artificial Sequence
  Description of Artificial Sequence: Synthetic oligonucleotide
  Target: COL7A1; (+) strand; PAM type: NRG; PAM sequence: AGG
cctccatcccttctgagccc

SEQ ID NO: 19464 - DNA, 20 bp, Artificial Sequence
  Description of Artificial Sequence: Synthetic oligonucleotide
  Target: COL7A1; (+) strand; PAM type: NRG; PAM sequence: CAG
cccttctgagcccaggacac

SEQ ID NO: 19465 - DNA, 20 bp, Artificial Sequence
  Description of Artificial Sequence: Synthetic oligonucleotide
  Target: COL7A1; (+) strand; PAM type: NRG; PAM sequence: CGG
aggacaccagccctactcac

SEQ ID NO: 19466 - DNA, 20 bp, Artificial Sequence
  Description of Artificial Sequence: Synthetic oligonucleotide
  Target: COL7A1; (+) strand; PAM type: NRG; PAM sequence: CGG
ccctactcaccggctcccca

SEQ ID NO: 19467 - DNA, 20 bp, Artificial Sequence
  Description of Artificial Sequence: Synthetic oligonucleotide
  Target: COL7A1; (+) strand; PAM type: NRG; PAM sequence: TGG
cggctccccacggtcaccct

SEQ ID NO: 19468 - DNA, 20 bp, Artificial Sequence
  Description of Artificial Sequence: Synthetic oligonucleotide
  Target: COL7A1; (+) strand; PAM type: NRG; PAM sequence: GGG
ggctccccacggtcaccctt

SEQ ID NO: 19469 - DNA, 20 bp, Artificial Sequence
  Description of Artificial Sequence: Synthetic oligonucleotide
  Target: COL7A1; (+) strand; PAM type: NRG; PAM sequence: CAG
cccacggtcacccttgggtc

SEQ ID NO: 19470 - DNA, 20 bp, Artificial Sequence
  Description of Artificial Sequence: Synthetic oligonucleotide
  Target: COL7A1; (+) strand; PAM type: NRG; PAM sequence: CAG
acccttgggtccagatgatc

SEQ ID NO: 19471 - DNA, 20 bp, Artificial Sequence
  Description of Artificial Sequence: Synthetic oligonucleotide
  Target: COL7A1; (+) strand; PAM type: NRG; PAM sequence: AGG
cccttgggtccagatgatcc

SEQ ID NO: 19472 - DNA, 20 bp, Artificial Sequence
  Description of Artificial Sequence: Synthetic oligonucleotide
  Target: COL7A1; (+) strand; PAM type: NRG; PAM sequence: GGG
ccttgggtccagatgatcca

SEQ ID NO: 19473 - DNA, 20 bp, Artificial Sequence
  Description of Artificial Sequence: Synthetic oligonucleotide
  Target: COL7A1; (+) strand; PAM type: NRG; PAM sequence: CAG
gatgatccagggctgccctg

SEQ ID NO: 19474 - DNA, 20 bp, Artificial Sequence
  Description of Artificial Sequence: Synthetic oligonucleotide
  Target: COL7A1; (+) strand; PAM type: NRG; PAM sequence: AAG
atccagggctgccctgcaga

SEQ ID NO: 19475 - DNA, 20 bp, Artificial Sequence
  Description of Artificial Sequence: Synthetic oligonucleotide
  Target: COL7A1; (+) strand; PAM type: NRG; PAM sequence: AGG
tccagggctgccctgcagaa

SEQ ID NO: 19476 - DNA, 20 bp, Artificial Sequence
  Description of Artificial Sequence: Synthetic oligonucleotide
  Target: COL7A1; (+) strand; PAM type: NRG; PAM sequence: CAG
agggctgccctgcagaaagg

SEQ ID NO: 19477 - DNA, 20 bp, Artificial Sequence
  Description of Artificial Sequence: Synthetic oligonucleotide
  Target: COL7A1; (+) strand; PAM type: NRG; PAM sequence: AGG
gggctgccctgcagaaaggc

SEQ ID NO: 19478 - DNA, 20 bp, Artificial Sequence
  Description of Artificial Sequence: Synthetic oligonucleotide
  Target: COL7A1; (+) strand; PAM type: NRG; PAM sequence: GGG
ggctgccctgcagaaaggca

SEQ ID NO: 19479 - DNA, 20 bp, Artificial Sequence
  Description of Artificial Sequence: Synthetic oligonucleotide
  Target: COL7A1; (+) strand; PAM type: NRG; PAM sequence: GGG
gctgccctgcagaaaggcag

SEQ ID NO: 19480 - DNA, 20 bp, Artificial Sequence
  Description of Artificial Sequence: Synthetic oligonucleotide
  Target: COL7A1; (+) strand; PAM type: NRG; PAM sequence: CAG
ccctgcagaaaggcaggggt

SEQ ID NO: 19481 - DNA, 20 bp, Artificial Sequence
  Description of Artificial Sequence: Synthetic oligonucleotide
  Target: COL7A1; (+) strand; PAM type: NRG; PAM sequence: AGG
cctgcagaaaggcaggggtc

SEQ ID NO: 19482 - DNA, 20 bp, Artificial Sequence
  Description of Artificial Sequence: Synthetic oligonucleotide
  Target: COL7A1; (+) strand; PAM type: NRG; PAM sequence: GGG
ctgcagaaaggcaggggtca

SEQ ID NO: 19483 - DNA, 20 bp, Artificial Sequence
  Description of Artificial Sequence: Synthetic oligonucleotide
  Target: COL7A1; (+) strand; PAM type: NRG; PAM sequence: AAG
ggcaggggtcagggccactc

SEQ ID NO: 19484 - DNA, 20 bp, Artificial Sequence
  Description of Artificial Sequence: Synthetic oligonucleotide
  Target: COL7A1; (+) strand; PAM type: NRG; PAM sequence: AGG
gcaggggtcagggccactca

SEQ ID NO: 19485 - DNA, 20 bp, Artificial Sequence
  Description of Artificial Sequence: Synthetic oligonucleotide
  Target: COL7A1; (+) strand; PAM type: NRG; PAM sequence: TAG
ggggtcagggccactcaagg

SEQ ID NO: 19486 - DNA, 20 bp, Artificial Sequence
  Description of Artificial Sequence: Synthetic oligonucleotide
  Target: COL7A1; (+) strand; PAM type: NRG; PAM sequence: AGG
gggtcagggccactcaaggt

SEQ ID NO: 19487 - DNA, 20 bp, Artificial Sequence
  Description of Artificial Sequence: Synthetic oligonucleotide
  Target: COL7A1; (+) strand; PAM type: NRG; PAM sequence: CAG
tcagggccactcaaggtagg

SEQ ID NO: 19488 - DNA, 20 bp, Artificial Sequence
  Description of Artificial Sequence: Synthetic oligonucleotide
  Target: COL7A1; (+) strand; PAM type: NRG; PAM sequence: CAG
gggccactcaaggtaggcag

SEQ ID NO: 19489 - DNA, 20 bp, Artificial Sequence
  Description of Artificial Sequence: Synthetic oligonucleotide
  Target: COL7A1; (+) strand; PAM type: NRG; PAM sequence: TGG
actcaaggtaggcagcagtt

SEQ ID NO: 19490 - DNA, 20 bp, Artificial Sequence
  Description of Artificial Sequence: Synthetic oligonucleotide
  Target: COL7A1; (+) strand; PAM type: NRG; PAM sequence: GGG
ctcaaggtaggcagcagttt

SEQ ID NO: 19491 - DNA, 20 bp, Artificial Sequence
  Description of Artificial Sequence: Synthetic oligonucleotide
  Target: COL7A1; (+) strand; PAM type: NRG; PAM sequence: GAG
caaggtaggcagcagtttgg

SEQ ID NO: 19492 - DNA, 20 bp, Artificial Sequence
  Description of Artificial Sequence: Synthetic oligonucleotide
  Target: COL7A1; (+) strand; PAM type: NRG; PAM sequence: GAG
aggtaggcagcagtttggga

SEQ ID NO: 19493 - DNA, 20 bp, Artificial Sequence
  Description of Artificial Sequence: Synthetic oligonucleotide
  Target: COL7A1; (+) strand; PAM type: NRG; PAM sequence: TGG
gcagcagtttgggagagctt

SEQ ID NO: 19494 - DNA, 20 bp, Artificial Sequence
  Description of Artificial Sequence: Synthetic oligonucleotide
  Target: COL7A1; (+) strand; PAM type: NRG; PAM sequence: AAG
gcagtttgggagagctttgg

SEQ ID NO: 19495 - DNA, 20 bp, Artificial Sequence
  Description of Artificial Sequence: Synthetic oligonucleotide
  Target: COL7A1; (+) strand; PAM type: NRG; PAM sequence: GAG
gagagctttggaagcaccat

SEQ ID NO: 19496 - DNA, 20 bp, Artificial Sequence
  Description of Artificial Sequence: Synthetic oligonucleotide
  Target: COL7A1; (+) strand; PAM type: NRG; PAM sequence: AGG
agagctttggaagcaccatg

SEQ ID NO: 19497 - DNA, 20 bp, Artificial Sequence
  Description of Artificial Sequence: Synthetic oligonucleotide
  Target: COL7A1; (+) strand; PAM type: NRG; PAM sequence: TGG
ggaagcaccatgaggactca

SEQ ID NO: 19498 - DNA, 20 bp, Artificial Sequence
  Description of Artificial Sequence: Synthetic oligonucleotide
  Target: COL7A1; (+) strand; PAM type: NRG; PAM sequence: GGG
gaagcaccatgaggactcat

SEQ ID NO: 19499 - DNA, 20 bp, Artificial Sequence
  Description of Artificial Sequence: Synthetic oligonucleotide
  Target: COL7A1; (+) strand; PAM type: NRG; PAM sequence: TGG
atgaggactcatgggaatgt

SEQ ID NO: 19500 - DNA, 20 bp, Artificial Sequence
  Description of Artificial Sequence: Synthetic oligonucleotide
  Target: COL7A1; (+) strand; PAM type: NRG; PAM sequence: TAG
aggactcatgggaatgttgg

SEQ ID NO: 19501 - DNA, 20 bp, Artificial Sequence
  Description of Artificial Sequence: Synthetic oligonucleotide
  Target: COL7A1; (+) strand; PAM type: NRG; PAM sequence: CAG
atgggaatgttggtagcctt

SEQ ID NO: 19502 - DNA, 20 bp, Artificial Sequence
  Description of Artificial Sequence: Synthetic oligonucleotide
  Target: COL7A1; (+) strand; PAM type: NRG; PAM sequence: CAG
agccttcagatgcgtgtgtg

SEQ ID NO: 19503 - DNA, 20 bp, Artificial Sequence
  Description of Artificial Sequence: Synthetic oligonucleotide
  Target: COL7A1; (+) strand; PAM type: NRG; PAM sequence: AGG
gccttcagatgcgtgtgtgc

SEQ ID NO: 19504 - DNA, 20 bp, Artificial Sequence
  Description of Artificial Sequence: Synthetic oligonucleotide
  Target: COL7A1; (+) strand; PAM type: NRG; PAM sequence: GGG
ccttcagatgcgtgtgtgca

SEQ ID NO: 19505 - DNA, 20 bp, Artificial Sequence
  Description of Artificial Sequence: Synthetic oligonucleotide
  Target: COL7A1; (+) strand; PAM type: NRG; PAM sequence: GGG
cttcagatgcgtgtgtgcag

SEQ ID NO: 19506 - DNA, 20 bp, Artificial Sequence
  Description of Artificial Sequence: Synthetic oligonucleotide
  Target: COL7A1; (+) strand; PAM type: NRG; PAM sequence: AAG
atgcgtgtgtgcaggggtca

SEQ ID NO: 19507 - DNA, 20 bp, Artificial Sequence
  Description of Artificial Sequence: Synthetic oligonucleotide
  Target: COL7A1; (+) strand; PAM type: NRG; PAM sequence: AGG
tgcgtgtgtgcaggggtcaa

SEQ ID NO: 19508 - DNA, 20 bp, Artificial Sequence
  Description of Artificial Sequence: Synthetic oligonucleotide
  Target: COL7A1; (+) strand; PAM type: NRG; PAM sequence: AAG
gtgtgtgcaggggtcaaagg

SEQ ID NO: 19509 - DNA, 20 bp, Artificial Sequence
  Description of Artificial Sequence: Synthetic oligonucleotide
  Target: COL7A1; (+) strand; PAM type: NRG; PAM sequence: AAG
tgcaggggtcaaaggaagtg

SEQ ID NO: 19510 - DNA, 20 bp, Artificial Sequence
  Description of Artificial Sequence: Synthetic oligonucleotide
  Target: COL7A1; (+) strand; PAM type: NRG; PAM sequence: TGG
gggtcaaaggaagtgaagat

SEQ ID NO: 19511 - DNA, 20 bp, Artificial Sequence
  Description of Artificial Sequence: Synthetic oligonucleotide
  Target: COL7A1; (+) strand; PAM type: NRG; PAM sequence: GGG
ggtcaaaggaagtgaagatt

SEQ ID NO: 19512 - DNA, 20 bp, Artificial Sequence
  Description of Artificial Sequence: Synthetic oligonucleotide
  Target: COL7A1; (+) strand; PAM type: NRG; PAM sequence: GAG
tcaaaggaagtgaagattgg

SEQ ID NO: 19513 - DNA, 20 bp, Artificial Sequence
  Description of Artificial Sequence: Synthetic oligonucleotide
  Target: COL7A1; (+) strand; PAM type: NRG; PAM sequence: AGG
caaaggaagtgaagattggg

SEQ ID NO: 19514 - DNA, 20 bp, Artificial Sequence
  Description of Artificial Sequence: Synthetic oligonucleotide
  Target: COL7A1; (+) strand; PAM type: NRG; PAM sequence: GGG
aaaggaagtgaagattggga

SEQ ID NO: 19515 - DNA, 20 bp, Artificial Sequence
  Description of Artificial Sequence: Synthetic oligonucleotide
  Target: COL7A1; (+) strand; PAM type: NRG; PAM sequence: TAG
aagtgaagattgggagggtt

SEQ ID NO: 19516 - DNA, 20 bp, Artificial Sequence
  Description of Artificial Sequence: Synthetic oligonucleotide
  Target: COL7A1; (+) strand; PAM type: NRG; PAM sequence: CAG
attgggagggtttagcatta

SEQ ID NO: 19517 - DNA, 20 bp, Artificial Sequence
  Description of Artificial Sequence: Synthetic oligonucleotide
  Target: COL7A1; (+) strand; PAM type: NRG; PAM sequence: AGG
ttgggagggtttagcattac

SEQ ID NO: 19518 - DNA, 20 bp, Artificial Sequence
  Description of Artificial Sequence: Synthetic oligonucleotide
  Target: COL7A1; (+) strand; PAM type: NRG; PAM sequence: GGG
tgggagggtttagcattaca

SEQ ID NO: 19519 - DNA, 20 bp, Artificial Sequence
  Description of Artificial Sequence: Synthetic oligonucleotide
  Target: COL7A1; (+) strand; PAM type: NRG; PAM sequence: TGG
agggtttagcattacagggt

SEQ ID NO: 19520 - DNA, 20 bp, Artificial Sequence
  Description of Artificial Sequence: Synthetic oligonucleotide
  Target: COL7A1; (+) strand; PAM type: NRG; PAM sequence: GGG
gggtttagcattacagggtt

SEQ ID NO: 19521 - DNA, 20 bp, Artificial Sequence
  Description of Artificial Sequence: Synthetic oligonucleotide
  Target: COL7A1; (+) strand; PAM type: NRG; PAM sequence: GGG
ggtttagcattacagggttg

SEQ ID NO: 19522 - DNA, 20 bp, Artificial Sequence
  Description of Artificial Sequence: Synthetic oligonucleotide
  Target: COL7A1; (+) strand; PAM type: NRG; PAM sequence: GGG
gtttagcattacagggttgg

SEQ ID NO: 19523 - DNA, 20 bp, Artificial Sequence
  Description of Artificial Sequence: Synthetic oligonucleotide
  Target: COL7A1; (+) strand; PAM type: NRG; PAM sequence: GGG
tttagcattacagggttggg

SEQ ID NO: 19524 - DNA, 20 bp, Artificial Sequence
  Description of Artificial Sequence: Synthetic oligonucleotide
  Target: COL7A1; (+) strand; PAM type: NRG; PAM sequence: TAG
agcattacagggttgggggg

SEQ ID NO: 19525 - DNA, 20 bp, Artificial Sequence
  Description of Artificial Sequence: Synthetic oligonucleotide
  Target: COL7A1; (+) strand; PAM type: NRG; PAM sequence: AGG
gcattacagggttggggggt

SEQ ID NO: 19526 - DNA, 20 bp, Artificial Sequence
  Description of Artificial Sequence: Synthetic oligonucleotide
  Target: COL7A1; (+) strand; PAM type: NRG; PAM sequence: CAG
acagggttggggggtaggat

SEQ ID NO: 19527 - DNA, 20 bp, Artificial Sequence
  Description of Artificial Sequence: Synthetic oligonucleotide
  Target: COL7A1; (+) strand; PAM type: NRG; PAM sequence: AGG
cagggttggggggtaggatc

SEQ ID NO: 19528 - DNA, 20 bp, Artificial Sequence
  Description of Artificial Sequence: Synthetic oligonucleotide
  Target: COL7A1; (+) strand; PAM type: NRG; PAM sequence: TGG
tggggggtaggatcaggtat

SEQ ID NO: 19529 - DNA, 20 bp, Artificial Sequence
  Description of Artificial Sequence: Synthetic oligonucleotide
  Target: COL7A1; (+) strand; PAM type: NRG; PAM sequence: GGG
ggggggtaggatcaggtatt

SEQ ID NO: 19530 - DNA, 20 bp, Artificial Sequence
  Description of Artificial Sequence: Synthetic oligonucleotide
  Target: COL7A1; (+) strand; PAM type: NRG; PAM sequence: TGG
taggatcaggtattgggaat

SEQ ID NO: 19531 - DNA, 20 bp, Artificial Sequence
  Description of Artificial Sequence: Synthetic oligonucleotide
  Target: COL7A1; (+) strand; PAM type: NRG; PAM sequence: TGG
atcaggtattgggaattggc

SEQ ID NO: 19532 - DNA, 20 bp, Artificial Sequence
  Description of Artificial Sequence: Synthetic oligonucleotide
  Target: COL7A1; (+) strand; PAM type: NRG; PAM sequence: TGG
ggtattgggaattggctggt

SEQ ID NO: 19533 - DNA, 20 bp, Artificial Sequence
  Description of Artificial Sequence: Synthetic oligonucleotide
  Target: COL7A1; (+) strand; PAM type: NRG; PAM sequence: GAG
tattgggaattggctggttg

SEQ ID NO: 19534 - DNA, 20 bp, Artificial Sequence
  Description of Artificial Sequence: Synthetic oligonucleotide
  Target: COL7A1; (+) strand; PAM type: NRG; PAM sequence: AGG
attgggaattggctggttgg

SEQ ID NO: 19535 - DNA, 20 bp, Artificial Sequence
  Description of Artificial Sequence: Synthetic oligonucleotide
  Target: COL7A1; (+) strand; PAM type: NRG; PAM sequence: GGG
ttgggaattggctggttgga

SEQ ID NO: 19536 - DNA, 20 bp, Artificial Sequence
  Description of Artificial Sequence: Synthetic oligonucleotide
  Target: COL7A1; (+) strand; PAM type: NRG; PAM sequence: AAG
aattggctggttggagggtt

SEQ ID NO: 19537 - DNA, 20 bp, Artificial Sequence
  Description of Artificial Sequence: Synthetic oligonucleotide
  Target: COL7A1; (+) strand; PAM type: NRG; PAM sequence: AGG
attggctggttggagggtta

SEQ ID NO: 19538 - DNA, 20 bp, Artificial Sequence
  Description of Artificial Sequence: Synthetic oligonucleotide
  Target: COL7A1; (+) strand; PAM type: NRG; PAM sequence: TGG
gctggttggagggttaaggt

SEQ ID NO: 19539 - DNA, 20 bp, Artificial Sequence
  Description of Artificial Sequence: Synthetic oligonucleotide
  Target: COL7A1; (+) strand; PAM type: NRG; PAM sequence: GGG
ctggttggagggttaaggtt

SEQ ID NO: 19540 - DNA, 20 bp, Artificial Sequence
  Description of Artificial Sequence: Synthetic oligonucleotide
  Target: COL7A1; (+) strand; PAM type: NRG; PAM sequence: GGG
tggttggagggttaaggttg

SEQ ID NO: 19541 - DNA, 20 bp, Artificial Sequence
  Description of Artificial Sequence: Synthetic oligonucleotide
  Target: COL7A1; (+) strand; PAM type: NRG; PAM sequence: GAG
tggagggttaaggttggggt

SEQ ID NO: 19542 - DNA, 20 bp, Artificial Sequence
  Description of Artificial Sequence: Synthetic oligonucleotide
  Target: COL7A1; (+) strand; PAM type: NRG; PAM sequence: AGG
ggagggttaaggttggggtg

SEQ ID NO: 19543 - DNA, 20 bp, Artificial Sequence
  Description of Artificial Sequence: Synthetic oligonucleotide
  Target: COL7A1; (+) strand; PAM type: NRG; PAM sequence: GAG
agggttaaggttggggtgag

SEQ ID NO: 19544 - DNA, 20 bp, Artificial Sequence
  Description of Artificial Sequence: Synthetic oligonucleotide
  Target: COL7A1; (+) strand; PAM type: NRG; PAM sequence: TAG
aaggttggggtgaggagtca

SEQ ID NO: 19545 - DNA, 20 bp, Artificial Sequence
  Description of Artificial Sequence: Synthetic oligonucleotide
  Target: COL7A1; (+) strand; PAM type: NRG; PAM sequence: AGG
aggttggggtgaggagtcat

SEQ ID NO: 19546 - DNA, 20 bp, Artificial Sequence
  Description of Artificial Sequence: Synthetic oligonucleotide
  Target: COL7A1; (+) strand; PAM type: NRG; PAM sequence: TGG
tggggtgaggagtcataggc

SEQ ID NO: 19547 - DNA, 20 bp, Artificial Sequence
  Description of Artificial Sequence: Synthetic oligonucleotide
  Target: COL7A1; (+) strand; PAM type: NRG; PAM sequence: GGG
ggggtgaggagtcataggct

SEQ ID NO: 19548 - DNA, 20 bp, Artificial Sequence
  Description of Artificial Sequence: Synthetic oligonucleotide
  Target: COL7A1; (+) strand; PAM type: NRG; PAM sequence: CAG
cacatttcgtccatcctctc

SEQ ID NO: 19549 - DNA, 20 bp, Artificial Sequence
  Description of Artificial Sequence: Synthetic oligonucleotide
  Target: COL7A1; (+) strand; PAM type: NRG; PAM sequence: AGG
acatttcgtccatcctctcc

SEQ ID NO: 19550 - DNA, 20 bp, Artificial Sequence
  Description of Artificial Sequence: Synthetic oligonucleotide
  Target: COL7A1; (+) strand; PAM type: NRG; PAM sequence: TGG
catcctctccaggatctccc

SEQ ID NO: 19551 - DNA, 20 bp, Artificial Sequence
  Description of Artificial Sequence: Synthetic oligonucleotide
  Target: COL7A1; (+) strand; PAM type: NRG; PAM sequence: CAG
ctggtctcccttttcaccca

SEQ ID NO: 19552 - DNA, 20 bp, Artificial Sequence
  Description of Artificial Sequence: Synthetic oligonucleotide
  Target: COL7A1; (+) strand; PAM type: NRG; PAM sequence: AGG
tggtctcccttttcacccac

SEQ ID NO: 19553 - DNA, 20 bp, Artificial Sequence
  Description of Artificial Sequence: Synthetic oligonucleotide
  Target: COL7A1; (+) strand; PAM type: NRG; PAM sequence: CAG
acccacaggcccccgaactc

SEQ ID NO: 19554 - DNA, 20 bp, Artificial Sequence
  Description of Artificial Sequence: Synthetic oligonucleotide
  Target: COL7A1; (+) strand; PAM type: NRG; PAM sequence: AGG
cccacaggcccccgaactcc

SEQ ID NO: 19555 - DNA, 20 bp, Artificial Sequence
  Description of Artificial Sequence: Synthetic oligonucleotide
  Target: COL7A1; (+) strand; PAM type: NRG; PAM sequence: AAG
ccgaactccaggtgccccct

SEQ ID NO: 19556 - DNA, 20 bp, Artificial Sequence
  Description of Artificial Sequence: Synthetic oligonucleotide
  Target: COL7A1; (+) strand; PAM type: NRG; PAM sequence: AAG
aactccaggtgccccctaag

SEQ ID NO: 19557 - DNA, 20 bp, Artificial Sequence
  Description of Artificial Sequence: Synthetic oligonucleotide
  Target: COL7A1; (+) strand; PAM type: NRG; PAM sequence: GAG
ctccaggtgccccctaagaa

SEQ ID NO: 19558 - DNA, 20 bp, Artificial Sequence
  Description of Artificial Sequence: Synthetic oligonucleotide
  Target: COL7A1; (+) strand; PAM type: NRG; PAM sequence: CAG
caggtgccccctaagaagag

SEQ ID NO: 19559 - DNA, 20 bp, Artificial Sequence
  Description of Artificial Sequence: Synthetic oligonucleotide
  Target: COL7A1; (+) strand; PAM type: NRG; PAM sequence: TGG
tgccccctaagaagagcagc

SEQ ID NO: 19560 - DNA, 20 bp, Artificial Sequence
  Description of Artificial Sequence: Synthetic oligonucleotide
  Target: COL7A1; (+) strand; PAM type: NRG; PAM sequence: GAG
ctaagaagagcagctggcct

SEQ ID NO: 19561 - DNA, 20 bp, Artificial Sequence
  Description of Artificial Sequence: Synthetic oligonucleotide
  Target: COL7A1; (+) strand; PAM type: NRG; PAM sequence: CAG
gaagagcagctggcctgaga

SEQ ID NO: 19562 - DNA, 20 bp, Artificial Sequence
  Description of Artificial Sequence: Synthetic oligonucleotide
  Target: COL7A1; (+) strand; PAM type: NRG; PAM sequence: CAG
cagaccctcccaatattttg

SEQ ID NO: 19563 - DNA, 20 bp, Artificial Sequence
  Description of Artificial Sequence: Synthetic oligonucleotide
  Target: COL7A1; (+) strand; PAM type: NRG; PAM sequence: AGG
agaccctcccaatattttgc

SEQ ID NO: 19564 - DNA, 20 bp, Artificial Sequence
  Description of Artificial Sequence: Synthetic oligonucleotide
  Target: COL7A1; (+) strand; PAM type: NRG; PAM sequence: CAG
tatgacccgctacactgccc

SEQ ID NO: 19565 - DNA, 20 bp, Artificial Sequence
  Description of Artificial Sequence: Synthetic oligonucleotide
  Target: COL7A1; (+) strand; PAM type: NRG; PAM sequence: AGG
atgacccgctacactgcccc

SEQ ID NO: 19566 - DNA, 20 bp, Artificial Sequence
  Description of Artificial Sequence: Synthetic oligonucleotide
  Target: COL7A1; (+) strand; PAM type: NRG; PAM sequence: CAG
cattactccaaaatccacat

SEQ ID NO: 19567 - DNA, 20 bp, Artificial Sequence
  Description of Artificial Sequence: Synthetic oligonucleotide
  Target: COL7A1; (+) strand; PAM type: NRG; PAM sequence: GAG
ttactccaaaatccacatca

SEQ ID NO: 19568 - DNA, 20 bp, Artificial Sequence
  Description of Artificial Sequence: Synthetic oligonucleotide
  Target: COL7A1; (+) strand; PAM type: NRG; PAM sequence: AGG
tactccaaaatccacatcag

SEQ ID NO: 19569 - DNA, 20 bp, Artificial Sequence
  Description of Artificial Sequence: Synthetic oligonucleotide
  Target: COL7A1; (+) strand; PAM type: NRG; PAM sequence: CAG
catcaccccatgcctccctg

SEQ ID NO: 19570 - DNA, 20 bp, Artificial Sequence
  Description of Artificial Sequence: Synthetic oligonucleotide
  Target: COL7A1; (+) strand; PAM type: NRG; PAM sequence: AGG
atcaccccatgcctccctgc

SEQ ID NO: 19571 - DNA, 20 bp, Artificial Sequence
  Description of Artificial Sequence: Synthetic oligonucleotide
  Target: COL7A1; (+) strand; PAM type: NRG; PAM sequence: GGG
tcaccccatgcctccctgca

SEQ ID NO: 19572 - DNA, 20 bp, Artificial Sequence
  Description of Artificial Sequence: Synthetic oligonucleotide
  Target: COL7A1; (+) strand; PAM type: NRG; PAM sequence: CAG
ccatcaccccttacccccct

SEQ ID NO: 19573 - DNA, 20 bp, Artificial Sequence
  Description of Artificial Sequence: Synthetic oligonucleotide
  Target: COL7A1; (+) strand; PAM type: NRG; PAM sequence: AAG
ccctgttacttctctctgcc

SEQ ID NO: 19574 - DNA, 20 bp, Artificial Sequence
  Description of Artificial Sequence: Synthetic oligonucleotide
  Target: COL7A1; (+) strand; PAM type: NRG; PAM sequence: AAG
tctctgccaagactcacccg

SEQ ID NO: 19575 - DNA, 20 bp, Artificial Sequence
  Description of Artificial Sequence: Synthetic oligonucleotide
  Target: COL7A1; (+) strand; PAM type: NRG; PAM sequence: AGG
ctctgccaagactcacccga

SEQ ID NO: 19576 - DNA, 20 bp, Artificial Sequence
  Description of Artificial Sequence: Synthetic oligonucleotide
  Target: COL7A1; (+) strand; PAM type: NRG; PAM sequence: CAG
gccacgctcgcctgcttttc

SEQ ID NO: 19577 - DNA, 20 bp, Artificial Sequence
  Description of Artificial Sequence: Synthetic oligonucleotide
  Target: COL7A1; (+) strand; PAM type: NRG; PAM sequence: AGG
ccacgctcgcctgcttttcc

SEQ ID NO: 19578 - DNA, 20 bp, Artificial Sequence
  Description of Artificial Sequence: Synthetic oligonucleotide
  Target: COL7A1; (+) strand; PAM type: NRG; PAM sequence: CGG
cctgcttttccaggcaaacc

SEQ ID NO: 19579 - DNA, 20 bp, Artificial Sequence
  Description of Artificial Sequence: Synthetic oligonucleotide
  Target: COL7A1; (+) strand; PAM type: NRG; PAM sequence: GGG
ctgcttttccaggcaaaccc

SEQ ID NO: 19580 - DNA, 20 bp, Artificial Sequence
  Description of Artificial Sequence: Synthetic oligonucleotide
  Target: COL7A1; (+) strand; PAM type: NRG; PAM sequence: TGG
caggcaaacccgggtcaccc

SEQ ID NO: 19581 - DNA, 20 bp, Artificial Sequence
  Description of Artificial Sequence: Synthetic oligonucleotide
  Target: COL7A1; (+) strand; PAM type: NRG; PAM sequence: TAG
aacccgggtcaccctggtga

SEQ ID NO: 19582 - DNA, 20 bp, Artificial Sequence
  Description of Artificial Sequence: Synthetic oligonucleotide
  Target: COL7A1; (+) strand; PAM type: NRG; PAM sequence: GAG
cccgggtcaccctggtgata

SEQ ID NO: 19583 - DNA, 20 bp, Artificial Sequence
  Description of Artificial Sequence: Synthetic oligonucleotide
  Target: COL7A1; (+) strand; PAM type: NRG; PAM sequence: GAG
cgggtcaccctggtgataga

SEQ ID NO: 19584 - DNA, 20 bp, Artificial Sequence
  Description of Artificial Sequence: Synthetic oligonucleotide
  Target: COL7A1; (+) strand; PAM type: NRG; PAM sequence: AAG
caccctggtgatagagagaa

SEQ ID NO: 19585 - DNA, 20 bp, Artificial Sequence
  Description of Artificial Sequence: Synthetic oligonucleotide
  Target: COL7A1; (+) strand; PAM type: NRG; PAM sequence: CAG
gagagaaaagtcatactgca

SEQ ID NO: 19586 - DNA, 20 bp, Artificial Sequence
  Description of Artificial Sequence: Synthetic oligonucleotide
  Target: COL7A1; (+) strand; PAM type: NRG; PAM sequence: AGG
agagaaaagtcatactgcac

SEQ ID NO: 19587 - DNA, 20 bp, Artificial Sequence
  Description of Artificial Sequence: Synthetic oligonucleotide
  Target: COL7A1; (+) strand; PAM type: NRG; PAM sequence: GGG
gagaaaagtcatactgcaca

SEQ ID NO: 19588 - DNA, 20 bp, Artificial Sequence
  Description of Artificial Sequence: Synthetic oligonucleotide
  Target: COL7A1; (+) strand; PAM type: NRG; PAM sequence: CAG
aaaagtcatactgcacaggg

SEQ ID NO: 19589 - DNA, 20 bp, Artificial Sequence
  Description of Artificial Sequence: Synthetic oligonucleotide
  Target: COL7A1; (+) strand; PAM type: NRG; PAM sequence: CAG
gtcatactgcacagggcagt

SEQ ID NO: 19590 - DNA, 20 bp, Artificial Sequence
  Description of Artificial Sequence: Synthetic oligonucleotide
  Target: COL7A1; (+) strand; PAM type: NRG; PAM sequence: AGG
tcatactgcacagggcagtc

SEQ ID NO: 19591 - DNA, 20 bp, Artificial Sequence
  Description of Artificial Sequence: Synthetic oligonucleotide
  Target: COL7A1; (+) strand; PAM type: NRG; PAM sequence: CAG
cagtcaggatctaactcact

SEQ ID NO: 19592 - DNA, 20 bp, Artificial Sequence
  Description of Artificial Sequence: Synthetic oligonucleotide
  Target: COL7A1; (+) strand; PAM type: NRG; PAM sequence: AGG
agtcaggatctaactcactc

SEQ ID NO: 19593 - DNA, 20 bp, Artificial Sequence
  Description of Artificial Sequence: Synthetic oligonucleotide
  Target: COL7A1; (+) strand; PAM type: NRG; PAM sequence: GGG
gtcaggatctaactcactca

SEQ ID NO: 19594 - DNA, 20 bp, Artificial Sequence
  Description of Artificial Sequence: Synthetic oligonucleotide
  Target: COL7A1; (+) strand; PAM type: NRG; PAM sequence: GAG
caggatctaactcactcagg

SEQ ID NO: 19595 - DNA, 20 bp, Artificial Sequence
  Description of Artificial Sequence: Synthetic oligonucleotide
  Target: COL7A1; (+) strand; PAM type: NRG; PAM sequence: GAG
ggatctaactcactcaggga

SEQ ID NO: 19596 - DNA, 20 bp, Artificial Sequence
  Description of Artificial Sequence: Synthetic oligonucleotide
  Target: COL7A1; (+) strand; PAM type: NRG; PAM sequence: AGG
gatctaactcactcagggag

SEQ ID NO: 19597 - DNA, 20 bp, Artificial Sequence
  Description of Artificial Sequence: Synthetic oligonucleotide
  Target: COL7A1; (+) strand; PAM type: NRG; PAM sequence: GGG
atctaactcactcagggaga

SEQ ID NO: 19598 - DNA, 20 bp, Artificial Sequence
  Description of Artificial Sequence: Synthetic oligonucleotide
  Target: COL7A1; (+) strand; PAM type: NRG; PAM sequence: GGG
tctaactcactcagggagag

SEQ ID NO: 19599 - DNA, 20 bp, Artificial Sequence
  Description of Artificial Sequence: Synthetic oligonucleotide
  Target: COL7A1; (+) strand; PAM type: NRG; PAM sequence: CAG
actcactcagggagagggga

SEQ ID NO: 19600 - DNA, 20 bp, Artificial Sequence
  Description of Artificial Sequence: Synthetic oligonucleotide
  Target: COL7A1; (+) strand; PAM type: NRG; PAM sequence: GAG
tcactcagggagaggggaca

SEQ ID NO: 19601 - DNA, 20 bp, Artificial Sequence
  Description of Artificial Sequence: Synthetic oligonucleotide
  Target: COL7A1; (+) strand; PAM type: NRG; PAM sequence: AAG
ctcagggagaggggacagag

SEQ ID NO: 19602 - DNA, 20 bp, Artificial Sequence
  Description of Artificial Sequence: Synthetic oligonucleotide
  Target: COL7A1; (+) strand; PAM type: NRG; PAM sequence: AGG
tcagggagaggggacagaga

SEQ ID NO: 19603 - DNA, 20 bp, Artificial Sequence
  Description of Artificial Sequence: Synthetic oligonucleotide
  Target: COL7A1; (+) strand; PAM type: NRG; PAM sequence: GGG
cagggagaggggacagagaa

SEQ ID NO: 19604 - DNA, 20 bp, Artificial Sequence
  Description of Artificial Sequence: Synthetic oligonucleotide
  Target: COL7A1; (+) strand; PAM type: NRG; PAM sequence: GAG
gaggggacagagaagggtct

SEQ ID NO: 19605 - DNA, 20 bp, Artificial Sequence
  Description of Artificial Sequence: Synthetic oligonucleotide
  Target: COL7A1; (+) strand; PAM type: NRG; PAM sequence: CAG
gggacagagaagggtctgag

SEQ ID NO: 19606 - DNA, 20 bp, Artificial Sequence
  Description of Artificial Sequence: Synthetic oligonucleotide
  Target: COL7A1; (+) strand; PAM type: NRG; PAM sequence: CAG
acagagaagggtctgagcag

SEQ ID NO: 19607 - DNA, 20 bp, Artificial Sequence
  Description of Artificial Sequence: Synthetic oligonucleotide
  Target: COL7A1; (+) strand; PAM type: NRG; PAM sequence: TGG
agaagggtctgagcagcagc

SEQ ID NO: 19608 - DNA, 20 bp, Artificial Sequence
  Description of Artificial Sequence: Synthetic oligonucleotide
  Target: COL7A1; (+) strand; PAM type: NRG; PAM sequence: CAG
gggtctgagcagcagctgga

SEQ ID NO: 19609 - DNA, 20 bp, Artificial Sequence
  Description of Artificial Sequence: Synthetic oligonucleotide
  Target: COL7A1; (+) strand; PAM type: NRG; PAM sequence: AGG
ggtctgagcagcagctggac

SEQ ID NO: 19610 - DNA, 20 bp, Artificial Sequence
  Description of Artificial Sequence: Synthetic oligonucleotide
  Target: COL7A1; (+) strand; PAM type: NRG; PAM sequence: GAG
tctgagcagcagctggacag

SEQ ID NO: 19611 - DNA, 20 bp, Artificial Sequence
  Description of Artificial Sequence: Synthetic oligonucleotide
  Target: COL7A1; (+) strand; PAM type: NRG; PAM sequence: AGG
ctgagcagcagctggacagg

SEQ ID NO: 19612 - DNA, 20 bp, Artificial Sequence
  Description of Artificial Sequence: Synthetic oligonucleotide
  Target: COL7A1; (+) strand; PAM type: NRG; PAM sequence: CAG
agcagcagctggacaggagg

SEQ ID NO: 19613 - DNA, 20 bp, Artificial Sequence
  Description of Artificial Sequence: Synthetic oligonucleotide
  Target: COL7A1; (+) strand; PAM type: NRG; PAM sequence: AGG
gcagcagctggacaggaggc

SEQ ID NO: 19614 - DNA, 20 bp, Artificial Sequence
  Description of Artificial Sequence: Synthetic oligonucleotide
  Target: COL7A1; (+) strand; PAM type: NRG; PAM sequence: GGG
cagcagctggacaggaggca

SEQ ID NO: 19615 - DNA, 20 bp, Artificial Sequence
  Description of Artificial Sequence: Synthetic oligonucleotide
  Target: COL7A1; (+) strand; PAM type: NRG; PAM sequence: GAG
gcagctggacaggaggcagg

SEQ ID NO: 19616 - DNA, 20 bp, Artificial Sequence
  Description of Artificial Sequence: Synthetic oligonucleotide
  Target: COL7A1; (+) strand; PAM type: NRG; PAM sequence: TGG
gctggacaggaggcagggag

SEQ ID NO: 19617 - DNA, 20 bp, Artificial Sequence
  Description of Artificial Sequence: Synthetic oligonucleotide
  Target: COL7A1; (+) strand; PAM type: NRG; PAM sequence: TGG
gacaggaggcagggagtgga

SEQ ID NO: 19618 - DNA, 20 bp, Artificial Sequence
  Description of Artificial Sequence: Synthetic oligonucleotide
  Target: COL7A1; (+) strand; PAM type: NRG; PAM sequence: TGG
cagggagtggatggatgaac

SEQ ID NO: 19619 - DNA, 20 bp, Artificial Sequence
  Description of Artificial Sequence: Synthetic oligonucleotide
  Target: COL7A1; (+) strand; PAM type: NRG; PAM sequence: TGG
ggagtggatggatgaactgg

SEQ ID NO: 19620 - DNA, 20 bp, Artificial Sequence
  Description of Artificial Sequence: Synthetic oligonucleotide
  Target: COL7A1; (+) strand; PAM type: NRG; PAM sequence: GAG
agtggatggatgaactggtg

SEQ ID NO: 19621 - DNA, 20 bp, Artificial Sequence
  Description of Artificial Sequence: Synthetic oligonucleotide
  Target: COL7A1; (+) strand; PAM type: NRG; PAM sequence: CAG
tggatgaactggtggagcac

SEQ ID NO: 19622 - DNA, 20 bp, Artificial Sequence
  Description of Artificial Sequence: Synthetic oligonucleotide
  Target: COL7A1; (+) strand; PAM type: NRG; PAM sequence: TGG
ctggtggagcaccagcctac

SEQ ID NO: 19623 - DNA, 20 bp, Artificial Sequence
  Description of Artificial Sequence: Synthetic oligonucleotide
  Target: COL7A1; (+) strand; PAM type: NRG; PAM sequence: GGG
tggtggagcaccagcctact

SEQ ID NO: 19624 - DNA, 20 bp, Artificial Sequence
  Description of Artificial Sequence: Synthetic oligonucleotide
  Target: COL7A1; (+) strand; PAM type: NRG; PAM sequence: TAG
gcaccagcctactgggatcc

SEQ ID NO: 19625 - DNA, 20 bp, Artificial Sequence
  Description of Artificial Sequence: Synthetic oligonucleotide
  Target: COL7A1; (+) strand; PAM type: NRG; PAM sequence: AAG
gcctactgggatcctagttc

SEQ ID NO: 19626 - DNA, 20 bp, Artificial Sequence
  Description of Artificial Sequence: Synthetic oligonucleotide
  Target: COL7A1; (+) strand; PAM type: NRG; PAM sequence: AGG
cctactgggatcctagttca

SEQ ID NO: 19627 - DNA, 20 bp, Artificial Sequence
  Description of Artificial Sequence: Synthetic oligonucleotide
  Target: COL7A1; (+) strand; PAM type: NRG; PAM sequence: GGG
ctactgggatcctagttcaa

SEQ ID NO: 19628 - DNA, 20 bp, Artificial Sequence
  Description of Artificial Sequence: Synthetic oligonucleotide
  Target: COL7A1; (+) strand; PAM type: NRG; PAM sequence: AAG
gggatcctagttcaagggta

SEQ ID NO: 19629 - DNA, 20 bp, Artificial Sequence
  Description of Artificial Sequence: Synthetic oligonucleotide
  Target: COL7A1; (+) strand; PAM type: NRG; PAM sequence: AGG
ggatcctagttcaagggtaa

SEQ ID NO: 19630 - DNA, 20 bp, Artificial Sequence
  Description of Artificial Sequence: Synthetic oligonucleotide
  Target: COL7A1; (+) strand; PAM type: NRG; PAM sequence: CAG
ctagttcaagggtaaaggat

SEQ ID NO: 19631 - DNA, 20 bp, Artificial Sequence
  Description of Artificial Sequence: Synthetic oligonucleotide
  Target: COL7A1; (+) strand; PAM type: NRG; PAM sequence: CAG
gggtaaaggatcagaaacca

SEQ ID NO: 19632 - DNA, 20 bp, Artificial Sequence
  Description of Artificial Sequence: Synthetic oligonucleotide
  Target: COL7A1; (+) strand; PAM type: NRG; PAM sequence: TGG
taaaggatcagaaaccacag

SEQ ID NO: 19633 - DNA, 20 bp, Artificial Sequence
  Description of Artificial Sequence: Synthetic oligonucleotide
  Target: COL7A1; (+) strand; PAM type: NRG; PAM sequence: GGG
aaaggatcagaaaccacagt

SEQ ID NO: 19634 - DNA, 20 bp, Artificial Sequence
  Description of Artificial Sequence: Synthetic oligonucleotide
  Target: COL7A1; (+) strand; PAM type: NRG; PAM sequence: AAG
ggatcagaaaccacagtggg

SEQ ID NO: 19635 - DNA, 20 bp, Artificial Sequence
  Description of Artificial Sequence: Synthetic oligonucleotide
  Target: COL7A1; (+) strand; PAM type: NRG; PAM sequence: AGG
gatcagaaaccacagtggga

SEQ ID NO: 19636 - DNA, 20 bp, Artificial Sequence
  Description of Artificial Sequence: Synthetic oligonucleotide
  Target: COL7A1; (+) strand; PAM type: NRG; PAM sequence: GAG
tcagaaaccacagtgggaag

SEQ ID NO: 19637 - DNA, 20 bp, Artificial Sequence
  Description of Artificial Sequence: Synthetic oligonucleotide
  Target: COL7A1; (+) strand; PAM type: NRG; PAM sequence: CGG
acagtgggaaggagtctcac

SEQ ID NO: 19638 - DNA, 20 bp, Artificial Sequence
  Description of Artificial Sequence: Synthetic oligonucleotide
  Target: COL7A1; (+) strand; PAM type: NRG; PAM sequence: GAG
agtgggaaggagtctcaccg

SEQ ID NO: 19639 - DNA, 20 bp, Artificial Sequence
  Description of Artificial Sequence: Synthetic oligonucleotide
  Target: COL7A1; (+) strand; PAM type: NRG; PAM sequence: AGG
gtgggaaggagtctcaccgg

SEQ ID NO: 19640 - DNA, 20 bp, Artificial Sequence
  Description of Artificial Sequence: Synthetic oligonucleotide
  Target: COL7A1; (+) strand; PAM type: NRG; PAM sequence: GAG
aacttcaccctgtgaaacat

SEQ ID NO: 19641 - DNA, 20 bp, Artificial Sequence
  Description of Artificial Sequence: Synthetic oligonucleotide
  Target: COL7A1; (+) strand; PAM type: NRG; PAM sequence: GAG
cttcaccctgtgaaacatga

SEQ ID NO: 19642 - DNA, 20 bp, Artificial Sequence
  Description of Artificial Sequence: Synthetic oligonucleotide
  Target: COL7A1; (+) strand; PAM type: NRG; PAM sequence: CAG
accctgtgaaacatgagagt

SEQ ID NO: 19643 - DNA, 20 bp, Artificial Sequence
  Description of Artificial Sequence: Synthetic oligonucleotide
  Target: COL7A1; (+) strand; PAM type: NRG; PAM sequence: TGG
tgaaacatgagagtcagccc

SEQ ID NO: 19644 - DNA, 20 bp, Artificial Sequence
  Description of Artificial Sequence: Synthetic oligonucleotide
  Target: COL7A1; (+) strand; PAM type: NRG; PAM sequence: AAG
tgagagtcagccctggttcc

SEQ ID NO: 19645 - DNA, 20 bp, Artificial Sequence
  Description of Artificial Sequence: Synthetic oligonucleotide
  Target: COL7A1; (+) strand; PAM type: NRG; PAM sequence: TGG
tccaagaacccccatgatgc

SEQ ID NO: 19646 - DNA, 20 bp, Artificial Sequence
  Description of Artificial Sequence: Synthetic oligonucleotide
  Target: COL7A1; (+) strand; PAM type: NRG; PAM sequence: CAG
aacccccatgatgctggcaa

SEQ ID NO: 19647 - DNA, 20 bp, Artificial Sequence
  Description of Artificial Sequence: Synthetic oligonucleotide
  Target: COL7A1; (+) strand; PAM type: NRG; PAM sequence: CAG
cgccatgactcccccgactc

SEQ ID NO: 19648 - DNA, 20 bp, Artificial Sequence
  Description of Artificial Sequence: Synthetic oligonucleotide
  Target: COL7A1; (+) strand; PAM type: NRG; PAM sequence: CGG
agcctcttacatctcgtcct

SEQ ID NO: 19649 - DNA, 20 bp, Artificial Sequence
  Description of Artificial Sequence: Synthetic oligonucleotide
  Target: COL7A1; (+) strand; PAM type: NRG; PAM sequence: GGG
gcctcttacatctcgtcctc

SEQ ID NO: 19650 - DNA, 20 bp, Artificial Sequence
  Description of Artificial Sequence: Synthetic oligonucleotide
  Target: COL7A1; (+) strand; PAM type: NRG; PAM sequence: GGG
cctcttacatctcgtcctcg

SEQ ID NO: 19651 - DNA, 20 bp, Artificial Sequence
  Description of Artificial Sequence: Synthetic oligonucleotide
  Target: COL7A1; (+) strand; PAM type: NRG; PAM sequence: GGG
ctcttacatctcgtcctcgg

SEQ ID NO: 19652 - DNA, 20 bp, Artificial Sequence
  Description of Artificial Sequence: Synthetic oligonucleotide
  Target: COL7A1; (+) strand; PAM type: NRG; PAM sequence: CAG
atctcgtcctcgggggccaa

SEQ ID NO: 19653 - DNA, 20 bp, Artificial Sequence
  Description of Artificial Sequence: Synthetic oligonucleotide
  Target: COL7A1; (+) strand; PAM type: NRG; PAM sequence: AGG
tctcgtcctcgggggccaac

SEQ ID NO: 19654 - DNA, 20 bp, Artificial Sequence
  Description of Artificial Sequence: Synthetic oligonucleotide
  Target: COL7A1; (+) strand; PAM type: NRG; PAM sequence: TGG
cctcgggggccaacaggtcc

SEQ ID NO: 19655 - DNA, 20 bp, Artificial Sequence
  Description of Artificial Sequence: Synthetic oligonucleotide
  Target: COL7A1; (+) strand; PAM type: NRG; PAM sequence: GGG
ctcgggggccaacaggtcct

SEQ ID NO: 19656 - DNA, 20 bp, Artificial Sequence
  Description of Artificial Sequence: Synthetic oligonucleotide
  Target: COL7A1; (+) strand; PAM type: NRG; PAM sequence: GGG
tcgggggccaacaggtcctg

SEQ ID NO: 19657 - DNA, 20 bp, Artificial Sequence
  Description of Artificial Sequence: Synthetic oligonucleotide
  Target: COL7A1; (+) strand; PAM type: NRG; PAM sequence: GGG
cgggggccaacaggtcctgg

SEQ ID NO: 19658 - DNA, 20 bp, Artificial Sequence
  Description of Artificial Sequence: Synthetic oligonucleotide
  Target: COL7A1; (+) strand; PAM type: NRG; PAM sequence: GGG
gggggccaacaggtcctggg

SEQ ID NO: 19659 - DNA, 20 bp, Artificial Sequence
  Description of Artificial Sequence: Synthetic oligonucleotide
  Target: COL7A1; (+) strand; PAM type: NRG; PAM sequence: CAG
gccaacaggtcctggggggc

SEQ ID NO: 19660 - DNA, 20 bp, Artificial Sequence
  Description of Artificial Sequence: Synthetic oligonucleotide
  Target: COL7A1; (+) strand; PAM type: NRG; PAM sequence: AGG
ccaacaggtcctggggggcc

SEQ ID NO: 19661 - DNA, 20 bp, Artificial Sequence
  Description of Artificial Sequence: Synthetic oligonucleotide
  Target: COL7A1; (+) strand; PAM type: NRG; PAM sequence: CAG
tcctggggggccaggccgcc

SEQ ID NO: 19662 - DNA, 20 bp, Artificial Sequence
  Description of Artificial Sequence: Synthetic oligonucleotide
  Target: COL7A1; (+) strand; PAM type: NRG; PAM sequence: AGG
cctggggggccaggccgccc

SEQ ID NO: 19663 - DNA, 20 bp, Artificial Sequence
  Description of Artificial Sequence: Synthetic oligonucleotide
  Target: COL7A1; (+) strand; PAM type: NRG; PAM sequence: GGG
ctggggggccaggccgccca

SEQ ID NO: 19664 - DNA, 20 bp, Artificial Sequence
  Description of Artificial Sequence: Synthetic oligonucleotide
  Target: COL7A1; (+) strand; PAM type: NRG; PAM sequence: CAG
cccagggtctcccttctctc

SEQ ID NO: 19665 - DNA, 20 bp, Artificial Sequence
  Description of Artificial Sequence: Synthetic oligonucleotide
  Target: COL7A1; (+) strand; PAM type: NRG; PAM sequence: AGG
ccagggtctcccttctctcc

SEQ ID NO: 19666 - DNA, 20 bp, Artificial Sequence
  Description of Artificial Sequence: Synthetic oligonucleotide
  Target: COL7A1; (+) strand; PAM type: NRG; PAM sequence: GAG
agggtctcccttctctccag

SEQ ID NO: 19667 - DNA, 20 bp, Artificial Sequence
  Description of Artificial Sequence: Synthetic oligonucleotide
  Target: COL7A1; (+) strand; PAM type: NRG; PAM sequence: AGG
gggtctcccttctctccagg

SEQ ID NO: 19668 - DNA, 20 bp, Artificial Sequence
  Description of Artificial Sequence: Synthetic oligonucleotide
  Target: COL7A1; (+) strand; PAM type: NRG; PAM sequence: GAG
ccttctctccaggaggccct

SEQ ID NO: 19669 - DNA, 20 bp, Artificial Sequence
  Description of Artificial Sequence: Synthetic oligonucleotide
  Target: COL7A1; (+) strand; PAM type: NRG; PAM sequence: TGG
ggaggccctgagtcaccctg

SEQ ID NO: 19670 - DNA, 20 bp, Artificial Sequence
  Description of Artificial Sequence: Synthetic oligonucleotide
  Target: COL7A1; (+) strand; PAM type: NRG; PAM sequence: GAG
aggccctgagtcaccctgtg

SEQ ID NO: 19671 - DNA, 20 bp, Artificial Sequence
  Description of Artificial Sequence: Synthetic oligonucleotide
  Target: COL7A1; (+) strand; PAM type: NRG; PAM sequence: AGG
ggccctgagtcaccctgtgg

SEQ ID NO: 19672 - DNA, 20 bp, Artificial Sequence
  Description of Artificial Sequence: Synthetic oligonucleotide
  Target: COL7A1; (+) strand; PAM type: NRG; PAM sequence: GAG
ccctgagtcaccctgtggag

SEQ ID NO: 19673 - DNA, 20 bp, Artificial Sequence
  Description of Artificial Sequence: Synthetic oligonucleotide
  Target: COL7A1; (+) strand; PAM type: NRG; PAM sequence: AGG
cctgagtcaccctgtggagg

SEQ ID NO: 19674 - DNA, 20 bp, Artificial Sequence
  Description of Artificial Sequence: Synthetic oligonucleotide
  Target: COL7A1; (+) strand; PAM type: NRG; PAM sequence: AAG
agtcaccctgtggaggaggc

SEQ ID NO: 19675 - DNA, 20 bp, Artificial Sequence
  Description of Artificial Sequence: Synthetic oligonucleotide
  Target: COL7A1; (+) strand; PAM type: NRG; PAM sequence: GAG
tcaccctgtggaggaggcaa

SEQ ID NO: 19676 - DNA, 20 bp, Artificial Sequence
  Description of Artificial Sequence: Synthetic oligonucleotide
  Target: COL7A1; (+) strand; PAM type: NRG; PAM sequence: AGG
caccctgtggaggaggcaag

SEQ ID NO: 19677 - DNA, 20 bp, Artificial Sequence
  Description of Artificial Sequence: Synthetic oligonucleotide
  Target: COL7A1; (+) strand; PAM type: NRG; PAM sequence: GGG
accctgtggaggaggcaaga

SEQ ID NO: 19678 - DNA, 20 bp, Artificial Sequence
  Description of Artificial Sequence: Synthetic oligonucleotide
  Target: COL7A1; (+) strand; PAM type: NRG; PAM sequence: GAG
cctgtggaggaggcaagagg

SEQ ID NO: 19679 - DNA, 20 bp, Artificial Sequence
  Description of Artificial Sequence: Synthetic oligonucleotide
  Target: COL7A1; (+) strand; PAM type: NRG; PAM sequence: AGG
ctgtggaggaggcaagaggg

SEQ ID NO: 19680 - DNA, 20 bp, Artificial Sequence
  Description of Artificial Sequence: Synthetic oligonucleotide
  Target: COL7A1; (+) strand; PAM type: NRG; PAM sequence: CAG
gaggcaagagggaggtgatg

SEQ ID NO: 19681 - DNA, 20 bp, Artificial Sequence
  Description of Artificial Sequence: Synthetic oligonucleotide
  Target: COL7A1; (+) strand; PAM type: NRG; PAM sequence: AGG
aggcaagagggaggtgatgc

SEQ ID NO: 19682 - DNA, 20 bp, Artificial Sequence
  Description of Artificial Sequence: Synthetic oligonucleotide
  Target: COL7A1; (+) strand; PAM type: NRG; PAM sequence: AAG
gaggtgatgcaggacgctcg

SEQ ID NO: 19683 - DNA, 20 bp, Artificial Sequence
  Description of Artificial Sequence: Synthetic oligonucleotide
  Target: COL7A1; (+) strand; PAM type: NRG; PAM sequence: AAG
tgatgcaggacgctcgaagc

SEQ ID NO: 19684 - DNA, 20 bp, Artificial Sequence
  Description of Artificial Sequence: Synthetic oligonucleotide
  Target: COL7A1; (+) strand; PAM type: NRG; PAM sequence: CAG
tgcaggacgctcgaagcaag

SEQ ID NO: 19685 - DNA, 20 bp, Artificial Sequence
  Description of Artificial Sequence: Synthetic oligonucleotide
  Target: COL7A1; (+) strand; PAM type: NRG; PAM sequence: AAG
gctcgaagcaagcagttctc

SEQ ID NO: 19686 - DNA, 20 bp, Artificial Sequence
  Description of Artificial Sequence: Synthetic oligonucleotide
  Target: COL7A1; (+) strand; PAM type: NRG; PAM sequence: AGG
ctcgaagcaagcagttctca

SEQ ID NO: 19687 - DNA, 20 bp, Artificial Sequence
  Description of Artificial Sequence: Synthetic oligonucleotide
  Target: COL7A1; (+) strand; PAM type: NRG; PAM sequence: GGG
tcgaagcaagcagttctcaa

SEQ ID NO: 19688 - DNA, 20 bp, Artificial Sequence
  Description of Artificial Sequence: Synthetic oligonucleotide
  Target: COL7A1; (+) strand; PAM type: NRG; PAM sequence: GGG
cgaagcaagcagttctcaag

SEQ ID NO: 19689 - DNA, 20 bp, Artificial Sequence
  Description of Artificial Sequence: Synthetic oligonucleotide
  Target: COL7A1; (+) strand; PAM type: NRG; PAM sequence: GAG
aagcaagcagttctcaaggg

SEQ ID NO: 19690 - DNA, 20 bp, Artificial Sequence
  Description of Artificial Sequence: Synthetic oligonucleotide
  Target: COL7A1; (+) strand; PAM type: NRG; PAM sequence: AGG
agcaagcagttctcaagggg

SEQ ID NO: 19691 - DNA, 20 bp, Artificial Sequence
  Description of Artificial Sequence: Synthetic oligonucleotide
  Target: COL7A1; (+) strand; PAM type: NRG; PAM sequence: GGG
gcaagcagttctcaagggga

SEQ ID NO: 19692 - DNA, 20 bp, Artificial Sequence
  Description of Artificial Sequence: Synthetic oligonucleotide
  Target: COL7A1; (+) strand; PAM type: NRG; PAM sequence: GGG
caagcagttctcaaggggag

SEQ ID NO: 19693 - DNA, 20 bp, Artificial Sequence
  Description of Artificial Sequence: Synthetic oligonucleotide
  Target: COL7A1; (+) strand; PAM type: NRG; PAM sequence: CAG
ttctcaaggggaggggaccc

SEQ ID NO: 19694 - DNA, 20 bp, Artificial Sequence
  Description of Artificial Sequence: Synthetic oligonucleotide
  Target: COL7A1; (+) strand; PAM type: NRG; PAM sequence: AAG
tcaaggggaggggaccccag

SEQ ID NO: 19695 - DNA, 20 bp, Artificial Sequence
  Description of Artificial Sequence: Synthetic oligonucleotide
  Target: COL7A1; (+) strand; PAM type: NRG; PAM sequence: GAG
gaggggaccccagaagcctt

SEQ ID NO: 19696 - DNA, 20 bp, Artificial Sequence
  Description of Artificial Sequence: Synthetic oligonucleotide
  Target: COL7A1; (+) strand; PAM type: NRG; PAM sequence: AGG
aggggaccccagaagccttg

SEQ ID NO: 19697 - DNA, 20 bp, Artificial Sequence
  Description of Artificial Sequence: Synthetic oligonucleotide
  Target: COL7A1; (+) strand; PAM type: NRG; PAM sequence: CAG
ccagaagccttgaggttgcc

SEQ ID NO: 19698 - DNA, 20 bp, Artificial Sequence
  Description of Artificial Sequence: Synthetic oligonucleotide
  Target: COL7A1; (+) strand; PAM type: NRG; PAM sequence: AGG
cagaagccttgaggttgccc

SEQ ID NO: 19699 - DNA, 20 bp, Artificial Sequence
  Description of Artificial Sequence: Synthetic oligonucleotide
  Target: COL7A1; (+) strand; PAM type: NRG; PAM sequence: GGG
agaagccttgaggttgccca

SEQ ID NO: 19700 - DNA, 20 bp, Artificial Sequence
  Description of Artificial Sequence: Synthetic oligonucleotide
  Target: COL7A1; (+) strand; PAM type: NRG; PAM sequence: CGG
cttgaggttgcccagggtaa

SEQ ID NO: 19701 - DNA, 20 bp, Artificial Sequence
  Description of Artificial Sequence: Synthetic oligonucleotide
  Target: COL7A1; (+) strand; PAM type: NRG; PAM sequence: GGG
ttgaggttgcccagggtaac

SEQ ID NO: 19702 - DNA, 20 bp, Artificial Sequence
  Description of Artificial Sequence: Synthetic oligonucleotide
  Target: COL7A1; (+) strand; PAM type: NRG; PAM sequence: TGG
ccagggtaacgggtactcac

SEQ ID NO: 19703 - DNA, 20 bp, Artificial Sequence
  Description of Artificial Sequence: Synthetic oligonucleotide
  Target: COL7A1; (+) strand; PAM type: NRG; PAM sequence: GGG
cagggtaacgggtactcact

SEQ ID NO: 19704 - DNA, 20 bp, Artificial Sequence
  Description of Artificial Sequence: Synthetic oligonucleotide
  Target: COL7A1; (+) strand; PAM type: NRG; PAM sequence: GGG
agggtaacgggtactcactg

SEQ ID NO: 19705 - DNA, 20 bp, Artificial Sequence
  Description of Artificial Sequence: Synthetic oligonucleotide
  Target: COL7A1; (+) strand; PAM type: NRG; PAM sequence: GGG
gggtaacgggtactcactgg

SEQ ID NO: 19706 - DNA, 20 bp, Artificial Sequence
  Description of Artificial Sequence: Synthetic oligonucleotide
  Target: COL7A1; (+) strand; PAM type: NRG; PAM sequence: CAG
cactgggggtcctgctctgc

SEQ ID NO: 19707 - DNA, 20 bp, Artificial Sequence
  Description of Artificial Sequence: Synthetic oligonucleotide
  Target: COL7A1; (+) strand; PAM type: NRG; PAM sequence: AAG
gggggtcctgctctgccagt

SEQ ID NO: 19708 - DNA, 20 bp, Artificial Sequence
  Description of Artificial Sequence: Synthetic oligonucleotide
  Target: COL7A1; (+) strand; PAM type: NRG; PAM sequence: AGG
ggggtcctgctctgccagta

SEQ ID NO: 19709 - DNA, 20 bp, Artificial Sequence
  Description of Artificial Sequence: Synthetic oligonucleotide
  Target: COL7A1; (+) strand; PAM type: NRG; PAM sequence: TGG
tgctctgccagtaaggccaa

SEQ ID NO: 19710 - DNA, 20 bp, Artificial Sequence
  Description of Artificial Sequence: Synthetic oligonucleotide
  Target: COL7A1; (+) strand; PAM type: NRG; PAM sequence: GGG
gctctgccagtaaggccaat

SEQ ID NO: 19711 - DNA, 20 bp, Artificial Sequence
  Description of Artificial Sequence: Synthetic oligonucleotide
  Target: COL7A1; (+) strand; PAM type: NRG; PAM sequence: AAG
gtaaggccaatgggaccctg

SEQ ID NO: 19712 - DNA, 20 bp, Artificial Sequence
  Description of Artificial Sequence: Synthetic oligonucleotide
  Target: COL7A1; (+) strand; PAM type: NRG; PAM sequence: AGG
taaggccaatgggaccctga

SEQ ID NO: 19713 - DNA, 20 bp, Artificial Sequence
  Description of Artificial Sequence: Synthetic oligonucleotide
  Target: COL7A1; (+) strand; PAM type: NRG; PAM sequence: GGG
aaggccaatgggaccctgaa

SEQ ID NO: 19714 - DNA, 20 bp, Artificial Sequence
  Description of Artificial Sequence: Synthetic oligonucleotide
  Target: COL7A1; (+) strand; PAM type: NRG; PAM sequence: GGG
aggccaatgggaccctgaag

SEQ ID NO: 19715 - DNA, 20 bp, Artificial Sequence
  Description of Artificial Sequence: Synthetic oligonucleotide
  Target: COL7A1; (+) strand; PAM type: NRG; PAM sequence: CAG
caatgggaccctgaagggga

SEQ ID NO: 19716 - DNA, 20 bp, Artificial Sequence
  Description of Artificial Sequence: Synthetic oligonucleotide
  Target: COL7A1; (+) strand; PAM type: NRG; PAM sequence: AAG
tgggaccctgaaggggacag

SEQ ID NO: 19717 - DNA, 20 bp, Artificial Sequence
  Description of Artificial Sequence: Synthetic oligonucleotide
  Target: COL7A1; (+) strand; PAM type: NRG; PAM sequence: AGG
gggaccctgaaggggacaga

SEQ ID NO: 19718 - DNA, 20 bp, Artificial Sequence
  Description of Artificial Sequence: Synthetic oligonucleotide
  Target: COL7A1; (+) strand; PAM type: NRG; PAM sequence: GGG
ggaccctgaaggggacagaa

SEQ ID NO: 19719 - DNA, 20 bp, Artificial Sequence
  Description of Artificial Sequence: Synthetic oligonucleotide
  Target: COL7A1; (+) strand; PAM type: NRG; PAM sequence: GGG
gaccctgaaggggacagaag

SEQ ID NO: 19720 - DNA, 20 bp, Artificial Sequence
  Description of Artificial Sequence: Synthetic oligonucleotide
  Target: COL7A1; (+) strand; PAM type: NRG; PAM sequence: GGG
accctgaaggggacagaagg

SEQ ID NO: 19721 - DNA, 20 bp, Artificial Sequence
  Description of Artificial Sequence: Synthetic oligonucleotide
  Target: COL7A1; (+) strand; PAM type: NRG; PAM sequence: GGG
ccctgaaggggacagaaggg

SEQ ID NO: 19722 - DNA, 20 bp, Artificial Sequence
  Description of Artificial Sequence: Synthetic oligonucleotide
  Target: COL7A1; (+) strand; PAM type: NRG; PAM sequence: CAG
tgaaggggacagaagggggg

SEQ ID NO: 19723 - DNA, 20 bp, Artificial Sequence
  Description of Artificial Sequence: Synthetic oligonucleotide
  Target: COL7A1; (+) strand; PAM type: NRG; PAM sequence: AGG
gaaggggacagaaggggggc

SEQ ID NO: 19724 - DNA, 20 bp, Artificial Sequence
  Description of Artificial Sequence: Synthetic oligonucleotide
  Target: COL7A1; (+) strand; PAM type: NRG; PAM sequence: TAG
gacagaaggggggcaggact

SEQ ID NO: 19725 - DNA, 20 bp, Artificial Sequence
  Description of Artificial Sequence: Synthetic oligonucleotide
  Target: COL7A1; (+) strand; PAM type: NRG; PAM sequence: CAG
gaaggggggcaggacttagt

SEQ ID NO: 19726 - DNA, 20 bp, Artificial Sequence
  Description of Artificial Sequence: Synthetic oligonucleotide
  Target: COL7A1; (+) strand; PAM type: NRG; PAM sequence: AGG
aaggggggcaggacttagtc

SEQ ID NO: 19727 - DNA, 20 bp, Artificial Sequence
  Description of Artificial Sequence: Synthetic oligonucleotide
  Target: COL7A1; (+) strand; PAM type: NRG; PAM sequence: GGG
aggggggcaggacttagtca

SEQ ID NO: 19728 - DNA, 20 bp, Artificial Sequence
  Description of Artificial Sequence: Synthetic oligonucleotide
  Target: COL7A1; (+) strand; PAM type: NRG; PAM sequence: CGG
cattcccacattgattcacc

SEQ ID NO: 19729 - DNA, 20 bp, Artificial Sequence
  Description of Artificial Sequence: Synthetic oligonucleotide
  Target: COL7A1; (+) strand; PAM type: NRG; PAM sequence: CAG
acattgattcacccggtctc

SEQ ID NO: 19730 - DNA, 20 bp, Artificial Sequence
  Description of Artificial Sequence: Synthetic oligonucleotide
  Target: COL7A1; (+) strand; PAM type: NRG; PAM sequence: AGG
cattgattcacccggtctcc

SEQ ID NO: 19731 - DNA, 20 bp, Artificial Sequence
  Description of Artificial Sequence: Synthetic oligonucleotide
  Target: COL7A1; (+) strand; PAM type: NRG; PAM sequence: GGG
attgattcacccggtctcca

SEQ ID NO: 19732 - DNA, 20 bp, Artificial Sequence
  Description of Artificial Sequence: Synthetic oligonucleotide
  Target: COL7A1; (+) strand; PAM type: NRG; PAM sequence: TGG
ccggtctccagggtctccct

SEQ ID NO: 19733 - DNA, 20 bp, Artificial Sequence
  Description of Artificial Sequence: Synthetic oligonucleotide
  Target: COL7A1; (+) strand; PAM type: NRG; PAM sequence: GGG
cggtctccagggtctccctt

SEQ ID NO: 19734 - DNA, 20 bp, Artificial Sequence
  Description of Artificial Sequence: Synthetic oligonucleotide
  Target: COL7A1; (+) strand; PAM type: NRG; PAM sequence: GGG
ggtctccagggtctcccttg

SEQ ID NO: 19735 - DNA, 20 bp, Artificial Sequence
  Description of Artificial Sequence: Synthetic oligonucleotide
  Target: COL7A1; (+) strand; PAM type: NRG; PAM sequence: CAG
tccagggtctcccttggggc

SEQ ID NO: 19736 - DNA, 20 bp, Artificial Sequence
  Description of Artificial Sequence: Synthetic oligonucleotide
  Target: COL7A1; (+) strand; PAM type: NRG; PAM sequence: AGG
ccagggtctcccttggggcc

SEQ ID NO: 19737 - DNA, 20 bp, Artificial Sequence
  Description of Artificial Sequence: Synthetic oligonucleotide
  Target: COL7A1; (+) strand; PAM type: NRG; PAM sequence: GGG
cagggtctcccttggggcca

SEQ ID NO: 19738 - DNA, 20 bp, Artificial Sequence
  Description of Artificial Sequence: Synthetic oligonucleotide
  Target: COL7A1; (+) strand; PAM type: NRG; PAM sequence: CAG
tcccttggggccagggtctc

SEQ ID NO: 19739 - DNA, 20 bp, Artificial Sequence
  Description of Artificial Sequence: Synthetic oligonucleotide
  Target: COL7A1; (+) strand; PAM type: NRG; PAM sequence: AGG
cccttggggccagggtctcc

SEQ ID NO: 19740 - DNA, 20 bp, Artificial Sequence
  Description of Artificial Sequence: Synthetic oligonucleotide
  Target: COL7A1; (+) strand; PAM type: NRG; PAM sequence: AAG
ttggggccagggtctccagg

SEQ ID NO: 19741 - DNA, 20 bp, Artificial Sequence
  Description of Artificial Sequence: Synthetic oligonucleotide
  Target: COL7A1; (+) strand; PAM type: NRG; PAM sequence: AAG
cagggtctccaggaagaacc

SEQ ID NO: 19742 - DNA, 20 bp, Artificial Sequence
  Description of Artificial Sequence: Synthetic oligonucleotide
  Target: COL7A1; (+) strand; PAM type: NRG; PAM sequence: CGG
gtctccaggaagaaccaagc

SEQ ID NO: 19743 - DNA, 20 bp, Artificial Sequence
  Description of Artificial Sequence: Synthetic oligonucleotide
  Target: COL7A1; (+) strand; PAM type: NRG; PAM sequence: GGG
tctccaggaagaaccaagcc

SEQ ID NO: 19744 - DNA, 20 bp, Artificial Sequence
  Description of Artificial Sequence: Synthetic oligonucleotide
  Target: COL7A1; (+) strand; PAM type: NRG; PAM sequence: TGG
ccaggaagaaccaagccggg

SEQ ID NO: 19745 - DNA, 20 bp, Artificial Sequence
  Description of Artificial Sequence: Synthetic oligonucleotide
  Target: COL7A1; (+) strand; PAM type: NRG; PAM sequence: GGG
caggaagaaccaagccgggt

SEQ ID NO: 19746 - DNA, 20 bp, Artificial Sequence
  Description of Artificial Sequence: Synthetic oligonucleotide
  Target: COL7A1; (+) strand; PAM type: NRG; PAM sequence: TGG
accaagccgggtgggccctg

SEQ ID NO: 19747 - DNA, 20 bp, Artificial Sequence
  Description of Artificial Sequence: Synthetic oligonucleotide
  Target: COL7A1; (+) strand; PAM type: NRG; PAM sequence: TGG
agccgggtgggccctgtgga

SEQ ID NO: 19748 - DNA, 20 bp, Artificial Sequence
  Description of Artificial Sequence: Synthetic oligonucleotide
  Target: COL7A1; (+) strand; PAM type: NRG; PAM sequence: AAG
cgggtgggccctgtggatgg

SEQ ID NO: 19749 - DNA, 20 bp, Artificial Sequence
  Description of Artificial Sequence: Synthetic oligonucleotide
  Target: COL7A1; (+) strand; PAM type: NRG; PAM sequence: AGG
gggtgggccctgtggatgga

SEQ ID NO: 19750 - DNA, 20 bp, Artificial Sequence
  Description of Artificial Sequence: Synthetic oligonucleotide
  Target: COL7A1; (+) strand; PAM type: NRG; PAM sequence: AAG
ggccctgtggatggaaggat

SEQ ID NO: 19751 - DNA, 20 bp, Artificial Sequence
  Description of Artificial Sequence: Synthetic oligonucleotide
  Target: COL7A1; (+) strand; PAM type: NRG; PAM sequence: AAG
cctgtggatggaaggataag

SEQ ID NO: 19752 - DNA, 20 bp, Artificial Sequence
  Description of Artificial Sequence: Synthetic oligonucleotide
  Target: COL7A1; (+) strand; PAM type: NRG; PAM sequence: CAG
tggatggaaggataagaagt

SEQ ID NO: 19753 - DNA, 20 bp, Artificial Sequence
  Description of Artificial Sequence: Synthetic oligonucleotide
  Target: COL7A1; (+) strand; PAM type: NRG; PAM sequence: AGG
ggatggaaggataagaagtc

SEQ ID NO: 19754 - DNA, 20 bp, Artificial Sequence
  Description of Artificial Sequence: Synthetic oligonucleotide
  Target: COL7A1; (+) strand; PAM type: NRG; PAM sequence: AAG
tggaaggataagaagtcagg

SEQ ID NO: 19755 - DNA, 20 bp, Artificial Sequence
  Description of Artificial Sequence: Synthetic oligonucleotide
  Target: COL7A1; (+) strand; PAM type: NRG; PAM sequence: TGG
cttcacttacccgttcccct

SEQ ID NO: 19756 - DNA, 20 bp, Artificial Sequence
  Description of Artificial Sequence: Synthetic oligonucleotide
  Target: COL7A1; (+) strand; PAM type: NRG; PAM sequence: CGG
tacccgttccccttggactc

SEQ ID NO: 19757 - DNA, 20 bp, Artificial Sequence
  Description of Artificial Sequence: Synthetic oligonucleotide
  Target: COL7A1; (+) strand; PAM type: NRG; PAM sequence: TAG
ccgttccccttggactccgg

SEQ ID NO: 19758 - DNA, 20 bp, Artificial Sequence
  Description of Artificial Sequence: Synthetic oligonucleotide
  Target: COL7A1; (+) strand; PAM type: NRG; PAM sequence: TGG
ttggactccggtagctcctc

SEQ ID NO: 19759 - DNA, 20 bp, Artificial Sequence
  Description of Artificial Sequence: Synthetic oligonucleotide
  Target: COL7A1; (+) strand; PAM type: NRG; PAM sequence: GGG
tggactccggtagctcctct

SEQ ID NO: 19760 - DNA, 20 bp, Artificial Sequence
  Description of Artificial Sequence: Synthetic oligonucleotide
  Target: COL7A1; (+) strand; PAM type: NRG; PAM sequence: CAG
tccggtagctcctctgggcc

SEQ ID NO: 19761 - DNA, 20 bp, Artificial Sequence
  Description of Artificial Sequence: Synthetic oligonucleotide
  Target: COL7A1; (+) strand; PAM type: NRG; PAM sequence: CGG
ggtagctcctctgggcccag

SEQ ID NO: 19762 - DNA, 20 bp, Artificial Sequence
  Description of Artificial Sequence: Synthetic oligonucleotide
  Target: COL7A1; (+) strand; PAM type: NRG; PAM sequence: GGG
gtagctcctctgggcccagc

SEQ ID NO: 19763 - DNA, 20 bp, Artificial Sequence
  Description of Artificial Sequence: Synthetic oligonucleotide
  Target: COL7A1; (+) strand; PAM type: NRG; PAM sequence: TGG
cagcgggccccacatctccc

SEQ ID NO: 19764 - DNA, 20 bp, Artificial Sequence
  Description of Artificial Sequence: Synthetic oligonucleotide
  Target: COL7A1; (+) strand; PAM type: NRG; PAM sequence: GAG
gcgggccccacatctccctg

SEQ ID NO: 19765 - DNA, 20 bp, Artificial Sequence
  Description of Artificial Sequence: Synthetic oligonucleotide
  Target: COL7A1; (+) strand; PAM type: NRG; PAM sequence: AGG
cgggccccacatctccctgg

SEQ ID NO: 19766 - DNA, 20 bp, Artificial Sequence
  Description of Artificial Sequence: Synthetic oligonucleotide
  Target: COL7A1; (+) strand; PAM type: NRG; PAM sequence: AAG
acatctccctggaggtgaca

SEQ ID NO: 19767 - DNA, 20 bp, Artificial Sequence
  Description of Artificial Sequence: Synthetic oligonucleotide
  Target: COL7A1; (+) strand; PAM type: NRG; PAM sequence: CAG
ctggaggtgacaaagaccat

SEQ ID NO: 19768 - DNA, 20 bp, Artificial Sequence
  Description of Artificial Sequence: Synthetic oligonucleotide
  Target: COL7A1; (+) strand; PAM type: NRG; PAM sequence: TAG
gtgacaaagaccatcagtgc

SEQ ID NO: 19769 - DNA, 20 bp, Artificial Sequence
  Description of Artificial Sequence: Synthetic oligonucleotide
  Target: COL7A1; (+) strand; PAM type: NRG; PAM sequence: CAG
aagaccatcagtgctagtcc

SEQ ID NO: 19770 - DNA, 20 bp, Artificial Sequence
  Description of Artificial Sequence: Synthetic oligonucleotide
  Target: COL7A1; (+) strand; PAM type: NRG; PAM sequence: AGG
agaccatcagtgctagtccc

SEQ ID NO: 19771 - DNA, 20 bp, Artificial Sequence
  Description of Artificial Sequence: Synthetic oligonucleotide
  Target: COL7A1; (+) strand; PAM type: NRG; PAM sequence: CAG
tcagtgctagtcccaggctc

SEQ ID NO: 19772 - DNA, 20 bp, Artificial Sequence
  Description of Artificial Sequence: Synthetic oligonucleotide
  Target: COL7A1; (+) strand; PAM type: NRG; PAM sequence: CAG
ctccagttaaccccctgacc

SEQ ID NO: 19773 - DNA, 20 bp, Artificial Sequence
  Description of Artificial Sequence: Synthetic oligonucleotide
  Target: COL7A1; (+) strand; PAM type: NRG; PAM sequence: AAG
agttaaccccctgacccagc

SEQ ID NO: 19774 - DNA, 20 bp, Artificial Sequence
  Description of Artificial Sequence: Synthetic oligonucleotide
  Target: COL7A1; (+) strand; PAM type: NRG; PAM sequence: AAG
agcaagtcctgtgacccccc

SEQ ID NO: 19775 - DNA, 20 bp, Artificial Sequence
  Description of Artificial Sequence: Synthetic oligonucleotide
  Target: COL7A1; (+) strand; PAM type: NRG; PAM sequence: TAG
ctgtgaccccccaagtccca

SEQ ID NO: 19776 - DNA, 20 bp, Artificial Sequence
  Description of Artificial Sequence: Synthetic oligonucleotide
  Target: COL7A1; (+) strand; PAM type: NRG; PAM sequence: TAG
gaccccccaagtcccataga

SEQ ID NO: 19777 - DNA, 20 bp, Artificial Sequence
  Description of Artificial Sequence: Synthetic oligonucleotide
  Target: COL7A1; (+) strand; PAM type: NRG; PAM sequence: AGG
accccccaagtcccatagat

SEQ ID NO: 19778 - DNA, 20 bp, Artificial Sequence
  Description of Artificial Sequence: Synthetic oligonucleotide
  Target: COL7A1; (+) strand; PAM type: NRG; PAM sequence: TAG
catagataggccctatgacc

SEQ ID NO: 19779 - DNA, 20 bp, Artificial Sequence
  Description of Artificial Sequence: Synthetic oligonucleotide
  Target: COL7A1; (+) strand; PAM type: NRG; PAM sequence: TAG
tgacctagacctcaaccctg

SEQ ID NO: 19780 - DNA, 20 bp, Artificial Sequence
  Description of Artificial Sequence: Synthetic oligonucleotide
  Target: COL7A1; (+) strand; PAM type: NRG; PAM sequence: CAG
aacctccccttgccccatac

SEQ ID NO: 19781 - DNA, 20 bp, Artificial Sequence
  Description of Artificial Sequence: Synthetic oligonucleotide
  Target: COL7A1; (+) strand; PAM type: NRG; PAM sequence: AGG
acctccccttgccccatacc

SEQ ID NO: 19782 - DNA, 20 bp, Artificial Sequence
  Description of Artificial Sequence: Synthetic oligonucleotide
  Target: COL7A1; (+) strand; PAM type: NRG; PAM sequence: TGG
caggcttaccttttctcctt

SEQ ID NO: 19783 - DNA, 20 bp, Artificial Sequence
  Description of Artificial Sequence: Synthetic oligonucleotide
  Target: COL7A1; (+) strand; PAM type: NRG; PAM sequence: GGG
aggcttaccttttctccttt

SEQ ID NO: 19784 - DNA, 20 bp, Artificial Sequence
  Description of Artificial Sequence: Synthetic oligonucleotide
  Target: COL7A1; (+) strand; PAM type: NRG; PAM sequence: CAG
taccttttctcctttgggtc

SEQ ID NO: 19785 - DNA, 20 bp, Artificial Sequence
  Description of Artificial Sequence: Synthetic oligonucleotide
  Target: COL7A1; (+) strand; PAM type: NRG; PAM sequence: CAG
ttctcctttgggtccagcaa

SEQ ID NO: 19786 - DNA, 20 bp, Artificial Sequence
  Description of Artificial Sequence: Synthetic oligonucleotide
  Target: COL7A1; (+) strand; PAM type: NRG; PAM sequence: CAG
tcctttgggtccagcaacag

SEQ ID NO: 19787 - DNA, 20 bp, Artificial Sequence
  Description of Artificial Sequence: Synthetic oligonucleotide
  Target: COL7A1; (+) strand; PAM type: NRG; PAM sequence: AGG
cctttgggtccagcaacagc

SEQ ID NO: 19788 - DNA, 20 bp, Artificial Sequence
  Description of Artificial Sequence: Synthetic oligonucleotide
  Target: COL7A1; (+) strand; PAM type: NRG; PAM sequence: CAG
agcaggtccctgaaaacaaa

SEQ ID NO: 19789 - DNA, 20 bp, Artificial Sequence
  Description of Artificial Sequence: Synthetic oligonucleotide
  Target: COL7A1; (+) strand; PAM type: NRG; PAM sequence: AGG
gcaggtccctgaaaacaaac

SEQ ID NO: 19790 - DNA, 20 bp, Artificial Sequence
  Description of Artificial Sequence: Synthetic oligonucleotide
  Target: COL7A1; (+) strand; PAM type: NRG; PAM sequence: CAG
gtccctgaaaacaaacagga

SEQ ID NO: 19791 - DNA, 20 bp, Artificial Sequence
  Description of Artificial Sequence: Synthetic oligonucleotide
  Target: COL7A1; (+) strand; PAM type: NRG; PAM sequence: CAG
gaaaacaaacaggacagata

SEQ ID NO: 19792 - DNA, 20 bp, Artificial Sequence
  Description of Artificial Sequence: Synthetic oligonucleotide
  Target: COL7A1; (+) strand; PAM type: NRG; PAM sequence: TGG
caaacaggacagatacagct

SEQ ID NO: 19793 - DNA, 20 bp, Artificial Sequence
  Description of Artificial Sequence: Synthetic oligonucleotide
  Target: COL7A1; (+) strand; PAM type: NRG; PAM sequence: TGG
gatacagcttggccctgcct

SEQ ID NO: 19794 - DNA, 20 bp, Artificial Sequence
  Description of Artificial Sequence: Synthetic oligonucleotide
  Target: COL7A1; (+) strand; PAM type: NRG; PAM sequence: GGG
atacagcttggccctgcctt

SEQ ID NO: 19795 - DNA, 20 bp, Artificial Sequence
  Description of Artificial Sequence: Synthetic oligonucleotide
  Target: COL7A1; (+) strand; PAM type: NRG; PAM sequence: GGG
tacagcttggccctgccttg

SEQ ID NO: 19796 - DNA, 20 bp, Artificial Sequence
  Description of Artificial Sequence: Synthetic oligonucleotide
  Target: COL7A1; (+) strand; PAM type: NRG; PAM sequence: AAG
gccttggggttgtatgatca

SEQ ID NO: 19797 - DNA, 20 bp, Artificial Sequence
  Description of Artificial Sequence: Synthetic oligonucleotide
  Target: COL7A1; (+) strand; PAM type: NRG; PAM sequence: TGG
tgtatgatcaaagtcttcat

SEQ ID NO: 19798 - DNA, 20 bp, Artificial Sequence
  Description of Artificial Sequence: Synthetic oligonucleotide
  Target: COL7A1; (+) strand; PAM type: NRG; PAM sequence: TGG
gatcaaagtcttcattggaa

SEQ ID NO: 19799 - DNA, 20 bp, Artificial Sequence
  Description of Artificial Sequence: Synthetic oligonucleotide
  Target: COL7A1; (+) strand; PAM type: NRG; PAM sequence: GAG
tcaaagtcttcattggaatg

SEQ ID NO: 19800 - DNA, 20 bp, Artificial Sequence
  Description of Artificial Sequence: Synthetic oligonucleotide
  Target: COL7A1; (+) strand; PAM type: NRG; PAM sequence: AGG
caaagtcttcattggaatgg

SEQ ID NO: 19801 - DNA, 20 bp, Artificial Sequence
  Description of Artificial Sequence: Synthetic oligonucleotide
  Target: COL7A1; (+) strand; PAM type: NRG; PAM sequence: TGG
tcattggaatggaggtcaca

SEQ ID NO: 19802 - DNA, 20 bp, Artificial Sequence
  Description of Artificial Sequence: Synthetic oligonucleotide
  Target: COL7A1; (+) strand; PAM type: NRG; PAM sequence: TGG
gaatggaggtcacatggaat

SEQ ID NO: 19803 - DNA, 20 bp, Artificial Sequence
  Description of Artificial Sequence: Synthetic oligonucleotide
  Target: COL7A1; (+) strand; PAM type: NRG; PAM sequence: AAG
tggaggtcacatggaattgg

SEQ ID NO: 19804 - DNA, 20 bp, Artificial Sequence
  Description of Artificial Sequence: Synthetic oligonucleotide
  Target: COL7A1; (+) strand; PAM type: NRG; PAM sequence: CAG
acatggaattggaagtcata

SEQ ID NO: 19805 - DNA, 20 bp, Artificial Sequence
  Description of Artificial Sequence: Synthetic oligonucleotide
  Target: COL7A1; (+) strand; PAM type: NRG; PAM sequence: CAG
gaattggaagtcatacagct

SEQ ID NO: 19806 - DNA, 20 bp, Artificial Sequence
  Description of Artificial Sequence: Synthetic oligonucleotide
  Target: COL7A1; (+) strand; PAM type: NRG; PAM sequence: CAG
catacagctcagtccccgcc

SEQ ID NO: 19807 - DNA, 20 bp, Artificial Sequence
  Description of Artificial Sequence: Synthetic oligonucleotide
  Target: COL7A1; (+) strand; PAM type: NRG; PAM sequence: AAG
acagctcagtccccgcccag

SEQ ID NO: 19808 - DNA, 20 bp, Artificial Sequence
  Description of Artificial Sequence: Synthetic oligonucleotide
  Target: COL7A1; (+) strand; PAM type: NRG; PAM sequence: CAG
cagtccccgcccagaagtca

SEQ ID NO: 19809 - DNA, 20 bp, Artificial Sequence
  Description of Artificial Sequence: Synthetic oligonucleotide
  Target: COL7A1; (+) strand; PAM type: NRG; PAM sequence: GAG
gtccccgcccagaagtcaca

SEQ ID NO: 19810 - DNA, 20 bp, Artificial Sequence
  Description of Artificial Sequence: Synthetic oligonucleotide
  Target: COL7A1; (+) strand; PAM type: NRG; PAM sequence: CAG
agtcacagagtcaccgctga

SEQ ID NO: 19811 - DNA, 20 bp, Artificial Sequence
  Description of Artificial Sequence: Synthetic oligonucleotide
  Target: COL7A1; (+) strand; PAM type: NRG; PAM sequence: CAG
cacagagtcaccgctgacag

SEQ ID NO: 19812 - DNA, 20 bp, Artificial Sequence
  Description of Artificial Sequence: Synthetic oligonucleotide
  Target: COL7A1; (+) strand; PAM type: NRG; PAM sequence: AGG
acagagtcaccgctgacagc

SEQ ID NO: 19813 - DNA, 20 bp, Artificial Sequence
  Description of Artificial Sequence: Synthetic oligonucleotide
  Target: COL7A1; (+) strand; PAM type: NRG; PAM sequence: GGG
cagagtcaccgctgacagca

SEQ ID NO: 19814 - DNA, 20 bp, Artificial Sequence
  Description of Artificial Sequence: Synthetic oligonucleotide
  Target: COL7A1; (+) strand; PAM type: NRG; PAM sequence: AAG
agtcaccgctgacagcaggg

SEQ ID NO: 19815 - DNA, 20 bp, Artificial Sequence
  Description of Artificial Sequence: Synthetic oligonucleotide
  Target: COL7A1; (+) strand; PAM type: NRG; PAM sequence: AGG
gtcaccgctgacagcaggga

SEQ ID NO: 19816 - DNA, 20 bp, Artificial Sequence
  Description of Artificial Sequence: Synthetic oligonucleotide
  Target: COL7A1; (+) strand; PAM type: NRG; PAM sequence: GGG
tcaccgctgacagcagggaa

SEQ ID NO: 19817 - DNA, 20 bp, Artificial Sequence
  Description of Artificial Sequence: Synthetic oligonucleotide
  Target: COL7A1; (+) strand; PAM type: NRG; PAM sequence: GGG
caccgctgacagcagggaag

SEQ ID NO: 19818 - DNA, 20 bp, Artificial Sequence
  Description of Artificial Sequence: Synthetic oligonucleotide
  Target: COL7A1; (+) strand; PAM type: NRG; PAM sequence: TGG
agggaaggggttatacaaaa

SEQ ID NO: 19819 - DNA, 20 bp, Artificial Sequence
  Description of Artificial Sequence: Synthetic oligonucleotide
  Target: COL7A1; (+) strand; PAM type: NRG; PAM sequence: AAG
atacaaaatggactgacaca

SEQ ID NO: 19820 - DNA, 20 bp, Artificial Sequence
  Description of Artificial Sequence: Synthetic oligonucleotide
  Target: COL7A1; (+) strand; PAM type: NRG; PAM sequence: GAG
acaaaatggactgacacaaa

SEQ ID NO: 19821 - DNA, 20 bp, Artificial Sequence
  Description of Artificial Sequence: Synthetic oligonucleotide
  Target: COL7A1; (+) strand; PAM type: NRG; PAM sequence: TGG
caaagagctcatgacctgca

SEQ ID NO: 19822 - DNA, 20 bp, Artificial Sequence
  Description of Artificial Sequence: Synthetic oligonucleotide
  Target: COL7A1; (+) strand; PAM type: NRG; PAM sequence: CGG
agagctcatgacctgcatgg

SEQ ID NO: 19823 - DNA, 20 bp, Artificial Sequence
  Description of Artificial Sequence: Synthetic oligonucleotide
  Target: COL7A1; (+) strand; PAM type: NRG; PAM sequence: TGG
catgacctgcatggcggtct

SEQ ID NO: 19824 - DNA, 20 bp, Artificial Sequence
  Description of Artificial Sequence: Synthetic oligonucleotide
  Target: COL7A1; (+) strand; PAM type: NRG; PAM sequence: GGG
atgacctgcatggcggtctt

SEQ ID NO: 19825 - DNA, 20 bp, Artificial Sequence
  Description of Artificial Sequence: Synthetic oligonucleotide
  Target: COL7A1; (+) strand; PAM type: NRG; PAM sequence: GGG
tgacctgcatggcggtcttg

SEQ ID NO: 19826 - DNA, 20 bp, Artificial Sequence
  Description of Artificial Sequence: Synthetic oligonucleotide
  Target: COL7A1; (+) strand; PAM type: NRG; PAM sequence: CAG
gcatggcggtcttggggtca

SEQ ID NO: 19827 - DNA, 20 bp, Artificial Sequence
  Description of Artificial Sequence: Synthetic oligonucleotide
  Target: COL7A1; (+) strand; PAM type: NRG; PAM sequence: AGG
catggcggtcttggggtcac

SEQ ID NO: 19828 - DNA, 20 bp, Artificial Sequence
  Description of Artificial Sequence: Synthetic oligonucleotide
  Target: COL7A1; (+) strand; PAM type: NRG; PAM sequence: TAG
gtcttggggtcacaggatca

SEQ ID NO: 19829 - DNA, 20 bp, Artificial Sequence
  Description of Artificial Sequence: Synthetic oligonucleotide
  Target: COL7A1; (+) strand; PAM type: NRG; PAM sequence: AAG
ggggtcacaggatcatagcc

SEQ ID NO: 19830 - DNA, 20 bp, Artificial Sequence
  Description of Artificial Sequence: Synthetic oligonucleotide
  Target: COL7A1; (+) strand; PAM type: NRG; PAM sequence: GAG
ggtcacaggatcatagccaa

SEQ ID NO: 19831 - DNA, 20 bp, Artificial Sequence
  Description of Artificial Sequence: Synthetic oligonucleotide
  Target: COL7A1; (+) strand; PAM type: NRG; PAM sequence: TGG
caggatcatagccaagagtc

SEQ ID NO: 19832 - DNA, 20 bp, Artificial Sequence
  Description of Artificial Sequence: Synthetic oligonucleotide
  Target: COL7A1; (+) strand; PAM type: NRG; PAM sequence: GGG
aggatcatagccaagagtct

SEQ ID NO: 19833 - DNA, 20 bp, Artificial Sequence
  Description of Artificial Sequence: Synthetic oligonucleotide
  Target: COL7A1; (+) strand; PAM type: NRG; PAM sequence: GGG
ggatcatagccaagagtctg

SEQ ID NO: 19834 - DNA, 20 bp, Artificial Sequence
  Description of Artificial Sequence: Synthetic oligonucleotide
  Target: COL7A1; (+) strand; PAM type: NRG; PAM sequence: GGG
gatcatagccaagagtctgg

SEQ ID NO: 19835 - DNA, 20 bp, Artificial Sequence
  Description of Artificial Sequence: Synthetic oligonucleotide
  Target: COL7A1; (+) strand; PAM type: NRG; PAM sequence: CAG
catagccaagagtctggggg

SEQ ID NO: 19836 - DNA, 20 bp, Artificial Sequence
  Description of Artificial Sequence: Synthetic oligonucleotide
  Target: COL7A1; (+) strand; PAM type: NRG; PAM sequence: AGG
atagccaagagtctgggggc

SEQ ID NO: 19837 - DNA, 20 bp, Artificial Sequence
  Description of Artificial Sequence: Synthetic oligonucleotide
  Target: COL7A1; (+) strand; PAM type: NRG; PAM sequence: TAG
aagagtctgggggcaggttc

SEQ ID NO: 19838 - DNA, 20 bp, Artificial Sequence
  Description of Artificial Sequence: Synthetic oligonucleotide
  Target: COL7A1; (+) strand; PAM type: NRG; PAM sequence: CAG
agtctgggggcaggttctag

SEQ ID NO: 19839 - DNA, 20 bp, Artificial Sequence
  Description of Artificial Sequence: Synthetic oligonucleotide
  Target: COL7A1; (+) strand; PAM type: NRG; PAM sequence: AAG
ctgggggcaggttctagcag

SEQ ID NO: 19840 - DNA, 20 bp, Artificial Sequence
  Description of Artificial Sequence: Synthetic oligonucleotide
  Target: COL7A1; (+) strand; PAM type: NRG; PAM sequence: AGG
tgggggcaggttctagcaga

SEQ ID NO: 19841 - DNA, 20 bp, Artificial Sequence
  Description of Artificial Sequence: Synthetic oligonucleotide
  Target: COL7A1; (+) strand; PAM type: NRG; PAM sequence: GAG
ggggcaggttctagcagaag

SEQ ID NO: 19842 - DNA, 20 bp, Artificial Sequence
  Description of Artificial Sequence: Synthetic oligonucleotide
  Target: COL7A1; (+) strand; PAM type: NRG; PAM sequence: GAG
ggcaggttctagcagaagga

SEQ ID NO: 19843 - DNA, 20 bp, Artificial Sequence
  Description of Artificial Sequence: Synthetic oligonucleotide
  Target: COL7A1; (+) strand; PAM type: NRG; PAM sequence: CAG
ttctagcagaaggagagccg

SEQ ID NO: 19844 - DNA, 20 bp, Artificial Sequence
  Description of Artificial Sequence: Synthetic oligonucleotide
  Target: COL7A1; (+) strand; PAM type: NRG; PAM sequence: GAG
ctagcagaaggagagccgca

SEQ ID NO: 19845 - DNA, 20 bp, Artificial Sequence
  Description of Artificial Sequence: Synthetic oligonucleotide
  Target: COL7A1; (+) strand; PAM type: NRG; PAM sequence: CAG
aaggagagccgcagagctcc

SEQ ID NO: 19846 - DNA, 20 bp, Artificial Sequence
  Description of Artificial Sequence: Synthetic oligonucleotide
  Target: COL7A1; (+) strand; PAM type: NRG; PAM sequence: CGG
cagagctcccagcctgctca

SEQ ID NO: 19847 - DNA, 20 bp, Artificial Sequence
  Description of Artificial Sequence: Synthetic oligonucleotide
  Target: COL7A1; (+) strand; PAM type: NRG; PAM sequence: GGG
agagctcccagcctgctcac

SEQ ID NO: 19848 - DNA, 20 bp, Artificial Sequence
  Description of Artificial Sequence: Synthetic oligonucleotide
  Target: COL7A1; (+) strand; PAM type: NRG; PAM sequence: CAG
tcccagcctgctcacgggcc

SEQ ID NO: 19849 - DNA, 20 bp, Artificial Sequence
  Description of Artificial Sequence: Synthetic oligonucleotide
  Target: COL7A1; (+) strand; PAM type: NRG; PAM sequence: TGG
tgctcacgggcccagcactg

SEQ ID NO: 19850 - DNA, 20 bp, Artificial Sequence
  Description of Artificial Sequence: Synthetic oligonucleotide
  Target: COL7A1; (+) strand; PAM type: NRG; PAM sequence: CAG
ggcccagcactgtggaatca

SEQ ID NO: 19851 - DNA, 20 bp, Artificial Sequence
  Description of Artificial Sequence: Synthetic oligonucleotide
  Target: COL7A1; (+) strand; PAM type: NRG; PAM sequence: CAG
agcactgtggaatcacagcc

SEQ ID NO: 19852 - DNA, 20 bp, Artificial Sequence
  Description of Artificial Sequence: Synthetic oligonucleotide
  Target: COL7A1; (+) strand; PAM type: NRG; PAM sequence: TAG
ctgtggaatcacagcccaga

SEQ ID NO: 19853 - DNA, 20 bp, Artificial Sequence
  Description of Artificial Sequence: Synthetic oligonucleotide
  Target: COL7A1; (+) strand; PAM type: NRG; PAM sequence: TAG
acagcccagatagtgttcta

SEQ ID NO: 19854 - DNA, 20 bp, Artificial Sequence
  Description of Artificial Sequence: Synthetic oligonucleotide
  Target: COL7A1; (+) strand; PAM type: NRG; PAM sequence: AGG
cagcccagatagtgttctat

SEQ ID NO: 19855 - DNA, 20 bp, Artificial Sequence
  Description of Artificial Sequence: Synthetic oligonucleotide
  Target: COL7A1; (+) strand; PAM type: NRG; PAM sequence: GAG
gcccagatagtgttctatag

SEQ ID NO: 19856 - DNA, 20 bp, Artificial Sequence
  Description of Artificial Sequence: Synthetic oligonucleotide
  Target: COL7A1; (+) strand; PAM type: NRG; PAM sequence: AGG
cccagatagtgttctatagg

SEQ ID NO: 19857 - DNA, 20 bp, Artificial Sequence
  Description of Artificial Sequence: Synthetic oligonucleotide
  Target: COL7A1; (+) strand; PAM type: NRG; PAM sequence: GGG
ccagatagtgttctatagga

SEQ ID NO: 19858 - DNA, 20 bp, Artificial Sequence
  Description of Artificial Sequence: Synthetic oligonucleotide
  Target: COL7A1; (+) strand; PAM type: NRG; PAM sequence: AAG
ctataggagggtcactgctc

SEQ ID NO: 19859 - DNA, 20 bp, Artificial Sequence
  Description of Artificial Sequence: Synthetic oligonucleotide
  Target: COL7A1; (+) strand; PAM type: NRG; PAM sequence: AGG
tataggagggtcactgctca

SEQ ID NO: 19860 - DNA, 20 bp, Artificial Sequence
  Description of Artificial Sequence: Synthetic oligonucleotide
  Target: COL7A1; (+) strand; PAM type: NRG; PAM sequence: GGG
ataggagggtcactgctcaa

SEQ ID NO: 19861 - DNA, 20 bp, Artificial Sequence
  Description of Artificial Sequence: Synthetic oligonucleotide
  Target: COL7A1; (+) strand; PAM type: NRG; PAM sequence: CAG
ctcaagggctgtgctgtgct

SEQ ID NO: 19862 - DNA, 20 bp, Artificial Sequence
  Description of Artificial Sequence: Synthetic oligonucleotide
  Target: COL7A1; (+) strand; PAM type: NRG; PAM sequence: GAG
caagggctgtgctgtgctca

SEQ ID NO: 19863 - DNA, 20 bp, Artificial Sequence
  Description of Artificial Sequence: Synthetic oligonucleotide
  Target: COL7A1; (+) strand; PAM type: NRG; PAM sequence: CAG
cccgtcactcaccaccactg

SEQ ID NO: 19864 - DNA, 20 bp, Artificial Sequence
  Description of Artificial Sequence: Synthetic oligonucleotide
  Target: COL7A1; (+) strand; PAM type: NRG; PAM sequence: AGG
ccgtcactcaccaccactgc

SEQ ID NO: 19865 - DNA, 20 bp, Artificial Sequence
  Description of Artificial Sequence: Synthetic oligonucleotide
  Target: COL7A1; (+) strand; PAM type: NRG; PAM sequence: GGG
cgtcactcaccaccactgca

SEQ ID NO: 19866 - DNA, 20 bp, Artificial Sequence
  Description of Artificial Sequence: Synthetic oligonucleotide
  Target: COL7A1; (+) strand; PAM type: NRG; PAM sequence: CAG
caccaccactgcagggtccc

SEQ ID NO: 19867 - DNA, 20 bp, Artificial Sequence
  Description of Artificial Sequence: Synthetic oligonucleotide
  Target: COL7A1; (+) strand; PAM type: NRG; PAM sequence: AGG
accaccactgcagggtcccc

SEQ ID NO: 19868 - DNA, 20 bp, Artificial Sequence
  Description of Artificial Sequence: Synthetic oligonucleotide
  Target: COL7A1; (+) strand; PAM type: NRG; PAM sequence: GGG
ccaccactgcagggtcccca

SEQ ID NO: 19869 - DNA, 20 bp, Artificial Sequence
  Description of Artificial Sequence: Synthetic oligonucleotide
  Target: COL7A1; (+) strand; PAM type: NRG; PAM sequence: CAG
tgcagggtccccagggcgac

SEQ ID NO: 19870 - DNA, 20 bp, Artificial Sequence
  Description of Artificial Sequence: Synthetic oligonucleotide
  Target: COL7A1; (+) strand; PAM type: NRG; PAM sequence: AGG
gcagggtccccagggcgacc

SEQ ID NO: 19871 - DNA, 20 bp, Artificial Sequence
  Description of Artificial Sequence: Synthetic oligonucleotide
  Target: COL7A1; (+) strand; PAM type: NRG; PAM sequence: TGG
gggcgaccaggctccccctg

SEQ ID NO: 19872 - DNA, 20 bp, Artificial Sequence
  Description of Artificial Sequence: Synthetic oligonucleotide
  Target: COL7A1; (+) strand; PAM type: NRG; PAM sequence: GAG
gcgaccaggctccccctgtg

SEQ ID NO: 19873 - DNA, 20 bp, Artificial Sequence
  Description of Artificial Sequence: Synthetic oligonucleotide
  Target: COL7A1; (+) strand; PAM type: NRG; PAM sequence: GAG
gaccaggctccccctgtgga

SEQ ID NO: 19874 - DNA, 20 bp, Artificial Sequence
  Description of Artificial Sequence: Synthetic oligonucleotide
  Target: COL7A1; (+) strand; PAM type: NRG; PAM sequence: GAG
ccaggctccccctgtggaga

SEQ ID NO: 19875 - DNA, 20 bp, Artificial Sequence
  Description of Artificial Sequence: Synthetic oligonucleotide
  Target: COL7A1; (+) strand; PAM type: NRG; PAM sequence: AGG
caggctccccctgtggagag

SEQ ID NO: 19876 - DNA, 20 bp, Artificial Sequence
  Description of Artificial Sequence: Synthetic oligonucleotide
  Target: COL7A1; (+) strand; PAM type: NRG; PAM sequence: TAG
ctccccctgtggagagagga

SEQ ID NO: 19877 - DNA, 20 bp, Artificial Sequence
  Description of Artificial Sequence: Synthetic oligonucleotide
  Target: COL7A1; (+) strand; PAM type: NRG; PAM sequence: AGG
tccccctgtggagagaggat

SEQ ID NO: 19878 - DNA, 20 bp, Artificial Sequence
  Description of Artificial Sequence: Synthetic oligonucleotide
  Target: COL7A1; (+) strand; PAM type: NRG; PAM sequence: GAG
cccctgtggagagaggatag

SEQ ID NO: 19879 - DNA, 20 bp, Artificial Sequence
  Description of Artificial Sequence: Synthetic oligonucleotide
  Target: COL7A1; (+) strand; PAM type: NRG; PAM sequence: CAG
ctgtggagagaggataggag

SEQ ID NO: 19880 - DNA, 20 bp, Artificial Sequence
  Description of Artificial Sequence: Synthetic oligonucleotide
  Target: COL7A1; (+) strand; PAM type: NRG; PAM sequence: AGG
tgtggagagaggataggagc

SEQ ID NO: 19881 - DNA, 20 bp, Artificial Sequence
  Description of Artificial Sequence: Synthetic oligonucleotide
  Target: COL7A1; (+) strand; PAM type: NRG; PAM sequence: GGG
gtggagagaggataggagca

SEQ ID NO: 19882 - DNA, 20 bp, Artificial Sequence
  Description of Artificial Sequence: Synthetic oligonucleotide
  Target: COL7A1; (+) strand; PAM type: NRG; PAM sequence: CAG
agagaggataggagcaggga

SEQ ID NO: 19883 - DNA, 20 bp, Artificial Sequence
  Description of Artificial Sequence: Synthetic oligonucleotide
  Target: COL7A1; (+) strand; PAM type: NRG; PAM sequence: AGG
gagaggataggagcagggac

SEQ ID NO: 19884 - DNA, 20 bp, Artificial Sequence
  Description of Artificial Sequence: Synthetic oligonucleotide
  Target: COL7A1; (+) strand; PAM type: NRG; PAM sequence: CAG
ggataggagcagggacaggt

SEQ ID NO: 19885 - DNA, 20 bp, Artificial Sequence
  Description of Artificial Sequence: Synthetic oligonucleotide
  Target: COL7A1; (+) strand; PAM type: NRG; PAM sequence: AGG
gataggagcagggacaggtc

SEQ ID NO: 19886 - DNA, 20 bp, Artificial Sequence
  Description of Artificial Sequence: Synthetic oligonucleotide
  Target: COL7A1; (+) strand; PAM type: NRG; PAM sequence: GGG
ataggagcagggacaggtca

SEQ ID NO: 19887 - DNA, 20 bp, Artificial Sequence
  Description of Artificial Sequence: Synthetic oligonucleotide
  Target: COL7A1; (+) strand; PAM type: NRG; PAM sequence: GAG
aggagcagggacaggtcagg

SEQ ID NO: 19888 - DNA, 20 bp, Artificial Sequence
  Description of Artificial Sequence: Synthetic oligonucleotide
  Target: COL7A1; (+) strand; PAM type: NRG; PAM sequence: TAG
ggacaggtcagggagtcacc

SEQ ID NO: 19889 - DNA, 20 bp, Artificial Sequence
  Description of Artificial Sequence: Synthetic oligonucleotide
  Target: COL7A1; (+) strand; PAM type: NRG; PAM sequence: AGG
gacaggtcagggagtcacct

SEQ ID NO: 19890 - DNA, 20 bp, Artificial Sequence
  Description of Artificial Sequence: Synthetic oligonucleotide
  Target: COL7A1; (+) strand; PAM type: NRG; PAM sequence: GAG
caggtcagggagtcacctag

SEQ ID NO: 19891 - DNA, 20 bp, Artificial Sequence
  Description of Artificial Sequence: Synthetic oligonucleotide
  Target: COL7A1; (+) strand; PAM type: NRG; PAM sequence: CAG
cacctaggagcccaaaatcc

SEQ ID NO: 19892 - DNA, 20 bp, Artificial Sequence
  Description of Artificial Sequence: Synthetic oligonucleotide
  Target: COL7A1; (+) strand; PAM type: NRG; PAM sequence: TAG
tgtcccatctgccacatccc

SEQ ID NO: 19893 - DNA, 20 bp, Artificial Sequence
  Description of Artificial Sequence: Synthetic oligonucleotide
  Target: COL7A1; (+) strand; PAM type: NRG; PAM sequence: CAG
atctgccacatccctagtac

SEQ ID NO: 19894 - DNA, 20 bp, Artificial Sequence
  Description of Artificial Sequence: Synthetic oligonucleotide
  Target: COL7A1; (+) strand; PAM type: NRG; PAM sequence: CAG
gccacatccctagtaccaga

SEQ ID NO: 19895 - DNA, 20 bp, Artificial Sequence
  Description of Artificial Sequence: Synthetic oligonucleotide
  Target: COL7A1; (+) strand; PAM type: NRG; PAM sequence: CAG
gtaccagacagtgccacccc

SEQ ID NO: 19896 - DNA, 20 bp, Artificial Sequence
  Description of Artificial Sequence: Synthetic oligonucleotide
  Target: COL7A1; (+) strand; PAM type: NRG; PAM sequence: GAG
agacagtgccacccccagcc

SEQ ID NO: 19897 - DNA, 20 bp, Artificial Sequence
  Description of Artificial Sequence: Synthetic oligonucleotide
  Target: COL7A1; (+) strand; PAM type: NRG; PAM sequence: AGG
gacagtgccacccccagccg

SEQ ID NO: 19898 - DNA, 20 bp, Artificial Sequence
  Description of Artificial Sequence: Synthetic oligonucleotide
  Target: COL7A1; (+) strand; PAM type: NRG; PAM sequence: TGG
gaggacccaccttctctcct

SEQ ID NO: 19899 - DNA, 20 bp, Artificial Sequence
  Description of Artificial Sequence: Synthetic oligonucleotide
  Target: COL7A1; (+) strand; PAM type: NRG; PAM sequence: CGG
gacccaccttctctccttgg

SEQ ID NO: 19900 - DNA, 20 bp, Artificial Sequence
  Description of Artificial Sequence: Synthetic oligonucleotide
  Target: COL7A1; (+) strand; PAM type: NRG; PAM sequence: CAG
caccttctctccttggcggc

SEQ ID NO: 19901 - DNA, 20 bp, Artificial Sequence
  Description of Artificial Sequence: Synthetic oligonucleotide
  Target: COL7A1; (+) strand; PAM type: NRG; PAM sequence: TGG
cttctctccttggcggccag

SEQ ID NO: 19902 - DNA, 20 bp, Artificial Sequence
  Description of Artificial Sequence: Synthetic oligonucleotide
  Target: COL7A1; (+) strand; PAM type: NRG; PAM sequence: GGG
ttctctccttggcggccagt

SEQ ID NO: 19903 - DNA, 20 bp, Artificial Sequence
  Description of Artificial Sequence: Synthetic oligonucleotide
  Target: COL7A1; (+) strand; PAM type: NRG; PAM sequence: TGG
ccttggcggccagtgggtcc

SEQ ID NO: 19904 - DNA, 20 bp, Artificial Sequence
  Description of Artificial Sequence: Synthetic oligonucleotide
  Target: COL7A1; (+) strand; PAM type: NRG; PAM sequence: TGG
tggcggccagtgggtcctgg

SEQ ID NO: 19905 - DNA, 20 bp, Artificial Sequence
  Description of Artificial Sequence: Synthetic oligonucleotide
  Target: COL7A1; (+) strand; PAM type: NRG; PAM sequence: TAG
gtcctggtggcccctgaatg

SEQ ID NO: 19906 - DNA, 20 bp, Artificial Sequence
  Description of Artificial Sequence: Synthetic oligonucleotide
  Target: COL7A1; (+) strand; PAM type: NRG; PAM sequence: GAG
cctggtggcccctgaatgta

SEQ ID NO: 19907 - DNA, 20 bp, Artificial Sequence
  Description of Artificial Sequence: Synthetic oligonucleotide
  Target: COL7A1; (+) strand; PAM type: NRG; PAM sequence: AAG
gtggcccctgaatgtagaga

SEQ ID NO: 19908 - DNA, 20 bp, Artificial Sequence
  Description of Artificial Sequence: Synthetic oligonucleotide
  Target: COL7A1; (+) strand; PAM type: NRG; PAM sequence: GAG
cctgaatgtagagaaagtgt

SEQ ID NO: 19909 - DNA, 20 bp, Artificial Sequence
  Description of Artificial Sequence: Synthetic oligonucleotide
  Target: COL7A1; (+) strand; PAM type: NRG; PAM sequence: CAG
atgtagagaaagtgtgagcc

SEQ ID NO: 19910 - DNA, 20 bp, Artificial Sequence
  Description of Artificial Sequence: Synthetic oligonucleotide
  Target: COL7A1; (+) strand; PAM type: NRG; PAM sequence: AGG
tgtagagaaagtgtgagccc

SEQ ID NO: 19911 - DNA, 20 bp, Artificial Sequence
  Description of Artificial Sequence: Synthetic oligonucleotide
  Target: COL7A1; (+) strand; PAM type: NRG; PAM sequence: GAG
tagagaaagtgtgagcccag

SEQ ID NO: 19912 - DNA, 20 bp, Artificial Sequence
  Description of Artificial Sequence: Synthetic oligonucleotide
  Target: COL7A1; (+) strand; PAM type: NRG; PAM sequence: AGG
agagaaagtgtgagcccagg

SEQ ID NO: 19913 - DNA, 20 bp, Artificial Sequence
  Description of Artificial Sequence: Synthetic oligonucleotide
  Target: COL7A1; (+) strand; PAM type: NRG; PAM sequence: GGG
gagaaagtgtgagcccagga

SEQ ID NO: 19914 - DNA, 20 bp, Artificial Sequence
  Description of Artificial Sequence: Synthetic oligonucleotide
  Target: COL7A1; (+) strand; PAM type: NRG; PAM sequence: GGG
agaaagtgtgagcccaggag

SEQ ID NO: 19915 - DNA, 20 bp, Artificial Sequence
  Description of Artificial Sequence: Synthetic oligonucleotide
  Target: COL7A1; (+) strand; PAM type: NRG; PAM sequence: AAG
aagtgtgagcccaggagggg

SEQ ID NO: 19916 - DNA, 20 bp, Artificial Sequence
  Description of Artificial Sequence: Synthetic oligonucleotide
  Target: COL7A1; (+) strand; PAM type: NRG; PAM sequence: AGG
agtgtgagcccaggagggga

SEQ ID NO: 19917 - DNA, 20 bp, Artificial Sequence
  Description of Artificial Sequence: Synthetic oligonucleotide
  Target: COL7A1; (+) strand; PAM type: NRG; PAM sequence: GGG
gtgtgagcccaggaggggaa

SEQ ID NO: 19918 - DNA, 20 bp, Artificial Sequence
  Description of Artificial Sequence: Synthetic oligonucleotide
  Target: COL7A1; (+) strand; PAM type: NRG; PAM sequence: AAG
gagcccaggaggggaaggga

SEQ ID NO: 19919 - DNA, 20 bp, Artificial Sequence
  Description of Artificial Sequence: Synthetic oligonucleotide
  Target: COL7A1; (+) strand; PAM type: NRG; PAM sequence: AGG
agcccaggaggggaagggaa

SEQ ID NO: 19920 - DNA, 20 bp, Artificial Sequence
  Description of Artificial Sequence: Synthetic oligonucleotide
  Target: COL7A1; (+) strand; PAM type: NRG; PAM sequence: GGG
gcccaggaggggaagggaaa

SEQ ID NO: 19921 - DNA, 20 bp, Artificial Sequence
  Description of Artificial Sequence: Synthetic oligonucleotide
  Target: COL7A1; (+) strand; PAM type: NRG; PAM sequence: GGG
cccaggaggggaagggaaag

SEQ ID NO: 19922 - DNA, 20 bp, Artificial Sequence
  Description of Artificial Sequence: Synthetic oligonucleotide
  Target: COL7A1; (+) strand; PAM type: NRG; PAM sequence: GAG
caggaggggaagggaaaggg

SEQ ID NO: 19923 - DNA, 20 bp, Artificial Sequence
  Description of Artificial Sequence: Synthetic oligonucleotide
  Target: COL7A1; (+) strand; PAM type: NRG; PAM sequence: AGG
aggaggggaagggaaagggg

SEQ ID NO: 19924 - DNA, 20 bp, Artificial Sequence
  Description of Artificial Sequence: Synthetic oligonucleotide
  Target: COL7A1; (+) strand; PAM type: NRG; PAM sequence: GGG
ggaggggaagggaaagggga

SEQ ID NO: 19925 - DNA, 20 bp, Artificial Sequence
  Description of Artificial Sequence: Synthetic oligonucleotide
  Target: COL7A1; (+) strand; PAM type: NRG; PAM sequence: AAG
gaaaggggagggacacacaa

SEQ ID NO: 19926 - DNA, 20 bp, Artificial Sequence
  Description of Artificial Sequence: Synthetic oligonucleotide
  Target: COL7A1; (+) strand; PAM type: NRG; PAM sequence: TGG
acacacaaaagtcccactcc

SEQ ID NO: 19927 - DNA, 20 bp, Artificial Sequence
  Description of Artificial Sequence: Synthetic oligonucleotide
  Target: COL7A1; (+) strand; PAM type: NRG; PAM sequence: CAG
tcccactcctggtcccacca

SEQ ID NO: 19928 - DNA, 20 bp, Artificial Sequence
  Description of Artificial Sequence: Synthetic oligonucleotide
  Target: COL7A1; (+) strand; PAM type: NRG; PAM sequence: CAG
tcctggtcccaccacagtca

SEQ ID NO: 19929 - DNA, 20 bp, Artificial Sequence
  Description of Artificial Sequence: Synthetic oligonucleotide
  Target: COL7A1; (+) strand; PAM type: NRG; PAM sequence: CAG
ccacagtcacagactcactt

SEQ ID NO: 19930 - DNA, 20 bp, Artificial Sequence
  Description of Artificial Sequence: Synthetic oligonucleotide
  Target: COL7A1; (+) strand; PAM type: NRG; PAM sequence: AGG
cacagtcacagactcacttc

SEQ ID NO: 19931 - DNA, 20 bp, Artificial Sequence
  Description of Artificial Sequence: Synthetic oligonucleotide
  Target: COL7A1; (+) strand; PAM type: NRG; PAM sequence: TGG
cagactcacttcaggaccct

SEQ ID NO: 19932 - DNA, 20 bp, Artificial Sequence
  Description of Artificial Sequence: Synthetic oligonucleotide
  Target: COL7A1; (+) strand; PAM type: NRG; PAM sequence: CAG
cacttcaggacccttggctc

SEQ ID NO: 19933 - DNA, 20 bp, Artificial Sequence
  Description of Artificial Sequence: Synthetic oligonucleotide
  Target: COL7A1; (+) strand; PAM type: NRG; PAM sequence: AGG
acttcaggacccttggctcc

SEQ ID NO: 19934 - DNA, 20 bp, Artificial Sequence
  Description of Artificial Sequence: Synthetic oligonucleotide
  Target: COL7A1; (+) strand; PAM type: NRG; PAM sequence: CAG
acccttggctccaggacgtc

SEQ ID NO: 19935 - DNA, 20 bp, Artificial Sequence
  Description of Artificial Sequence: Synthetic oligonucleotide
  Target: COL7A1; (+) strand; PAM type: NRG; PAM sequence: TGG
ccaggacgtccagcaacccc

SEQ ID NO: 19936 - DNA, 20 bp, Artificial Sequence
  Description of Artificial Sequence: Synthetic oligonucleotide
  Target: COL7A1; (+) strand; PAM type: NRG; PAM sequence: CAG
ggacgtccagcaacccctgg

SEQ ID NO: 19937 - DNA, 20 bp, Artificial Sequence
  Description of Artificial Sequence: Synthetic oligonucleotide
  Target: COL7A1; (+) strand; PAM type: NRG; PAM sequence: TGG
cagcaacccctggcagcccc

SEQ ID NO: 19938 - DNA, 20 bp, Artificial Sequence
  Description of Artificial Sequence: Synthetic oligonucleotide
  Target: COL7A1; (+) strand; PAM type: NRG; PAM sequence: GAG
gcaacccctggcagcccctg

SEQ ID NO: 19939 - DNA, 20 bp, Artificial Sequence
  Description of Artificial Sequence: Synthetic oligonucleotide
  Target: COL7A1; (+) strand; PAM type: NRG; PAM sequence: AGG
caacccctggcagcccctgg

SEQ ID NO: 19940 - DNA, 20 bp, Artificial Sequence
  Description of Artificial Sequence: Synthetic oligonucleotide
  Target: COL7A1; (+) strand; PAM type: NRG; PAM sequence: GAG
acccctggcagcccctggag

SEQ ID NO: 19941 - DNA, 20 bp, Artificial Sequence
  Description of Artificial Sequence: Synthetic oligonucleotide
  Target: COL7A1; (+) strand; PAM type: NRG; PAM sequence: GAG
ccctggcagcccctggagga

SEQ ID NO: 19942 - DNA, 20 bp, Artificial Sequence
  Description of Artificial Sequence: Synthetic oligonucleotide
  Target: COL7A1; (+) strand; PAM type: NRG; PAM sequence: AGG
cctggcagcccctggaggag

SEQ ID NO: 19943 - DNA, 20 bp, Artificial Sequence
  Description of Artificial Sequence: Synthetic oligonucleotide
  Target: COL7A1; (+) strand; PAM type: NRG; PAM sequence: AAG
ggcagcccctggaggagagg

SEQ ID NO: 19944 - DNA, 20 bp, Artificial Sequence
  Description of Artificial Sequence: Synthetic oligonucleotide
  Target: COL7A1; (+) strand; PAM type: NRG; PAM sequence: AGG
gcagcccctggaggagagga

SEQ ID NO: 19945 - DNA, 20 bp, Artificial Sequence
  Description of Artificial Sequence: Synthetic oligonucleotide
  Target: COL7A1; (+) strand; PAM type: NRG; PAM sequence: GGG
cagcccctggaggagaggaa

SEQ ID NO: 19946 - DNA, 20 bp, Artificial Sequence
  Description of Artificial Sequence: Synthetic oligonucleotide
  Target: COL7A1; (+) strand; PAM type: NRG; PAM sequence: AAG
cccctggaggagaggaaggg

SEQ ID NO: 19947 - DNA, 20 bp, Artificial Sequence
  Description of Artificial Sequence: Synthetic oligonucleotide
  Target: COL7A1; (+) strand; PAM type: NRG; PAM sequence: GAG
cctggaggagaggaagggaa

SEQ ID NO: 19948 - DNA, 20 bp, Artificial Sequence
  Description of Artificial Sequence: Synthetic oligonucleotide
  Target: COL7A1; (+) strand; PAM type: NRG; PAM sequence: CAG
agaggaagggaagagctgtg

SEQ ID NO: 19949 - DNA, 20 bp, Artificial Sequence
  Description of Artificial Sequence: Synthetic oligonucleotide
  Target: COL7A1; (+) strand; PAM type: NRG; PAM sequence: AGG
gaggaagggaagagctgtgc

SEQ ID NO: 19950 - DNA, 20 bp, Artificial Sequence
  Description of Artificial Sequence: Synthetic oligonucleotide
  Target: COL7A1; (+) strand; PAM type: NRG; PAM sequence: TGG
gaagggaagagctgtgcagg

SEQ ID NO: 19951 - DNA, 20 bp, Artificial Sequence
  Description of Artificial Sequence: Synthetic oligonucleotide
  Target: COL7A1; (+) strand; PAM type: NRG; PAM sequence: GGG
aagggaagagctgtgcaggt

SEQ ID NO: 19952 - DNA, 20 bp, Artificial Sequence
  Description of Artificial Sequence: Synthetic oligonucleotide
  Target: COL7A1; (+) strand; PAM type: NRG; PAM sequence: TGG
ggaagagctgtgcaggtggg

SEQ ID NO: 19953 - DNA, 20 bp, Artificial Sequence
  Description of Artificial Sequence: Synthetic oligonucleotide
  Target: COL7A1; (+) strand; PAM type: NRG; PAM sequence: GGG
gaagagctgtgcaggtgggt

SEQ ID NO: 19954 - DNA, 20 bp, Artificial Sequence
  Description of Artificial Sequence: Synthetic oligonucleotide
  Target: COL7A1; (+) strand; PAM type: NRG; PAM sequence: GGG
aagagctgtgcaggtgggtg

SEQ ID NO: 19955 - DNA, 20 bp, Artificial Sequence
  Description of Artificial Sequence: Synthetic oligonucleotide
  Target: COL7A1; (+) strand; PAM type: NRG; PAM sequence: CGG
gctgtgcaggtgggtgggga

SEQ ID NO: 19956 - DNA, 20 bp, Artificial Sequence
  Description of Artificial Sequence: Synthetic oligonucleotide
  Target: COL7A1; (+) strand; PAM type: NRG; PAM sequence: GGG
ctgtgcaggtgggtggggac

SEQ ID NO: 19957 - DNA, 20 bp, Artificial Sequence
  Description of Artificial Sequence: Synthetic oligonucleotide
  Target: COL7A1; (+) strand; PAM type: NRG; PAM sequence: GGG
tgtgcaggtgggtggggacg

SEQ ID NO: 19958 - DNA, 20 bp, Artificial Sequence
  Description of Artificial Sequence: Synthetic oligonucleotide
  Target: COL7A1; (+) strand; PAM type: NRG; PAM sequence: GGG
gtgcaggtgggtggggacgg

SEQ ID NO: 19959 - DNA, 20 bp, Artificial Sequence
  Description of Artificial Sequence: Synthetic oligonucleotide
  Target: COL7A1; (+) strand; PAM type: NRG; PAM sequence: TGG
gtgggtggggacgggggata

SEQ ID NO: 19960 - DNA, 20 bp, Artificial Sequence
  Description of Artificial Sequence: Synthetic oligonucleotide
  Target: COL7A1; (+) strand; PAM type: NRG; PAM sequence: CAG
gtggggacgggggatatgga

SEQ ID NO: 19961 - DNA, 20 bp, Artificial Sequence
  Description of Artificial Sequence: Synthetic oligonucleotide
  Target: COL7A1; (+) strand; PAM type: NRG; PAM sequence: CAG
ggacgggggatatggacaga

SEQ ID NO: 19962 - DNA, 20 bp, Artificial Sequence
  Description of Artificial Sequence: Synthetic oligonucleotide
  Target: COL7A1; (+) strand; PAM type: NRG; PAM sequence: AGG
gacgggggatatggacagac

SEQ ID NO: 19963 - DNA, 20 bp, Artificial Sequence
  Description of Artificial Sequence: Synthetic oligonucleotide
  Target: COL7A1; (+) strand; PAM type: NRG; PAM sequence: GGG
acgggggatatggacagaca

SEQ ID NO: 19964 - DNA, 20 bp, Artificial Sequence
  Description of Artificial Sequence: Synthetic oligonucleotide
  Target: COL7A1; (+) strand; PAM type: NRG; PAM sequence: TAG
gggatatggacagacagggc

SEQ ID NO: 19965 - DNA, 20 bp, Artificial Sequence
  Description of Artificial Sequence: Synthetic oligonucleotide
  Target: COL7A1; (+) strand; PAM type: NRG; PAM sequence: GAG
gatatggacagacagggcta

SEQ ID NO: 19966 - DNA, 20 bp, Artificial Sequence
  Description of Artificial Sequence: Synthetic oligonucleotide
  Target: COL7A1; (+) strand; PAM type: NRG; PAM sequence: AGG
atatggacagacagggctag

SEQ ID NO: 19967 - DNA, 20 bp, Artificial Sequence
  Description of Artificial Sequence: Synthetic oligonucleotide
  Target: COL7A1; (+) strand; PAM type: NRG; PAM sequence: TGG
ggacagacagggctagaggc

SEQ ID NO: 19968 - DNA, 20 bp, Artificial Sequence
  Description of Artificial Sequence: Synthetic oligonucleotide
  Target: COL7A1; (+) strand; PAM type: NRG; PAM sequence: GGG
gacagacagggctagaggct

SEQ ID NO: 19969 - DNA, 20 bp, Artificial Sequence
  Description of Artificial Sequence: Synthetic oligonucleotide
  Target: COL7A1; (+) strand; PAM type: NRG; PAM sequence: GGG
acagacagggctagaggctg

SEQ ID NO: 19970 - DNA, 20 bp, Artificial Sequence
  Description of Artificial Sequence: Synthetic oligonucleotide
  Target: COL7A1; (+) strand; PAM type: NRG; PAM sequence: TGG
gacagggctagaggctgggg

SEQ ID NO: 19971 - DNA, 20 bp, Artificial Sequence
  Description of Artificial Sequence: Synthetic oligonucleotide
  Target: COL7A1; (+) strand; PAM type: NRG; PAM sequence: GGG
acagggctagaggctggggt

SEQ ID NO: 19972 - DNA, 20 bp, Artificial Sequence
  Description of Artificial Sequence: Synthetic oligonucleotide
  Target: COL7A1; (+) strand; PAM type: NRG; PAM sequence: GGG
cagggctagaggctggggtg

SEQ ID NO: 19973 - DNA, 20 bp, Artificial Sequence
  Description of Artificial Sequence: Synthetic oligonucleotide
  Target: COL7A1; (+) strand; PAM type: NRG; PAM sequence: GGG
agggctagaggctggggtgg

SEQ ID NO: 19974 - DNA, 20 bp, Artificial Sequence
  Description of Artificial Sequence: Synthetic oligonucleotide
  Target: COL7A1; (+) strand; PAM type: NRG; PAM sequence: TGG
ctagaggctggggtgggggc

SEQ ID NO: 19975 - DNA, 20 bp, Artificial Sequence
  Description of Artificial Sequence: Synthetic oligonucleotide
  Target: COL7A1; (+) strand; PAM type: NRG; PAM sequence: GAG
agaggctggggtgggggctg

SEQ ID NO: 19976 - DNA, 20 bp, Artificial Sequence
  Description of Artificial Sequence: Synthetic oligonucleotide
  Target: COL7A1; (+) strand; PAM type: NRG; PAM sequence: GAG
aggctggggtgggggctgga

SEQ ID NO: 19977 - DNA, 20 bp, Artificial Sequence
  Description of Artificial Sequence: Synthetic oligonucleotide
  Target: COL7A1; (+) strand; PAM type: NRG; PAM sequence: AGG
ggctggggtgggggctggag

SEQ ID NO: 19978 - DNA, 20 bp, Artificial Sequence
  Description of Artificial Sequence: Synthetic oligonucleotide
  Target: COL7A1; (+) strand; PAM type: NRG; PAM sequence: GGG
gctggggtgggggctggaga

SEQ ID NO: 19979 - DNA, 20 bp, Artificial Sequence
  Description of Artificial Sequence: Synthetic oligonucleotide
  Target: COL7A1; (+) strand; PAM type: NRG; PAM sequence: GGG
ctggggtgggggctggagag

SEQ ID NO: 19980 - DNA, 20 bp, Artificial Sequence
  Description of Artificial Sequence: Synthetic oligonucleotide
  Target: COL7A1; (+) strand; PAM type: NRG; PAM sequence: CAG
ggtgggggctggagaggggt

SEQ ID NO: 19981 - DNA, 20 bp, Artificial Sequence
  Description of Artificial Sequence: Synthetic oligonucleotide
  Target: COL7A1; (+) strand; PAM type: NRG; PAM sequence: AGG
gtgggggctggagaggggtc

SEQ ID NO: 19982 - DNA, 20 bp, Artificial Sequence
  Description of Artificial Sequence: Synthetic oligonucleotide
  Target: COL7A1; (+) strand; PAM type: NRG; PAM sequence: GGG
tgggggctggagaggggtca

SEQ ID NO: 19983 - DNA, 20 bp, Artificial Sequence
  Description of Artificial Sequence: Synthetic oligonucleotide
  Target: COL7A1; (+) strand; PAM type: NRG; PAM sequence: AAG
gggctggagaggggtcaggg

SEQ ID NO: 19984 - DNA, 20 bp, Artificial Sequence
  Description of Artificial Sequence: Synthetic oligonucleotide
  Target: COL7A1; (+) strand; PAM type: NRG; PAM sequence: TGG
ggagaggggtcagggaagat

SEQ ID NO: 19985 - DNA, 20 bp, Artificial Sequence
  Description of Artificial Sequence: Synthetic oligonucleotide
  Target: COL7A1; (+) strand; PAM type: NRG; PAM sequence: GGG
gagaggggtcagggaagatt

SEQ ID NO: 19986 - DNA, 20 bp, Artificial Sequence
  Description of Artificial Sequence: Synthetic oligonucleotide
  Target: COL7A1; (+) strand; PAM type: NRG; PAM sequence: TAG
ggtcagggaagattgggatt

SEQ ID NO: 19987 - DNA, 20 bp, Artificial Sequence
  Description of Artificial Sequence: Synthetic oligonucleotide
  Target: COL7A1; (+) strand; PAM type: NRG; PAM sequence: AGG
gtcagggaagattgggattt

SEQ ID NO: 19988 - DNA, 20 bp, Artificial Sequence
  Description of Artificial Sequence: Synthetic oligonucleotide
  Target: COL7A1; (+) strand; PAM type: NRG; PAM sequence: TGG
gggaagattgggatttaggt

SEQ ID NO: 19989 - DNA, 20 bp, Artificial Sequence
  Description of Artificial Sequence: Synthetic oligonucleotide
  Target: COL7A1; (+) strand; PAM type: NRG; PAM sequence: CAG
aagattgggatttaggttgg

SEQ ID NO: 19990 - DNA, 20 bp, Artificial Sequence
  Description of Artificial Sequence: Synthetic oligonucleotide
  Target: COL7A1; (+) strand; PAM type: NRG; PAM sequence: AGG
agattgggatttaggttggc

SEQ ID NO: 19991 - DNA, 20 bp, Artificial Sequence
  Description of Artificial Sequence: Synthetic oligonucleotide
  Target: COL7A1; (+) strand; PAM type: NRG; PAM sequence: GGG
gattgggatttaggttggca

SEQ ID NO: 19992 - DNA, 20 bp, Artificial Sequence
  Description of Artificial Sequence: Synthetic oligonucleotide
  Target: COL7A1; (+) strand; PAM type: NRG; PAM sequence: GGG
attgggatttaggttggcag

SEQ ID NO: 19993 - DNA, 20 bp, Artificial Sequence
  Description of Artificial Sequence: Synthetic oligonucleotide
  Target: COL7A1; (+) strand; PAM type: NRG; PAM sequence: AAG
ggatttaggttggcaggggt

SEQ ID NO: 19994 - DNA, 20 bp, Artificial Sequence
  Description of Artificial Sequence: Synthetic oligonucleotide
  Target: COL7A1; (+) strand; PAM type: NRG; PAM sequence: TGG
aggttggcaggggtaagact

SEQ ID NO: 19995 - DNA, 20 bp, Artificial Sequence
  Description of Artificial Sequence: Synthetic oligonucleotide
  Target: COL7A1; (+) strand; PAM type: NRG; PAM sequence: CAG
ttggcaggggtaagacttgg

SEQ ID NO: 19996 - DNA, 20 bp, Artificial Sequence
  Description of Artificial Sequence: Synthetic oligonucleotide
  Target: COL7A1; (+) strand; PAM type: NRG; PAM sequence: AGG
tggcaggggtaagacttggc

SEQ ID NO: 19997 - DNA, 20 bp, Artificial Sequence
  Description of Artificial Sequence: Synthetic oligonucleotide
  Target: COL7A1; (+) strand; PAM type: NRG; PAM sequence: GAG
gcaggggtaagacttggcag

SEQ ID NO: 19998 - DNA, 20 bp, Artificial Sequence
  Description of Artificial Sequence: Synthetic oligonucleotide
  Target: COL7A1; (+) strand; PAM type: NRG; PAM sequence: CAG
ggtaagacttggcaggagaa

SEQ ID NO: 19999 - DNA, 20 bp, Artificial Sequence
  Description of Artificial Sequence: Synthetic oligonucleotide
  Target: COL7A1; (+) strand; PAM type: NRG; PAM sequence: GAG
taagacttggcaggagaaca

SEQ ID NO: 20000 - DNA, 20 bp, Artificial Sequence
  Description of Artificial Sequence: Synthetic oligonucleotide
  Target: COL7A1; (+) strand; PAM type: NRG; PAM sequence: CAG
cttggcaggagaacagagac

SEQ ID NO: 20001 - DNA, 20 bp, Artificial Sequence
  Description of Artificial Sequence: Synthetic oligonucleotide
  Target: COL7A1; (+) strand; PAM type: NRG; PAM sequence: AGG
ttggcaggagaacagagacc

SEQ ID NO: 20002 - DNA, 20 bp, Artificial Sequence
  Description of Artificial Sequence: Synthetic oligonucleotide
  Target: COL7A1; (+) strand; PAM type: NRG; PAM sequence: CAG
caggagaacagagaccaggt

SEQ ID NO: 20003 - DNA, 20 bp, Artificial Sequence
  Description of Artificial Sequence: Synthetic oligonucleotide
  Target: COL7A1; (+) strand; PAM type: NRG; PAM sequence: AAG
agaccaggtcagtgaaaatc

SEQ ID NO: 20004 - DNA, 20 bp, Artificial Sequence
  Description of Artificial Sequence: Synthetic oligonucleotide
  Target: COL7A1; (+) strand; PAM type: NRG; PAM sequence: AGG
gaccaggtcagtgaaaatca

SEQ ID NO: 20005 - DNA, 20 bp, Artificial Sequence
  Description of Artificial Sequence: Synthetic oligonucleotide
  Target: COL7A1; (+) strand; PAM type: NRG; PAM sequence: CAG
aggtcagtgaaaatcaaggt

SEQ ID NO: 20006 - DNA, 20 bp, Artificial Sequence
  Description of Artificial Sequence: Synthetic oligonucleotide
  Target: COL7A1; (+) strand; PAM type: NRG; PAM sequence: CAG
agtgaaaatcaaggtcagtt

SEQ ID NO: 20007 - DNA, 20 bp, Artificial Sequence
  Description of Artificial Sequence: Synthetic oligonucleotide
  Target: COL7A1; (+) strand; PAM type: NRG; PAM sequence: CAG
gaaaatcaaggtcagttcag

SEQ ID NO: 20008 - DNA, 20 bp, Artificial Sequence
  Description of Artificial Sequence: Synthetic oligonucleotide
  Target: COL7A1; (+) strand; PAM type: NRG; PAM sequence: AGG
aaaatcaaggtcagttcagc

SEQ ID NO: 20009 - DNA, 20 bp, Artificial Sequence
  Description of Artificial Sequence: Synthetic oligonucleotide
  Target: COL7A1; (+) strand; PAM type: NRG; PAM sequence: GGG
aaatcaaggtcagttcagca

SEQ ID NO: 20010 - DNA, 20 bp, Artificial Sequence
  Description of Artificial Sequence: Synthetic oligonucleotide
  Target: COL7A1; (+) strand; PAM type: NRG; PAM sequence: CAG
caaggtcagttcagcagggt

SEQ ID NO: 20011 - DNA, 20 bp, Artificial Sequence
  Description of Artificial Sequence: Synthetic oligonucleotide
  Target: COL7A1; (+) strand; PAM type: NRG; PAM sequence: GAG
aggtcagttcagcagggtca

SEQ ID NO: 20012 - DNA, 20 bp, Artificial Sequence
  Description of Artificial Sequence: Synthetic oligonucleotide
  Target: COL7A1; (+) strand; PAM type: NRG; PAM sequence: AGG
ggtcagttcagcagggtcag

SEQ ID NO: 20013 - DNA, 20 bp, Artificial Sequence
  Description of Artificial Sequence: Synthetic oligonucleotide
  Target: COL7A1; (+) strand; PAM type: NRG; PAM sequence: AAG
tcagcagggtcagaggttca

SEQ ID NO: 20014 - DNA, 20 bp, Artificial Sequence
  Description of Artificial Sequence: Synthetic oligonucleotide
  Target: COL7A1; (+) strand; PAM type: NRG; PAM sequence: CAG
cagggtcagaggttcaaagc

SEQ ID NO: 20015 - DNA, 20 bp, Artificial Sequence
  Description of Artificial Sequence: Synthetic oligonucleotide
  Target: COL7A1; (+) strand; PAM type: NRG; PAM sequence: AGG
agggtcagaggttcaaagcc

SEQ ID NO: 20016 - DNA, 20 bp, Artificial Sequence
  Description of Artificial Sequence: Synthetic oligonucleotide
  Target: COL7A1; (+) strand; PAM type: NRG; PAM sequence: TGG
gaggttcaaagccaggtccc

SEQ ID NO: 20017 - DNA, 20 bp, Artificial Sequence
  Description of Artificial Sequence: Synthetic oligonucleotide
  Target: COL7A1; (+) strand; PAM type: NRG; PAM sequence: GGG
aggttcaaagccaggtccct

SEQ ID NO: 20018 - DNA, 20 bp, Artificial Sequence
  Description of Artificial Sequence: Synthetic oligonucleotide
  Target: COL7A1; (+) strand; PAM type: NRG; PAM sequence: GGG
ggttcaaagccaggtccctg

SEQ ID NO: 20019 - DNA, 20 bp, Artificial Sequence
  Description of Artificial Sequence: Synthetic oligonucleotide
  Target: COL7A1; (+) strand; PAM type: NRG; PAM sequence: GAG
aaagccaggtccctggggct

SEQ ID NO: 20020 - DNA, 20 bp, Artificial Sequence
  Description of Artificial Sequence: Synthetic oligonucleotide
  Target: COL7A1; (+) strand; PAM type: NRG; PAM sequence: AGG
aagccaggtccctggggctg

SEQ ID NO: 20021 - DNA, 20 bp, Artificial Sequence
  Description of Artificial Sequence: Synthetic oligonucleotide
  Target: COL7A1; (+) strand; PAM type: NRG; PAM sequence: GGG
agccaggtccctggggctga

SEQ ID NO: 20022 - DNA, 20 bp, Artificial Sequence
  Description of Artificial Sequence: Synthetic oligonucleotide
  Target: COL7A1; (+) strand; PAM type: NRG; PAM sequence: TAG
aggtccctggggctgagggt

SEQ ID NO: 20023 - DNA, 20 bp, Artificial Sequence
  Description of Artificial Sequence: Synthetic oligonucleotide
  Target: COL7A1; (+) strand; PAM type: NRG; PAM sequence: GAG
gtccctggggctgagggtta

SEQ ID NO: 20024 - DNA, 20 bp, Artificial Sequence
  Description of Artificial Sequence: Synthetic oligonucleotide
  Target: COL7A1; (+) strand; PAM type: NRG; PAM sequence: CAG
ctgagggttagagcctgtat

SEQ ID NO: 20025 - DNA, 20 bp, Artificial Sequence
  Description of Artificial Sequence: Synthetic oligonucleotide
  Target: COL7A1; (+) strand; PAM type: NRG; PAM sequence: CAG
agggttagagcctgtatcag

SEQ ID NO: 20026 - DNA, 20 bp, Artificial Sequence
  Description of Artificial Sequence: Synthetic oligonucleotide
  Target: COL7A1; (+) strand; PAM type: NRG; PAM sequence: AGG
gggttagagcctgtatcagc

SEQ ID NO: 20027 - DNA, 20 bp, Artificial Sequence
  Description of Artificial Sequence: Synthetic oligonucleotide
  Target: COL7A1; (+) strand; PAM type: NRG; PAM sequence: GGG
ggttagagcctgtatcagca

SEQ ID NO: 20028 - DNA, 20 bp, Artificial Sequence
  Description of Artificial Sequence: Synthetic oligonucleotide
  Target: COL7A1; (+) strand; PAM type: NRG; PAM sequence: AAG
gagcctgtatcagcagggat

SEQ ID NO: 20029 - DNA, 20 bp, Artificial Sequence
  Description of Artificial Sequence: Synthetic oligonucleotide
  Target: COL7A1; (+) strand; PAM type: NRG; PAM sequence: TGG
cctgtatcagcagggataag

SEQ ID NO: 20030 - DNA, 20 bp, Artificial Sequence
  Description of Artificial Sequence: Synthetic oligonucleotide
  Target: COL7A1; (+) strand; PAM type: NRG; PAM sequence: GAG
agcagggataagtggtcatt

SEQ ID NO: 20031 - DNA, 20 bp, Artificial Sequence
  Description of Artificial Sequence: Synthetic oligonucleotide
  Target: COL7A1; (+) strand; PAM type: NRG; PAM sequence: AGG
gcagggataagtggtcattg

SEQ ID NO: 20032 - DNA, 20 bp, Artificial Sequence
  Description of Artificial Sequence: Synthetic oligonucleotide
  Target: COL7A1; (+) strand; PAM type: NRG; PAM sequence: GAG
agggataagtggtcattgag

SEQ ID NO: 20033 - DNA, 20 bp, Artificial Sequence
  Description of Artificial Sequence: Synthetic oligonucleotide
  Target: COL7A1; (+) strand; PAM type: NRG; PAM sequence: AGG
gggataagtggtcattgagg

SEQ ID NO: 20034 - DNA, 20 bp, Artificial Sequence
  Description of Artificial Sequence: Synthetic oligonucleotide
  Target: COL7A1; (+) strand; PAM type: NRG; PAM sequence: GGG
ggataagtggtcattgagga

SEQ ID NO: 20035 - DNA, 20 bp, Artificial Sequence
  Description of Artificial Sequence: Synthetic oligonucleotide
  Target: COL7A1; (+) strand; PAM type: NRG; PAM sequence: GGG
gataagtggtcattgaggag

SEQ ID NO: 20036 - DNA, 20 bp, Artificial Sequence
  Description of Artificial Sequence: Synthetic oligonucleotide
  Target: COL7A1; (+) strand; PAM type: NRG; PAM sequence: GAG
agtggtcattgaggaggggt

SEQ ID NO: 20037 - DNA, 20 bp, Artificial Sequence
  Description of Artificial Sequence: Synthetic oligonucleotide
  Target: COL7A1; (+) strand; PAM type: NRG; PAM sequence: AGG
gtggtcattgaggaggggtg

SEQ ID NO: 20038 - DNA, 20 bp, Artificial Sequence
  Description of Artificial Sequence: Synthetic oligonucleotide
  Target: COL7A1; (+) strand; PAM type: NRG; PAM sequence: GAG
ggtcattgaggaggggtgag

SEQ ID NO: 20039 - DNA, 20 bp, Artificial Sequence
  Description of Artificial Sequence: Synthetic oligonucleotide
  Target: COL7A1; (+) strand; PAM type: NRG; PAM sequence: CAG
cattgaggaggggtgaggag

SEQ ID NO: 20040 - DNA, 20 bp, Artificial Sequence
  Description of Artificial Sequence: Synthetic oligonucleotide
  Target: COL7A1; (+) strand; PAM type: NRG; PAM sequence: AGG
attgaggaggggtgaggagc

SEQ ID NO: 20041 - DNA, 20 bp, Artificial Sequence
  Description of Artificial Sequence: Synthetic oligonucleotide
  Target: COL7A1; (+) strand; PAM type: NRG; PAM sequence: GGG
ttgaggaggggtgaggagca

SEQ ID NO: 20042 - DNA, 20 bp, Artificial Sequence
  Description of Artificial Sequence: Synthetic oligonucleotide
  Target: COL7A1; (+) strand; PAM type: NRG; PAM sequence: GGG
tgaggaggggtgaggagcag

SEQ ID NO: 20043 - DNA, 20 bp, Artificial Sequence
  Description of Artificial Sequence: Synthetic oligonucleotide
  Target: COL7A1; (+) strand; PAM type: NRG; PAM sequence: TAG
ggaggggtgaggagcagggg

SEQ ID NO: 20044 - DNA, 20 bp, Artificial Sequence
  Description of Artificial Sequence: Synthetic oligonucleotide
  Target: COL7A1; (+) strand; PAM type: NRG; PAM sequence: CAG
ggggtgaggagcaggggtag

SEQ ID NO: 20045 - DNA, 20 bp, Artificial Sequence
  Description of Artificial Sequence: Synthetic oligonucleotide
  Target: COL7A1; (+) strand; PAM type: NRG; PAM sequence: AGG
gggtgaggagcaggggtagc

SEQ ID NO: 20046 - DNA, 20 bp, Artificial Sequence
  Description of Artificial Sequence: Synthetic oligonucleotide
  Target: COL7A1; (+) strand; PAM type: NRG; PAM sequence: GGG
ggtgaggagcaggggtagca

SEQ ID NO: 20047 - DNA, 20 bp, Artificial Sequence
  Description of Artificial Sequence: Synthetic oligonucleotide
  Target: COL7A1; (+) strand; PAM type: NRG; PAM sequence: GGG
gtgaggagcaggggtagcag

SEQ ID NO: 20048 - DNA, 20 bp, Artificial Sequence
  Description of Artificial Sequence: Synthetic oligonucleotide
  Target: COL7A1; (+) strand; PAM type: NRG; PAM sequence: AAG
gagcaggggtagcaggggtc

SEQ ID NO: 20049 - DNA, 20 bp, Artificial Sequence
  Description of Artificial Sequence: Synthetic oligonucleotide
  Target: COL7A1; (+) strand; PAM type: NRG; PAM sequence: AGG
agcaggggtagcaggggtca

SEQ ID NO: 20050 - DNA, 20 bp, Artificial Sequence
  Description of Artificial Sequence: Synthetic oligonucleotide
  Target: COL7A1; (+) strand; PAM type: NRG; PAM sequence: GGG
gcaggggtagcaggggtcaa

SEQ ID NO: 20051 - DNA, 20 bp, Artificial Sequence
  Description of Artificial Sequence: Synthetic oligonucleotide
  Target: COL7A1; (+) strand; PAM type: NRG; PAM sequence: AAG
gggtagcaggggtcaagggc

SEQ ID NO: 20052 - DNA, 20 bp, Artificial Sequence
  Description of Artificial Sequence: Synthetic oligonucleotide
  Target: COL7A1; (+) strand; PAM type: NRG; PAM sequence: AAG
tagcaggggtcaagggcaag

SEQ ID NO: 20053 - DNA, 20 bp, Artificial Sequence
  Description of Artificial Sequence: Synthetic oligonucleotide
  Target: COL7A1; (+) strand; PAM type: NRG; PAM sequence: CAG
aggggtcaagggcaagaagt

SEQ ID NO: 20054 - DNA, 20 bp, Artificial Sequence
  Description of Artificial Sequence: Synthetic oligonucleotide
  Target: COL7A1; (+) strand; PAM type: NRG; PAM sequence: CAG
caagggcaagaagtcagaac

SEQ ID NO: 20055 - DNA, 20 bp, Artificial Sequence
  Description of Artificial Sequence: Synthetic oligonucleotide
  Target: COL7A1; (+) strand; PAM type: NRG; PAM sequence: AAG
ggcaagaagtcagaaccaga

SEQ ID NO: 20056 - DNA, 20 bp, Artificial Sequence
  Description of Artificial Sequence: Synthetic oligonucleotide
  Target: COL7A1; (+) strand; PAM type: NRG; PAM sequence: AGG
gcaagaagtcagaaccagaa

SEQ ID NO: 20057 - DNA, 20 bp, Artificial Sequence
  Description of Artificial Sequence: Synthetic oligonucleotide
  Target: COL7A1; (+) strand; PAM type: NRG; PAM sequence: GGG
caagaagtcagaaccagaaa

SEQ ID NO: 20058 - DNA, 20 bp, Artificial Sequence
  Description of Artificial Sequence: Synthetic oligonucleotide
  Target: COL7A1; (+) strand; PAM type: NRG; PAM sequence: CAG
agtcagaaccagaaagggca

SEQ ID NO: 20059 - DNA, 20 bp, Artificial Sequence
  Description of Artificial Sequence: Synthetic oligonucleotide
  Target: COL7A1; (+) strand; PAM type: NRG; PAM sequence: CAG
agaaccagaaagggcacagc

SEQ ID NO: 20060 - DNA, 20 bp, Artificial Sequence
  Description of Artificial Sequence: Synthetic oligonucleotide
  Target: COL7A1; (+) strand; PAM type: NRG; PAM sequence: AGG
gaaccagaaagggcacagcc

SEQ ID NO: 20061 - DNA, 20 bp, Artificial Sequence
  Description of Artificial Sequence: Synthetic oligonucleotide
  Target: COL7A1; (+) strand; PAM type: NRG; PAM sequence: CAG
cagaaagggcacagccaggt

SEQ ID NO: 20062 - DNA, 20 bp, Artificial Sequence
  Description of Artificial Sequence: Synthetic oligonucleotide
  Target: COL7A1; (+) strand; PAM type: NRG; PAM sequence: TGG
aagggcacagccaggtcagc

SEQ ID NO: 20063 - DNA, 20 bp, Artificial Sequence
  Description of Artificial Sequence: Synthetic oligonucleotide
  Target: COL7A1; (+) strand; PAM type: NRG; PAM sequence: GAG
acagccaggtcagctggtat

SEQ ID NO: 20064 - DNA, 20 bp, Artificial Sequence
  Description of Artificial Sequence: Synthetic oligonucleotide
  Target: COL7A1; (+) strand; PAM type: NRG; PAM sequence: CAG
gtcagctggtatgagcattg

SEQ ID NO: 20065 - DNA, 20 bp, Artificial Sequence
  Description of Artificial Sequence: Synthetic oligonucleotide
  Target: COL7A1; (+) strand; PAM type: NRG; PAM sequence: CAG
gctggtatgagcattgcagc

SEQ ID NO: 20066 - DNA, 20 bp, Artificial Sequence
  Description of Artificial Sequence: Synthetic oligonucleotide
  Target: COL7A1; (+) strand; PAM type: NRG; PAM sequence: TGG
ggtatgagcattgcagccag

SEQ ID NO: 20067 - DNA, 20 bp, Artificial Sequence
  Description of Artificial Sequence: Synthetic oligonucleotide
  Target: COL7A1; (+) strand; PAM type: NRG; PAM sequence: GGG
gtatgagcattgcagccagt

SEQ ID NO: 20068 - DNA, 20 bp, Artificial Sequence
  Description of Artificial Sequence: Synthetic oligonucleotide
  Target: COL7A1; (+) strand; PAM type: NRG; PAM sequence: CGG
ttgcagccagtgggtttacc

SEQ ID NO: 20069 - DNA, 20 bp, Artificial Sequence
  Description of Artificial Sequence: Synthetic oligonucleotide
  Target: COL7A1; (+) strand; PAM type: NRG; PAM sequence: GGG
tgcagccagtgggtttaccc

SEQ ID NO: 20070 - DNA, 20 bp, Artificial Sequence
  Description of Artificial Sequence: Synthetic oligonucleotide
  Target: COL7A1; (+) strand; PAM type: NRG; PAM sequence: TGG
gggtttacccgggatcccgc

SEQ ID NO: 20071 - DNA, 20 bp, Artificial Sequence
  Description of Artificial Sequence: Synthetic oligonucleotide
  Target: COL7A1; (+) strand; PAM type: NRG; PAM sequence: GGG
ggtttacccgggatcccgct

SEQ ID NO: 20072 - DNA, 20 bp, Artificial Sequence
  Description of Artificial Sequence: Synthetic oligonucleotide
  Target: COL7A1; (+) strand; PAM type: NRG; PAM sequence: TGG
acccgggatcccgctgggcc

SEQ ID NO: 20073 - DNA, 20 bp, Artificial Sequence
  Description of Artificial Sequence: Synthetic oligonucleotide
  Target: COL7A1; (+) strand; PAM type: NRG; PAM sequence: GGG
cccgggatcccgctgggcct

SEQ ID NO: 20074 - DNA, 20 bp, Artificial Sequence
  Description of Artificial Sequence: Synthetic oligonucleotide
  Target: COL7A1; (+) strand; PAM type: NRG; PAM sequence: GGG
ccgggatcccgctgggcctg

SEQ ID NO: 20075 - DNA, 20 bp, Artificial Sequence
  Description of Artificial Sequence: Synthetic oligonucleotide
  Target: COL7A1; (+) strand; PAM type: NRG; PAM sequence: GGG
cgggatcccgctgggcctgg

SEQ ID NO: 20076 - DNA, 20 bp, Artificial Sequence
  Description of Artificial Sequence: Synthetic oligonucleotide
  Target: COL7A1; (+) strand; PAM type: NRG; PAM sequence: TGG
ggggtccacgttcgccctga

SEQ ID NO: 20077 - DNA, 20 bp, Artificial Sequence
  Description of Artificial Sequence: Synthetic oligonucleotide
  Target: COL7A1; (+) strand; PAM type: NRG; PAM sequence: AAG
ccacgttcgccctgatggaa

SEQ ID NO: 20078 - DNA, 20 bp, Artificial Sequence
  Description of Artificial Sequence: Synthetic oligonucleotide
  Target: COL7A1; (+) strand; PAM type: NRG; PAM sequence: AAG
cgttcgccctgatggaaaag

SEQ ID NO: 20079 - DNA, 20 bp, Artificial Sequence
  Description of Artificial Sequence: Synthetic oligonucleotide
  Target: COL7A1; (+) strand; PAM type: NRG; PAM sequence: GAG
ttcgccctgatggaaaagaa

SEQ ID NO: 20080 - DNA, 20 bp, Artificial Sequence
  Description of Artificial Sequence: Synthetic oligonucleotide
  Target: COL7A1; (+) strand; PAM type: NRG; PAM sequence: AGG
tcgccctgatggaaaagaag

SEQ ID NO: 20081 - DNA, 20 bp, Artificial Sequence
  Description of Artificial Sequence: Synthetic oligonucleotide
  Target: COL7A1; (+) strand; PAM type: NRG; PAM sequence: CAG
cctgatggaaaagaagaggt

SEQ ID NO: 20082 - DNA, 20 bp, Artificial Sequence
  Description of Artificial Sequence: Synthetic oligonucleotide
  Target: COL7A1; (+) strand; PAM type: NRG; PAM sequence: GAG
tgatggaaaagaagaggtca

SEQ ID NO: 20083 - DNA, 20 bp, Artificial Sequence
  Description of Artificial Sequence: Synthetic oligonucleotide
  Target: COL7A1; (+) strand; PAM type: NRG; PAM sequence: GAG
gaaaagaagaggtcagagct

SEQ ID NO: 20084 - DNA, 20 bp, Artificial Sequence
  Description of Artificial Sequence: Synthetic oligonucleotide
  Target: COL7A1; (+) strand; PAM type: NRG; PAM sequence: TGG
agaagaggtcagagctgagt

SEQ ID NO: 20085 - DNA, 20 bp, Artificial Sequence
  Description of Artificial Sequence: Synthetic oligonucleotide
  Target: COL7A1; (+) strand; PAM type: NRG; PAM sequence: GGG
gaagaggtcagagctgagtt

SEQ ID NO: 20086 - DNA, 20 bp, Artificial Sequence
  Description of Artificial Sequence: Synthetic oligonucleotide
  Target: COL7A1; (+) strand; PAM type: NRG; PAM sequence: CAG
ggtcagagctgagttgggcc

SEQ ID NO: 20087 - DNA, 20 bp, Artificial Sequence
  Description of Artificial Sequence: Synthetic oligonucleotide
  Target: COL7A1; (+) strand; PAM type: NRG; PAM sequence: CAG
tgagttgggcccagatcctc

SEQ ID NO: 20088 - DNA, 20 bp, Artificial Sequence
  Description of Artificial Sequence: Synthetic oligonucleotide
  Target: COL7A1; (+) strand; PAM type: NRG; PAM sequence: AGG
gagttgggcccagatcctcc

SEQ ID NO: 20089 - DNA, 20 bp, Artificial Sequence
  Description of Artificial Sequence: Synthetic oligonucleotide
  Target: COL7A1; (+) strand; PAM type: NRG; PAM sequence: GGG
agttgggcccagatcctcca

SEQ ID NO: 20090 - DNA, 20 bp, Artificial Sequence
  Description of Artificial Sequence: Synthetic oligonucleotide
  Target: COL7A1; (+) strand; PAM type: NRG; PAM sequence: TGG
cccagatcctccagggccct

SEQ ID NO: 20091 - DNA, 20 bp, Artificial Sequence
  Description of Artificial Sequence: Synthetic oligonucleotide
  Target: COL7A1; (+) strand; PAM type: NRG; PAM sequence: CAG
ccagggcccttggcaccccc

SEQ ID NO: 20092 - DNA, 20 bp, Artificial Sequence
  Description of Artificial Sequence: Synthetic oligonucleotide
  Target: COL7A1; (+) strand; PAM type: NRG; PAM sequence: AGG
cagggcccttggcacccccc

SEQ ID NO: 20093 - DNA, 20 bp, Artificial Sequence
  Description of Artificial Sequence: Synthetic oligonucleotide
  Target: COL7A1; (+) strand; PAM type: NRG; PAM sequence: CAG
ggttgcacttaccttctctc

SEQ ID NO: 20094 - DNA, 20 bp, Artificial Sequence
  Description of Artificial Sequence: Synthetic oligonucleotide
  Target: COL7A1; (+) strand; PAM type: NRG; PAM sequence: CAG
accttctctccagcctcacc

SEQ ID NO: 20095 - DNA, 20 bp, Artificial Sequence
  Description of Artificial Sequence: Synthetic oligonucleotide
  Target: COL7A1; (+) strand; PAM type: NRG; PAM sequence: AGG
ccttctctccagcctcaccc

SEQ ID NO: 20096 - DNA, 20 bp, Artificial Sequence
  Description of Artificial Sequence: Synthetic oligonucleotide
  Target: COL7A1; (+) strand; PAM type: NRG; PAM sequence: GGG
cttctctccagcctcaccca

SEQ ID NO: 20097 - DNA, 20 bp, Artificial Sequence
  Description of Artificial Sequence: Synthetic oligonucleotide
  Target: COL7A1; (+) strand; PAM type: NRG; PAM sequence: GGG
ttctctccagcctcacccag

SEQ ID NO: 20098 - DNA, 20 bp, Artificial Sequence
  Description of Artificial Sequence: Synthetic oligonucleotide
  Target: COL7A1; (+) strand; PAM type: NRG; PAM sequence: TGG
ccagcctcacccaggggccc

SEQ ID NO: 20099 - DNA, 20 bp, Artificial Sequence
  Description of Artificial Sequence: Synthetic oligonucleotide
  Target: COL7A1; (+) strand; PAM type: NRG; PAM sequence: AAG
cctcacccaggggccctgga

SEQ ID NO: 20100 - DNA, 20 bp, Artificial Sequence
  Description of Artificial Sequence: Synthetic oligonucleotide
  Target: COL7A1; (+) strand; PAM type: NRG; PAM sequence: CGG
ccaggggccctggaaagccc

SEQ ID NO: 20101 - DNA, 20 bp, Artificial Sequence
  Description of Artificial Sequence: Synthetic oligonucleotide
  Target: COL7A1; (+) strand; PAM type: NRG; PAM sequence: AAG
ggaaagccccggtcaccctg

SEQ ID NO: 20102 - DNA, 20 bp, Artificial Sequence
  Description of Artificial Sequence: Synthetic oligonucleotide
  Target: COL7A1; (+) strand; PAM type: NRG; PAM sequence: GAG
aaagccccggtcaccctgaa

SEQ ID NO: 20103 - DNA, 20 bp, Artificial Sequence
  Description of Artificial Sequence: Synthetic oligonucleotide
  Target: COL7A1; (+) strand; PAM type: NRG; PAM sequence: GAG
agccccggtcaccctgaaga

SEQ ID NO: 20104 - DNA, 20 bp, Artificial Sequence
  Description of Artificial Sequence: Synthetic oligonucleotide
  Target: COL7A1; (+) strand; PAM type: NRG; PAM sequence: GAG
ccccggtcaccctgaagaga

SEQ ID NO: 20105 - DNA, 20 bp, Artificial Sequence
  Description of Artificial Sequence: Synthetic oligonucleotide
  Target: COL7A1; (+) strand; PAM type: NRG; PAM sequence: AGG
cccggtcaccctgaagagag

SEQ ID NO: 20106 - DNA, 20 bp, Artificial Sequence
  Description of Artificial Sequence: Synthetic oligonucleotide
  Target: COL7A1; (+) strand; PAM type: NRG; PAM sequence: GGG
ccggtcaccctgaagagaga

SEQ ID NO: 20107 - DNA, 20 bp, Artificial Sequence
  Description of Artificial Sequence: Synthetic oligonucleotide
  Target: COL7A1; (+) strand; PAM type: NRG; PAM sequence: GAG
tcaccctgaagagagagggt

SEQ ID NO: 20108 - DNA, 20 bp, Artificial Sequence
  Description of Artificial Sequence: Synthetic oligonucleotide
  Target: COL7A1; (+) strand; PAM type: NRG; PAM sequence: GAG
accctgaagagagagggtga

SEQ ID NO: 20109 - DNA, 20 bp, Artificial Sequence
  Description of Artificial Sequence: Synthetic oligonucleotide
  Target: COL7A1; (+) strand; PAM type: NRG; PAM sequence: AAG
tgaagagagagggtgagaga

SEQ ID NO: 20110 - DNA, 20 bp, Artificial Sequence
  Description of Artificial Sequence: Synthetic oligonucleotide
  Target: COL7A1; (+) strand; PAM type: NRG; PAM sequence: CAG
gagagagggtgagagaaaga

SEQ ID NO: 20111 - DNA, 20 bp, Artificial Sequence
  Description of Artificial Sequence: Synthetic oligonucleotide
  Target: COL7A1; (+) strand; PAM type: NRG; PAM sequence: GAG
gagagggtgagagaaagaca

SEQ ID NO: 20112 - DNA, 20 bp, Artificial Sequence
  Description of Artificial Sequence: Synthetic oligonucleotide
  Target: COL7A1; (+) strand; PAM type: NRG; PAM sequence: GAG
gagggtgagagaaagacaga

SEQ ID NO: 20113 - DNA, 20 bp, Artificial Sequence
  Description of Artificial Sequence: Synthetic oligonucleotide
  Target: COL7A1; (+) strand; PAM type: NRG; PAM sequence: GAG
gggtgagagaaagacagaga

SEQ ID NO: 20114 - DNA, 20 bp, Artificial Sequence
  Description of Artificial Sequence: Synthetic oligonucleotide
  Target: COL7A1; (+) strand; PAM type: NRG; PAM sequence: GAG
gtgagagaaagacagagaga

SEQ ID NO: 20115 - DNA, 20 bp, Artificial Sequence
  Description of Artificial Sequence: Synthetic oligonucleotide
  Target: COL7A1; (+) strand; PAM type: NRG; PAM sequence: GAG
gagagaaagacagagagaga

SEQ ID NO: 20116 - DNA, 20 bp, Artificial Sequence
  Description of Artificial Sequence: Synthetic oligonucleotide
  Target: COL7A1; (+) strand; PAM type: NRG; PAM sequence: AGG
agagaaagacagagagagag

SEQ ID NO: 20117 - DNA, 20 bp, Artificial Sequence
  Description of Artificial Sequence: Synthetic oligonucleotide
  Target: COL7A1; (+) strand; PAM type: NRG; PAM sequence: GGG
gagaaagacagagagagaga

SEQ ID NO: 20118 - DNA, 20 bp, Artificial Sequence
  Description of Artificial Sequence: Synthetic oligonucleotide
  Target: COL7A1; (+) strand; PAM type: NRG; PAM sequence: TGG
aagacagagagagagagggt

SEQ ID NO: 20119 - DNA, 20 bp, Artificial Sequence
  Description of Artificial Sequence: Synthetic oligonucleotide
  Target: COL7A1; (+) strand; PAM type: NRG; PAM sequence: TGG
acagagagagagagggttgg

SEQ ID NO: 20120 - DNA, 20 bp, Artificial Sequence
  Description of Artificial Sequence: Synthetic oligonucleotide
  Target: COL7A1; (+) strand; PAM type: NRG; PAM sequence: CGG
gagagagagagggttggtgg

SEQ ID NO: 20121 - DNA, 20 bp, Artificial Sequence
  Description of Artificial Sequence: Synthetic oligonucleotide
  Target: COL7A1; (+) strand; PAM type: NRG; PAM sequence: GGG
agagagagagggttggtggc

SEQ ID NO: 20122 - DNA, 20 bp, Artificial Sequence
  Description of Artificial Sequence: Synthetic oligonucleotide
  Target: COL7A1; (+) strand; PAM type: NRG; PAM sequence: GGG
gagagagagggttggtggcg

SEQ ID NO: 20123 - DNA, 20 bp, Artificial Sequence
  Description of Artificial Sequence: Synthetic oligonucleotide
  Target: COL7A1; (+) strand; PAM type: NRG; PAM sequence: CAG
ggggcttgaacgtcaaaccc

SEQ ID NO: 20124 - DNA, 20 bp, Artificial Sequence
  Description of Artificial Sequence: Synthetic oligonucleotide
  Target: COL7A1; (+) strand; PAM type: NRG; PAM sequence: AAG
ttgaacgtcaaaccccagac

SEQ ID NO: 20125 - DNA, 20 bp, Artificial Sequence
  Description of Artificial Sequence: Synthetic oligonucleotide
  Target: COL7A1; (+) strand; PAM type: NRG; PAM sequence: AGG
tgaacgtcaaaccccagaca

SEQ ID NO: 20126 - DNA, 20 bp, Artificial Sequence
  Description of Artificial Sequence: Synthetic oligonucleotide
  Target: COL7A1; (+) strand; PAM type: NRG; PAM sequence: GGG
gaacgtcaaaccccagacaa

SEQ ID NO: 20127 - DNA, 20 bp, Artificial Sequence
  Description of Artificial Sequence: Synthetic oligonucleotide
  Target: COL7A1; (+) strand; PAM type: NRG; PAM sequence: GGG
aacgtcaaaccccagacaag

SEQ ID NO: 20128 - DNA, 20 bp, Artificial Sequence
  Description of Artificial Sequence: Synthetic oligonucleotide
  Target: COL7A1; (+) strand; PAM type: NRG; PAM sequence: TGG
caaaaccacgacctctgacc

SEQ ID NO: 20129 - DNA, 20 bp, Artificial Sequence
  Description of Artificial Sequence: Synthetic oligonucleotide
  Target: COL7A1; (+) strand; PAM type: NRG; PAM sequence: GAG
aaaccacgacctctgacctg

SEQ ID NO: 20130 - DNA, 20 bp, Artificial Sequence
  Description of Artificial Sequence: Synthetic oligonucleotide
  Target: COL7A1; (+) strand; PAM type: NRG; PAM sequence: AGG
aaccacgacctctgacctgg

SEQ ID NO: 20131 - DNA, 20 bp, Artificial Sequence
  Description of Artificial Sequence: Synthetic oligonucleotide
  Target: COL7A1; (+) strand; PAM type: NRG; PAM sequence: GGG
accacgacctctgacctgga

SEQ ID NO: 20132 - DNA, 20 bp, Artificial Sequence
  Description of Artificial Sequence: Synthetic oligonucleotide
  Target: COL7A1; (+) strand; PAM type: NRG; PAM sequence: CAG
actcttatctccttatcttc

SEQ ID NO: 20133 - DNA, 20 bp, Artificial Sequence
  Description of Artificial Sequence: Synthetic oligonucleotide
  Target: COL7A1; (+) strand; PAM type: NRG; PAM sequence: TGG
tccagcctcccctaacacca

SEQ ID NO: 20134 - DNA, 20 bp, Artificial Sequence
  Description of Artificial Sequence: Synthetic oligonucleotide
  Target: COL7A1; (+) strand; PAM type: NRG; PAM sequence: GGG
ccagcctcccctaacaccat

SEQ ID NO: 20135 - DNA, 20 bp, Artificial Sequence
  Description of Artificial Sequence: Synthetic oligonucleotide
  Target: COL7A1; (+) strand; PAM type: NRG; PAM sequence: GGG
cagcctcccctaacaccatg

SEQ ID NO: 20136 - DNA, 20 bp, Artificial Sequence
  Description of Artificial Sequence: Synthetic oligonucleotide
  Target: COL7A1; (+) strand; PAM type: NRG; PAM sequence: GAG
gcctcccctaacaccatggg

SEQ ID NO: 20137 - DNA, 20 bp, Artificial Sequence
  Description of Artificial Sequence: Synthetic oligonucleotide
  Target: COL7A1; (+) strand; PAM type: NRG; PAM sequence: CAG
ccctaacaccatggggagcc

SEQ ID NO: 20138 - DNA, 20 bp, Artificial Sequence
  Description of Artificial Sequence: Synthetic oligonucleotide
  Target: COL7A1; (+) strand; PAM type: NRG; PAM sequence: GAG
ctaacaccatggggagccca

SEQ ID NO: 20139 - DNA, 20 bp, Artificial Sequence
  Description of Artificial Sequence: Synthetic oligonucleotide
  Target: COL7A1; (+) strand; PAM type: NRG; PAM sequence: TAG
acaccatggggagcccagag

SEQ ID NO: 20140 - DNA, 20 bp, Artificial Sequence
  Description of Artificial Sequence: Synthetic oligonucleotide
  Target: COL7A1; (+) strand; PAM type: NRG; PAM sequence: TGG
tcacacctgaatcccccaac

SEQ ID NO: 20141 - DNA, 20 bp, Artificial Sequence
  Description of Artificial Sequence: Synthetic oligonucleotide
  Target: COL7A1; (+) strand; PAM type: NRG; PAM sequence: TGG
cccccaactggtactcactt

SEQ ID NO: 20142 - DNA, 20 bp, Artificial Sequence
  Description of Artificial Sequence: Synthetic oligonucleotide
  Target: COL7A1; (+) strand; PAM type: NRG; PAM sequence: GGG
ccccaactggtactcacttt

SEQ ID NO: 20143 - DNA, 20 bp, Artificial Sequence
  Description of Artificial Sequence: Synthetic oligonucleotide
  Target: COL7A1; (+) strand; PAM type: NRG; PAM sequence: GGG
cccaactggtactcactttg

SEQ ID NO: 20144 - DNA, 20 bp, Artificial Sequence
  Description of Artificial Sequence: Synthetic oligonucleotide
  Target: COL7A1; (+) strand; PAM type: NRG; PAM sequence: TAG
ggtactcactttggggccaa

SEQ ID NO: 20145 - DNA, 20 bp, Artificial Sequence
  Description of Artificial Sequence: Synthetic oligonucleotide
  Target: COL7A1; (+) strand; PAM type: NRG; PAM sequence: CAG
cactttggggccaatagctc

SEQ ID NO: 20146 - DNA, 20 bp, Artificial Sequence
  Description of Artificial Sequence: Synthetic oligonucleotide
  Target: COL7A1; (+) strand; PAM type: NRG; PAM sequence: AGG
actttggggccaatagctcc

SEQ ID NO: 20147 - DNA, 20 bp, Artificial Sequence
  Description of Artificial Sequence: Synthetic oligonucleotide
  Target: COL7A1; (+) strand; PAM type: NRG; PAM sequence: GAG
tttggggccaatagctccag

SEQ ID NO: 20148 - DNA, 20 bp, Artificial Sequence
  Description of Artificial Sequence: Synthetic oligonucleotide
  Target: COL7A1; (+) strand; PAM type: NRG; PAM sequence: AGG
ttggggccaatagctccagg

SEQ ID NO: 20149 - DNA, 20 bp, Artificial Sequence
  Description of Artificial Sequence: Synthetic oligonucleotide
  Target: COL7A1; (+) strand; PAM type: NRG; PAM sequence: TGG
atagctccaggaggtccccg

SEQ ID NO: 20150 - DNA, 20 bp, Artificial Sequence
  Description of Artificial Sequence: Synthetic oligonucleotide
  Target: COL7A1; (+) strand; PAM type: NRG; PAM sequence: GGG
tagctccaggaggtccccgt

SEQ ID NO: 20151 - DNA, 20 bp, Artificial Sequence
  Description of Artificial Sequence: Synthetic oligonucleotide
  Target: COL7A1; (+) strand; PAM type: NRG; PAM sequence: TGG
caggaggtccccgtgggccc

SEQ ID NO: 20152 - DNA, 20 bp, Artificial Sequence
  Description of Artificial Sequence: Synthetic oligonucleotide
  Target: COL7A1; (+) strand; PAM type: NRG; PAM sequence: AAG
gaggtccccgtgggccctgg

SEQ ID NO: 20153 - DNA, 20 bp, Artificial Sequence
  Description of Artificial Sequence: Synthetic oligonucleotide
  Target: COL7A1; (+) strand; PAM type: NRG; PAM sequence: AGG
aggtccccgtgggccctgga

SEQ ID NO: 20154 - DNA, 20 bp, Artificial Sequence
  Description of Artificial Sequence: Synthetic oligonucleotide
  Target: COL7A1; (+) strand; PAM type: NRG; PAM sequence: GGG
ggtccccgtgggccctggaa

SEQ ID NO: 20155 - DNA, 20 bp, Artificial Sequence
  Description of Artificial Sequence: Synthetic oligonucleotide
  Target: COL7A1; (+) strand; PAM type: NRG; PAM sequence: TGG
ggccctggaagggatgaatt

SEQ ID NO: 20156 - DNA, 20 bp, Artificial Sequence
  Description of Artificial Sequence: Synthetic oligonucleotide
  Target: COL7A1; (+) strand; PAM type: NRG; PAM sequence: GGG
gccctggaagggatgaattt

SEQ ID NO: 20157 - DNA, 20 bp, Artificial Sequence
  Description of Artificial Sequence: Synthetic oligonucleotide
  Target: COL7A1; (+) strand; PAM type: NRG; PAM sequence: GGG
ccctggaagggatgaatttg

SEQ ID NO: 20158 - DNA, 20 bp, Artificial Sequence
  Description of Artificial Sequence: Synthetic oligonucleotide
  Target: COL7A1; (+) strand; PAM type: NRG; PAM sequence: GGG
cctggaagggatgaatttgg

SEQ ID NO: 20159 - DNA, 20 bp, Artificial Sequence
  Description of Artificial Sequence: Synthetic oligonucleotide
  Target: COL7A1; (+) strand; PAM type: NRG; PAM sequence: CAG
aagggatgaatttgggggtt

SEQ ID NO: 20160 - DNA, 20 bp, Artificial Sequence
  Description of Artificial Sequence: Synthetic oligonucleotide
  Target: COL7A1; (+) strand; PAM type: NRG; PAM sequence: GAG
gggatgaatttgggggttca

SEQ ID NO: 20161 - DNA, 20 bp, Artificial Sequence
  Description of Artificial Sequence: Synthetic oligonucleotide
  Target: COL7A1; (+) strand; PAM type: NRG; PAM sequence: TGG
aatttgggggttcagagatt

SEQ ID NO: 20162 - DNA, 20 bp, Artificial Sequence
  Description of Artificial Sequence: Synthetic oligonucleotide
  Target: COL7A1; (+) strand; PAM type: NRG; PAM sequence: GGG
atttgggggttcagagattt

SEQ ID NO: 20163 - DNA, 20 bp, Artificial Sequence
  Description of Artificial Sequence: Synthetic oligonucleotide
  Target: COL7A1; (+) strand; PAM type: NRG; PAM sequence: TGG
ggggttcagagatttgggtt

SEQ ID NO: 20164 - DNA, 20 bp, Artificial Sequence
  Description of Artificial Sequence: Synthetic oligonucleotide
  Target: COL7A1; (+) strand; PAM type: NRG; PAM sequence: GGG
gggttcagagatttgggttt

SEQ ID NO: 20165 - DNA, 20 bp, Artificial Sequence
  Description of Artificial Sequence: Synthetic oligonucleotide
  Target: COL7A1; (+) strand; PAM type: NRG; PAM sequence: GAG
agagatttgggtttgggcat

SEQ ID NO: 20166 - DNA, 20 bp, Artificial Sequence
  Description of Artificial Sequence: Synthetic oligonucleotide
  Target: COL7A1; (+) strand; PAM type: NRG; PAM sequence: AGG
gagatttgggtttgggcatg

SEQ ID NO: 20167 - DNA, 20 bp, Artificial Sequence
  Description of Artificial Sequence: Synthetic oligonucleotide
  Target: COL7A1; (+) strand; PAM type: NRG; PAM sequence: TGG
tttgggtttgggcatgagga

SEQ ID NO: 20168 - DNA, 20 bp, Artificial Sequence
  Description of Artificial Sequence: Synthetic oligonucleotide
  Target: COL7A1; (+) strand; PAM type: NRG; PAM sequence: GAG
tgggtttgggcatgaggatg

SEQ ID NO: 20169 - DNA, 20 bp, Artificial Sequence
  Description of Artificial Sequence: Synthetic oligonucleotide
  Target: COL7A1; (+) strand; PAM type: NRG; PAM sequence: CAG
gtttgggcatgaggatggag

SEQ ID NO: 20170 - DNA, 20 bp, Artificial Sequence
  Description of Artificial Sequence: Synthetic oligonucleotide
  Target: COL7A1; (+) strand; PAM type: NRG; PAM sequence: TGG
tgggcatgaggatggagcag

SEQ ID NO: 20171 - DNA, 20 bp, Artificial Sequence
  Description of Artificial Sequence: Synthetic oligonucleotide
  Target: COL7A1; (+) strand; PAM type: NRG; PAM sequence: GAG
tggagcagtggttgatgatt

SEQ ID NO: 20172 - DNA, 20 bp, Artificial Sequence
  Description of Artificial Sequence: Synthetic oligonucleotide
  Target: COL7A1; (+) strand; PAM type: NRG; PAM sequence: AGG
ggagcagtggttgatgattg

SEQ ID NO: 20173 - DNA, 20 bp, Artificial Sequence
  Description of Artificial Sequence: Synthetic oligonucleotide
  Target: COL7A1; (+) strand; PAM type: NRG; PAM sequence: TAG
gcagtggttgatgattgagg

SEQ ID NO: 20174 - DNA, 20 bp, Artificial Sequence
  Description of Artificial Sequence: Synthetic oligonucleotide
  Target: COL7A1; (+) strand; PAM type: NRG; PAM sequence: AGG
cagtggttgatgattgaggt

SEQ ID NO: 20175 - DNA, 20 bp, Artificial Sequence
  Description of Artificial Sequence: Synthetic oligonucleotide
  Target: COL7A1; (+) strand; PAM type: NRG; PAM sequence: GGG
agtggttgatgattgaggta

SEQ ID NO: 20176 - DNA, 20 bp, Artificial Sequence
  Description of Artificial Sequence: Synthetic oligonucleotide
  Target: COL7A1; (+) strand; PAM type: NRG; PAM sequence: GGG
gtggttgatgattgaggtag

SEQ ID NO: 20177 - DNA, 20 bp, Artificial Sequence
  Description of Artificial Sequence: Synthetic oligonucleotide
  Target: COL7A1; (+) strand; PAM type: NRG; PAM sequence: TGG
ttgatgattgaggtaggggc

SEQ ID NO: 20178 - DNA, 20 bp, Artificial Sequence
  Description of Artificial Sequence: Synthetic oligonucleotide
  Target: COL7A1; (+) strand; PAM type: NRG; PAM sequence: GAG
gatgattgaggtaggggctg

SEQ ID NO: 20179 - DNA, 20 bp, Artificial Sequence
  Description of Artificial Sequence: Synthetic oligonucleotide
  Target: COL7A1; (+) strand; PAM type: NRG; PAM sequence: CAG
ggagctgtgcccaccatatt

SEQ ID NO: 20180 - DNA, 20 bp, Artificial Sequence
  Description of Artificial Sequence: Synthetic oligonucleotide
  Target: COL7A1; (+) strand; PAM type: NRG; PAM sequence: TGG
cccaccatattcagaatccc

SEQ ID NO: 20181 - DNA, 20 bp, Artificial Sequence
  Description of Artificial Sequence: Synthetic oligonucleotide
  Target: COL7A1; (+) strand; PAM type: NRG; PAM sequence: CGG
cctccactcacctgctcacc

SEQ ID NO: 20182 - DNA, 20 bp, Artificial Sequence
  Description of Artificial Sequence: Synthetic oligonucleotide
  Target: COL7A1; (+) strand; PAM type: NRG; PAM sequence: GAG
tccactcacctgctcacccg

SEQ ID NO: 20183 - DNA, 20 bp, Artificial Sequence
  Description of Artificial Sequence: Synthetic oligonucleotide
  Target: COL7A1; (+) strand; PAM type: NRG; PAM sequence: CAG
cacctgctcacccggagacc

SEQ ID NO: 20184 - DNA, 20 bp, Artificial Sequence
  Description of Artificial Sequence: Synthetic oligonucleotide
  Target: COL7A1; (+) strand; PAM type: NRG; PAM sequence: AGG
acctgctcacccggagaccc

SEQ ID NO: 20185 - DNA, 20 bp, Artificial Sequence
  Description of Artificial Sequence: Synthetic oligonucleotide
  Target: COL7A1; (+) strand; PAM type: NRG; PAM sequence: TGG
cccggagacccaggttgtcc

SEQ ID NO: 20186 - DNA, 20 bp, Artificial Sequence
  Description of Artificial Sequence: Synthetic oligonucleotide
  Target: COL7A1; (+) strand; PAM type: NRG; PAM sequence: GGG
ccggagacccaggttgtcct

SEQ ID NO: 20187 - DNA, 20 bp, Artificial Sequence
  Description of Artificial Sequence: Synthetic oligonucleotide
  Target: COL7A1; (+) strand; PAM type: NRG; PAM sequence: GAG
ggagacccaggttgtcctgg

SEQ ID NO: 20188 - DNA, 20 bp, Artificial Sequence
  Description of Artificial Sequence: Synthetic oligonucleotide
  Target: COL7A1; (+) strand; PAM type: NRG; PAM sequence: AGG
gagacccaggttgtcctggg

SEQ ID NO: 20189 - DNA, 20 bp, Artificial Sequence
  Description of Artificial Sequence: Synthetic oligonucleotide
  Target: COL7A1; (+) strand; PAM type: NRG; PAM sequence: TGG
ccaggttgtcctgggaggcc

SEQ ID NO: 20190 - DNA, 20 bp, Artificial Sequence
  Description of Artificial Sequence: Synthetic oligonucleotide
  Target: COL7A1; (+) strand; PAM type: NRG; PAM sequence: GAG
aggttgtcctgggaggcctg

SEQ ID NO: 20191 - DNA, 20 bp, Artificial Sequence
  Description of Artificial Sequence: Synthetic oligonucleotide
  Target: COL7A1; (+) strand; PAM type: NRG; PAM sequence: CAG
gaggcctggagctccatcct

SEQ ID NO: 20192 - DNA, 20 bp, Artificial Sequence
  Description of Artificial Sequence: Synthetic oligonucleotide
  Target: COL7A1; (+) strand; PAM type: NRG; PAM sequence: GAG
ggcctggagctccatcctca

SEQ ID NO: 20193 - DNA, 20 bp, Artificial Sequence
  Description of Artificial Sequence: Synthetic oligonucleotide
  Target: COL7A1; (+) strand; PAM type: NRG; PAM sequence: AAG
ccatcctcagagtcaccctg

SEQ ID NO: 20194 - DNA, 20 bp, Artificial Sequence
  Description of Artificial Sequence: Synthetic oligonucleotide
  Target: COL7A1; (+) strand; PAM type: NRG; PAM sequence: AGG
catcctcagagtcaccctga

SEQ ID NO: 20195 - DNA, 20 bp, Artificial Sequence
  Description of Artificial Sequence: Synthetic oligonucleotide
  Target: COL7A1; (+) strand; PAM type: NRG; PAM sequence: GAG
tcctcagagtcaccctgaag

SEQ ID NO: 20196 - DNA, 20 bp, Artificial Sequence
  Description of Artificial Sequence: Synthetic oligonucleotide
  Target: COL7A1; (+) strand; PAM type: NRG; PAM sequence: CGG
caccctgaaggagaaacaca

SEQ ID NO: 20197 - DNA, 20 bp, Artificial Sequence
  Description of Artificial Sequence: Synthetic oligonucleotide
  Target: COL7A1; (+) strand; PAM type: NRG; PAM sequence: GGG
accctgaaggagaaacacac

SEQ ID NO: 20198 - DNA, 20 bp, Artificial Sequence
  Description of Artificial Sequence: Synthetic oligonucleotide
  Target: COL7A1; (+) strand; PAM type: NRG; PAM sequence: TGG
ctgaaggagaaacacacggg

SEQ ID NO: 20199 - DNA, 20 bp, Artificial Sequence
  Description of Artificial Sequence: Synthetic oligonucleotide
  Target: COL7A1; (+) strand; PAM type: NRG; PAM sequence: GGG
tgaaggagaaacacacgggt

SEQ ID NO: 20200 - DNA, 20 bp, Artificial Sequence
  Description of Artificial Sequence: Synthetic oligonucleotide
  Target: COL7A1; (+) strand; PAM type: NRG; PAM sequence: AAG
aggagaaacacacgggtggg

SEQ ID NO: 20201 - DNA, 20 bp, Artificial Sequence
  Description of Artificial Sequence: Synthetic oligonucleotide
  Target: COL7A1; (+) strand; PAM type: NRG; PAM sequence: AAG
acacacgggtgggaagaccg

SEQ ID NO: 20202 - DNA, 20 bp, Artificial Sequence
  Description of Artificial Sequence: Synthetic oligonucleotide
  Target: COL7A1; (+) strand; PAM type: NRG; PAM sequence: AGG
cacacgggtgggaagaccga

SEQ ID NO: 20203 - DNA, 20 bp, Artificial Sequence
  Description of Artificial Sequence: Synthetic oligonucleotide
  Target: COL7A1; (+) strand; PAM type: NRG; PAM sequence: GGG
acacgggtgggaagaccgaa

SEQ ID NO: 20204 - DNA, 20 bp, Artificial Sequence
  Description of Artificial Sequence: Synthetic oligonucleotide
  Target: COL7A1; (+) strand; PAM type: NRG; PAM sequence: GAG
acgggtgggaagaccgaagg

SEQ ID NO: 20205 - DNA, 20 bp, Artificial Sequence
  Description of Artificial Sequence: Synthetic oligonucleotide
  Target: COL7A1; (+) strand; PAM type: NRG; PAM sequence: AGG
cgggtgggaagaccgaaggg

SEQ ID NO: 20206 - DNA, 20 bp, Artificial Sequence
  Description of Artificial Sequence: Synthetic oligonucleotide
  Target: COL7A1; (+) strand; PAM type: NRG; PAM sequence: CAG
ccgaagggaggccctgcccc

SEQ ID NO: 20207 - DNA, 20 bp, Artificial Sequence
  Description of Artificial Sequence: Synthetic oligonucleotide
  Target: COL7A1; (+) strand; PAM type: NRG; PAM sequence: CAG
gaggccctgcccccagcacg

SEQ ID NO: 20208 - DNA, 20 bp, Artificial Sequence
  Description of Artificial Sequence: Synthetic oligonucleotide
  Target: COL7A1; (+) strand; PAM type: NRG; PAM sequence: CAG
cagcacgcagcctcccaccc

SEQ ID NO: 20209 - DNA, 20 bp, Artificial Sequence
  Description of Artificial Sequence: Synthetic oligonucleotide
  Target: COL7A1; (+) strand; PAM type: NRG; PAM sequence: TGG
gcagcctcccaccccagaac

SEQ ID NO: 20210 - DNA, 20 bp, Artificial Sequence
  Description of Artificial Sequence: Synthetic oligonucleotide
  Target: COL7A1; (+) strand; PAM type: NRG; PAM sequence: GGG
cagcctcccaccccagaact

SEQ ID NO: 20211 - DNA, 20 bp, Artificial Sequence
  Description of Artificial Sequence: Synthetic oligonucleotide
  Target: COL7A1; (+) strand; PAM type: NRG; PAM sequence: AAG
cccagaactgggacatcatc

SEQ ID NO: 20212 - DNA, 20 bp, Artificial Sequence
  Description of Artificial Sequence: Synthetic oligonucleotide
  Target: COL7A1; (+) strand; PAM type: NRG; PAM sequence: CAG
gaactgggacatcatcaagt

SEQ ID NO: 20213 - DNA, 20 bp, Artificial Sequence
  Description of Artificial Sequence: Synthetic oligonucleotide
  Target: COL7A1; (+) strand; PAM type: NRG; PAM sequence: CAG
tactttttctcctttctttc

SEQ ID NO: 20214 - DNA, 20 bp, Artificial Sequence
  Description of Artificial Sequence: Synthetic oligonucleotide
  Target: COL7A1; (+) strand; PAM type: NRG; PAM sequence: AGG
actttttctcctttctttcc

SEQ ID NO: 20215 - DNA, 20 bp, Artificial Sequence
  Description of Artificial Sequence: Synthetic oligonucleotide
  Target: COL7A1; (+) strand; PAM type: NRG; PAM sequence: GGG
ctttttctcctttctttcca

SEQ ID NO: 20216 - DNA, 20 bp, Artificial Sequence
  Description of Artificial Sequence: Synthetic oligonucleotide
  Target: COL7A1; (+) strand; PAM type: NRG; PAM sequence: GGG
tttttctcctttctttccag

SEQ ID NO: 20217 - DNA, 20 bp, Artificial Sequence
  Description of Artificial Sequence: Synthetic oligonucleotide
  Target: COL7A1; (+) strand; PAM type: NRG; PAM sequence: GGG
ttttctcctttctttccagg

SEQ ID NO: 20218 - DNA, 20 bp, Artificial Sequence
  Description of Artificial Sequence: Synthetic oligonucleotide
  Target: COL7A1; (+) strand; PAM type: NRG; PAM sequence: GGG
tttctcctttctttccaggg

SEQ ID NO: 20219 - DNA, 20 bp, Artificial Sequence
  Description of Artificial Sequence: Synthetic oligonucleotide
  Target: COL7A1; (+) strand; PAM type: NRG; PAM sequence: CGG
tttctttccaggggggccaa

SEQ ID NO: 20220 - DNA, 20 bp, Artificial Sequence
  Description of Artificial Sequence: Synthetic oligonucleotide
  Target: COL7A1; (+) strand; PAM type: NRG; PAM sequence: GGG
ttctttccaggggggccaac

SEQ ID NO: 20221 - DNA, 20 bp, Artificial Sequence
  Description of Artificial Sequence: Synthetic oligonucleotide
  Target: COL7A1; (+) strand; PAM type: NRG; PAM sequence: GGG
tctttccaggggggccaacg

SEQ ID NO: 20222 - DNA, 20 bp, Artificial Sequence
  Description of Artificial Sequence: Synthetic oligonucleotide
  Target: COL7A1; (+) strand; PAM type: NRG; PAM sequence: TGG
caggggggccaacggggcct

SEQ ID NO: 20223 - DNA, 20 bp, Artificial Sequence
  Description of Artificial Sequence: Synthetic oligonucleotide
  Target: COL7A1; (+) strand; PAM type: NRG; PAM sequence: GGG
aggggggccaacggggcctt

SEQ ID NO: 20224 - DNA, 20 bp, Artificial Sequence
  Description of Artificial Sequence: Synthetic oligonucleotide
  Target: COL7A1; (+) strand; PAM type: NRG; PAM sequence: GGG
ggggggccaacggggccttg

SEQ ID NO: 20225 - DNA, 20 bp, Artificial Sequence
  Description of Artificial Sequence: Synthetic oligonucleotide
  Target: COL7A1; (+) strand; PAM type: NRG; PAM sequence: CAG
gccaacggggccttggggtc

SEQ ID NO: 20226 - DNA, 20 bp, Artificial Sequence
  Description of Artificial Sequence: Synthetic oligonucleotide
  Target: COL7A1; (+) strand; PAM type: NRG; PAM sequence: AGG
ccaacggggccttggggtcc

SEQ ID NO: 20227 - DNA, 20 bp, Artificial Sequence
  Description of Artificial Sequence: Synthetic oligonucleotide
  Target: COL7A1; (+) strand; PAM type: NRG; PAM sequence: GGG
caacggggccttggggtcca

SEQ ID NO: 20228 - DNA, 20 bp, Artificial Sequence
  Description of Artificial Sequence: Synthetic oligonucleotide
  Target: COL7A1; (+) strand; PAM type: NRG; PAM sequence: CGG
gccttggggtccagggcttc

SEQ ID NO: 20229 - DNA, 20 bp, Artificial Sequence
  Description of Artificial Sequence: Synthetic oligonucleotide
  Target: COL7A1; (+) strand; PAM type: NRG; PAM sequence: GGG
ccttggggtccagggcttcc

SEQ ID NO: 20230 - DNA, 20 bp, Artificial Sequence
  Description of Artificial Sequence: Synthetic oligonucleotide
  Target: COL7A1; (+) strand; PAM type: NRG; PAM sequence: AAG
tggggtccagggcttccggg

SEQ ID NO: 20231 - DNA, 20 bp, Artificial Sequence
  Description of Artificial Sequence: Synthetic oligonucleotide
  Target: COL7A1; (+) strand; PAM type: NRG; PAM sequence: TAG
cagggcttccgggaagaccc

SEQ ID NO: 20232 - DNA, 20 bp, Artificial Sequence
  Description of Artificial Sequence: Synthetic oligonucleotide
  Target: COL7A1; (+) strand; PAM type: NRG; PAM sequence: AGG
agggcttccgggaagaccct

SEQ ID NO: 20233 - DNA, 20 bp, Artificial Sequence
  Description of Artificial Sequence: Synthetic oligonucleotide
  Target: COL7A1; (+) strand; PAM type: NRG; PAM sequence: AAG
gcttccgggaagaccctagg

SEQ ID NO: 20234 - DNA, 20 bp, Artificial Sequence
  Description of Artificial Sequence: Synthetic oligonucleotide
  Target: COL7A1; (+) strand; PAM type: NRG; PAM sequence: AAG
tccgggaagaccctaggaag

SEQ ID NO: 20235 - DNA, 20 bp, Artificial Sequence
  Description of Artificial Sequence: Synthetic oligonucleotide
  Target: COL7A1; (+) strand; PAM type: NRG; PAM sequence: GAG
ggaagaccctaggaagaagt

SEQ ID NO: 20236 - DNA, 20 bp, Artificial Sequence
  Description of Artificial Sequence: Synthetic oligonucleotide
  Target: COL7A1; (+) strand; PAM type: NRG; PAM sequence: GAG
gaagaagtgagtaaaaatat

SEQ ID NO: 20237 - DNA, 20 bp, Artificial Sequence
  Description of Artificial Sequence: Synthetic oligonucleotide
  Target: COL7A1; (+) strand; PAM type: NRG; PAM sequence: AAG
agtgagtaaaaatatgagcc

SEQ ID NO: 20238 - DNA, 20 bp, Artificial Sequence
  Description of Artificial Sequence: Synthetic oligonucleotide
  Target: COL7A1; (+) strand; PAM type: NRG; PAM sequence: AAG
aatatgagccaagaactatg

SEQ ID NO: 20239 - DNA, 20 bp, Artificial Sequence
  Description of Artificial Sequence: Synthetic oligonucleotide
  Target: COL7A1; (+) strand; PAM type: NRG; PAM sequence: CAG
gagccaagaactatgaagcc

SEQ ID NO: 20240 - DNA, 20 bp, Artificial Sequence
  Description of Artificial Sequence: Synthetic oligonucleotide
  Target: COL7A1; (+) strand; PAM type: NRG; PAM sequence: CAG
ccagcacccaaccactgccc

SEQ ID NO: 20241 - DNA, 20 bp, Artificial Sequence
  Description of Artificial Sequence: Synthetic oligonucleotide
  Target: COL7A1; (+) strand; PAM type: NRG; PAM sequence: AGG
cagcacccaaccactgcccc

SEQ ID NO: 20242 - DNA, 20 bp, Artificial Sequence
  Description of Artificial Sequence: Synthetic oligonucleotide
  Target: COL7A1; (+) strand; PAM type: NRG; PAM sequence: GAG
gcacccaaccactgccccag

SEQ ID NO: 20243 - DNA, 20 bp, Artificial Sequence
  Description of Artificial Sequence: Synthetic oligonucleotide
  Target: COL7A1; (+) strand; PAM type: NRG; PAM sequence: GAG
acccaaccactgccccagga

SEQ ID NO: 20244 - DNA, 20 bp, Artificial Sequence
  Description of Artificial Sequence: Synthetic oligonucleotide
  Target: COL7A1; (+) strand; PAM type: NRG; PAM sequence: GAG
caggagagacccacacccct

SEQ ID NO: 20245 - DNA, 20 bp, Artificial Sequence
  Description of Artificial Sequence: Synthetic oligonucleotide
  Target: COL7A1; (+) strand; PAM type: NRG; PAM sequence: CAG
gagagacccacacccctgag

SEQ ID NO: 20246 - DNA, 20 bp, Artificial Sequence
  Description of Artificial Sequence: Synthetic oligonucleotide
  Target: COL7A1; (+) strand; PAM type: NRG; PAM sequence: AGG
agagacccacacccctgagc

SEQ ID NO: 20247 - DNA, 20 bp, Artificial Sequence
  Description of Artificial Sequence: Synthetic oligonucleotide
  Target: COL7A1; (+) strand; PAM type: NRG; PAM sequence: GGG
gagacccacacccctgagca

SEQ ID NO: 20248 - DNA, 20 bp, Artificial Sequence
  Description of Artificial Sequence: Synthetic oligonucleotide
  Target: COL7A1; (+) strand; PAM type: NRG; PAM sequence: CAG
acacccctgagcagggcccc

SEQ ID NO: 20249 - DNA, 20 bp, Artificial Sequence
  Description of Artificial Sequence: Synthetic oligonucleotide
  Target: COL7A1; (+) strand; PAM type: NRG; PAM sequence: CAG
cccctgagcagggcccccag

SEQ ID NO: 20250 - DNA, 20 bp, Artificial Sequence
  Description of Artificial Sequence: Synthetic oligonucleotide
  Target: COL7A1; (+) strand; PAM type: NRG; PAM sequence: GAG
cctgagcagggcccccagca

SEQ ID NO: 20251 - DNA, 20 bp, Artificial Sequence
  Description of Artificial Sequence: Synthetic oligonucleotide
  Target: COL7A1; (+) strand; PAM type: NRG; PAM sequence: AAG
agggcccccagcagagcctc

SEQ ID NO: 20252 - DNA, 20 bp, Artificial Sequence
  Description of Artificial Sequence: Synthetic oligonucleotide
  Target: COL7A1; (+) strand; PAM type: NRG; PAM sequence: AGG
gggcccccagcagagcctca

SEQ ID NO: 20253 - DNA, 20 bp, Artificial Sequence
  Description of Artificial Sequence: Synthetic oligonucleotide
  Target: COL7A1; (+) strand; PAM type: NRG; PAM sequence: CGG
agagcctcaaggcccctcac

SEQ ID NO: 20254 - DNA, 20 bp, Artificial Sequence
  Description of Artificial Sequence: Synthetic oligonucleotide
  Target: COL7A1; (+) strand; PAM type: NRG; PAM sequence: CAG
gcctcaaggcccctcaccgg

SEQ ID NO: 20255 - DNA, 20 bp, Artificial Sequence
  Description of Artificial Sequence: Synthetic oligonucleotide
  Target: COL7A1; (+) strand; PAM type: NRG; PAM sequence: CAG
aaggcccctcaccggcagcc

SEQ ID NO: 20256 - DNA, 20 bp, Artificial Sequence
  Description of Artificial Sequence: Synthetic oligonucleotide
  Target: COL7A1; (+) strand; PAM type: NRG; PAM sequence: AGG
aggcccctcaccggcagccc

SEQ ID NO: 20257 - DNA, 20 bp, Artificial Sequence
  Description of Artificial Sequence: Synthetic oligonucleotide
  Target: COL7A1; (+) strand; PAM type: NRG; PAM sequence: CAG
caccggcagcccaggctccc

SEQ ID NO: 20258 - DNA, 20 bp, Artificial Sequence
  Description of Artificial Sequence: Synthetic oligonucleotide
  Target: COL7A1; (+) strand; PAM type: NRG; PAM sequence: AGG
accggcagcccaggctcccc

SEQ ID NO: 20259 - DNA, 20 bp, Artificial Sequence
  Description of Artificial Sequence: Synthetic oligonucleotide
  Target: COL7A1; (+) strand; PAM type: NRG; PAM sequence: GAG
cggcagcccaggctccccag

SEQ ID NO: 20260 - DNA, 20 bp, Artificial Sequence
  Description of Artificial Sequence: Synthetic oligonucleotide
  Target: COL7A1; (+) strand; PAM type: NRG; PAM sequence: TGG
ggagcaatgccaccttcacc

SEQ ID NO: 20261 - DNA, 20 bp, Artificial Sequence
  Description of Artificial Sequence: Synthetic oligonucleotide
  Target: COL7A1; (+) strand; PAM type: NRG; PAM sequence: CAG
aatgccaccttcacctggtc

SEQ ID NO: 20262 - DNA, 20 bp, Artificial Sequence
  Description of Artificial Sequence: Synthetic oligonucleotide
  Target: COL7A1; (+) strand; PAM type: NRG; PAM sequence: AGG
atgccaccttcacctggtcc

SEQ ID NO: 20263 - DNA, 20 bp, Artificial Sequence
  Description of Artificial Sequence: Synthetic oligonucleotide
  Target: COL7A1; (+) strand; PAM type: NRG; PAM sequence: GGG
tgccaccttcacctggtcca

SEQ ID NO: 20264 - DNA, 20 bp, Artificial Sequence
  Description of Artificial Sequence: Synthetic oligonucleotide
  Target: COL7A1; (+) strand; PAM type: NRG; PAM sequence: GGG
gccaccttcacctggtccag

SEQ ID NO: 20265 - DNA, 20 bp, Artificial Sequence
  Description of Artificial Sequence: Synthetic oligonucleotide
  Target: COL7A1; (+) strand; PAM type: NRG; PAM sequence: GGG
ccaccttcacctggtccagg

SEQ ID NO: 20266 - DNA, 20 bp, Artificial Sequence
  Description of Artificial Sequence: Synthetic oligonucleotide
  Target: COL7A1; (+) strand; PAM type: NRG; PAM sequence: TGG
cacctggtccagggggaccc

SEQ ID NO: 20267 - DNA, 20 bp, Artificial Sequence
  Description of Artificial Sequence: Synthetic oligonucleotide
  Target: COL7A1; (+) strand; PAM type: NRG; PAM sequence: GGG
acctggtccagggggaccct

SEQ ID NO: 20268 - DNA, 20 bp, Artificial Sequence
  Description of Artificial Sequence: Synthetic oligonucleotide
  Target: COL7A1; (+) strand; PAM type: NRG; PAM sequence: GAG
ctggtccagggggaccctgg

SEQ ID NO: 20269 - DNA, 20 bp, Artificial Sequence
  Description of Artificial Sequence: Synthetic oligonucleotide
  Target: COL7A1; (+) strand; PAM type: NRG; PAM sequence: GAG
ggtccagggggaccctggga

SEQ ID NO: 20270 - DNA, 20 bp, Artificial Sequence
  Description of Artificial Sequence: Synthetic oligonucleotide
  Target: COL7A1; (+) strand; PAM type: NRG; PAM sequence: CAG
agggggaccctgggagagaa

SEQ ID NO: 20271 - DNA, 20 bp, Artificial Sequence
  Description of Artificial Sequence: Synthetic oligonucleotide
  Target: COL7A1; (+) strand; PAM type: NRG; PAM sequence: CAG
gggaccctgggagagaacag

SEQ ID NO: 20272 - DNA, 20 bp, Artificial Sequence
  Description of Artificial Sequence: Synthetic oligonucleotide
  Target: COL7A1; (+) strand; PAM type: NRG; PAM sequence: AGG
ggaccctgggagagaacagc

SEQ ID NO: 20273 - DNA, 20 bp, Artificial Sequence
  Description of Artificial Sequence: Synthetic oligonucleotide
  Target: COL7A1; (+) strand; PAM type: NRG; PAM sequence: CAG
cctgggagagaacagcaggt

SEQ ID NO: 20274 - DNA, 20 bp, Artificial Sequence
  Description of Artificial Sequence: Synthetic oligonucleotide
  Target: COL7A1; (+) strand; PAM type: NRG; PAM sequence: AGG
ctgggagagaacagcaggtc

SEQ ID NO: 20275 - DNA, 20 bp, Artificial Sequence
  Description of Artificial Sequence: Synthetic oligonucleotide
  Target: COL7A1; (+) strand; PAM type: NRG; PAM sequence: GGG
tgggagagaacagcaggtca

SEQ ID NO: 20276 - DNA, 20 bp, Artificial Sequence
  Description of Artificial Sequence: Synthetic oligonucleotide
  Target: COL7A1; (+) strand; PAM type: NRG; PAM sequence: CAG
acagcaggtcagggaatgaa

SEQ ID NO: 20277 - DNA, 20 bp, Artificial Sequence
  Description of Artificial Sequence: Synthetic oligonucleotide
  Target: COL7A1; (+) strand; PAM type: NRG; PAM sequence: AGG
cagcaggtcagggaatgaac

SEQ ID NO: 20278 - DNA, 20 bp, Artificial Sequence
  Description of Artificial Sequence: Synthetic oligonucleotide
  Target: COL7A1; (+) strand; PAM type: NRG; PAM sequence: GGG
agcaggtcagggaatgaaca

SEQ ID NO: 20279 - DNA, 20 bp, Artificial Sequence
  Description of Artificial Sequence: Synthetic oligonucleotide
  Target: COL7A1; (+) strand; PAM type: NRG; PAM sequence: GGG
gcaggtcagggaatgaacag

SEQ ID NO: 20280 - DNA, 20 bp, Artificial Sequence
  Description of Artificial Sequence: Synthetic oligonucleotide
  Target: COL7A1; (+) strand; PAM type: NRG; PAM sequence: CAG
cagggaatgaacaggggaat

SEQ ID NO: 20281 - DNA, 20 bp, Artificial Sequence
  Description of Artificial Sequence: Synthetic oligonucleotide
  Target: COL7A1; (+) strand; PAM type: NRG; PAM sequence: AAG
gaacaggggaatcagactcc

SEQ ID NO: 20282 - DNA, 20 bp, Artificial Sequence
  Description of Artificial Sequence: Synthetic oligonucleotide
  Target: COL7A1; (+) strand; PAM type: NRG; PAM sequence: TAG
atcagactccaagccacccc

SEQ ID NO: 20283 - DNA, 20 bp, Artificial Sequence
  Description of Artificial Sequence: Synthetic oligonucleotide
  Target: COL7A1; (+) strand; PAM type: NRG; PAM sequence: TAG
cacgatcgcctttgtcaccc

SEQ ID NO: 20284 - DNA, 20 bp, Artificial Sequence
  Description of Artificial Sequence: Synthetic oligonucleotide
  Target: COL7A1; (+) strand; PAM type: NRG; PAM sequence: CAG
gcctttgtcaccctagaaaa

SEQ ID NO: 20285 - DNA, 20 bp, Artificial Sequence
  Description of Artificial Sequence: Synthetic oligonucleotide
  Target: COL7A1; (+) strand; PAM type: NRG; PAM sequence: TGG
agatgacgaccccatgaccc

SEQ ID NO: 20286 - DNA, 20 bp, Artificial Sequence
  Description of Artificial Sequence: Synthetic oligonucleotide
  Target: COL7A1; (+) strand; PAM type: NRG; PAM sequence: GGG
gatgacgaccccatgaccct

SEQ ID NO: 20287 - DNA, 20 bp, Artificial Sequence
  Description of Artificial Sequence: Synthetic oligonucleotide
  Target: COL7A1; (+) strand; PAM type: NRG; PAM sequence: AAG
tgggccacacctcactccca

SEQ ID NO: 20288 - DNA, 20 bp, Artificial Sequence
  Description of Artificial Sequence: Synthetic oligonucleotide
  Target: COL7A1; (+) strand; PAM type: NRG; PAM sequence: CAG
cacctcactcccaaagatac

SEQ ID NO: 20289 - DNA, 20 bp, Artificial Sequence
  Description of Artificial Sequence: Synthetic oligonucleotide
  Target: COL7A1; (+) strand; PAM type: NRG; PAM sequence: AGG
acctcactcccaaagatacc

SEQ ID NO: 20290 - DNA, 20 bp, Artificial Sequence
  Description of Artificial Sequence: Synthetic oligonucleotide
  Target: COL7A1; (+) strand; PAM type: NRG; PAM sequence: GAG
ctcactcccaaagataccag

SEQ ID NO: 20291 - DNA, 20 bp, Artificial Sequence
  Description of Artificial Sequence: Synthetic oligonucleotide
  Target: COL7A1; (+) strand; PAM type: NRG; PAM sequence: GAG
ccaaagataccaggagtgat

SEQ ID NO: 20292 - DNA, 20 bp, Artificial Sequence
  Description of Artificial Sequence: Synthetic oligonucleotide
  Target: COL7A1; (+) strand; PAM type: NRG; PAM sequence: AGG
caaagataccaggagtgatg

SEQ ID NO: 20293 - DNA, 20 bp, Artificial Sequence
  Description of Artificial Sequence: Synthetic oligonucleotide
  Target: COL7A1; (+) strand; PAM type: NRG; PAM sequence: GGG
aaagataccaggagtgatga

SEQ ID NO: 20294 - DNA, 20 bp, Artificial Sequence
  Description of Artificial Sequence: Synthetic oligonucleotide
  Target: COL7A1; (+) strand; PAM type: NRG; PAM sequence: TGG
accaggagtgatgagggtca

SEQ ID NO: 20295 - DNA, 20 bp, Artificial Sequence
  Description of Artificial Sequence: Synthetic oligonucleotide
  Target: COL7A1; (+) strand; PAM type: NRG; PAM sequence: GGG
ccaggagtgatgagggtcat

SEQ ID NO: 20296 - DNA, 20 bp, Artificial Sequence
  Description of Artificial Sequence: Synthetic oligonucleotide
  Target: COL7A1; (+) strand; PAM type: NRG; PAM sequence: GGG
caggagtgatgagggtcatg

SEQ ID NO: 20297 - DNA, 20 bp, Artificial Sequence
  Description of Artificial Sequence: Synthetic oligonucleotide
  Target: COL7A1; (+) strand; PAM type: NRG; PAM sequence: TGG
tgagggtcatggggtccaat

SEQ ID NO: 20298 - DNA, 20 bp, Artificial Sequence
  Description of Artificial Sequence: Synthetic oligonucleotide
  Target: COL7A1; (+) strand; PAM type: NRG; PAM sequence: AAG
atggggtccaattggatttc

SEQ ID NO: 20299 - DNA, 20 bp, Artificial Sequence
  Description of Artificial Sequence: Synthetic oligonucleotide
  Target: COL7A1; (+) strand; PAM type: NRG; PAM sequence: AGG
tggggtccaattggatttca

SEQ ID NO: 20300 - DNA, 20 bp, Artificial Sequence
  Description of Artificial Sequence: Synthetic oligonucleotide
  Target: COL7A1; (+) strand; PAM type: NRG; PAM sequence: TGG
caattggatttcaaggattt

SEQ ID NO: 20301 - DNA, 20 bp, Artificial Sequence
  Description of Artificial Sequence: Synthetic oligonucleotide
  Target: COL7A1; (+) strand; PAM type: NRG; PAM sequence: GGG
aattggatttcaaggatttt

SEQ ID NO: 20302 - DNA, 20 bp, Artificial Sequence
  Description of Artificial Sequence: Synthetic oligonucleotide
  Target: COL7A1; (+) strand; PAM type: NRG; PAM sequence: GAG
ttggatttcaaggattttgg

SEQ ID NO: 20303 - DNA, 20 bp, Artificial Sequence
  Description of Artificial Sequence: Synthetic oligonucleotide
  Target: COL7A1; (+) strand; PAM type: NRG; PAM sequence: GAG
tcaaggattttgggagaact

SEQ ID NO: 20304 - DNA, 20 bp, Artificial Sequence
  Description of Artificial Sequence: Synthetic oligonucleotide
  Target: COL7A1; (+) strand; PAM type: NRG; PAM sequence: AGG
caaggattttgggagaactg

SEQ ID NO: 20305 - DNA, 20 bp, Artificial Sequence
  Description of Artificial Sequence: Synthetic oligonucleotide
  Target: COL7A1; (+) strand; PAM type: NRG; PAM sequence: TGG
ttgggagaactgaggcgtca

SEQ ID NO: 20306 - DNA, 20 bp, Artificial Sequence
  Description of Artificial Sequence: Synthetic oligonucleotide
  Target: COL7A1; (+) strand; PAM type: NRG; PAM sequence: GAG
gagaactgaggcgtcatggt

SEQ ID NO: 20307 - DNA, 20 bp, Artificial Sequence
  Description of Artificial Sequence: Synthetic oligonucleotide
  Target: COL7A1; (+) strand; PAM type: NRG; PAM sequence: AGG
agaactgaggcgtcatggtg

SEQ ID NO: 20308 - DNA, 20 bp, Artificial Sequence
  Description of Artificial Sequence: Synthetic oligonucleotide
  Target: COL7A1; (+) strand; PAM type: NRG; PAM sequence: TGG
ctgaggcgtcatggtgagga

SEQ ID NO: 20309 - DNA, 20 bp, Artificial Sequence
  Description of Artificial Sequence: Synthetic oligonucleotide
  Target: COL7A1; (+) strand; PAM type: NRG; PAM sequence: GGG
tgaggcgtcatggtgaggat

SEQ ID NO: 20310 - DNA, 20 bp, Artificial Sequence
  Description of Artificial Sequence: Synthetic oligonucleotide
  Target: COL7A1; (+) strand; PAM type: NRG; PAM sequence: GGG
gaggcgtcatggtgaggatg

SEQ ID NO: 20311 - DNA, 20 bp, Artificial Sequence
  Description of Artificial Sequence: Synthetic oligonucleotide
  Target: COL7A1; (+) strand; PAM type: NRG; PAM sequence: GGG
aggcgtcatggtgaggatgg

SEQ ID NO: 20312 - DNA, 20 bp, Artificial Sequence
  Description of Artificial Sequence: Synthetic oligonucleotide
  Target: COL7A1; (+) strand; PAM type: NRG; PAM sequence: AAG
ggtgaggatgggggtaatca

SEQ ID NO: 20313 - DNA, 20 bp, Artificial Sequence
  Description of Artificial Sequence: Synthetic oligonucleotide
  Target: COL7A1; (+) strand; PAM type: NRG; PAM sequence: AGG
gtgaggatgggggtaatcaa

SEQ ID NO: 20314 - DNA, 20 bp, Artificial Sequence
  Description of Artificial Sequence: Synthetic oligonucleotide
  Target: COL7A1; (+) strand; PAM type: NRG; PAM sequence: GGG
tgaggatgggggtaatcaaa

SEQ ID NO: 20315 - DNA, 20 bp, Artificial Sequence
  Description of Artificial Sequence: Synthetic oligonucleotide
  Target: COL7A1; (+) strand; PAM type: NRG; PAM sequence: AAG
gggggtaatcaaagggtcac

SEQ ID NO: 20316 - DNA, 20 bp, Artificial Sequence
  Description of Artificial Sequence: Synthetic oligonucleotide
  Target: COL7A1; (+) strand; PAM type: NRG; PAM sequence: AGG
ggggtaatcaaagggtcaca

SEQ ID NO: 20317 - DNA, 20 bp, Artificial Sequence
  Description of Artificial Sequence: Synthetic oligonucleotide
  Target: COL7A1; (+) strand; PAM type: NRG; PAM sequence: GGG
gggtaatcaaagggtcacaa

SEQ ID NO: 20318 - DNA, 20 bp, Artificial Sequence
  Description of Artificial Sequence: Synthetic oligonucleotide
  Target: COL7A1; (+) strand; PAM type: NRG; PAM sequence: CAG
aatcaaagggtcacaagggc

SEQ ID NO: 20319 - DNA, 20 bp, Artificial Sequence
  Description of Artificial Sequence: Synthetic oligonucleotide
  Target: COL7A1; (+) strand; PAM type: NRG; PAM sequence: GAG
tcaaagggtcacaagggcca

SEQ ID NO: 20320 - DNA, 20 bp, Artificial Sequence
  Description of Artificial Sequence: Synthetic oligonucleotide
  Target: COL7A1; (+) strand; PAM type: NRG; PAM sequence: TGG
gtcacaagggccagagtaac

SEQ ID NO: 20321 - DNA, 20 bp, Artificial Sequence
  Description of Artificial Sequence: Synthetic oligonucleotide
  Target: COL7A1; (+) strand; PAM type: NRG; PAM sequence: CAG
acaagggccagagtaactgg

SEQ ID NO: 20322 - DNA, 20 bp, Artificial Sequence
  Description of Artificial Sequence: Synthetic oligonucleotide
  Target: COL7A1; (+) strand; PAM type: NRG; PAM sequence: AGG
caagggccagagtaactggc

SEQ ID NO: 20323 - DNA, 20 bp, Artificial Sequence
  Description of Artificial Sequence: Synthetic oligonucleotide
  Target: COL7A1; (+) strand; PAM type: NRG; PAM sequence: GGG
aagggccagagtaactggca

SEQ ID NO: 20324 - DNA, 20 bp, Artificial Sequence
  Description of Artificial Sequence: Synthetic oligonucleotide
  Target: COL7A1; (+) strand; PAM type: NRG; PAM sequence: GGG
agggccagagtaactggcag

SEQ ID NO: 20325 - DNA, 20 bp, Artificial Sequence
  Description of Artificial Sequence: Synthetic oligonucleotide
  Target: COL7A1; (+) strand; PAM type: NRG; PAM sequence: TGG
agtaactggcaggggttatg

SEQ ID NO: 20326 - DNA, 20 bp, Artificial Sequence
  Description of Artificial Sequence: Synthetic oligonucleotide
  Target: COL7A1; (+) strand; PAM type: NRG; PAM sequence: GGG
gtaactggcaggggttatgt

SEQ ID NO: 20327 - DNA, 20 bp, Artificial Sequence
  Description of Artificial Sequence: Synthetic oligonucleotide
  Target: COL7A1; (+) strand; PAM type: NRG; PAM sequence: TGG
aggggttatgtgggttcaaa

SEQ ID NO: 20328 - DNA, 20 bp, Artificial Sequence
  Description of Artificial Sequence: Synthetic oligonucleotide
  Target: COL7A1; (+) strand; PAM type: NRG; PAM sequence: GGG
ggggttatgtgggttcaaat

SEQ ID NO: 20329 - DNA, 20 bp, Artificial Sequence
  Description of Artificial Sequence: Synthetic oligonucleotide
  Target: COL7A1; (+) strand; PAM type: NRG; PAM sequence: GGG
gggttatgtgggttcaaatg

SEQ ID NO: 20330 - DNA, 20 bp, Artificial Sequence
  Description of Artificial Sequence: Synthetic oligonucleotide
  Target: COL7A1; (+) strand; PAM type: NRG; PAM sequence: CAG
gtgggttcaaatggggtcac

SEQ ID NO: 20331 - DNA, 20 bp, Artificial Sequence
  Description of Artificial Sequence: Synthetic oligonucleotide
  Target: COL7A1; (+) strand; PAM type: NRG; PAM sequence: AGG
tgggttcaaatggggtcacc

SEQ ID NO: 20332 - DNA, 20 bp, Artificial Sequence
  Description of Artificial Sequence: Synthetic oligonucleotide
  Target: COL7A1; (+) strand; PAM type: NRG; PAM sequence: TGG
caccaggtctctgcatcaca

SEQ ID NO: 20333 - DNA, 20 bp, Artificial Sequence
  Description of Artificial Sequence: Synthetic oligonucleotide
  Target: COL7A1; (+) strand; PAM type: NRG; PAM sequence: GAG
ctgcatcacatggcactcat

SEQ ID NO: 20334 - DNA, 20 bp, Artificial Sequence
  Description of Artificial Sequence: Synthetic oligonucleotide
  Target: COL7A1; (+) strand; PAM type: NRG; PAM sequence: AGG
tgcatcacatggcactcatg

SEQ ID NO: 20335 - DNA, 20 bp, Artificial Sequence
  Description of Artificial Sequence: Synthetic oligonucleotide
  Target: COL7A1; (+) strand; PAM type: NRG; PAM sequence: TGG
tcatgaggctgtcaccttca

SEQ ID NO: 20336 - DNA, 20 bp, Artificial Sequence
  Description of Artificial Sequence: Synthetic oligonucleotide
  Target: COL7A1; (+) strand; PAM type: NRG; PAM sequence: CAG
tgtcaccttcatggctgttc

SEQ ID NO: 20337 - DNA, 20 bp, Artificial Sequence
  Description of Artificial Sequence: Synthetic oligonucleotide
  Target: COL7A1; (+) strand; PAM type: NRG; PAM sequence: AGG
gtcaccttcatggctgttcc

SEQ ID NO: 20338 - DNA, 20 bp, Artificial Sequence
  Description of Artificial Sequence: Synthetic oligonucleotide
  Target: COL7A1; (+) strand; PAM type: NRG; PAM sequence: AAG
accttcatggctgttccagg

SEQ ID NO: 20339 - DNA, 20 bp, Artificial Sequence
  Description of Artificial Sequence: Synthetic oligonucleotide
  Target: COL7A1; (+) strand; PAM type: NRG; PAM sequence: TGG
atggctgttccaggaagccc

SEQ ID NO: 20340 - DNA, 20 bp, Artificial Sequence
  Description of Artificial Sequence: Synthetic oligonucleotide
  Target: COL7A1; (+) strand; PAM type: NRG; PAM sequence: GGG
tggctgttccaggaagccct

SEQ ID NO: 20341 - DNA, 20 bp, Artificial Sequence
  Description of Artificial Sequence: Synthetic oligonucleotide
  Target: COL7A1; (+) strand; PAM type: NRG; PAM sequence: GGG
ggctgttccaggaagccctg

SEQ ID NO: 20342 - DNA, 20 bp, Artificial Sequence
  Description of Artificial Sequence: Synthetic oligonucleotide
  Target: COL7A1; (+) strand; PAM type: NRG; PAM sequence: GGG
gctgttccaggaagccctgg

SEQ ID NO: 20343 - DNA, 20 bp, Artificial Sequence
  Description of Artificial Sequence: Synthetic oligonucleotide
  Target: COL7A1; (+) strand; PAM type: NRG; PAM sequence: GGG
ctgttccaggaagccctggg

SEQ ID NO: 20344 - DNA, 20 bp, Artificial Sequence
  Description of Artificial Sequence: Synthetic oligonucleotide
  Target: COL7A1; (+) strand; PAM type: NRG; PAM sequence: CGG
caggaagccctggggggcca

SEQ ID NO: 20345 - DNA, 20 bp, Artificial Sequence
  Description of Artificial Sequence: Synthetic oligonucleotide
  Target: COL7A1; (+) strand; PAM type: NRG; PAM sequence: GGG
aggaagccctggggggccac

SEQ ID NO: 20346 - DNA, 20 bp, Artificial Sequence
  Description of Artificial Sequence: Synthetic oligonucleotide
  Target: COL7A1; (+) strand; PAM type: NRG; PAM sequence: GGG
ggaagccctggggggccacg

SEQ ID NO: 20347 - DNA, 20 bp, Artificial Sequence
  Description of Artificial Sequence: Synthetic oligonucleotide
  Target: COL7A1; (+) strand; PAM type: NRG; PAM sequence: TGG
cctggggggccacggggtcc

SEQ ID NO: 20348 - DNA, 20 bp, Artificial Sequence
  Description of Artificial Sequence: Synthetic oligonucleotide
  Target: COL7A1; (+) strand; PAM type: NRG; PAM sequence: GGG
ctggggggccacggggtcct

SEQ ID NO: 20349 - DNA, 20 bp, Artificial Sequence
  Description of Artificial Sequence: Synthetic oligonucleotide
  Target: COL7A1; (+) strand; PAM type: NRG; PAM sequence: CAG
ccacggggtcctgggtcccc

SEQ ID NO: 20350 - DNA, 20 bp, Artificial Sequence
  Description of Artificial Sequence: Synthetic oligonucleotide
  Target: COL7A1; (+) strand; PAM type: NRG; PAM sequence: TGG
cggggtcctgggtcccccag

SEQ ID NO: 20351 - DNA, 20 bp, Artificial Sequence
  Description of Artificial Sequence: Synthetic oligonucleotide
  Target: COL7A1; (+) strand; PAM type: NRG; PAM sequence: GAG
tgggtcccccagtggtccac

SEQ ID NO: 20352 - DNA, 20 bp, Artificial Sequence
  Description of Artificial Sequence: Synthetic oligonucleotide
  Target: COL7A1; (+) strand; PAM type: NRG; PAM sequence: AGG
gggtcccccagtggtccacg

SEQ ID NO: 20353 - DNA, 20 bp, Artificial Sequence
  Description of Artificial Sequence: Synthetic oligonucleotide
  Target: COL7A1; (+) strand; PAM type: NRG; PAM sequence: CAG
ccccagtggtccacgaggtc

SEQ ID NO: 20354 - DNA, 20 bp, Artificial Sequence
  Description of Artificial Sequence: Synthetic oligonucleotide
  Target: COL7A1; (+) strand; PAM type: NRG; PAM sequence: AGG
cccagtggtccacgaggtcc

SEQ ID NO: 20355 - DNA, 20 bp, Artificial Sequence
  Description of Artificial Sequence: Synthetic oligonucleotide
  Target: COL7A1; (+) strand; PAM type: NRG; PAM sequence: GGG
ccagtggtccacgaggtcca

SEQ ID NO: 20356 - DNA, 20 bp, Artificial Sequence
  Description of Artificial Sequence: Synthetic oligonucleotide
  Target: COL7A1; (+) strand; PAM type: NRG; PAM sequence: GGG
cagtggtccacgaggtccag

SEQ ID NO: 20357 - DNA, 20 bp, Artificial Sequence
  Description of Artificial Sequence: Synthetic oligonucleotide
  Target: COL7A1; (+) strand; PAM type: NRG; PAM sequence: GGG
agtggtccacgaggtccagg

SEQ ID NO: 20358 - DNA, 20 bp, Artificial Sequence
  Description of Artificial Sequence: Synthetic oligonucleotide
  Target: COL7A1; (+) strand; PAM type: NRG; PAM sequence: GGG
gtggtccacgaggtccaggg

SEQ ID NO: 20359 - DNA, 20 bp, Artificial Sequence
  Description of Artificial Sequence: Synthetic oligonucleotide
  Target: COL7A1; (+) strand; PAM type: NRG; PAM sequence: TGG
gaggtccaggggggccctga

SEQ ID NO: 20360 - DNA, 20 bp, Artificial Sequence
  Description of Artificial Sequence: Synthetic oligonucleotide
  Target: COL7A1; (+) strand; PAM type: NRG; PAM sequence: GAG
ggtccaggggggccctgatg

SEQ ID NO: 20361 - DNA, 20 bp, Artificial Sequence
  Description of Artificial Sequence: Synthetic oligonucleotide
  Target: COL7A1; (+) strand; PAM type: NRG; PAM sequence: AGG
gtccaggggggccctgatgg

SEQ ID NO: 20362 - DNA, 20 bp, Artificial Sequence
  Description of Artificial Sequence: Synthetic oligonucleotide
  Target: COL7A1; (+) strand; PAM type: NRG; PAM sequence: GAG
ccaggggggccctgatggag

SEQ ID NO: 20363 - DNA, 20 bp, Artificial Sequence
  Description of Artificial Sequence: Synthetic oligonucleotide
  Target: COL7A1; (+) strand; PAM type: NRG; PAM sequence: AAG
gggccctgatggaggagaca

SEQ ID NO: 20364 - DNA, 20 bp, Artificial Sequence
  Description of Artificial Sequence: Synthetic oligonucleotide
  Target: COL7A1; (+) strand; PAM type: NRG; PAM sequence: AAG
tgatggaggagacaaagtat

SEQ ID NO: 20365 - DNA, 20 bp, Artificial Sequence
  Description of Artificial Sequence: Synthetic oligonucleotide
  Target: COL7A1; (+) strand; PAM type: NRG; PAM sequence: AGG
gatggaggagacaaagtata

SEQ ID NO: 20366 - DNA, 20 bp, Artificial Sequence
  Description of Artificial Sequence: Synthetic oligonucleotide
  Target: COL7A1; (+) strand; PAM type: NRG; PAM sequence: CAG
aagtataaggtgcaacccca

SEQ ID NO: 20367 - DNA, 20 bp, Artificial Sequence
  Description of Artificial Sequence: Synthetic oligonucleotide
  Target: COL7A1; (+) strand; PAM type: NRG; PAM sequence: TGG
cactctcgcccccctcgtgt

SEQ ID NO: 20368 - DNA, 20 bp, Artificial Sequence
  Description of Artificial Sequence: Synthetic oligonucleotide
  Target: COL7A1; (+) strand; PAM type: NRG; PAM sequence: TGG
acataccctgcacttaccga

SEQ ID NO: 20369 - DNA, 20 bp, Artificial Sequence
  Description of Artificial Sequence: Synthetic oligonucleotide
  Target: COL7A1; (+) strand; PAM type: NRG; PAM sequence: CAG
ccctgcacttaccgatggtc

SEQ ID NO: 20370 - DNA, 20 bp, Artificial Sequence
  Description of Artificial Sequence: Synthetic oligonucleotide
  Target: COL7A1; (+) strand; PAM type: NRG; PAM sequence: AGG
cctgcacttaccgatggtcc

SEQ ID NO: 20371 - DNA, 20 bp, Artificial Sequence
  Description of Artificial Sequence: Synthetic oligonucleotide
  Target: COL7A1; (+) strand; PAM type: NRG; PAM sequence: GGG
ctgcacttaccgatggtcca

SEQ ID NO: 20372 - DNA, 20 bp, Artificial Sequence
  Description of Artificial Sequence: Synthetic oligonucleotide
  Target: COL7A1; (+) strand; PAM type: NRG; PAM sequence: CAG
tccagggtcccctttccgcc

SEQ ID NO: 20373 - DNA, 20 bp, Artificial Sequence
  Description of Artificial Sequence: Synthetic oligonucleotide
  Target: COL7A1; (+) strand; PAM type: NRG; PAM sequence: AGG
ccagggtcccctttccgccc

SEQ ID NO: 20374 - DNA, 20 bp, Artificial Sequence
  Description of Artificial Sequence: Synthetic oligonucleotide
  Target: COL7A1; (+) strand; PAM type: NRG; PAM sequence: AAG
gggtcccctttccgcccagg

SEQ ID NO: 20375 - DNA, 20 bp, Artificial Sequence
  Description of Artificial Sequence: Synthetic oligonucleotide
  Target: COL7A1; (+) strand; PAM type: NRG; PAM sequence: CAG
ccctttccgcccaggaagcc

SEQ ID NO: 20376 - DNA, 20 bp, Artificial Sequence
  Description of Artificial Sequence: Synthetic oligonucleotide
  Target: COL7A1; (+) strand; PAM type: NRG; PAM sequence: AGG
cctttccgcccaggaagccc

SEQ ID NO: 20377 - DNA, 20 bp, Artificial Sequence
  Description of Artificial Sequence: Synthetic oligonucleotide
  Target: COL7A1; (+) strand; PAM type: NRG; PAM sequence: CGG
ttcacctccgatgacttgtc

SEQ ID NO: 20378 - DNA, 20 bp, Artificial Sequence
  Description of Artificial Sequence: Synthetic oligonucleotide
  Target: COL7A1; (+) strand; PAM type: NRG; PAM sequence: GGG
tcacctccgatgacttgtcc

SEQ ID NO: 20379 - DNA, 20 bp, Artificial Sequence
  Description of Artificial Sequence: Synthetic oligonucleotide
  Target: COL7A1; (+) strand; PAM type: NRG; PAM sequence: GAG
acctccgatgacttgtccgg

SEQ ID NO: 20380 - DNA, 20 bp, Artificial Sequence
  Description of Artificial Sequence: Synthetic oligonucleotide
  Target: COL7A1; (+) strand; PAM type: NRG; PAM sequence: AAG
cttgtccgggagccccctgt

SEQ ID NO: 20381 - DNA, 20 bp, Artificial Sequence
  Description of Artificial Sequence: Synthetic oligonucleotide
  Target: COL7A1; (+) strand; PAM type: NRG; PAM sequence: AGG
ttgtccgggagccccctgta

SEQ ID NO: 20382 - DNA, 20 bp, Artificial Sequence
  Description of Artificial Sequence: Synthetic oligonucleotide
  Target: COL7A1; (+) strand; PAM type: NRG; PAM sequence: CAG
ccgggagccccctgtaagga

SEQ ID NO: 20383 - DNA, 20 bp, Artificial Sequence
  Description of Artificial Sequence: Synthetic oligonucleotide
  Target: COL7A1; (+) strand; PAM type: NRG; PAM sequence: GAG
gggagccccctgtaaggaca

SEQ ID NO: 20384 - DNA, 20 bp, Artificial Sequence
  Description of Artificial Sequence: Synthetic oligonucleotide
  Target: COL7A1; (+) strand; PAM type: NRG; PAM sequence: GAG
gagccccctgtaaggacaga

SEQ ID NO: 20385 - DNA, 20 bp, Artificial Sequence
  Description of Artificial Sequence: Synthetic oligonucleotide
  Target: COL7A1; (+) strand; PAM type: NRG; PAM sequence: CAG
ccccctgtaaggacagagag

SEQ ID NO: 20386 - DNA, 20 bp, Artificial Sequence
  Description of Artificial Sequence: Synthetic oligonucleotide
  Target: COL7A1; (+) strand; PAM type: NRG; PAM sequence: TGG
cctgtaaggacagagagcag

SEQ ID NO: 20387 - DNA, 20 bp, Artificial Sequence
  Description of Artificial Sequence: Synthetic oligonucleotide
  Target: COL7A1; (+) strand; PAM type: NRG; PAM sequence: GGG
ctgtaaggacagagagcagt

SEQ ID NO: 20388 - DNA, 20 bp, Artificial Sequence
  Description of Artificial Sequence: Synthetic oligonucleotide
  Target: COL7A1; (+) strand; PAM type: NRG; PAM sequence: CAG
taaggacagagagcagtggg

SEQ ID NO: 20389 - DNA, 20 bp, Artificial Sequence
  Description of Artificial Sequence: Synthetic oligonucleotide
  Target: COL7A1; (+) strand; PAM type: NRG; PAM sequence: AGG
aaggacagagagcagtgggc

SEQ ID NO: 20390 - DNA, 20 bp, Artificial Sequence
  Description of Artificial Sequence: Synthetic oligonucleotide
  Target: COL7A1; (+) strand; PAM type: NRG; PAM sequence: CAG
agagagcagtgggcaggatt

SEQ ID NO: 20391 - DNA, 20 bp, Artificial Sequence
  Description of Artificial Sequence: Synthetic oligonucleotide
  Target: COL7A1; (+) strand; PAM type: NRG; PAM sequence: AGG
gagagcagtgggcaggattc

SEQ ID NO: 20392 - DNA, 20 bp, Artificial Sequence
  Description of Artificial Sequence: Synthetic oligonucleotide
  Target: COL7A1; (+) strand; PAM type: NRG; PAM sequence: TGG
agtgggcaggattcaggcta

SEQ ID NO: 20393 - DNA, 20 bp, Artificial Sequence
  Description of Artificial Sequence: Synthetic oligonucleotide
  Target: COL7A1; (+) strand; PAM type: NRG; PAM sequence: GGG
gtgggcaggattcaggctat

SEQ ID NO: 20394 - DNA, 20 bp, Artificial Sequence
  Description of Artificial Sequence: Synthetic oligonucleotide
  Target: COL7A1; (+) strand; PAM type: NRG; PAM sequence: GGG
tgggcaggattcaggctatg

SEQ ID NO: 20395 - DNA, 20 bp, Artificial Sequence
  Description of Artificial Sequence: Synthetic oligonucleotide
  Target: COL7A1; (+) strand; PAM type: NRG; PAM sequence: GGG
gggcaggattcaggctatgg

SEQ ID NO: 20396 - DNA, 20 bp, Artificial Sequence
  Description of Artificial Sequence: Synthetic oligonucleotide
  Target: COL7A1; (+) strand; PAM type: NRG; PAM sequence: GAG
attcaggctatgggggcctt

SEQ ID NO: 20397 - DNA, 20 bp, Artificial Sequence
  Description of Artificial Sequence: Synthetic oligonucleotide
  Target: COL7A1; (+) strand; PAM type: NRG; PAM sequence: TGG
aggctatgggggccttgagc

SEQ ID NO: 20398 - DNA, 20 bp, Artificial Sequence
  Description of Artificial Sequence: Synthetic oligonucleotide
  Target: COL7A1; (+) strand; PAM type: NRG; PAM sequence: AAG
ctatgggggccttgagctgg

SEQ ID NO: 20399 - DNA, 20 bp, Artificial Sequence
  Description of Artificial Sequence: Synthetic oligonucleotide
  Target: COL7A1; (+) strand; PAM type: NRG; PAM sequence: AAG
tgggggccttgagctggaag

SEQ ID NO: 20400 - DNA, 20 bp, Artificial Sequence
  Description of Artificial Sequence: Synthetic oligonucleotide
  Target: COL7A1; (+) strand; PAM type: NRG; PAM sequence: TAG
cttgagctggaagaagcccc

SEQ ID NO: 20401 - DNA, 20 bp, Artificial Sequence
  Description of Artificial Sequence: Synthetic oligonucleotide
  Target: COL7A1; (+) strand; PAM type: NRG; PAM sequence: CAG
aagaagcccctagacatgtc

SEQ ID NO: 20402 - DNA, 20 bp, Artificial Sequence
  Description of Artificial Sequence: Synthetic oligonucleotide
  Target: COL7A1; (+) strand; PAM type: NRG; PAM sequence: TAG
agctattcctattcgcgcct

SEQ ID NO: 20403 - DNA, 20 bp, Artificial Sequence
  Description of Artificial Sequence: Synthetic oligonucleotide
  Target: COL7A1; (+) strand; PAM type: NRG; PAM sequence: AGG
gctattcctattcgcgcctt

SEQ ID NO: 20404 - DNA, 20 bp, Artificial Sequence
  Description of Artificial Sequence: Synthetic oligonucleotide
  Target: COL7A1; (+) strand; PAM type: NRG; PAM sequence: CAG
ttcgcgccttaggccctgca

SEQ ID NO: 20405 - DNA, 20 bp, Artificial Sequence
  Description of Artificial Sequence: Synthetic oligonucleotide
  Target: COL7A1; (+) strand; PAM type: NRG; PAM sequence: AGG
tcgcgccttaggccctgcac

SEQ ID NO: 20406 - DNA, 20 bp, Artificial Sequence
  Description of Artificial Sequence: Synthetic oligonucleotide
  Target: COL7A1; (+) strand; PAM type: NRG; PAM sequence: GGG
cgcgccttaggccctgcaca

SEQ ID NO: 20407 - DNA, 20 bp, Artificial Sequence
  Description of Artificial Sequence: Synthetic oligonucleotide
  Target: COL7A1; (+) strand; PAM type: NRG; PAM sequence: TGG
cttaggccctgcacagggtc

SEQ ID NO: 20408 - DNA, 20 bp, Artificial Sequence
  Description of Artificial Sequence: Synthetic oligonucleotide
  Target: COL7A1; (+) strand; PAM type: NRG; PAM sequence: TGG
gccctgcacagggtctggtg

SEQ ID NO: 20409 - DNA, 20 bp, Artificial Sequence
  Description of Artificial Sequence: Synthetic oligonucleotide
  Target: COL7A1; (+) strand; PAM type: NRG; PAM sequence: GGG
ccctgcacagggtctggtgt

SEQ ID NO: 20410 - DNA, 20 bp, Artificial Sequence
  Description of Artificial Sequence: Synthetic oligonucleotide
  Target: COL7A1; (+) strand; PAM type: NRG; PAM sequence: GGG
cctgcacagggtctggtgtg

SEQ ID NO: 20411 - DNA, 20 bp, Artificial Sequence
  Description of Artificial Sequence: Synthetic oligonucleotide
  Target: COL7A1; (+) strand; PAM type: NRG; PAM sequence: CAG
gcacagggtctggtgtgggg

SEQ ID NO: 20412 - DNA, 20 bp, Artificial Sequence
  Description of Artificial Sequence: Synthetic oligonucleotide
  Target: COL7A1; (+) strand; PAM type: NRG; PAM sequence: TGG
ggggcagtcctgctcctccc

SEQ ID NO: 20413 - DNA, 20 bp, Artificial Sequence
  Description of Artificial Sequence: Synthetic oligonucleotide
  Target: COL7A1; (+) strand; PAM type: NRG; PAM sequence: GGG
gggcagtcctgctcctccct

SEQ ID NO: 20414 - DNA, 20 bp, Artificial Sequence
  Description of Artificial Sequence: Synthetic oligonucleotide
  Target: COL7A1; (+) strand; PAM type: NRG; PAM sequence: CGG
tgctcctccctgggacatcc

SEQ ID NO: 20415 - DNA, 20 bp, Artificial Sequence
  Description of Artificial Sequence: Synthetic oligonucleotide
  Target: COL7A1; (+) strand; PAM type: NRG; PAM sequence: CGG
tcccttcccccttcacctac

SEQ ID NO: 20416 - DNA, 20 bp, Artificial Sequence
  Description of Artificial Sequence: Synthetic oligonucleotide
  Target: COL7A1; (+) strand; PAM type: NRG; PAM sequence: TGG
tcacctaccggctccccctt

SEQ ID NO: 20417 - DNA, 20 bp, Artificial Sequence
  Description of Artificial Sequence: Synthetic oligonucleotide
  Target: COL7A1; (+) strand; PAM type: NRG; PAM sequence: GGG
cacctaccggctcccccttt

SEQ ID NO: 20418 - DNA, 20 bp, Artificial Sequence
  Description of Artificial Sequence: Synthetic oligonucleotide
  Target: COL7A1; (+) strand; PAM type: NRG; PAM sequence: GAG
cggctccccctttgggcctc

SEQ ID NO: 20419 - DNA, 20 bp, Artificial Sequence
  Description of Artificial Sequence: Synthetic oligonucleotide
  Target: COL7A1; (+) strand; PAM type: NRG; PAM sequence: AGG
ggctccccctttgggcctcg

SEQ ID NO: 20420 - DNA, 20 bp, Artificial Sequence
  Description of Artificial Sequence: Synthetic oligonucleotide
  Target: COL7A1; (+) strand; PAM type: NRG; PAM sequence: GAG
tcgaggtcctcgctctccct

SEQ ID NO: 20421 - DNA, 20 bp, Artificial Sequence
  Description of Artificial Sequence: Synthetic oligonucleotide
  Target: COL7A1; (+) strand; PAM type: NRG; PAM sequence: AGG
cgaggtcctcgctctccctg

SEQ ID NO: 20422 - DNA, 20 bp, Artificial Sequence
  Description of Artificial Sequence: Synthetic oligonucleotide
  Target: COL7A1; (+) strand; PAM type: NRG; PAM sequence: CAG
cgctctccctgaggacgaaa

SEQ ID NO: 20423 - DNA, 20 bp, Artificial Sequence
  Description of Artificial Sequence: Synthetic oligonucleotide
  Target: COL7A1; (+) strand; PAM type: NRG; PAM sequence: GAG
ctctccctgaggacgaaaca

SEQ ID NO: 20424 - DNA, 20 bp, Artificial Sequence
  Description of Artificial Sequence: Synthetic oligonucleotide
  Target: COL7A1; (+) strand; PAM type: NRG; PAM sequence: CAG
tccctgaggacgaaacagag

SEQ ID NO: 20425 - DNA, 20 bp, Artificial Sequence
  Description of Artificial Sequence: Synthetic oligonucleotide
  Target: COL7A1; (+) strand; PAM type: NRG; PAM sequence: GAG
cctgaggacgaaacagagca

SEQ ID NO: 20426 - DNA, 20 bp, Artificial Sequence
  Description of Artificial Sequence: Synthetic oligonucleotide
  Target: COL7A1; (+) strand; PAM type: NRG; PAM sequence: AGG
ctgaggacgaaacagagcag

SEQ ID NO: 20427 - DNA, 20 bp, Artificial Sequence
  Description of Artificial Sequence: Synthetic oligonucleotide
  Target: COL7A1; (+) strand; PAM type: NRG; PAM sequence: GGG
tgaggacgaaacagagcaga

SEQ ID NO: 20428 - DNA, 20 bp, Artificial Sequence
  Description of Artificial Sequence: Synthetic oligonucleotide
  Target: COL7A1; (+) strand; PAM type: NRG; PAM sequence: TGG
ggacgaaacagagcagaggg

SEQ ID NO: 20429 - DNA, 20 bp, Artificial Sequence
  Description of Artificial Sequence: Synthetic oligonucleotide
  Target: COL7A1; (+) strand; PAM type: NRG; PAM sequence: TGG
acagagcagagggtggtgct

SEQ ID NO: 20430 - DNA, 20 bp, Artificial Sequence
  Description of Artificial Sequence: Synthetic oligonucleotide
  Target: COL7A1; (+) strand; PAM type: NRG; PAM sequence: GGG
cagagcagagggtggtgctt

SEQ ID NO: 20431 - DNA, 20 bp, Artificial Sequence
  Description of Artificial Sequence: Synthetic oligonucleotide
  Target: COL7A1; (+) strand; PAM type: NRG; PAM sequence: CAG
cagagggtggtgcttgggct

SEQ ID NO: 20432 - DNA, 20 bp, Artificial Sequence
  Description of Artificial Sequence: Synthetic oligonucleotide
  Target: COL7A1; (+) strand; PAM type: NRG; PAM sequence: AGG
agagggtggtgcttgggctc

SEQ ID NO: 20433 - DNA, 20 bp, Artificial Sequence
  Description of Artificial Sequence: Synthetic oligonucleotide
  Target: COL7A1; (+) strand; PAM type: NRG; PAM sequence: TGG
ggctcaggcgaatgtcaacg

SEQ ID NO: 20434 - DNA, 20 bp, Artificial Sequence
  Description of Artificial Sequence: Synthetic oligonucleotide
  Target: COL7A1; (+) strand; PAM type: NRG; PAM sequence: GGG
gctcaggcgaatgtcaacgt

SEQ ID NO: 20435 - DNA, 20 bp, Artificial Sequence
  Description of Artificial Sequence: Synthetic oligonucleotide
  Target: COL7A1; (+) strand; PAM type: NRG; PAM sequence: CAG
tgggcactgcaccaccaccc

SEQ ID NO: 20436 - DNA, 20 bp, Artificial Sequence
  Description of Artificial Sequence: Synthetic oligonucleotide
  Target: COL7A1; (+) strand; PAM type: NRG; PAM sequence: AGG
gggcactgcaccaccacccc

SEQ ID NO: 20437 - DNA, 20 bp, Artificial Sequence
  Description of Artificial Sequence: Synthetic oligonucleotide
  Target: COL7A1; (+) strand; PAM type: NRG; PAM sequence: TGG
caccccaggctcccaccctg

SEQ ID NO: 20438 - DNA, 20 bp, Artificial Sequence
  Description of Artificial Sequence: Synthetic oligonucleotide
  Target: COL7A1; (+) strand; PAM type: NRG; PAM sequence: AAG
cccaggctcccaccctgtgg

SEQ ID NO: 20439 - DNA, 20 bp, Artificial Sequence
  Description of Artificial Sequence: Synthetic oligonucleotide
  Target: COL7A1; (+) strand; PAM type: NRG; PAM sequence: TGG
cccaccctgtggaagaaccc

SEQ ID NO: 20440 - DNA, 20 bp, Artificial Sequence
  Description of Artificial Sequence: Synthetic oligonucleotide
  Target: COL7A1; (+) strand; PAM type: NRG; PAM sequence: GGG
ccaccctgtggaagaaccct

SEQ ID NO: 20441 - DNA, 20 bp, Artificial Sequence
  Description of Artificial Sequence: Synthetic oligonucleotide
  Target: COL7A1; (+) strand; PAM type: NRG; PAM sequence: AAG
ccctgtggaagaaccctggg

SEQ ID NO: 20442 - DNA, 20 bp, Artificial Sequence
  Description of Artificial Sequence: Synthetic oligonucleotide
  Target: COL7A1; (+) strand; PAM type: NRG; PAM sequence: TAG
aagaaccctgggaagacact

SEQ ID NO: 20443 - DNA, 20 bp, Artificial Sequence
  Description of Artificial Sequence: Synthetic oligonucleotide
  Target: COL7A1; (+) strand; PAM type: NRG; PAM sequence: GAG
gaaccctgggaagacactta

SEQ ID NO: 20444 - DNA, 20 bp, Artificial Sequence
  Description of Artificial Sequence: Synthetic oligonucleotide
  Target: COL7A1; (+) strand; PAM type: NRG; PAM sequence: GAG
accctgggaagacacttaga

SEQ ID NO: 20445 - DNA, 20 bp, Artificial Sequence
  Description of Artificial Sequence: Synthetic oligonucleotide
  Target: COL7A1; (+) strand; PAM type: NRG; PAM sequence: AAG
gggaagacacttagagagca

SEQ ID NO: 20446 - DNA, 20 bp, Artificial Sequence
  Description of Artificial Sequence: Synthetic oligonucleotide
  Target: COL7A1; (+) strand; PAM type: NRG; PAM sequence: AAG
aagacacttagagagcaaag

SEQ ID NO: 20447 - DNA, 20 bp, Artificial Sequence
  Description of Artificial Sequence: Synthetic oligonucleotide
  Target: COL7A1; (+) strand; PAM type: NRG; PAM sequence: AGG
agacacttagagagcaaaga

SEQ ID NO: 20448 - DNA, 20 bp, Artificial Sequence
  Description of Artificial Sequence: Synthetic oligonucleotide
  Target: COL7A1; (+) strand; PAM type: NRG; PAM sequence: GGG
gacacttagagagcaaagaa

SEQ ID NO: 20449 - DNA, 20 bp, Artificial Sequence
  Description of Artificial Sequence: Synthetic oligonucleotide
  Target: COL7A1; (+) strand; PAM type: NRG; PAM sequence: AAG
acttagagagcaaagaaggg

SEQ ID NO: 20450 - DNA, 20 bp, Artificial Sequence
  Description of Artificial Sequence: Synthetic oligonucleotide
  Target: COL7A1; (+) strand; PAM type: NRG; PAM sequence: AGG
cttagagagcaaagaaggga

SEQ ID NO: 20451 - DNA, 20 bp, Artificial Sequence
  Description of Artificial Sequence: Synthetic oligonucleotide
  Target: COL7A1; (+) strand; PAM type: NRG; PAM sequence: CGG
aagaagggaaggcaccttac

SEQ ID NO: 20452 - DNA, 20 bp, Artificial Sequence
  Description of Artificial Sequence: Synthetic oligonucleotide
  Target: COL7A1; (+) strand; PAM type: NRG; PAM sequence: GGG
agaagggaaggcaccttacc

SEQ ID NO: 20453 - DNA, 20 bp, Artificial Sequence
  Description of Artificial Sequence: Synthetic oligonucleotide
  Target: COL7A1; (+) strand; PAM type: NRG; PAM sequence: GAG
gcaccttaccgggtccccac

SEQ ID NO: 20454 - DNA, 20 bp, Artificial Sequence
  Description of Artificial Sequence: Synthetic oligonucleotide
  Target: COL7A1; (+) strand; PAM type: NRG; PAM sequence: AGG
caccttaccgggtccccacg

SEQ ID NO: 20455 - DNA, 20 bp, Artificial Sequence
  Description of Artificial Sequence: Synthetic oligonucleotide
  Target: COL7A1; (+) strand; PAM type: NRG; PAM sequence: GGG
accttaccgggtccccacga

SEQ ID NO: 20456 - DNA, 20 bp, Artificial Sequence
  Description of Artificial Sequence: Synthetic oligonucleotide
  Target: COL7A1; (+) strand; PAM type: NRG; PAM sequence: CAG
taccgggtccccacgagggc

SEQ ID NO: 20457 - DNA, 20 bp, Artificial Sequence
  Description of Artificial Sequence: Synthetic oligonucleotide
  Target: COL7A1; (+) strand; PAM type: NRG; PAM sequence: AGG
accgggtccccacgagggcc

SEQ ID NO: 20458 - DNA, 20 bp, Artificial Sequence
  Description of Artificial Sequence: Synthetic oligonucleotide
  Target: COL7A1; (+) strand; PAM type: NRG; PAM sequence: TGG
ccacgagggccaggcaaccc

SEQ ID NO: 20459 - DNA, 20 bp, Artificial Sequence
  Description of Artificial Sequence: Synthetic oligonucleotide
  Target: COL7A1; (+) strand; PAM type: NRG; PAM sequence: GAG
acgagggccaggcaaccctg

SEQ ID NO: 20460 - DNA, 20 bp, Artificial Sequence
  Description of Artificial Sequence: Synthetic oligonucleotide
  Target: COL7A1; (+) strand; PAM type: NRG; PAM sequence: GAG
gagggccaggcaaccctgga

SEQ ID NO: 20461 - DNA, 20 bp, Artificial Sequence
  Description of Artificial Sequence: Synthetic oligonucleotide
  Target: COL7A1; (+) strand; PAM type: NRG; PAM sequence: TGG
accctggagagccctgcaaa

SEQ ID NO: 20462 - DNA, 20 bp, Artificial Sequence
  Description of Artificial Sequence: Synthetic oligonucleotide
  Target: COL7A1; (+) strand; PAM type: NRG; PAM sequence: GAG
cctggagagccctgcaaatg

SEQ ID NO: 20463 - DNA, 20 bp, Artificial Sequence
  Description of Artificial Sequence: Synthetic oligonucleotide
  Target: COL7A1; (+) strand; PAM type: NRG; PAM sequence: AGG
ctggagagccctgcaaatgg

SEQ ID NO: 20464 - DNA, 20 bp, Artificial Sequence
  Description of Artificial Sequence: Synthetic oligonucleotide
  Target: COL7A1; (+) strand; PAM type: NRG; PAM sequence: CAG
agagccctgcaaatggaggc

SEQ ID NO: 20465 - DNA, 20 bp, Artificial Sequence
  Description of Artificial Sequence: Synthetic oligonucleotide
  Target: COL7A1; (+) strand; PAM type: NRG; PAM sequence: GAG
agccctgcaaatggaggcca

SEQ ID NO: 20466 - DNA, 20 bp, Artificial Sequence
  Description of Artificial Sequence: Synthetic oligonucleotide
  Target: COL7A1; (+) strand; PAM type: NRG; PAM sequence: AGG
gccctgcaaatggaggccag

SEQ ID NO: 20467 - DNA, 20 bp, Artificial Sequence
  Description of Artificial Sequence: Synthetic oligonucleotide
  Target: COL7A1; (+) strand; PAM type: NRG; PAM sequence: CAG
ctgcaaatggaggccagagg

SEQ ID NO: 20468 - DNA, 20 bp, Artificial Sequence
  Description of Artificial Sequence: Synthetic oligonucleotide
  Target: COL7A1; (+) strand; PAM type: NRG; PAM sequence: CAG
aatggaggccagaggcagaa

SEQ ID NO: 20469 - DNA, 20 bp, Artificial Sequence
  Description of Artificial Sequence: Synthetic oligonucleotide
  Target: COL7A1; (+) strand; PAM type: NRG; PAM sequence: CGG
gaggccagaggcagaacagt

SEQ ID NO: 20470 - DNA, 20 bp, Artificial Sequence
  Description of Artificial Sequence: Synthetic oligonucleotide
  Target: COL7A1; (+) strand; PAM type: NRG; PAM sequence: GAG
ggccagaggcagaacagtcg

SEQ ID NO: 20471 - DNA, 20 bp, Artificial Sequence
  Description of Artificial Sequence: Synthetic oligonucleotide
  Target: COL7A1; (+) strand; PAM type: NRG; PAM sequence: CAG
tcggagccaccccacccact

SEQ ID NO: 20472 - DNA, 20 bp, Artificial Sequence
  Description of Artificial Sequence: Synthetic oligonucleotide
  Target: COL7A1; (+) strand; PAM type: NRG; PAM sequence: AGG
cggagccaccccacccactc

SEQ ID NO: 20473 - DNA, 20 bp, Artificial Sequence
  Description of Artificial Sequence: Synthetic oligonucleotide
  Target: COL7A1; (+) strand; PAM type: NRG; PAM sequence: CAG
agccaccccacccactcagg

SEQ ID NO: 20474 - DNA, 20 bp, Artificial Sequence
  Description of Artificial Sequence: Synthetic oligonucleotide
  Target: COL7A1; (+) strand; PAM type: NRG; PAM sequence: CAG
gcagcgcccaccctgacctg

SEQ ID NO: 20475 - DNA, 20 bp, Artificial Sequence
  Description of Artificial Sequence: Synthetic oligonucleotide
  Target: COL7A1; (+) strand; PAM type: NRG; PAM sequence: AGG
cagcgcccaccctgacctgc

SEQ ID NO: 20476 - DNA, 20 bp, Artificial Sequence
  Description of Artificial Sequence: Synthetic oligonucleotide
  Target: COL7A1; (+) strand; PAM type: NRG; PAM sequence: AAG
cccaccctgacctgcaggac

SEQ ID NO: 20477 - DNA, 20 bp, Artificial Sequence
  Description of Artificial Sequence: Synthetic oligonucleotide
  Target: COL7A1; (+) strand; PAM type: NRG; PAM sequence: AGG
ccaccctgacctgcaggaca

SEQ ID NO: 20478 - DNA, 20 bp, Artificial Sequence
  Description of Artificial Sequence: Synthetic oligonucleotide
  Target: COL7A1; (+) strand; PAM type: NRG; PAM sequence: TAG
ggacaaggcttgctcacctt

SEQ ID NO: 20479 - DNA, 20 bp, Artificial Sequence
  Description of Artificial Sequence: Synthetic oligonucleotide
  Target: COL7A1; (+) strand; PAM type: NRG; PAM sequence: AGG
gacaaggcttgctcaccttt

SEQ ID NO: 20480 - DNA, 20 bp, Artificial Sequence
  Description of Artificial Sequence: Synthetic oligonucleotide
  Target: COL7A1; (+) strand; PAM type: NRG; PAM sequence: CAG
aggcttgctcacctttaggc

SEQ ID NO: 20481 - DNA, 20 bp, Artificial Sequence
  Description of Artificial Sequence: Synthetic oligonucleotide
  Target: COL7A1; (+) strand; PAM type: NRG; PAM sequence: AGG
ggcttgctcacctttaggcc

SEQ ID NO: 20482 - DNA, 20 bp, Artificial Sequence
  Description of Artificial Sequence: Synthetic oligonucleotide
  Target: COL7A1; (+) strand; PAM type: NRG; PAM sequence: GGG
gcttgctcacctttaggcca

SEQ ID NO: 20483 - DNA, 20 bp, Artificial Sequence
  Description of Artificial Sequence: Synthetic oligonucleotide
  Target: COL7A1; (+) strand; PAM type: NRG; PAM sequence: GGG
cttgctcacctttaggccag

SEQ ID NO: 20484 - DNA, 20 bp, Artificial Sequence
  Description of Artificial Sequence: Synthetic oligonucleotide
  Target: COL7A1; (+) strand; PAM type: NRG; PAM sequence: CAG
cacctttaggccaggggctc

SEQ ID NO: 20485 - DNA, 20 bp, Artificial Sequence
  Description of Artificial Sequence: Synthetic oligonucleotide
  Target: COL7A1; (+) strand; PAM type: NRG; PAM sequence: AGG
acctttaggccaggggctcc

SEQ ID NO: 20486 - DNA, 20 bp, Artificial Sequence
  Description of Artificial Sequence: Synthetic oligonucleotide
  Target: COL7A1; (+) strand; PAM type: NRG; PAM sequence: GGG
cctttaggccaggggctcca

SEQ ID NO: 20487 - DNA, 20 bp, Artificial Sequence
  Description of Artificial Sequence: Synthetic oligonucleotide
  Target: COL7A1; (+) strand; PAM type: NRG; PAM sequence: GGG
ctttaggccaggggctccag

SEQ ID NO: 20488 - DNA, 20 bp, Artificial Sequence
  Description of Artificial Sequence: Synthetic oligonucleotide
  Target: COL7A1; (+) strand; PAM type: NRG; PAM sequence: CAG
gccaggggctccaggggtcc

SEQ ID NO: 20489 - DNA, 20 bp, Artificial Sequence
  Description of Artificial Sequence: Synthetic oligonucleotide
  Target: COL7A1; (+) strand; PAM type: NRG; PAM sequence: AGG
ccaggggctccaggggtccc

SEQ ID NO: 20490 - DNA, 20 bp, Artificial Sequence
  Description of Artificial Sequence: Synthetic oligonucleotide
  Target: COL7A1; (+) strand; PAM type: NRG; PAM sequence: CGG
tccaggggtcccaggattcc

SEQ ID NO: 20491 - DNA, 20 bp, Artificial Sequence
  Description of Artificial Sequence: Synthetic oligonucleotide
  Target: COL7A1; (+) strand; PAM type: NRG; PAM sequence: CGG
gggtcccaggattcccggcg

SEQ ID NO: 20492 - DNA, 20 bp, Artificial Sequence
  Description of Artificial Sequence: Synthetic oligonucleotide
  Target: COL7A1; (+) strand; PAM type: NRG; PAM sequence: CAG
cccaggattcccggcgcggc

SEQ ID NO: 20493 - DNA, 20 bp, Artificial Sequence
  Description of Artificial Sequence: Synthetic oligonucleotide
  Target: COL7A1; (+) strand; PAM type: NRG; PAM sequence: AGG
ccaggattcccggcgcggcc

SEQ ID NO: 20494 - DNA, 20 bp, Artificial Sequence
  Description of Artificial Sequence: Synthetic oligonucleotide
  Target: COL7A1; (+) strand; PAM type: NRG; PAM sequence: GGG
caggattcccggcgcggcca

SEQ ID NO: 20495 - DNA, 20 bp, Artificial Sequence
  Description of Artificial Sequence: Synthetic oligonucleotide
  Target: COL7A1; (+) strand; PAM type: NRG; PAM sequence: TGG
ccggcgcggccagggctgcc

SEQ ID NO: 20496 - DNA, 20 bp, Artificial Sequence
  Description of Artificial Sequence: Synthetic oligonucleotide
  Target: COL7A1; (+) strand; PAM type: NRG; PAM sequence: CAG
gcctggacgcccatctgctc

SEQ ID NO: 20497 - DNA, 20 bp, Artificial Sequence
  Description of Artificial Sequence: Synthetic oligonucleotide
  Target: COL7A1; (+) strand; PAM type: NRG; PAM sequence: AGG
cctggacgcccatctgctcc

SEQ ID NO: 20498 - DNA, 20 bp, Artificial Sequence
  Description of Artificial Sequence: Synthetic oligonucleotide
  Target: COL7A1; (+) strand; PAM type: NRG; PAM sequence: GGG
ctggacgcccatctgctcca

SEQ ID NO: 20499 - DNA, 20 bp, Artificial Sequence
  Description of Artificial Sequence: Synthetic oligonucleotide
  Target: COL7A1; (+) strand; PAM type: NRG; PAM sequence: AAG
gacgcccatctgctccaggg

SEQ ID NO: 20500 - DNA, 20 bp, Artificial Sequence
  Description of Artificial Sequence: Synthetic oligonucleotide
  Target: COL7A1; (+) strand; PAM type: NRG; PAM sequence: GAG
atctgctccagggaagccct

SEQ ID NO: 20501 - DNA, 20 bp, Artificial Sequence
  Description of Artificial Sequence: Synthetic oligonucleotide
  Target: COL7A1; (+) strand; PAM type: NRG; PAM sequence: AGG
tctgctccagggaagccctg

SEQ ID NO: 20502 - DNA, 20 bp, Artificial Sequence
  Description of Artificial Sequence: Synthetic oligonucleotide
  Target: COL7A1; (+) strand; PAM type: NRG; PAM sequence: GAG
tgctccagggaagccctgag

SEQ ID NO: 20503 - DNA, 20 bp, Artificial Sequence
  Description of Artificial Sequence: Synthetic oligonucleotide
  Target: COL7A1; (+) strand; PAM type: NRG; PAM sequence: AGG
gctccagggaagccctgagg

SEQ ID NO: 20504 - DNA, 20 bp, Artificial Sequence
  Description of Artificial Sequence: Synthetic oligonucleotide
  Target: COL7A1; (+) strand; PAM type: NRG; PAM sequence: AAG
agggaagccctgaggaggtg

SEQ ID NO: 20505 - DNA, 20 bp, Artificial Sequence
  Description of Artificial Sequence: Synthetic oligonucleotide
  Target: COL7A1; (+) strand; PAM type: NRG; PAM sequence: GAG
ggaagccctgaggaggtgaa

SEQ ID NO: 20506 - DNA, 20 bp, Artificial Sequence
  Description of Artificial Sequence: Synthetic oligonucleotide
  Target: COL7A1; (+) strand; PAM type: NRG; PAM sequence: AGG
gaagccctgaggaggtgaag

SEQ ID NO: 20507 - DNA, 20 bp, Artificial Sequence
  Description of Artificial Sequence: Synthetic oligonucleotide
  Target: COL7A1; (+) strand; PAM type: NRG; PAM sequence: CAG
ccctgaggaggtgaagaggt

SEQ ID NO: 20508 - DNA, 20 bp, Artificial Sequence
  Description of Artificial Sequence: Synthetic oligonucleotide
  Target: COL7A1; (+) strand; PAM type: NRG; PAM sequence: AGG
cctgaggaggtgaagaggtc

SEQ ID NO: 20509 - DNA, 20 bp, Artificial Sequence
  Description of Artificial Sequence: Synthetic oligonucleotide
  Target: COL7A1; (+) strand; PAM type: NRG; PAM sequence: CAG
aggaggtgaagaggtcagga

SEQ ID NO: 20510 - DNA, 20 bp, Artificial Sequence
  Description of Artificial Sequence: Synthetic oligonucleotide
  Target: COL7A1; (+) strand; PAM type: NRG; PAM sequence: AGG
ggaggtgaagaggtcaggac

SEQ ID NO: 20511 - DNA, 20 bp, Artificial Sequence
  Description of Artificial Sequence: Synthetic oligonucleotide
  Target: COL7A1; (+) strand; PAM type: NRG; PAM sequence: AAG
ggtgaagaggtcaggacagg

SEQ ID NO: 20512 - DNA, 20 bp, Artificial Sequence
  Description of Artificial Sequence: Synthetic oligonucleotide
  Target: COL7A1; (+) strand; PAM type: NRG; PAM sequence: AGG
gtgaagaggtcaggacagga

SEQ ID NO: 20513 - DNA, 20 bp, Artificial Sequence
  Description of Artificial Sequence: Synthetic oligonucleotide
  Target: COL7A1; (+) strand; PAM type: NRG; PAM sequence: GGG
tgaagaggtcaggacaggaa

SEQ ID NO: 20514 - DNA, 20 bp, Artificial Sequence
  Description of Artificial Sequence: Synthetic oligonucleotide
  Target: COL7A1; (+) strand; PAM type: NRG; PAM sequence: AAG
acaggaagggaccctccccc

SEQ ID NO: 20515 - DNA, 20 bp, Artificial Sequence
  Description of Artificial Sequence: Synthetic oligonucleotide
  Target: COL7A1; (+) strand; PAM type: NRG; PAM sequence: AGG
caggaagggaccctccccca

SEQ ID NO: 20516 - DNA, 20 bp, Artificial Sequence
  Description of Artificial Sequence: Synthetic oligonucleotide
  Target: COL7A1; (+) strand; PAM type: NRG; PAM sequence: TGG
ggaccctcccccaaggcccc

SEQ ID NO: 20517 - DNA, 20 bp, Artificial Sequence
  Description of Artificial Sequence: Synthetic oligonucleotide
  Target: COL7A1; (+) strand; PAM type: NRG; PAM sequence: TGG
ccccaaggcccctggtttgc

SEQ ID NO: 20518 - DNA, 20 bp, Artificial Sequence
  Description of Artificial Sequence: Synthetic oligonucleotide
  Target: COL7A1; (+) strand; PAM type: NRG; PAM sequence: GAG
ccaaggcccctggtttgctg

SEQ ID NO: 20519 - DNA, 20 bp, Artificial Sequence
  Description of Artificial Sequence: Synthetic oligonucleotide
  Target: COL7A1; (+) strand; PAM type: NRG; PAM sequence: AGG
caaggcccctggtttgctgg

SEQ ID NO: 20520 - DNA, 20 bp, Artificial Sequence
  Description of Artificial Sequence: Synthetic oligonucleotide
  Target: COL7A1; (+) strand; PAM type: NRG; PAM sequence: GGG
aaggcccctggtttgctgga

SEQ ID NO: 20521 - DNA, 20 bp, Artificial Sequence
  Description of Artificial Sequence: Synthetic oligonucleotide
  Target: COL7A1; (+) strand; PAM type: NRG; PAM sequence: GGG
aggcccctggtttgctggag

SEQ ID NO: 20522 - DNA, 20 bp, Artificial Sequence
  Description of Artificial Sequence: Synthetic oligonucleotide
  Target: COL7A1; (+) strand; PAM type: NRG; PAM sequence: AAG
aggggcctcaccccatcaac

SEQ ID NO: 20523 - DNA, 20 bp, Artificial Sequence
  Description of Artificial Sequence: Synthetic oligonucleotide
  Target: COL7A1; (+) strand; PAM type: NRG; PAM sequence: AGG
ggggcctcaccccatcaaca

SEQ ID NO: 20524 - DNA, 20 bp, Artificial Sequence
  Description of Artificial Sequence: Synthetic oligonucleotide
  Target: COL7A1; (+) strand; PAM type: NRG; PAM sequence: GGG
gggcctcaccccatcaacaa

SEQ ID NO: 20525 - DNA, 20 bp, Artificial Sequence
  Description of Artificial Sequence: Synthetic oligonucleotide
  Target: COL7A1; (+) strand; PAM type: NRG; PAM sequence: GGG
ggcctcaccccatcaacaag

SEQ ID NO: 20526 - DNA, 20 bp, Artificial Sequence
  Description of Artificial Sequence: Synthetic oligonucleotide
  Target: COL7A1; (+) strand; PAM type: NRG; PAM sequence: AAG
cgcctaccccactgaccccc

SEQ ID NO: 20527 - DNA, 20 bp, Artificial Sequence
  Description of Artificial Sequence: Synthetic oligonucleotide
  Target: COL7A1; (+) strand; PAM type: NRG; PAM sequence: TGG
cactgacccccaagtgttat

SEQ ID NO: 20528 - DNA, 20 bp, Artificial Sequence
  Description of Artificial Sequence: Synthetic oligonucleotide
  Target: COL7A1; (+) strand; PAM type: NRG; PAM sequence: GGG
actgacccccaagtgttatt

SEQ ID NO: 20529 - DNA, 20 bp, Artificial Sequence
  Description of Artificial Sequence: Synthetic oligonucleotide
  Target: COL7A1; (+) strand; PAM type: NRG; PAM sequence: GGG
ctgacccccaagtgttattg

SEQ ID NO: 20530 - DNA, 20 bp, Artificial Sequence
  Description of Artificial Sequence: Synthetic oligonucleotide
  Target: COL7A1; (+) strand; PAM type: NRG; PAM sequence: GGG
tgacccccaagtgttattgg

SEQ ID NO: 20531 - DNA, 20 bp, Artificial Sequence
  Description of Artificial Sequence: Synthetic oligonucleotide
  Target: COL7A1; (+) strand; PAM type: NRG; PAM sequence: TGG
cccccaagtgttattggggg

SEQ ID NO: 20532 - DNA, 20 bp, Artificial Sequence
  Description of Artificial Sequence: Synthetic oligonucleotide
  Target: COL7A1; (+) strand; PAM type: NRG; PAM sequence: CAG
aagtgttattgggggtggaa

SEQ ID NO: 20533 - DNA, 20 bp, Artificial Sequence
  Description of Artificial Sequence: Synthetic oligonucleotide
  Target: COL7A1; (+) strand; PAM type: NRG; PAM sequence: GAG
gttattgggggtggaacagt

SEQ ID NO: 20534 - DNA, 20 bp, Artificial Sequence
  Description of Artificial Sequence: Synthetic oligonucleotide
  Target: COL7A1; (+) strand; PAM type: NRG; PAM sequence: AGG
ttattgggggtggaacagtg

SEQ ID NO: 20535 - DNA, 20 bp, Artificial Sequence
  Description of Artificial Sequence: Synthetic oligonucleotide
  Target: COL7A1; (+) strand; PAM type: NRG; PAM sequence: CAG
ttgggggtggaacagtgagg

SEQ ID NO: 20536 - DNA, 20 bp, Artificial Sequence
  Description of Artificial Sequence: Synthetic oligonucleotide
  Target: COL7A1; (+) strand; PAM type: NRG; PAM sequence: GAG
gggggtggaacagtgaggca

SEQ ID NO: 20537 - DNA, 20 bp, Artificial Sequence
  Description of Artificial Sequence: Synthetic oligonucleotide
  Target: COL7A1; (+) strand; PAM type: NRG; PAM sequence: TGG
ggaacagtgaggcagagaaa

SEQ ID NO: 20538 - DNA, 20 bp, Artificial Sequence
  Description of Artificial Sequence: Synthetic oligonucleotide
  Target: COL7A1; (+) strand; PAM type: NRG; PAM sequence: CAG
gaggcagagaaatggcccct

SEQ ID NO: 20539 - DNA, 20 bp, Artificial Sequence
  Description of Artificial Sequence: Synthetic oligonucleotide
  Target: COL7A1; (+) strand; PAM type: NRG; PAM sequence: GAG
ggcagagaaatggcccctca

SEQ ID NO: 20540 - DNA, 20 bp, Artificial Sequence
  Description of Artificial Sequence: Synthetic oligonucleotide
  Target: COL7A1; (+) strand; PAM type: NRG; PAM sequence: CAG
aatggcccctcagagcttca

SEQ ID NO: 20541 - DNA, 20 bp, Artificial Sequence
  Description of Artificial Sequence: Synthetic oligonucleotide
  Target: COL7A1; (+) strand; PAM type: NRG; PAM sequence: GAG
tggcccctcagagcttcaca

SEQ ID NO: 20542 - DNA, 20 bp, Artificial Sequence
  Description of Artificial Sequence: Synthetic oligonucleotide
  Target: COL7A1; (+) strand; PAM type: NRG; PAM sequence: CAG
agcttcacagagcccaattc

SEQ ID NO: 20543 - DNA, 20 bp, Artificial Sequence
  Description of Artificial Sequence: Synthetic oligonucleotide
  Target: COL7A1; (+) strand; PAM type: NRG; PAM sequence: AGG
gcttcacagagcccaattcc

SEQ ID NO: 20544 - DNA, 20 bp, Artificial Sequence
  Description of Artificial Sequence: Synthetic oligonucleotide
  Target: COL7A1; (+) strand; PAM type: NRG; PAM sequence: AAG
cagagcccaattccaggcac

SEQ ID NO: 20545 - DNA, 20 bp, Artificial Sequence
  Description of Artificial Sequence: Synthetic oligonucleotide
  Target: COL7A1; (+) strand; PAM type: NRG; PAM sequence: AGG
agagcccaattccaggcaca

SEQ ID NO: 20546 - DNA, 20 bp, Artificial Sequence
  Description of Artificial Sequence: Synthetic oligonucleotide
  Target: COL7A1; (+) strand; PAM type: NRG; PAM sequence: GGG
gagcccaattccaggcacaa

SEQ ID NO: 20547 - DNA, 20 bp, Artificial Sequence
  Description of Artificial Sequence: Synthetic oligonucleotide
  Target: COL7A1; (+) strand; PAM type: NRG; PAM sequence: CAG
cccaattccaggcacaaggg

SEQ ID NO: 20548 - DNA, 20 bp, Artificial Sequence
  Description of Artificial Sequence: Synthetic oligonucleotide
  Target: COL7A1; (+) strand; PAM type: NRG; PAM sequence: AAG
ccaggcacaagggcagcgac

SEQ ID NO: 20549 - DNA, 20 bp, Artificial Sequence
  Description of Artificial Sequence: Synthetic oligonucleotide
  Target: COL7A1; (+) strand; PAM type: NRG; PAM sequence: AGG
caggcacaagggcagcgaca

SEQ ID NO: 20550 - DNA, 20 bp, Artificial Sequence
  Description of Artificial Sequence: Synthetic oligonucleotide
  Target: COL7A1; (+) strand; PAM type: NRG; PAM sequence: CAG
gcacaagggcagcgacaagg

SEQ ID NO: 20551 - DNA, 20 bp, Artificial Sequence
  Description of Artificial Sequence: Synthetic oligonucleotide
  Target: COL7A1; (+) strand; PAM type: NRG; PAM sequence: GAG
acaagggcagcgacaaggca

SEQ ID NO: 20552 - DNA, 20 bp, Artificial Sequence
  Description of Artificial Sequence: Synthetic oligonucleotide
  Target: COL7A1; (+) strand; PAM type: NRG; PAM sequence: AGG
caagggcagcgacaaggcag

SEQ ID NO: 20553 - DNA, 20 bp, Artificial Sequence
  Description of Artificial Sequence: Synthetic oligonucleotide
  Target: COL7A1; (+) strand; PAM type: NRG; PAM sequence: GGG
aagggcagcgacaaggcaga

SEQ ID NO: 20554 - DNA, 20 bp, Artificial Sequence
  Description of Artificial Sequence: Synthetic oligonucleotide
  Target: COL7A1; (+) strand; PAM type: NRG; PAM sequence: TGG
gcagagggcttccctgcctc

SEQ ID NO: 20555 - DNA, 20 bp, Artificial Sequence
  Description of Artificial Sequence: Synthetic oligonucleotide
  Target: COL7A1; (+) strand; PAM type: NRG; PAM sequence: GGG
cagagggcttccctgcctct

SEQ ID NO: 20556 - DNA, 20 bp, Artificial Sequence
  Description of Artificial Sequence: Synthetic oligonucleotide
  Target: COL7A1; (+) strand; PAM type: NRG; PAM sequence: TGG
gcttccctgcctctgggact

SEQ ID NO: 20557 - DNA, 20 bp, Artificial Sequence
  Description of Artificial Sequence: Synthetic oligonucleotide
  Target: COL7A1; (+) strand; PAM type: NRG; PAM sequence: GAG
ttccctgcctctgggacttg

SEQ ID NO: 20558 - DNA, 20 bp, Artificial Sequence
  Description of Artificial Sequence: Synthetic oligonucleotide
  Target: COL7A1; (+) strand; PAM type: NRG; PAM sequence: CAG
tgggacttggagctgctgct

SEQ ID NO: 20559 - DNA, 20 bp, Artificial Sequence
  Description of Artificial Sequence: Synthetic oligonucleotide
  Target: COL7A1; (+) strand; PAM type: NRG; PAM sequence: AGG
gggacttggagctgctgctc

SEQ ID NO: 20560 - DNA, 20 bp, Artificial Sequence
  Description of Artificial Sequence: Synthetic oligonucleotide
  Target: COL7A1; (+) strand; PAM type: NRG; PAM sequence: CAG
gagctgctgctcaggctctg

SEQ ID NO: 20561 - DNA, 20 bp, Artificial Sequence
  Description of Artificial Sequence: Synthetic oligonucleotide
  Target: COL7A1; (+) strand; PAM type: NRG; PAM sequence: CGG
ctgctgctcaggctctgcag

SEQ ID NO: 20562 - DNA, 20 bp, Artificial Sequence
  Description of Artificial Sequence: Synthetic oligonucleotide
  Target: COL7A1; (+) strand; PAM type: NRG; PAM sequence: GGG
tgctgctcaggctctgcagc

SEQ ID NO: 20563 - DNA, 20 bp, Artificial Sequence
  Description of Artificial Sequence: Synthetic oligonucleotide
  Target: COL7A1; (+) strand; PAM type: NRG; PAM sequence: GGG
gctgctcaggctctgcagcg

SEQ ID NO: 20564 - DNA, 20 bp, Artificial Sequence
  Description of Artificial Sequence: Synthetic oligonucleotide
  Target: COL7A1; (+) strand; PAM type: NRG; PAM sequence: TAG
ctcaggctctgcagcggggc

SEQ ID NO: 20565 - DNA, 20 bp, Artificial Sequence
  Description of Artificial Sequence: Synthetic oligonucleotide
  Target: COL7A1; (+) strand; PAM type: NRG; PAM sequence: GAG
caggctctgcagcggggcta

SEQ ID NO: 20566 - DNA, 20 bp, Artificial Sequence
  Description of Artificial Sequence: Synthetic oligonucleotide
  Target: COL7A1; (+) strand; PAM type: NRG; PAM sequence: AGG
aggctctgcagcggggctag

SEQ ID NO: 20567 - DNA, 20 bp, Artificial Sequence
  Description of Artificial Sequence: Synthetic oligonucleotide
  Target: COL7A1; (+) strand; PAM type: NRG; PAM sequence: TGG
agcggggctagaggccccac

SEQ ID NO: 20568 - DNA, 20 bp, Artificial Sequence
  Description of Artificial Sequence: Synthetic oligonucleotide
  Target: COL7A1; (+) strand; PAM type: NRG; PAM sequence: CAG
ccccactggcccttctattt

SEQ ID NO: 20569 - DNA, 20 bp, Artificial Sequence
  Description of Artificial Sequence: Synthetic oligonucleotide
  Target: COL7A1; (+) strand; PAM type: NRG; PAM sequence: GAG
ccactggcccttctatttca

SEQ ID NO: 20570 - DNA, 20 bp, Artificial Sequence
  Description of Artificial Sequence: Synthetic oligonucleotide
  Target: COL7A1; (+) strand; PAM type: NRG; PAM sequence: AAG
ctatttcagagtgtccccca

SEQ ID NO: 20571 - DNA, 20 bp, Artificial Sequence
  Description of Artificial Sequence: Synthetic oligonucleotide
  Target: COL7A1; (+) strand; PAM type: NRG; PAM sequence: TGG
agtgtcccccaaagtctctg

SEQ ID NO: 20572 - DNA, 20 bp, Artificial Sequence
  Description of Artificial Sequence: Synthetic oligonucleotide
  Target: COL7A1; (+) strand; PAM type: NRG; PAM sequence: TGG
gtcccccaaagtctctgtgg

SEQ ID NO: 20573 - DNA, 20 bp, Artificial Sequence
  Description of Artificial Sequence: Synthetic oligonucleotide
  Target: COL7A1; (+) strand; PAM type: NRG; PAM sequence: CAG
ctgtggtggtttataacctc

SEQ ID NO: 20574 - DNA, 20 bp, Artificial Sequence
  Description of Artificial Sequence: Synthetic oligonucleotide
  Target: COL7A1; (+) strand; PAM type: NRG; PAM sequence: TGG
ggtggtttataacctccagc

SEQ ID NO: 20575 - DNA, 20 bp, Artificial Sequence
  Description of Artificial Sequence: Synthetic oligonucleotide
  Target: COL7A1; (+) strand; PAM type: NRG; PAM sequence: GGG
gtggtttataacctccagct

SEQ ID NO: 20576 - DNA, 20 bp, Artificial Sequence
  Description of Artificial Sequence: Synthetic oligonucleotide
  Target: COL7A1; (+) strand; PAM type: NRG; PAM sequence: TAG
ataacctccagctgggcttc

SEQ ID NO: 20577 - DNA, 20 bp, Artificial Sequence
  Description of Artificial Sequence: Synthetic oligonucleotide
  Target: COL7A1; (+) strand; PAM type: NRG; PAM sequence: AGG
taacctccagctgggcttct

SEQ ID NO: 20578 - DNA, 20 bp, Artificial Sequence
  Description of Artificial Sequence: Synthetic oligonucleotide
  Target: COL7A1; (+) strand; PAM type: NRG; PAM sequence: GAG
ttctctcttgtaaaaacccc

SEQ ID NO: 20579 - DNA, 20 bp, Artificial Sequence
  Description of Artificial Sequence: Synthetic oligonucleotide
  Target: COL7A1; (+) strand; PAM type: NRG; PAM sequence: CAG
ctcttgtaaaaaccccgaga

SEQ ID NO: 20580 - DNA, 20 bp, Artificial Sequence
  Description of Artificial Sequence: Synthetic oligonucleotide
  Target: COL7A1; (+) strand; PAM type: NRG; PAM sequence: GAG
aaaaaccccgagacagcttt

SEQ ID NO: 20581 - DNA, 20 bp, Artificial Sequence
  Description of Artificial Sequence: Synthetic oligonucleotide
  Target: COL7A1; (+) strand; PAM type: NRG; PAM sequence: AGG
aaaaccccgagacagctttg

SEQ ID NO: 20582 - DNA, 20 bp, Artificial Sequence
  Description of Artificial Sequence: Synthetic oligonucleotide
  Target: COL7A1; (+) strand; PAM type: NRG; PAM sequence: GAG
aaccccgagacagctttgag

SEQ ID NO: 20583 - DNA, 20 bp, Artificial Sequence
  Description of Artificial Sequence: Synthetic oligonucleotide
  Target: COL7A1; (+) strand; PAM type: NRG; PAM sequence: CAG
gacagctttgaggagtgcct

SEQ ID NO: 20584 - DNA, 20 bp, Artificial Sequence
  Description of Artificial Sequence: Synthetic oligonucleotide
  Target: COL7A1; (+) strand; PAM type: NRG; PAM sequence: GAG
cagctttgaggagtgcctca

SEQ ID NO: 20585 - DNA, 20 bp, Artificial Sequence
  Description of Artificial Sequence: Synthetic oligonucleotide
  Target: COL7A1; (+) strand; PAM type: NRG; PAM sequence: TGG
gtgcctcagagaaacctcga

SEQ ID NO: 20586 - DNA, 20 bp, Artificial Sequence
  Description of Artificial Sequence: Synthetic oligonucleotide
  Target: COL7A1; (+) strand; PAM type: NRG; PAM sequence: TGG
cacactcaccctctcgccct

SEQ ID NO: 20587 - DNA, 20 bp, Artificial Sequence
  Description of Artificial Sequence: Synthetic oligonucleotide
  Target: COL7A1; (+) strand; PAM type: NRG; PAM sequence: CAG
actcaccctctcgcccttgg

SEQ ID NO: 20588 - DNA, 20 bp, Artificial Sequence
  Description of Artificial Sequence: Synthetic oligonucleotide
  Target: COL7A1; (+) strand; PAM type: NRG; PAM sequence: TGG
caccctctcgcccttggcag

SEQ ID NO: 20589 - DNA, 20 bp, Artificial Sequence
  Description of Artificial Sequence: Synthetic oligonucleotide
  Target: COL7A1; (+) strand; PAM type: NRG; PAM sequence: CAG
gcccttggcagtggcacttc

SEQ ID NO: 20590 - DNA, 20 bp, Artificial Sequence
  Description of Artificial Sequence: Synthetic oligonucleotide
  Target: COL7A1; (+) strand; PAM type: NRG; PAM sequence: AGG
cccttggcagtggcacttcc

SEQ ID NO: 20591 - DNA, 20 bp, Artificial Sequence
  Description of Artificial Sequence: Synthetic oligonucleotide
  Target: COL7A1; (+) strand; PAM type: NRG; PAM sequence: GGG
ccttggcagtggcacttcca

SEQ ID NO: 20592 - DNA, 20 bp, Artificial Sequence
  Description of Artificial Sequence: Synthetic oligonucleotide
  Target: COL7A1; (+) strand; PAM type: NRG; PAM sequence: GGG
cttggcagtggcacttccag

SEQ ID NO: 20593 - DNA, 20 bp, Artificial Sequence
  Description of Artificial Sequence: Synthetic oligonucleotide
  Target: COL7A1; (+) strand; PAM type: NRG; PAM sequence: GGG
ttggcagtggcacttccagg

SEQ ID NO: 20594 - DNA, 20 bp, Artificial Sequence
  Description of Artificial Sequence: Synthetic oligonucleotide
  Target: COL7A1; (+) strand; PAM type: NRG; PAM sequence: TGG
tggcacttccagggggcccc

SEQ ID NO: 20595 - DNA, 20 bp, Artificial Sequence
  Description of Artificial Sequence: Synthetic oligonucleotide
  Target: COL7A1; (+) strand; PAM type: NRG; PAM sequence: GGG
ggcacttccagggggcccct

SEQ ID NO: 20596 - DNA, 20 bp, Artificial Sequence
  Description of Artificial Sequence: Synthetic oligonucleotide
  Target: COL7A1; (+) strand; PAM type: NRG; PAM sequence: GGG
gcacttccagggggcccctg

SEQ ID NO: 20597 - DNA, 20 bp, Artificial Sequence
  Description of Artificial Sequence: Synthetic oligonucleotide
  Target: COL7A1; (+) strand; PAM type: NRG; PAM sequence: GGG
cacttccagggggcccctgg

SEQ ID NO: 20598 - DNA, 20 bp, Artificial Sequence
  Description of Artificial Sequence: Synthetic oligonucleotide
  Target: COL7A1; (+) strand; PAM type: NRG; PAM sequence: CGG
tccagggggcccctgggggc

SEQ ID NO: 20599 - DNA, 20 bp, Artificial Sequence
  Description of Artificial Sequence: Synthetic oligonucleotide
  Target: COL7A1; (+) strand; PAM type: NRG; PAM sequence: GGG
ccagggggcccctgggggcc

SEQ ID NO: 20600 - DNA, 20 bp, Artificial Sequence
  Description of Artificial Sequence: Synthetic oligonucleotide
  Target: COL7A1; (+) strand; PAM type: NRG; PAM sequence: GAG
agggggcccctgggggccgg

SEQ ID NO: 20601 - DNA, 20 bp, Artificial Sequence
  Description of Artificial Sequence: Synthetic oligonucleotide
  Target: COL7A1; (+) strand; PAM type: NRG; PAM sequence: CGG
cccctgggggccgggagcac

SEQ ID NO: 20602 - DNA, 20 bp, Artificial Sequence
  Description of Artificial Sequence: Synthetic oligonucleotide
  Target: COL7A1; (+) strand; PAM type: NRG; PAM sequence: AAG
gagcaccggtcctgccctga

SEQ ID NO: 20603 - DNA, 20 bp, Artificial Sequence
  Description of Artificial Sequence: Synthetic oligonucleotide
  Target: COL7A1; (+) strand; PAM type: NRG; PAM sequence: AAG
caccggtcctgccctgaaag

SEQ ID NO: 20604 - DNA, 20 bp, Artificial Sequence
  Description of Artificial Sequence: Synthetic oligonucleotide
  Target: COL7A1; (+) strand; PAM type: NRG; PAM sequence: TAG
ggtcctgccctgaaagaaga

SEQ ID NO: 20605 - DNA, 20 bp, Artificial Sequence
  Description of Artificial Sequence: Synthetic oligonucleotide
  Target: COL7A1; (+) strand; PAM type: NRG; PAM sequence: CAG
cctgccctgaaagaagatag

SEQ ID NO: 20606 - DNA, 20 bp, Artificial Sequence
  Description of Artificial Sequence: Synthetic oligonucleotide
  Target: COL7A1; (+) strand; PAM type: NRG; PAM sequence: TAG
ccctgaaagaagatagcagt

SEQ ID NO: 20607 - DNA, 20 bp, Artificial Sequence
  Description of Artificial Sequence: Synthetic oligonucleotide
  Target: COL7A1; (+) strand; PAM type: NRG; PAM sequence: AGG
cctgaaagaagatagcagtt

SEQ ID NO: 20608 - DNA, 20 bp, Artificial Sequence
  Description of Artificial Sequence: Synthetic oligonucleotide
  Target: COL7A1; (+) strand; PAM type: NRG; PAM sequence: TGG
gaaagaagatagcagttagg

SEQ ID NO: 20609 - DNA, 20 bp, Artificial Sequence
  Description of Artificial Sequence: Synthetic oligonucleotide
  Target: COL7A1; (+) strand; PAM type: NRG; PAM sequence: GGG
aaagaagatagcagttaggt

SEQ ID NO: 20610 - DNA, 20 bp, Artificial Sequence
  Description of Artificial Sequence: Synthetic oligonucleotide
  Target: COL7A1; (+) strand; PAM type: NRG; PAM sequence: GGG
aagaagatagcagttaggtg

SEQ ID NO: 20611 - DNA, 20 bp, Artificial Sequence
  Description of Artificial Sequence: Synthetic oligonucleotide
  Target: COL7A1; (+) strand; PAM type: NRG; PAM sequence: AAG
gatagcagttaggtggggat

SEQ ID NO: 20612 - DNA, 20 bp, Artificial Sequence
  Description of Artificial Sequence: Synthetic oligonucleotide
  Target: COL7A1; (+) strand; PAM type: NRG; PAM sequence: CAG
gcagttaggtggggataagc

SEQ ID NO: 20613 - DNA, 20 bp, Artificial Sequence
  Description of Artificial Sequence: Synthetic oligonucleotide
  Target: COL7A1; (+) strand; PAM type: NRG; PAM sequence: CAG
ttaggtggggataagccagt

SEQ ID NO: 20614 - DNA, 20 bp, Artificial Sequence
  Description of Artificial Sequence: Synthetic oligonucleotide
  Target: COL7A1; (+) strand; PAM type: NRG; PAM sequence: AGG
taggtggggataagccagtc

SEQ ID NO: 20615 - DNA, 20 bp, Artificial Sequence
  Description of Artificial Sequence: Synthetic oligonucleotide
  Target: COL7A1; (+) strand; PAM type: NRG; PAM sequence: GGG
aggtggggataagccagtca

SEQ ID NO: 20616 - DNA, 20 bp, Artificial Sequence
  Description of Artificial Sequence: Synthetic oligonucleotide
  Target: COL7A1; (+) strand; PAM type: NRG; PAM sequence: CAG
gggataagccagtcagggtg

SEQ ID NO: 20617 - DNA, 20 bp, Artificial Sequence
  Description of Artificial Sequence: Synthetic oligonucleotide
  Target: COL7A1; (+) strand; PAM type: NRG; PAM sequence: AGG
ggataagccagtcagggtgc

SEQ ID NO: 20618 - DNA, 20 bp, Artificial Sequence
  Description of Artificial Sequence: Synthetic oligonucleotide
  Target: COL7A1; (+) strand; PAM type: NRG; PAM sequence: GGG
gataagccagtcagggtgca

SEQ ID NO: 20619 - DNA, 20 bp, Artificial Sequence
  Description of Artificial Sequence: Synthetic oligonucleotide
  Target: COL7A1; (+) strand; PAM type: NRG; PAM sequence: CAG
agccagtcagggtgcaggga

SEQ ID NO: 20620 - DNA, 20 bp, Artificial Sequence
  Description of Artificial Sequence: Synthetic oligonucleotide
  Target: COL7A1; (+) strand; PAM type: NRG; PAM sequence: TGG
tcagggtgcagggacagatg

SEQ ID NO: 20621 - DNA, 20 bp, Artificial Sequence
  Description of Artificial Sequence: Synthetic oligonucleotide
  Target: COL7A1; (+) strand; PAM type: NRG; PAM sequence: GGG
cagggtgcagggacagatgt

SEQ ID NO: 20622 - DNA, 20 bp, Artificial Sequence
  Description of Artificial Sequence: Synthetic oligonucleotide
  Target: COL7A1; (+) strand; PAM type: NRG; PAM sequence: GGG
agggtgcagggacagatgtg

SEQ ID NO: 20623 - DNA, 20 bp, Artificial Sequence
  Description of Artificial Sequence: Synthetic oligonucleotide
  Target: COL7A1; (+) strand; PAM type: NRG; PAM sequence: GGG
gggtgcagggacagatgtgg

SEQ ID NO: 20624 - DNA, 20 bp, Artificial Sequence
  Description of Artificial Sequence: Synthetic oligonucleotide
  Target: COL7A1; (+) strand; PAM type: NRG; PAM sequence: CGG
cagatgtgggggacactcac

SEQ ID NO: 20625 - DNA, 20 bp, Artificial Sequence
  Description of Artificial Sequence: Synthetic oligonucleotide
  Target: COL7A1; (+) strand; PAM type: NRG; PAM sequence: GGG
agatgtgggggacactcacc

SEQ ID NO: 20626 - DNA, 20 bp, Artificial Sequence
  Description of Artificial Sequence: Synthetic oligonucleotide
  Target: COL7A1; (+) strand; PAM type: NRG; PAM sequence: GAG
atgtgggggacactcaccgg

SEQ ID NO: 20627 - DNA, 20 bp, Artificial Sequence
  Description of Artificial Sequence: Synthetic oligonucleotide
  Target: COL7A1; (+) strand; PAM type: NRG; PAM sequence: AGG
tgtgggggacactcaccggg

SEQ ID NO: 20628 - DNA, 20 bp, Artificial Sequence
  Description of Artificial Sequence: Synthetic oligonucleotide
  Target: COL7A1; (+) strand; PAM type: NRG; PAM sequence: CAG
ggggacactcaccgggaggc

SEQ ID NO: 20629 - DNA, 20 bp, Artificial Sequence
  Description of Artificial Sequence: Synthetic oligonucleotide
  Target: COL7A1; (+) strand; PAM type: NRG; PAM sequence: AGG
gggacactcaccgggaggcc

SEQ ID NO: 20630 - DNA, 20 bp, Artificial Sequence
  Description of Artificial Sequence: Synthetic oligonucleotide
  Target: COL7A1; (+) strand; PAM type: NRG; PAM sequence: GGG
ggacactcaccgggaggcca

SEQ ID NO: 20631 - DNA, 20 bp, Artificial Sequence
  Description of Artificial Sequence: Synthetic oligonucleotide
  Target: COL7A1; (+) strand; PAM type: NRG; PAM sequence: CAG
caccgggaggccagggtcgc

SEQ ID NO: 20632 - DNA, 20 bp, Artificial Sequence
  Description of Artificial Sequence: Synthetic oligonucleotide
  Target: COL7A1; (+) strand; PAM type: NRG; PAM sequence: AGG
accgggaggccagggtcgcc

SEQ ID NO: 20633 - DNA, 20 bp, Artificial Sequence
  Description of Artificial Sequence: Synthetic oligonucleotide
  Target: COL7A1; (+) strand; PAM type: NRG; PAM sequence: GAG
cgggaggccagggtcgccag

SEQ ID NO: 20634 - DNA, 20 bp, Artificial Sequence
  Description of Artificial Sequence: Synthetic oligonucleotide
  Target: COL7A1; (+) strand; PAM type: NRG; PAM sequence: AGG
gggaggccagggtcgccagg

SEQ ID NO: 20635 - DNA, 20 bp, Artificial Sequence
  Description of Artificial Sequence: Synthetic oligonucleotide
  Target: COL7A1; (+) strand; PAM type: NRG; PAM sequence: CAG
ggaggcccaacttgtcctct

SEQ ID NO: 20636 - DNA, 20 bp, Artificial Sequence
  Description of Artificial Sequence: Synthetic oligonucleotide
  Target: COL7A1; (+) strand; PAM type: NRG; PAM sequence: AGG
gaggcccaacttgtcctctc

SEQ ID NO: 20637 - DNA, 20 bp, Artificial Sequence
  Description of Artificial Sequence: Synthetic oligonucleotide
  Target: COL7A1; (+) strand; PAM type: NRG; PAM sequence: TAG
caacttgtcctctcaggccc

SEQ ID NO: 20638 - DNA, 20 bp, Artificial Sequence
  Description of Artificial Sequence: Synthetic oligonucleotide
  Target: COL7A1; (+) strand; PAM type: NRG; PAM sequence: AGG
aacttgtcctctcaggccct

SEQ ID NO: 20639 - DNA, 20 bp, Artificial Sequence
  Description of Artificial Sequence: Synthetic oligonucleotide
  Target: COL7A1; (+) strand; PAM type: NRG; PAM sequence: AAG
ttgtcctctcaggccctagg

SEQ ID NO: 20640 - DNA, 20 bp, Artificial Sequence
  Description of Artificial Sequence: Synthetic oligonucleotide
  Target: COL7A1; (+) strand; PAM type: NRG; PAM sequence: AGG
tgtcctctcaggccctagga

SEQ ID NO: 20641 - DNA, 20 bp, Artificial Sequence
  Description of Artificial Sequence: Synthetic oligonucleotide
  Target: COL7A1; (+) strand; PAM type: NRG; PAM sequence: GGG
gtcctctcaggccctaggaa

SEQ ID NO: 20642 - DNA, 20 bp, Artificial Sequence
  Description of Artificial Sequence: Synthetic oligonucleotide
  Target: COL7A1; (+) strand; PAM type: NRG; PAM sequence: CAG
caggccctaggaagggtaat

SEQ ID NO: 20643 - DNA, 20 bp, Artificial Sequence
  Description of Artificial Sequence: Synthetic oligonucleotide
  Target: COL7A1; (+) strand; PAM type: NRG; PAM sequence: GAG
ccctaggaagggtaatcagt

SEQ ID NO: 20644 - DNA, 20 bp, Artificial Sequence
  Description of Artificial Sequence: Synthetic oligonucleotide
  Target: COL7A1; (+) strand; PAM type: NRG; PAM sequence: CAG
cattctctattccccgcccg

SEQ ID NO: 20645 - DNA, 20 bp, Artificial Sequence
  Description of Artificial Sequence: Synthetic oligonucleotide
  Target: COL7A1; (+) strand; PAM type: NRG; PAM sequence: AGG
attctctattccccgcccgc

SEQ ID NO: 20646 - DNA, 20 bp, Artificial Sequence
  Description of Artificial Sequence: Synthetic oligonucleotide
  Target: COL7A1; (+) strand; PAM type: NRG; PAM sequence: GGG
ttctctattccccgcccgca

SEQ ID NO: 20647 - DNA, 20 bp, Artificial Sequence
  Description of Artificial Sequence: Synthetic oligonucleotide
  Target: COL7A1; (+) strand; PAM type: NRG; PAM sequence: GGG
tctctattccccgcccgcag

SEQ ID NO: 20648 - DNA, 20 bp, Artificial Sequence
  Description of Artificial Sequence: Synthetic oligonucleotide
  Target: COL7A1; (+) strand; PAM type: NRG; PAM sequence: CAG
aggggcactcaccatctctc

SEQ ID NO: 20649 - DNA, 20 bp, Artificial Sequence
  Description of Artificial Sequence: Synthetic oligonucleotide
  Target: COL7A1; (+) strand; PAM type: NRG; PAM sequence: AGG
ggggcactcaccatctctcc

SEQ ID NO: 20650 - DNA, 20 bp, Artificial Sequence
  Description of Artificial Sequence: Synthetic oligonucleotide
  Target: COL7A1; (+) strand; PAM type: NRG; PAM sequence: TGG
tctctccaggttcccccttc

SEQ ID NO: 20651 - DNA, 20 bp, Artificial Sequence
  Description of Artificial Sequence: Synthetic oligonucleotide
  Target: COL7A1; (+) strand; PAM type: NRG; PAM sequence: TGG
caggttcccccttctggccc

SEQ ID NO: 20652 - DNA, 20 bp, Artificial Sequence
  Description of Artificial Sequence: Synthetic oligonucleotide
  Target: COL7A1; (+) strand; PAM type: NRG; PAM sequence: GGG
aggttcccccttctggccct

SEQ ID NO: 20653 - DNA, 20 bp, Artificial Sequence
  Description of Artificial Sequence: Synthetic oligonucleotide
  Target: COL7A1; (+) strand; PAM type: NRG; PAM sequence: GGG
ggttcccccttctggccctg

SEQ ID NO: 20654 - DNA, 20 bp, Artificial Sequence
  Description of Artificial Sequence: Synthetic oligonucleotide
  Target: COL7A1; (+) strand; PAM type: NRG; PAM sequence: AAG
cccccttctggccctgggga

SEQ ID NO: 20655 - DNA, 20 bp, Artificial Sequence
  Description of Artificial Sequence: Synthetic oligonucleotide
  Target: COL7A1; (+) strand; PAM type: NRG; PAM sequence: CAG
ggccctggggaaagacatgt

SEQ ID NO: 20656 - DNA, 20 bp, Artificial Sequence
  Description of Artificial Sequence: Synthetic oligonucleotide
  Target: COL7A1; (+) strand; PAM type: NRG; PAM sequence: TGG
ggggaaagacatgtcagatg

SEQ ID NO: 20657 - DNA, 20 bp, Artificial Sequence
  Description of Artificial Sequence: Synthetic oligonucleotide
  Target: COL7A1; (+) strand; PAM type: NRG; PAM sequence: GGG
gggaaagacatgtcagatgt

SEQ ID NO: 20658 - DNA, 20 bp, Artificial Sequence
  Description of Artificial Sequence: Synthetic oligonucleotide
  Target: COL7A1; (+) strand; PAM type: NRG; PAM sequence: CAG
aagacatgtcagatgtgggt

SEQ ID NO: 20659 - DNA, 20 bp, Artificial Sequence
  Description of Artificial Sequence: Synthetic oligonucleotide
  Target: COL7A1; (+) strand; PAM type: NRG; PAM sequence: GAG
gacatgtcagatgtgggtca

SEQ ID NO: 20660 - DNA, 20 bp, Artificial Sequence
  Description of Artificial Sequence: Synthetic oligonucleotide
  Target: COL7A1; (+) strand; PAM type: NRG; PAM sequence: TGG
atgtcagatgtgggtcagag

SEQ ID NO: 20661 - DNA, 20 bp, Artificial Sequence
  Description of Artificial Sequence: Synthetic oligonucleotide
  Target: COL7A1; (+) strand; PAM type: NRG; PAM sequence: TAG
cagatgtgggtcagagtggc

SEQ ID NO: 20662 - DNA, 20 bp, Artificial Sequence
  Description of Artificial Sequence: Synthetic oligonucleotide
  Target: COL7A1; (+) strand; PAM type: NRG; PAM sequence: CAG
tgggtcagagtggctagccc

SEQ ID NO: 20663 - DNA, 20 bp, Artificial Sequence
  Description of Artificial Sequence: Synthetic oligonucleotide
  Target: COL7A1; (+) strand; PAM type: NRG; PAM sequence: AGG
gggtcagagtggctagcccc

SEQ ID NO: 20664 - DNA, 20 bp, Artificial Sequence
  Description of Artificial Sequence: Synthetic oligonucleotide
  Target: COL7A1; (+) strand; PAM type: NRG; PAM sequence: CAG
agagtggctagccccaggtg

SEQ ID NO: 20665 - DNA, 20 bp, Artificial Sequence
  Description of Artificial Sequence: Synthetic oligonucleotide
  Target: COL7A1; (+) strand; PAM type: NRG; PAM sequence: GAG
gcctctgttcacctctcgat

SEQ ID NO: 20666 - DNA, 20 bp, Artificial Sequence
  Description of Artificial Sequence: Synthetic oligonucleotide
  Target: COL7A1; (+) strand; PAM type: NRG; PAM sequence: AGG
cctctgttcacctctcgatg

SEQ ID NO: 20667 - DNA, 20 bp, Artificial Sequence
  Description of Artificial Sequence: Synthetic oligonucleotide
  Target: COL7A1; (+) strand; PAM type: NRG; PAM sequence: GGG
ctctgttcacctctcgatga

SEQ ID NO: 20668 - DNA, 20 bp, Artificial Sequence
  Description of Artificial Sequence: Synthetic oligonucleotide
  Target: COL7A1; (+) strand; PAM type: NRG; PAM sequence: TGG
cgatgagggactcttacctt

SEQ ID NO: 20669 - DNA, 20 bp, Artificial Sequence
  Description of Artificial Sequence: Synthetic oligonucleotide
  Target: COL7A1; (+) strand; PAM type: NRG; PAM sequence: TGG
cttacctttggacaatacac

SEQ ID NO: 20670 - DNA, 20 bp, Artificial Sequence
  Description of Artificial Sequence: Synthetic oligonucleotide
  Target: COL7A1; (+) strand; PAM type: NRG; PAM sequence: GGG
ttacctttggacaatacact

SEQ ID NO: 20671 - DNA, 20 bp, Artificial Sequence
  Description of Artificial Sequence: Synthetic oligonucleotide
  Target: COL7A1; (+) strand; PAM type: NRG; PAM sequence: CAG
cctttggacaatacactggg

SEQ ID NO: 20672 - DNA, 20 bp, Artificial Sequence
  Description of Artificial Sequence: Synthetic oligonucleotide
  Target: COL7A1; (+) strand; PAM type: NRG; PAM sequence: AGG
ctttggacaatacactgggc

SEQ ID NO: 20673 - DNA, 20 bp, Artificial Sequence
  Description of Artificial Sequence: Synthetic oligonucleotide
  Target: COL7A1; (+) strand; PAM type: NRG; PAM sequence: GGG
tttggacaatacactgggca

SEQ ID NO: 20674 - DNA, 20 bp, Artificial Sequence
  Description of Artificial Sequence: Synthetic oligonucleotide
  Target: COL7A1; (+) strand; PAM type: NRG; PAM sequence: TGG
caatacactgggcagggctc

SEQ ID NO: 20675 - DNA, 20 bp, Artificial Sequence
  Description of Artificial Sequence: Synthetic oligonucleotide
  Target: COL7A1; (+) strand; PAM type: NRG; PAM sequence: CGG
acactgggcagggctctggc

SEQ ID NO: 20676 - DNA, 20 bp, Artificial Sequence
  Description of Artificial Sequence: Synthetic oligonucleotide
  Target: COL7A1; (+) strand; PAM type: NRG; PAM sequence: GGG
cactgggcagggctctggcc

SEQ ID NO: 20677 - DNA, 20 bp, Artificial Sequence
  Description of Artificial Sequence: Synthetic oligonucleotide
  Target: COL7A1; (+) strand; PAM type: NRG; PAM sequence: GGG
actgggcagggctctggccg

SEQ ID NO: 20678 - DNA, 20 bp, Artificial Sequence
  Description of Artificial Sequence: Synthetic oligonucleotide
  Target: COL7A1; (+) strand; PAM type: NRG; PAM sequence: CGG
cagggctctggccggggctg

SEQ ID NO: 20679 - DNA, 20 bp, Artificial Sequence
  Description of Artificial Sequence: Synthetic oligonucleotide
  Target: COL7A1; (+) strand; PAM type: NRG; PAM sequence: TAG
tctggccggggctgcggaca

SEQ ID NO: 20680 - DNA, 20 bp, Artificial Sequence
  Description of Artificial Sequence: Synthetic oligonucleotide
  Target: COL7A1; (+) strand; PAM type: NRG; PAM sequence: AGG
ctggccggggctgcggacat

SEQ ID NO: 20681 - DNA, 20 bp, Artificial Sequence
  Description of Artificial Sequence: Synthetic oligonucleotide
  Target: COL7A1; (+) strand; PAM type: NRG; PAM sequence: GGG
tggccggggctgcggacata

SEQ ID NO: 20682 - DNA, 20 bp, Artificial Sequence
  Description of Artificial Sequence: Synthetic oligonucleotide
  Target: COL7A1; (+) strand; PAM type: NRG; PAM sequence: GAG
tgcggacatagggtctcttt

SEQ ID NO: 20683 - DNA, 20 bp, Artificial Sequence
  Description of Artificial Sequence: Synthetic oligonucleotide
  Target: COL7A1; (+) strand; PAM type: NRG; PAM sequence: AGG
gcggacatagggtctctttg

SEQ ID NO: 20684 - DNA, 20 bp, Artificial Sequence
  Description of Artificial Sequence: Synthetic oligonucleotide
  Target: COL7A1; (+) strand; PAM type: NRG; PAM sequence: AAG
tgaggttgaacatttctacc

SEQ ID NO: 20685 - DNA, 20 bp, Artificial Sequence
  Description of Artificial Sequence: Synthetic oligonucleotide
  Target: COL7A1; (+) strand; PAM type: NRG; PAM sequence: CAG
acatttctaccaagaacccc

SEQ ID NO: 20686 - DNA, 20 bp, Artificial Sequence
  Description of Artificial Sequence: Synthetic oligonucleotide
  Target: COL7A1; (+) strand; PAM type: NRG; PAM sequence: CAG
accccttatattctaccacc

SEQ ID NO: 20687 - DNA, 20 bp, Artificial Sequence
  Description of Artificial Sequence: Synthetic oligonucleotide
  Target: COL7A1; (+) strand; PAM type: NRG; PAM sequence: CAG
tattctaccacccagtcccc

SEQ ID NO: 20688 - DNA, 20 bp, Artificial Sequence
  Description of Artificial Sequence: Synthetic oligonucleotide
  Target: COL7A1; (+) strand; PAM type: NRG; PAM sequence: GAG
ttctaccacccagtccccca

SEQ ID NO: 20689 - DNA, 20 bp, Artificial Sequence
  Description of Artificial Sequence: Synthetic oligonucleotide
  Target: COL7A1; (+) strand; PAM type: NRG; PAM sequence: AGG
tctaccacccagtcccccag

SEQ ID NO: 20690 - DNA, 20 bp, Artificial Sequence
  Description of Artificial Sequence: Synthetic oligonucleotide
  Target: COL7A1; (+) strand; PAM type: NRG; PAM sequence: GAG
cagaggcctcttccaaacct

SEQ ID NO: 20691 - DNA, 20 bp, Artificial Sequence
  Description of Artificial Sequence: Synthetic oligonucleotide
  Target: COL7A1; (+) strand; PAM type: NRG; PAM sequence: TAG
aggcctcttccaaacctgag

SEQ ID NO: 20692 - DNA, 20 bp, Artificial Sequence
  Description of Artificial Sequence: Synthetic oligonucleotide
  Target: COL7A1; (+) strand; PAM type: NRG; PAM sequence: AAG
tcttccaaacctgagtagtg

SEQ ID NO: 20693 - DNA, 20 bp, Artificial Sequence
  Description of Artificial Sequence: Synthetic oligonucleotide
  Target: COL7A1; (+) strand; PAM type: NRG; PAM sequence: AGG
cttccaaacctgagtagtga

SEQ ID NO: 20694 - DNA, 20 bp, Artificial Sequence
  Description of Artificial Sequence: Synthetic oligonucleotide
  Target: COL7A1; (+) strand; PAM type: NRG; PAM sequence: CAG
gtagtgaaggatgcctgaca

SEQ ID NO: 20695 - DNA, 20 bp, Artificial Sequence
  Description of Artificial Sequence: Synthetic oligonucleotide
  Target: COL7A1; (+) strand; PAM type: NRG; PAM sequence: AGG
tagtgaaggatgcctgacac

SEQ ID NO: 20696 - DNA, 20 bp, Artificial Sequence
  Description of Artificial Sequence: Synthetic oligonucleotide
  Target: COL7A1; (+) strand; PAM type: NRG; PAM sequence: GGG
agtgaaggatgcctgacaca

SEQ ID NO: 20697 - DNA, 20 bp, Artificial Sequence
  Description of Artificial Sequence: Synthetic oligonucleotide
  Target: COL7A1; (+) strand; PAM type: NRG; PAM sequence: TGG
ggatgcctgacacagggctg

SEQ ID NO: 20698 - DNA, 20 bp, Artificial Sequence
  Description of Artificial Sequence: Synthetic oligonucleotide
  Target: COL7A1; (+) strand; PAM type: NRG; PAM sequence: CAG
gcctgacacagggctgtggc

SEQ ID NO: 20699 - DNA, 20 bp, Artificial Sequence
  Description of Artificial Sequence: Synthetic oligonucleotide
  Target: COL7A1; (+) strand; PAM type: NRG; PAM sequence: TGG
tggccagaccactgactgcc

SEQ ID NO: 20700 - DNA, 20 bp, Artificial Sequence
  Description of Artificial Sequence: Synthetic oligonucleotide
  Target: COL7A1; (+) strand; PAM type: NRG; PAM sequence: CAG
agaccactgactgcctggtc

SEQ ID NO: 20701 - DNA, 20 bp, Artificial Sequence
  Description of Artificial Sequence: Synthetic oligonucleotide
  Target: COL7A1; (+) strand; PAM type: NRG; PAM sequence: AGG
gaccactgactgcctggtcc

SEQ ID NO: 20702 - DNA, 20 bp, Artificial Sequence
  Description of Artificial Sequence: Synthetic oligonucleotide
  Target: COL7A1; (+) strand; PAM type: NRG; PAM sequence: TGG
ctgactgcctggtccaggct

SEQ ID NO: 20703 - DNA, 20 bp, Artificial Sequence
  Description of Artificial Sequence: Synthetic oligonucleotide
  Target: COL7A1; (+) strand; PAM type: NRG; PAM sequence: CGG
caggcttggcccatcatcca

SEQ ID NO: 20704 - DNA, 20 bp, Artificial Sequence
  Description of Artificial Sequence: Synthetic oligonucleotide
  Target: COL7A1; (+) strand; PAM type: NRG; PAM sequence: AAG
ttggcccatcatccacggcg

SEQ ID NO: 20705 - DNA, 20 bp, Artificial Sequence
  Description of Artificial Sequence: Synthetic oligonucleotide
  Target: COL7A1; (+) strand; PAM type: NRG; PAM sequence: AAG
gcccatcatccacggcgaag

SEQ ID NO: 20706 - DNA, 20 bp, Artificial Sequence
  Description of Artificial Sequence: Synthetic oligonucleotide
  Target: COL7A1; (+) strand; PAM type: NRG; PAM sequence: AGG
cccatcatccacggcgaaga

SEQ ID NO: 20707 - DNA, 20 bp, Artificial Sequence
  Description of Artificial Sequence: Synthetic oligonucleotide
  Target: COL7A1; (+) strand; PAM type: NRG; PAM sequence: TGG
catccacggcgaagaaggtc

SEQ ID NO: 20708 - DNA, 20 bp, Artificial Sequence
  Description of Artificial Sequence: Synthetic oligonucleotide
  Target: COL7A1; (+) strand; PAM type: NRG; PAM sequence: CAG
cacggcgaagaaggtctgga

SEQ ID NO: 20709 - DNA, 20 bp, Artificial Sequence
  Description of Artificial Sequence: Synthetic oligonucleotide
  Target: COL7A1; (+) strand; PAM type: NRG; PAM sequence: GAG
cggcgaagaaggtctggaca

SEQ ID NO: 20710 - DNA, 20 bp, Artificial Sequence
  Description of Artificial Sequence: Synthetic oligonucleotide
  Target: COL7A1; (+) strand; PAM type: NRG; PAM sequence: CGG
gtctggacagagtccatacc

SEQ ID NO: 20711 - DNA, 20 bp, Artificial Sequence
  Description of Artificial Sequence: Synthetic oligonucleotide
  Target: COL7A1; (+) strand; PAM type: NRG; PAM sequence: AAG
cagagtccatacccggcgcc

SEQ ID NO: 20712 - DNA, 20 bp, Artificial Sequence
  Description of Artificial Sequence: Synthetic oligonucleotide
  Target: COL7A1; (+) strand; PAM type: NRG; PAM sequence: CAG
atacccggcgccaagcgacg

SEQ ID NO: 20713 - DNA, 20 bp, Artificial Sequence
  Description of Artificial Sequence: Synthetic oligonucleotide
  Target: COL7A1; (+) strand; PAM type: NRG; PAM sequence: TGG
gccaagcgacgcagctgctc

SEQ ID NO: 20714 - DNA, 20 bp, Artificial Sequence
  Description of Artificial Sequence: Synthetic oligonucleotide
  Target: COL7A1; (+) strand; PAM type: NRG; PAM sequence: GGG
ccaagcgacgcagctgctct

SEQ ID NO: 20715 - DNA, 20 bp, Artificial Sequence
  Description of Artificial Sequence: Synthetic oligonucleotide
  Target: COL7A1; (+) strand; PAM type: NRG; PAM sequence: CAG
cagctgctctgggtccgctc

SEQ ID NO: 20716 - DNA, 20 bp, Artificial Sequence
  Description of Artificial Sequence: Synthetic oligonucleotide
  Target: COL7A1; (+) strand; PAM type: NRG; PAM sequence: AAG
attcccaacatcaccacatt

SEQ ID NO: 20717 - DNA, 20 bp, Artificial Sequence
  Description of Artificial Sequence: Synthetic oligonucleotide
  Target: COL7A1; (+) strand; PAM type: NRG; PAM sequence: AAG
acatcaccacattaagccct

SEQ ID NO: 20718 - DNA, 20 bp, Artificial Sequence
  Description of Artificial Sequence: Synthetic oligonucleotide
  Target: COL7A1; (+) strand; PAM type: NRG; PAM sequence: AGG
catcaccacattaagcccta

SEQ ID NO: 20719 - DNA, 20 bp, Artificial Sequence
  Description of Artificial Sequence: Synthetic oligonucleotide
  Target: COL7A1; (+) strand; PAM type: NRG; PAM sequence: TGG
caccacattaagccctaagg

SEQ ID NO: 20720 - DNA, 20 bp, Artificial Sequence
  Description of Artificial Sequence: Synthetic oligonucleotide
  Target: COL7A1; (+) strand; PAM type: NRG; PAM sequence: GGG
accacattaagccctaaggt

SEQ ID NO: 20721 - DNA, 20 bp, Artificial Sequence
  Description of Artificial Sequence: Synthetic oligonucleotide
  Target: COL7A1; (+) strand; PAM type: NRG; PAM sequence: GGG
ccacattaagccctaaggtg

SEQ ID NO: 20722 - DNA, 20 bp, Artificial Sequence
  Description of Artificial Sequence: Synthetic oligonucleotide
  Target: COL7A1; (+) strand; PAM type: NRG; PAM sequence: CAG
ttaagccctaaggtggggtc

SEQ ID NO: 20723 - DNA, 20 bp, Artificial Sequence
  Description of Artificial Sequence: Synthetic oligonucleotide
  Target: COL7A1; (+) strand; PAM type: NRG; PAM sequence: TGG
agccctaaggtggggtccag

SEQ ID NO: 20724 - DNA, 20 bp, Artificial Sequence
  Description of Artificial Sequence: Synthetic oligonucleotide
  Target: COL7A1; (+) strand; PAM type: NRG; PAM sequence: TAG
ggggtccagtggctgcatga

SEQ ID NO: 20725 - DNA, 20 bp, Artificial Sequence
  Description of Artificial Sequence: Synthetic oligonucleotide
  Target: COL7A1; (+) strand; PAM type: NRG; PAM sequence: CAG
tggctgcatgatagcctttt

SEQ ID NO: 20726 - DNA, 20 bp, Artificial Sequence
  Description of Artificial Sequence: Synthetic oligonucleotide
  Target: COL7A1; (+) strand; PAM type: NRG; PAM sequence: AGG
ggctgcatgatagccttttc

SEQ ID NO: 20727 - DNA, 20 bp, Artificial Sequence
  Description of Artificial Sequence: Synthetic oligonucleotide
  Target: COL7A1; (+) strand; PAM type: NRG; PAM sequence: GGG
gctgcatgatagccttttca

SEQ ID NO: 20728 - DNA, 20 bp, Artificial Sequence
  Description of Artificial Sequence: Synthetic oligonucleotide
  Target: COL7A1; (+) strand; PAM type: NRG; PAM sequence: CAG
ttcagggccacccctattcc

SEQ ID NO: 20729 - DNA, 20 bp, Artificial Sequence
  Description of Artificial Sequence: Synthetic oligonucleotide
  Target: COL7A1; (+) strand; PAM type: NRG; PAM sequence: CAG
ttcccagaccccttccccat

SEQ ID NO: 20730 - DNA, 20 bp, Artificial Sequence
  Description of Artificial Sequence: Synthetic oligonucleotide
  Target: COL7A1; (+) strand; PAM type: NRG; PAM sequence: CAG
cccatcagcctactccttac

SEQ ID NO: 20731 - DNA, 20 bp, Artificial Sequence
  Description of Artificial Sequence: Synthetic oligonucleotide
  Target: COL7A1; (+) strand; PAM type: NRG; PAM sequence: AAG
atcagcctactccttaccag

SEQ ID NO: 20732 - DNA, 20 bp, Artificial Sequence
  Description of Artificial Sequence: Synthetic oligonucleotide
  Target: COL7A1; (+) strand; PAM type: NRG; PAM sequence: TGG
cctactccttaccagaagcc

SEQ ID NO: 20733 - DNA, 20 bp, Artificial Sequence
  Description of Artificial Sequence: Synthetic oligonucleotide
  Target: COL7A1; (+) strand; PAM type: NRG; PAM sequence: GGG
ctactccttaccagaagcct

SEQ ID NO: 20734 - DNA, 20 bp, Artificial Sequence
  Description of Artificial Sequence: Synthetic oligonucleotide
  Target: COL7A1; (+) strand; PAM type: NRG; PAM sequence: CGG
taccagaagcctgggcctca

SEQ ID NO: 20735 - DNA, 20 bp, Artificial Sequence
  Description of Artificial Sequence: Synthetic oligonucleotide
  Target: COL7A1; (+) strand; PAM type: NRG; PAM sequence: TGG
agaagcctgggcctcacgga

SEQ ID NO: 20736 - DNA, 20 bp, Artificial Sequence
  Description of Artificial Sequence: Synthetic oligonucleotide
  Target: COL7A1; (+) strand; PAM type: NRG; PAM sequence: GGG
gaagcctgggcctcacggat

SEQ ID NO: 20737 - DNA, 20 bp, Artificial Sequence
  Description of Artificial Sequence: Synthetic oligonucleotide
  Target: COL7A1; (+) strand; PAM type: NRG; PAM sequence: GGG
aagcctgggcctcacggatg

SEQ ID NO: 20738 - DNA, 20 bp, Artificial Sequence
  Description of Artificial Sequence: Synthetic oligonucleotide
  Target: COL7A1; (+) strand; PAM type: NRG; PAM sequence: AAG
ggctgaatatgtcacctctc

SEQ ID NO: 20739 - DNA, 20 bp, Artificial Sequence
  Description of Artificial Sequence: Synthetic oligonucleotide
  Target: COL7A1; (+) strand; PAM type: NRG; PAM sequence: AGG
gctgaatatgtcacctctca

SEQ ID NO: 20740 - DNA, 20 bp, Artificial Sequence
  Description of Artificial Sequence: Synthetic oligonucleotide
  Target: COL7A1; (+) strand; PAM type: NRG; PAM sequence: GGG
ctgaatatgtcacctctcaa

SEQ ID NO: 20741 - DNA, 20 bp, Artificial Sequence
  Description of Artificial Sequence: Synthetic oligonucleotide
  Target: COL7A1; (+) strand; PAM type: NRG; PAM sequence: TAG
cctctcaagggttcatccac

SEQ ID NO: 20742 - DNA, 20 bp, Artificial Sequence
  Description of Artificial Sequence: Synthetic oligonucleotide
  Target: COL7A1; (+) strand; PAM type: NRG; PAM sequence: CAG
ctcaagggttcatccactag

SEQ ID NO: 20743 - DNA, 20 bp, Artificial Sequence
  Description of Artificial Sequence: Synthetic oligonucleotide
  Target: COL7A1; (+) strand; PAM type: NRG; PAM sequence: TGG
actagcagaaccatcacccc

SEQ ID NO: 20744 - DNA, 20 bp, Artificial Sequence
  Description of Artificial Sequence: Synthetic oligonucleotide
  Target: COL7A1; (+) strand; PAM type: NRG; PAM sequence: TGG
ccatcacccctggtacgtgc

SEQ ID NO: 20745 - DNA, 20 bp, Artificial Sequence
  Description of Artificial Sequence: Synthetic oligonucleotide
  Target: COL7A1; (+) strand; PAM type: NRG; PAM sequence: CGG
tcacccctggtacgtgctgg

SEQ ID NO: 20746 - DNA, 20 bp, Artificial Sequence
  Description of Artificial Sequence: Synthetic oligonucleotide
  Target: COL7A1; (+) strand; PAM type: NRG; PAM sequence: CAG
tggtacgtgctggcggcgcc

SEQ ID NO: 20747 - DNA, 20 bp, Artificial Sequence
  Description of Artificial Sequence: Synthetic oligonucleotide
  Target: COL7A1; (+) strand; PAM type: NRG; PAM sequence: AGG
ggtacgtgctggcggcgccc

SEQ ID NO: 20748 - DNA, 20 bp, Artificial Sequence
  Description of Artificial Sequence: Synthetic oligonucleotide
  Target: COL7A1; (+) strand; PAM type: NRG; PAM sequence: GAG
tacgtgctggcggcgcccag

SEQ ID NO: 20749 - DNA, 20 bp, Artificial Sequence
  Description of Artificial Sequence: Synthetic oligonucleotide
  Target: COL7A1; (+) strand; PAM type: NRG; PAM sequence: TGG
tggcggcgcccaggagcatc

SEQ ID NO: 20750 - DNA, 20 bp, Artificial Sequence
  Description of Artificial Sequence: Synthetic oligonucleotide
  Target: COL7A1; (+) strand; PAM type: NRG; PAM sequence: GAG
tggtgccaacatgtatctgt

SEQ ID NO: 20751 - DNA, 20 bp, Artificial Sequence
  Description of Artificial Sequence: Synthetic oligonucleotide
  Target: COL7A1; (+) strand; PAM type: NRG; PAM sequence: CGG
gtatctgtgagctgtgacca

SEQ ID NO: 20752 - DNA, 20 bp, Artificial Sequence
  Description of Artificial Sequence: Synthetic oligonucleotide
  Target: COL7A1; (+) strand; PAM type: NRG; PAM sequence: TGG
gctgtgaccacggctgtgcc

SEQ ID NO: 20753 - DNA, 20 bp, Artificial Sequence
  Description of Artificial Sequence: Synthetic oligonucleotide
  Target: COL7A1; (+) strand; PAM type: NRG; PAM sequence: AAG
gtgaccacggctgtgcctgg

SEQ ID NO: 20754 - DNA, 20 bp, Artificial Sequence
  Description of Artificial Sequence: Synthetic oligonucleotide
  Target: COL7A1; (+) strand; PAM type: NRG; PAM sequence: AGG
tgaccacggctgtgcctgga

SEQ ID NO: 20755 - DNA, 20 bp, Artificial Sequence
  Description of Artificial Sequence: Synthetic oligonucleotide
  Target: COL7A1; (+) strand; PAM type: NRG; PAM sequence: AAG
ccacggctgtgcctggaagg

SEQ ID NO: 20756 - DNA, 20 bp, Artificial Sequence
  Description of Artificial Sequence: Synthetic oligonucleotide
  Target: COL7A1; (+) strand; PAM type: NRG; PAM sequence: AGG
cacggctgtgcctggaagga

SEQ ID NO: 20757 - DNA, 20 bp, Artificial Sequence
  Description of Artificial Sequence: Synthetic oligonucleotide
  Target: COL7A1; (+) strand; PAM type: NRG; PAM sequence: CAG
gcctggaaggaaggacatgt

SEQ ID NO: 20758 - DNA, 20 bp, Artificial Sequence
  Description of Artificial Sequence: Synthetic oligonucleotide
  Target: COL7A1; (+) strand; PAM type: NRG; PAM sequence: TGG
ggaaggacatgtcagaaccc

SEQ ID NO: 20759 - DNA, 20 bp, Artificial Sequence
  Description of Artificial Sequence: Synthetic oligonucleotide
  Target: COL7A1; (+) strand; PAM type: NRG; PAM sequence: GGG
gaaggacatgtcagaaccct

SEQ ID NO: 20760 - DNA, 20 bp, Artificial Sequence
  Description of Artificial Sequence: Synthetic oligonucleotide
  Target: COL7A1; (+) strand; PAM type: NRG; PAM sequence: GGG
aaggacatgtcagaaccctg

SEQ ID NO: 20761 - DNA, 20 bp, Artificial Sequence
  Description of Artificial Sequence: Synthetic oligonucleotide
  Target: COL7A1; (+) strand; PAM type: NRG; PAM sequence: AAG
tgtcagaaccctggggcacc

SEQ ID NO: 20762 - DNA, 20 bp, Artificial Sequence
  Description of Artificial Sequence: Synthetic oligonucleotide
  Target: COL7A1; (+) strand; PAM type: NRG; PAM sequence: CAG
accctggggcaccaagctcc

SEQ ID NO: 20763 - DNA, 20 bp, Artificial Sequence
  Description of Artificial Sequence: Synthetic oligonucleotide
  Target: COL7A1; (+) strand; PAM type: NRG; PAM sequence: TGG
ctggggcaccaagctcccag

SEQ ID NO: 20764 - DNA, 20 bp, Artificial Sequence
  Description of Artificial Sequence: Synthetic oligonucleotide
  Target: COL7A1; (+) strand; PAM type: NRG; PAM sequence: TAG
ggcaccaagctcccagtgga

SEQ ID NO: 20765 - DNA, 20 bp, Artificial Sequence
  Description of Artificial Sequence: Synthetic oligonucleotide
  Target: COL7A1; (+) strand; PAM type: NRG; PAM sequence: CAG
aagctcccagtggatagccc

SEQ ID NO: 20766 - DNA, 20 bp, Artificial Sequence
  Description of Artificial Sequence: Synthetic oligonucleotide
  Target: COL7A1; (+) strand; PAM type: NRG; PAM sequence: AGG
agctcccagtggatagcccc

SEQ ID NO: 20767 - DNA, 20 bp, Artificial Sequence
  Description of Artificial Sequence: Synthetic oligonucleotide
  Target: COL7A1; (+) strand; PAM type: NRG; PAM sequence: GAG
ctcccagtggatagccccag

SEQ ID NO: 20768 - DNA, 20 bp, Artificial Sequence
  Description of Artificial Sequence: Synthetic oligonucleotide
  Target: COL7A1; (+) strand; PAM type: NRG; PAM sequence: CAG
ccaggagtccatgcctgctg

SEQ ID NO: 20769 - DNA, 20 bp, Artificial Sequence
  Description of Artificial Sequence: Synthetic oligonucleotide
  Target: COL7A1; (+) strand; PAM type: NRG; PAM sequence: CAG
tgcctgctgcagtcctcacc

SEQ ID NO: 20770 - DNA, 20 bp, Artificial Sequence
  Description of Artificial Sequence: Synthetic oligonucleotide
  Target: COL7A1; (+) strand; PAM type: NRG; PAM sequence: AGG
gcctgctgcagtcctcaccc

SEQ ID NO: 20771 - DNA, 20 bp, Artificial Sequence
  Description of Artificial Sequence: Synthetic oligonucleotide
  Target: COL7A1; (+) strand; PAM type: NRG; PAM sequence: TGG
tcacccaggttgttcccact

SEQ ID NO: 20772 - DNA, 20 bp, Artificial Sequence
  Description of Artificial Sequence: Synthetic oligonucleotide
  Target: COL7A1; (+) strand; PAM type: NRG; PAM sequence: GGG
cacccaggttgttcccactt

SEQ ID NO: 20773 - DNA, 20 bp, Artificial Sequence
  Description of Artificial Sequence: Synthetic oligonucleotide
  Target: COL7A1; (+) strand; PAM type: NRG; PAM sequence: TAG
tgttcccacttgggtccatg

SEQ ID NO: 20774 - DNA, 20 bp, Artificial Sequence
  Description of Artificial Sequence: Synthetic oligonucleotide
  Target: COL7A1; (+) strand; PAM type: NRG; PAM sequence: AGG
gttcccacttgggtccatgt

SEQ ID NO: 20775 - DNA, 20 bp, Artificial Sequence
  Description of Artificial Sequence: Synthetic oligonucleotide
  Target: COL7A1; (+) strand; PAM type: NRG; PAM sequence: GGG
ttcccacttgggtccatgta

SEQ ID NO: 20776 - DNA, 20 bp, Artificial Sequence
  Description of Artificial Sequence: Synthetic oligonucleotide
  Target: COL7A1; (+) strand; PAM type: NRG; PAM sequence: CGG
ggtccatgtagggcatgtca

SEQ ID NO: 20777 - DNA, 20 bp, Artificial Sequence
  Description of Artificial Sequence: Synthetic oligonucleotide
  Target: COL7A1; (+) strand; PAM type: NRG; PAM sequence: AAG
gcatgtcacggatcctttgc

SEQ ID NO: 20778 - DNA, 20 bp, Artificial Sequence
  Description of Artificial Sequence: Synthetic oligonucleotide
  Target: COL7A1; (+) strand; PAM type: NRG; PAM sequence: AAG
atcctttgcaagataatgcc

SEQ ID NO: 20779 - DNA, 20 bp, Artificial Sequence
  Description of Artificial Sequence: Synthetic oligonucleotide
  Target: COL7A1; (+) strand; PAM type: NRG; PAM sequence: AGG
tcctttgcaagataatgcca

SEQ ID NO: 20780 - DNA, 20 bp, Artificial Sequence
  Description of Artificial Sequence: Synthetic oligonucleotide
  Target: COL7A1; (+) strand; PAM type: NRG; PAM sequence: TGG
gcaagataatgccaaggtca

SEQ ID NO: 20781 - DNA, 20 bp, Artificial Sequence
  Description of Artificial Sequence: Synthetic oligonucleotide
  Target: COL7A1; (+) strand; PAM type: NRG; PAM sequence: GGG
caagataatgccaaggtcat

SEQ ID NO: 20782 - DNA, 20 bp, Artificial Sequence
  Description of Artificial Sequence: Synthetic oligonucleotide
  Target: COL7A1; (+) strand; PAM type: NRG; PAM sequence: GAG
agataatgccaaggtcatgg

SEQ ID NO: 20783 - DNA, 20 bp, Artificial Sequence
  Description of Artificial Sequence: Synthetic oligonucleotide
  Target: COL7A1; (+) strand; PAM type: NRG; PAM sequence: CAG
ccaaggtcatgggagccatt

SEQ ID NO: 20784 - DNA, 20 bp, Artificial Sequence
  Description of Artificial Sequence: Synthetic oligonucleotide
  Target: COL7A1; (+) strand; PAM type: NRG; PAM sequence: TGG
aggtcatgggagccattcag

SEQ ID NO: 20785 - DNA, 20 bp, Artificial Sequence
  Description of Artificial Sequence: Synthetic oligonucleotide
  Target: COL7A1; (+) strand; PAM type: NRG; PAM sequence: GGG
ggtcatgggagccattcagt

SEQ ID NO: 20786 - DNA, 20 bp, Artificial Sequence
  Description of Artificial Sequence: Synthetic oligonucleotide
  Target: COL7A1; (+) strand; PAM type: NRG; PAM sequence: CAG
tgggagccattcagtgggaa

SEQ ID NO: 20787 - DNA, 20 bp, Artificial Sequence
  Description of Artificial Sequence: Synthetic oligonucleotide
  Target: COL7A1; (+) strand; PAM type: NRG; PAM sequence: TGG
gagccattcagtgggaacag

SEQ ID NO: 20788 - DNA, 20 bp, Artificial Sequence
  Description of Artificial Sequence: Synthetic oligonucleotide
  Target: COL7A1; (+) strand; PAM type: NRG; PAM sequence: GGG
agccattcagtgggaacagt

SEQ ID NO: 20789 - DNA, 20 bp, Artificial Sequence
  Description of Artificial Sequence: Synthetic oligonucleotide
  Target: COL7A1; (+) strand; PAM type: NRG; PAM sequence: GGG
gccattcagtgggaacagtg

SEQ ID NO: 20790 - DNA, 20 bp, Artificial Sequence
  Description of Artificial Sequence: Synthetic oligonucleotide
  Target: COL7A1; (+) strand; PAM type: NRG; PAM sequence: GAG
cattcagtgggaacagtggg

SEQ ID NO: 20791 - DNA, 20 bp, Artificial Sequence
  Description of Artificial Sequence: Synthetic oligonucleotide
  Target: COL7A1; (+) strand; PAM type: NRG; PAM sequence: AGG
attcagtgggaacagtgggg

SEQ ID NO: 20792 - DNA, 20 bp, Artificial Sequence
  Description of Artificial Sequence: Synthetic oligonucleotide
  Target: COL7A1; (+) strand; PAM type: NRG; PAM sequence: GGG
ttcagtgggaacagtgggga

SEQ ID NO: 20793 - DNA, 20 bp, Artificial Sequence
  Description of Artificial Sequence: Synthetic oligonucleotide
  Target: COL7A1; (+) strand; PAM type: NRG; PAM sequence: AAG
tggggagggccgatgactgt

SEQ ID NO: 20794 - DNA, 20 bp, Artificial Sequence
  Description of Artificial Sequence: Synthetic oligonucleotide
  Target: COL7A1; (+) strand; PAM type: NRG; PAM sequence: CAG
gagggccgatgactgtaaga

SEQ ID NO: 20795 - DNA, 20 bp, Artificial Sequence
  Description of Artificial Sequence: Synthetic oligonucleotide
  Target: COL7A1; (+) strand; PAM type: NRG; PAM sequence: CAG
ggccgatgactgtaagacag

SEQ ID NO: 20796 - DNA, 20 bp, Artificial Sequence
  Description of Artificial Sequence: Synthetic oligonucleotide
  Target: COL7A1; (+) strand; PAM type: NRG; PAM sequence: AGG
gccgatgactgtaagacagc

SEQ ID NO: 20797 - DNA, 20 bp, Artificial Sequence
  Description of Artificial Sequence: Synthetic oligonucleotide
  Target: COL7A1; (+) strand; PAM type: NRG; PAM sequence: TGG
tgtaagacagcaggccaacc

SEQ ID NO: 20798 - DNA, 20 bp, Artificial Sequence
  Description of Artificial Sequence: Synthetic oligonucleotide
  Target: COL7A1; (+) strand; PAM type: NRG; PAM sequence: GGG
gtaagacagcaggccaacct

SEQ ID NO: 20799 - DNA, 20 bp, Artificial Sequence
  Description of Artificial Sequence: Synthetic oligonucleotide
  Target: COL7A1; (+) strand; PAM type: NRG; PAM sequence: GGG
taagacagcaggccaacctg

SEQ ID NO: 20800 - DNA, 20 bp, Artificial Sequence
  Description of Artificial Sequence: Synthetic oligonucleotide
  Target: COL7A1; (+) strand; PAM type: NRG; PAM sequence: TGG
gacagcaggccaacctgggg

SEQ ID NO: 20801 - DNA, 20 bp, Artificial Sequence
  Description of Artificial Sequence: Synthetic oligonucleotide
  Target: COL7A1; (+) strand; PAM type: NRG; PAM sequence: AAG
agcaggccaacctggggtgg

SEQ ID NO: 20802 - DNA, 20 bp, Artificial Sequence
  Description of Artificial Sequence: Synthetic oligonucleotide
  Target: COL7A1; (+) strand; PAM type: NRG; PAM sequence: AGG
gcaggccaacctggggtgga

SEQ ID NO: 20803 - DNA, 20 bp, Artificial Sequence
  Description of Artificial Sequence: Synthetic oligonucleotide
  Target: COL7A1; (+) strand; PAM type: NRG; PAM sequence: CAG
acctggggtggaaggaaaca

SEQ ID NO: 20804 - DNA, 20 bp, Artificial Sequence
  Description of Artificial Sequence: Synthetic oligonucleotide
  Target: COL7A1; (+) strand; PAM type: NRG; PAM sequence: GAG
ctggggtggaaggaaacaca

SEQ ID NO: 20805 - DNA, 20 bp, Artificial Sequence
  Description of Artificial Sequence: Synthetic oligonucleotide
  Target: COL7A1; (+) strand; PAM type: NRG; PAM sequence: GAG
tggaaggaaacacagagcct

SEQ ID NO: 20806 - DNA, 20 bp, Artificial Sequence
  Description of Artificial Sequence: Synthetic oligonucleotide
  Target: COL7A1; (+) strand; PAM type: NRG; PAM sequence: AGG
ggaaggaaacacagagcctg

SEQ ID NO: 20807 - DNA, 20 bp, Artificial Sequence
  Description of Artificial Sequence: Synthetic oligonucleotide
  Target: COL7A1; (+) strand; PAM type: NRG; PAM sequence: GAG
aaggaaacacagagcctgag

SEQ ID NO: 20808 - DNA, 20 bp, Artificial Sequence
  Description of Artificial Sequence: Synthetic oligonucleotide
  Target: COL7A1; (+) strand; PAM type: NRG; PAM sequence: AGG
aggaaacacagagcctgagg

SEQ ID NO: 20809 - DNA, 20 bp, Artificial Sequence
  Description of Artificial Sequence: Synthetic oligonucleotide
  Target: COL7A1; (+) strand; PAM type: NRG; PAM sequence: CAG
acagagcctgaggaggatga

SEQ ID NO: 20810 - DNA, 20 bp, Artificial Sequence
  Description of Artificial Sequence: Synthetic oligonucleotide
  Target: COL7A1; (+) strand; PAM type: NRG; PAM sequence: GAG
agagcctgaggaggatgaca

SEQ ID NO: 20811 - DNA, 20 bp, Artificial Sequence
  Description of Artificial Sequence: Synthetic oligonucleotide
  Target: COL7A1; (+) strand; PAM type: NRG; PAM sequence: CAG
gcctgaggaggatgacagag

SEQ ID NO: 20812 - DNA, 20 bp, Artificial Sequence
  Description of Artificial Sequence: Synthetic oligonucleotide
  Target: COL7A1; (+) strand; PAM type: NRG; PAM sequence: AGG
cctgaggaggatgacagagc

SEQ ID NO: 20813 - DNA, 20 bp, Artificial Sequence
  Description of Artificial Sequence: Synthetic oligonucleotide
  Target: COL7A1; (+) strand; PAM type: NRG; PAM sequence: GGG
ctgaggaggatgacagagca

SEQ ID NO: 20814 - DNA, 20 bp, Artificial Sequence
  Description of Artificial Sequence: Synthetic oligonucleotide
  Target: COL7A1; (+) strand; PAM type: NRG; PAM sequence: TGG
ggaggatgacagagcaggga

SEQ ID NO: 20815 - DNA, 20 bp, Artificial Sequence
  Description of Artificial Sequence: Synthetic oligonucleotide
  Target: COL7A1; (+) strand; PAM type: NRG; PAM sequence: GGG
gaggatgacagagcagggat

SEQ ID NO: 20816 - DNA, 20 bp, Artificial Sequence
  Description of Artificial Sequence: Synthetic oligonucleotide
  Target: COL7A1; (+) strand; PAM type: NRG; PAM sequence: GGG
aggatgacagagcagggatg

SEQ ID NO: 20817 - DNA, 20 bp, Artificial Sequence
  Description of Artificial Sequence: Synthetic oligonucleotide
  Target: COL7A1; (+) strand; PAM type: NRG; PAM sequence: GGG
ggatgacagagcagggatgg

SEQ ID NO: 20818 - DNA, 20 bp, Artificial Sequence
  Description of Artificial Sequence: Synthetic oligonucleotide
  Target: COL7A1; (+) strand; PAM type: NRG; PAM sequence: CAG
agagcagggatgggggtgca

SEQ ID NO: 20819 - DNA, 20 bp, Artificial Sequence
  Description of Artificial Sequence: Synthetic oligonucleotide
  Target: COL7A1; (+) strand; PAM type: NRG; PAM sequence: GAG
agcagggatgggggtgcaca

SEQ ID NO: 20820 - DNA, 20 bp, Artificial Sequence
  Description of Artificial Sequence: Synthetic oligonucleotide
  Target: COL7A1; (+) strand; PAM type: NRG; PAM sequence: TGG
ggatgggggtgcacagagcc

SEQ ID NO: 20821 - DNA, 20 bp, Artificial Sequence
  Description of Artificial Sequence: Synthetic oligonucleotide
  Target: COL7A1; (+) strand; PAM type: NRG; PAM sequence: GAG
atgggggtgcacagagcctg

SEQ ID NO: 20822 - DNA, 20 bp, Artificial Sequence
  Description of Artificial Sequence: Synthetic oligonucleotide
  Target: COL7A1; (+) strand; PAM type: NRG; PAM sequence: CAG
cagagcctggagaaacacat

SEQ ID NO: 20823 - DNA, 20 bp, Artificial Sequence
  Description of Artificial Sequence: Synthetic oligonucleotide
  Target: COL7A1; (+) strand; PAM type: NRG; PAM sequence: AGG
agagcctggagaaacacatc

SEQ ID NO: 20824 - DNA, 20 bp, Artificial Sequence
  Description of Artificial Sequence: Synthetic oligonucleotide
  Target: COL7A1; (+) strand; PAM type: NRG; PAM sequence: GGG
gagcctggagaaacacatca

SEQ ID NO: 20825 - DNA, 20 bp, Artificial Sequence
  Description of Artificial Sequence: Synthetic oligonucleotide
  Target: COL7A1; (+) strand; PAM type: NRG; PAM sequence: TAG
tgtgaccaaaccctatctat

SEQ ID NO: 20826 - DNA, 20 bp, Artificial Sequence
  Description of Artificial Sequence: Synthetic oligonucleotide
  Target: COL7A1; (+) strand; PAM type: NRG; PAM sequence: AGG
gtgaccaaaccctatctatt

SEQ ID NO: 20827 - DNA, 20 bp, Artificial Sequence
  Description of Artificial Sequence: Synthetic oligonucleotide
  Target: COL7A1; (+) strand; PAM type: NRG; PAM sequence: GGG
tgaccaaaccctatctatta

SEQ ID NO: 20828 - DNA, 20 bp, Artificial Sequence
  Description of Artificial Sequence: Synthetic oligonucleotide
  Target: COL7A1; (+) strand; PAM type: NRG; PAM sequence: GAG
accaaaccctatctattagg

SEQ ID NO: 20829 - DNA, 20 bp, Artificial Sequence
  Description of Artificial Sequence: Synthetic oligonucleotide
  Target: COL7A1; (+) strand; PAM type: NRG; PAM sequence: CAG
aaccctatctattagggagt

SEQ ID NO: 20830 - DNA, 20 bp, Artificial Sequence
  Description of Artificial Sequence: Synthetic oligonucleotide
  Target: COL7A1; (+) strand; PAM type: NRG; PAM sequence: CAG
cctatctattagggagtcag

SEQ ID NO: 20831 - DNA, 20 bp, Artificial Sequence
  Description of Artificial Sequence: Synthetic oligonucleotide
  Target: COL7A1; (+) strand; PAM type: NRG; PAM sequence: TGG
tattagggagtcagcagtga

SEQ ID NO: 20832 - DNA, 20 bp, Artificial Sequence
  Description of Artificial Sequence: Synthetic oligonucleotide
  Target: COL7A1; (+) strand; PAM type: NRG; PAM sequence: CAG
tagggagtcagcagtgatgg

SEQ ID NO: 20833 - DNA, 20 bp, Artificial Sequence
  Description of Artificial Sequence: Synthetic oligonucleotide
  Target: COL7A1; (+) strand; PAM type: NRG; PAM sequence: AGG
agggagtcagcagtgatggc

SEQ ID NO: 20834 - DNA, 20 bp, Artificial Sequence
  Description of Artificial Sequence: Synthetic oligonucleotide
  Target: COL7A1; (+) strand; PAM type: NRG; PAM sequence: TAG
agtcagcagtgatggcagga

SEQ ID NO: 20835 - DNA, 20 bp, Artificial Sequence
  Description of Artificial Sequence: Synthetic oligonucleotide
  Target: COL7A1; (+) strand; PAM type: NRG; PAM sequence: AGG
gtcagcagtgatggcaggat

SEQ ID NO: 20836 - DNA, 20 bp, Artificial Sequence
  Description of Artificial Sequence: Synthetic oligonucleotide
  Target: COL7A1; (+) strand; PAM type: NRG; PAM sequence: GGG
tcagcagtgatggcaggata

SEQ ID NO: 20837 - DNA, 20 bp, Artificial Sequence
  Description of Artificial Sequence: Synthetic oligonucleotide
  Target: COL7A1; (+) strand; PAM type: NRG; PAM sequence: GAG
agcagtgatggcaggatagg

SEQ ID NO: 20838 - DNA, 20 bp, Artificial Sequence
  Description of Artificial Sequence: Synthetic oligonucleotide
  Target: COL7A1; (+) strand; PAM type: NRG; PAM sequence: CAG
gtgatggcaggatagggagc

SEQ ID NO: 20839 - DNA, 20 bp, Artificial Sequence
  Description of Artificial Sequence: Synthetic oligonucleotide
  Target: COL7A1; (+) strand; PAM type: NRG; PAM sequence: AGG
tgatggcaggatagggagcc

SEQ ID NO: 20840 - DNA, 20 bp, Artificial Sequence
  Description of Artificial Sequence: Synthetic oligonucleotide
  Target: COL7A1; (+) strand; PAM type: NRG; PAM sequence: CAG
tggcaggatagggagccagg

SEQ ID NO: 20841 - DNA, 20 bp, Artificial Sequence
  Description of Artificial Sequence: Synthetic oligonucleotide
  Target: COL7A1; (+) strand; PAM type: NRG; PAM sequence: TAG
caggatagggagccaggcag

SEQ ID NO: 20842 - DNA, 20 bp, Artificial Sequence
  Description of Artificial Sequence: Synthetic oligonucleotide
  Target: COL7A1; (+) strand; PAM type: NRG; PAM sequence: AGG
aggatagggagccaggcagt

SEQ ID NO: 20843 - DNA, 20 bp, Artificial Sequence
  Description of Artificial Sequence: Synthetic oligonucleotide
  Target: COL7A1; (+) strand; PAM type: NRG; PAM sequence: GAG
tagggagccaggcagtaggt

SEQ ID NO: 20844 - DNA, 20 bp, Artificial Sequence
  Description of Artificial Sequence: Synthetic oligonucleotide
  Target: COL7A1; (+) strand; PAM type: NRG; PAM sequence: AGG
agggagccaggcagtaggtg

SEQ ID NO: 20845 - DNA, 20 bp, Artificial Sequence
  Description of Artificial Sequence: Synthetic oligonucleotide
  Target: COL7A1; (+) strand; PAM type: NRG; PAM sequence: TGG
gccaggcagtaggtgaggtc

SEQ ID NO: 20846 - DNA, 20 bp, Artificial Sequence
  Description of Artificial Sequence: Synthetic oligonucleotide
  Target: COL7A1; (+) strand; PAM type: NRG; PAM sequence: GAG
caggcagtaggtgaggtctg

SEQ ID NO: 20847 - DNA, 20 bp, Artificial Sequence
  Description of Artificial Sequence: Synthetic oligonucleotide
  Target: COL7A1; (+) strand; PAM type: NRG; PAM sequence: GAG
aggtgaggtctggagcctgt

SEQ ID NO: 20848 - DNA, 20 bp, Artificial Sequence
  Description of Artificial Sequence: Synthetic oligonucleotide
  Target: COL7A1; (+) strand; PAM type: NRG; PAM sequence: GAG
gtgaggtctggagcctgtga

SEQ ID NO: 20849 - DNA, 20 bp, Artificial Sequence
  Description of Artificial Sequence: Synthetic oligonucleotide
  Target: COL7A1; (+) strand; PAM type: NRG; PAM sequence: GAG
gaggtctggagcctgtgaga

SEQ ID NO: 20850 - DNA, 20 bp, Artificial Sequence
  Description of Artificial Sequence: Synthetic oligonucleotide
  Target: COL7A1; (+) strand; PAM type: NRG; PAM sequence: TGG
tctggagcctgtgagagagc

SEQ ID NO: 20851 - DNA, 20 bp, Artificial Sequence
  Description of Artificial Sequence: Synthetic oligonucleotide
  Target: COL7A1; (+) strand; PAM type: NRG; PAM sequence: GGG
ctggagcctgtgagagagct

SEQ ID NO: 20852 - DNA, 20 bp, Artificial Sequence
  Description of Artificial Sequence: Synthetic oligonucleotide
  Target: COL7A1; (+) strand; PAM type: NRG; PAM sequence: GAG
ggagcctgtgagagagctgg

SEQ ID NO: 20853 - DNA, 20 bp, Artificial Sequence
  Description of Artificial Sequence: Synthetic oligonucleotide
  Target: COL7A1; (+) strand; PAM type: NRG; PAM sequence: TGG
gggagaatgcctgaacctat

SEQ ID NO: 20854 - DNA, 20 bp, Artificial Sequence
  Description of Artificial Sequence: Synthetic oligonucleotide
  Target: COL7A1; (+) strand; PAM type: NRG; PAM sequence: GGG
ggagaatgcctgaacctatt

SEQ ID NO: 20855 - DNA, 20 bp, Artificial Sequence
  Description of Artificial Sequence: Synthetic oligonucleotide
  Target: COL7A1; (+) strand; PAM type: NRG; PAM sequence: TGG
gaatgcctgaacctattggg

SEQ ID NO: 20856 - DNA, 20 bp, Artificial Sequence
  Description of Artificial Sequence: Synthetic oligonucleotide
  Target: COL7A1; (+) strand; PAM type: NRG; PAM sequence: CAG
gcctgaacctattgggtggt

SEQ ID NO: 20857 - DNA, 20 bp, Artificial Sequence
  Description of Artificial Sequence: Synthetic oligonucleotide
  Target: COL7A1; (+) strand; PAM type: NRG; PAM sequence: AGG
cctgaacctattgggtggtc

SEQ ID NO: 20858 - DNA, 20 bp, Artificial Sequence
  Description of Artificial Sequence: Synthetic oligonucleotide
  Target: COL7A1; (+) strand; PAM type: NRG; PAM sequence: GAG
tgaacctattgggtggtcag

SEQ ID NO: 20859 - DNA, 20 bp, Artificial Sequence
  Description of Artificial Sequence: Synthetic oligonucleotide
  Target: COL7A1; (+) strand; PAM type: NRG; PAM sequence: TGG
cctattgggtggtcaggaga

SEQ ID NO: 20860 - DNA, 20 bp, Artificial Sequence
  Description of Artificial Sequence: Synthetic oligonucleotide
  Target: COL7A1; (+) strand; PAM type: NRG; PAM sequence: TGG
ggtggtcaggagatggtaac

SEQ ID NO: 20861 - DNA, 20 bp, Artificial Sequence
  Description of Artificial Sequence: Synthetic oligonucleotide
  Target: COL7A1; (+) strand; PAM type: NRG; PAM sequence: TGG
tcaggagatggtaactggta

SEQ ID NO: 20862 - DNA, 20 bp, Artificial Sequence
  Description of Artificial Sequence: Synthetic oligonucleotide
  Target: COL7A1; (+) strand; PAM type: NRG; PAM sequence: GAG
aggagatggtaactggtatg

SEQ ID NO: 20863 - DNA, 20 bp, Artificial Sequence
  Description of Artificial Sequence: Synthetic oligonucleotide
  Target: COL7A1; (+) strand; PAM type: NRG; PAM sequence: TGG
atggtaactggtatggagcc

SEQ ID NO: 20864 - DNA, 20 bp, Artificial Sequence
  Description of Artificial Sequence: Synthetic oligonucleotide
  Target: COL7A1; (+) strand; PAM type: NRG; PAM sequence: GGG
tggtaactggtatggagcct

SEQ ID NO: 20865 - DNA, 20 bp, Artificial Sequence
  Description of Artificial Sequence: Synthetic oligonucleotide
  Target: COL7A1; (+) strand; PAM type: NRG; PAM sequence: TGG
taactggtatggagcctggg

SEQ ID NO: 20866 - DNA, 20 bp, Artificial Sequence
  Description of Artificial Sequence: Synthetic oligonucleotide
  Target: COL7A1; (+) strand; PAM type: NRG; PAM sequence: GGG
aactggtatggagcctgggt

SEQ ID NO: 20867 - DNA, 20 bp, Artificial Sequence
  Description of Artificial Sequence: Synthetic oligonucleotide
  Target: COL7A1; (+) strand; PAM type: NRG; PAM sequence: GGG
actggtatggagcctgggtg

SEQ ID NO: 20868 - DNA, 20 bp, Artificial Sequence
  Description of Artificial Sequence: Synthetic oligonucleotide
  Target: COL7A1; (+) strand; PAM type: NRG; PAM sequence: GGG
ctggtatggagcctgggtgg

SEQ ID NO: 20869 - DNA, 20 bp, Artificial Sequence
  Description of Artificial Sequence: Synthetic oligonucleotide
  Target: COL7A1; (+) strand; PAM type: NRG; PAM sequence: GGG
tggtatggagcctgggtggg

SEQ ID NO: 20870 - DNA, 20 bp, Artificial Sequence
  Description of Artificial Sequence: Synthetic oligonucleotide
  Target: COL7A1; (+) strand; PAM type: NRG; PAM sequence: CAG
ggagcctgggtggggggcct

SEQ ID NO: 20871 - DNA, 20 bp, Artificial Sequence
  Description of Artificial Sequence: Synthetic oligonucleotide
  Target: COL7A1; (+) strand; PAM type: NRG; PAM sequence: AGG
gagcctgggtggggggcctc

SEQ ID NO: 20872 - DNA, 20 bp, Artificial Sequence
  Description of Artificial Sequence: Synthetic oligonucleotide
  Target: COL7A1; (+) strand; PAM type: NRG; PAM sequence: GGG
agcctgggtggggggcctca

SEQ ID NO: 20873 - DNA, 20 bp, Artificial Sequence
  Description of Artificial Sequence: Synthetic oligonucleotide
  Target: COL7A1; (+) strand; PAM type: NRG; PAM sequence: GAG
cctgggtggggggcctcagg

SEQ ID NO: 20874 - DNA, 20 bp, Artificial Sequence
  Description of Artificial Sequence: Synthetic oligonucleotide
  Target: COL7A1; (+) strand; PAM type: NRG; PAM sequence: GAG
tgggtggggggcctcaggga

SEQ ID NO: 20875 - DNA, 20 bp, Artificial Sequence
  Description of Artificial Sequence: Synthetic oligonucleotide
  Target: COL7A1; (+) strand; PAM type: NRG; PAM sequence: AGG
gggtggggggcctcagggag

SEQ ID NO: 20876 - DNA, 20 bp, Artificial Sequence
  Description of Artificial Sequence: Synthetic oligonucleotide
  Target: COL7A1; (+) strand; PAM type: NRG; PAM sequence: TAG
tggggggcctcagggagagg

SEQ ID NO: 20877 - DNA, 20 bp, Artificial Sequence
  Description of Artificial Sequence: Synthetic oligonucleotide
  Target: COL7A1; (+) strand; PAM type: NRG; PAM sequence: TGG
cctcagggagaggtagaatc

SEQ ID NO: 20878 - DNA, 20 bp, Artificial Sequence
  Description of Artificial Sequence: Synthetic oligonucleotide
  Target: COL7A1; (+) strand; PAM type: NRG; PAM sequence: CAG
gaggtagaatctggctgccc

SEQ ID NO: 20879 - DNA, 20 bp, Artificial Sequence
  Description of Artificial Sequence: Synthetic oligonucleotide
  Target: COL7A1; (+) strand; PAM type: NRG; PAM sequence: AGG
aggtagaatctggctgcccc

SEQ ID NO: 20880 - DNA, 20 bp, Artificial Sequence
  Description of Artificial Sequence: Synthetic oligonucleotide
  Target: COL7A1; (+) strand; PAM type: NRG; PAM sequence: GGG
ggtagaatctggctgcccca

SEQ ID NO: 20881 - DNA, 20 bp, Artificial Sequence
  Description of Artificial Sequence: Synthetic oligonucleotide
  Target: COL7A1; (+) strand; PAM type: NRG; PAM sequence: TGG
ggccaaacctgaactgcctg

SEQ ID NO: 20882 - DNA, 20 bp, Artificial Sequence
  Description of Artificial Sequence: Synthetic oligonucleotide
  Target: COL7A1; (+) strand; PAM type: NRG; PAM sequence: AAG
acctgaactgcctgtggccc

SEQ ID NO: 20883 - DNA, 20 bp, Artificial Sequence
  Description of Artificial Sequence: Synthetic oligonucleotide
  Target: COL7A1; (+) strand; PAM type: NRG; PAM sequence: GAG
ctgaactgcctgtggcccaa

SEQ ID NO: 20884 - DNA, 20 bp, Artificial Sequence
  Description of Artificial Sequence: Synthetic oligonucleotide
  Target: COL7A1; (+) strand; PAM type: NRG; PAM sequence: AGG
tgaactgcctgtggcccaag

SEQ ID NO: 20885 - DNA, 20 bp, Artificial Sequence
  Description of Artificial Sequence: Synthetic oligonucleotide
  Target: COL7A1; (+) strand; PAM type: NRG; PAM sequence: AAG
gcctgtggcccaagaggccc

SEQ ID NO: 20886 - DNA, 20 bp, Artificial Sequence
  Description of Artificial Sequence: Synthetic oligonucleotide
  Target: COL7A1; (+) strand; PAM type: NRG; PAM sequence: CAG
agaggcccaagtgccaacac

SEQ ID NO: 20887 - DNA, 20 bp, Artificial Sequence
  Description of Artificial Sequence: Synthetic oligonucleotide
  Target: COL7A1; (+) strand; PAM type: NRG; PAM sequence: CAG
agtgccaacaccagacgctc

SEQ ID NO: 20888 - DNA, 20 bp, Artificial Sequence
  Description of Artificial Sequence: Synthetic oligonucleotide
  Target: COL7A1; (+) strand; PAM type: NRG; PAM sequence: AGG
gtgccaacaccagacgctcc

SEQ ID NO: 20889 - DNA, 20 bp, Artificial Sequence
  Description of Artificial Sequence: Synthetic oligonucleotide
  Target: COL7A1; (+) strand; PAM type: NRG; PAM sequence: TAG
acgctccaggaccctcctcg

SEQ ID NO: 20890 - DNA, 20 bp, Artificial Sequence
  Description of Artificial Sequence: Synthetic oligonucleotide
  Target: COL7A1; (+) strand; PAM type: NRG; PAM sequence: CGG
ccctcctcgtagcctccgca

SEQ ID NO: 20891 - DNA, 20 bp, Artificial Sequence
  Description of Artificial Sequence: Synthetic oligonucleotide
  Target: COL7A1; (+) strand; PAM type: NRG; PAM sequence: GAG
cctcgtagcctccgcacggt

SEQ ID NO: 20892 - DNA, 20 bp, Artificial Sequence
  Description of Artificial Sequence: Synthetic oligonucleotide
  Target: COL7A1; (+) strand; PAM type: NRG; PAM sequence: GAG
cgcacggtgagcattgtctt

SEQ ID NO: 20893 - DNA, 20 bp, Artificial Sequence
  Description of Artificial Sequence: Synthetic oligonucleotide
  Target: COL7A1; (+) strand; PAM type: NRG; PAM sequence: TGG
acggtgagcattgtcttgag

SEQ ID NO: 20894 - DNA, 20 bp, Artificial Sequence
  Description of Artificial Sequence: Synthetic oligonucleotide
  Target: COL7A1; (+) strand; PAM type: NRG; PAM sequence: TGG
gcattgtcttgagtggcatg

SEQ ID NO: 20895 - DNA, 20 bp, Artificial Sequence
  Description of Artificial Sequence: Synthetic oligonucleotide
  Target: COL7A1; (+) strand; PAM type: NRG; PAM sequence: TAG
ttgtcttgagtggcatgtgg

SEQ ID NO: 20896 - DNA, 20 bp, Artificial Sequence
  Description of Artificial Sequence: Synthetic oligonucleotide
  Target: COL7A1; (+) strand; PAM type: NRG; PAM sequence: AGG
tgtcttgagtggcatgtggt

SEQ ID NO: 20897 - DNA, 20 bp, Artificial Sequence
  Description of Artificial Sequence: Synthetic oligonucleotide
  Target: COL7A1; (+) strand; PAM type: NRG; PAM sequence: CAG
ggtaggaacaccacatccgc

SEQ ID NO: 20898 - DNA, 20 bp, Artificial Sequence
  Description of Artificial Sequence: Synthetic oligonucleotide
  Target: COL7A1; (+) strand; PAM type: NRG; PAM sequence: AGG
gtaggaacaccacatccgcc

SEQ ID NO: 20899 - DNA, 20 bp, Artificial Sequence
  Description of Artificial Sequence: Synthetic oligonucleotide
  Target: COL7A1; (+) strand; PAM type: NRG; PAM sequence: CGG
acaccacatccgccaggcca

SEQ ID NO: 20900 - DNA, 20 bp, Artificial Sequence
  Description of Artificial Sequence: Synthetic oligonucleotide
  Target: COL7A1; (+) strand; PAM type: NRG; PAM sequence: GGG
caccacatccgccaggccac

SEQ ID NO: 20901 - DNA, 20 bp, Artificial Sequence
  Description of Artificial Sequence: Synthetic oligonucleotide
  Target: COL7A1; (+) strand; PAM type: NRG; PAM sequence: GGG
accacatccgccaggccacg

SEQ ID NO: 20902 - DNA, 20 bp, Artificial Sequence
  Description of Artificial Sequence: Synthetic oligonucleotide
  Target: COL7A1; (+) strand; PAM type: NRG; PAM sequence: GGG
ccacatccgccaggccacgg

SEQ ID NO: 20903 - DNA, 20 bp, Artificial Sequence
  Description of Artificial Sequence: Synthetic oligonucleotide
  Target: COL7A1; (+) strand; PAM type: NRG; PAM sequence: TAG
caggccacgggggcacactg

SEQ ID NO: 20904 - DNA, 20 bp, Artificial Sequence
  Description of Artificial Sequence: Synthetic oligonucleotide
  Target: COL7A1; (+) strand; PAM type: NRG; PAM sequence: AGG
aggccacgggggcacactgt

SEQ ID NO: 20905 - DNA, 20 bp, Artificial Sequence
  Description of Artificial Sequence: Synthetic oligonucleotide
  Target: COL7A1; (+) strand; PAM type: NRG; PAM sequence: AAG
ccacgggggcacactgtagg

SEQ ID NO: 20906 - DNA, 20 bp, Artificial Sequence
  Description of Artificial Sequence: Synthetic oligonucleotide
  Target: COL7A1; (+) strand; PAM type: NRG; PAM sequence: AGG
cacgggggcacactgtagga

SEQ ID NO: 20907 - DNA, 20 bp, Artificial Sequence
  Description of Artificial Sequence: Synthetic oligonucleotide
  Target: COL7A1; (+) strand; PAM type: NRG; PAM sequence: GGG
acgggggcacactgtaggaa

SEQ ID NO: 20908 - DNA, 20 bp, Artificial Sequence
  Description of Artificial Sequence: Synthetic oligonucleotide
  Target: COL7A1; (+) strand; PAM type: NRG; PAM sequence: GGG
cgggggcacactgtaggaag

SEQ ID NO: 20909 - DNA, 20 bp, Artificial Sequence
  Description of Artificial Sequence: Synthetic oligonucleotide
  Target: COL7A1; (+) strand; PAM type: NRG; PAM sequence: AAG
cacactgtaggaaggggaac

SEQ ID NO: 20910 - DNA, 20 bp, Artificial Sequence
  Description of Artificial Sequence: Synthetic oligonucleotide
  Target: COL7A1; (+) strand; PAM type: NRG; PAM sequence: AAG
ggaaggggaacaagttactg

SEQ ID NO: 20911 - DNA, 20 bp, Artificial Sequence
  Description of Artificial Sequence: Synthetic oligonucleotide
  Target: COL7A1; (+) strand; PAM type: NRG; PAM sequence: CGG
aggggaacaagttactgaag

SEQ ID NO: 20912 - DNA, 20 bp, Artificial Sequence
  Description of Artificial Sequence: Synthetic oligonucleotide
  Target: COL7A1; (+) strand; PAM type: NRG; PAM sequence: GGG
ggggaacaagttactgaagc

SEQ ID NO: 20913 - DNA, 20 bp, Artificial Sequence
  Description of Artificial Sequence: Synthetic oligonucleotide
  Target: COL7A1; (+) strand; PAM type: NRG; PAM sequence: CAG
gaacaagttactgaagcggg

SEQ ID NO: 20914 - DNA, 20 bp, Artificial Sequence
  Description of Artificial Sequence: Synthetic oligonucleotide
  Target: COL7A1; (+) strand; PAM type: NRG; PAM sequence: CAG
actgaagcgggcagcccacc

SEQ ID NO: 20915 - DNA, 20 bp, Artificial Sequence
  Description of Artificial Sequence: Synthetic oligonucleotide
  Target: COL7A1; (+) strand; PAM type: NRG; PAM sequence: TGG
cccactacgcccactatacc

SEQ ID NO: 20916 - DNA, 20 bp, Artificial Sequence
  Description of Artificial Sequence: Synthetic oligonucleotide
  Target: COL7A1; (+) strand; PAM type: NRG; PAM sequence: CAG
tatacctggcgtctgtgtga

SEQ ID NO: 20917 - DNA, 20 bp, Artificial Sequence
  Description of Artificial Sequence: Synthetic oligonucleotide
  Target: COL7A1; (+) strand; PAM type: NRG; PAM sequence: CAG
cgtctgtgtgacagatgcct

SEQ ID NO: 20918 - DNA, 20 bp, Artificial Sequence
  Description of Artificial Sequence: Synthetic oligonucleotide
  Target: COL7A1; (+) strand; PAM type: NRG; PAM sequence: AGG
gtctgtgtgacagatgcctc

SEQ ID NO: 20919 - DNA, 20 bp, Artificial Sequence
  Description of Artificial Sequence: Synthetic oligonucleotide
  Target: COL7A1; (+) strand; PAM type: NRG; PAM sequence: CAG
tcaggaccccgcacaccatc

SEQ ID NO: 20920 - DNA, 20 bp, Artificial Sequence
  Description of Artificial Sequence: Synthetic oligonucleotide
  Target: COL7A1; (+) strand; PAM type: NRG; PAM sequence: AGG
caggaccccgcacaccatcc

SEQ ID NO: 20921 - DNA, 20 bp, Artificial Sequence
  Description of Artificial Sequence: Synthetic oligonucleotide
  Target: COL7A1; (+) strand; PAM type: NRG; PAM sequence: CAG
accccgcacaccatccagga

SEQ ID NO: 20922 - DNA, 20 bp, Artificial Sequence
  Description of Artificial Sequence: Synthetic oligonucleotide
  Target: COL7A1; (+) strand; PAM type: NRG; PAM sequence: AGG
ccccgcacaccatccaggac

SEQ ID NO: 20923 - DNA, 20 bp, Artificial Sequence
  Description of Artificial Sequence: Synthetic oligonucleotide
  Target: COL7A1; (+) strand; PAM type: NRG; PAM sequence: CAG
acaccatccaggacaggcgt

SEQ ID NO: 20924 - DNA, 20 bp, Artificial Sequence
  Description of Artificial Sequence: Synthetic oligonucleotide
  Target: COL7A1; (+) strand; PAM type: NRG; PAM sequence: AGG
caccatccaggacaggcgtc

SEQ ID NO: 20925 - DNA, 20 bp, Artificial Sequence
  Description of Artificial Sequence: Synthetic oligonucleotide
  Target: COL7A1; (+) strand; PAM type: NRG; PAM sequence: GGG
accatccaggacaggcgtca

SEQ ID NO: 20926 - DNA, 20 bp, Artificial Sequence
  Description of Artificial Sequence: Synthetic oligonucleotide
  Target: COL7A1; (+) strand; PAM type: NRG; PAM sequence: GAG
catccaggacaggcgtcagg

SEQ ID NO: 20927 - DNA, 20 bp, Artificial Sequence
  Description of Artificial Sequence: Synthetic oligonucleotide
  Target: COL7A1; (+) strand; PAM type: NRG; PAM sequence: AAG
ccaggacaggcgtcagggag

SEQ ID NO: 20928 - DNA, 20 bp, Artificial Sequence
  Description of Artificial Sequence: Synthetic oligonucleotide
  Target: COL7A1; (+) strand; PAM type: NRG; PAM sequence: AAG
aggcgtcagggagaagatgt

SEQ ID NO: 20929 - DNA, 20 bp, Artificial Sequence
  Description of Artificial Sequence: Synthetic oligonucleotide
  Target: COL7A1; (+) strand; PAM type: NRG; PAM sequence: GAG
gcgtcagggagaagatgtaa

SEQ ID NO: 20930 - DNA, 20 bp, Artificial Sequence
  Description of Artificial Sequence: Synthetic oligonucleotide
  Target: COL7A1; (+) strand; PAM type: NRG; PAM sequence: CAG
ggagaagatgtaagagacgc

SEQ ID NO: 20931 - DNA, 20 bp, Artificial Sequence
  Description of Artificial Sequence: Synthetic oligonucleotide
  Target: COL7A1; (+) strand; PAM type: NRG; PAM sequence: AGG
gagaagatgtaagagacgcc

SEQ ID NO: 20932 - DNA, 20 bp, Artificial Sequence
  Description of Artificial Sequence: Synthetic oligonucleotide
  Target: COL7A1; (+) strand; PAM type: NRG; PAM sequence: TAG
atgtaagagacgccaggctc

SEQ ID NO: 20933 - DNA, 20 bp, Artificial Sequence
  Description of Artificial Sequence: Synthetic oligonucleotide
  Target: COL7A1; (+) strand; PAM type: NRG; PAM sequence: TGG
gctctagccctgtcacccgc

SEQ ID NO: 20934 - DNA, 20 bp, Artificial Sequence
  Description of Artificial Sequence: Synthetic oligonucleotide
  Target: COL7A1; (+) strand; PAM type: NRG; PAM sequence: GGG
ctctagccctgtcacccgct

SEQ ID NO: 20935 - DNA, 20 bp, Artificial Sequence
  Description of Artificial Sequence: Synthetic oligonucleotide
  Target: COL7A1; (+) strand; PAM type: NRG; PAM sequence: GAG
ctagccctgtcacccgctgg

SEQ ID NO: 20936 - DNA, 20 bp, Artificial Sequence
  Description of Artificial Sequence: Synthetic oligonucleotide
  Target: COL7A1; (+) strand; PAM type: NRG; PAM sequence: GAG
ctgtcacccgctgggagctt

SEQ ID NO: 20937 - DNA, 20 bp, Artificial Sequence
  Description of Artificial Sequence: Synthetic oligonucleotide
  Target: COL7A1; (+) strand; PAM type: NRG; PAM sequence: TGG
cgctgggagcttgagatccc

SEQ ID NO: 20938 - DNA, 20 bp, Artificial Sequence
  Description of Artificial Sequence: Synthetic oligonucleotide
  Target: COL7A1; (+) strand; PAM type: NRG; PAM sequence: AAG
tgggagcttgagatccctgg

SEQ ID NO: 20939 - DNA, 20 bp, Artificial Sequence
  Description of Artificial Sequence: Synthetic oligonucleotide
  Target: COL7A1; (+) strand; PAM type: NRG; PAM sequence: CGG
gagatccctggaagtgtctg

SEQ ID NO: 20940 - DNA, 20 bp, Artificial Sequence
  Description of Artificial Sequence: Synthetic oligonucleotide
  Target: COL7A1; (+) strand; PAM type: NRG; PAM sequence: GGG
agatccctggaagtgtctgc

SEQ ID NO: 20941 - DNA, 20 bp, Artificial Sequence
  Description of Artificial Sequence: Synthetic oligonucleotide
  Target: COL7A1; (+) strand; PAM type: NRG; PAM sequence: GGG
gatccctggaagtgtctgcg

SEQ ID NO: 20942 - DNA, 20 bp, Artificial Sequence
  Description of Artificial Sequence: Synthetic oligonucleotide
  Target: COL7A1; (+) strand; PAM type: NRG; PAM sequence: CAG
tggaagtgtctgcggggacc

SEQ ID NO: 20943 - DNA, 20 bp, Artificial Sequence
  Description of Artificial Sequence: Synthetic oligonucleotide
  Target: COL7A1; (+) strand; PAM type: NRG; PAM sequence: AGG
ggaagtgtctgcggggaccc

SEQ ID NO: 20944 - DNA, 20 bp, Artificial Sequence
  Description of Artificial Sequence: Synthetic oligonucleotide
  Target: COL7A1; (+) strand; PAM type: NRG; PAM sequence: CAG
cggggacccaggcacttctg

SEQ ID NO: 20945 - DNA, 20 bp, Artificial Sequence
  Description of Artificial Sequence: Synthetic oligonucleotide
  Target: COL7A1; (+) strand; PAM type: NRG; PAM sequence: AGG
ggggacccaggcacttctgc

SEQ ID NO: 20946 - DNA, 20 bp, Artificial Sequence
  Description of Artificial Sequence: Synthetic oligonucleotide
  Target: COL7A1; (+) strand; PAM type: NRG; PAM sequence: GAG
ggacccaggcacttctgcag

SEQ ID NO: 20947 - DNA, 20 bp, Artificial Sequence
  Description of Artificial Sequence: Synthetic oligonucleotide
  Target: COL7A1; (+) strand; PAM type: NRG; PAM sequence: CAG
ccaggcacttctgcaggaga

SEQ ID NO: 20948 - DNA, 20 bp, Artificial Sequence
  Description of Artificial Sequence: Synthetic oligonucleotide
  Target: COL7A1; (+) strand; PAM type: NRG; PAM sequence: AAG
ggagacagaacttgattaaa

SEQ ID NO: 20949 - DNA, 20 bp, Artificial Sequence
  Description of Artificial Sequence: Synthetic oligonucleotide
  Target: COL7A1; (+) strand; PAM type: NRG; PAM sequence: CAG
tgattaaaaagctgtctcca

SEQ ID NO: 20950 - DNA, 20 bp, Artificial Sequence
  Description of Artificial Sequence: Synthetic oligonucleotide
  Target: COL7A1; (+) strand; PAM type: NRG; PAM sequence: GAG
attaaaaagctgtctccaca

SEQ ID NO: 20951 - DNA, 20 bp, Artificial Sequence
  Description of Artificial Sequence: Synthetic oligonucleotide
  Target: COL7A1; (+) strand; PAM type: NRG; PAM sequence: CAG
ctccacagagccccaactgc

SEQ ID NO: 20952 - DNA, 20 bp, Artificial Sequence
  Description of Artificial Sequence: Synthetic oligonucleotide
  Target: COL7A1; (+) strand; PAM type: NRG; PAM sequence: TGG
ctgccagcccacccaaatcc

SEQ ID NO: 20953 - DNA, 20 bp, Artificial Sequence
  Description of Artificial Sequence: Synthetic oligonucleotide
  Target: COL7A1; (+) strand; PAM type: NRG; PAM sequence: TGG
tcctggcctccccctcaccc

SEQ ID NO: 20954 - DNA, 20 bp, Artificial Sequence
  Description of Artificial Sequence: Synthetic oligonucleotide
  Target: COL7A1; (+) strand; PAM type: NRG; PAM sequence: CAG
ggcctccccctcaccctggc

SEQ ID NO: 20955 - DNA, 20 bp, Artificial Sequence
  Description of Artificial Sequence: Synthetic oligonucleotide
  Target: COL7A1; (+) strand; PAM type: NRG; PAM sequence: AGG
gcctccccctcaccctggcc

SEQ ID NO: 20956 - DNA, 20 bp, Artificial Sequence
  Description of Artificial Sequence: Synthetic oligonucleotide
  Target: COL7A1; (+) strand; PAM type: NRG; PAM sequence: GGG
cctccccctcaccctggcca

SEQ ID NO: 20957 - DNA, 20 bp, Artificial Sequence
  Description of Artificial Sequence: Synthetic oligonucleotide
  Target: COL7A1; (+) strand; PAM type: NRG; PAM sequence: GAG
tcaccctggccagggcctct

SEQ ID NO: 20958 - DNA, 20 bp, Artificial Sequence
  Description of Artificial Sequence: Synthetic oligonucleotide
  Target: COL7A1; (+) strand; PAM type: NRG; PAM sequence: TGG
ccctggccagggcctctgag

SEQ ID NO: 20959 - DNA, 20 bp, Artificial Sequence
  Description of Artificial Sequence: Synthetic oligonucleotide
  Target: COL7A1; (+) strand; PAM type: NRG; PAM sequence: CAG
cagggcctctgagtggccgc

SEQ ID NO: 20960 - DNA, 20 bp, Artificial Sequence
  Description of Artificial Sequence: Synthetic oligonucleotide
  Target: COL7A1; (+) strand; PAM type: NRG; PAM sequence: AGG
agggcctctgagtggccgcc

SEQ ID NO: 20961 - DNA, 20 bp, Artificial Sequence
  Description of Artificial Sequence: Synthetic oligonucleotide
  Target: COL7A1; (+) strand; PAM type: NRG; PAM sequence: TAG
cctctgagtggccgccagga

SEQ ID NO: 20962 - DNA, 20 bp, Artificial Sequence
  Description of Artificial Sequence: Synthetic oligonucleotide
  Target: COL7A1; (+) strand; PAM type: NRG; PAM sequence: AGG
ctctgagtggccgccaggat

SEQ ID NO: 20963 - DNA, 20 bp, Artificial Sequence
  Description of Artificial Sequence: Synthetic oligonucleotide
  Target: COL7A1; (+) strand; PAM type: NRG; PAM sequence: TAG
gtggccgccaggataggatg

SEQ ID NO: 20964 - DNA, 20 bp, Artificial Sequence
  Description of Artificial Sequence: Synthetic oligonucleotide
  Target: COL7A1; (+) strand; PAM type: NRG; PAM sequence: TGG
ccgccaggataggatgtagc

SEQ ID NO: 20965 - DNA, 20 bp, Artificial Sequence
  Description of Artificial Sequence: Synthetic oligonucleotide
  Target: COL7A1; (+) strand; PAM type: NRG; PAM sequence: TGG
taggatgtagctggatgccc

SEQ ID NO: 20966 - DNA, 20 bp, Artificial Sequence
  Description of Artificial Sequence: Synthetic oligonucleotide
  Target: COL7A1; (+) strand; PAM type: NRG; PAM sequence: TGG
tagctggatgccctggacac

SEQ ID NO: 20967 - DNA, 20 bp, Artificial Sequence
  Description of Artificial Sequence: Synthetic oligonucleotide
  Target: COL7A1; (+) strand; PAM type: NRG; PAM sequence: GAG
gctggatgccctggacactg

SEQ ID NO: 20968 - DNA, 20 bp, Artificial Sequence
  Description of Artificial Sequence: Synthetic oligonucleotide
  Target: COL7A1; (+) strand; PAM type: NRG; PAM sequence: CAG
atgccctggacactggagtc

SEQ ID NO: 20969 - DNA, 20 bp, Artificial Sequence
  Description of Artificial Sequence: Synthetic oligonucleotide
  Target: COL7A1; (+) strand; PAM type: NRG; PAM sequence: AGG
tgccctggacactggagtcc

SEQ ID NO: 20970 - DNA, 20 bp, Artificial Sequence
  Description of Artificial Sequence: Synthetic oligonucleotide
  Target: COL7A1; (+) strand; PAM type: NRG; PAM sequence: AAG
ggacactggagtccaggcca

SEQ ID NO: 20971 - DNA, 20 bp, Artificial Sequence
  Description of Artificial Sequence: Synthetic oligonucleotide
  Target: COL7A1; (+) strand; PAM type: NRG; PAM sequence: GAG
gagtccaggccaaagtcacc

SEQ ID NO: 20972 - DNA, 20 bp, Artificial Sequence
  Description of Artificial Sequence: Synthetic oligonucleotide
  Target: COL7A1; (+) strand; PAM type: NRG; PAM sequence: GAG
ccaaagtcaccgagtcgatc

SEQ ID NO: 20973 - DNA, 20 bp, Artificial Sequence
  Description of Artificial Sequence: Synthetic oligonucleotide
  Target: COL7A1; (+) strand; PAM type: NRG; PAM sequence: AGG
caaagtcaccgagtcgatcg

SEQ ID NO: 20974 - DNA, 20 bp, Artificial Sequence
  Description of Artificial Sequence: Synthetic oligonucleotide
  Target: COL7A1; (+) strand; PAM type: NRG; PAM sequence: TAG
atcgaggtgtccaccacacg

SEQ ID NO: 20975 - DNA, 20 bp, Artificial Sequence
  Description of Artificial Sequence: Synthetic oligonucleotide
  Target: COL7A1; (+) strand; PAM type: NRG; PAM sequence: TGG
accacacgtagttcaatgct

SEQ ID NO: 20976 - DNA, 20 bp, Artificial Sequence
  Description of Artificial Sequence: Synthetic oligonucleotide
  Target: COL7A1; (+) strand; PAM type: NRG; PAM sequence: GAG
tagttcaatgcttggaacac

SEQ ID NO: 20977 - DNA, 20 bp, Artificial Sequence
  Description of Artificial Sequence: Synthetic oligonucleotide
  Target: COL7A1; (+) strand; PAM type: NRG; PAM sequence: AGG
agttcaatgcttggaacacg

SEQ ID NO: 20978 - DNA, 20 bp, Artificial Sequence
  Description of Artificial Sequence: Synthetic oligonucleotide
  Target: COL7A1; (+) strand; PAM type: NRG; PAM sequence: AAG
tggaacacgaggtgactctg

SEQ ID NO: 20979 - DNA, 20 bp, Artificial Sequence
  Description of Artificial Sequence: Synthetic oligonucleotide
  Target: COL7A1; (+) strand; PAM type: NRG; PAM sequence: AGG
ggaacacgaggtgactctga

SEQ ID NO: 20980 - DNA, 20 bp, Artificial Sequence
  Description of Artificial Sequence: Synthetic oligonucleotide
  Target: COL7A1; (+) strand; PAM type: NRG; PAM sequence: GAG
aacacgaggtgactctgaag

SEQ ID NO: 20981 - DNA, 20 bp, Artificial Sequence
  Description of Artificial Sequence: Synthetic oligonucleotide
  Target: COL7A1; (+) strand; PAM type: NRG; PAM sequence: AGG
acacgaggtgactctgaagg

SEQ ID NO: 20982 - DNA, 20 bp, Artificial Sequence
  Description of Artificial Sequence: Synthetic oligonucleotide
  Target: COL7A1; (+) strand; PAM type: NRG; PAM sequence: AAG
tgactctgaaggaggaatga

SEQ ID NO: 20983 - DNA, 20 bp, Artificial Sequence
  Description of Artificial Sequence: Synthetic oligonucleotide
  Target: COL7A1; (+) strand; PAM type: NRG; PAM sequence: GAG
tgaaggaggaatgaaagatc

SEQ ID NO: 20984 - DNA, 20 bp, Artificial Sequence
  Description of Artificial Sequence: Synthetic oligonucleotide
  Target: COL7A1; (+) strand; PAM type: NRG; PAM sequence: AGG
gaaggaggaatgaaagatcg

SEQ ID NO: 20985 - DNA, 20 bp, Artificial Sequence
  Description of Artificial Sequence: Synthetic oligonucleotide
  Target: COL7A1; (+) strand; PAM type: NRG; PAM sequence: CAG
aggaatgaaagatcgaggat

SEQ ID NO: 20986 - DNA, 20 bp, Artificial Sequence
  Description of Artificial Sequence: Synthetic oligonucleotide
  Target: COL7A1; (+) strand; PAM type: NRG; PAM sequence: GAG
gaatgaaagatcgaggatca

SEQ ID NO: 20987 - DNA, 20 bp, Artificial Sequence
  Description of Artificial Sequence: Synthetic oligonucleotide
  Target: COL7A1; (+) strand; PAM type: NRG; PAM sequence: AGG
aatgaaagatcgaggatcag

SEQ ID NO: 20988 - DNA, 20 bp, Artificial Sequence
  Description of Artificial Sequence: Synthetic oligonucleotide
  Target: COL7A1; (+) strand; PAM type: NRG; PAM sequence: GAG
aagatcgaggatcagaggct

SEQ ID NO: 20989 - DNA, 20 bp, Artificial Sequence
  Description of Artificial Sequence: Synthetic oligonucleotide
  Target: COL7A1; (+) strand; PAM type: NRG; PAM sequence: GAG
aggatcagaggctgagtcct

SEQ ID NO: 20990 - DNA, 20 bp, Artificial Sequence
  Description of Artificial Sequence: Synthetic oligonucleotide
  Target: COL7A1; (+) strand; PAM type: NRG; PAM sequence: CAG
gaggctgagtcctgagaacc

SEQ ID NO: 20991 - DNA, 20 bp, Artificial Sequence
  Description of Artificial Sequence: Synthetic oligonucleotide
  Target: COL7A1; (+) strand; PAM type: NRG; PAM sequence: AAG
gctgagtcctgagaacccag

SEQ ID NO: 20992 - DNA, 20 bp, Artificial Sequence
  Description of Artificial Sequence: Synthetic oligonucleotide
  Target: COL7A1; (+) strand; PAM type: NRG; PAM sequence: AGG
ctgagtcctgagaacccaga

SEQ ID NO: 20993 - DNA, 20 bp, Artificial Sequence
  Description of Artificial Sequence: Synthetic oligonucleotide
  Target: COL7A1; (+) strand; PAM type: NRG; PAM sequence: GGG
tgagtcctgagaacccagaa

SEQ ID NO: 20994 - DNA, 20 bp, Artificial Sequence
  Description of Artificial Sequence: Synthetic oligonucleotide
  Target: COL7A1; (+) strand; PAM type: NRG; PAM sequence: GAG
agtcctgagaacccagaagg

SEQ ID NO: 20995 - DNA, 20 bp, Artificial Sequence
  Description of Artificial Sequence: Synthetic oligonucleotide
  Target: COL7A1; (+) strand; PAM type: NRG; PAM sequence: GAG
tcctgagaacccagaaggga

SEQ ID NO: 20996 - DNA, 20 bp, Artificial Sequence
  Description of Artificial Sequence: Synthetic oligonucleotide
  Target: COL7A1; (+) strand; PAM type: NRG; PAM sequence: GAG
aacccagaagggagagatct

SEQ ID NO: 20997 - DNA, 20 bp, Artificial Sequence
  Description of Artificial Sequence: Synthetic oligonucleotide
  Target: COL7A1; (+) strand; PAM type: NRG; PAM sequence: TGG
aagggagagatctgagatcc

SEQ ID NO: 20998 - DNA, 20 bp, Artificial Sequence
  Description of Artificial Sequence: Synthetic oligonucleotide
  Target: COL7A1; (+) strand; PAM type: NRG; PAM sequence: GGG
agggagagatctgagatcct

SEQ ID NO: 20999 - DNA, 20 bp, Artificial Sequence
  Description of Artificial Sequence: Synthetic oligonucleotide
  Target: COL7A1; (+) strand; PAM type: NRG; PAM sequence: CGG
gagatctgagatcctgggtc

SEQ ID NO: 21000 - DNA, 20 bp, Artificial Sequence
  Description of Artificial Sequence: Synthetic oligonucleotide
  Target: COL7A1; (+) strand; PAM type: NRG; PAM sequence: AAG
gggtccggtttgtcttattg

SEQ ID NO: 21001 - DNA, 20 bp, Artificial Sequence
  Description of Artificial Sequence: Synthetic oligonucleotide
  Target: COL7A1; (+) strand; PAM type: NRG; PAM sequence: TGG
tttgtcttattgaagcatca

SEQ ID NO: 21002 - DNA, 20 bp, Artificial Sequence
  Description of Artificial Sequence: Synthetic oligonucleotide
  Target: COL7A1; (+) strand; PAM type: NRG; PAM sequence: GGG
ttgtcttattgaagcatcat

SEQ ID NO: 21003 - DNA, 20 bp, Artificial Sequence
  Description of Artificial Sequence: Synthetic oligonucleotide
  Target: COL7A1; (+) strand; PAM type: NRG; PAM sequence: GAG
gtcttattgaagcatcatgg

SEQ ID NO: 21004 - DNA, 20 bp, Artificial Sequence
  Description of Artificial Sequence: Synthetic oligonucleotide
  Target: COL7A1; (+) strand; PAM type: NRG; PAM sequence: AGG
tcttattgaagcatcatggg

SEQ ID NO: 21005 - DNA, 20 bp, Artificial Sequence
  Description of Artificial Sequence: Synthetic oligonucleotide
  Target: COL7A1; (+) strand; PAM type: NRG; PAM sequence: TGG
agcatcatgggaggtcatgc

SEQ ID NO: 21006 - DNA, 20 bp, Artificial Sequence
  Description of Artificial Sequence: Synthetic oligonucleotide
  Target: COL7A1; (+) strand; PAM type: NRG; PAM sequence: GGG
gcatcatgggaggtcatgct

SEQ ID NO: 21007 - DNA, 20 bp, Artificial Sequence
  Description of Artificial Sequence: Synthetic oligonucleotide
  Target: COL7A1; (+) strand; PAM type: NRG; PAM sequence: GGG
catcatgggaggtcatgctg

SEQ ID NO: 21008 - DNA, 20 bp, Artificial Sequence
  Description of Artificial Sequence: Synthetic oligonucleotide
  Target: COL7A1; (+) strand; PAM type: NRG; PAM sequence: CAG
gaggtcatgctggggtcacc

SEQ ID NO: 21009 - DNA, 20 bp, Artificial Sequence
  Description of Artificial Sequence: Synthetic oligonucleotide
  Target: COL7A1; (+) strand; PAM type: NRG; PAM sequence: AGG
aggtcatgctggggtcaccc

SEQ ID NO: 21010 - DNA, 20 bp, Artificial Sequence
  Description of Artificial Sequence: Synthetic oligonucleotide
  Target: COL7A1; (+) strand; PAM type: NRG; PAM sequence: GGG
ggtcatgctggggtcaccca

SEQ ID NO: 21011 - DNA, 20 bp, Artificial Sequence
  Description of Artificial Sequence: Synthetic oligonucleotide
  Target: COL7A1; (+) strand; PAM type: NRG; PAM sequence: CAG
atgctggggtcacccagggt

SEQ ID NO: 21012 - DNA, 20 bp, Artificial Sequence
  Description of Artificial Sequence: Synthetic oligonucleotide
  Target: COL7A1; (+) strand; PAM type: NRG; PAM sequence: GAG
gctggggtcacccagggtca

SEQ ID NO: 21013 - DNA, 20 bp, Artificial Sequence
  Description of Artificial Sequence: Synthetic oligonucleotide
  Target: COL7A1; (+) strand; PAM type: NRG; PAM sequence: AGG
ctggggtcacccagggtcag

SEQ ID NO: 21014 - DNA, 20 bp, Artificial Sequence
  Description of Artificial Sequence: Synthetic oligonucleotide
  Target: COL7A1; (+) strand; PAM type: NRG; PAM sequence: GGG
tggggtcacccagggtcaga

SEQ ID NO: 21015 - DNA, 20 bp, Artificial Sequence
  Description of Artificial Sequence: Synthetic oligonucleotide
  Target: COL7A1; (+) strand; PAM type: NRG; PAM sequence: GAG
gtcacccagggtcagagggt

SEQ ID NO: 21016 - DNA, 20 bp, Artificial Sequence
  Description of Artificial Sequence: Synthetic oligonucleotide
  Target: COL7A1; (+) strand; PAM type: NRG; PAM sequence: AGG
tcacccagggtcagagggtg

SEQ ID NO: 21017 - DNA, 20 bp, Artificial Sequence
  Description of Artificial Sequence: Synthetic oligonucleotide
  Target: COL7A1; (+) strand; PAM type: NRG; PAM sequence: GGG
cacccagggtcagagggtga

SEQ ID NO: 21018 - DNA, 20 bp, Artificial Sequence
  Description of Artificial Sequence: Synthetic oligonucleotide
  Target: COL7A1; (+) strand; PAM type: NRG; PAM sequence: GGG
acccagggtcagagggtgag

SEQ ID NO: 21019 - DNA, 20 bp, Artificial Sequence
  Description of Artificial Sequence: Synthetic oligonucleotide
  Target: COL7A1; (+) strand; PAM type: NRG; PAM sequence: TAG
cagggtcagagggtgagggg

SEQ ID NO: 21020 - DNA, 20 bp, Artificial Sequence
  Description of Artificial Sequence: Synthetic oligonucleotide
  Target: COL7A1; (+) strand; PAM type: NRG; PAM sequence: AGG
agggtcagagggtgaggggt

SEQ ID NO: 21021 - DNA, 20 bp, Artificial Sequence
  Description of Artificial Sequence: Synthetic oligonucleotide
  Target: COL7A1; (+) strand; PAM type: NRG; PAM sequence: GGG
gggtcagagggtgaggggta

SEQ ID NO: 21022 - DNA, 20 bp, Artificial Sequence
  Description of Artificial Sequence: Synthetic oligonucleotide
  Target: COL7A1; (+) strand; PAM type: NRG; PAM sequence: GGG
ggtcagagggtgaggggtag

SEQ ID NO: 21023 - DNA, 20 bp, Artificial Sequence
  Description of Artificial Sequence: Synthetic oligonucleotide
  Target: COL7A1; (+) strand; PAM type: NRG; PAM sequence: CAG
gagggtgaggggtaggggta

SEQ ID NO: 21024 - DNA, 20 bp, Artificial Sequence
  Description of Artificial Sequence: Synthetic oligonucleotide
  Target: COL7A1; (+) strand; PAM type: NRG; PAM sequence: AGG
agggtgaggggtaggggtac

SEQ ID NO: 21025 - DNA, 20 bp, Artificial Sequence
  Description of Artificial Sequence: Synthetic oligonucleotide
  Target: COL7A1; (+) strand; PAM type: NRG; PAM sequence: GAG
ggtgaggggtaggggtacag

SEQ ID NO: 21026 - DNA, 20 bp, Artificial Sequence
  Description of Artificial Sequence: Synthetic oligonucleotide
  Target: COL7A1; (+) strand; PAM type: NRG; PAM sequence: AGG
gtgaggggtaggggtacagg

SEQ ID NO: 21027 - DNA, 20 bp, Artificial Sequence
  Description of Artificial Sequence: Synthetic oligonucleotide
  Target: COL7A1; (+) strand; PAM type: NRG; PAM sequence: GAG
gaggggtaggggtacaggag

SEQ ID NO: 21028 - DNA, 20 bp, Artificial Sequence
  Description of Artificial Sequence: Synthetic oligonucleotide
  Target: COL7A1; (+) strand; PAM type: NRG; PAM sequence: CAG
ggggtacaggaggagtcact

SEQ ID NO: 21029 - DNA, 20 bp, Artificial Sequence
  Description of Artificial Sequence: Synthetic oligonucleotide
  Target: COL7A1; (+) strand; PAM type: NRG; PAM sequence: GAG
ggtacaggaggagtcactca

SEQ ID NO: 21030 - DNA, 20 bp, Artificial Sequence
  Description of Artificial Sequence: Synthetic oligonucleotide
  Target: COL7A1; (+) strand; PAM type: NRG; PAM sequence: CGG
caggaggagtcactcagagt

SEQ ID NO: 21031 - DNA, 20 bp, Artificial Sequence
  Description of Artificial Sequence: Synthetic oligonucleotide
  Target: COL7A1; (+) strand; PAM type: NRG; PAM sequence: GGG
aggaggagtcactcagagtc

SEQ ID NO: 21032 - DNA, 20 bp, Artificial Sequence
  Description of Artificial Sequence: Synthetic oligonucleotide
  Target: COL7A1; (+) strand; PAM type: NRG; PAM sequence: GGG
ggaggagtcactcagagtcg

SEQ ID NO: 21033 - DNA, 20 bp, Artificial Sequence
  Description of Artificial Sequence: Synthetic oligonucleotide
  Target: COL7A1; (+) strand; PAM type: NRG; PAM sequence: CAG
agtcactcagagtcggggtg

SEQ ID NO: 21034 - DNA, 20 bp, Artificial Sequence
  Description of Artificial Sequence: Synthetic oligonucleotide
  Target: COL7A1; (+) strand; PAM type: NRG; PAM sequence: AGG
gtcactcagagtcggggtgc

SEQ ID NO: 21035 - DNA, 20 bp, Artificial Sequence
  Description of Artificial Sequence: Synthetic oligonucleotide
  Target: COL7A1; (+) strand; PAM type: NRG; PAM sequence: AAG
actcagagtcggggtgcagg

SEQ ID NO: 21036 - DNA, 20 bp, Artificial Sequence
  Description of Artificial Sequence: Synthetic oligonucleotide
  Target: COL7A1; (+) strand; PAM type: NRG; PAM sequence: CAG
agagtcggggtgcaggaagt

SEQ ID NO: 21037 - DNA, 20 bp, Artificial Sequence
  Description of Artificial Sequence: Synthetic oligonucleotide
  Target: COL7A1; (+) strand; PAM type: NRG; PAM sequence: AGG
gagtcggggtgcaggaagtc

SEQ ID NO: 21038 - DNA, 20 bp, Artificial Sequence
  Description of Artificial Sequence: Synthetic oligonucleotide
  Target: COL7A1; (+) strand; PAM type: NRG; PAM sequence: GGG
agtcggggtgcaggaagtca

SEQ ID NO: 21039 - DNA, 20 bp, Artificial Sequence
  Description of Artificial Sequence: Synthetic oligonucleotide
  Target: COL7A1; (+) strand; PAM type: NRG; PAM sequence: TGG
cggggtgcaggaagtcaggg

SEQ ID NO: 21040 - DNA, 20 bp, Artificial Sequence
  Description of Artificial Sequence: Synthetic oligonucleotide
  Target: COL7A1; (+) strand; PAM type: NRG; PAM sequence: GGG
ggggtgcaggaagtcagggt

SEQ ID NO: 21041 - DNA, 20 bp, Artificial Sequence
  Description of Artificial Sequence: Synthetic oligonucleotide
  Target: COL7A1; (+) strand; PAM type: NRG; PAM sequence: CAG
aggaagtcagggtgggtcat

SEQ ID NO: 21042 - DNA, 20 bp, Artificial Sequence
  Description of Artificial Sequence: Synthetic oligonucleotide
  Target: COL7A1; (+) strand; PAM type: NRG; PAM sequence: CAG
aagtcagggtgggtcatcag

SEQ ID NO: 21043 - DNA, 20 bp, Artificial Sequence
  Description of Artificial Sequence: Synthetic oligonucleotide
  Target: COL7A1; (+) strand; PAM type: NRG; PAM sequence: AGG
agtcagggtgggtcatcagc

SEQ ID NO: 21044 - DNA, 20 bp, Artificial Sequence
  Description of Artificial Sequence: Synthetic oligonucleotide
  Target: COL7A1; (+) strand; PAM type: NRG; PAM sequence: GGG
gtcagggtgggtcatcagca

SEQ ID NO: 21045 - DNA, 20 bp, Artificial Sequence
  Description of Artificial Sequence: Synthetic oligonucleotide
  Target: COL7A1; (+) strand; PAM type: NRG; PAM sequence: GGG
tcagggtgggtcatcagcag

SEQ ID NO: 21046 - DNA, 20 bp, Artificial Sequence
  Description of Artificial Sequence: Synthetic oligonucleotide
  Target: COL7A1; (+) strand; PAM type: NRG; PAM sequence: GAG
agggtgggtcatcagcaggg

SEQ ID NO: 21047 - DNA, 20 bp, Artificial Sequence
  Description of Artificial Sequence: Synthetic oligonucleotide
  Target: COL7A1; (+) strand; PAM type: NRG; PAM sequence: AGG
gggtgggtcatcagcagggg

SEQ ID NO: 21048 - DNA, 20 bp, Artificial Sequence
  Description of Artificial Sequence: Synthetic oligonucleotide
  Target: COL7A1; (+) strand; PAM type: NRG; PAM sequence: GAG
gtgggtcatcagcaggggag

SEQ ID NO: 21049 - DNA, 20 bp, Artificial Sequence
  Description of Artificial Sequence: Synthetic oligonucleotide
  Target: COL7A1; (+) strand; PAM type: NRG; PAM sequence: AAG
cagcaggggaggagcacgcc

SEQ ID NO: 21050 - DNA, 20 bp, Artificial Sequence
  Description of Artificial Sequence: Synthetic oligonucleotide
  Target: COL7A1; (+) strand; PAM type: NRG; PAM sequence: AGG
agcaggggaggagcacgcca

SEQ ID NO: 21051 - DNA, 20 bp, Artificial Sequence
  Description of Artificial Sequence: Synthetic oligonucleotide
  Target: COL7A1; (+) strand; PAM type: NRG; PAM sequence: GAG
ggggaggagcacgccaaggt

SEQ ID NO: 21052 - DNA, 20 bp, Artificial Sequence
  Description of Artificial Sequence: Synthetic oligonucleotide
  Target: COL7A1; (+) strand; PAM type: NRG; PAM sequence: AGG
gggaggagcacgccaaggtg

SEQ ID NO: 21053 - DNA, 20 bp, Artificial Sequence
  Description of Artificial Sequence: Synthetic oligonucleotide
  Target: COL7A1; (+) strand; PAM type: NRG; PAM sequence: CAG
aggagcacgccaaggtgagg

SEQ ID NO: 21054 - DNA, 20 bp, Artificial Sequence
  Description of Artificial Sequence: Synthetic oligonucleotide
  Target: COL7A1; (+) strand; PAM type: NRG; PAM sequence: AGG
ggagcacgccaaggtgaggc

SEQ ID NO: 21055 - DNA, 20 bp, Artificial Sequence
  Description of Artificial Sequence: Synthetic oligonucleotide
  Target: COL7A1; (+) strand; PAM type: NRG; PAM sequence: CAG
ccaaggtgaggcaggcttac

SEQ ID NO: 21056 - DNA, 20 bp, Artificial Sequence
  Description of Artificial Sequence: Synthetic oligonucleotide
  Target: COL7A1; (+) strand; PAM type: NRG; PAM sequence: CAG
ggcaggcttaccagtgcgcg

SEQ ID NO: 21057 - DNA, 20 bp, Artificial Sequence
  Description of Artificial Sequence: Synthetic oligonucleotide
  Target: COL7A1; (+) strand; PAM type: NRG; PAM sequence: CAG
agtgcgcgcagtcacctctg

SEQ ID NO: 21058 - DNA, 20 bp, Artificial Sequence
  Description of Artificial Sequence: Synthetic oligonucleotide
  Target: COL7A1; (+) strand; PAM type: NRG; PAM sequence: GAG
tgcgcgcagtcacctctgca

SEQ ID NO: 21059 - DNA, 20 bp, Artificial Sequence
  Description of Artificial Sequence: Synthetic oligonucleotide
  Target: COL7A1; (+) strand; PAM type: NRG; PAM sequence: AGG
gcgcgcagtcacctctgcag

SEQ ID NO: 21060 - DNA, 20 bp, Artificial Sequence
  Description of Artificial Sequence: Synthetic oligonucleotide
  Target: COL7A1; (+) strand; PAM type: NRG; PAM sequence: GGG
cgcgcagtcacctctgcaga

SEQ ID NO: 21061 - DNA, 20 bp, Artificial Sequence
  Description of Artificial Sequence: Synthetic oligonucleotide
  Target: COL7A1; (+) strand; PAM type: NRG; PAM sequence: CAG
ctctgcagagggcccttctc

SEQ ID NO: 21062 - DNA, 20 bp, Artificial Sequence
  Description of Artificial Sequence: Synthetic oligonucleotide
  Target: COL7A1; (+) strand; PAM type: NRG; PAM sequence: TGG
gcagagggcccttctccagc

SEQ ID NO: 21063 - DNA, 20 bp, Artificial Sequence
  Description of Artificial Sequence: Synthetic oligonucleotide
  Target: COL7A1; (+) strand; PAM type: NRG; PAM sequence: TAG
ggcccttctccagctggccc

SEQ ID NO: 21064 - DNA, 20 bp, Artificial Sequence
  Description of Artificial Sequence: Synthetic oligonucleotide
  Target: COL7A1; (+) strand; PAM type: NRG; PAM sequence: AGG
gcccttctccagctggccct

SEQ ID NO: 21065 - DNA, 20 bp, Artificial Sequence
  Description of Artificial Sequence: Synthetic oligonucleotide
  Target: COL7A1; (+) strand; PAM type: NRG; PAM sequence: CAG
ccagctggccctaggacact

SEQ ID NO: 21066 - DNA, 20 bp, Artificial Sequence
  Description of Artificial Sequence: Synthetic oligonucleotide
  Target: COL7A1; (+) strand; PAM type: NRG; PAM sequence: CGG
ctaggacactcagcctcacg

SEQ ID NO: 21067 - DNA, 20 bp, Artificial Sequence
  Description of Artificial Sequence: Synthetic oligonucleotide
  Target: COL7A1; (+) strand; PAM type: NRG; PAM sequence: TGG
ctcacgcggtactgtgtcgc

SEQ ID NO: 21068 - DNA, 20 bp, Artificial Sequence
  Description of Artificial Sequence: Synthetic oligonucleotide
  Target: COL7A1; (+) strand; PAM type: NRG; PAM sequence: CAG
cggtactgtgtcgctggctc

SEQ ID NO: 21069 - DNA, 20 bp, Artificial Sequence
  Description of Artificial Sequence: Synthetic oligonucleotide
  Target: COL7A1; (+) strand; PAM type: NRG; PAM sequence: CAG
gtcgctggctccagcccgtc

SEQ ID NO: 21070 - DNA, 20 bp, Artificial Sequence
  Description of Artificial Sequence: Synthetic oligonucleotide
  Target: COL7A1; (+) strand; PAM type: NRG; PAM sequence: AGG
tcgctggctccagcccgtcc

SEQ ID NO: 21071 - DNA, 20 bp, Artificial Sequence
  Description of Artificial Sequence: Synthetic oligonucleotide
  Target: COL7A1; (+) strand; PAM type: NRG; PAM sequence: TAG
gctccagcccgtccaggtga

SEQ ID NO: 21072 - DNA, 20 bp, Artificial Sequence
  Description of Artificial Sequence: Synthetic oligonucleotide
  Target: COL7A1; (+) strand; PAM type: NRG; PAM sequence: GAG
ccgtccaggtgatagctgct

SEQ ID NO: 21073 - DNA, 20 bp, Artificial Sequence
  Description of Artificial Sequence: Synthetic oligonucleotide
  Target: COL7A1; (+) strand; PAM type: NRG; PAM sequence: CGG
caggtgatagctgctgagct

SEQ ID NO: 21074 - DNA, 20 bp, Artificial Sequence
  Description of Artificial Sequence: Synthetic oligonucleotide
  Target: COL7A1; (+) strand; PAM type: NRG; PAM sequence: GGG
aggtgatagctgctgagctc

SEQ ID NO: 21075 - DNA, 20 bp, Artificial Sequence
  Description of Artificial Sequence: Synthetic oligonucleotide
  Target: COL7A1; (+) strand; PAM type: NRG; PAM sequence: CAG
tagctgctgagctcgggccc

SEQ ID NO: 21076 - DNA, 20 bp, Artificial Sequence
  Description of Artificial Sequence: Synthetic oligonucleotide
  Target: COL7A1; (+) strand; PAM type: NRG; PAM sequence: AGG
agctgctgagctcgggcccc

SEQ ID NO: 21077 - DNA, 20 bp, Artificial Sequence
  Description of Artificial Sequence: Synthetic oligonucleotide
  Target: COL7A1; (+) strand; PAM type: NRG; PAM sequence: CGG
tgagctcgggccccaggacc

SEQ ID NO: 21078 - DNA, 20 bp, Artificial Sequence
  Description of Artificial Sequence: Synthetic oligonucleotide
  Target: COL7A1; (+) strand; PAM type: NRG; PAM sequence: GGG
gagctcgggccccaggaccc

SEQ ID NO: 21079 - DNA, 20 bp, Artificial Sequence
  Description of Artificial Sequence: Synthetic oligonucleotide
  Target: COL7A1; (+) strand; PAM type: NRG; PAM sequence: TGG
ccaggacccgggactgttcc

SEQ ID NO: 21080 - DNA, 20 bp, Artificial Sequence
  Description of Artificial Sequence: Synthetic oligonucleotide
  Target: COL7A1; (+) strand; PAM type: NRG; PAM sequence: TGG
cgggactgttcctggccacc

SEQ ID NO: 21081 - DNA, 20 bp, Artificial Sequence
  Description of Artificial Sequence: Synthetic oligonucleotide
  Target: COL7A1; (+) strand; PAM type: NRG; PAM sequence: GGG
gggactgttcctggccacct

SEQ ID NO: 21082 - DNA, 20 bp, Artificial Sequence
  Description of Artificial Sequence: Synthetic oligonucleotide
  Target: COL7A1; (+) strand; PAM type: NRG; PAM sequence: GGG
ggactgttcctggccacctg

SEQ ID NO: 21083 - DNA, 20 bp, Artificial Sequence
  Description of Artificial Sequence: Synthetic oligonucleotide
  Target: COL7A1; (+) strand; PAM type: NRG; PAM sequence: CAG
ctgttcctggccacctgggg

SEQ ID NO: 21084 - DNA, 20 bp, Artificial Sequence
  Description of Artificial Sequence: Synthetic oligonucleotide
  Target: COL7A1; (+) strand; PAM type: NRG; PAM sequence: AGG
tgttcctggccacctggggc

SEQ ID NO: 21085 - DNA, 20 bp, Artificial Sequence
  Description of Artificial Sequence: Synthetic oligonucleotide
  Target: COL7A1; (+) strand; PAM type: NRG; PAM sequence: GAG
tggccacctggggcaggcgt

SEQ ID NO: 21086 - DNA, 20 bp, Artificial Sequence
  Description of Artificial Sequence: Synthetic oligonucleotide
  Target: COL7A1; (+) strand; PAM type: NRG; PAM sequence: AGG
ggccacctggggcaggcgtg

SEQ ID NO: 21087 - DNA, 20 bp, Artificial Sequence
  Description of Artificial Sequence: Synthetic oligonucleotide
  Target: COL7A1; (+) strand; PAM type: NRG; PAM sequence: GGG
gccacctggggcaggcgtga

SEQ ID NO: 21088 - DNA, 20 bp, Artificial Sequence
  Description of Artificial Sequence: Synthetic oligonucleotide
  Target: COL7A1; (+) strand; PAM type: NRG; PAM sequence: TGG
acctggggcaggcgtgaggg

SEQ ID NO: 21089 - DNA, 20 bp, Artificial Sequence
  Description of Artificial Sequence: Synthetic oligonucleotide
  Target: COL7A1; (+) strand; PAM type: NRG; PAM sequence: GGG
cctggggcaggcgtgagggt

SEQ ID NO: 21090 - DNA, 20 bp, Artificial Sequence
  Description of Artificial Sequence: Synthetic oligonucleotide
  Target: COL7A1; (+) strand; PAM type: NRG; PAM sequence: GGG
ctggggcaggcgtgagggtg

SEQ ID NO: 21091 - DNA, 20 bp, Artificial Sequence
  Description of Artificial Sequence: Synthetic oligonucleotide
  Target: COL7A1; (+) strand; PAM type: NRG; PAM sequence: GGG
tggggcaggcgtgagggtgg

SEQ ID NO: 21092 - DNA, 20 bp, Artificial Sequence
  Description of Artificial Sequence: Synthetic oligonucleotide
  Target: COL7A1; (+) strand; PAM type: NRG; PAM sequence: AAG
caggcgtgagggtgggggcc

SEQ ID NO: 21093 - DNA, 20 bp, Artificial Sequence
  Description of Artificial Sequence: Synthetic oligonucleotide
  Target: COL7A1; (+) strand; PAM type: NRG; PAM sequence: GAG
ggcgtgagggtgggggccaa

SEQ ID NO: 21094 - DNA, 20 bp, Artificial Sequence
  Description of Artificial Sequence: Synthetic oligonucleotide
  Target: COL7A1; (+) strand; PAM type: NRG; PAM sequence: TGG
gggtgggggccaagagcatg

SEQ ID NO: 21095 - DNA, 20 bp, Artificial Sequence
  Description of Artificial Sequence: Synthetic oligonucleotide
  Target: COL7A1; (+) strand; PAM type: NRG; PAM sequence: GGG
ggtgggggccaagagcatgt

SEQ ID NO: 21096 - DNA, 20 bp, Artificial Sequence
  Description of Artificial Sequence: Synthetic oligonucleotide
  Target: COL7A1; (+) strand; PAM type: NRG; PAM sequence: TAG
ggggccaagagcatgtggga

SEQ ID NO: 21097 - DNA, 20 bp, Artificial Sequence
  Description of Artificial Sequence: Synthetic oligonucleotide
  Target: COL7A1; (+) strand; PAM type: NRG; PAM sequence: TGG
gcatgtgggatagtgacacc

SEQ ID NO: 21098 - DNA, 20 bp, Artificial Sequence
  Description of Artificial Sequence: Synthetic oligonucleotide
  Target: COL7A1; (+) strand; PAM type: NRG; PAM sequence: GGG
catgtgggatagtgacacct

SEQ ID NO: 21099 - DNA, 20 bp, Artificial Sequence
  Description of Artificial Sequence: Synthetic oligonucleotide
  Target: COL7A1; (+) strand; PAM type: NRG; PAM sequence: GGG
atgtgggatagtgacacctg

SEQ ID NO: 21100 - DNA, 20 bp, Artificial Sequence
  Description of Artificial Sequence: Synthetic oligonucleotide
  Target: COL7A1; (+) strand; PAM type: NRG; PAM sequence: GGG
tgtgggatagtgacacctgg

SEQ ID NO: 21101 - DNA, 20 bp, Artificial Sequence
  Description of Artificial Sequence: Synthetic oligonucleotide
  Target: COL7A1; (+) strand; PAM type: NRG; PAM sequence: AAG
agtgacacctgggggcatta

SEQ ID NO: 21102 - DNA, 20 bp, Artificial Sequence
  Description of Artificial Sequence: Synthetic oligonucleotide
  Target: COL7A1; (+) strand; PAM type: NRG; PAM sequence: AGG
gtgacacctgggggcattaa

SEQ ID NO: 21103 - DNA, 20 bp, Artificial Sequence
  Description of Artificial Sequence: Synthetic oligonucleotide
  Target: COL7A1; (+) strand; PAM type: NRG; PAM sequence: GGG
tgacacctgggggcattaaa

SEQ ID NO: 21104 - DNA, 20 bp, Artificial Sequence
  Description of Artificial Sequence: Synthetic oligonucleotide
  Target: COL7A1; (+) strand; PAM type: NRG; PAM sequence: TGG
aaagggcctgcccacttcac

SEQ ID NO: 21105 - DNA, 20 bp, Artificial Sequence
  Description of Artificial Sequence: Synthetic oligonucleotide
  Target: COL7A1; (+) strand; PAM type: NRG; PAM sequence: TGG
acttcactggctctgttaac

SEQ ID NO: 21106 - DNA, 20 bp, Artificial Sequence
  Description of Artificial Sequence: Synthetic oligonucleotide
  Target: COL7A1; (+) strand; PAM type: NRG; PAM sequence: GGG
cttcactggctctgttaact

SEQ ID NO: 21107 - DNA, 20 bp, Artificial Sequence
  Description of Artificial Sequence: Synthetic oligonucleotide
  Target: COL7A1; (+) strand; PAM type: NRG; PAM sequence: CGG
cactgaccctgcccacttta

SEQ ID NO: 21108 - DNA, 20 bp, Artificial Sequence
  Description of Artificial Sequence: Synthetic oligonucleotide
  Target: COL7A1; (+) strand; PAM type: NRG; PAM sequence: CAG
gcccactttacggaccctgc

SEQ ID NO: 21109 - DNA, 20 bp, Artificial Sequence
  Description of Artificial Sequence: Synthetic oligonucleotide
  Target: COL7A1; (+) strand; PAM type: NRG; PAM sequence: CGG
attgatcttacctactgtca

SEQ ID NO: 21110 - DNA, 20 bp, Artificial Sequence
  Description of Artificial Sequence: Synthetic oligonucleotide
  Target: COL7A1; (+) strand; PAM type: NRG; PAM sequence: CAG
acctactgtcacggatcccg

SEQ ID NO: 21111 - DNA, 20 bp, Artificial Sequence
  Description of Artificial Sequence: Synthetic oligonucleotide
  Target: COL7A1; (+) strand; PAM type: NRG; PAM sequence: CAG
tcacggatcccgcagacccc

SEQ ID NO: 21112 - DNA, 20 bp, Artificial Sequence
  Description of Artificial Sequence: Synthetic oligonucleotide
  Target: COL7A1; (+) strand; PAM type: NRG; PAM sequence: CAG
atcccgcagacccccagtga

SEQ ID NO: 21113 - DNA, 20 bp, Artificial Sequence
  Description of Artificial Sequence: Synthetic oligonucleotide
  Target: COL7A1; (+) strand; PAM type: NRG; PAM sequence: CGG
cactgtcctcgcctaccttg

SEQ ID NO: 21114 - DNA, 20 bp, Artificial Sequence
  Description of Artificial Sequence: Synthetic oligonucleotide
  Target: COL7A1; (+) strand; PAM type: NRG; PAM sequence: GAG
ctgtcctcgcctaccttgcg

SEQ ID NO: 21115 - DNA, 20 bp, Artificial Sequence
  Description of Artificial Sequence: Synthetic oligonucleotide
  Target: COL7A1; (+) strand; PAM type: NRG; PAM sequence: CAG
ctaccttgcggagtctgcca

SEQ ID NO: 21116 - DNA, 20 bp, Artificial Sequence
  Description of Artificial Sequence: Synthetic oligonucleotide
  Target: COL7A1; (+) strand; PAM type: NRG; PAM sequence: TGG
tgccacagccctgcccccaa

SEQ ID NO: 21117 - DNA, 20 bp, Artificial Sequence
  Description of Artificial Sequence: Synthetic oligonucleotide
  Target: COL7A1; (+) strand; PAM type: NRG; PAM sequence: TGG
aatggtccctaacttcctcc

SEQ ID NO: 21118 - DNA, 20 bp, Artificial Sequence
  Description of Artificial Sequence: Synthetic oligonucleotide
  Target: COL7A1; (+) strand; PAM type: NRG; PAM sequence: GGG
atggtccctaacttcctcct

SEQ ID NO: 21119 - DNA, 20 bp, Artificial Sequence
  Description of Artificial Sequence: Synthetic oligonucleotide
  Target: COL7A1; (+) strand; PAM type: NRG; PAM sequence: GGG
tggtccctaacttcctcctg

SEQ ID NO: 21120 - DNA, 20 bp, Artificial Sequence
  Description of Artificial Sequence: Synthetic oligonucleotide
  Target: COL7A1; (+) strand; PAM type: NRG; PAM sequence: CAG
ctggggacacctctcaccct

SEQ ID NO: 21121 - DNA, 20 bp, Artificial Sequence
  Description of Artificial Sequence: Synthetic oligonucleotide
  Target: COL7A1; (+) strand; PAM type: NRG; PAM sequence: AGG
tggggacacctctcaccctc

SEQ ID NO: 21122 - DNA, 20 bp, Artificial Sequence
  Description of Artificial Sequence: Synthetic oligonucleotide
  Target: COL7A1; (+) strand; PAM type: NRG; PAM sequence: CAG
acctctcaccctcaggttgc

SEQ ID NO: 21123 - DNA, 20 bp, Artificial Sequence
  Description of Artificial Sequence: Synthetic oligonucleotide
  Target: COL7A1; (+) strand; PAM type: NRG; PAM sequence: CAG
tcaccctcaggttgccagtg

SEQ ID NO: 21124 - DNA, 20 bp, Artificial Sequence
  Description of Artificial Sequence: Synthetic oligonucleotide
  Target: COL7A1; (+) strand; PAM type: NRG; PAM sequence: AAG
ccctcaggttgccagtgcag

SEQ ID NO: 21125 - DNA, 20 bp, Artificial Sequence
  Description of Artificial Sequence: Synthetic oligonucleotide
  Target: COL7A1; (+) strand; PAM type: NRG; PAM sequence: AGG
cctcaggttgccagtgcaga

SEQ ID NO: 21126 - DNA, 20 bp, Artificial Sequence
  Description of Artificial Sequence: Synthetic oligonucleotide
  Target: COL7A1; (+) strand; PAM type: NRG; PAM sequence: AAG
caggttgccagtgcagaagg

SEQ ID NO: 21127 - DNA, 20 bp, Artificial Sequence
  Description of Artificial Sequence: Synthetic oligonucleotide
  Target: COL7A1; (+) strand; PAM type: NRG; PAM sequence: TGG
cagaaggaagccctgcgctc

SEQ ID NO: 21128 - DNA, 20 bp, Artificial Sequence
  Description of Artificial Sequence: Synthetic oligonucleotide
  Target: COL7A1; (+) strand; PAM type: NRG; PAM sequence: GGG
agaaggaagccctgcgctct

SEQ ID NO: 21129 - DNA, 20 bp, Artificial Sequence
  Description of Artificial Sequence: Synthetic oligonucleotide
  Target: COL7A1; (+) strand; PAM type: NRG; PAM sequence: CGG
aagccctgcgctctgggcac

SEQ ID NO: 21130 - DNA, 20 bp, Artificial Sequence
  Description of Artificial Sequence: Synthetic oligonucleotide
  Target: COL7A1; (+) strand; PAM type: NRG; PAM sequence: CAG
gcgctctgggcaccggctcc

SEQ ID NO: 21131 - DNA, 20 bp, Artificial Sequence
  Description of Artificial Sequence: Synthetic oligonucleotide
  Target: COL7A1; (+) strand; PAM type: NRG; PAM sequence: CAG
ctgggcaccggctcccagcg

SEQ ID NO: 21132 - DNA, 20 bp, Artificial Sequence
  Description of Artificial Sequence: Synthetic oligonucleotide
  Target: COL7A1; (+) strand; PAM type: NRG; PAM sequence: CAG
accggctcccagcgcagcct

SEQ ID NO: 21133 - DNA, 20 bp, Artificial Sequence
  Description of Artificial Sequence: Synthetic oligonucleotide
  Target: COL7A1; (+) strand; PAM type: NRG; PAM sequence: GAG
gctcccagcgcagcctcagc

SEQ ID NO: 21134 - DNA, 20 bp, Artificial Sequence
  Description of Artificial Sequence: Synthetic oligonucleotide
  Target: COL7A1; (+) strand; PAM type: NRG; PAM sequence: AAG
tccccgcgctgcaccacgtg

SEQ ID NO: 21135 - DNA, 20 bp, Artificial Sequence
  Description of Artificial Sequence: Synthetic oligonucleotide
  Target: COL7A1; (+) strand; PAM type: NRG; PAM sequence: CAG
tgcaccacgtgaagcgtccc

SEQ ID NO: 21136 - DNA, 20 bp, Artificial Sequence
  Description of Artificial Sequence: Synthetic oligonucleotide
  Target: COL7A1; (+) strand; PAM type: NRG; PAM sequence: AGG
gcaccacgtgaagcgtcccc

SEQ ID NO: 21137 - DNA, 20 bp, Artificial Sequence
  Description of Artificial Sequence: Synthetic oligonucleotide
  Target: COL7A1; (+) strand; PAM type: NRG; PAM sequence: GGG
caccacgtgaagcgtcccca

SEQ ID NO: 21138 - DNA, 20 bp, Artificial Sequence
  Description of Artificial Sequence: Synthetic oligonucleotide
  Target: COL7A1; (+) strand; PAM type: NRG; PAM sequence: TGG
acgtgaagcgtccccagggc

SEQ ID NO: 21139 - DNA, 20 bp, Artificial Sequence
  Description of Artificial Sequence: Synthetic oligonucleotide
  Target: COL7A1; (+) strand; PAM type: NRG; PAM sequence: CGG
tgaagcgtccccagggctgg

SEQ ID NO: 21140 - DNA, 20 bp, Artificial Sequence
  Description of Artificial Sequence: Synthetic oligonucleotide
  Target: COL7A1; (+) strand; PAM type: NRG; PAM sequence: GAG
aagcgtccccagggctggcg

SEQ ID NO: 21141 - DNA, 20 bp, Artificial Sequence
  Description of Artificial Sequence: Synthetic oligonucleotide
  Target: COL7A1; (+) strand; PAM type: NRG; PAM sequence: CAG
ccccagggctggcggagcct

SEQ ID NO: 21142 - DNA, 20 bp, Artificial Sequence
  Description of Artificial Sequence: Synthetic oligonucleotide
  Target: COL7A1; (+) strand; PAM type: NRG; PAM sequence: AGG
cccagggctggcggagcctc

SEQ ID NO: 21143 - DNA, 20 bp, Artificial Sequence
  Description of Artificial Sequence: Synthetic oligonucleotide
  Target: COL7A1; (+) strand; PAM type: NRG; PAM sequence: TGG
gctggcggagcctcaggcgc

SEQ ID NO: 21144 - DNA, 20 bp, Artificial Sequence
  Description of Artificial Sequence: Synthetic oligonucleotide
  Target: COL7A1; (+) strand; PAM type: NRG; PAM sequence: GAG
tggcggagcctcaggcgctg

SEQ ID NO: 21145 - DNA, 20 bp, Artificial Sequence
  Description of Artificial Sequence: Synthetic oligonucleotide
  Target: COL7A1; (+) strand; PAM type: NRG; PAM sequence: GAG
gcggagcctcaggcgctgga

SEQ ID NO: 21146 - DNA, 20 bp, Artificial Sequence
  Description of Artificial Sequence: Synthetic oligonucleotide
  Target: COL7A1; (+) strand; PAM type: NRG; PAM sequence: AAG
agcctcaggcgctggagaga

SEQ ID NO: 21147 - DNA, 20 bp, Artificial Sequence
  Description of Artificial Sequence: Synthetic oligonucleotide
  Target: COL7A1; (+) strand; PAM type: NRG; PAM sequence: CAG
caggcgctggagagaaagct

SEQ ID NO: 21148 - DNA, 20 bp, Artificial Sequence
  Description of Artificial Sequence: Synthetic oligonucleotide
  Target: COL7A1; (+) strand; PAM type: NRG; PAM sequence: AGG
aggcgctggagagaaagctc

SEQ ID NO: 21149 - DNA, 20 bp, Artificial Sequence
  Description of Artificial Sequence: Synthetic oligonucleotide
  Target: COL7A1; (+) strand; PAM type: NRG; PAM sequence: CAG
tggagagaaagctcaggaat

SEQ ID NO: 21150 - DNA, 20 bp, Artificial Sequence
  Description of Artificial Sequence: Synthetic oligonucleotide
  Target: COL7A1; (+) strand; PAM type: NRG; PAM sequence: AGG
ggagagaaagctcaggaatc

SEQ ID NO: 21151 - DNA, 20 bp, Artificial Sequence
  Description of Artificial Sequence: Synthetic oligonucleotide
  Target: COL7A1; (+) strand; PAM type: NRG; PAM sequence: GGG
gagagaaagctcaggaatca

SEQ ID NO: 21152 - DNA, 20 bp, Artificial Sequence
  Description of Artificial Sequence: Synthetic oligonucleotide
  Target: COL7A1; (+) strand; PAM type: NRG; PAM sequence: GAG
gagaaagctcaggaatcagg

SEQ ID NO: 21153 - DNA, 20 bp, Artificial Sequence
  Description of Artificial Sequence: Synthetic oligonucleotide
  Target: COL7A1; (+) strand; PAM type: NRG; PAM sequence: AGG
agaaagctcaggaatcaggg

SEQ ID NO: 21154 - DNA, 20 bp, Artificial Sequence
  Description of Artificial Sequence: Synthetic oligonucleotide
  Target: COL7A1; (+) strand; PAM type: NRG; PAM sequence: TGG
tcagggaggctctgccccca

SEQ ID NO: 21155 - DNA, 20 bp, Artificial Sequence
  Description of Artificial Sequence: Synthetic oligonucleotide
  Target: COL7A1; (+) strand; PAM type: NRG; PAM sequence: CAG
catggcccctgcaccaatcc

SEQ ID NO: 21156 - DNA, 20 bp, Artificial Sequence
  Description of Artificial Sequence: Synthetic oligonucleotide
  Target: COL7A1; (+) strand; PAM type: NRG; PAM sequence: AGG
atggcccctgcaccaatccc

SEQ ID NO: 21157 - DNA, 20 bp, Artificial Sequence
  Description of Artificial Sequence: Synthetic oligonucleotide
  Target: COL7A1; (+) strand; PAM type: NRG; PAM sequence: TGG
caccaatcccaggcccaccc

SEQ ID NO: 21158 - DNA, 20 bp, Artificial Sequence
  Description of Artificial Sequence: Synthetic oligonucleotide
  Target: COL7A1; (+) strand; PAM type: NRG; PAM sequence: CAG
cctggcacacgcaccccgcc

SEQ ID NO: 21159 - DNA, 20 bp, Artificial Sequence
  Description of Artificial Sequence: Synthetic oligonucleotide
  Target: COL7A1; (+) strand; PAM type: NRG; PAM sequence: CAG
acgcaccccgcccagcctct

SEQ ID NO: 21160 - DNA, 20 bp, Artificial Sequence
  Description of Artificial Sequence: Synthetic oligonucleotide
  Target: COL7A1; (+) strand; PAM type: NRG; PAM sequence: CAG
cagacccctctccctcctct

SEQ ID NO: 21161 - DNA, 20 bp, Artificial Sequence
  Description of Artificial Sequence: Synthetic oligonucleotide
  Target: COL7A1; (+) strand; PAM type: NRG; PAM sequence: AAG
cctctcagaccctgccccca

SEQ ID NO: 21162 - DNA, 20 bp, Artificial Sequence
  Description of Artificial Sequence: Synthetic oligonucleotide
  Target: COL7A1; (+) strand; PAM type: NRG; PAM sequence: AGG
ctctcagaccctgcccccaa

SEQ ID NO: 21163 - DNA, 20 bp, Artificial Sequence
  Description of Artificial Sequence: Synthetic oligonucleotide
  Target: COL7A1; (+) strand; PAM type: NRG; PAM sequence: TGG
caaaggctcactaccaatcc

SEQ ID NO: 21164 - DNA, 20 bp, Artificial Sequence
  Description of Artificial Sequence: Synthetic oligonucleotide
  Target: COL7A1; (+) strand; PAM type: NRG; PAM sequence: CAG
tcctggtcctttctccaatc

SEQ ID NO: 21165 - DNA, 20 bp, Artificial Sequence
  Description of Artificial Sequence: Synthetic oligonucleotide
  Target: COL7A1; (+) strand; PAM type: NRG; PAM sequence: GAG
ctggtcctttctccaatcca

SEQ ID NO: 21166 - DNA, 20 bp, Artificial Sequence
  Description of Artificial Sequence: Synthetic oligonucleotide
  Target: COL7A1; (+) strand; PAM type: NRG; PAM sequence: AAG
ctttctccaatccagagcac

SEQ ID NO: 21167 - DNA, 20 bp, Artificial Sequence
  Description of Artificial Sequence: Synthetic oligonucleotide
  Target: COL7A1; (+) strand; PAM type: NRG; PAM sequence: CGG
tccaatccagagcacaagcc

SEQ ID NO: 21168 - DNA, 20 bp, Artificial Sequence
  Description of Artificial Sequence: Synthetic oligonucleotide
  Target: COL7A1; (+) strand; PAM type: NRG; PAM sequence: AAG
ccatccacaccacccatccg

SEQ ID NO: 21169 - DNA, 20 bp, Artificial Sequence
  Description of Artificial Sequence: Synthetic oligonucleotide
  Target: COL7A1; (+) strand; PAM type: NRG; PAM sequence: CAG
accacccatccgaagctctc

SEQ ID NO: 21170 - DNA, 20 bp, Artificial Sequence
  Description of Artificial Sequence: Synthetic oligonucleotide
  Target: COL7A1; (+) strand; PAM type: NRG; PAM sequence: TAG
gcgcatgctctgcctacgcg

SEQ ID NO: 21171 - DNA, 20 bp, Artificial Sequence
  Description of Artificial Sequence: Synthetic oligonucleotide
  Target: COL7A1; (+) strand; PAM type: NRG; PAM sequence: TGG
cctacgcgtagtgacaacaa

SEQ ID NO: 21172 - DNA, 20 bp, Artificial Sequence
  Description of Artificial Sequence: Synthetic oligonucleotide
  Target: COL7A1; (+) strand; PAM type: NRG; PAM sequence: GAG
tacgcgtagtgacaacaatg

SEQ ID NO: 21173 - DNA, 20 bp, Artificial Sequence
  Description of Artificial Sequence: Synthetic oligonucleotide
  Target: COL7A1; (+) strand; PAM type: NRG; PAM sequence: CAG
cgtagtgacaacaatggaga

SEQ ID NO: 21174 - DNA, 20 bp, Artificial Sequence
  Description of Artificial Sequence: Synthetic oligonucleotide
  Target: COL7A1; (+) strand; PAM type: NRG; PAM sequence: AGG
gtagtgacaacaatggagac

SEQ ID NO: 21175 - DNA, 20 bp, Artificial Sequence
  Description of Artificial Sequence: Synthetic oligonucleotide
  Target: COL7A1; (+) strand; PAM type: NRG; PAM sequence: CGG
tggagacaggtgtgccctcg

SEQ ID NO: 21176 - DNA, 20 bp, Artificial Sequence
  Description of Artificial Sequence: Synthetic oligonucleotide
  Target: COL7A1; (+) strand; PAM type: NRG; PAM sequence: AAG
gtgccctcgcggtccccgac

SEQ ID NO: 21177 - DNA, 20 bp, Artificial Sequence
  Description of Artificial Sequence: Synthetic oligonucleotide
  Target: COL7A1; (+) strand; PAM type: NRG; PAM sequence: CAG
ctcgcggtccccgacaagtg

SEQ ID NO: 21178 - DNA, 20 bp, Artificial Sequence
  Description of Artificial Sequence: Synthetic oligonucleotide
  Target: COL7A1; (+) strand; PAM type: NRG; PAM sequence: GAG
caagtgcagtcactcgcact

SEQ ID NO: 21179 - DNA, 20 bp, Artificial Sequence
  Description of Artificial Sequence: Synthetic oligonucleotide
  Target: COL7A1; (+) strand; PAM type: NRG; PAM sequence: TAG
gtgcagtcactcgcactgag

SEQ ID NO: 21180 - DNA, 20 bp, Artificial Sequence
  Description of Artificial Sequence: Synthetic oligonucleotide
  Target: COL7A1; (+) strand; PAM type: NRG; PAM sequence: GAG
gagtagctgactccaccttc

SEQ ID NO: 21181 - DNA, 20 bp, Artificial Sequence
  Description of Artificial Sequence: Synthetic oligonucleotide
  Target: COL7A1; (+) strand; PAM type: NRG; PAM sequence: CGG
tgactccaccttcgagaccc

SEQ ID NO: 21182 - DNA, 20 bp, Artificial Sequence
  Description of Artificial Sequence: Synthetic oligonucleotide
  Target: COL7A1; (+) strand; PAM type: NRG; PAM sequence: CAG
ttcgagaccccggatctctg

SEQ ID NO: 21183 - DNA, 20 bp, Artificial Sequence
  Description of Artificial Sequence: Synthetic oligonucleotide
  Target: COL7A1; (+) strand; PAM type: NRG; PAM sequence: GAG
cgagaccccggatctctgca

SEQ ID NO: 21184 - DNA, 20 bp, Artificial Sequence
  Description of Artificial Sequence: Synthetic oligonucleotide
  Target: COL7A1; (+) strand; PAM type: NRG; PAM sequence: TGG
tctgcagagtctgtgtttcc

SEQ ID NO: 21185 - DNA, 20 bp, Artificial Sequence
  Description of Artificial Sequence: Synthetic oligonucleotide
  Target: COL7A1; (+) strand; PAM type: NRG; PAM sequence: GGG
ctgcagagtctgtgtttcct

SEQ ID NO: 21186 - DNA, 20 bp, Artificial Sequence
  Description of Artificial Sequence: Synthetic oligonucleotide
  Target: COL7A1; (+) strand; PAM type: NRG; PAM sequence: GAG
gcagagtctgtgtttcctgg

SEQ ID NO: 21187 - DNA, 20 bp, Artificial Sequence
  Description of Artificial Sequence: Synthetic oligonucleotide
  Target: COL7A1; (+) strand; PAM type: NRG; PAM sequence: TGG
ctgtgtttcctgggagtatc

SEQ ID NO: 21188 - DNA, 20 bp, Artificial Sequence
  Description of Artificial Sequence: Synthetic oligonucleotide
  Target: COL7A1; (+) strand; PAM type: NRG; PAM sequence: TGG
tgggagtatctggtgcctca

SEQ ID NO: 21189 - DNA, 20 bp, Artificial Sequence
  Description of Artificial Sequence: Synthetic oligonucleotide
  Target: COL7A1; (+) strand; PAM type: NRG; PAM sequence: GGG
gggagtatctggtgcctcat

SEQ ID NO: 21190 - DNA, 20 bp, Artificial Sequence
  Description of Artificial Sequence: Synthetic oligonucleotide
  Target: COL7A1; (+) strand; PAM type: NRG; PAM sequence: GGG
ggagtatctggtgcctcatg

SEQ ID NO: 21191 - DNA, 20 bp, Artificial Sequence
  Description of Artificial Sequence: Synthetic oligonucleotide
  Target: COL7A1; (+) strand; PAM type: NRG; PAM sequence: TGG
tggtgcctcatggggccgcc

SEQ ID NO: 21192 - DNA, 20 bp, Artificial Sequence
  Description of Artificial Sequence: Synthetic oligonucleotide
  Target: COL7A1; (+) strand; PAM type: NRG; PAM sequence: CAG
gcctcatggggccgcctggc

SEQ ID NO: 21193 - DNA, 20 bp, Artificial Sequence
  Description of Artificial Sequence: Synthetic oligonucleotide
  Target: COL7A1; (+) strand; PAM type: NRG; PAM sequence: AGG
cctcatggggccgcctggcc

SEQ ID NO: 21194 - DNA, 20 bp, Artificial Sequence
  Description of Artificial Sequence: Synthetic oligonucleotide
  Target: COL7A1; (+) strand; PAM type: NRG; PAM sequence: TGG
catggggccgcctggccagg

SEQ ID NO: 21195 - DNA, 20 bp, Artificial Sequence
  Description of Artificial Sequence: Synthetic oligonucleotide
  Target: COL7A1; (+) strand; PAM type: NRG; PAM sequence: GGG
atggggccgcctggccaggt

SEQ ID NO: 21196 - DNA, 20 bp, Artificial Sequence
  Description of Artificial Sequence: Synthetic oligonucleotide
  Target: COL7A1; (+) strand; PAM type: NRG; PAM sequence: CAG
cgcctggccaggtgggcata

SEQ ID NO: 21197 - DNA, 20 bp, Artificial Sequence
  Description of Artificial Sequence: Synthetic oligonucleotide
  Target: COL7A1; (+) strand; PAM type: NRG; PAM sequence: TGG
gccaggtgggcatacagcaa

SEQ ID NO: 21198 - DNA, 20 bp, Artificial Sequence
  Description of Artificial Sequence: Synthetic oligonucleotide
  Target: COL7A1; (+) strand; PAM type: NRG; PAM sequence: TAG
ggtgggcatacagcaatggt

SEQ ID NO: 21199 - DNA, 20 bp, Artificial Sequence
  Description of Artificial Sequence: Synthetic oligonucleotide
  Target: COL7A1; (+) strand; PAM type: NRG; PAM sequence: AGG
gtgggcatacagcaatggtt

SEQ ID NO: 21200 - DNA, 20 bp, Artificial Sequence
  Description of Artificial Sequence: Synthetic oligonucleotide
  Target: COL7A1; (+) strand; PAM type: NRG; PAM sequence: GGG
tgggcatacagcaatggtta

SEQ ID NO: 21201 - DNA, 20 bp, Artificial Sequence
  Description of Artificial Sequence: Synthetic oligonucleotide
  Target: COL7A1; (+) strand; PAM type: NRG; PAM sequence: GGG
gggcatacagcaatggttag

SEQ ID NO: 21202 - DNA, 20 bp, Artificial Sequence
  Description of Artificial Sequence: Synthetic oligonucleotide
  Target: COL7A1; (+) strand; PAM type: NRG; PAM sequence: GAG
atacagcaatggttaggggt

SEQ ID NO: 21203 - DNA, 20 bp, Artificial Sequence
  Description of Artificial Sequence: Synthetic oligonucleotide
  Target: COL7A1; (+) strand; PAM type: NRG; PAM sequence: CAG
cagcaatggttaggggtgag

SEQ ID NO: 21204 - DNA, 20 bp, Artificial Sequence
  Description of Artificial Sequence: Synthetic oligonucleotide
  Target: COL7A1; (+) strand; PAM type: NRG; PAM sequence: CAG
tggttaggggtgagcagtcc

SEQ ID NO: 21205 - DNA, 20 bp, Artificial Sequence
  Description of Artificial Sequence: Synthetic oligonucleotide
  Target: COL7A1; (+) strand; PAM type: NRG; PAM sequence: CAG
taggggtgagcagtcccagc

SEQ ID NO: 21206 - DNA, 20 bp, Artificial Sequence
  Description of Artificial Sequence: Synthetic oligonucleotide
  Target: COL7A1; (+) strand; PAM type: NRG; PAM sequence: AGG
aggggtgagcagtcccagcc

SEQ ID NO: 21207 - DNA, 20 bp, Artificial Sequence
  Description of Artificial Sequence: Synthetic oligonucleotide
  Target: COL7A1; (+) strand; PAM type: NRG; PAM sequence: AAG
ggtgagcagtcccagccagg

SEQ ID NO: 21208 - DNA, 20 bp, Artificial Sequence
  Description of Artificial Sequence: Synthetic oligonucleotide
  Target: COL7A1; (+) strand; PAM type: NRG; PAM sequence: AGG
gtgagcagtcccagccagga

SEQ ID NO: 21209 - DNA, 20 bp, Artificial Sequence
  Description of Artificial Sequence: Synthetic oligonucleotide
  Target: COL7A1; (+) strand; PAM type: NRG; PAM sequence: CAG
gcagtcccagccaggaagga

SEQ ID NO: 21210 - DNA, 20 bp, Artificial Sequence
  Description of Artificial Sequence: Synthetic oligonucleotide
  Target: COL7A1; (+) strand; PAM type: NRG; PAM sequence: AGG
cagtcccagccaggaaggac

SEQ ID NO: 21211 - DNA, 20 bp, Artificial Sequence
  Description of Artificial Sequence: Synthetic oligonucleotide
  Target: COL7A1; (+) strand; PAM type: NRG; PAM sequence: GGG
agtcccagccaggaaggaca

SEQ ID NO: 21212 - DNA, 20 bp, Artificial Sequence
  Description of Artificial Sequence: Synthetic oligonucleotide
  Target: COL7A1; (+) strand; PAM type: NRG; PAM sequence: GGG
gtcccagccaggaaggacag

SEQ ID NO: 21213 - DNA, 20 bp, Artificial Sequence
  Description of Artificial Sequence: Synthetic oligonucleotide
  Target: COL7A1; (+) strand; PAM type: NRG; PAM sequence: TGG
ccagccaggaaggacagggg

SEQ ID NO: 21214 - DNA, 20 bp, Artificial Sequence
  Description of Artificial Sequence: Synthetic oligonucleotide
  Target: COL7A1; (+) strand; PAM type: NRG; PAM sequence: CAG
aggaaggacaggggtggcgt

SEQ ID NO: 21215 - DNA, 20 bp, Artificial Sequence
  Description of Artificial Sequence: Synthetic oligonucleotide
  Target: COL7A1; (+) strand; PAM type: NRG; PAM sequence: AGG
ggaaggacaggggtggcgtc

SEQ ID NO: 21216 - DNA, 20 bp, Artificial Sequence
  Description of Artificial Sequence: Synthetic oligonucleotide
  Target: COL7A1; (+) strand; PAM type: NRG; PAM sequence: GGG
gaaggacaggggtggcgtca

SEQ ID NO: 21217 - DNA, 20 bp, Artificial Sequence
  Description of Artificial Sequence: Synthetic oligonucleotide
  Target: COL7A1; (+) strand; PAM type: NRG; PAM sequence: GAG
aggacaggggtggcgtcagg

SEQ ID NO: 21218 - DNA, 20 bp, Artificial Sequence
  Description of Artificial Sequence: Synthetic oligonucleotide
  Target: COL7A1; (+) strand; PAM type: NRG; PAM sequence: CGG
agggagccataccttcactc

SEQ ID NO: 21219 - DNA, 20 bp, Artificial Sequence
  Description of Artificial Sequence: Synthetic oligonucleotide
  Target: COL7A1; (+) strand; PAM type: NRG; PAM sequence: CAG
ccataccttcactccggccc

SEQ ID NO: 21220 - DNA, 20 bp, Artificial Sequence
  Description of Artificial Sequence: Synthetic oligonucleotide
  Target: COL7A1; (+) strand; PAM type: NRG; PAM sequence: AGG
cataccttcactccggcccc

SEQ ID NO: 21221 - DNA, 20 bp, Artificial Sequence
  Description of Artificial Sequence: Synthetic oligonucleotide
  Target: COL7A1; (+) strand; PAM type: NRG; PAM sequence: CAG
ccttcactccggccccaggc

SEQ ID NO: 21222 - DNA, 20 bp, Artificial Sequence
  Description of Artificial Sequence: Synthetic oligonucleotide
  Target: COL7A1; (+) strand; PAM type: NRG; PAM sequence: AAG
ccggccccaggccagtctgt

SEQ ID NO: 21223 - DNA, 20 bp, Artificial Sequence
  Description of Artificial Sequence: Synthetic oligonucleotide
  Target: COL7A1; (+) strand; PAM type: NRG; PAM sequence: TGG
ccaggccagtctgtaagctg

SEQ ID NO: 21224 - DNA, 20 bp, Artificial Sequence
  Description of Artificial Sequence: Synthetic oligonucleotide
  Target: COL7A1; (+) strand; PAM type: NRG; PAM sequence: CAG
cagtctgtaagctgtggctc

SEQ ID NO: 21225 - DNA, 20 bp, Artificial Sequence
  Description of Artificial Sequence: Synthetic oligonucleotide
  Target: COL7A1; (+) strand; PAM type: NRG; PAM sequence: CAG
tggctccagtgacccctacc

SEQ ID NO: 21226 - DNA, 20 bp, Artificial Sequence
  Description of Artificial Sequence: Synthetic oligonucleotide
  Target: COL7A1; (+) strand; PAM type: NRG; PAM sequence: AGG
ggctccagtgacccctaccc

SEQ ID NO: 21227 - DNA, 20 bp, Artificial Sequence
  Description of Artificial Sequence: Synthetic oligonucleotide
  Target: COL7A1; (+) strand; PAM type: NRG; PAM sequence: TAG
acccctacccaggtgatccg

SEQ ID NO: 21228 - DNA, 20 bp, Artificial Sequence
  Description of Artificial Sequence: Synthetic oligonucleotide
  Target: COL7A1; (+) strand; PAM type: NRG; PAM sequence: TGG
ggtgatccgtagaacgtcgc

SEQ ID NO: 21229 - DNA, 20 bp, Artificial Sequence
  Description of Artificial Sequence: Synthetic oligonucleotide
  Target: COL7A1; (+) strand; PAM type: NRG; PAM sequence: AAG
gatccgtagaacgtcgctgg

SEQ ID NO: 21230 - DNA, 20 bp, Artificial Sequence
  Description of Artificial Sequence: Synthetic oligonucleotide
  Target: COL7A1; (+) strand; PAM type: NRG; PAM sequence: GAG
agaacgtcgctggaagcatt

SEQ ID NO: 21231 - DNA, 20 bp, Artificial Sequence
  Description of Artificial Sequence: Synthetic oligonucleotide
  Target: COL7A1; (+) strand; PAM type: NRG; PAM sequence: AGG
gaacgtcgctggaagcattg

SEQ ID NO: 21232 - DNA, 20 bp, Artificial Sequence
  Description of Artificial Sequence: Synthetic oligonucleotide
  Target: COL7A1; (+) strand; PAM type: NRG; PAM sequence: CAG
ctggaagcattgaggatctg

SEQ ID NO: 21233 - DNA, 20 bp, Artificial Sequence
  Description of Artificial Sequence: Synthetic oligonucleotide
  Target: COL7A1; (+) strand; PAM type: NRG; PAM sequence: CAG
cagcctcgacacacgaccca

SEQ ID NO: 21234 - DNA, 20 bp, Artificial Sequence
  Description of Artificial Sequence: Synthetic oligonucleotide
  Target: COL7A1; (+) strand; PAM type: NRG; PAM sequence: AGG
agcctcgacacacgacccac

SEQ ID NO: 21235 - DNA, 20 bp, Artificial Sequence
  Description of Artificial Sequence: Synthetic oligonucleotide
  Target: COL7A1; (+) strand; PAM type: NRG; PAM sequence: CAG
cgacacacgacccacaggct

SEQ ID NO: 21236 - DNA, 20 bp, Artificial Sequence
  Description of Artificial Sequence: Synthetic oligonucleotide
  Target: COL7A1; (+) strand; PAM type: NRG; PAM sequence: AGG
gacacacgacccacaggctc

SEQ ID NO: 21237 - DNA, 20 bp, Artificial Sequence
  Description of Artificial Sequence: Synthetic oligonucleotide
  Target: COL7A1; (+) strand; PAM type: NRG; PAM sequence: GGG
acacacgacccacaggctca

SEQ ID NO: 21238 - DNA, 20 bp, Artificial Sequence
  Description of Artificial Sequence: Synthetic oligonucleotide
  Target: COL7A1; (+) strand; PAM type: NRG; PAM sequence: GGG
cacacgacccacaggctcag

SEQ ID NO: 21239 - DNA, 20 bp, Artificial Sequence
  Description of Artificial Sequence: Synthetic oligonucleotide
  Target: COL7A1; (+) strand; PAM type: NRG; PAM sequence: TGG
cgacccacaggctcaggggc

SEQ ID NO: 21240 - DNA, 20 bp, Artificial Sequence
  Description of Artificial Sequence: Synthetic oligonucleotide
  Target: COL7A1; (+) strand; PAM type: NRG; PAM sequence: GGG
gacccacaggctcaggggct

SEQ ID NO: 21241 - DNA, 20 bp, Artificial Sequence
  Description of Artificial Sequence: Synthetic oligonucleotide
  Target: COL7A1; (+) strand; PAM type: NRG; PAM sequence: GGG
acccacaggctcaggggctg

SEQ ID NO: 21242 - DNA, 20 bp, Artificial Sequence
  Description of Artificial Sequence: Synthetic oligonucleotide
  Target: COL7A1; (+) strand; PAM type: NRG; PAM sequence: CAG
acaggctcaggggctgggga

SEQ ID NO: 21243 - DNA, 20 bp, Artificial Sequence
  Description of Artificial Sequence: Synthetic oligonucleotide
  Target: COL7A1; (+) strand; PAM type: NRG; PAM sequence: GAG
aggctcaggggctggggaca

SEQ ID NO: 21244 - DNA, 20 bp, Artificial Sequence
  Description of Artificial Sequence: Synthetic oligonucleotide
  Target: COL7A1; (+) strand; PAM type: NRG; PAM sequence: AGG
ggctcaggggctggggacag

SEQ ID NO: 21245 - DNA, 20 bp, Artificial Sequence
  Description of Artificial Sequence: Synthetic oligonucleotide
  Target: COL7A1; (+) strand; PAM type: NRG; PAM sequence: AAG
caggggctggggacagaggc

SEQ ID NO: 21246 - DNA, 20 bp, Artificial Sequence
  Description of Artificial Sequence: Synthetic oligonucleotide
  Target: COL7A1; (+) strand; PAM type: NRG; PAM sequence: AGG
aggggctggggacagaggca

SEQ ID NO: 21247 - DNA, 20 bp, Artificial Sequence
  Description of Artificial Sequence: Synthetic oligonucleotide
  Target: COL7A1; (+) strand; PAM type: NRG; PAM sequence: AAG
gctggggacagaggcaaggt

SEQ ID NO: 21248 - DNA, 20 bp, Artificial Sequence
  Description of Artificial Sequence: Synthetic oligonucleotide
  Target: COL7A1; (+) strand; PAM type: NRG; PAM sequence: AGG
ctggggacagaggcaaggta

SEQ ID NO: 21249 - DNA, 20 bp, Artificial Sequence
  Description of Artificial Sequence: Synthetic oligonucleotide
  Target: COL7A1; (+) strand; PAM type: NRG; PAM sequence: GGG
tggggacagaggcaaggtaa

SEQ ID NO: 21250 - DNA, 20 bp, Artificial Sequence
  Description of Artificial Sequence: Synthetic oligonucleotide
  Target: COL7A1; (+) strand; PAM type: NRG; PAM sequence: GGG
ggggacagaggcaaggtaag

SEQ ID NO: 21251 - DNA, 20 bp, Artificial Sequence
  Description of Artificial Sequence: Synthetic oligonucleotide
  Target: COL7A1; (+) strand; PAM type: NRG; PAM sequence: TGG
agaggcaaggtaaggggtcc

SEQ ID NO: 21252 - DNA, 20 bp, Artificial Sequence
  Description of Artificial Sequence: Synthetic oligonucleotide
  Target: COL7A1; (+) strand; PAM type: NRG; PAM sequence: TAG
ggcaaggtaaggggtcctgg

SEQ ID NO: 21253 - DNA, 20 bp, Artificial Sequence
  Description of Artificial Sequence: Synthetic oligonucleotide
  Target: COL7A1; (+) strand; PAM type: NRG; PAM sequence: GAG
caaggtaaggggtcctggta

SEQ ID NO: 21254 - DNA, 20 bp, Artificial Sequence
  Description of Artificial Sequence: Synthetic oligonucleotide
  Target: COL7A1; (+) strand; PAM type: NRG; PAM sequence: CAG
taaggggtcctggtagagaa

SEQ ID NO: 21255 - DNA, 20 bp, Artificial Sequence
  Description of Artificial Sequence: Synthetic oligonucleotide
  Target: COL7A1; (+) strand; PAM type: NRG; PAM sequence: GAG
aggggtcctggtagagaaca

SEQ ID NO: 21256 - DNA, 20 bp, Artificial Sequence
  Description of Artificial Sequence: Synthetic oligonucleotide
  Target: COL7A1; (+) strand; PAM type: NRG; PAM sequence: GAG
gggtcctggtagagaacaga

SEQ ID NO: 21257 - DNA, 20 bp, Artificial Sequence
  Description of Artificial Sequence: Synthetic oligonucleotide
  Target: COL7A1; (+) strand; PAM type: NRG; PAM sequence: AGG
ggtcctggtagagaacagag

SEQ ID NO: 21258 - DNA, 20 bp, Artificial Sequence
  Description of Artificial Sequence: Synthetic oligonucleotide
  Target: COL7A1; (+) strand; PAM type: NRG; PAM sequence: CAG
cctggtagagaacagagagg

SEQ ID NO: 21259 - DNA, 20 bp, Artificial Sequence
  Description of Artificial Sequence: Synthetic oligonucleotide
  Target: COL7A1; (+) strand; PAM type: NRG; PAM sequence: CAG
tagagaacagagaggcagtg

SEQ ID NO: 21260 - DNA, 20 bp, Artificial Sequence
  Description of Artificial Sequence: Synthetic oligonucleotide
  Target: COL7A1; (+) strand; PAM type: NRG; PAM sequence: AGG
agagaacagagaggcagtgc

SEQ ID NO: 21261 - DNA, 20 bp, Artificial Sequence
  Description of Artificial Sequence: Synthetic oligonucleotide
  Target: COL7A1; (+) strand; PAM type: NRG; PAM sequence: TGG
acagagaggcagtgcaggaa

SEQ ID NO: 21262 - DNA, 20 bp, Artificial Sequence
  Description of Artificial Sequence: Synthetic oligonucleotide
  Target: COL7A1; (+) strand; PAM type: NRG; PAM sequence: CAG
cagtgcaggaatggttgacg

SEQ ID NO: 21263 - DNA, 20 bp, Artificial Sequence
  Description of Artificial Sequence: Synthetic oligonucleotide
  Target: COL7A1; (+) strand; PAM type: NRG; PAM sequence: AGG
agtgcaggaatggttgacgc

SEQ ID NO: 21264 - DNA, 20 bp, Artificial Sequence
  Description of Artificial Sequence: Synthetic oligonucleotide
  Target: COL7A1; (+) strand; PAM type: NRG; PAM sequence: GGG
gtgcaggaatggttgacgca

SEQ ID NO: 21265 - DNA, 20 bp, Artificial Sequence
  Description of Artificial Sequence: Synthetic oligonucleotide
  Target: COL7A1; (+) strand; PAM type: NRG; PAM sequence: GGG
tgcaggaatggttgacgcag

SEQ ID NO: 21266 - DNA, 20 bp, Artificial Sequence
  Description of Artificial Sequence: Synthetic oligonucleotide
  Target: COL7A1; (+) strand; PAM type: NRG; PAM sequence: AAG
ttgacgcaggggtgatctga

SEQ ID NO: 21267 - DNA, 20 bp, Artificial Sequence
  Description of Artificial Sequence: Synthetic oligonucleotide
  Target: COL7A1; (+) strand; PAM type: NRG; PAM sequence: CAG
cgcaggggtgatctgaaagt

SEQ ID NO: 21268 - DNA, 20 bp, Artificial Sequence
  Description of Artificial Sequence: Synthetic oligonucleotide
  Target: COL7A1; (+) strand; PAM type: NRG; PAM sequence: GAG
ggtgatctgaaagtcagtgt

SEQ ID NO: 21269 - DNA, 20 bp, Artificial Sequence
  Description of Artificial Sequence: Synthetic oligonucleotide
  Target: COL7A1; (+) strand; PAM type: NRG; PAM sequence: AGG
gtgatctgaaagtcagtgtg

SEQ ID NO: 21270 - DNA, 20 bp, Artificial Sequence
  Description of Artificial Sequence: Synthetic oligonucleotide
  Target: COL7A1; (+) strand; PAM type: NRG; PAM sequence: TAG
tctgaaagtcagtgtgaggt

SEQ ID NO: 21271 - DNA, 20 bp, Artificial Sequence
  Description of Artificial Sequence: Synthetic oligonucleotide
  Target: COL7A1; (+) strand; PAM type: NRG; PAM sequence: TGG
aagtcagtgtgaggttagtg

SEQ ID NO: 21272 - DNA, 20 bp, Artificial Sequence
  Description of Artificial Sequence: Synthetic oligonucleotide
  Target: COL7A1; (+) strand; PAM type: NRG; PAM sequence: CAG
cagtgtgaggttagtgtgga

SEQ ID NO: 21273 - DNA, 20 bp, Artificial Sequence
  Description of Artificial Sequence: Synthetic oligonucleotide
  Target: COL7A1; (+) strand; PAM type: NRG; PAM sequence: AGG
agtgtgaggttagtgtggac

SEQ ID NO: 21274 - DNA, 20 bp, Artificial Sequence
  Description of Artificial Sequence: Synthetic oligonucleotide
  Target: COL7A1; (+) strand; PAM type: NRG; PAM sequence: TAG
ttagtgtggacaggtcactt

SEQ ID NO: 21275 - DNA, 20 bp, Artificial Sequence
  Description of Artificial Sequence: Synthetic oligonucleotide
  Target: COL7A1; (+) strand; PAM type: NRG; PAM sequence: AGG
tagtgtggacaggtcacttt

SEQ ID NO: 21276 - DNA, 20 bp, Artificial Sequence
  Description of Artificial Sequence: Synthetic oligonucleotide
  Target: COL7A1; (+) strand; PAM type: NRG; PAM sequence: CAG
tgtggacaggtcactttagg

SEQ ID NO: 21277 - DNA, 20 bp, Artificial Sequence
  Description of Artificial Sequence: Synthetic oligonucleotide
  Target: COL7A1; (+) strand; PAM type: NRG; PAM sequence: GAG
aggtcactttaggcagccct

SEQ ID NO: 21278 - DNA, 20 bp, Artificial Sequence
  Description of Artificial Sequence: Synthetic oligonucleotide
  Target: COL7A1; (+) strand; PAM type: NRG; PAM sequence: AGG
ggtcactttaggcagccctg

SEQ ID NO: 21279 - DNA, 20 bp, Artificial Sequence
  Description of Artificial Sequence: Synthetic oligonucleotide
  Target: COL7A1; (+) strand; PAM type: NRG; PAM sequence: GAG
tcactttaggcagccctgag

SEQ ID NO: 21280 - DNA, 20 bp, Artificial Sequence
  Description of Artificial Sequence: Synthetic oligonucleotide
  Target: COL7A1; (+) strand; PAM type: NRG; PAM sequence: AGG
cactttaggcagccctgagg

SEQ ID NO: 21281 - DNA, 20 bp, Artificial Sequence
  Description of Artificial Sequence: Synthetic oligonucleotide
  Target: COL7A1; (+) strand; PAM type: NRG; PAM sequence: GAG
ctttaggcagccctgaggag

SEQ ID NO: 21282 - DNA, 20 bp, Artificial Sequence
  Description of Artificial Sequence: Synthetic oligonucleotide
  Target: COL7A1; (+) strand; PAM type: NRG; PAM sequence: AGG
tttaggcagccctgaggagg

SEQ ID NO: 21283 - DNA, 20 bp, Artificial Sequence
  Description of Artificial Sequence: Synthetic oligonucleotide
  Target: COL7A1; (+) strand; PAM type: NRG; PAM sequence: GAG
taggcagccctgaggaggag

SEQ ID NO: 21284 - DNA, 20 bp, Artificial Sequence
  Description of Artificial Sequence: Synthetic oligonucleotide
  Target: COL7A1; (+) strand; PAM type: NRG; PAM sequence: AGG
aggcagccctgaggaggagg

SEQ ID NO: 21285 - DNA, 20 bp, Artificial Sequence
  Description of Artificial Sequence: Synthetic oligonucleotide
  Target: COL7A1; (+) strand; PAM type: NRG; PAM sequence: CAG
agccctgaggaggaggaggt

SEQ ID NO: 21286 - DNA, 20 bp, Artificial Sequence
  Description of Artificial Sequence: Synthetic oligonucleotide
  Target: COL7A1; (+) strand; PAM type: NRG; PAM sequence: TGG
ggaggaggaggtcagtgcct

SEQ ID NO: 21287 - DNA, 20 bp, Artificial Sequence
  Description of Artificial Sequence: Synthetic oligonucleotide
  Target: COL7A1; (+) strand; PAM type: NRG; PAM sequence: GGG
gaggaggaggtcagtgcctt

SEQ ID NO: 21288 - DNA, 20 bp, Artificial Sequence
  Description of Artificial Sequence: Synthetic oligonucleotide
  Target: COL7A1; (+) strand; PAM type: NRG; PAM sequence: GGG
aggaggaggtcagtgccttg

SEQ ID NO: 21289 - DNA, 20 bp, Artificial Sequence
  Description of Artificial Sequence: Synthetic oligonucleotide
  Target: COL7A1; (+) strand; PAM type: NRG; PAM sequence: TGG
aggaggtcagtgccttgggg

SEQ ID NO: 21290 - DNA, 20 bp, Artificial Sequence
  Description of Artificial Sequence: Synthetic oligonucleotide
  Target: COL7A1; (+) strand; PAM type: NRG; PAM sequence: GGG
ggaggtcagtgccttggggt

SEQ ID NO: 21291 - DNA, 20 bp, Artificial Sequence
  Description of Artificial Sequence: Synthetic oligonucleotide
  Target: COL7A1; (+) strand; PAM type: NRG; PAM sequence: CAG
ggtcagtgccttggggtggg

SEQ ID NO: 21292 - DNA, 20 bp, Artificial Sequence
  Description of Artificial Sequence: Synthetic oligonucleotide
  Target: COL7A1; (+) strand; PAM type: NRG; PAM sequence: TGG
gtgccttggggtgggcagtg

SEQ ID NO: 21293 - DNA, 20 bp, Artificial Sequence
  Description of Artificial Sequence: Synthetic oligonucleotide
  Target: COL7A1; (+) strand; PAM type: NRG; PAM sequence: GGG
tgccttggggtgggcagtgt

SEQ ID NO: 21294 - DNA, 20 bp, Artificial Sequence
  Description of Artificial Sequence: Synthetic oligonucleotide
  Target: COL7A1; (+) strand; PAM type: NRG; PAM sequence: GGG
gccttggggtgggcagtgtg

SEQ ID NO: 21295 - DNA, 20 bp, Artificial Sequence
  Description of Artificial Sequence: Synthetic oligonucleotide
  Target: COL7A1; (+) strand; PAM type: NRG; PAM sequence: CAG
ggtgggcagtgtggggccac

SEQ ID NO: 21296 - DNA, 20 bp, Artificial Sequence
  Description of Artificial Sequence: Synthetic oligonucleotide
  Target: COL7A1; (+) strand; PAM type: NRG; PAM sequence: AGG
gtgggcagtgtggggccacc

SEQ ID NO: 21297 - DNA, 20 bp, Artificial Sequence
  Description of Artificial Sequence: Synthetic oligonucleotide
  Target: COL7A1; (+) strand; PAM type: NRG; PAM sequence: GAG
gggcagtgtggggccaccag

SEQ ID NO: 21298 - DNA, 20 bp, Artificial Sequence
  Description of Artificial Sequence: Synthetic oligonucleotide
  Target: COL7A1; (+) strand; PAM type: NRG; PAM sequence: AGG
ggcagtgtggggccaccagg

SEQ ID NO: 21299 - DNA, 20 bp, Artificial Sequence
  Description of Artificial Sequence: Synthetic oligonucleotide
  Target: COL7A1; (+) strand; PAM type: NRG; PAM sequence: TGG
gggccaccaggaggtcaccg

SEQ ID NO: 21300 - DNA, 20 bp, Artificial Sequence
  Description of Artificial Sequence: Synthetic oligonucleotide
  Target: COL7A1; (+) strand; PAM type: NRG; PAM sequence: GGG
ggccaccaggaggtcaccgt

SEQ ID NO: 21301 - DNA, 20 bp, Artificial Sequence
  Description of Artificial Sequence: Synthetic oligonucleotide
  Target: COL7A1; (+) strand; PAM type: NRG; PAM sequence: TGG
caccaggaggtcaccgtggg

SEQ ID NO: 21302 - DNA, 20 bp, Artificial Sequence
  Description of Artificial Sequence: Synthetic oligonucleotide
  Target: COL7A1; (+) strand; PAM type: NRG; PAM sequence: CAG
accgtgggtggacacttaat

SEQ ID NO: 21303 - DNA, 20 bp, Artificial Sequence
  Description of Artificial Sequence: Synthetic oligonucleotide
  Target: COL7A1; (+) strand; PAM type: NRG; PAM sequence: TGG
gggtggacacttaatcagtg

SEQ ID NO: 21304 - DNA, 20 bp, Artificial Sequence
  Description of Artificial Sequence: Synthetic oligonucleotide
  Target: COL7A1; (+) strand; PAM type: NRG; PAM sequence: GGG
ggtggacacttaatcagtgt

SEQ ID NO: 21305 - DNA, 20 bp, Artificial Sequence
  Description of Artificial Sequence: Synthetic oligonucleotide
  Target: COL7A1; (+) strand; PAM type: NRG; PAM sequence: GGG
gtggacacttaatcagtgtg

SEQ ID NO: 21306 - DNA, 20 bp, Artificial Sequence
  Description of Artificial Sequence: Synthetic oligonucleotide
  Target: COL7A1; (+) strand; PAM type: NRG; PAM sequence: TGG
gacacttaatcagtgtgggg

SEQ ID NO: 21307 - DNA, 20 bp, Artificial Sequence
  Description of Artificial Sequence: Synthetic oligonucleotide
  Target: COL7A1; (+) strand; PAM type: NRG; PAM sequence: GGG
acacttaatcagtgtggggt

SEQ ID NO: 21308 - DNA, 20 bp, Artificial Sequence
  Description of Artificial Sequence: Synthetic oligonucleotide
  Target: COL7A1; (+) strand; PAM type: NRG; PAM sequence: CAG
ttaatcagtgtggggtgggt

SEQ ID NO: 21309 - DNA, 20 bp, Artificial Sequence
  Description of Artificial Sequence: Synthetic oligonucleotide
  Target: COL7A1; (+) strand; PAM type: NRG; PAM sequence: TGG
cagtgtggggtgggtcagtg

SEQ ID NO: 21310 - DNA, 20 bp, Artificial Sequence
  Description of Artificial Sequence: Synthetic oligonucleotide
  Target: COL7A1; (+) strand; PAM type: NRG; PAM sequence: CAG
gtggggtgggtcagtgtgga

SEQ ID NO: 21311 - DNA, 20 bp, Artificial Sequence
  Description of Artificial Sequence: Synthetic oligonucleotide
  Target: COL7A1; (+) strand; PAM type: NRG; PAM sequence: AGG
tggggtgggtcagtgtggac

SEQ ID NO: 21312 - DNA, 20 bp, Artificial Sequence
  Description of Artificial Sequence: Synthetic oligonucleotide
  Target: COL7A1; (+) strand; PAM type: NRG; PAM sequence: CAG
gtgggtcagtgtggacagga

SEQ ID NO: 21313 - DNA, 20 bp, Artificial Sequence
  Description of Artificial Sequence: Synthetic oligonucleotide
  Target: COL7A1; (+) strand; PAM type: NRG; PAM sequence: GAG
gtgtggacaggacagtcact

SEQ ID NO: 21314 - DNA, 20 bp, Artificial Sequence
  Description of Artificial Sequence: Synthetic oligonucleotide
  Target: COL7A1; (+) strand; PAM type: NRG; PAM sequence: CAG
tggacaggacagtcactgag

SEQ ID NO: 21315 - DNA, 20 bp, Artificial Sequence
  Description of Artificial Sequence: Synthetic oligonucleotide
  Target: COL7A1; (+) strand; PAM type: NRG; PAM sequence: AGG
ggacaggacagtcactgagc

SEQ ID NO: 21316 - DNA, 20 bp, Artificial Sequence
  Description of Artificial Sequence: Synthetic oligonucleotide
  Target: COL7A1; (+) strand; PAM type: NRG; PAM sequence: GGG
gacaggacagtcactgagca

SEQ ID NO: 21317 - DNA, 20 bp, Artificial Sequence
  Description of Artificial Sequence: Synthetic oligonucleotide
  Target: COL7A1; (+) strand; PAM type: NRG; PAM sequence: GGG
acaggacagtcactgagcag

SEQ ID NO: 21318 - DNA, 20 bp, Artificial Sequence
  Description of Artificial Sequence: Synthetic oligonucleotide
  Target: COL7A1; (+) strand; PAM type: NRG; PAM sequence: GGG
caggacagtcactgagcagg

SEQ ID NO: 21319 - DNA, 20 bp, Artificial Sequence
  Description of Artificial Sequence: Synthetic oligonucleotide
  Target: COL7A1; (+) strand; PAM type: NRG; PAM sequence: GGG
aggacagtcactgagcaggg

SEQ ID NO: 21320 - DNA, 20 bp, Artificial Sequence
  Description of Artificial Sequence: Synthetic oligonucleotide
  Target: COL7A1; (+) strand; PAM type: NRG; PAM sequence: TGG
acagtcactgagcagggggg

SEQ ID NO: 21321 - DNA, 20 bp, Artificial Sequence
  Description of Artificial Sequence: Synthetic oligonucleotide
  Target: COL7A1; (+) strand; PAM type: NRG; PAM sequence: GAG
agtcactgagcaggggggtg

SEQ ID NO: 21322 - DNA, 20 bp, Artificial Sequence
  Description of Artificial Sequence: Synthetic oligonucleotide
  Target: COL7A1; (+) strand; PAM type: NRG; PAM sequence: AGG
gtcactgagcaggggggtgg

SEQ ID NO: 21323 - DNA, 20 bp, Artificial Sequence
  Description of Artificial Sequence: Synthetic oligonucleotide
  Target: COL7A1; (+) strand; PAM type: NRG; PAM sequence: CAG
actgagcaggggggtggagg

SEQ ID NO: 21324 - DNA, 20 bp, Artificial Sequence
  Description of Artificial Sequence: Synthetic oligonucleotide
  Target: COL7A1; (+) strand; PAM type: NRG; PAM sequence: TGG
agcaggggggtggaggcagc

SEQ ID NO: 21325 - DNA, 20 bp, Artificial Sequence
  Description of Artificial Sequence: Synthetic oligonucleotide
  Target: COL7A1; (+) strand; PAM type: NRG; PAM sequence: GGG
gcaggggggtggaggcagct

SEQ ID NO: 21326 - DNA, 20 bp, Artificial Sequence
  Description of Artificial Sequence: Synthetic oligonucleotide
  Target: COL7A1; (+) strand; PAM type: NRG; PAM sequence: CAG
ggtggaggcagctgggcaat

SEQ ID NO: 21327 - DNA, 20 bp, Artificial Sequence
  Description of Artificial Sequence: Synthetic oligonucleotide
  Target: COL7A1; (+) strand; PAM type: NRG; PAM sequence: AGG
gtggaggcagctgggcaatc

SEQ ID NO: 21328 - DNA, 20 bp, Artificial Sequence
  Description of Artificial Sequence: Synthetic oligonucleotide
  Target: COL7A1; (+) strand; PAM type: NRG; PAM sequence: CAG
gctgggcaatcaggaacaca

SEQ ID NO: 21329 - DNA, 20 bp, Artificial Sequence
  Description of Artificial Sequence: Synthetic oligonucleotide
  Target: COL7A1; (+) strand; PAM type: NRG; PAM sequence: CAG
gggcaatcaggaacacacag

SEQ ID NO: 21330 - DNA, 20 bp, Artificial Sequence
  Description of Artificial Sequence: Synthetic oligonucleotide
  Target: COL7A1; (+) strand; PAM type: NRG; PAM sequence: AGG
ggcaatcaggaacacacagc

SEQ ID NO: 21331 - DNA, 20 bp, Artificial Sequence
  Description of Artificial Sequence: Synthetic oligonucleotide
  Target: COL7A1; (+) strand; PAM type: NRG; PAM sequence: GGG
gcaatcaggaacacacagca

SEQ ID NO: 21332 - DNA, 20 bp, Artificial Sequence
  Description of Artificial Sequence: Synthetic oligonucleotide
  Target: COL7A1; (+) strand; PAM type: NRG; PAM sequence: CAG
atcaggaacacacagcaggg

SEQ ID NO: 21333 - DNA, 20 bp, Artificial Sequence
  Description of Artificial Sequence: Synthetic oligonucleotide
  Target: COL7A1; (+) strand; PAM type: NRG; PAM sequence: AGG
tcaggaacacacagcagggc

SEQ ID NO: 21334 - DNA, 20 bp, Artificial Sequence
  Description of Artificial Sequence: Synthetic oligonucleotide
  Target: COL7A1; (+) strand; PAM type: NRG; PAM sequence: GGG
caggaacacacagcagggca

SEQ ID NO: 21335 - DNA, 20 bp, Artificial Sequence
  Description of Artificial Sequence: Synthetic oligonucleotide
  Target: COL7A1; (+) strand; PAM type: NRG; PAM sequence: TAG
gaacacacagcagggcaggg

SEQ ID NO: 21336 - DNA, 20 bp, Artificial Sequence
  Description of Artificial Sequence: Synthetic oligonucleotide
  Target: COL7A1; (+) strand; PAM type: NRG; PAM sequence: CGG
gcagggcagggtagctaatg

SEQ ID NO: 21337 - DNA, 20 bp, Artificial Sequence
  Description of Artificial Sequence: Synthetic oligonucleotide
  Target: COL7A1; (+) strand; PAM type: NRG; PAM sequence: TGG
gcagggtagctaatgcggtg

SEQ ID NO: 21338 - DNA, 20 bp, Artificial Sequence
  Description of Artificial Sequence: Synthetic oligonucleotide
  Target: COL7A1; (+) strand; PAM type: NRG; PAM sequence: TAG
ggtagctaatgcggtgtggc

SEQ ID NO: 21339 - DNA, 20 bp, Artificial Sequence
  Description of Artificial Sequence: Synthetic oligonucleotide
  Target: COL7A1; (+) strand; PAM type: NRG; PAM sequence: TAG
agctaatgcggtgtggctag

SEQ ID NO: 21340 - DNA, 20 bp, Artificial Sequence
  Description of Artificial Sequence: Synthetic oligonucleotide
  Target: COL7A1; (+) strand; PAM type: NRG; PAM sequence: TGG
aatgcggtgtggctagtagc

SEQ ID NO: 21341 - DNA, 20 bp, Artificial Sequence
  Description of Artificial Sequence: Synthetic oligonucleotide
  Target: COL7A1; (+) strand; PAM type: NRG; PAM sequence: CAG
cggtgtggctagtagctggc

SEQ ID NO: 21342 - DNA, 20 bp, Artificial Sequence
  Description of Artificial Sequence: Synthetic oligonucleotide
  Target: COL7A1; (+) strand; PAM type: NRG; PAM sequence: AGG
ggtgtggctagtagctggcc

SEQ ID NO: 21343 - DNA, 20 bp, Artificial Sequence
  Description of Artificial Sequence: Synthetic oligonucleotide
  Target: COL7A1; (+) strand; PAM type: NRG; PAM sequence: GGG
gtgtggctagtagctggcca

SEQ ID NO: 21344 - DNA, 20 bp, Artificial Sequence
  Description of Artificial Sequence: Synthetic oligonucleotide
  Target: COL7A1; (+) strand; PAM type: NRG; PAM sequence: CAG
gctggccagggtccactcac

SEQ ID NO: 21345 - DNA, 20 bp, Artificial Sequence
  Description of Artificial Sequence: Synthetic oligonucleotide
  Target: COL7A1; (+) strand; PAM type: NRG; PAM sequence: CAG
ctcaccagtcctcacaacca

SEQ ID NO: 21346 - DNA, 20 bp, Artificial Sequence
  Description of Artificial Sequence: Synthetic oligonucleotide
  Target: COL7A1; (+) strand; PAM type: NRG; PAM sequence: GAG
caccagtcctcacaaccaca

SEQ ID NO: 21347 - DNA, 20 bp, Artificial Sequence
  Description of Artificial Sequence: Synthetic oligonucleotide
  Target: COL7A1; (+) strand; PAM type: NRG; PAM sequence: AGG
accagtcctcacaaccacag

SEQ ID NO: 21348 - DNA, 20 bp, Artificial Sequence
  Description of Artificial Sequence: Synthetic oligonucleotide
  Target: COL7A1; (+) strand; PAM type: NRG; PAM sequence: CAG
agtcctcacaaccacagagg

SEQ ID NO: 21349 - DNA, 20 bp, Artificial Sequence
  Description of Artificial Sequence: Synthetic oligonucleotide
  Target: COL7A1; (+) strand; PAM type: NRG; PAM sequence: AGG
gtcctcacaaccacagaggc

SEQ ID NO: 21350 - DNA, 20 bp, Artificial Sequence
  Description of Artificial Sequence: Synthetic oligonucleotide
  Target: COL7A1; (+) strand; PAM type: NRG; PAM sequence: GGG
tcctcacaaccacagaggca

SEQ ID NO: 21351 - DNA, 20 bp, Artificial Sequence
  Description of Artificial Sequence: Synthetic oligonucleotide
  Target: COL7A1; (+) strand; PAM type: NRG; PAM sequence: GGG
cctcacaaccacagaggcag

SEQ ID NO: 21352 - DNA, 20 bp, Artificial Sequence
  Description of Artificial Sequence: Synthetic oligonucleotide
  Target: COL7A1; (+) strand; PAM type: NRG; PAM sequence: GGG
ctcacaaccacagaggcagg

SEQ ID NO: 21353 - DNA, 20 bp, Artificial Sequence
  Description of Artificial Sequence: Synthetic oligonucleotide
  Target: COL7A1; (+) strand; PAM type: NRG; PAM sequence: CAG
ggcagggggcccatccacgc

SEQ ID NO: 21354 - DNA, 20 bp, Artificial Sequence
  Description of Artificial Sequence: Synthetic oligonucleotide
  Target: COL7A1; (+) strand; PAM type: NRG; PAM sequence: TGG
gcccatccacgccagccaca

SEQ ID NO: 21355 - DNA, 20 bp, Artificial Sequence
  Description of Artificial Sequence: Synthetic oligonucleotide
  Target: COL7A1; (+) strand; PAM type: NRG; PAM sequence: GGG
cccatccacgccagccacat

SEQ ID NO: 21356 - DNA, 20 bp, Artificial Sequence
  Description of Artificial Sequence: Synthetic oligonucleotide
  Target: COL7A1; (+) strand; PAM type: NRG; PAM sequence: CAG
cctcacatgcaccgtatact

SEQ ID NO: 21357 - DNA, 20 bp, Artificial Sequence
  Description of Artificial Sequence: Synthetic oligonucleotide
  Target: COL7A1; (+) strand; PAM type: NRG; PAM sequence: TGG
tgcaccgtatactcagtatc

SEQ ID NO: 21358 - DNA, 20 bp, Artificial Sequence
  Description of Artificial Sequence: Synthetic oligonucleotide
  Target: COL7A1; (+) strand; PAM type: NRG; PAM sequence: CAG
gtatactcagtatctggctc

SEQ ID NO: 21359 - DNA, 20 bp, Artificial Sequence
  Description of Artificial Sequence: Synthetic oligonucleotide
  Target: COL7A1; (+) strand; PAM type: NRG; PAM sequence: CAG
gtatctggctccagtccatc

SEQ ID NO: 21360 - DNA, 20 bp, Artificial Sequence
  Description of Artificial Sequence: Synthetic oligonucleotide
  Target: COL7A1; (+) strand; PAM type: NRG; PAM sequence: CAG
tggctccagtccatccagct

SEQ ID NO: 21361 - DNA, 20 bp, Artificial Sequence
  Description of Artificial Sequence: Synthetic oligonucleotide
  Target: COL7A1; (+) strand; PAM type: NRG; PAM sequence: TGG
tccatccagctcagccaccg

SEQ ID NO: 21362 - DNA, 20 bp, Artificial Sequence
  Description of Artificial Sequence: Synthetic oligonucleotide
  Target: COL7A1; (+) strand; PAM type: NRG; PAM sequence: CAG
ctcagccaccgtggcctccc

SEQ ID NO: 21363 - DNA, 20 bp, Artificial Sequence
  Description of Artificial Sequence: Synthetic oligonucleotide
  Target: COL7A1; (+) strand; PAM type: NRG; PAM sequence: TGG
tggcctccccagaaaccaac

SEQ ID NO: 21364 - DNA, 20 bp, Artificial Sequence
  Description of Artificial Sequence: Synthetic oligonucleotide
  Target: COL7A1; (+) strand; PAM type: NRG; PAM sequence: GGG
ggcctccccagaaaccaact

SEQ ID NO: 21365 - DNA, 20 bp, Artificial Sequence
  Description of Artificial Sequence: Synthetic oligonucleotide
  Target: COL7A1; (+) strand; PAM type: NRG; PAM sequence: TGG
gaaaccaactgggatttctc

SEQ ID NO: 21366 - DNA, 20 bp, Artificial Sequence
  Description of Artificial Sequence: Synthetic oligonucleotide
  Target: COL7A1; (+) strand; PAM type: NRG; PAM sequence: GGG
aaaccaactgggatttctct

SEQ ID NO: 21367 - DNA, 20 bp, Artificial Sequence
  Description of Artificial Sequence: Synthetic oligonucleotide
  Target: COL7A1; (+) strand; PAM type: NRG; PAM sequence: TGG
aactgggatttctctgggcc

SEQ ID NO: 21368 - DNA, 20 bp, Artificial Sequence
  Description of Artificial Sequence: Synthetic oligonucleotide
  Target: COL7A1; (+) strand; PAM type: NRG; PAM sequence: GGG
actgggatttctctgggcct

SEQ ID NO: 21369 - DNA, 20 bp, Artificial Sequence
  Description of Artificial Sequence: Synthetic oligonucleotide
  Target: COL7A1; (+) strand; PAM type: NRG; PAM sequence: CAG
gatttctctgggcctgggaa

SEQ ID NO: 21370 - DNA, 20 bp, Artificial Sequence
  Description of Artificial Sequence: Synthetic oligonucleotide
  Target: COL7A1; (+) strand; PAM type: NRG; PAM sequence: AGG
atttctctgggcctgggaac

SEQ ID NO: 21371 - DNA, 20 bp, Artificial Sequence
  Description of Artificial Sequence: Synthetic oligonucleotide
  Target: COL7A1; (+) strand; PAM type: NRG; PAM sequence: GGG
tttctctgggcctgggaaca

SEQ ID NO: 21372 - DNA, 20 bp, Artificial Sequence
  Description of Artificial Sequence: Synthetic oligonucleotide
  Target: COL7A1; (+) strand; PAM type: NRG; PAM sequence: TGG
tctgggcctgggaacaggga

SEQ ID NO: 21373 - DNA, 20 bp, Artificial Sequence
  Description of Artificial Sequence: Synthetic oligonucleotide
  Target: COL7A1; (+) strand; PAM type: NRG; PAM sequence: GAG
tgggcctgggaacagggatg

SEQ ID NO: 21374 - DNA, 20 bp, Artificial Sequence
  Description of Artificial Sequence: Synthetic oligonucleotide
  Target: COL7A1; (+) strand; PAM type: NRG; PAM sequence: AGG
gggcctgggaacagggatgg

SEQ ID NO: 21375 - DNA, 20 bp, Artificial Sequence
  Description of Artificial Sequence: Synthetic oligonucleotide
  Target: COL7A1; (+) strand; PAM type: NRG; PAM sequence: CAG
cctgggaacagggatggagg

SEQ ID NO: 21376 - DNA, 20 bp, Artificial Sequence
  Description of Artificial Sequence: Synthetic oligonucleotide
  Target: COL7A1; (+) strand; PAM type: NRG; PAM sequence: CAG
aacagggatggaggcagctc

SEQ ID NO: 21377 - DNA, 20 bp, Artificial Sequence
  Description of Artificial Sequence: Synthetic oligonucleotide
  Target: COL7A1; (+) strand; PAM type: NRG; PAM sequence: AGG
acagggatggaggcagctcc

SEQ ID NO: 21378 - DNA, 20 bp, Artificial Sequence
  Description of Artificial Sequence: Synthetic oligonucleotide
  Target: COL7A1; (+) strand; PAM type: NRG; PAM sequence: GGG
cagggatggaggcagctcca

SEQ ID NO: 21379 - DNA, 20 bp, Artificial Sequence
  Description of Artificial Sequence: Synthetic oligonucleotide
  Target: COL7A1; (+) strand; PAM type: NRG; PAM sequence: TAG
gatggaggcagctccagggc

SEQ ID NO: 21380 - DNA, 20 bp, Artificial Sequence
  Description of Artificial Sequence: Synthetic oligonucleotide
  Target: COL7A1; (+) strand; PAM type: NRG; PAM sequence: CAG
ggctagcaaactctgtgccc

SEQ ID NO: 21381 - DNA, 20 bp, Artificial Sequence
  Description of Artificial Sequence: Synthetic oligonucleotide
  Target: COL7A1; (+) strand; PAM type: NRG; PAM sequence: GAG
ctagcaaactctgtgcccca

SEQ ID NO: 21382 - DNA, 20 bp, Artificial Sequence
  Description of Artificial Sequence: Synthetic oligonucleotide
  Target: COL7A1; (+) strand; PAM type: NRG; PAM sequence: TGG
ctgtgccccagagccccacc

SEQ ID NO: 21383 - DNA, 20 bp, Artificial Sequence
  Description of Artificial Sequence: Synthetic oligonucleotide
  Target: COL7A1; (+) strand; PAM type: NRG; PAM sequence: CAG
ctggacccccaataaacccc

SEQ ID NO: 21384 - DNA, 20 bp, Artificial Sequence
  Description of Artificial Sequence: Synthetic oligonucleotide
  Target: COL7A1; (+) strand; PAM type: NRG; PAM sequence: CAG
acctgccccctcccaaaccc

SEQ ID NO: 21385 - DNA, 20 bp, Artificial Sequence
  Description of Artificial Sequence: Synthetic oligonucleotide
  Target: COL7A1; (+) strand; PAM type: NRG; PAM sequence: TGG
ccaaaccccagtccccaccg

SEQ ID NO: 21386 - DNA, 20 bp, Artificial Sequence
  Description of Artificial Sequence: Synthetic oligonucleotide
  Target: COL7A1; (+) strand; PAM type: NRG; PAM sequence: GGG
caaaccccagtccccaccgt

SEQ ID NO: 21387 - DNA, 20 bp, Artificial Sequence
  Description of Artificial Sequence: Synthetic oligonucleotide
  Target: COL7A1; (+) strand; PAM type: NRG; PAM sequence: GAG
cccagtccccaccgtgggct

SEQ ID NO: 21388 - DNA, 20 bp, Artificial Sequence
  Description of Artificial Sequence: Synthetic oligonucleotide
  Target: COL7A1; (+) strand; PAM type: NRG; PAM sequence: CAG
ccccaccgtgggctgagtgc

SEQ ID NO: 21389 - DNA, 20 bp, Artificial Sequence
  Description of Artificial Sequence: Synthetic oligonucleotide
  Target: COL7A1; (+) strand; PAM type: NRG; PAM sequence: AGG
cccaccgtgggctgagtgcc

SEQ ID NO: 21390 - DNA, 20 bp, Artificial Sequence
  Description of Artificial Sequence: Synthetic oligonucleotide
  Target: COL7A1; (+) strand; PAM type: NRG; PAM sequence: TGG
ccaggaaaccctgtatcctg

SEQ ID NO: 21391 - DNA, 20 bp, Artificial Sequence
  Description of Artificial Sequence: Synthetic oligonucleotide
  Target: COL7A1; (+) strand; PAM type: NRG; PAM sequence: CAG
aaccctgtatcctgtggcgc

SEQ ID NO: 21392 - DNA, 20 bp, Artificial Sequence
  Description of Artificial Sequence: Synthetic oligonucleotide
  Target: COL7A1; (+) strand; PAM type: NRG; PAM sequence: AGG
accctgtatcctgtggcgcc

SEQ ID NO: 21393 - DNA, 20 bp, Artificial Sequence
  Description of Artificial Sequence: Synthetic oligonucleotide
  Target: COL7A1; (+) strand; PAM type: NRG; PAM sequence: TGG
tcctgtggcgccaggaaccc

SEQ ID NO: 21394 - DNA, 20 bp, Artificial Sequence
  Description of Artificial Sequence: Synthetic oligonucleotide
  Target: COL7A1; (+) strand; PAM type: NRG; PAM sequence: CAG
tggcgccaggaaccctggtc

SEQ ID NO: 21395 - DNA, 20 bp, Artificial Sequence
  Description of Artificial Sequence: Synthetic oligonucleotide
  Target: COL7A1; (+) strand; PAM type: NRG; PAM sequence: AGG
ggcgccaggaaccctggtcc

SEQ ID NO: 21396 - DNA, 20 bp, Artificial Sequence
  Description of Artificial Sequence: Synthetic oligonucleotide
  Target: COL7A1; (+) strand; PAM type: NRG; PAM sequence: TGG
aggaaccctggtccaggtaa

SEQ ID NO: 21397 - DNA, 20 bp, Artificial Sequence
  Description of Artificial Sequence: Synthetic oligonucleotide
  Target: COL7A1; (+) strand; PAM type: NRG; PAM sequence: CAG
cctggtccaggtaatggtga

SEQ ID NO: 21398 - DNA, 20 bp, Artificial Sequence
  Description of Artificial Sequence: Synthetic oligonucleotide
  Target: COL7A1; (+) strand; PAM type: NRG; PAM sequence: GAG
tccaggtaatggtgacagat

SEQ ID NO: 21399 - DNA, 20 bp, Artificial Sequence
  Description of Artificial Sequence: Synthetic oligonucleotide
  Target: COL7A1; (+) strand; PAM type: NRG; PAM sequence: TGG
aatggtgacagatgagctgc

SEQ ID NO: 21400 - DNA, 20 bp, Artificial Sequence
  Description of Artificial Sequence: Synthetic oligonucleotide
  Target: COL7A1; (+) strand; PAM type: NRG; PAM sequence: GAG
gacagatgagctgctggcct

SEQ ID NO: 21401 - DNA, 20 bp, Artificial Sequence
  Description of Artificial Sequence: Synthetic oligonucleotide
  Target: COL7A1; (+) strand; PAM type: NRG; PAM sequence: TGG
agctgctggcctgagtcaca

SEQ ID NO: 21402 - DNA, 20 bp, Artificial Sequence
  Description of Artificial Sequence: Synthetic oligonucleotide
  Target: COL7A1; (+) strand; PAM type: NRG; PAM sequence: TGG
gtcacatggaccgtcctcac

SEQ ID NO: 21403 - DNA, 20 bp, Artificial Sequence
  Description of Artificial Sequence: Synthetic oligonucleotide
  Target: COL7A1; (+) strand; PAM type: NRG; PAM sequence: GGG
tcacatggaccgtcctcact

SEQ ID NO: 21404 - DNA, 20 bp, Artificial Sequence
  Description of Artificial Sequence: Synthetic oligonucleotide
  Target: COL7A1; (+) strand; PAM type: NRG; PAM sequence: CAG
tggaccgtcctcactgggcc

SEQ ID NO: 21405 - DNA, 20 bp, Artificial Sequence
  Description of Artificial Sequence: Synthetic oligonucleotide
  Target: COL7A1; (+) strand; PAM type: NRG; PAM sequence: TGG
accgtcctcactgggcccag

SEQ ID NO: 21406 - DNA, 20 bp, Artificial Sequence
  Description of Artificial Sequence: Synthetic oligonucleotide
  Target: COL7A1; (+) strand; PAM type: NRG; PAM sequence: GGG
ccgtcctcactgggcccagt

SEQ ID NO: 21407 - DNA, 20 bp, Artificial Sequence
  Description of Artificial Sequence: Synthetic oligonucleotide
  Target: COL7A1; (+) strand; PAM type: NRG; PAM sequence: TAG
ctcactgggcccagtgggtc

SEQ ID NO: 21408 - DNA, 20 bp, Artificial Sequence
  Description of Artificial Sequence: Synthetic oligonucleotide
  Target: COL7A1; (+) strand; PAM type: NRG; PAM sequence: TGG
actgggcccagtgggtctag

SEQ ID NO: 21409 - DNA, 20 bp, Artificial Sequence
  Description of Artificial Sequence: Synthetic oligonucleotide
  Target: COL7A1; (+) strand; PAM type: NRG; PAM sequence: GGG
ctgggcccagtgggtctagt

SEQ ID NO: 21410 - DNA, 20 bp, Artificial Sequence
  Description of Artificial Sequence: Synthetic oligonucleotide
  Target: COL7A1; (+) strand; PAM type: NRG; PAM sequence: GGG
tgggcccagtgggtctagtg

SEQ ID NO: 21411 - DNA, 20 bp, Artificial Sequence
  Description of Artificial Sequence: Synthetic oligonucleotide
  Target: COL7A1; (+) strand; PAM type: NRG; PAM sequence: GAG
ggcccagtgggtctagtggg

SEQ ID NO: 21412 - DNA, 20 bp, Artificial Sequence
  Description of Artificial Sequence: Synthetic oligonucleotide
  Target: COL7A1; (+) strand; PAM type: NRG; PAM sequence: GAG
cccagtgggtctagtgggga

SEQ ID NO: 21413 - DNA, 20 bp, Artificial Sequence
  Description of Artificial Sequence: Synthetic oligonucleotide
  Target: COL7A1; (+) strand; PAM type: NRG; PAM sequence: AGG
ccagtgggtctagtggggag

SEQ ID NO: 21414 - DNA, 20 bp, Artificial Sequence
  Description of Artificial Sequence: Synthetic oligonucleotide
  Target: COL7A1; (+) strand; PAM type: NRG; PAM sequence: TGG
ggtctagtggggagaggcaa

SEQ ID NO: 21415 - DNA, 20 bp, Artificial Sequence
  Description of Artificial Sequence: Synthetic oligonucleotide
  Target: COL7A1; (+) strand; PAM type: NRG; PAM sequence: GGG
gtctagtggggagaggcaat

SEQ ID NO: 21416 - DNA, 20 bp, Artificial Sequence
  Description of Artificial Sequence: Synthetic oligonucleotide
  Target: COL7A1; (+) strand; PAM type: NRG; PAM sequence: GGG
tctagtggggagaggcaatg

SEQ ID NO: 21417 - DNA, 20 bp, Artificial Sequence
  Description of Artificial Sequence: Synthetic oligonucleotide
  Target: COL7A1; (+) strand; PAM type: NRG; PAM sequence: GAG
tagtggggagaggcaatggg

SEQ ID NO: 21418 - DNA, 20 bp, Artificial Sequence
  Description of Artificial Sequence: Synthetic oligonucleotide
  Target: COL7A1; (+) strand; PAM type: NRG; PAM sequence: TGG
agaggcaatggggagtctgc

SEQ ID NO: 21419 - DNA, 20 bp, Artificial Sequence
  Description of Artificial Sequence: Synthetic oligonucleotide
  Target: COL7A1; (+) strand; PAM type: NRG; PAM sequence: CAG
caatggggagtctgctggaa

SEQ ID NO: 21420 - DNA, 20 bp, Artificial Sequence
  Description of Artificial Sequence: Synthetic oligonucleotide
  Target: COL7A1; (+) strand; PAM type: NRG; PAM sequence: AGG
aatggggagtctgctggaac

SEQ ID NO: 21421 - DNA, 20 bp, Artificial Sequence
  Description of Artificial Sequence: Synthetic oligonucleotide
  Target: COL7A1; (+) strand; PAM type: NRG; PAM sequence: CAG
ggggagtctgctggaacagg

SEQ ID NO: 21422 - DNA, 20 bp, Artificial Sequence
  Description of Artificial Sequence: Synthetic oligonucleotide
  Target: COL7A1; (+) strand; PAM type: NRG; PAM sequence: AGG
gggagtctgctggaacaggc

SEQ ID NO: 21423 - DNA, 20 bp, Artificial Sequence
  Description of Artificial Sequence: Synthetic oligonucleotide
  Target: COL7A1; (+) strand; PAM type: NRG; PAM sequence: AAG
agtctgctggaacaggcagg

SEQ ID NO: 21424 - DNA, 20 bp, Artificial Sequence
  Description of Artificial Sequence: Synthetic oligonucleotide
  Target: COL7A1; (+) strand; PAM type: NRG; PAM sequence: AGG
gtctgctggaacaggcagga

SEQ ID NO: 21425 - DNA, 20 bp, Artificial Sequence
  Description of Artificial Sequence: Synthetic oligonucleotide
  Target: COL7A1; (+) strand; PAM type: NRG; PAM sequence: GAG
ctgctggaacaggcaggaag

SEQ ID NO: 21426 - DNA, 20 bp, Artificial Sequence
  Description of Artificial Sequence: Synthetic oligonucleotide
  Target: COL7A1; (+) strand; PAM type: NRG; PAM sequence: TGG
ctggaacaggcaggaaggag

SEQ ID NO: 21427 - DNA, 20 bp, Artificial Sequence
  Description of Artificial Sequence: Synthetic oligonucleotide
  Target: COL7A1; (+) strand; PAM type: NRG; PAM sequence: GGG
tggaacaggcaggaaggagt

SEQ ID NO: 21428 - DNA, 20 bp, Artificial Sequence
  Description of Artificial Sequence: Synthetic oligonucleotide
  Target: COL7A1; (+) strand; PAM type: NRG; PAM sequence: GGG
ggaacaggcaggaaggagtg

SEQ ID NO: 21429 - DNA, 20 bp, Artificial Sequence
  Description of Artificial Sequence: Synthetic oligonucleotide
  Target: COL7A1; (+) strand; PAM type: NRG; PAM sequence: TAG
gaaggagtggggctatctga

SEQ ID NO: 21430 - DNA, 20 bp, Artificial Sequence
  Description of Artificial Sequence: Synthetic oligonucleotide
  Target: COL7A1; (+) strand; PAM type: NRG; PAM sequence: AGG
aaggagtggggctatctgat

SEQ ID NO: 21431 - DNA, 20 bp, Artificial Sequence
  Description of Artificial Sequence: Synthetic oligonucleotide
  Target: COL7A1; (+) strand; PAM type: NRG; PAM sequence: GGG
aggagtggggctatctgata

SEQ ID NO: 21432 - DNA, 20 bp, Artificial Sequence
  Description of Artificial Sequence: Synthetic oligonucleotide
  Target: COL7A1; (+) strand; PAM type: NRG; PAM sequence: GGG
ggagtggggctatctgatag

SEQ ID NO: 21433 - DNA, 20 bp, Artificial Sequence
  Description of Artificial Sequence: Synthetic oligonucleotide
  Target: COL7A1; (+) strand; PAM type: NRG; PAM sequence: AAG
gtggggctatctgatagggg

SEQ ID NO: 21434 - DNA, 20 bp, Artificial Sequence
  Description of Artificial Sequence: Synthetic oligonucleotide
  Target: COL7A1; (+) strand; PAM type: NRG; PAM sequence: TGG
tatctgataggggaagatga

SEQ ID NO: 21435 - DNA, 20 bp, Artificial Sequence
  Description of Artificial Sequence: Synthetic oligonucleotide
  Target: COL7A1; (+) strand; PAM type: NRG; PAM sequence: GGG
atctgataggggaagatgat

SEQ ID NO: 21436 - DNA, 20 bp, Artificial Sequence
  Description of Artificial Sequence: Synthetic oligonucleotide
  Target: COL7A1; (+) strand; PAM type: NRG; PAM sequence: GAG
ctgataggggaagatgatgg

SEQ ID NO: 21437 - DNA, 20 bp, Artificial Sequence
  Description of Artificial Sequence: Synthetic oligonucleotide
  Target: COL7A1; (+) strand; PAM type: NRG; PAM sequence: CAG
ggaagatgatgggagtctaa

SEQ ID NO: 21438 - DNA, 20 bp, Artificial Sequence
  Description of Artificial Sequence: Synthetic oligonucleotide
  Target: COL7A1; (+) strand; PAM type: NRG; PAM sequence: AGG
gaagatgatgggagtctaac

SEQ ID NO: 21439 - DNA, 20 bp, Artificial Sequence
  Description of Artificial Sequence: Synthetic oligonucleotide
  Target: COL7A1; (+) strand; PAM type: NRG; PAM sequence: GAG
agatgatgggagtctaacag

SEQ ID NO: 21440 - DNA, 20 bp, Artificial Sequence
  Description of Artificial Sequence: Synthetic oligonucleotide
  Target: COL7A1; (+) strand; PAM type: NRG; PAM sequence: CGG
gatgggagtctaacaggaga

SEQ ID NO: 21441 - DNA, 20 bp, Artificial Sequence
  Description of Artificial Sequence: Synthetic oligonucleotide
  Target: COL7A1; (+) strand; PAM type: NRG; PAM sequence: GGG
atgggagtctaacaggagac

SEQ ID NO: 21442 - DNA, 20 bp, Artificial Sequence
  Description of Artificial Sequence: Synthetic oligonucleotide
  Target: COL7A1; (+) strand; PAM type: NRG; PAM sequence: TAG
aacaggagacgggaatttga

SEQ ID NO: 21443 - DNA, 20 bp, Artificial Sequence
  Description of Artificial Sequence: Synthetic oligonucleotide
  Target: COL7A1; (+) strand; PAM type: NRG; PAM sequence: GAG
caggagacgggaatttgata

SEQ ID NO: 21444 - DNA, 20 bp, Artificial Sequence
  Description of Artificial Sequence: Synthetic oligonucleotide
  Target: COL7A1; (+) strand; PAM type: NRG; PAM sequence: AGG
aggagacgggaatttgatag

SEQ ID NO: 21445 - DNA, 20 bp, Artificial Sequence
  Description of Artificial Sequence: Synthetic oligonucleotide
  Target: COL7A1; (+) strand; PAM type: NRG; PAM sequence: GAG
gagacgggaatttgatagag

SEQ ID NO: 21446 - DNA, 20 bp, Artificial Sequence
  Description of Artificial Sequence: Synthetic oligonucleotide
  Target: COL7A1; (+) strand; PAM type: NRG; PAM sequence: TGG
cgggaatttgatagaggaga

SEQ ID NO: 21447 - DNA, 20 bp, Artificial Sequence
  Description of Artificial Sequence: Synthetic oligonucleotide
  Target: COL7A1; (+) strand; PAM type: NRG; PAM sequence: TAG
ttgatagaggagatggtgaa

SEQ ID NO: 21448 - DNA, 20 bp, Artificial Sequence
  Description of Artificial Sequence: Synthetic oligonucleotide
  Target: COL7A1; (+) strand; PAM type: NRG; PAM sequence: AGG
tgatagaggagatggtgaat

SEQ ID NO: 21449 - DNA, 20 bp, Artificial Sequence
  Description of Artificial Sequence: Synthetic oligonucleotide
  Target: COL7A1; (+) strand; PAM type: NRG; PAM sequence: CAG
gaggagatggtgaataggtc

SEQ ID NO: 21450 - DNA, 20 bp, Artificial Sequence
  Description of Artificial Sequence: Synthetic oligonucleotide
  Target: COL7A1; (+) strand; PAM type: NRG; PAM sequence: TGG
gagatggtgaataggtccag

SEQ ID NO: 21451 - DNA, 20 bp, Artificial Sequence
  Description of Artificial Sequence: Synthetic oligonucleotide
  Target: COL7A1; (+) strand; PAM type: NRG; PAM sequence: GAG
gatggtgaataggtccagtg

SEQ ID NO: 21452 - DNA, 20 bp, Artificial Sequence
  Description of Artificial Sequence: Synthetic oligonucleotide
  Target: COL7A1; (+) strand; PAM type: NRG; PAM sequence: AGG
atggtgaataggtccagtgg

SEQ ID NO: 21453 - DNA, 20 bp, Artificial Sequence
  Description of Artificial Sequence: Synthetic oligonucleotide
  Target: COL7A1; (+) strand; PAM type: NRG; PAM sequence: GAG
ggtgaataggtccagtggag

SEQ ID NO: 21454 - DNA, 20 bp, Artificial Sequence
  Description of Artificial Sequence: Synthetic oligonucleotide
  Target: COL7A1; (+) strand; PAM type: NRG; PAM sequence: TGG
gaataggtccagtggaggag

SEQ ID NO: 21455 - DNA, 20 bp, Artificial Sequence
  Description of Artificial Sequence: Synthetic oligonucleotide
  Target: COL7A1; (+) strand; PAM type: NRG; PAM sequence: GGG
aataggtccagtggaggagt

SEQ ID NO: 21456 - DNA, 20 bp, Artificial Sequence
  Description of Artificial Sequence: Synthetic oligonucleotide
  Target: COL7A1; (+) strand; PAM type: NRG; PAM sequence: GGG
ataggtccagtggaggagtg

SEQ ID NO: 21457 - DNA, 20 bp, Artificial Sequence
  Description of Artificial Sequence: Synthetic oligonucleotide
  Target: COL7A1; (+) strand; PAM type: NRG; PAM sequence: GAG
aggtccagtggaggagtggg

SEQ ID NO: 21458 - DNA, 20 bp, Artificial Sequence
  Description of Artificial Sequence: Synthetic oligonucleotide
  Target: COL7A1; (+) strand; PAM type: NRG; PAM sequence: AGG
ggtccagtggaggagtgggg

SEQ ID NO: 21459 - DNA, 20 bp, Artificial Sequence
  Description of Artificial Sequence: Synthetic oligonucleotide
  Target: COL7A1; (+) strand; PAM type: NRG; PAM sequence: TGG
ccagtggaggagtggggagg

SEQ ID NO: 21460 - DNA, 20 bp, Artificial Sequence
  Description of Artificial Sequence: Synthetic oligonucleotide
  Target: COL7A1; (+) strand; PAM type: NRG; PAM sequence: GAG
agtggaggagtggggaggtg

SEQ ID NO: 21461 - DNA, 20 bp, Artificial Sequence
  Description of Artificial Sequence: Synthetic oligonucleotide
  Target: COL7A1; (+) strand; PAM type: NRG; PAM sequence: AGG
gtggaggagtggggaggtgg

SEQ ID NO: 21462 - DNA, 20 bp, Artificial Sequence
  Description of Artificial Sequence: Synthetic oligonucleotide
  Target: COL7A1; (+) strand; PAM type: NRG; PAM sequence: TAG
gagtggggaggtggaggttt

SEQ ID NO: 21463 - DNA, 20 bp, Artificial Sequence
  Description of Artificial Sequence: Synthetic oligonucleotide
  Target: COL7A1; (+) strand; PAM type: NRG; PAM sequence: AGG
agtggggaggtggaggtttt

SEQ ID NO: 21464 - DNA, 20 bp, Artificial Sequence
  Description of Artificial Sequence: Synthetic oligonucleotide
  Target: COL7A1; (+) strand; PAM type: NRG; PAM sequence: AAG
ggggaggtggaggttttagg

SEQ ID NO: 21465 - DNA, 20 bp, Artificial Sequence
  Description of Artificial Sequence: Synthetic oligonucleotide
  Target: COL7A1; (+) strand; PAM type: NRG; PAM sequence: CAG
gaggtggaggttttaggaag

SEQ ID NO: 21466 - DNA, 20 bp, Artificial Sequence
  Description of Artificial Sequence: Synthetic oligonucleotide
  Target: COL7A1; (+) strand; PAM type: NRG; PAM sequence: GAG
tggaggttttaggaagcagt

SEQ ID NO: 21467 - DNA, 20 bp, Artificial Sequence
  Description of Artificial Sequence: Synthetic oligonucleotide
  Target: COL7A1; (+) strand; PAM type: NRG; PAM sequence: CAG
aggttttaggaagcagtgag

SEQ ID NO: 21468 - DNA, 20 bp, Artificial Sequence
  Description of Artificial Sequence: Synthetic oligonucleotide
  Target: COL7A1; (+) strand; PAM type: NRG; PAM sequence: AGG
ggttttaggaagcagtgagc

SEQ ID NO: 21469 - DNA, 20 bp, Artificial Sequence
  Description of Artificial Sequence: Synthetic oligonucleotide
  Target: COL7A1; (+) strand; PAM type: NRG; PAM sequence: TGG
gaagcagtgagcaggtctga

SEQ ID NO: 21470 - DNA, 20 bp, Artificial Sequence
  Description of Artificial Sequence: Synthetic oligonucleotide
  Target: COL7A1; (+) strand; PAM type: NRG; PAM sequence: GAG
agcagtgagcaggtctgatg

SEQ ID NO: 21471 - DNA, 20 bp, Artificial Sequence
  Description of Artificial Sequence: Synthetic oligonucleotide
  Target: COL7A1; (+) strand; PAM type: NRG; PAM sequence: AGG
gcagtgagcaggtctgatgg

SEQ ID NO: 21472 - DNA, 20 bp, Artificial Sequence
  Description of Artificial Sequence: Synthetic oligonucleotide
  Target: COL7A1; (+) strand; PAM type: NRG; PAM sequence: GAG
agtgagcaggtctgatggag

SEQ ID NO: 21473 - DNA, 20 bp, Artificial Sequence
  Description of Artificial Sequence: Synthetic oligonucleotide
  Target: COL7A1; (+) strand; PAM type: NRG; PAM sequence: AAG
agcaggtctgatggaggaga

SEQ ID NO: 21474 - DNA, 20 bp, Artificial Sequence
  Description of Artificial Sequence: Synthetic oligonucleotide
  Target: COL7A1; (+) strand; PAM type: NRG; PAM sequence: CAG
ggaggagaaagtgtaaatct

SEQ ID NO: 21475 - DNA, 20 bp, Artificial Sequence
  Description of Artificial Sequence: Synthetic oligonucleotide
  Target: COL7A1; (+) strand; PAM type: NRG; PAM sequence: GAG
aggagaaagtgtaaatctca

SEQ ID NO: 21476 - DNA, 20 bp, Artificial Sequence
  Description of Artificial Sequence: Synthetic oligonucleotide
  Target: COL7A1; (+) strand; PAM type: NRG; PAM sequence: AGG
ggagaaagtgtaaatctcag

SEQ ID NO: 21477 - DNA, 20 bp, Artificial Sequence
  Description of Artificial Sequence: Synthetic oligonucleotide
  Target: COL7A1; (+) strand; PAM type: NRG; PAM sequence: GAG
agaaagtgtaaatctcagag

SEQ ID NO: 21478 - DNA, 20 bp, Artificial Sequence
  Description of Artificial Sequence: Synthetic oligonucleotide
  Target: COL7A1; (+) strand; PAM type: NRG; PAM sequence: TGG
tgtaaatctcagaggagatt

SEQ ID NO: 21479 - DNA, 20 bp, Artificial Sequence
  Description of Artificial Sequence: Synthetic oligonucleotide
  Target: COL7A1; (+) strand; PAM type: NRG; PAM sequence: GGG
gtaaatctcagaggagattt

SEQ ID NO: 21480 - DNA, 20 bp, Artificial Sequence
  Description of Artificial Sequence: Synthetic oligonucleotide
  Target: COL7A1; (+) strand; PAM type: NRG; PAM sequence: CAG
tctcagaggagatttgggtc

SEQ ID NO: 21481 - DNA, 20 bp, Artificial Sequence
  Description of Artificial Sequence: Synthetic oligonucleotide
  Target: COL7A1; (+) strand; PAM type: NRG; PAM sequence: AAG
gagatttgggtccagcaaaa

SEQ ID NO: 21482 - DNA, 20 bp, Artificial Sequence
  Description of Artificial Sequence: Synthetic oligonucleotide
  Target: COL7A1; (+) strand; PAM type: NRG; PAM sequence: AGG
agatttgggtccagcaaaaa

SEQ ID NO: 21483 - DNA, 20 bp, Artificial Sequence
  Description of Artificial Sequence: Synthetic oligonucleotide
  Target: COL7A1; (+) strand; PAM type: NRG; PAM sequence: GGG
gatttgggtccagcaaaaaa

SEQ ID NO: 21484 - DNA, 20 bp, Artificial Sequence
  Description of Artificial Sequence: Synthetic oligonucleotide
  Target: COL7A1; (+) strand; PAM type: NRG; PAM sequence: TGG
tgggtccagcaaaaaaggga

SEQ ID NO: 21485 - DNA, 20 bp, Artificial Sequence
  Description of Artificial Sequence: Synthetic oligonucleotide
  Target: COL7A1; (+) strand; PAM type: NRG; PAM sequence: GGG
gggtccagcaaaaaagggat

SEQ ID NO: 21486 - DNA, 20 bp, Artificial Sequence
  Description of Artificial Sequence: Synthetic oligonucleotide
  Target: COL7A1; (+) strand; PAM type: NRG; PAM sequence: GGG
ggtccagcaaaaaagggatg

SEQ ID NO: 21487 - DNA, 20 bp, Artificial Sequence
  Description of Artificial Sequence: Synthetic oligonucleotide
  Target: COL7A1; (+) strand; PAM type: NRG; PAM sequence: GGG
gtccagcaaaaaagggatgg

SEQ ID NO: 21488 - DNA, 20 bp, Artificial Sequence
  Description of Artificial Sequence: Synthetic oligonucleotide
  Target: COL7A1; (+) strand; PAM type: NRG; PAM sequence: GAG
caaaaaagggatgggggtct

SEQ ID NO: 21489 - DNA, 20 bp, Artificial Sequence
  Description of Artificial Sequence: Synthetic oligonucleotide
  Target: COL7A1; (+) strand; PAM type: NRG; PAM sequence: AGG
aaaaaagggatgggggtctg

SEQ ID NO: 21490 - DNA, 20 bp, Artificial Sequence
  Description of Artificial Sequence: Synthetic oligonucleotide
  Target: COL7A1; (+) strand; PAM type: NRG; PAM sequence: GGG
aaaaagggatgggggtctga

SEQ ID NO: 21491 - DNA, 20 bp, Artificial Sequence
  Description of Artificial Sequence: Synthetic oligonucleotide
  Target: COL7A1; (+) strand; PAM type: NRG; PAM sequence: AAG
ggatgggggtctgagggttg

SEQ ID NO: 21492 - DNA, 20 bp, Artificial Sequence
  Description of Artificial Sequence: Synthetic oligonucleotide
  Target: COL7A1; (+) strand; PAM type: NRG; PAM sequence: TGG
tgggggtctgagggttgaag

SEQ ID NO: 21493 - DNA, 20 bp, Artificial Sequence
  Description of Artificial Sequence: Synthetic oligonucleotide
  Target: COL7A1; (+) strand; PAM type: NRG; PAM sequence: TGG
gggtctgagggttgaagtgg

SEQ ID NO: 21494 - DNA, 20 bp, Artificial Sequence
  Description of Artificial Sequence: Synthetic oligonucleotide
  Target: COL7A1; (+) strand; PAM type: NRG; PAM sequence: GAG
ggttgaagtggtggatattt

SEQ ID NO: 21495 - DNA, 20 bp, Artificial Sequence
  Description of Artificial Sequence: Synthetic oligonucleotide
  Target: COL7A1; (+) strand; PAM type: NRG; PAM sequence: AGG
gttgaagtggtggatatttg

SEQ ID NO: 21496 - DNA, 20 bp, Artificial Sequence
  Description of Artificial Sequence: Synthetic oligonucleotide
  Target: COL7A1; (+) strand; PAM type: NRG; PAM sequence: GGG
ttgaagtggtggatatttga

SEQ ID NO: 21497 - DNA, 20 bp, Artificial Sequence
  Description of Artificial Sequence: Synthetic oligonucleotide
  Target: COL7A1; (+) strand; PAM type: NRG; PAM sequence: AAG
gtggtggatatttgagggca

SEQ ID NO: 21498 - DNA, 20 bp, Artificial Sequence
  Description of Artificial Sequence: Synthetic oligonucleotide
  Target: COL7A1; (+) strand; PAM type: NRG; PAM sequence: AGG
tggtggatatttgagggcaa

SEQ ID NO: 21499 - DNA, 20 bp, Artificial Sequence
  Description of Artificial Sequence: Synthetic oligonucleotide
  Target: COL7A1; (+) strand; PAM type: NRG; PAM sequence: TGG
atatttgagggcaaaggctg

SEQ ID NO: 21500 - DNA, 20 bp, Artificial Sequence
  Description of Artificial Sequence: Synthetic oligonucleotide
  Target: COL7A1; (+) strand; PAM type: NRG; PAM sequence: GGG
tatttgagggcaaaggctgt

SEQ ID NO: 21501 - DNA, 20 bp, Artificial Sequence
  Description of Artificial Sequence: Synthetic oligonucleotide
  Target: COL7A1; (+) strand; PAM type: NRG; PAM sequence: GAG
tttgagggcaaaggctgtgg

SEQ ID NO: 21502 - DNA, 20 bp, Artificial Sequence
  Description of Artificial Sequence: Synthetic oligonucleotide
  Target: COL7A1; (+) strand; PAM type: NRG; PAM sequence: TAG
ggcaaaggctgtgggagtct

SEQ ID NO: 21503 - DNA, 20 bp, Artificial Sequence
  Description of Artificial Sequence: Synthetic oligonucleotide
  Target: COL7A1; (+) strand; PAM type: NRG; PAM sequence: AGG
gcaaaggctgtgggagtctt

SEQ ID NO: 21504 - DNA, 20 bp, Artificial Sequence
  Description of Artificial Sequence: Synthetic oligonucleotide
  Target: COL7A1; (+) strand; PAM type: NRG; PAM sequence: GAG
aaaggctgtgggagtcttag

SEQ ID NO: 21505 - DNA, 20 bp, Artificial Sequence
  Description of Artificial Sequence: Synthetic oligonucleotide
  Target: COL7A1; (+) strand; PAM type: NRG; PAM sequence: GAG
aggctgtgggagtcttagga

SEQ ID NO: 21506 - DNA, 20 bp, Artificial Sequence
  Description of Artificial Sequence: Synthetic oligonucleotide
  Target: COL7A1; (+) strand; PAM type: NRG; PAM sequence: AAG
ctgtgggagtcttaggagag

SEQ ID NO: 21507 - DNA, 20 bp, Artificial Sequence
  Description of Artificial Sequence: Synthetic oligonucleotide
  Target: COL7A1; (+) strand; PAM type: NRG; PAM sequence: CGG
tgggagtcttaggagagaag

SEQ ID NO: 21508 - DNA, 20 bp, Artificial Sequence
  Description of Artificial Sequence: Synthetic oligonucleotide
  Target: COL7A1; (+) strand; PAM type: NRG; PAM sequence: GAG
ggagtcttaggagagaagcg

SEQ ID NO: 21509 - DNA, 20 bp, Artificial Sequence
  Description of Artificial Sequence: Synthetic oligonucleotide
  Target: COL7A1; (+) strand; PAM type: NRG; PAM sequence: AGG
gagtcttaggagagaagcgg

SEQ ID NO: 21510 - DNA, 20 bp, Artificial Sequence
  Description of Artificial Sequence: Synthetic oligonucleotide
  Target: COL7A1; (+) strand; PAM type: NRG; PAM sequence: CGG
gaagcggaggaatctgaata

SEQ ID NO: 21511 - DNA, 20 bp, Artificial Sequence
  Description of Artificial Sequence: Synthetic oligonucleotide
  Target: COL7A1; (+) strand; PAM type: NRG; PAM sequence: GGG
aagcggaggaatctgaatac

SEQ ID NO: 21512 - DNA, 20 bp, Artificial Sequence
  Description of Artificial Sequence: Synthetic oligonucleotide
  Target: COL7A1; (+) strand; PAM type: NRG; PAM sequence: GGG
agcggaggaatctgaatacg

SEQ ID NO: 21513 - DNA, 20 bp, Artificial Sequence
  Description of Artificial Sequence: Synthetic oligonucleotide
  Target: COL7A1; (+) strand; PAM type: NRG; PAM sequence: GAG
cggaggaatctgaatacggg

SEQ ID NO: 21514 - DNA, 20 bp, Artificial Sequence
  Description of Artificial Sequence: Synthetic oligonucleotide
  Target: COL7A1; (+) strand; PAM type: NRG; PAM sequence: AGG
ggaggaatctgaatacgggg

SEQ ID NO: 21515 - DNA, 20 bp, Artificial Sequence
  Description of Artificial Sequence: Synthetic oligonucleotide
  Target: COL7A1; (+) strand; PAM type: NRG; PAM sequence: GGG
gaggaatctgaatacgggga

SEQ ID NO: 21516 - DNA, 20 bp, Artificial Sequence
  Description of Artificial Sequence: Synthetic oligonucleotide
  Target: COL7A1; (+) strand; PAM type: NRG; PAM sequence: AAG
tctgaatacggggagggctt

SEQ ID NO: 21517 - DNA, 20 bp, Artificial Sequence
  Description of Artificial Sequence: Synthetic oligonucleotide
  Target: COL7A1; (+) strand; PAM type: NRG; PAM sequence: AGG
ctgaatacggggagggctta

SEQ ID NO: 21518 - DNA, 20 bp, Artificial Sequence
  Description of Artificial Sequence: Synthetic oligonucleotide
  Target: COL7A1; (+) strand; PAM type: NRG; PAM sequence: GGG
tgaatacggggagggcttaa

SEQ ID NO: 21519 - DNA, 20 bp, Artificial Sequence
  Description of Artificial Sequence: Synthetic oligonucleotide
  Target: COL7A1; (+) strand; PAM type: NRG; PAM sequence: GGG
gaatacggggagggcttaag

SEQ ID NO: 21520 - DNA, 20 bp, Artificial Sequence
  Description of Artificial Sequence: Synthetic oligonucleotide
  Target: COL7A1; (+) strand; PAM type: NRG; PAM sequence: GAG
atacggggagggcttaaggg

SEQ ID NO: 21521 - DNA, 20 bp, Artificial Sequence
  Description of Artificial Sequence: Synthetic oligonucleotide
  Target: COL7A1; (+) strand; PAM type: NRG; PAM sequence: CAG
ggggagggcttaaggggaga

SEQ ID NO: 21522 - DNA, 20 bp, Artificial Sequence
  Description of Artificial Sequence: Synthetic oligonucleotide
  Target: COL7A1; (+) strand; PAM type: NRG; PAM sequence: AAG
aggggagacagctgaaactg

SEQ ID NO: 21523 - DNA, 20 bp, Artificial Sequence
  Description of Artificial Sequence: Synthetic oligonucleotide
  Target: COL7A1; (+) strand; PAM type: NRG; PAM sequence: GAG
gggagacagctgaaactgaa

SEQ ID NO: 21524 - DNA, 20 bp, Artificial Sequence
  Description of Artificial Sequence: Synthetic oligonucleotide
  Target: COL7A1; (+) strand; PAM type: NRG; PAM sequence: AGG
ggagacagctgaaactgaag

SEQ ID NO: 21525 - DNA, 20 bp, Artificial Sequence
  Description of Artificial Sequence: Synthetic oligonucleotide
  Target: COL7A1; (+) strand; PAM type: NRG; PAM sequence: AAG
gacagctgaaactgaagagg

SEQ ID NO: 21526 - DNA, 20 bp, Artificial Sequence
  Description of Artificial Sequence: Synthetic oligonucleotide
  Target: COL7A1; (+) strand; PAM type: NRG; PAM sequence: CAG
agctgaaactgaagaggaag

SEQ ID NO: 21527 - DNA, 20 bp, Artificial Sequence
  Description of Artificial Sequence: Synthetic oligonucleotide
  Target: COL7A1; (+) strand; PAM type: NRG; PAM sequence: GAG
gaagaggaagcagcgtctct

SEQ ID NO: 21528 - DNA, 20 bp, Artificial Sequence
  Description of Artificial Sequence: Synthetic oligonucleotide
  Target: COL7A1; (+) strand; PAM type: NRG; PAM sequence: AGG
aagaggaagcagcgtctctg

SEQ ID NO: 21529 - DNA, 20 bp, Artificial Sequence
  Description of Artificial Sequence: Synthetic oligonucleotide
  Target: COL7A1; (+) strand; PAM type: NRG; PAM sequence: GGG
agaggaagcagcgtctctga

SEQ ID NO: 21530 - DNA, 20 bp, Artificial Sequence
  Description of Artificial Sequence: Synthetic oligonucleotide
  Target: COL7A1; (+) strand; PAM type: NRG; PAM sequence: GAG
aggaagcagcgtctctgagg

SEQ ID NO: 21531 - DNA, 20 bp, Artificial Sequence
  Description of Artificial Sequence: Synthetic oligonucleotide
  Target: COL7A1; (+) strand; PAM type: NRG; PAM sequence: AGG
ggaagcagcgtctctgaggg

SEQ ID NO: 21532 - DNA, 20 bp, Artificial Sequence
  Description of Artificial Sequence: Synthetic oligonucleotide
  Target: COL7A1; (+) strand; PAM type: NRG; PAM sequence: GAG
aagcagcgtctctgagggag

SEQ ID NO: 21533 - DNA, 20 bp, Artificial Sequence
  Description of Artificial Sequence: Synthetic oligonucleotide
  Target: COL7A1; (+) strand; PAM type: NRG; PAM sequence: AGG
agcagcgtctctgagggagg

SEQ ID NO: 21534 - DNA, 20 bp, Artificial Sequence
  Description of Artificial Sequence: Synthetic oligonucleotide
  Target: COL7A1; (+) strand; PAM type: NRG; PAM sequence: GGG
gcagcgtctctgagggagga

SEQ ID NO: 21535 - DNA, 20 bp, Artificial Sequence
  Description of Artificial Sequence: Synthetic oligonucleotide
  Target: COL7A1; (+) strand; PAM type: NRG; PAM sequence: GAG
agcgtctctgagggaggagg

SEQ ID NO: 21536 - DNA, 20 bp, Artificial Sequence
  Description of Artificial Sequence: Synthetic oligonucleotide
  Target: COL7A1; (+) strand; PAM type: NRG; PAM sequence: TGG
gtctctgagggaggagggag

SEQ ID NO: 21537 - DNA, 20 bp, Artificial Sequence
  Description of Artificial Sequence: Synthetic oligonucleotide
  Target: COL7A1; (+) strand; PAM type: NRG; PAM sequence: GGG
tctctgagggaggagggagt

SEQ ID NO: 21538 - DNA, 20 bp, Artificial Sequence
  Description of Artificial Sequence: Synthetic oligonucleotide
  Target: COL7A1; (+) strand; PAM type: NRG; PAM sequence: AAG
gaggagggagtgggattctg

SEQ ID NO: 21539 - DNA, 20 bp, Artificial Sequence
  Description of Artificial Sequence: Synthetic oligonucleotide
  Target: COL7A1; (+) strand; PAM type: NRG; PAM sequence: AGG
aggagggagtgggattctga

SEQ ID NO: 21540 - DNA, 20 bp, Artificial Sequence
  Description of Artificial Sequence: Synthetic oligonucleotide
  Target: COL7A1; (+) strand; PAM type: NRG; PAM sequence: GGG
ggagggagtgggattctgaa

SEQ ID NO: 21541 - DNA, 20 bp, Artificial Sequence
  Description of Artificial Sequence: Synthetic oligonucleotide
  Target: COL7A1; (+) strand; PAM type: NRG; PAM sequence: GGG
gagggagtgggattctgaag

SEQ ID NO: 21542 - DNA, 20 bp, Artificial Sequence
  Description of Artificial Sequence: Synthetic oligonucleotide
  Target: COL7A1; (+) strand; PAM type: NRG; PAM sequence: GGG
agggagtgggattctgaagg

SEQ ID NO: 21543 - DNA, 20 bp, Artificial Sequence
  Description of Artificial Sequence: Synthetic oligonucleotide
  Target: COL7A1; (+) strand; PAM type: NRG; PAM sequence: GAG
ggagtgggattctgaagggg

SEQ ID NO: 21544 - DNA, 20 bp, Artificial Sequence
  Description of Artificial Sequence: Synthetic oligonucleotide
  Target: COL7A1; (+) strand; PAM type: NRG; PAM sequence: AGG
gagtgggattctgaaggggg

SEQ ID NO: 21545 - DNA, 20 bp, Artificial Sequence
  Description of Artificial Sequence: Synthetic oligonucleotide
  Target: COL7A1; (+) strand; PAM type: NRG; PAM sequence: CAG
tgggattctgaagggggagg

SEQ ID NO: 21546 - DNA, 20 bp, Artificial Sequence
  Description of Artificial Sequence: Synthetic oligonucleotide
  Target: COL7A1; (+) strand; PAM type: NRG; PAM sequence: AGG
gggattctgaagggggaggc

SEQ ID NO: 21547 - DNA, 20 bp, Artificial Sequence
  Description of Artificial Sequence: Synthetic oligonucleotide
  Target: COL7A1; (+) strand; PAM type: NRG; PAM sequence: GAG
gattctgaagggggaggcag

SEQ ID NO: 21548 - DNA, 20 bp, Artificial Sequence
  Description of Artificial Sequence: Synthetic oligonucleotide
  Target: COL7A1; (+) strand; PAM type: NRG; PAM sequence: TGG
gaagggggaggcaggagttc

SEQ ID NO: 21549 - DNA, 20 bp, Artificial Sequence
  Description of Artificial Sequence: Synthetic oligonucleotide
  Target: COL7A1; (+) strand; PAM type: NRG; PAM sequence: GGG
aagggggaggcaggagttct

SEQ ID NO: 21550 - DNA, 20 bp, Artificial Sequence
  Description of Artificial Sequence: Synthetic oligonucleotide
  Target: COL7A1; (+) strand; PAM type: NRG; PAM sequence: GGG
agggggaggcaggagttctg

SEQ ID NO: 21551 - DNA, 20 bp, Artificial Sequence
  Description of Artificial Sequence: Synthetic oligonucleotide
  Target: COL7A1; (+) strand; PAM type: NRG; PAM sequence: GAG
ggggaggcaggagttctggg

SEQ ID NO: 21552 - DNA, 20 bp, Artificial Sequence
  Description of Artificial Sequence: Synthetic oligonucleotide
  Target: COL7A1; (+) strand; PAM type: NRG; PAM sequence: AAG
gaggcaggagttctggggag

SEQ ID NO: 21553 - DNA, 20 bp, Artificial Sequence
  Description of Artificial Sequence: Synthetic oligonucleotide
  Target: COL7A1; (+) strand; PAM type: NRG; PAM sequence: AAG
caggagttctggggagaagc

SEQ ID NO: 21554 - DNA, 20 bp, Artificial Sequence
  Description of Artificial Sequence: Synthetic oligonucleotide
  Target: COL7A1; (+) strand; PAM type: NRG; PAM sequence: AGG
aggagttctggggagaagca

SEQ ID NO: 21555 - DNA, 20 bp, Artificial Sequence
  Description of Artificial Sequence: Synthetic oligonucleotide
  Target: COL7A1; (+) strand; PAM type: NRG; PAM sequence: GGG
ggagttctggggagaagcaa

SEQ ID NO: 21556 - DNA, 20 bp, Artificial Sequence
  Description of Artificial Sequence: Synthetic oligonucleotide
  Target: COL7A1; (+) strand; PAM type: NRG; PAM sequence: AAG
ggggagaagcaagggtctgc

SEQ ID NO: 21557 - DNA, 20 bp, Artificial Sequence
  Description of Artificial Sequence: Synthetic oligonucleotide
  Target: COL7A1; (+) strand; PAM type: NRG; PAM sequence: AGG
gggagaagcaagggtctgca

SEQ ID NO: 21558 - DNA, 20 bp, Artificial Sequence
  Description of Artificial Sequence: Synthetic oligonucleotide
  Target: COL7A1; (+) strand; PAM type: NRG; PAM sequence: GGG
ggagaagcaagggtctgcaa

SEQ ID NO: 21559 - DNA, 20 bp, Artificial Sequence
  Description of Artificial Sequence: Synthetic oligonucleotide
  Target: COL7A1; (+) strand; PAM type: NRG; PAM sequence: AAG
gaagcaagggtctgcaaggg

SEQ ID NO: 21560 - DNA, 20 bp, Artificial Sequence
  Description of Artificial Sequence: Synthetic oligonucleotide
  Target: COL7A1; (+) strand; PAM type: NRG; PAM sequence: AGG
aagcaagggtctgcaaggga

SEQ ID NO: 21561 - DNA, 20 bp, Artificial Sequence
  Description of Artificial Sequence: Synthetic oligonucleotide
  Target: COL7A1; (+) strand; PAM type: NRG; PAM sequence: TGG
agggtctgcaagggaaggca

SEQ ID NO: 21562 - DNA, 20 bp, Artificial Sequence
  Description of Artificial Sequence: Synthetic oligonucleotide
  Target: COL7A1; (+) strand; PAM type: NRG; PAM sequence: GGG
gggtctgcaagggaaggcat

SEQ ID NO: 21563 - DNA, 20 bp, Artificial Sequence
  Description of Artificial Sequence: Synthetic oligonucleotide
  Target: COL7A1; (+) strand; PAM type: NRG; PAM sequence: GGG
ggtctgcaagggaaggcatg

SEQ ID NO: 21564 - DNA, 20 bp, Artificial Sequence
  Description of Artificial Sequence: Synthetic oligonucleotide
  Target: COL7A1; (+) strand; PAM type: NRG; PAM sequence: GGG
gtctgcaagggaaggcatgg

SEQ ID NO: 21565 - DNA, 20 bp, Artificial Sequence
  Description of Artificial Sequence: Synthetic oligonucleotide
  Target: COL7A1; (+) strand; PAM type: NRG; PAM sequence: AAG
gggaaggcatgggggtctga

SEQ ID NO: 21566 - DNA, 20 bp, Artificial Sequence
  Description of Artificial Sequence: Synthetic oligonucleotide
  Target: COL7A1; (+) strand; PAM type: NRG; PAM sequence: GAG
gaaggcatgggggtctgaaa

SEQ ID NO: 21567 - DNA, 20 bp, Artificial Sequence
  Description of Artificial Sequence: Synthetic oligonucleotide
  Target: COL7A1; (+) strand; PAM type: NRG; PAM sequence: TGG
atgggggtctgaaagagcaa

SEQ ID NO: 21568 - DNA, 20 bp, Artificial Sequence
  Description of Artificial Sequence: Synthetic oligonucleotide
  Target: COL7A1; (+) strand; PAM type: NRG; PAM sequence: GAG
gggggtctgaaagagcaatg

SEQ ID NO: 21569 - DNA, 20 bp, Artificial Sequence
  Description of Artificial Sequence: Synthetic oligonucleotide
  Target: COL7A1; (+) strand; PAM type: NRG; PAM sequence: AGG
ggggtctgaaagagcaatgg

SEQ ID NO: 21570 - DNA, 20 bp, Artificial Sequence
  Description of Artificial Sequence: Synthetic oligonucleotide
  Target: COL7A1; (+) strand; PAM type: NRG; PAM sequence: CAG
gtctgaaagagcaatggagg

SEQ ID NO: 21571 - DNA, 20 bp, Artificial Sequence
  Description of Artificial Sequence: Synthetic oligonucleotide
  Target: COL7A1; (+) strand; PAM type: NRG; PAM sequence: GAG
ctgaaagagcaatggaggca

SEQ ID NO: 21572 - DNA, 20 bp, Artificial Sequence
  Description of Artificial Sequence: Synthetic oligonucleotide
  Target: COL7A1; (+) strand; PAM type: NRG; PAM sequence: GAG
gaaagagcaatggaggcaga

SEQ ID NO: 21573 - DNA, 20 bp, Artificial Sequence
  Description of Artificial Sequence: Synthetic oligonucleotide
  Target: COL7A1; (+) strand; PAM type: NRG; PAM sequence: AAG
agcaatggaggcagagagcc

SEQ ID NO: 21574 - DNA, 20 bp, Artificial Sequence
  Description of Artificial Sequence: Synthetic oligonucleotide
  Target: COL7A1; (+) strand; PAM type: NRG; PAM sequence: AGG
gcaatggaggcagagagcca

SEQ ID NO: 21575 - DNA, 20 bp, Artificial Sequence
  Description of Artificial Sequence: Synthetic oligonucleotide
  Target: COL7A1; (+) strand; PAM type: NRG; PAM sequence: GGG
caatggaggcagagagccaa

SEQ ID NO: 21576 - DNA, 20 bp, Artificial Sequence
  Description of Artificial Sequence: Synthetic oligonucleotide
  Target: COL7A1; (+) strand; PAM type: NRG; PAM sequence: CGG
ggaggcagagagccaaggga

SEQ ID NO: 21577 - DNA, 20 bp, Artificial Sequence
  Description of Artificial Sequence: Synthetic oligonucleotide
  Target: COL7A1; (+) strand; PAM type: NRG; PAM sequence: GGG
gaggcagagagccaagggac

SEQ ID NO: 21578 - DNA, 20 bp, Artificial Sequence
  Description of Artificial Sequence: Synthetic oligonucleotide
  Target: COL7A1; (+) strand; PAM type: NRG; PAM sequence: GGG
aggcagagagccaagggacg

SEQ ID NO: 21579 - DNA, 20 bp, Artificial Sequence
  Description of Artificial Sequence: Synthetic oligonucleotide
  Target: COL7A1; (+) strand; PAM type: NRG; PAM sequence: GGG
ggcagagagccaagggacgg

SEQ ID NO: 21580 - DNA, 20 bp, Artificial Sequence
  Description of Artificial Sequence: Synthetic oligonucleotide
  Target: COL7A1; (+) strand; PAM type: NRG; PAM sequence: CAG
agagagccaagggacggggg

SEQ ID NO: 21581 - DNA, 20 bp, Artificial Sequence
  Description of Artificial Sequence: Synthetic oligonucleotide
  Target: COL7A1; (+) strand; PAM type: NRG; PAM sequence: AGG
gagagccaagggacgggggc

SEQ ID NO: 21582 - DNA, 20 bp, Artificial Sequence
  Description of Artificial Sequence: Synthetic oligonucleotide
  Target: COL7A1; (+) strand; PAM type: NRG; PAM sequence: GGG
agagccaagggacgggggca

SEQ ID NO: 21583 - DNA, 20 bp, Artificial Sequence
  Description of Artificial Sequence: Synthetic oligonucleotide
  Target: COL7A1; (+) strand; PAM type: NRG; PAM sequence: GAG
gggcagggcctgacccgttc

SEQ ID NO: 21584 - DNA, 20 bp, Artificial Sequence
  Description of Artificial Sequence: Synthetic oligonucleotide
  Target: COL7A1; (+) strand; PAM type: NRG; PAM sequence: CAG
cgttcgagccacgatgactg

SEQ ID NO: 21585 - DNA, 20 bp, Artificial Sequence
  Description of Artificial Sequence: Synthetic oligonucleotide
  Target: COL7A1; (+) strand; PAM type: NRG; PAM sequence: CAG
tcgagccacgatgactgcag

SEQ ID NO: 21586 - DNA, 20 bp, Artificial Sequence
  Description of Artificial Sequence: Synthetic oligonucleotide
  Target: COL7A1; (+) strand; PAM type: NRG; PAM sequence: AGG
cgagccacgatgactgcagc

SEQ ID NO: 21587 - DNA, 20 bp, Artificial Sequence
  Description of Artificial Sequence: Synthetic oligonucleotide
  Target: COL7A1; (+) strand; PAM type: NRG; PAM sequence: GGG
gagccacgatgactgcagca

SEQ ID NO: 21588 - DNA, 20 bp, Artificial Sequence
  Description of Artificial Sequence: Synthetic oligonucleotide
  Target: COL7A1; (+) strand; PAM type: NRG; PAM sequence: CAG
gggccctcctctctgcctcg

SEQ ID NO: 21589 - DNA, 20 bp, Artificial Sequence
  Description of Artificial Sequence: Synthetic oligonucleotide
  Target: COL7A1; (+) strand; PAM type: NRG; PAM sequence: CAG
tctgcctcgcagtaccgaca

SEQ ID NO: 21590 - DNA, 20 bp, Artificial Sequence
  Description of Artificial Sequence: Synthetic oligonucleotide
  Target: COL7A1; (+) strand; PAM type: NRG; PAM sequence: TGG
gcagtaccgacacagccacc

SEQ ID NO: 21591 - DNA, 20 bp, Artificial Sequence
  Description of Artificial Sequence: Synthetic oligonucleotide
  Target: COL7A1; (+) strand; PAM type: NRG; PAM sequence: TAG
gtaccgacacagccacctgg

SEQ ID NO: 21592 - DNA, 20 bp, Artificial Sequence
  Description of Artificial Sequence: Synthetic oligonucleotide
  Target: COL7A1; (+) strand; PAM type: NRG; PAM sequence: AGG
taccgacacagccacctggt

SEQ ID NO: 21593 - DNA, 20 bp, Artificial Sequence
  Description of Artificial Sequence: Synthetic oligonucleotide
  Target: COL7A1; (+) strand; PAM type: NRG; PAM sequence: TGG
cgacacagccacctggtagg

SEQ ID NO: 21594 - DNA, 20 bp, Artificial Sequence
  Description of Artificial Sequence: Synthetic oligonucleotide
  Target: COL7A1; (+) strand; PAM type: NRG; PAM sequence: CAG
agccacctggtaggtggttc

SEQ ID NO: 21595 - DNA, 20 bp, Artificial Sequence
  Description of Artificial Sequence: Synthetic oligonucleotide
  Target: COL7A1; (+) strand; PAM type: NRG; PAM sequence: AGG
gccacctggtaggtggttcc

SEQ ID NO: 21596 - DNA, 20 bp, Artificial Sequence
  Description of Artificial Sequence: Synthetic oligonucleotide
  Target: COL7A1; (+) strand; PAM type: NRG; PAM sequence: CAG
tggtaggtggttccaggctg

SEQ ID NO: 21597 - DNA, 20 bp, Artificial Sequence
  Description of Artificial Sequence: Synthetic oligonucleotide
  Target: COL7A1; (+) strand; PAM type: NRG; PAM sequence: TGG
ctgcagccctgtgatgtctg

SEQ ID NO: 21598 - DNA, 20 bp, Artificial Sequence
  Description of Artificial Sequence: Synthetic oligonucleotide
  Target: COL7A1; (+) strand; PAM type: NRG; PAM sequence: CAG
cagccctgtgatgtctgtgg

SEQ ID NO: 21599 - DNA, 20 bp, Artificial Sequence
  Description of Artificial Sequence: Synthetic oligonucleotide
  Target: COL7A1; (+) strand; PAM type: NRG; PAM sequence: TAG
ccctgtgatgtctgtggcag

SEQ ID NO: 21600 - DNA, 20 bp, Artificial Sequence
  Description of Artificial Sequence: Synthetic oligonucleotide
  Target: COL7A1; (+) strand; PAM type: NRG; PAM sequence: GAG
ctgtgatgtctgtggcagta

SEQ ID NO: 21601 - DNA, 20 bp, Artificial Sequence
  Description of Artificial Sequence: Synthetic oligonucleotide
  Target: COL7A1; (+) strand; PAM type: NRG; PAM sequence: TGG
atgtctgtggcagtagagtc

SEQ ID NO: 21602 - DNA, 20 bp, Artificial Sequence
  Description of Artificial Sequence: Synthetic oligonucleotide
  Target: COL7A1; (+) strand; PAM type: NRG; PAM sequence: GGG
tgtctgtggcagtagagtct

SEQ ID NO: 21603 - DNA, 20 bp, Artificial Sequence
  Description of Artificial Sequence: Synthetic oligonucleotide
  Target: COL7A1; (+) strand; PAM type: NRG; PAM sequence: GGG
gtctgtggcagtagagtctg

SEQ ID NO: 21604 - DNA, 20 bp, Artificial Sequence
  Description of Artificial Sequence: Synthetic oligonucleotide
  Target: COL7A1; (+) strand; PAM type: NRG; PAM sequence: GGG
tctgtggcagtagagtctgg

SEQ ID NO: 21605 - DNA, 20 bp, Artificial Sequence
  Description of Artificial Sequence: Synthetic oligonucleotide
  Target: COL7A1; (+) strand; PAM type: NRG; PAM sequence: CAG
gtggcagtagagtctggggg

SEQ ID NO: 21606 - DNA, 20 bp, Artificial Sequence
  Description of Artificial Sequence: Synthetic oligonucleotide
  Target: COL7A1; (+) strand; PAM type: NRG; PAM sequence: TGG
tagagtctgggggcagtgtc

SEQ ID NO: 21607 - DNA, 20 bp, Artificial Sequence
  Description of Artificial Sequence: Synthetic oligonucleotide
  Target: COL7A1; (+) strand; PAM type: NRG; PAM sequence: TGG
gtctgggggcagtgtctggc

SEQ ID NO: 21608 - DNA, 20 bp, Artificial Sequence
  Description of Artificial Sequence: Synthetic oligonucleotide
  Target: COL7A1; (+) strand; PAM type: NRG; PAM sequence: CGG
ggcagtgtctggctggactc

SEQ ID NO: 21609 - DNA, 20 bp, Artificial Sequence
  Description of Artificial Sequence: Synthetic oligonucleotide
  Target: COL7A1; (+) strand; PAM type: NRG; PAM sequence: GAG
tctggctggactccggacct

SEQ ID NO: 21610 - DNA, 20 bp, Artificial Sequence
  Description of Artificial Sequence: Synthetic oligonucleotide
  Target: COL7A1; (+) strand; PAM type: NRG; PAM sequence: AGG
ctggctggactccggacctg

SEQ ID NO: 21611 - DNA, 20 bp, Artificial Sequence
  Description of Artificial Sequence: Synthetic oligonucleotide
  Target: COL7A1; (+) strand; PAM type: NRG; PAM sequence: CAG
ctggactccggacctgaggt

SEQ ID NO: 21612 - DNA, 20 bp, Artificial Sequence
  Description of Artificial Sequence: Synthetic oligonucleotide
  Target: COL7A1; (+) strand; PAM type: NRG; PAM sequence: GAG
ggactccggacctgaggtca

SEQ ID NO: 21613 - DNA, 20 bp, Artificial Sequence
  Description of Artificial Sequence: Synthetic oligonucleotide
  Target: COL7A1; (+) strand; PAM type: NRG; PAM sequence: AGG
gactccggacctgaggtcag

SEQ ID NO: 21614 - DNA, 20 bp, Artificial Sequence
  Description of Artificial Sequence: Synthetic oligonucleotide
  Target: COL7A1; (+) strand; PAM type: NRG; PAM sequence: GGG
actccggacctgaggtcaga

SEQ ID NO: 21615 - DNA, 20 bp, Artificial Sequence
  Description of Artificial Sequence: Synthetic oligonucleotide
  Target: COL7A1; (+) strand; PAM type: NRG; PAM sequence: TGG
ctgaggtcagagggaaatgc

SEQ ID NO: 21616 - DNA, 20 bp, Artificial Sequence
  Description of Artificial Sequence: Synthetic oligonucleotide
  Target: COL7A1; (+) strand; PAM type: NRG; PAM sequence: TGG
gtcagagggaaatgctggca

SEQ ID NO: 21617 - DNA, 20 bp, Artificial Sequence
  Description of Artificial Sequence: Synthetic oligonucleotide
  Target: COL7A1; (+) strand; PAM type: NRG; PAM sequence: TGG
tggctcctgcctgtcccctc

SEQ ID NO: 21618 - DNA, 20 bp, Artificial Sequence
  Description of Artificial Sequence: Synthetic oligonucleotide
  Target: COL7A1; (+) strand; PAM type: NRG; PAM sequence: TGG
tctggcacccataccctcat

SEQ ID NO: 21619 - DNA, 20 bp, Artificial Sequence
  Description of Artificial Sequence: Synthetic oligonucleotide
  Target: COL7A1; (+) strand; PAM type: NRG; PAM sequence: TGG
cataccctcattggtccctt

SEQ ID NO: 21620 - DNA, 20 bp, Artificial Sequence
  Description of Artificial Sequence: Synthetic oligonucleotide
  Target: COL7A1; (+) strand; PAM type: NRG; PAM sequence: CAG
accctcattggtccctttgg

SEQ ID NO: 21621 - DNA, 20 bp, Artificial Sequence
  Description of Artificial Sequence: Synthetic oligonucleotide
  Target: COL7A1; (+) strand; PAM type: NRG; PAM sequence: CAG
actgaccactgcctgtgctc

SEQ ID NO: 21622 - DNA, 20 bp, Artificial Sequence
  Description of Artificial Sequence: Synthetic oligonucleotide
  Target: COL7A1; (+) strand; PAM type: NRG; PAM sequence: TGG
ccagctaatccgaaatccac

SEQ ID NO: 21623 - DNA, 20 bp, Artificial Sequence
  Description of Artificial Sequence: Synthetic oligonucleotide
  Target: COL7A1; (+) strand; PAM type: NRG; PAM sequence: CAG
aatccgaaatccactggctc

SEQ ID NO: 21624 - DNA, 20 bp, Artificial Sequence
  Description of Artificial Sequence: Synthetic oligonucleotide
  Target: COL7A1; (+) strand; PAM type: NRG; PAM sequence: AGG
atccgaaatccactggctcc

SEQ ID NO: 21625 - DNA, 20 bp, Artificial Sequence
  Description of Artificial Sequence: Synthetic oligonucleotide
  Target: COL7A1; (+) strand; PAM type: NRG; PAM sequence: GGG
tccgaaatccactggctcca

SEQ ID NO: 21626 - DNA, 20 bp, Artificial Sequence
  Description of Artificial Sequence: Synthetic oligonucleotide
  Target: COL7A1; (+) strand; PAM type: NRG; PAM sequence: CGG
aaatccactggctccaggga

SEQ ID NO: 21627 - DNA, 20 bp, Artificial Sequence
  Description of Artificial Sequence: Synthetic oligonucleotide
  Target: COL7A1; (+) strand; PAM type: NRG; PAM sequence: GGG
aatccactggctccagggac

SEQ ID NO: 21628 - DNA, 20 bp, Artificial Sequence
  Description of Artificial Sequence: Synthetic oligonucleotide
  Target: COL7A1; (+) strand; PAM type: NRG; PAM sequence: CAG
tggctccagggacgggtccc

SEQ ID NO: 21629 - DNA, 20 bp, Artificial Sequence
  Description of Artificial Sequence: Synthetic oligonucleotide
  Target: COL7A1; (+) strand; PAM type: NRG; PAM sequence: AGG
ggctccagggacgggtcccc

SEQ ID NO: 21630 - DNA, 20 bp, Artificial Sequence
  Description of Artificial Sequence: Synthetic oligonucleotide
  Target: COL7A1; (+) strand; PAM type: NRG; PAM sequence: CAG
gcatctgacaccacaacccg

SEQ ID NO: 21631 - DNA, 20 bp, Artificial Sequence
  Description of Artificial Sequence: Synthetic oligonucleotide
  Target: COL7A1; (+) strand; PAM type: NRG; PAM sequence: TGG
gacaccacaacccgcagccc

SEQ ID NO: 21632 - DNA, 20 bp, Artificial Sequence
  Description of Artificial Sequence: Synthetic oligonucleotide
  Target: COL7A1; (+) strand; PAM type: NRG; PAM sequence: CAG
cacaacccgcagccctggaa

SEQ ID NO: 21633 - DNA, 20 bp, Artificial Sequence
  Description of Artificial Sequence: Synthetic oligonucleotide
  Target: COL7A1; (+) strand; PAM type: NRG; PAM sequence: AAG
acccgcagccctggaacagc

SEQ ID NO: 21634 - DNA, 20 bp, Artificial Sequence
  Description of Artificial Sequence: Synthetic oligonucleotide
  Target: COL7A1; (+) strand; PAM type: NRG; PAM sequence: TGG
cgcagccctggaacagcaag

SEQ ID NO: 21635 - DNA, 20 bp, Artificial Sequence
  Description of Artificial Sequence: Synthetic oligonucleotide
  Target: COL7A1; (+) strand; PAM type: NRG; PAM sequence: GAG
cagccctggaacagcaagtg

SEQ ID NO: 21636 - DNA, 20 bp, Artificial Sequence
  Description of Artificial Sequence: Synthetic oligonucleotide
  Target: COL7A1; (+) strand; PAM type: NRG; PAM sequence: CGG
ggaacagcaagtggagtttc

SEQ ID NO: 21637 - DNA, 20 bp, Artificial Sequence
  Description of Artificial Sequence: Synthetic oligonucleotide
  Target: COL7A1; (+) strand; PAM type: NRG; PAM sequence: TAG
gcaagtggagtttccggctc

SEQ ID NO: 21638 - DNA, 20 bp, Artificial Sequence
  Description of Artificial Sequence: Synthetic oligonucleotide
  Target: COL7A1; (+) strand; PAM type: NRG; PAM sequence: AGG
caagtggagtttccggctct

SEQ ID NO: 21639 - DNA, 20 bp, Artificial Sequence
  Description of Artificial Sequence: Synthetic oligonucleotide
  Target: COL7A1; (+) strand; PAM type: NRG; PAM sequence: GAG
agtggagtttccggctctag

SEQ ID NO: 21640 - DNA, 20 bp, Artificial Sequence
  Description of Artificial Sequence: Synthetic oligonucleotide
  Target: COL7A1; (+) strand; PAM type: NRG; PAM sequence: CAG
gtttccggctctaggagtta

SEQ ID NO: 21641 - DNA, 20 bp, Artificial Sequence
  Description of Artificial Sequence: Synthetic oligonucleotide
  Target: COL7A1; (+) strand; PAM type: NRG; PAM sequence: CAG
ccggctctaggagttacaga

SEQ ID NO: 21642 - DNA, 20 bp, Artificial Sequence
  Description of Artificial Sequence: Synthetic oligonucleotide
  Target: COL7A1; (+) strand; PAM type: NRG; PAM sequence: AAG
gctctaggagttacagacag

SEQ ID NO: 21643 - DNA, 20 bp, Artificial Sequence
  Description of Artificial Sequence: Synthetic oligonucleotide
  Target: COL7A1; (+) strand; PAM type: NRG; PAM sequence: CAG
taggagttacagacagaagt

SEQ ID NO: 21644 - DNA, 20 bp, Artificial Sequence
  Description of Artificial Sequence: Synthetic oligonucleotide
  Target: COL7A1; (+) strand; PAM type: NRG; PAM sequence: AAG
gagttacagacagaagtcag

SEQ ID NO: 21645 - DNA, 20 bp, Artificial Sequence
  Description of Artificial Sequence: Synthetic oligonucleotide
  Target: COL7A1; (+) strand; PAM type: NRG; PAM sequence: CAG
tacagacagaagtcagaagt

SEQ ID NO: 21646 - DNA, 20 bp, Artificial Sequence
  Description of Artificial Sequence: Synthetic oligonucleotide
  Target: COL7A1; (+) strand; PAM type: NRG; PAM sequence: CAG
cagaagtcagaagtcagaac

SEQ ID NO: 21647 - DNA, 20 bp, Artificial Sequence
  Description of Artificial Sequence: Synthetic oligonucleotide
  Target: COL7A1; (+) strand; PAM type: NRG; PAM sequence: AGG
agaagtcagaagtcagaacc

SEQ ID NO: 21648 - DNA, 20 bp, Artificial Sequence
  Description of Artificial Sequence: Synthetic oligonucleotide
  Target: COL7A1; (+) strand; PAM type: NRG; PAM sequence: CAG
tcagaagtcagaaccaggac

SEQ ID NO: 21649 - DNA, 20 bp, Artificial Sequence
  Description of Artificial Sequence: Synthetic oligonucleotide
  Target: COL7A1; (+) strand; PAM type: NRG; PAM sequence: GAG
agaagtcagaaccaggacca

SEQ ID NO: 21650 - DNA, 20 bp, Artificial Sequence
  Description of Artificial Sequence: Synthetic oligonucleotide
  Target: COL7A1; (+) strand; PAM type: NRG; PAM sequence: GAG
gtcagaaccaggaccagagt

SEQ ID NO: 21651 - DNA, 20 bp, Artificial Sequence
  Description of Artificial Sequence: Synthetic oligonucleotide
  Target: COL7A1; (+) strand; PAM type: NRG; PAM sequence: AGG
tcagaaccaggaccagagtg

SEQ ID NO: 21652 - DNA, 20 bp, Artificial Sequence
  Description of Artificial Sequence: Synthetic oligonucleotide
  Target: COL7A1; (+) strand; PAM type: NRG; PAM sequence: CAG
gaaccaggaccagagtgagg

SEQ ID NO: 21653 - DNA, 20 bp, Artificial Sequence
  Description of Artificial Sequence: Synthetic oligonucleotide
  Target: COL7A1; (+) strand; PAM type: NRG; PAM sequence: AGG
aaccaggaccagagtgaggc

SEQ ID NO: 21654 - DNA, 20 bp, Artificial Sequence
  Description of Artificial Sequence: Synthetic oligonucleotide
  Target: COL7A1; (+) strand; PAM type: NRG; PAM sequence: CAG
caggaccagagtgaggcagg

SEQ ID NO: 21655 - DNA, 20 bp, Artificial Sequence
  Description of Artificial Sequence: Synthetic oligonucleotide
  Target: COL7A1; (+) strand; PAM type: NRG; PAM sequence: AAG
ggcaggcagctgtcctccac

SEQ ID NO: 21656 - DNA, 20 bp, Artificial Sequence
  Description of Artificial Sequence: Synthetic oligonucleotide
  Target: COL7A1; (+) strand; PAM type: NRG; PAM sequence: CAG
tgtcctccacaagcctcctg

SEQ ID NO: 21657 - DNA, 20 bp, Artificial Sequence
  Description of Artificial Sequence: Synthetic oligonucleotide
  Target: COL7A1; (+) strand; PAM type: NRG; PAM sequence: CGG
gcctcctgcagtactcaccc

SEQ ID NO: 21658 - DNA, 20 bp, Artificial Sequence
  Description of Artificial Sequence: Synthetic oligonucleotide
  Target: COL7A1; (+) strand; PAM type: NRG; PAM sequence: CGG
tcctgcagtactcaccccgg

SEQ ID NO: 21659 - DNA, 20 bp, Artificial Sequence
  Description of Artificial Sequence: Synthetic oligonucleotide
  Target: COL7A1; (+) strand; PAM type: NRG; PAM sequence: CAG
gcagtactcaccccggcgga

SEQ ID NO: 21660 - DNA, 20 bp, Artificial Sequence
  Description of Artificial Sequence: Synthetic oligonucleotide
  Target: COL7A1; (+) strand; PAM type: NRG; PAM sequence: GAG
tactcaccccggcggacagt

SEQ ID NO: 21661 - DNA, 20 bp, Artificial Sequence
  Description of Artificial Sequence: Synthetic oligonucleotide
  Target: COL7A1; (+) strand; PAM type: NRG; PAM sequence: AGG
actcaccccggcggacagtg

SEQ ID NO: 21662 - DNA, 20 bp, Artificial Sequence
  Description of Artificial Sequence: Synthetic oligonucleotide
  Target: COL7A1; (+) strand; PAM type: NRG; PAM sequence: TGG
ccggcggacagtgaggacac

SEQ ID NO: 21663 - DNA, 20 bp, Artificial Sequence
  Description of Artificial Sequence: Synthetic oligonucleotide
  Target: COL7A1; (+) strand; PAM type: NRG; PAM sequence: CGG
ggacactggcactgccctca

SEQ ID NO: 21664 - DNA, 20 bp, Artificial Sequence
  Description of Artificial Sequence: Synthetic oligonucleotide
  Target: COL7A1; (+) strand; PAM type: NRG; PAM sequence: GGG
gacactggcactgccctcac

SEQ ID NO: 21665 - DNA, 20 bp, Artificial Sequence
  Description of Artificial Sequence: Synthetic oligonucleotide
  Target: COL7A1; (+) strand; PAM type: NRG; PAM sequence: GGG
acactggcactgccctcacg

SEQ ID NO: 21666 - DNA, 20 bp, Artificial Sequence
  Description of Artificial Sequence: Synthetic oligonucleotide
  Target: COL7A1; (+) strand; PAM type: NRG; PAM sequence: GAG
gccctcacggggacccactc

SEQ ID NO: 21667 - DNA, 20 bp, Artificial Sequence
  Description of Artificial Sequence: Synthetic oligonucleotide
  Target: COL7A1; (+) strand; PAM type: NRG; PAM sequence: CAG
ctcacggggacccactcgag

SEQ ID NO: 21668 - DNA, 20 bp, Artificial Sequence
  Description of Artificial Sequence: Synthetic oligonucleotide
  Target: COL7A1; (+) strand; PAM type: NRG; PAM sequence: CAG
cactcgagcagacacccgca

SEQ ID NO: 21669 - DNA, 20 bp, Artificial Sequence
  Description of Artificial Sequence: Synthetic oligonucleotide
  Target: COL7A1; (+) strand; PAM type: NRG; PAM sequence: TAG
gagcagacacccgcacagtg

SEQ ID NO: 21670 - DNA, 20 bp, Artificial Sequence
  Description of Artificial Sequence: Synthetic oligonucleotide
  Target: COL7A1; (+) strand; PAM type: NRG; PAM sequence: AAG
gacacccgcacagtgtagct

SEQ ID NO: 21671 - DNA, 20 bp, Artificial Sequence
  Description of Artificial Sequence: Synthetic oligonucleotide
  Target: COL7A1; (+) strand; PAM type: NRG; PAM sequence: CAG
ccgcacagtgtagctaagcc

SEQ ID NO: 21672 - DNA, 20 bp, Artificial Sequence
  Description of Artificial Sequence: Synthetic oligonucleotide
  Target: COL7A1; (+) strand; PAM type: NRG; PAM sequence: AAG
gcccagcctgaacgtcatcc

SEQ ID NO: 21673 - DNA, 20 bp, Artificial Sequence
  Description of Artificial Sequence: Synthetic oligonucleotide
  Target: COL7A1; (+) strand; PAM type: NRG; PAM sequence: CAG
gtcgaatgctgtctgactcc

SEQ ID NO: 21674 - DNA, 20 bp, Artificial Sequence
  Description of Artificial Sequence: Synthetic oligonucleotide
  Target: COL7A1; (+) strand; PAM type: NRG; PAM sequence: AGG
tcgaatgctgtctgactccc

SEQ ID NO: 21675 - DNA, 20 bp, Artificial Sequence
  Description of Artificial Sequence: Synthetic oligonucleotide
  Target: COL7A1; (+) strand; PAM type: NRG; PAM sequence: AAG
aatgctgtctgactcccagg

SEQ ID NO: 21676 - DNA, 20 bp, Artificial Sequence
  Description of Artificial Sequence: Synthetic oligonucleotide
  Target: COL7A1; (+) strand; PAM type: NRG; PAM sequence: CAG
gtctgactcccaggaagcac

SEQ ID NO: 21677 - DNA, 20 bp, Artificial Sequence
  Description of Artificial Sequence: Synthetic oligonucleotide
  Target: COL7A1; (+) strand; PAM type: NRG; PAM sequence: AGG
tctgactcccaggaagcacc

SEQ ID NO: 21678 - DNA, 20 bp, Artificial Sequence
  Description of Artificial Sequence: Synthetic oligonucleotide
  Target: COL7A1; (+) strand; PAM type: NRG; PAM sequence: GGG
ctgactcccaggaagcacca

SEQ ID NO: 21679 - DNA, 20 bp, Artificial Sequence
  Description of Artificial Sequence: Synthetic oligonucleotide
  Target: COL7A1; (+) strand; PAM type: NRG; PAM sequence: AAG
ccagggtccgctcaacccct

SEQ ID NO: 21680 - DNA, 20 bp, Artificial Sequence
  Description of Artificial Sequence: Synthetic oligonucleotide
  Target: COL7A1; (+) strand; PAM type: NRG; PAM sequence: GAG
agggtccgctcaacccctaa

SEQ ID NO: 21681 - DNA, 20 bp, Artificial Sequence
  Description of Artificial Sequence: Synthetic oligonucleotide
  Target: COL7A1; (+) strand; PAM type: NRG; PAM sequence: GAG
ggtccgctcaacccctaaga

SEQ ID NO: 21682 - DNA, 20 bp, Artificial Sequence
  Description of Artificial Sequence: Synthetic oligonucleotide
  Target: COL7A1; (+) strand; PAM type: NRG; PAM sequence: AAG
ccgctcaacccctaagagag

SEQ ID NO: 21683 - DNA, 20 bp, Artificial Sequence
  Description of Artificial Sequence: Synthetic oligonucleotide
  Target: COL7A1; (+) strand; PAM type: NRG; PAM sequence: CAG
tcaacccctaagagagaagt

SEQ ID NO: 21684 - DNA, 20 bp, Artificial Sequence
  Description of Artificial Sequence: Synthetic oligonucleotide
  Target: COL7A1; (+) strand; PAM type: NRG; PAM sequence: AGG
caacccctaagagagaagtc

SEQ ID NO: 21685 - DNA, 20 bp, Artificial Sequence
  Description of Artificial Sequence: Synthetic oligonucleotide
  Target: COL7A1; (+) strand; PAM type: NRG; PAM sequence: GGG
aacccctaagagagaagtca

SEQ ID NO: 21686 - DNA, 20 bp, Artificial Sequence
  Description of Artificial Sequence: Synthetic oligonucleotide
  Target: COL7A1; (+) strand; PAM type: NRG; PAM sequence: TAG
ccctaagagagaagtcaggg

SEQ ID NO: 21687 - DNA, 20 bp, Artificial Sequence
  Description of Artificial Sequence: Synthetic oligonucleotide
  Target: COL7A1; (+) strand; PAM type: NRG; PAM sequence: AGG
cctaagagagaagtcagggt

SEQ ID NO: 21688 - DNA, 20 bp, Artificial Sequence
  Description of Artificial Sequence: Synthetic oligonucleotide
  Target: COL7A1; (+) strand; PAM type: NRG; PAM sequence: TGG
aagagagaagtcagggtagg

SEQ ID NO: 21689 - DNA, 20 bp, Artificial Sequence
  Description of Artificial Sequence: Synthetic oligonucleotide
  Target: COL7A1; (+) strand; PAM type: NRG; PAM sequence: GGG
agagagaagtcagggtaggt

SEQ ID NO: 21690 - DNA, 20 bp, Artificial Sequence
  Description of Artificial Sequence: Synthetic oligonucleotide
  Target: COL7A1; (+) strand; PAM type: NRG; PAM sequence: CAG
gagaagtcagggtaggtggg

SEQ ID NO: 21691 - DNA, 20 bp, Artificial Sequence
  Description of Artificial Sequence: Synthetic oligonucleotide
  Target: COL7A1; (+) strand; PAM type: NRG; PAM sequence: AGG
agaagtcagggtaggtgggc

SEQ ID NO: 21692 - DNA, 20 bp, Artificial Sequence
  Description of Artificial Sequence: Synthetic oligonucleotide
  Target: COL7A1; (+) strand; PAM type: NRG; PAM sequence: GGG
gaagtcagggtaggtgggca

SEQ ID NO: 21693 - DNA, 20 bp, Artificial Sequence
  Description of Artificial Sequence: Synthetic oligonucleotide
  Target: COL7A1; (+) strand; PAM type: NRG; PAM sequence: GGG
aagtcagggtaggtgggcag

SEQ ID NO: 21694 - DNA, 20 bp, Artificial Sequence
  Description of Artificial Sequence: Synthetic oligonucleotide
  Target: COL7A1; (+) strand; PAM type: NRG; PAM sequence: CAG
cagggtaggtgggcaggggt

SEQ ID NO: 21695 - DNA, 20 bp, Artificial Sequence
  Description of Artificial Sequence: Synthetic oligonucleotide
  Target: COL7A1; (+) strand; PAM type: NRG; PAM sequence: AAG
gtaggtgggcaggggtcaga

SEQ ID NO: 21696 - DNA, 20 bp, Artificial Sequence
  Description of Artificial Sequence: Synthetic oligonucleotide
  Target: COL7A1; (+) strand; PAM type: NRG; PAM sequence: GAG
aggtgggcaggggtcagaaa

SEQ ID NO: 21697 - DNA, 20 bp, Artificial Sequence
  Description of Artificial Sequence: Synthetic oligonucleotide
  Target: COL7A1; (+) strand; PAM type: NRG; PAM sequence: CAG
gggcaggggtcagaaagaga

SEQ ID NO: 21698 - DNA, 20 bp, Artificial Sequence
  Description of Artificial Sequence: Synthetic oligonucleotide
  Target: COL7A1; (+) strand; PAM type: NRG; PAM sequence: AGG
ggcaggggtcagaaagagac

SEQ ID NO: 21699 - DNA, 20 bp, Artificial Sequence
  Description of Artificial Sequence: Synthetic oligonucleotide
  Target: COL7A1; (+) strand; PAM type: NRG; PAM sequence: GGG
gcaggggtcagaaagagaca

SEQ ID NO: 21700 - DNA, 20 bp, Artificial Sequence
  Description of Artificial Sequence: Synthetic oligonucleotide
  Target: COL7A1; (+) strand; PAM type: NRG; PAM sequence: TGG
gtcagaaagagacagggatg

SEQ ID NO: 21701 - DNA, 20 bp, Artificial Sequence
  Description of Artificial Sequence: Synthetic oligonucleotide
  Target: COL7A1; (+) strand; PAM type: NRG; PAM sequence: GGG
tcagaaagagacagggatgt

SEQ ID NO: 21702 - DNA, 20 bp, Artificial Sequence
  Description of Artificial Sequence: Synthetic oligonucleotide
  Target: COL7A1; (+) strand; PAM type: NRG; PAM sequence: TGG
gagacagggatgtgggacga

SEQ ID NO: 21703 - DNA, 20 bp, Artificial Sequence
  Description of Artificial Sequence: Synthetic oligonucleotide
  Target: COL7A1; (+) strand; PAM type: NRG; PAM sequence: CAG
acagggatgtgggacgatgg

SEQ ID NO: 21704 - DNA, 20 bp, Artificial Sequence
  Description of Artificial Sequence: Synthetic oligonucleotide
  Target: COL7A1; (+) strand; PAM type: NRG; PAM sequence: TGG
atgtgggacgatggcagtga

SEQ ID NO: 21705 - DNA, 20 bp, Artificial Sequence
  Description of Artificial Sequence: Synthetic oligonucleotide
  Target: COL7A1; (+) strand; PAM type: NRG; PAM sequence: CAG
gggacgatggcagtgatgga

SEQ ID NO: 21706 - DNA, 20 bp, Artificial Sequence
  Description of Artificial Sequence: Synthetic oligonucleotide
  Target: COL7A1; (+) strand; PAM type: NRG; PAM sequence: AGG
ggacgatggcagtgatggac

SEQ ID NO: 21707 - DNA, 20 bp, Artificial Sequence
  Description of Artificial Sequence: Synthetic oligonucleotide
  Target: COL7A1; (+) strand; PAM type: NRG; PAM sequence: GGG
gacgatggcagtgatggaca

SEQ ID NO: 21708 - DNA, 20 bp, Artificial Sequence
  Description of Artificial Sequence: Synthetic oligonucleotide
  Target: COL7A1; (+) strand; PAM type: NRG; PAM sequence: CAG
ggcagtgatggacagggacg

SEQ ID NO: 21709 - DNA, 20 bp, Artificial Sequence
  Description of Artificial Sequence: Synthetic oligonucleotide
  Target: COL7A1; (+) strand; PAM type: NRG; PAM sequence: GAG
cagtgatggacagggacgca

SEQ ID NO: 21710 - DNA, 20 bp, Artificial Sequence
  Description of Artificial Sequence: Synthetic oligonucleotide
  Target: COL7A1; (+) strand; PAM type: NRG; PAM sequence: GAG
gatggacagggacgcagagt

SEQ ID NO: 21711 - DNA, 20 bp, Artificial Sequence
  Description of Artificial Sequence: Synthetic oligonucleotide
  Target: COL7A1; (+) strand; PAM type: NRG; PAM sequence: AAG
ggacagggacgcagagtgag

SEQ ID NO: 21712 - DNA, 20 bp, Artificial Sequence
  Description of Artificial Sequence: Synthetic oligonucleotide
  Target: COL7A1; (+) strand; PAM type: NRG; PAM sequence: AGG
gacagggacgcagagtgaga

SEQ ID NO: 21713 - DNA, 20 bp, Artificial Sequence
  Description of Artificial Sequence: Synthetic oligonucleotide
  Target: COL7A1; (+) strand; PAM type: NRG; PAM sequence: GGG
acagggacgcagagtgagaa

SEQ ID NO: 21714 - DNA, 20 bp, Artificial Sequence
  Description of Artificial Sequence: Synthetic oligonucleotide
  Target: COL7A1; (+) strand; PAM type: NRG; PAM sequence: TGG
acgcagagtgagaagggcca

SEQ ID NO: 21715 - DNA, 20 bp, Artificial Sequence
  Description of Artificial Sequence: Synthetic oligonucleotide
  Target: COL7A1; (+) strand; PAM type: NRG; PAM sequence: GGG
cgcagagtgagaagggccat

SEQ ID NO: 21716 - DNA, 20 bp, Artificial Sequence
  Description of Artificial Sequence: Synthetic oligonucleotide
  Target: COL7A1; (+) strand; PAM type: NRG; PAM sequence: GGG
gcagagtgagaagggccatg

SEQ ID NO: 21717 - DNA, 20 bp, Artificial Sequence
  Description of Artificial Sequence: Synthetic oligonucleotide
  Target: COL7A1; (+) strand; PAM type: NRG; PAM sequence: GGG
cagagtgagaagggccatgg

SEQ ID NO: 21718 - DNA, 20 bp, Artificial Sequence
  Description of Artificial Sequence: Synthetic oligonucleotide
  Target: COL7A1; (+) strand; PAM type: NRG; PAM sequence: TGG
agtgagaagggccatggggg

SEQ ID NO: 21719 - DNA, 20 bp, Artificial Sequence
  Description of Artificial Sequence: Synthetic oligonucleotide
  Target: COL7A1; (+) strand; PAM type: NRG; PAM sequence: GGG
gtgagaagggccatgggggt

SEQ ID NO: 21720 - DNA, 20 bp, Artificial Sequence
  Description of Artificial Sequence: Synthetic oligonucleotide
  Target: COL7A1; (+) strand; PAM type: NRG; PAM sequence: GGG
tgagaagggccatgggggtg

SEQ ID NO: 21721 - DNA, 20 bp, Artificial Sequence
  Description of Artificial Sequence: Synthetic oligonucleotide
  Target: COL7A1; (+) strand; PAM type: NRG; PAM sequence: TGG
gggccatgggggtggggatg

SEQ ID NO: 21722 - DNA, 20 bp, Artificial Sequence
  Description of Artificial Sequence: Synthetic oligonucleotide
  Target: COL7A1; (+) strand; PAM type: NRG; PAM sequence: GGG
ggccatgggggtggggatgt

SEQ ID NO: 21723 - DNA, 20 bp, Artificial Sequence
  Description of Artificial Sequence: Synthetic oligonucleotide
  Target: COL7A1; (+) strand; PAM type: NRG; PAM sequence: GGG
gccatgggggtggggatgtg

SEQ ID NO: 21724 - DNA, 20 bp, Artificial Sequence
  Description of Artificial Sequence: Synthetic oligonucleotide
  Target: COL7A1; (+) strand; PAM type: NRG; PAM sequence: TGG
atgggggtggggatgtgggg

SEQ ID NO: 21725 - DNA, 20 bp, Artificial Sequence
  Description of Artificial Sequence: Synthetic oligonucleotide
  Target: COL7A1; (+) strand; PAM type: NRG; PAM sequence: TGG
ggggtggggatgtggggtgg

SEQ ID NO: 21726 - DNA, 20 bp, Artificial Sequence
  Description of Artificial Sequence: Synthetic oligonucleotide
  Target: COL7A1; (+) strand; PAM type: NRG; PAM sequence: GGG
gggtggggatgtggggtggt

SEQ ID NO: 21727 - DNA, 20 bp, Artificial Sequence
  Description of Artificial Sequence: Synthetic oligonucleotide
  Target: COL7A1; (+) strand; PAM type: NRG; PAM sequence: GGG
ggtggggatgtggggtggtg

SEQ ID NO: 21728 - DNA, 20 bp, Artificial Sequence
  Description of Artificial Sequence: Synthetic oligonucleotide
  Target: COL7A1; (+) strand; PAM type: NRG; PAM sequence: CAG
ggatgtggggtggtggggac

SEQ ID NO: 21729 - DNA, 20 bp, Artificial Sequence
  Description of Artificial Sequence: Synthetic oligonucleotide
  Target: COL7A1; (+) strand; PAM type: NRG; PAM sequence: GAG
atgtggggtggtggggacca

SEQ ID NO: 21730 - DNA, 20 bp, Artificial Sequence
  Description of Artificial Sequence: Synthetic oligonucleotide
  Target: COL7A1; (+) strand; PAM type: NRG; PAM sequence: GAG
gtggggtggtggggaccaga

SEQ ID NO: 21731 - DNA, 20 bp, Artificial Sequence
  Description of Artificial Sequence: Synthetic oligonucleotide
  Target: COL7A1; (+) strand; PAM type: NRG; PAM sequence: TGG
ggtggtggggaccagagagc

SEQ ID NO: 21732 - DNA, 20 bp, Artificial Sequence
  Description of Artificial Sequence: Synthetic oligonucleotide
  Target: COL7A1; (+) strand; PAM type: NRG; PAM sequence: GGG
gtggtggggaccagagagct

SEQ ID NO: 21733 - DNA, 20 bp, Artificial Sequence
  Description of Artificial Sequence: Synthetic oligonucleotide
  Target: COL7A1; (+) strand; PAM type: NRG; PAM sequence: TGG
gggaccagagagctgggata

SEQ ID NO: 21734 - DNA, 20 bp, Artificial Sequence
  Description of Artificial Sequence: Synthetic oligonucleotide
  Target: COL7A1; (+) strand; PAM type: NRG; PAM sequence: AAG
agctgggatatggctgaaaa

SEQ ID NO: 21735 - DNA, 20 bp, Artificial Sequence
  Description of Artificial Sequence: Synthetic oligonucleotide
  Target: COL7A1; (+) strand; PAM type: NRG; PAM sequence: GAG
gggatatggctgaaaaaagt

SEQ ID NO: 21736 - DNA, 20 bp, Artificial Sequence
  Description of Artificial Sequence: Synthetic oligonucleotide
  Target: COL7A1; (+) strand; PAM type: NRG; PAM sequence: AAG
tggctgaaaaaagtgagtgc

SEQ ID NO: 21737 - DNA, 20 bp, Artificial Sequence
  Description of Artificial Sequence: Synthetic oligonucleotide
  Target: COL7A1; (+) strand; PAM type: NRG; PAM sequence: AAG
gaaaaaagtgagtgcaagac

SEQ ID NO: 21738 - DNA, 20 bp, Artificial Sequence
  Description of Artificial Sequence: Synthetic oligonucleotide
  Target: COL7A1; (+) strand; PAM type: NRG; PAM sequence: AGG
aaaaaagtgagtgcaagaca

SEQ ID NO: 21739 - DNA, 20 bp, Artificial Sequence
  Description of Artificial Sequence: Synthetic oligonucleotide
  Target: COL7A1; (+) strand; PAM type: NRG; PAM sequence: TAG
gtgagtgcaagacaaggaca

SEQ ID NO: 21740 - DNA, 20 bp, Artificial Sequence
  Description of Artificial Sequence: Synthetic oligonucleotide
  Target: COL7A1; (+) strand; PAM type: NRG; PAM sequence: AGG
tgagtgcaagacaaggacat

SEQ ID NO: 21741 - DNA, 20 bp, Artificial Sequence
  Description of Artificial Sequence: Synthetic oligonucleotide
  Target: COL7A1; (+) strand; PAM type: NRG; PAM sequence: AAG
aagacaaggacataggatga

SEQ ID NO: 21742 - DNA, 20 bp, Artificial Sequence
  Description of Artificial Sequence: Synthetic oligonucleotide
  Target: COL7A1; (+) strand; PAM type: NRG; PAM sequence: AGG
agacaaggacataggatgaa

SEQ ID NO: 21743 - DNA, 20 bp, Artificial Sequence
  Description of Artificial Sequence: Synthetic oligonucleotide
  Target: COL7A1; (+) strand; PAM type: NRG; PAM sequence: GGG
gacaaggacataggatgaaa

SEQ ID NO: 21744 - DNA, 20 bp, Artificial Sequence
  Description of Artificial Sequence: Synthetic oligonucleotide
  Target: COL7A1; (+) strand; PAM type: NRG; PAM sequence: GGG
acaaggacataggatgaaag

SEQ ID NO: 21745 - DNA, 20 bp, Artificial Sequence
  Description of Artificial Sequence: Synthetic oligonucleotide
  Target: COL7A1; (+) strand; PAM type: NRG; PAM sequence: CAG
ggacataggatgaaaggggc

SEQ ID NO: 21746 - DNA, 20 bp, Artificial Sequence
  Description of Artificial Sequence: Synthetic oligonucleotide
  Target: COL7A1; (+) strand; PAM type: NRG; PAM sequence: TGG
aggatgaaaggggccagtga

SEQ ID NO: 21747 - DNA, 20 bp, Artificial Sequence
  Description of Artificial Sequence: Synthetic oligonucleotide
  Target: COL7A1; (+) strand; PAM type: NRG; PAM sequence: CAG
tgaaaggggccagtgatggt

SEQ ID NO: 21748 - DNA, 20 bp, Artificial Sequence
  Description of Artificial Sequence: Synthetic oligonucleotide
  Target: COL7A1; (+) strand; PAM type: NRG; PAM sequence: AGG
gaaaggggccagtgatggtc

SEQ ID NO: 21749 - DNA, 20 bp, Artificial Sequence
  Description of Artificial Sequence: Synthetic oligonucleotide
  Target: COL7A1; (+) strand; PAM type: NRG; PAM sequence: GGG
aaaggggccagtgatggtca

SEQ ID NO: 21750 - DNA, 20 bp, Artificial Sequence
  Description of Artificial Sequence: Synthetic oligonucleotide
  Target: COL7A1; (+) strand; PAM type: NRG; PAM sequence: TGG
ccagtgatggtcagggacac

SEQ ID NO: 21751 - DNA, 20 bp, Artificial Sequence
  Description of Artificial Sequence: Synthetic oligonucleotide
  Target: COL7A1; (+) strand; PAM type: NRG; PAM sequence: GAG
agtgatggtcagggacactg

SEQ ID NO: 21752 - DNA, 20 bp, Artificial Sequence
  Description of Artificial Sequence: Synthetic oligonucleotide
  Target: COL7A1; (+) strand; PAM type: NRG; PAM sequence: AGG
gtgatggtcagggacactgg

SEQ ID NO: 21753 - DNA, 20 bp, Artificial Sequence
  Description of Artificial Sequence: Synthetic oligonucleotide
  Target: COL7A1; (+) strand; PAM type: NRG; PAM sequence: CAG
tggtcagggacactggagga

SEQ ID NO: 21754 - DNA, 20 bp, Artificial Sequence
  Description of Artificial Sequence: Synthetic oligonucleotide
  Target: COL7A1; (+) strand; PAM type: NRG; PAM sequence: AGG
ggtcagggacactggaggac

SEQ ID NO: 21755 - DNA, 20 bp, Artificial Sequence
  Description of Artificial Sequence: Synthetic oligonucleotide
  Target: COL7A1; (+) strand; PAM type: NRG; PAM sequence: GAG
tcagggacactggaggacag

SEQ ID NO: 21756 - DNA, 20 bp, Artificial Sequence
  Description of Artificial Sequence: Synthetic oligonucleotide
  Target: COL7A1; (+) strand; PAM type: NRG; PAM sequence: TGG
cactggaggacaggagtctg

SEQ ID NO: 21757 - DNA, 20 bp, Artificial Sequence
  Description of Artificial Sequence: Synthetic oligonucleotide
  Target: COL7A1; (+) strand; PAM type: NRG; PAM sequence: GGG
actggaggacaggagtctgt

SEQ ID NO: 21758 - DNA, 20 bp, Artificial Sequence
  Description of Artificial Sequence: Synthetic oligonucleotide
  Target: COL7A1; (+) strand; PAM type: NRG; PAM sequence: TAG
gacaggagtctgtgggatct

SEQ ID NO: 21759 - DNA, 20 bp, Artificial Sequence
  Description of Artificial Sequence: Synthetic oligonucleotide
  Target: COL7A1; (+) strand; PAM type: NRG; PAM sequence: TAG
gtctgtgggatcttagcatg

SEQ ID NO: 21760 - DNA, 20 bp, Artificial Sequence
  Description of Artificial Sequence: Synthetic oligonucleotide
  Target: COL7A1; (+) strand; PAM type: NRG; PAM sequence: AGG
tctgtgggatcttagcatgt

SEQ ID NO: 21761 - DNA, 20 bp, Artificial Sequence
  Description of Artificial Sequence: Synthetic oligonucleotide
  Target: COL7A1; (+) strand; PAM type: NRG; PAM sequence: CAG
gatcttagcatgtaggatga

SEQ ID NO: 21762 - DNA, 20 bp, Artificial Sequence
  Description of Artificial Sequence: Synthetic oligonucleotide
  Target: COL7A1; (+) strand; PAM type: NRG; PAM sequence: AGG
atcttagcatgtaggatgac

SEQ ID NO: 21763 - DNA, 20 bp, Artificial Sequence
  Description of Artificial Sequence: Synthetic oligonucleotide
  Target: COL7A1; (+) strand; PAM type: NRG; PAM sequence: GAG
cttagcatgtaggatgacag

SEQ ID NO: 21764 - DNA, 20 bp, Artificial Sequence
  Description of Artificial Sequence: Synthetic oligonucleotide
  Target: COL7A1; (+) strand; PAM type: NRG; PAM sequence: CAG
gcatgtaggatgacaggagt

SEQ ID NO: 21765 - DNA, 20 bp, Artificial Sequence
  Description of Artificial Sequence: Synthetic oligonucleotide
  Target: COL7A1; (+) strand; PAM type: NRG; PAM sequence: TGG
tgtaggatgacaggagtcag

SEQ ID NO: 21766 - DNA, 20 bp, Artificial Sequence
  Description of Artificial Sequence: Synthetic oligonucleotide
  Target: COL7A1; (+) strand; PAM type: NRG; PAM sequence: CAG
tgacaggagtcagtggactg

SEQ ID NO: 21767 - DNA, 20 bp, Artificial Sequence
  Description of Artificial Sequence: Synthetic oligonucleotide
  Target: COL7A1; (+) strand; PAM type: NRG; PAM sequence: GAG
aggagtcagtggactgcagt

SEQ ID NO: 21768 - DNA, 20 bp, Artificial Sequence
  Description of Artificial Sequence: Synthetic oligonucleotide
  Target: COL7A1; (+) strand; PAM type: NRG; PAM sequence: GAG
ggactgcagtgagaactgat

SEQ ID NO: 21769 - DNA, 20 bp, Artificial Sequence
  Description of Artificial Sequence: Synthetic oligonucleotide
  Target: COL7A1; (+) strand; PAM type: NRG; PAM sequence: CAG
gagaactgatgagccattga

SEQ ID NO: 21770 - DNA, 20 bp, Artificial Sequence
  Description of Artificial Sequence: Synthetic oligonucleotide
  Target: COL7A1; (+) strand; PAM type: NRG; PAM sequence: TGG
gccattgacagacactgatg

SEQ ID NO: 21771 - DNA, 20 bp, Artificial Sequence
  Description of Artificial Sequence: Synthetic oligonucleotide
  Target: COL7A1; (+) strand; PAM type: NRG; PAM sequence: GGG
ccattgacagacactgatgt

SEQ ID NO: 21772 - DNA, 20 bp, Artificial Sequence
  Description of Artificial Sequence: Synthetic oligonucleotide
  Target: COL7A1; (+) strand; PAM type: NRG; PAM sequence: TGG
tgacagacactgatgtggga

SEQ ID NO: 21773 - DNA, 20 bp, Artificial Sequence
  Description of Artificial Sequence: Synthetic oligonucleotide
  Target: COL7A1; (+) strand; PAM type: NRG; PAM sequence: CAG
cagacactgatgtgggatgg

SEQ ID NO: 21774 - DNA, 20 bp, Artificial Sequence
  Description of Artificial Sequence: Synthetic oligonucleotide
  Target: COL7A1; (+) strand; PAM type: NRG; PAM sequence: GAG
gacactgatgtgggatggca

SEQ ID NO: 21775 - DNA, 20 bp, Artificial Sequence
  Description of Artificial Sequence: Synthetic oligonucleotide
  Target: COL7A1; (+) strand; PAM type: NRG; PAM sequence: AGG
acactgatgtgggatggcag

SEQ ID NO: 21776 - DNA, 20 bp, Artificial Sequence
  Description of Artificial Sequence: Synthetic oligonucleotide
  Target: COL7A1; (+) strand; PAM type: NRG; PAM sequence: CAG
tgatgtgggatggcagaggt

SEQ ID NO: 21777 - DNA, 20 bp, Artificial Sequence
  Description of Artificial Sequence: Synthetic oligonucleotide
  Target: COL7A1; (+) strand; PAM type: NRG; PAM sequence: TGG
gggatggcagaggtcagtgc

SEQ ID NO: 21778 - DNA, 20 bp, Artificial Sequence
  Description of Artificial Sequence: Synthetic oligonucleotide
  Target: COL7A1; (+) strand; PAM type: NRG; PAM sequence: TGG
tggcagaggtcagtgctgga

SEQ ID NO: 21779 - DNA, 20 bp, Artificial Sequence
  Description of Artificial Sequence: Synthetic oligonucleotide
  Target: COL7A1; (+) strand; PAM type: NRG; PAM sequence: GGG
ggcagaggtcagtgctggat

SEQ ID NO: 21780 - DNA, 20 bp, Artificial Sequence
  Description of Artificial Sequence: Synthetic oligonucleotide
  Target: COL7A1; (+) strand; PAM type: NRG; PAM sequence: GGG
gcagaggtcagtgctggatg

SEQ ID NO: 21781 - DNA, 20 bp, Artificial Sequence
  Description of Artificial Sequence: Synthetic oligonucleotide
  Target: COL7A1; (+) strand; PAM type: NRG; PAM sequence: GAG
gctggatggggacatgcaat

SEQ ID NO: 21782 - DNA, 20 bp, Artificial Sequence
  Description of Artificial Sequence: Synthetic oligonucleotide
  Target: COL7A1; (+) strand; PAM type: NRG; PAM sequence: GAG
tggatggggacatgcaatga

SEQ ID NO: 21783 - DNA, 20 bp, Artificial Sequence
  Description of Artificial Sequence: Synthetic oligonucleotide
  Target: COL7A1; (+) strand; PAM type: NRG; PAM sequence: AGG
ggatggggacatgcaatgag

SEQ ID NO: 21784 - DNA, 20 bp, Artificial Sequence
  Description of Artificial Sequence: Synthetic oligonucleotide
  Target: COL7A1; (+) strand; PAM type: NRG; PAM sequence: TGG
ggggacatgcaatgagaggt

SEQ ID NO: 21785 - DNA, 20 bp, Artificial Sequence
  Description of Artificial Sequence: Synthetic oligonucleotide
  Target: COL7A1; (+) strand; PAM type: NRG; PAM sequence: CAG
tgcaatgagaggttggtgta

SEQ ID NO: 21786 - DNA, 20 bp, Artificial Sequence
  Description of Artificial Sequence: Synthetic oligonucleotide
  Target: COL7A1; (+) strand; PAM type: NRG; PAM sequence: TGG
aatgagaggttggtgtacag

SEQ ID NO: 21787 - DNA, 20 bp, Artificial Sequence
  Description of Artificial Sequence: Synthetic oligonucleotide
  Target: COL7A1; (+) strand; PAM type: NRG; PAM sequence: TAG
tggtgtacagtggtcaccac

SEQ ID NO: 21788 - DNA, 20 bp, Artificial Sequence
  Description of Artificial Sequence: Synthetic oligonucleotide
  Target: COL7A1; (+) strand; PAM type: NRG; PAM sequence: AGG
ggtgtacagtggtcaccact

SEQ ID NO: 21789 - DNA, 20 bp, Artificial Sequence
  Description of Artificial Sequence: Synthetic oligonucleotide
  Target: COL7A1; (+) strand; PAM type: NRG; PAM sequence: GGG
gtgtacagtggtcaccacta

SEQ ID NO: 21790 - DNA, 20 bp, Artificial Sequence
  Description of Artificial Sequence: Synthetic oligonucleotide
  Target: COL7A1; (+) strand; PAM type: NRG; PAM sequence: CAG
agtggtcaccactagggtaa

SEQ ID NO: 21791 - DNA, 20 bp, Artificial Sequence
  Description of Artificial Sequence: Synthetic oligonucleotide
  Target: COL7A1; (+) strand; PAM type: NRG; PAM sequence: AAG
gtcaccactagggtaacaga

SEQ ID NO: 21792 - DNA, 20 bp, Artificial Sequence
  Description of Artificial Sequence: Synthetic oligonucleotide
  Target: COL7A1; (+) strand; PAM type: NRG; PAM sequence: CAG
ccactagggtaacagaaaga

SEQ ID NO: 21793 - DNA, 20 bp, Artificial Sequence
  Description of Artificial Sequence: Synthetic oligonucleotide
  Target: COL7A1; (+) strand; PAM type: NRG; PAM sequence: AGG
cactagggtaacagaaagac

SEQ ID NO: 21794 - DNA, 20 bp, Artificial Sequence
  Description of Artificial Sequence: Synthetic oligonucleotide
  Target: COL7A1; (+) strand; PAM type: NRG; PAM sequence: GAG
taacagaaagacaggtgatt

SEQ ID NO: 21795 - DNA, 20 bp, Artificial Sequence
  Description of Artificial Sequence: Synthetic oligonucleotide
  Target: COL7A1; (+) strand; PAM type: NRG; PAM sequence: TGG
aagacaggtgattgagcttg

SEQ ID NO: 21796 - DNA, 20 bp, Artificial Sequence
  Description of Artificial Sequence: Synthetic oligonucleotide
  Target: COL7A1; (+) strand; PAM type: NRG; PAM sequence: CAG
tgattgagcttgtggctgtg

SEQ ID NO: 21797 - DNA, 20 bp, Artificial Sequence
  Description of Artificial Sequence: Synthetic oligonucleotide
  Target: COL7A1; (+) strand; PAM type: NRG; PAM sequence: GAG
attgagcttgtggctgtgca

SEQ ID NO: 21798 - DNA, 20 bp, Artificial Sequence
  Description of Artificial Sequence: Synthetic oligonucleotide
  Target: COL7A1; (+) strand; PAM type: NRG; PAM sequence: AGG
ttgagcttgtggctgtgcag

SEQ ID NO: 21799 - DNA, 20 bp, Artificial Sequence
  Description of Artificial Sequence: Synthetic oligonucleotide
  Target: COL7A1; (+) strand; PAM type: NRG; PAM sequence: AAG
ttgtggctgtgcagaggtga

SEQ ID NO: 21800 - DNA, 20 bp, Artificial Sequence
  Description of Artificial Sequence: Synthetic oligonucleotide
  Target: COL7A1; (+) strand; PAM type: NRG; PAM sequence: TGG
ctgtgcagaggtgaaagccg

SEQ ID NO: 21801 - DNA, 20 bp, Artificial Sequence
  Description of Artificial Sequence: Synthetic oligonucleotide
  Target: COL7A1; (+) strand; PAM type: NRG; PAM sequence: TGG
gcagaggtgaaagccgtgga

SEQ ID NO: 21802 - DNA, 20 bp, Artificial Sequence
  Description of Artificial Sequence: Synthetic oligonucleotide
  Target: COL7A1; (+) strand; PAM type: NRG; PAM sequence: GGG
cagaggtgaaagccgtggat

SEQ ID NO: 21803 - DNA, 20 bp, Artificial Sequence
  Description of Artificial Sequence: Synthetic oligonucleotide
  Target: COL7A1; (+) strand; PAM type: NRG; PAM sequence: GGG
agaggtgaaagccgtggatg

SEQ ID NO: 21804 - DNA, 20 bp, Artificial Sequence
  Description of Artificial Sequence: Synthetic oligonucleotide
  Target: COL7A1; (+) strand; PAM type: NRG; PAM sequence: TGG
tgaaagccgtggatggggtg

SEQ ID NO: 21805 - DNA, 20 bp, Artificial Sequence
  Description of Artificial Sequence: Synthetic oligonucleotide
  Target: COL7A1; (+) strand; PAM type: NRG; PAM sequence: GGG
gaaagccgtggatggggtgt

SEQ ID NO: 21806 - DNA, 20 bp, Artificial Sequence
  Description of Artificial Sequence: Synthetic oligonucleotide
  Target: COL7A1; (+) strand; PAM type: NRG; PAM sequence: GGG
aaagccgtggatggggtgtg

SEQ ID NO: 21807 - DNA, 20 bp, Artificial Sequence
  Description of Artificial Sequence: Synthetic oligonucleotide
  Target: COL7A1; (+) strand; PAM type: NRG; PAM sequence: CAG
gccgtggatggggtgtgggg

SEQ ID NO: 21808 - DNA, 20 bp, Artificial Sequence
  Description of Artificial Sequence: Synthetic oligonucleotide
  Target: COL7A1; (+) strand; PAM type: NRG; PAM sequence: AGG
ccgtggatggggtgtggggc

SEQ ID NO: 21809 - DNA, 20 bp, Artificial Sequence
  Description of Artificial Sequence: Synthetic oligonucleotide
  Target: COL7A1; (+) strand; PAM type: NRG; PAM sequence: GGG
cgtggatggggtgtggggca

SEQ ID NO: 21810 - DNA, 20 bp, Artificial Sequence
  Description of Artificial Sequence: Synthetic oligonucleotide
  Target: COL7A1; (+) strand; PAM type: NRG; PAM sequence: GAG
tggatggggtgtggggcagg

SEQ ID NO: 21811 - DNA, 20 bp, Artificial Sequence
  Description of Artificial Sequence: Synthetic oligonucleotide
  Target: COL7A1; (+) strand; PAM type: NRG; PAM sequence: AGG
ggatggggtgtggggcaggg

SEQ ID NO: 21812 - DNA, 20 bp, Artificial Sequence
  Description of Artificial Sequence: Synthetic oligonucleotide
  Target: COL7A1; (+) strand; PAM type: NRG; PAM sequence: GAG
atggggtgtggggcagggag

SEQ ID NO: 21813 - DNA, 20 bp, Artificial Sequence
  Description of Artificial Sequence: Synthetic oligonucleotide
  Target: COL7A1; (+) strand; PAM type: NRG; PAM sequence: TGG
gtgtggggcagggaggagat

SEQ ID NO: 21814 - DNA, 20 bp, Artificial Sequence
  Description of Artificial Sequence: Synthetic oligonucleotide
  Target: COL7A1; (+) strand; PAM type: NRG; PAM sequence: TGG
ggggcagggaggagattggt

SEQ ID NO: 21815 - DNA, 20 bp, Artificial Sequence
  Description of Artificial Sequence: Synthetic oligonucleotide
  Target: COL7A1; (+) strand; PAM type: NRG; PAM sequence: GGG
gggcagggaggagattggtt

SEQ ID NO: 21816 - DNA, 20 bp, Artificial Sequence
  Description of Artificial Sequence: Synthetic oligonucleotide
  Target: COL7A1; (+) strand; PAM type: NRG; PAM sequence: GGG
ggcagggaggagattggttg

SEQ ID NO: 21817 - DNA, 20 bp, Artificial Sequence
  Description of Artificial Sequence: Synthetic oligonucleotide
  Target: COL7A1; (+) strand; PAM type: NRG; PAM sequence: TAG
agggaggagattggttgggg

SEQ ID NO: 21818 - DNA, 20 bp, Artificial Sequence
  Description of Artificial Sequence: Synthetic oligonucleotide
  Target: COL7A1; (+) strand; PAM type: NRG; PAM sequence: AGG
gggaggagattggttggggt

SEQ ID NO: 21819 - DNA, 20 bp, Artificial Sequence
  Description of Artificial Sequence: Synthetic oligonucleotide
  Target: COL7A1; (+) strand; PAM type: NRG; PAM sequence: GGG
ggaggagattggttggggta

SEQ ID NO: 21820 - DNA, 20 bp, Artificial Sequence
  Description of Artificial Sequence: Synthetic oligonucleotide
  Target: COL7A1; (+) strand; PAM type: NRG; PAM sequence: TAG
ggagattggttggggtaggg

SEQ ID NO: 21821 - DNA, 20 bp, Artificial Sequence
  Description of Artificial Sequence: Synthetic oligonucleotide
  Target: COL7A1; (+) strand; PAM type: NRG; PAM sequence: AGG
gagattggttggggtagggt

SEQ ID NO: 21822 - DNA, 20 bp, Artificial Sequence
  Description of Artificial Sequence: Synthetic oligonucleotide
  Target: COL7A1; (+) strand; PAM type: NRG; PAM sequence: GGG
agattggttggggtagggta

SEQ ID NO: 21823 - DNA, 20 bp, Artificial Sequence
  Description of Artificial Sequence: Synthetic oligonucleotide
  Target: COL7A1; (+) strand; PAM type: NRG; PAM sequence: GGG
gattggttggggtagggtag

SEQ ID NO: 21824 - DNA, 20 bp, Artificial Sequence
  Description of Artificial Sequence: Synthetic oligonucleotide
  Target: COL7A1; (+) strand; PAM type: NRG; PAM sequence: CAG
tggttggggtagggtagggg

SEQ ID NO: 21825 - DNA, 20 bp, Artificial Sequence
  Description of Artificial Sequence: Synthetic oligonucleotide
  Target: COL7A1; (+) strand; PAM type: NRG; PAM sequence: CAG
gggcagacacaccctgttga

SEQ ID NO: 21826 - DNA, 20 bp, Artificial Sequence
  Description of Artificial Sequence: Synthetic oligonucleotide
  Target: COL7A1; (+) strand; PAM type: NRG; PAM sequence: CAG
gacacaccctgttgacagtt

SEQ ID NO: 21827 - DNA, 20 bp, Artificial Sequence
  Description of Artificial Sequence: Synthetic oligonucleotide
  Target: COL7A1; (+) strand; PAM type: NRG; PAM sequence: AGG
acacaccctgttgacagttc

SEQ ID NO: 21828 - DNA, 20 bp, Artificial Sequence
  Description of Artificial Sequence: Synthetic oligonucleotide
  Target: COL7A1; (+) strand; PAM type: NRG; PAM sequence: GGG
cacaccctgttgacagttca

SEQ ID NO: 21829 - DNA, 20 bp, Artificial Sequence
  Description of Artificial Sequence: Synthetic oligonucleotide
  Target: COL7A1; (+) strand; PAM type: NRG; PAM sequence: CAG
cctgttgacagttcagggct

SEQ ID NO: 21830 - DNA, 20 bp, Artificial Sequence
  Description of Artificial Sequence: Synthetic oligonucleotide
  Target: COL7A1; (+) strand; PAM type: NRG; PAM sequence: TGG
ttcagggctcagtgccatct

SEQ ID NO: 21831 - DNA, 20 bp, Artificial Sequence
  Description of Artificial Sequence: Synthetic oligonucleotide
  Target: COL7A1; (+) strand; PAM type: NRG; PAM sequence: GGG
tcagggctcagtgccatctt

SEQ ID NO: 21832 - DNA, 20 bp, Artificial Sequence
  Description of Artificial Sequence: Synthetic oligonucleotide
  Target: COL7A1; (+) strand; PAM type: NRG; PAM sequence: AAG
gggctcagtgccatcttggg

SEQ ID NO: 21833 - DNA, 20 bp, Artificial Sequence
  Description of Artificial Sequence: Synthetic oligonucleotide
  Target: COL7A1; (+) strand; PAM type: NRG; PAM sequence: CAG
ctcagtgccatcttgggaag

SEQ ID NO: 21834 - DNA, 20 bp, Artificial Sequence
  Description of Artificial Sequence: Synthetic oligonucleotide
  Target: COL7A1; (+) strand; PAM type: NRG; PAM sequence: TGG
gtgccatcttgggaagcaga

SEQ ID NO: 21835 - DNA, 20 bp, Artificial Sequence
  Description of Artificial Sequence: Synthetic oligonucleotide
  Target: COL7A1; (+) strand; PAM type: NRG; PAM sequence: GAG
ttgggaagcagatggataac

SEQ ID NO: 21836 - DNA, 20 bp, Artificial Sequence
  Description of Artificial Sequence: Synthetic oligonucleotide
  Target: COL7A1; (+) strand; PAM type: NRG; PAM sequence: CAG
gaagcagatggataacgaga

SEQ ID NO: 21837 - DNA, 20 bp, Artificial Sequence
  Description of Artificial Sequence: Synthetic oligonucleotide
  Target: COL7A1; (+) strand; PAM type: NRG; PAM sequence: AGG
aagcagatggataacgagac

SEQ ID NO: 21838 - DNA, 20 bp, Artificial Sequence
  Description of Artificial Sequence: Synthetic oligonucleotide
  Target: COL7A1; (+) strand; PAM type: NRG; PAM sequence: GGG
agcagatggataacgagaca

SEQ ID NO: 21839 - DNA, 20 bp, Artificial Sequence
  Description of Artificial Sequence: Synthetic oligonucleotide
  Target: COL7A1; (+) strand; PAM type: NRG; PAM sequence: GAG
cagatggataacgagacagg

SEQ ID NO: 21840 - DNA, 20 bp, Artificial Sequence
  Description of Artificial Sequence: Synthetic oligonucleotide
  Target: COL7A1; (+) strand; PAM type: NRG; PAM sequence: AGG
agatggataacgagacaggg

SEQ ID NO: 21841 - DNA, 20 bp, Artificial Sequence
  Description of Artificial Sequence: Synthetic oligonucleotide
  Target: COL7A1; (+) strand; PAM type: NRG; PAM sequence: GAG
atggataacgagacagggag

SEQ ID NO: 21842 - DNA, 20 bp, Artificial Sequence
  Description of Artificial Sequence: Synthetic oligonucleotide
  Target: COL7A1; (+) strand; PAM type: NRG; PAM sequence: TAG
acgagacagggaggagacta

SEQ ID NO: 21843 - DNA, 20 bp, Artificial Sequence
  Description of Artificial Sequence: Synthetic oligonucleotide
  Target: COL7A1; (+) strand; PAM type: NRG; PAM sequence: AGG
cgagacagggaggagactat

SEQ ID NO: 21844 - DNA, 20 bp, Artificial Sequence
  Description of Artificial Sequence: Synthetic oligonucleotide
  Target: COL7A1; (+) strand; PAM type: NRG; PAM sequence: GGG
gagacagggaggagactata

SEQ ID NO: 21845 - DNA, 20 bp, Artificial Sequence
  Description of Artificial Sequence: Synthetic oligonucleotide
  Target: COL7A1; (+) strand; PAM type: NRG; PAM sequence: CAG
gggaggagactatagggacc

SEQ ID NO: 21846 - DNA, 20 bp, Artificial Sequence
  Description of Artificial Sequence: Synthetic oligonucleotide
  Target: COL7A1; (+) strand; PAM type: NRG; PAM sequence: AGG
ggaggagactatagggaccc

SEQ ID NO: 21847 - DNA, 20 bp, Artificial Sequence
  Description of Artificial Sequence: Synthetic oligonucleotide
  Target: COL7A1; (+) strand; PAM type: NRG; PAM sequence: TGG
agactatagggacccaggtg

SEQ ID NO: 21848 - DNA, 20 bp, Artificial Sequence
  Description of Artificial Sequence: Synthetic oligonucleotide
  Target: COL7A1; (+) strand; PAM type: NRG; PAM sequence: AAG
ctatagggacccaggtgtgg

SEQ ID NO: 21849 - DNA, 20 bp, Artificial Sequence
  Description of Artificial Sequence: Synthetic oligonucleotide
  Target: COL7A1; (+) strand; PAM type: NRG; PAM sequence: AGG
tatagggacccaggtgtgga

SEQ ID NO: 21850 - DNA, 20 bp, Artificial Sequence
  Description of Artificial Sequence: Synthetic oligonucleotide
  Target: COL7A1; (+) strand; PAM type: NRG; PAM sequence: GAG
tagggacccaggtgtggaag

SEQ ID NO: 21851 - DNA, 20 bp, Artificial Sequence
  Description of Artificial Sequence: Synthetic oligonucleotide
  Target: COL7A1; (+) strand; PAM type: NRG; PAM sequence: GAG
gggacccaggtgtggaagga

SEQ ID NO: 21852 - DNA, 20 bp, Artificial Sequence
  Description of Artificial Sequence: Synthetic oligonucleotide
  Target: COL7A1; (+) strand; PAM type: NRG; PAM sequence: AGG
ggacccaggtgtggaaggag

SEQ ID NO: 21853 - DNA, 20 bp, Artificial Sequence
  Description of Artificial Sequence: Synthetic oligonucleotide
  Target: COL7A1; (+) strand; PAM type: NRG; PAM sequence: GGG
gacccaggtgtggaaggaga

SEQ ID NO: 21854 - DNA, 20 bp, Artificial Sequence
  Description of Artificial Sequence: Synthetic oligonucleotide
  Target: COL7A1; (+) strand; PAM type: NRG; PAM sequence: TGG
caggtgtggaaggagagggc

SEQ ID NO: 21855 - DNA, 20 bp, Artificial Sequence
  Description of Artificial Sequence: Synthetic oligonucleotide
  Target: COL7A1; (+) strand; PAM type: NRG; PAM sequence: GAG
ggtgtggaaggagagggctg

SEQ ID NO: 21856 - DNA, 20 bp, Artificial Sequence
  Description of Artificial Sequence: Synthetic oligonucleotide
  Target: COL7A1; (+) strand; PAM type: NRG; PAM sequence: AGG
gtgtggaaggagagggctgg

SEQ ID NO: 21857 - DNA, 20 bp, Artificial Sequence
  Description of Artificial Sequence: Synthetic oligonucleotide
  Target: COL7A1; (+) strand; PAM type: NRG; PAM sequence: CAG
gagagggctggaggtacact

SEQ ID NO: 21858 - DNA, 20 bp, Artificial Sequence
  Description of Artificial Sequence: Synthetic oligonucleotide
  Target: COL7A1; (+) strand; PAM type: NRG; PAM sequence: CAG
ggaggtacactcagacccct

SEQ ID NO: 21859 - DNA, 20 bp, Artificial Sequence
  Description of Artificial Sequence: Synthetic oligonucleotide
  Target: COL7A1; (+) strand; PAM type: NRG; PAM sequence: AGG
gaggtacactcagacccctc

SEQ ID NO: 21860 - DNA, 20 bp, Artificial Sequence
  Description of Artificial Sequence: Synthetic oligonucleotide
  Target: COL7A1; (+) strand; PAM type: NRG; PAM sequence: TGG
tacactcagacccctcaggc

SEQ ID NO: 21861 - DNA, 20 bp, Artificial Sequence
  Description of Artificial Sequence: Synthetic oligonucleotide
  Target: COL7A1; (+) strand; PAM type: NRG; PAM sequence: CAG
gacccctcaggctggaactt

SEQ ID NO: 21862 - DNA, 20 bp, Artificial Sequence
  Description of Artificial Sequence: Synthetic oligonucleotide
  Target: COL7A1; (+) strand; PAM type: NRG; PAM sequence: TGG
ggctggaacttcagtgtgtg

SEQ ID NO: 21863 - DNA, 20 bp, Artificial Sequence
  Description of Artificial Sequence: Synthetic oligonucleotide
  Target: COL7A1; (+) strand; PAM type: NRG; PAM sequence: TGG
tggaacttcagtgtgtgtgg

SEQ ID NO: 21864 - DNA, 20 bp, Artificial Sequence
  Description of Artificial Sequence: Synthetic oligonucleotide
  Target: COL7A1; (+) strand; PAM type: NRG; PAM sequence: GGG
ggaacttcagtgtgtgtggt

SEQ ID NO: 21865 - DNA, 20 bp, Artificial Sequence
  Description of Artificial Sequence: Synthetic oligonucleotide
  Target: COL7A1; (+) strand; PAM type: NRG; PAM sequence: GGG
gaacttcagtgtgtgtggtg

SEQ ID NO: 21866 - DNA, 20 bp, Artificial Sequence
  Description of Artificial Sequence: Synthetic oligonucleotide
  Target: COL7A1; (+) strand; PAM type: NRG; PAM sequence: GGG
aacttcagtgtgtgtggtgg

SEQ ID NO: 21867 - DNA, 20 bp, Artificial Sequence
  Description of Artificial Sequence: Synthetic oligonucleotide
  Target: COL7A1; (+) strand; PAM type: NRG; PAM sequence: TGG
agtgtgtgtggtgggggtgc

SEQ ID NO: 21868 - DNA, 20 bp, Artificial Sequence
  Description of Artificial Sequence: Synthetic oligonucleotide
  Target: COL7A1; (+) strand; PAM type: NRG; PAM sequence: TGG
tggctgcgtccacctcaccc

SEQ ID NO: 21869 - DNA, 20 bp, Artificial Sequence
  Description of Artificial Sequence: Synthetic oligonucleotide
  Target: COL7A1; (+) strand; PAM type: NRG; PAM sequence: GGG
ggctgcgtccacctcaccct

SEQ ID NO: 21870 - DNA, 20 bp, Artificial Sequence
  Description of Artificial Sequence: Synthetic oligonucleotide
  Target: COL7A1; (+) strand; PAM type: NRG; PAM sequence: CGG
gggtgctgcgcacaatgatg

SEQ ID NO: 21871 - DNA, 20 bp, Artificial Sequence
  Description of Artificial Sequence: Synthetic oligonucleotide
  Target: COL7A1; (+) strand; PAM type: NRG; PAM sequence: TGG
tgcgcacaatgatgcggtac

SEQ ID NO: 21872 - DNA, 20 bp, Artificial Sequence
  Description of Artificial Sequence: Synthetic oligonucleotide
  Target: COL7A1; (+) strand; PAM type: NRG; PAM sequence: GGG
gcgcacaatgatgcggtact

SEQ ID NO: 21873 - DNA, 20 bp, Artificial Sequence
  Description of Artificial Sequence: Synthetic oligonucleotide
  Target: COL7A1; (+) strand; PAM type: NRG; PAM sequence: TGG
cacaatgatgcggtactggg

SEQ ID NO: 21874 - DNA, 20 bp, Artificial Sequence
  Description of Artificial Sequence: Synthetic oligonucleotide
  Target: COL7A1; (+) strand; PAM type: NRG; PAM sequence: CAG
gatgcggtactgggtggcac

SEQ ID NO: 21875 - DNA, 20 bp, Artificial Sequence
  Description of Artificial Sequence: Synthetic oligonucleotide
  Target: COL7A1; (+) strand; PAM type: NRG; PAM sequence: AGG
atgcggtactgggtggcacc

SEQ ID NO: 21876 - DNA, 20 bp, Artificial Sequence
  Description of Artificial Sequence: Synthetic oligonucleotide
  Target: COL7A1; (+) strand; PAM type: NRG; PAM sequence: GGG
tgcggtactgggtggcacca

SEQ ID NO: 21877 - DNA, 20 bp, Artificial Sequence
  Description of Artificial Sequence: Synthetic oligonucleotide
  Target: COL7A1; (+) strand; PAM type: NRG; PAM sequence: TGG
tactgggtggcaccagggac

SEQ ID NO: 21878 - DNA, 20 bp, Artificial Sequence
  Description of Artificial Sequence: Synthetic oligonucleotide
  Target: COL7A1; (+) strand; PAM type: NRG; PAM sequence: GGG
actgggtggcaccagggact

SEQ ID NO: 21879 - DNA, 20 bp, Artificial Sequence
  Description of Artificial Sequence: Synthetic oligonucleotide
  Target: COL7A1; (+) strand; PAM type: NRG; PAM sequence: CAG
tggcaccagggactgggctc

SEQ ID NO: 21880 - DNA, 20 bp, Artificial Sequence
  Description of Artificial Sequence: Synthetic oligonucleotide
  Target: COL7A1; (+) strand; PAM type: NRG; PAM sequence: AGG
ggcaccagggactgggctcc

SEQ ID NO: 21881 - DNA, 20 bp, Artificial Sequence
  Description of Artificial Sequence: Synthetic oligonucleotide
  Target: COL7A1; (+) strand; PAM type: NRG; PAM sequence: CGG
ggacactcgcacccgctgcc

SEQ ID NO: 21882 - DNA, 20 bp, Artificial Sequence
  Description of Artificial Sequence: Synthetic oligonucleotide
  Target: COL7A1; (+) strand; PAM type: NRG; PAM sequence: GGG
gacactcgcacccgctgccc

SEQ ID NO: 21883 - DNA, 20 bp, Artificial Sequence
  Description of Artificial Sequence: Synthetic oligonucleotide
  Target: COL7A1; (+) strand; PAM type: NRG; PAM sequence: CAG
actcgcacccgctgcccggg

SEQ ID NO: 21884 - DNA, 20 bp, Artificial Sequence
  Description of Artificial Sequence: Synthetic oligonucleotide
  Target: COL7A1; (+) strand; PAM type: NRG; PAM sequence: CGG
cacccgctgcccgggcagct

SEQ ID NO: 21885 - DNA, 20 bp, Artificial Sequence
  Description of Artificial Sequence: Synthetic oligonucleotide
  Target: COL7A1; (+) strand; PAM type: NRG; PAM sequence: TGG
ccgctgcccgggcagctcgg

SEQ ID NO: 21886 - DNA, 20 bp, Artificial Sequence
  Description of Artificial Sequence: Synthetic oligonucleotide
  Target: COL7A1; (+) strand; PAM type: NRG; PAM sequence: CAG
ccgggcagctcggtggcttg

SEQ ID NO: 21887 - DNA, 20 bp, Artificial Sequence
  Description of Artificial Sequence: Synthetic oligonucleotide
  Target: COL7A1; (+) strand; PAM type: NRG; PAM sequence: AGG
cgggcagctcggtggcttgc

SEQ ID NO: 21888 - DNA, 20 bp, Artificial Sequence
  Description of Artificial Sequence: Synthetic oligonucleotide
  Target: COL7A1; (+) strand; PAM type: NRG; PAM sequence: CAG
ggtggcttgcaggtctgtta

SEQ ID NO: 21889 - DNA, 20 bp, Artificial Sequence
  Description of Artificial Sequence: Synthetic oligonucleotide
  Target: COL7A1; (+) strand; PAM type: NRG; PAM sequence: AGG
gtggcttgcaggtctgttac

SEQ ID NO: 21890 - DNA, 20 bp, Artificial Sequence
  Description of Artificial Sequence: Synthetic oligonucleotide
  Target: COL7A1; (+) strand; PAM type: NRG; PAM sequence: GGG
tggcttgcaggtctgttaca

SEQ ID NO: 21891 - DNA, 20 bp, Artificial Sequence
  Description of Artificial Sequence: Synthetic oligonucleotide
  Target: COL7A1; (+) strand; PAM type: NRG; PAM sequence: CAG
caggtctgttacagggctca

SEQ ID NO: 21892 - DNA, 20 bp, Artificial Sequence
  Description of Artificial Sequence: Synthetic oligonucleotide
  Target: COL7A1; (+) strand; PAM type: NRG; PAM sequence: AGG
aggtctgttacagggctcac

SEQ ID NO: 21893 - DNA, 20 bp, Artificial Sequence
  Description of Artificial Sequence: Synthetic oligonucleotide
  Target: COL7A1; (+) strand; PAM type: NRG; PAM sequence: CAG
tctgttacagggctcacagg

SEQ ID NO: 21894 - DNA, 20 bp, Artificial Sequence
  Description of Artificial Sequence: Synthetic oligonucleotide
  Target: COL7A1; (+) strand; PAM type: NRG; PAM sequence: TGG
acagggctcacaggcagctc

SEQ ID NO: 21895 - DNA, 20 bp, Artificial Sequence
  Description of Artificial Sequence: Synthetic oligonucleotide
  Target: COL7A1; (+) strand; PAM type: NRG; PAM sequence: TGG
acaggcagctctggtcctgt

SEQ ID NO: 21896 - DNA, 20 bp, Artificial Sequence
  Description of Artificial Sequence: Synthetic oligonucleotide
  Target: COL7A1; (+) strand; PAM type: NRG; PAM sequence: GAG
aggcagctctggtcctgttg

SEQ ID NO: 21897 - DNA, 20 bp, Artificial Sequence
  Description of Artificial Sequence: Synthetic oligonucleotide
  Target: COL7A1; (+) strand; PAM type: NRG; PAM sequence: GAG
gcagctctggtcctgttgga

SEQ ID NO: 21898 - DNA, 20 bp, Artificial Sequence
  Description of Artificial Sequence: Synthetic oligonucleotide
  Target: COL7A1; (+) strand; PAM type: NRG; PAM sequence: CAG
tctggtcctgttggagagca

SEQ ID NO: 21899 - DNA, 20 bp, Artificial Sequence
  Description of Artificial Sequence: Synthetic oligonucleotide
  Target: COL7A1; (+) strand; PAM type: NRG; PAM sequence: TAG
tcctgttggagagcacagca

SEQ ID NO: 21900 - DNA, 20 bp, Artificial Sequence
  Description of Artificial Sequence: Synthetic oligonucleotide
  Target: COL7A1; (+) strand; PAM type: NRG; PAM sequence: GAG
ctgttggagagcacagcata

SEQ ID NO: 21901 - DNA, 20 bp, Artificial Sequence
  Description of Artificial Sequence: Synthetic oligonucleotide
  Target: COL7A1; (+) strand; PAM type: NRG; PAM sequence: AGG
tgttggagagcacagcatag

SEQ ID NO: 21902 - DNA, 20 bp, Artificial Sequence
  Description of Artificial Sequence: Synthetic oligonucleotide
  Target: COL7A1; (+) strand; PAM type: NRG; PAM sequence: CAG
tggagagcacagcatagagg

SEQ ID NO: 21903 - DNA, 20 bp, Artificial Sequence
  Description of Artificial Sequence: Synthetic oligonucleotide
  Target: COL7A1; (+) strand; PAM type: NRG; PAM sequence: TGG
agcacagcatagaggcagcc

SEQ ID NO: 21904 - DNA, 20 bp, Artificial Sequence
  Description of Artificial Sequence: Synthetic oligonucleotide
  Target: COL7A1; (+) strand; PAM type: NRG; PAM sequence: GGG
gcacagcatagaggcagcct

SEQ ID NO: 21905 - DNA, 20 bp, Artificial Sequence
  Description of Artificial Sequence: Synthetic oligonucleotide
  Target: COL7A1; (+) strand; PAM type: NRG; PAM sequence: GGG
cacagcatagaggcagcctg

SEQ ID NO: 21906 - DNA, 20 bp, Artificial Sequence
  Description of Artificial Sequence: Synthetic oligonucleotide
  Target: COL7A1; (+) strand; PAM type: NRG; PAM sequence: TGG
ccgacacctcccccactcac

SEQ ID NO: 21907 - DNA, 20 bp, Artificial Sequence
  Description of Artificial Sequence: Synthetic oligonucleotide
  Target: COL7A1; (+) strand; PAM type: NRG; PAM sequence: CAG
acctcccccactcactggcc

SEQ ID NO: 21908 - DNA, 20 bp, Artificial Sequence
  Description of Artificial Sequence: Synthetic oligonucleotide
  Target: COL7A1; (+) strand; PAM type: NRG; PAM sequence: CAG
ccactcactggcccagccca

SEQ ID NO: 21909 - DNA, 20 bp, Artificial Sequence
  Description of Artificial Sequence: Synthetic oligonucleotide
  Target: COL7A1; (+) strand; PAM type: NRG; PAM sequence: GAG
actcactggcccagcccaca

SEQ ID NO: 21910 - DNA, 20 bp, Artificial Sequence
  Description of Artificial Sequence: Synthetic oligonucleotide
  Target: COL7A1; (+) strand; PAM type: NRG; PAM sequence: CAG
ccagcccacagagccctcac

SEQ ID NO: 21911 - DNA, 20 bp, Artificial Sequence
  Description of Artificial Sequence: Synthetic oligonucleotide
  Target: COL7A1; (+) strand; PAM type: NRG; PAM sequence: TGG
gcccacagagccctcaccag

SEQ ID NO: 21912 - DNA, 20 bp, Artificial Sequence
  Description of Artificial Sequence: Synthetic oligonucleotide
  Target: COL7A1; (+) strand; PAM type: NRG; PAM sequence: GGG
cccacagagccctcaccagt

SEQ ID NO: 21913 - DNA, 20 bp, Artificial Sequence
  Description of Artificial Sequence: Synthetic oligonucleotide
  Target: COL7A1; (+) strand; PAM type: NRG; PAM sequence: CGG
gccctcaccagtgggaacca

SEQ ID NO: 21914 - DNA, 20 bp, Artificial Sequence
  Description of Artificial Sequence: Synthetic oligonucleotide
  Target: COL7A1; (+) strand; PAM type: NRG; PAM sequence: CAG
accagtgggaaccacggttg

SEQ ID NO: 21915 - DNA, 20 bp, Artificial Sequence
  Description of Artificial Sequence: Synthetic oligonucleotide
  Target: COL7A1; (+) strand; PAM type: NRG; PAM sequence: AGG
ccagtgggaaccacggttgc

SEQ ID NO: 21916 - DNA, 20 bp, Artificial Sequence
  Description of Artificial Sequence: Synthetic oligonucleotide
  Target: COL7A1; (+) strand; PAM type: NRG; PAM sequence: GGG
cagtgggaaccacggttgca

SEQ ID NO: 21917 - DNA, 20 bp, Artificial Sequence
  Description of Artificial Sequence: Synthetic oligonucleotide
  Target: COL7A1; (+) strand; PAM type: NRG; PAM sequence: GGG
agtgggaaccacggttgcag

SEQ ID NO: 21918 - DNA, 20 bp, Artificial Sequence
  Description of Artificial Sequence: Synthetic oligonucleotide
  Target: COL7A1; (+) strand; PAM type: NRG; PAM sequence: TGG
gggaaccacggttgcagggg

SEQ ID NO: 21919 - DNA, 20 bp, Artificial Sequence
  Description of Artificial Sequence: Synthetic oligonucleotide
  Target: COL7A1; (+) strand; PAM type: NRG; PAM sequence: TGG
ttgcaggggtggccacctcg

SEQ ID NO: 21920 - DNA, 20 bp, Artificial Sequence
  Description of Artificial Sequence: Synthetic oligonucleotide
  Target: COL7A1; (+) strand; PAM type: NRG; PAM sequence: CAG
gtggccacctcgtggccctc

SEQ ID NO: 21921 - DNA, 20 bp, Artificial Sequence
  Description of Artificial Sequence: Synthetic oligonucleotide
  Target: COL7A1; (+) strand; PAM type: NRG; PAM sequence: CAG
gccacctcgtggccctccag

SEQ ID NO: 21922 - DNA, 20 bp, Artificial Sequence
  Description of Artificial Sequence: Synthetic oligonucleotide
  Target: COL7A1; (+) strand; PAM type: NRG; PAM sequence: GAG
cacctcgtggccctccagca

SEQ ID NO: 21923 - DNA, 20 bp, Artificial Sequence
  Description of Artificial Sequence: Synthetic oligonucleotide
  Target: COL7A1; (+) strand; PAM type: NRG; PAM sequence: TAG
cgtggccctccagcagagtg

SEQ ID NO: 21924 - DNA, 20 bp, Artificial Sequence
  Description of Artificial Sequence: Synthetic oligonucleotide
  Target: COL7A1; (+) strand; PAM type: NRG; PAM sequence: GAG
tggccctccagcagagtgta

SEQ ID NO: 21925 - DNA, 20 bp, Artificial Sequence
  Description of Artificial Sequence: Synthetic oligonucleotide
  Target: COL7A1; (+) strand; PAM type: NRG; PAM sequence: GAG
tccagcagagtgtagagtgt

SEQ ID NO: 21926 - DNA, 20 bp, Artificial Sequence
  Description of Artificial Sequence: Synthetic oligonucleotide
  Target: COL7A1; (+) strand; PAM type: NRG; PAM sequence: AGG
ccagcagagtgtagagtgtg

SEQ ID NO: 21927 - DNA, 20 bp, Artificial Sequence
  Description of Artificial Sequence: Synthetic oligonucleotide
  Target: COL7A1; (+) strand; PAM type: NRG; PAM sequence: CGG
gcagagtgtagagtgtgagg

SEQ ID NO: 21928 - DNA, 20 bp, Artificial Sequence
  Description of Artificial Sequence: Synthetic oligonucleotide
  Target: COL7A1; (+) strand; PAM type: NRG; PAM sequence: CAG
gtagagtgtgaggcggtact

SEQ ID NO: 21929 - DNA, 20 bp, Artificial Sequence
  Description of Artificial Sequence: Synthetic oligonucleotide
  Target: COL7A1; (+) strand; PAM type: NRG; PAM sequence: CGG
gtgaggcggtactcagtgcc

SEQ ID NO: 21930 - DNA, 20 bp, Artificial Sequence
  Description of Artificial Sequence: Synthetic oligonucleotide
  Target: COL7A1; (+) strand; PAM type: NRG; PAM sequence: CAG
cggtactcagtgcccggctg

SEQ ID NO: 21931 - DNA, 20 bp, Artificial Sequence
  Description of Artificial Sequence: Synthetic oligonucleotide
  Target: COL7A1; (+) strand; PAM type: NRG; PAM sequence: TGG
ccggctgcagcccatccaac

SEQ ID NO: 21932 - DNA, 20 bp, Artificial Sequence
  Description of Artificial Sequence: Synthetic oligonucleotide
  Target: COL7A1; (+) strand; PAM type: NRG; PAM sequence: TAG
gctgcagcccatccaactgg

SEQ ID NO: 21933 - DNA, 20 bp, Artificial Sequence
  Description of Artificial Sequence: Synthetic oligonucleotide
  Target: COL7A1; (+) strand; PAM type: NRG; PAM sequence: CGG
gcagcccatccaactggtag

SEQ ID NO: 21934 - DNA, 20 bp, Artificial Sequence
  Description of Artificial Sequence: Synthetic oligonucleotide
  Target: COL7A1; (+) strand; PAM type: NRG; PAM sequence: GGG
cagcccatccaactggtagc

SEQ ID NO: 21935 - DNA, 20 bp, Artificial Sequence
  Description of Artificial Sequence: Synthetic oligonucleotide
  Target: COL7A1; (+) strand; PAM type: NRG; PAM sequence: CAG
caactggtagcgggtcacat

SEQ ID NO: 21936 - DNA, 20 bp, Artificial Sequence
  Description of Artificial Sequence: Synthetic oligonucleotide
  Target: COL7A1; (+) strand; PAM type: NRG; PAM sequence: GAG
actggtagcgggtcacatca

SEQ ID NO: 21937 - DNA, 20 bp, Artificial Sequence
  Description of Artificial Sequence: Synthetic oligonucleotide
  Target: COL7A1; (+) strand; PAM type: NRG; PAM sequence: AGG
ctggtagcgggtcacatcag

SEQ ID NO: 21938 - DNA, 20 bp, Artificial Sequence
  Description of Artificial Sequence: Synthetic oligonucleotide
  Target: COL7A1; (+) strand; PAM type: NRG; PAM sequence: GGG
tggtagcgggtcacatcaga

SEQ ID NO: 21939 - DNA, 20 bp, Artificial Sequence
  Description of Artificial Sequence: Synthetic oligonucleotide
  Target: COL7A1; (+) strand; PAM type: NRG; PAM sequence: CAG
tagcgggtcacatcagaggg

SEQ ID NO: 21940 - DNA, 20 bp, Artificial Sequence
  Description of Artificial Sequence: Synthetic oligonucleotide
  Target: COL7A1; (+) strand; PAM type: NRG; PAM sequence: CGG
gagggcagtaccaccttctg

SEQ ID NO: 21941 - DNA, 20 bp, Artificial Sequence
  Description of Artificial Sequence: Synthetic oligonucleotide
  Target: COL7A1; (+) strand; PAM type: NRG; PAM sequence: TGG
ggcagtaccaccttctgcgg

SEQ ID NO: 21942 - DNA, 20 bp, Artificial Sequence
  Description of Artificial Sequence: Synthetic oligonucleotide
  Target: COL7A1; (+) strand; PAM type: NRG; PAM sequence: AAG
ccaccttctgcggtggctcc

SEQ ID NO: 21943 - DNA, 20 bp, Artificial Sequence
  Description of Artificial Sequence: Synthetic oligonucleotide
  Target: COL7A1; (+) strand; PAM type: NRG; PAM sequence: AAG
tgcggtggctccaagcctgc

SEQ ID NO: 21944 - DNA, 20 bp, Artificial Sequence
  Description of Artificial Sequence: Synthetic oligonucleotide
  Target: COL7A1; (+) strand; PAM type: NRG; PAM sequence: CAG
gctccaagcctgcaagataa

SEQ ID NO: 21945 - DNA, 20 bp, Artificial Sequence
  Description of Artificial Sequence: Synthetic oligonucleotide
  Target: COL7A1; (+) strand; PAM type: NRG; PAM sequence: AGG
ctccaagcctgcaagataac

SEQ ID NO: 21946 - DNA, 20 bp, Artificial Sequence
  Description of Artificial Sequence: Synthetic oligonucleotide
  Target: COL7A1; (+) strand; PAM type: NRG; PAM sequence: GGG
tccaagcctgcaagataaca

SEQ ID NO: 21947 - DNA, 20 bp, Artificial Sequence
  Description of Artificial Sequence: Synthetic oligonucleotide
  Target: COL7A1; (+) strand; PAM type: NRG; PAM sequence: CAG
agcctgcaagataacagggt

SEQ ID NO: 21948 - DNA, 20 bp, Artificial Sequence
  Description of Artificial Sequence: Synthetic oligonucleotide
  Target: COL7A1; (+) strand; PAM type: NRG; PAM sequence: CAG
gcaagataacagggtcagac

SEQ ID NO: 21949 - DNA, 20 bp, Artificial Sequence
  Description of Artificial Sequence: Synthetic oligonucleotide
  Target: COL7A1; (+) strand; PAM type: NRG; PAM sequence: CAG
agataacagggtcagaccag

SEQ ID NO: 21950 - DNA, 20 bp, Artificial Sequence
  Description of Artificial Sequence: Synthetic oligonucleotide
  Target: COL7A1; (+) strand; PAM type: NRG; PAM sequence: GAG
ataacagggtcagaccagca

SEQ ID NO: 21951 - DNA, 20 bp, Artificial Sequence
  Description of Artificial Sequence: Synthetic oligonucleotide
  Target: COL7A1; (+) strand; PAM type: NRG; PAM sequence: AGG
taacagggtcagaccagcag

SEQ ID NO: 21952 - DNA, 20 bp, Artificial Sequence
  Description of Artificial Sequence: Synthetic oligonucleotide
  Target: COL7A1; (+) strand; PAM type: NRG; PAM sequence: CAG
atcccttcccccgcactgac

SEQ ID NO: 21953 - DNA, 20 bp, Artificial Sequence
  Description of Artificial Sequence: Synthetic oligonucleotide
  Target: COL7A1; (+) strand; PAM type: NRG; PAM sequence: CGG
tctcacgccgccattccaac

SEQ ID NO: 21954 - DNA, 20 bp, Artificial Sequence
  Description of Artificial Sequence: Synthetic oligonucleotide
  Target: COL7A1; (+) strand; PAM type: NRG; PAM sequence: TAG
cacgccgccattccaaccgg

SEQ ID NO: 21955 - DNA, 20 bp, Artificial Sequence
  Description of Artificial Sequence: Synthetic oligonucleotide
  Target: COL7A1; (+) strand; PAM type: NRG; PAM sequence: CGG
gccattccaaccggtagcca

SEQ ID NO: 21956 - DNA, 20 bp, Artificial Sequence
  Description of Artificial Sequence: Synthetic oligonucleotide
  Target: COL7A1; (+) strand; PAM type: NRG; PAM sequence: GGG
ccattccaaccggtagccac

SEQ ID NO: 21957 - DNA, 20 bp, Artificial Sequence
  Description of Artificial Sequence: Synthetic oligonucleotide
  Target: COL7A1; (+) strand; PAM type: NRG; PAM sequence: CAG
caaccggtagccacgggcct

SEQ ID NO: 21958 - DNA, 20 bp, Artificial Sequence
  Description of Artificial Sequence: Synthetic oligonucleotide
  Target: COL7A1; (+) strand; PAM type: NRG; PAM sequence: AGG
aaccggtagccacgggcctc

SEQ ID NO: 21959 - DNA, 20 bp, Artificial Sequence
  Description of Artificial Sequence: Synthetic oligonucleotide
  Target: COL7A1; (+) strand; PAM type: NRG; PAM sequence: AAG
agccacgggcctcaggcacc

SEQ ID NO: 21960 - DNA, 20 bp, Artificial Sequence
  Description of Artificial Sequence: Synthetic oligonucleotide
  Target: COL7A1; (+) strand; PAM type: NRG; PAM sequence: CAG
gggcctcaggcaccaagttc

SEQ ID NO: 21961 - DNA, 20 bp, Artificial Sequence
  Description of Artificial Sequence: Synthetic oligonucleotide
  Target: COL7A1; (+) strand; PAM type: NRG; PAM sequence: AGG
ggcctcaggcaccaagttcc

SEQ ID NO: 21962 - DNA, 20 bp, Artificial Sequence
  Description of Artificial Sequence: Synthetic oligonucleotide
  Target: COL7A1; (+) strand; PAM type: NRG; PAM sequence: AAG
tcaggcaccaagttccagga

SEQ ID NO: 21963 - DNA, 20 bp, Artificial Sequence
  Description of Artificial Sequence: Synthetic oligonucleotide
  Target: COL7A1; (+) strand; PAM type: NRG; PAM sequence: AGG
caggcaccaagttccaggaa

SEQ ID NO: 21964 - DNA, 20 bp, Artificial Sequence
  Description of Artificial Sequence: Synthetic oligonucleotide
  Target: COL7A1; (+) strand; PAM type: NRG; PAM sequence: GAG
ggcaccaagttccaggaaag

SEQ ID NO: 21965 - DNA, 20 bp, Artificial Sequence
  Description of Artificial Sequence: Synthetic oligonucleotide
  Target: COL7A1; (+) strand; PAM type: NRG; PAM sequence: AGG
gcaccaagttccaggaaagg

SEQ ID NO: 21966 - DNA, 20 bp, Artificial Sequence
  Description of Artificial Sequence: Synthetic oligonucleotide
  Target: COL7A1; (+) strand; PAM type: NRG; PAM sequence: TGG
caagttccaggaaaggagga

SEQ ID NO: 21967 - DNA, 20 bp, Artificial Sequence
  Description of Artificial Sequence: Synthetic oligonucleotide
  Target: COL7A1; (+) strand; PAM type: NRG; PAM sequence: TGG
ccaggaaaggaggatggatg

SEQ ID NO: 21968 - DNA, 20 bp, Artificial Sequence
  Description of Artificial Sequence: Synthetic oligonucleotide
  Target: COL7A1; (+) strand; PAM type: NRG; PAM sequence: GGG
caggaaaggaggatggatgt

SEQ ID NO: 21969 - DNA, 20 bp, Artificial Sequence
  Description of Artificial Sequence: Synthetic oligonucleotide
  Target: COL7A1; (+) strand; PAM type: NRG; PAM sequence: GGG
aggaaaggaggatggatgtg

SEQ ID NO: 21970 - DNA, 20 bp, Artificial Sequence
  Description of Artificial Sequence: Synthetic oligonucleotide
  Target: COL7A1; (+) strand; PAM type: NRG; PAM sequence: CAG
aggaggatggatgtggggcc

SEQ ID NO: 21971 - DNA, 20 bp, Artificial Sequence
  Description of Artificial Sequence: Synthetic oligonucleotide
  Target: COL7A1; (+) strand; PAM type: NRG; PAM sequence: AGG
ggaggatggatgtggggccc

SEQ ID NO: 21972 - DNA, 20 bp, Artificial Sequence
  Description of Artificial Sequence: Synthetic oligonucleotide
  Target: COL7A1; (+) strand; PAM type: NRG; PAM sequence: CGG
gatgtggggcccaggatgac

SEQ ID NO: 21973 - DNA, 20 bp, Artificial Sequence
  Description of Artificial Sequence: Synthetic oligonucleotide
  Target: COL7A1; (+) strand; PAM type: NRG; PAM sequence: GGG
atgtggggcccaggatgacc

SEQ ID NO: 21974 - DNA, 20 bp, Artificial Sequence
  Description of Artificial Sequence: Synthetic oligonucleotide
  Target: COL7A1; (+) strand; PAM type: NRG; PAM sequence: CAG
gggcccaggatgaccgggcg

SEQ ID NO: 21975 - DNA, 20 bp, Artificial Sequence
  Description of Artificial Sequence: Synthetic oligonucleotide
  Target: COL7A1; (+) strand; PAM type: NRG; PAM sequence: AGG
ggcccaggatgaccgggcgc

SEQ ID NO: 21976 - DNA, 20 bp, Artificial Sequence
  Description of Artificial Sequence: Synthetic oligonucleotide
  Target: COL7A1; (+) strand; PAM type: NRG; PAM sequence: GGG
gcccaggatgaccgggcgca

SEQ ID NO: 21977 - DNA, 20 bp, Artificial Sequence
  Description of Artificial Sequence: Synthetic oligonucleotide
  Target: COL7A1; (+) strand; PAM type: NRG; PAM sequence: CAG
cgggcgcagggtctgctcaa

SEQ ID NO: 21978 - DNA, 20 bp, Artificial Sequence
  Description of Artificial Sequence: Synthetic oligonucleotide
  Target: COL7A1; (+) strand; PAM type: NRG; PAM sequence: AAG
gcgcagggtctgctcaacag

SEQ ID NO: 21979 - DNA, 20 bp, Artificial Sequence
  Description of Artificial Sequence: Synthetic oligonucleotide
  Target: COL7A1; (+) strand; PAM type: NRG; PAM sequence: CAG
gctcaacagaagcgtctgcc

SEQ ID NO: 21980 - DNA, 20 bp, Artificial Sequence
  Description of Artificial Sequence: Synthetic oligonucleotide
  Target: COL7A1; (+) strand; PAM type: NRG; PAM sequence: AGG
ctcaacagaagcgtctgccc

SEQ ID NO: 21981 - DNA, 20 bp, Artificial Sequence
  Description of Artificial Sequence: Synthetic oligonucleotide
  Target: COL7A1; (+) strand; PAM type: NRG; PAM sequence: GGG
tcaacagaagcgtctgccca

SEQ ID NO: 21982 - DNA, 20 bp, Artificial Sequence
  Description of Artificial Sequence: Synthetic oligonucleotide
  Target: COL7A1; (+) strand; PAM type: NRG; PAM sequence: TGG
aagcgtctgcccagggcaca

SEQ ID NO: 21983 - DNA, 20 bp, Artificial Sequence
  Description of Artificial Sequence: Synthetic oligonucleotide
  Target: COL7A1; (+) strand; PAM type: NRG; PAM sequence: GGG
agcgtctgcccagggcacat

SEQ ID NO: 21984 - DNA, 20 bp, Artificial Sequence
  Description of Artificial Sequence: Synthetic oligonucleotide
  Target: COL7A1; (+) strand; PAM type: NRG; PAM sequence: CAG
gcccagggcacatgggatgt

SEQ ID NO: 21985 - DNA, 20 bp, Artificial Sequence
  Description of Artificial Sequence: Synthetic oligonucleotide
  Target: COL7A1; (+) strand; PAM type: NRG; PAM sequence: TGG
cagggcacatgggatgtcag

SEQ ID NO: 21986 - DNA, 20 bp, Artificial Sequence
  Description of Artificial Sequence: Synthetic oligonucleotide
  Target: COL7A1; (+) strand; PAM type: NRG; PAM sequence: CGG
catgggatgtcagtggcctc

SEQ ID NO: 21987 - DNA, 20 bp, Artificial Sequence
  Description of Artificial Sequence: Synthetic oligonucleotide
  Target: COL7A1; (+) strand; PAM type: NRG; PAM sequence: GGG
atgggatgtcagtggcctcc

SEQ ID NO: 21988 - DNA, 20 bp, Artificial Sequence
  Description of Artificial Sequence: Synthetic oligonucleotide
  Target: COL7A1; (+) strand; PAM type: NRG; PAM sequence: CAG
cttgccctgcctgcccgtcc

SEQ ID NO: 21989 - DNA, 20 bp, Artificial Sequence
  Description of Artificial Sequence: Synthetic oligonucleotide
  Target: COL7A1; (+) strand; PAM type: NRG; PAM sequence: AAG
tgcctgcccgtcccagcctg

SEQ ID NO: 21990 - DNA, 20 bp, Artificial Sequence
  Description of Artificial Sequence: Synthetic oligonucleotide
  Target: COL7A1; (+) strand; PAM type: NRG; PAM sequence: AAG
tgcccgtcccagcctgaaga

SEQ ID NO: 21991 - DNA, 20 bp, Artificial Sequence
  Description of Artificial Sequence: Synthetic oligonucleotide
  Target: COL7A1; (+) strand; PAM type: NRG; PAM sequence: CAG
cccagcctgaagaaagtgcc

SEQ ID NO: 21992 - DNA, 20 bp, Artificial Sequence
  Description of Artificial Sequence: Synthetic oligonucleotide
  Target: COL7A1; (+) strand; PAM type: NRG; PAM sequence: CAG
aaagtgcccagccttctcac

SEQ ID NO: 21993 - DNA, 20 bp, Artificial Sequence
  Description of Artificial Sequence: Synthetic oligonucleotide
  Target: COL7A1; (+) strand; PAM type: NRG; PAM sequence: GAG
cccagccttctcaccagtgc

SEQ ID NO: 21994 - DNA, 20 bp, Artificial Sequence
  Description of Artificial Sequence: Synthetic oligonucleotide
  Target: COL7A1; (+) strand; PAM type: NRG; PAM sequence: CAG
ttctcaccagtgcgagccat

SEQ ID NO: 21995 - DNA, 20 bp, Artificial Sequence
  Description of Artificial Sequence: Synthetic oligonucleotide
  Target: COL7A1; (+) strand; PAM type: NRG; PAM sequence: AGG
tctcaccagtgcgagccatc

SEQ ID NO: 21996 - DNA, 20 bp, Artificial Sequence
  Description of Artificial Sequence: Synthetic oligonucleotide
  Target: COL7A1; (+) strand; PAM type: NRG; PAM sequence: GGG
ctcaccagtgcgagccatca

SEQ ID NO: 21997 - DNA, 20 bp, Artificial Sequence
  Description of Artificial Sequence: Synthetic oligonucleotide
  Target: COL7A1; (+) strand; PAM type: NRG; PAM sequence: AAG
accagtgcgagccatcaggg

SEQ ID NO: 21998 - DNA, 20 bp, Artificial Sequence
  Description of Artificial Sequence: Synthetic oligonucleotide
  Target: COL7A1; (+) strand; PAM type: NRG; PAM sequence: TGG
agtgcgagccatcagggaag

SEQ ID NO: 21999 - DNA, 20 bp, Artificial Sequence
  Description of Artificial Sequence: Synthetic oligonucleotide
  Target: COL7A1; (+) strand; PAM type: NRG; PAM sequence: CGG
gcgagccatcagggaagtgg

SEQ ID NO: 22000 - DNA, 20 bp, Artificial Sequence
  Description of Artificial Sequence: Synthetic oligonucleotide
  Target: COL7A1; (+) strand; PAM type: NRG; PAM sequence: GGG
cgagccatcagggaagtggc

SEQ ID NO: 22001 - DNA, 20 bp, Artificial Sequence
  Description of Artificial Sequence: Synthetic oligonucleotide
  Target: COL7A1; (+) strand; PAM type: NRG; PAM sequence: CGG
aagtggcgggccccacactg

SEQ ID NO: 22002 - DNA, 20 bp, Artificial Sequence
  Description of Artificial Sequence: Synthetic oligonucleotide
  Target: COL7A1; (+) strand; PAM type: NRG; PAM sequence: TAG
ggccccacactgcggccaaa

SEQ ID NO: 22003 - DNA, 20 bp, Artificial Sequence
  Description of Artificial Sequence: Synthetic oligonucleotide
  Target: COL7A1; (+) strand; PAM type: NRG; PAM sequence: AGG
gccccacactgcggccaaat

SEQ ID NO: 22004 - DNA, 20 bp, Artificial Sequence
  Description of Artificial Sequence: Synthetic oligonucleotide
  Target: COL7A1; (+) strand; PAM type: NRG; PAM sequence: GGG
ccccacactgcggccaaata

SEQ ID NO: 22005 - DNA, 20 bp, Artificial Sequence
  Description of Artificial Sequence: Synthetic oligonucleotide
  Target: COL7A1; (+) strand; PAM type: NRG; PAM sequence: CGG
gcggccaaatagggtgctca

SEQ ID NO: 22006 - DNA, 20 bp, Artificial Sequence
  Description of Artificial Sequence: Synthetic oligonucleotide
  Target: COL7A1; (+) strand; PAM type: NRG; PAM sequence: TAG
gggtgctcacggtcacctca

SEQ ID NO: 22007 - DNA, 20 bp, Artificial Sequence
  Description of Artificial Sequence: Synthetic oligonucleotide
  Target: COL7A1; (+) strand; PAM type: NRG; PAM sequence: CAG
ggtcacctcatagtccgtgc

SEQ ID NO: 22008 - DNA, 20 bp, Artificial Sequence
  Description of Artificial Sequence: Synthetic oligonucleotide
  Target: COL7A1; (+) strand; PAM type: NRG; PAM sequence: AGG
gtcacctcatagtccgtgcc

SEQ ID NO: 22009 - DNA, 20 bp, Artificial Sequence
  Description of Artificial Sequence: Synthetic oligonucleotide
  Target: COL7A1; (+) strand; PAM type: NRG; PAM sequence: AAG
catagtccgtgccaggctcc

SEQ ID NO: 22010 - DNA, 20 bp, Artificial Sequence
  Description of Artificial Sequence: Synthetic oligonucleotide
  Target: COL7A1; (+) strand; PAM type: NRG; PAM sequence: CAG
gtgccaggctccaagtcacg

SEQ ID NO: 22011 - DNA, 20 bp, Artificial Sequence
  Description of Artificial Sequence: Synthetic oligonucleotide
  Target: COL7A1; (+) strand; PAM type: NRG; PAM sequence: CAG
cagcaacactgaaccctgcc

SEQ ID NO: 22012 - DNA, 20 bp, Artificial Sequence
  Description of Artificial Sequence: Synthetic oligonucleotide
  Target: COL7A1; (+) strand; PAM type: NRG; PAM sequence: AGG
agcaacactgaaccctgccc

SEQ ID NO: 22013 - DNA, 20 bp, Artificial Sequence
  Description of Artificial Sequence: Synthetic oligonucleotide
  Target: COL7A1; (+) strand; PAM type: NRG; PAM sequence: GGG
gcaacactgaaccctgccca

SEQ ID NO: 22014 - DNA, 20 bp, Artificial Sequence
  Description of Artificial Sequence: Synthetic oligonucleotide
  Target: COL7A1; (+) strand; PAM type: NRG; PAM sequence: CAG
actgaaccctgcccagggcc

SEQ ID NO: 22015 - DNA, 20 bp, Artificial Sequence
  Description of Artificial Sequence: Synthetic oligonucleotide
  Target: COL7A1; (+) strand; PAM type: NRG; PAM sequence: TGG
gcccagctcctgctgctgtg

SEQ ID NO: 22016 - DNA, 20 bp, Artificial Sequence
  Description of Artificial Sequence: Synthetic oligonucleotide
  Target: COL7A1; (+) strand; PAM type: NRG; PAM sequence: GGG
cccagctcctgctgctgtgt

SEQ ID NO: 22017 - DNA, 20 bp, Artificial Sequence
  Description of Artificial Sequence: Synthetic oligonucleotide
  Target: COL7A1; (+) strand; PAM type: NRG; PAM sequence: TGG
gctgtgtgggcccacctgca

SEQ ID NO: 22018 - DNA, 20 bp, Artificial Sequence
  Description of Artificial Sequence: Synthetic oligonucleotide
  Target: COL7A1; (+) strand; PAM type: NRG; PAM sequence: GGG
ctgtgtgggcccacctgcat

SEQ ID NO: 22019 - DNA, 20 bp, Artificial Sequence
  Description of Artificial Sequence: Synthetic oligonucleotide
  Target: COL7A1; (+) strand; PAM type: NRG; PAM sequence: GGG
tgtgtgggcccacctgcatg

SEQ ID NO: 22020 - DNA, 20 bp, Artificial Sequence
  Description of Artificial Sequence: Synthetic oligonucleotide
  Target: COL7A1; (+) strand; PAM type: NRG; PAM sequence: GGG
gtgtgggcccacctgcatgg

SEQ ID NO: 22021 - DNA, 20 bp, Artificial Sequence
  Description of Artificial Sequence: Synthetic oligonucleotide
  Target: COL7A1; (+) strand; PAM type: NRG; PAM sequence: AAG
ccacctgcatgggggacacc

SEQ ID NO: 22022 - DNA, 20 bp, Artificial Sequence
  Description of Artificial Sequence: Synthetic oligonucleotide
  Target: COL7A1; (+) strand; PAM type: NRG; PAM sequence: AGG
cacctgcatgggggacacca

SEQ ID NO: 22023 - DNA, 20 bp, Artificial Sequence
  Description of Artificial Sequence: Synthetic oligonucleotide
  Target: COL7A1; (+) strand; PAM type: NRG; PAM sequence: GGG
acctgcatgggggacaccaa

SEQ ID NO: 22024 - DNA, 20 bp, Artificial Sequence
  Description of Artificial Sequence: Synthetic oligonucleotide
  Target: COL7A1; (+) strand; PAM type: NRG; PAM sequence: GGG
cctgcatgggggacaccaag

SEQ ID NO: 22025 - DNA, 20 bp, Artificial Sequence
  Description of Artificial Sequence: Synthetic oligonucleotide
  Target: COL7A1; (+) strand; PAM type: NRG; PAM sequence: CAG
catgggggacaccaaggggc

SEQ ID NO: 22026 - DNA, 20 bp, Artificial Sequence
  Description of Artificial Sequence: Synthetic oligonucleotide
  Target: COL7A1; (+) strand; PAM type: NRG; PAM sequence: TGG
gggggacaccaaggggccag

SEQ ID NO: 22027 - DNA, 20 bp, Artificial Sequence
  Description of Artificial Sequence: Synthetic oligonucleotide
  Target: COL7A1; (+) strand; PAM type: NRG; PAM sequence: GGG
ggggacaccaaggggccagt

SEQ ID NO: 22028 - DNA, 20 bp, Artificial Sequence
  Description of Artificial Sequence: Synthetic oligonucleotide
  Target: COL7A1; (+) strand; PAM type: NRG; PAM sequence: CAG
caaggggccagtgggccttg

SEQ ID NO: 22029 - DNA, 20 bp, Artificial Sequence
  Description of Artificial Sequence: Synthetic oligonucleotide
  Target: COL7A1; (+) strand; PAM type: NRG; PAM sequence: CAG
gccagtgggccttgcagact

SEQ ID NO: 22030 - DNA, 20 bp, Artificial Sequence
  Description of Artificial Sequence: Synthetic oligonucleotide
  Target: COL7A1; (+) strand; PAM type: NRG; PAM sequence: AGG
ccagtgggccttgcagactc

SEQ ID NO: 22031 - DNA, 20 bp, Artificial Sequence
  Description of Artificial Sequence: Synthetic oligonucleotide
  Target: COL7A1; (+) strand; PAM type: NRG; PAM sequence: CAG
cttgcagactcaggactcta

SEQ ID NO: 22032 - DNA, 20 bp, Artificial Sequence
  Description of Artificial Sequence: Synthetic oligonucleotide
  Target: COL7A1; (+) strand; PAM type: NRG; PAM sequence: GAG
aggactctacagccttgtct

SEQ ID NO: 22033 - DNA, 20 bp, Artificial Sequence
  Description of Artificial Sequence: Synthetic oligonucleotide
  Target: COL7A1; (+) strand; PAM type: NRG; PAM sequence: AGG
ggactctacagccttgtctg

SEQ ID NO: 22034 - DNA, 20 bp, Artificial Sequence
  Description of Artificial Sequence: Synthetic oligonucleotide
  Target: COL7A1; (+) strand; PAM type: NRG; PAM sequence: CGG
ctacagccttgtctgaggcg

SEQ ID NO: 22035 - DNA, 20 bp, Artificial Sequence
  Description of Artificial Sequence: Synthetic oligonucleotide
  Target: COL7A1; (+) strand; PAM type: NRG; PAM sequence: GGG
tacagccttgtctgaggcgc

SEQ ID NO: 22036 - DNA, 20 bp, Artificial Sequence
  Description of Artificial Sequence: Synthetic oligonucleotide
  Target: COL7A1; (+) strand; PAM type: NRG; PAM sequence: GGG
acagccttgtctgaggcgcg

SEQ ID NO: 22037 - DNA, 20 bp, Artificial Sequence
  Description of Artificial Sequence: Synthetic oligonucleotide
  Target: COL7A1; (+) strand; PAM type: NRG; PAM sequence: CAG
tgaggcgcggggactcccct

SEQ ID NO: 22038 - DNA, 20 bp, Artificial Sequence
  Description of Artificial Sequence: Synthetic oligonucleotide
  Target: COL7A1; (+) strand; PAM type: NRG; PAM sequence: GAG
cacatctctcactcaccact

SEQ ID NO: 22039 - DNA, 20 bp, Artificial Sequence
  Description of Artificial Sequence: Synthetic oligonucleotide
  Target: COL7A1; (+) strand; PAM type: NRG; PAM sequence: AGG
acatctctcactcaccactg

SEQ ID NO: 22040 - DNA, 20 bp, Artificial Sequence
  Description of Artificial Sequence: Synthetic oligonucleotide
  Target: COL7A1; (+) strand; PAM type: NRG; PAM sequence: CGG
tgaggacccgccatgtcaca

SEQ ID NO: 22041 - DNA, 20 bp, Artificial Sequence
  Description of Artificial Sequence: Synthetic oligonucleotide
  Target: COL7A1; (+) strand; PAM type: NRG; PAM sequence: TAG
ggacccgccatgtcacacgg

SEQ ID NO: 22042 - DNA, 20 bp, Artificial Sequence
  Description of Artificial Sequence: Synthetic oligonucleotide
  Target: COL7A1; (+) strand; PAM type: NRG; PAM sequence: CAG
ccgccatgtcacacggtagc

SEQ ID NO: 22043 - DNA, 20 bp, Artificial Sequence
  Description of Artificial Sequence: Synthetic oligonucleotide
  Target: COL7A1; (+) strand; PAM type: NRG; PAM sequence: TGG
ccatgtcacacggtagccag

SEQ ID NO: 22044 - DNA, 20 bp, Artificial Sequence
  Description of Artificial Sequence: Synthetic oligonucleotide
  Target: COL7A1; (+) strand; PAM type: NRG; PAM sequence: TGG
acacggtagccagtggcacc

SEQ ID NO: 22045 - DNA, 20 bp, Artificial Sequence
  Description of Artificial Sequence: Synthetic oligonucleotide
  Target: COL7A1; (+) strand; PAM type: NRG; PAM sequence: CAG
tggcacctggcacactccgc

SEQ ID NO: 22046 - DNA, 20 bp, Artificial Sequence
  Description of Artificial Sequence: Synthetic oligonucleotide
  Target: COL7A1; (+) strand; PAM type: NRG; PAM sequence: AGG
ggcacctggcacactccgcc

SEQ ID NO: 22047 - DNA, 20 bp, Artificial Sequence
  Description of Artificial Sequence: Synthetic oligonucleotide
  Target: COL7A1; (+) strand; PAM type: NRG; PAM sequence: CAG
ggcacactccgccaggccac

SEQ ID NO: 22048 - DNA, 20 bp, Artificial Sequence
  Description of Artificial Sequence: Synthetic oligonucleotide
  Target: COL7A1; (+) strand; PAM type: NRG; PAM sequence: AGG
gcacactccgccaggccacc

SEQ ID NO: 22049 - DNA, 20 bp, Artificial Sequence
  Description of Artificial Sequence: Synthetic oligonucleotide
  Target: COL7A1; (+) strand; PAM type: NRG; PAM sequence: GAG
acactccgccaggccaccag

SEQ ID NO: 22050 - DNA, 20 bp, Artificial Sequence
  Description of Artificial Sequence: Synthetic oligonucleotide
  Target: COL7A1; (+) strand; PAM type: NRG; PAM sequence: AGG
cactccgccaggccaccagg

SEQ ID NO: 22051 - DNA, 20 bp, Artificial Sequence
  Description of Artificial Sequence: Synthetic oligonucleotide
  Target: COL7A1; (+) strand; PAM type: NRG; PAM sequence: TGG
gccaggccaccaggaggctg

SEQ ID NO: 22052 - DNA, 20 bp, Artificial Sequence
  Description of Artificial Sequence: Synthetic oligonucleotide
  Target: COL7A1; (+) strand; PAM type: NRG; PAM sequence: GGG
ccaggccaccaggaggctgt

SEQ ID NO: 22053 - DNA, 20 bp, Artificial Sequence
  Description of Artificial Sequence: Synthetic oligonucleotide
  Target: COL7A1; (+) strand; PAM type: NRG; PAM sequence: TGG
caccaggaggctgtgggctg

SEQ ID NO: 22054 - DNA, 20 bp, Artificial Sequence
  Description of Artificial Sequence: Synthetic oligonucleotide
  Target: COL7A1; (+) strand; PAM type: NRG; PAM sequence: TGG
ggctgtgggctgtggtattc

SEQ ID NO: 22055 - DNA, 20 bp, Artificial Sequence
  Description of Artificial Sequence: Synthetic oligonucleotide
  Target: COL7A1; (+) strand; PAM type: NRG; PAM sequence: TGG
gtgggctgtggtattctgga

SEQ ID NO: 22056 - DNA, 20 bp, Artificial Sequence
  Description of Artificial Sequence: Synthetic oligonucleotide
  Target: COL7A1; (+) strand; PAM type: NRG; PAM sequence: CAG
gctgtggtattctggatggt

SEQ ID NO: 22057 - DNA, 20 bp, Artificial Sequence
  Description of Artificial Sequence: Synthetic oligonucleotide
  Target: COL7A1; (+) strand; PAM type: NRG; PAM sequence: CGG
gtattctggatggtcagttc

SEQ ID NO: 22058 - DNA, 20 bp, Artificial Sequence
  Description of Artificial Sequence: Synthetic oligonucleotide
  Target: COL7A1; (+) strand; PAM type: NRG; PAM sequence: TAG
atggtcagttccggcccttc

SEQ ID NO: 22059 - DNA, 20 bp, Artificial Sequence
  Description of Artificial Sequence: Synthetic oligonucleotide
  Target: COL7A1; (+) strand; PAM type: NRG; PAM sequence: AGG
tggtcagttccggcccttct

SEQ ID NO: 22060 - DNA, 20 bp, Artificial Sequence
  Description of Artificial Sequence: Synthetic oligonucleotide
  Target: COL7A1; (+) strand; PAM type: NRG; PAM sequence: GGG
ggtcagttccggcccttcta

SEQ ID NO: 22061 - DNA, 20 bp, Artificial Sequence
  Description of Artificial Sequence: Synthetic oligonucleotide
  Target: COL7A1; (+) strand; PAM type: NRG; PAM sequence: CAG
cagttccggcccttctaggg

SEQ ID NO: 22062 - DNA, 20 bp, Artificial Sequence
  Description of Artificial Sequence: Synthetic oligonucleotide
  Target: COL7A1; (+) strand; PAM type: NRG; PAM sequence: TGG
tccggcccttctagggcagc

SEQ ID NO: 22063 - DNA, 20 bp, Artificial Sequence
  Description of Artificial Sequence: Synthetic oligonucleotide
  Target: COL7A1; (+) strand; PAM type: NRG; PAM sequence: GGG
ccggcccttctagggcagct

SEQ ID NO: 22064 - DNA, 20 bp, Artificial Sequence
  Description of Artificial Sequence: Synthetic oligonucleotide
  Target: COL7A1; (+) strand; PAM type: NRG; PAM sequence: GGG
cggcccttctagggcagctg

SEQ ID NO: 22065 - DNA, 20 bp, Artificial Sequence
  Description of Artificial Sequence: Synthetic oligonucleotide
  Target: COL7A1; (+) strand; PAM type: NRG; PAM sequence: GGG
ggcccttctagggcagctgg

SEQ ID NO: 22066 - DNA, 20 bp, Artificial Sequence
  Description of Artificial Sequence: Synthetic oligonucleotide
  Target: COL7A1; (+) strand; PAM type: NRG; PAM sequence: GAG
cccttctagggcagctgggg

SEQ ID NO: 22067 - DNA, 20 bp, Artificial Sequence
  Description of Artificial Sequence: Synthetic oligonucleotide
  Target: COL7A1; (+) strand; PAM type: NRG; PAM sequence: GAG
cttctagggcagctggggga

SEQ ID NO: 22068 - DNA, 20 bp, Artificial Sequence
  Description of Artificial Sequence: Synthetic oligonucleotide
  Target: COL7A1; (+) strand; PAM type: NRG; PAM sequence: CAG
cagctgggggagagtcccac

SEQ ID NO: 22069 - DNA, 20 bp, Artificial Sequence
  Description of Artificial Sequence: Synthetic oligonucleotide
  Target: COL7A1; (+) strand; PAM type: NRG; PAM sequence: AGG
agctgggggagagtcccacc

SEQ ID NO: 22070 - DNA, 20 bp, Artificial Sequence
  Description of Artificial Sequence: Synthetic oligonucleotide
  Target: COL7A1; (+) strand; PAM type: NRG; PAM sequence: GGG
gctgggggagagtcccacca

SEQ ID NO: 22071 - DNA, 20 bp, Artificial Sequence
  Description of Artificial Sequence: Synthetic oligonucleotide
  Target: COL7A1; (+) strand; PAM type: NRG; PAM sequence: TGG
agagtcccaccagggattca

SEQ ID NO: 22072 - DNA, 20 bp, Artificial Sequence
  Description of Artificial Sequence: Synthetic oligonucleotide
  Target: COL7A1; (+) strand; PAM type: NRG; PAM sequence: GAG
agtcccaccagggattcatg

SEQ ID NO: 22073 - DNA, 20 bp, Artificial Sequence
  Description of Artificial Sequence: Synthetic oligonucleotide
  Target: COL7A1; (+) strand; PAM type: NRG; PAM sequence: CAG
ccaccagggattcatggagt

SEQ ID NO: 22074 - DNA, 20 bp, Artificial Sequence
  Description of Artificial Sequence: Synthetic oligonucleotide
  Target: COL7A1; (+) strand; PAM type: NRG; PAM sequence: AAG
ccagggattcatggagtcag

SEQ ID NO: 22075 - DNA, 20 bp, Artificial Sequence
  Description of Artificial Sequence: Synthetic oligonucleotide
  Target: COL7A1; (+) strand; PAM type: NRG; PAM sequence: TGG
gggattcatggagtcagaag

SEQ ID NO: 22076 - DNA, 20 bp, Artificial Sequence
  Description of Artificial Sequence: Synthetic oligonucleotide
  Target: COL7A1; (+) strand; PAM type: NRG; PAM sequence: GGG
ggattcatggagtcagaagt

SEQ ID NO: 22077 - DNA, 20 bp, Artificial Sequence
  Description of Artificial Sequence: Synthetic oligonucleotide
  Target: COL7A1; (+) strand; PAM type: NRG; PAM sequence: GAG
attcatggagtcagaagtgg

SEQ ID NO: 22078 - DNA, 20 bp, Artificial Sequence
  Description of Artificial Sequence: Synthetic oligonucleotide
  Target: COL7A1; (+) strand; PAM type: NRG; PAM sequence: AGG
ttcatggagtcagaagtggg

SEQ ID NO: 22079 - DNA, 20 bp, Artificial Sequence
  Description of Artificial Sequence: Synthetic oligonucleotide
  Target: COL7A1; (+) strand; PAM type: NRG; PAM sequence: GGG
tcatggagtcagaagtggga

SEQ ID NO: 22080 - DNA, 20 bp, Artificial Sequence
  Description of Artificial Sequence: Synthetic oligonucleotide
  Target: COL7A1; (+) strand; PAM type: NRG; PAM sequence: GGG
catggagtcagaagtgggag

SEQ ID NO: 22081 - DNA, 20 bp, Artificial Sequence
  Description of Artificial Sequence: Synthetic oligonucleotide
  Target: COL7A1; (+) strand; PAM type: NRG; PAM sequence: GGG
atggagtcagaagtgggagg

SEQ ID NO: 22082 - DNA, 20 bp, Artificial Sequence
  Description of Artificial Sequence: Synthetic oligonucleotide
  Target: COL7A1; (+) strand; PAM type: NRG; PAM sequence: TGG
tcagaagtgggagggggtac

SEQ ID NO: 22083 - DNA, 20 bp, Artificial Sequence
  Description of Artificial Sequence: Synthetic oligonucleotide
  Target: COL7A1; (+) strand; PAM type: NRG; PAM sequence: GGG
cagaagtgggagggggtact

SEQ ID NO: 22084 - DNA, 20 bp, Artificial Sequence
  Description of Artificial Sequence: Synthetic oligonucleotide
  Target: COL7A1; (+) strand; PAM type: NRG; PAM sequence: GGG
agaagtgggagggggtactg

SEQ ID NO: 22085 - DNA, 20 bp, Artificial Sequence
  Description of Artificial Sequence: Synthetic oligonucleotide
  Target: COL7A1; (+) strand; PAM type: NRG; PAM sequence: CGG
gtgggagggggtactggggt

SEQ ID NO: 22086 - DNA, 20 bp, Artificial Sequence
  Description of Artificial Sequence: Synthetic oligonucleotide
  Target: COL7A1; (+) strand; PAM type: NRG; PAM sequence: GGG
tgggagggggtactggggtc

SEQ ID NO: 22087 - DNA, 20 bp, Artificial Sequence
  Description of Artificial Sequence: Synthetic oligonucleotide
  Target: COL7A1; (+) strand; PAM type: NRG; PAM sequence: GGG
gggagggggtactggggtcg

SEQ ID NO: 22088 - DNA, 20 bp, Artificial Sequence
  Description of Artificial Sequence: Synthetic oligonucleotide
  Target: COL7A1; (+) strand; PAM type: NRG; PAM sequence: GGG
ggagggggtactggggtcgg

SEQ ID NO: 22089 - DNA, 20 bp, Artificial Sequence
  Description of Artificial Sequence: Synthetic oligonucleotide
  Target: COL7A1; (+) strand; PAM type: NRG; PAM sequence: TAG
ggggtactggggtcgggggt

SEQ ID NO: 22090 - DNA, 20 bp, Artificial Sequence
  Description of Artificial Sequence: Synthetic oligonucleotide
  Target: COL7A1; (+) strand; PAM type: NRG; PAM sequence: AGG
gggtactggggtcgggggtt

SEQ ID NO: 22091 - DNA, 20 bp, Artificial Sequence
  Description of Artificial Sequence: Synthetic oligonucleotide
  Target: COL7A1; (+) strand; PAM type: NRG; PAM sequence: TGG
ggggtcgggggttaggtgaa

SEQ ID NO: 22092 - DNA, 20 bp, Artificial Sequence
  Description of Artificial Sequence: Synthetic oligonucleotide
  Target: COL7A1; (+) strand; PAM type: NRG; PAM sequence: GGG
gggtcgggggttaggtgaat

SEQ ID NO: 22093 - DNA, 20 bp, Artificial Sequence
  Description of Artificial Sequence: Synthetic oligonucleotide
  Target: COL7A1; (+) strand; PAM type: NRG; PAM sequence: GGG
ggtcgggggttaggtgaatg

SEQ ID NO: 22094 - DNA, 20 bp, Artificial Sequence
  Description of Artificial Sequence: Synthetic oligonucleotide
  Target: COL7A1; (+) strand; PAM type: NRG; PAM sequence: CAG
gggggttaggtgaatggggt

SEQ ID NO: 22095 - DNA, 20 bp, Artificial Sequence
  Description of Artificial Sequence: Synthetic oligonucleotide
  Target: COL7A1; (+) strand; PAM type: NRG; PAM sequence: GAG
gggttaggtgaatggggtca

SEQ ID NO: 22096 - DNA, 20 bp, Artificial Sequence
  Description of Artificial Sequence: Synthetic oligonucleotide
  Target: COL7A1; (+) strand; PAM type: NRG; PAM sequence: AGG
ggttaggtgaatggggtcag

SEQ ID NO: 22097 - DNA, 20 bp, Artificial Sequence
  Description of Artificial Sequence: Synthetic oligonucleotide
  Target: COL7A1; (+) strand; PAM type: NRG; PAM sequence: TGG
aggtgaatggggtcagaggc

SEQ ID NO: 22098 - DNA, 20 bp, Artificial Sequence
  Description of Artificial Sequence: Synthetic oligonucleotide
  Target: COL7A1; (+) strand; PAM type: NRG; PAM sequence: CAG
tgaatggggtcagaggctgg

SEQ ID NO: 22099 - DNA, 20 bp, Artificial Sequence
  Description of Artificial Sequence: Synthetic oligonucleotide
  Target: COL7A1; (+) strand; PAM type: NRG; PAM sequence: TGG
aggctggcagaattgctcac

SEQ ID NO: 22100 - DNA, 20 bp, Artificial Sequence
  Description of Artificial Sequence: Synthetic oligonucleotide
  Target: COL7A1; (+) strand; PAM type: NRG; PAM sequence: GAG
gcagaattgctcactggtcc

SEQ ID NO: 22101 - DNA, 20 bp, Artificial Sequence
  Description of Artificial Sequence: Synthetic oligonucleotide
  Target: COL7A1; (+) strand; PAM type: NRG; PAM sequence: CAG
ggtccgagctgtcccgctca

SEQ ID NO: 22102 - DNA, 20 bp, Artificial Sequence
  Description of Artificial Sequence: Synthetic oligonucleotide
  Target: COL7A1; (+) strand; PAM type: NRG; PAM sequence: TGG
cacagcctccccgatgctgt

SEQ ID NO: 22103 - DNA, 20 bp, Artificial Sequence
  Description of Artificial Sequence: Synthetic oligonucleotide
  Target: COL7A1; (+) strand; PAM type: NRG; PAM sequence: TAG
cctccccgatgctgttggcg

SEQ ID NO: 22104 - DNA, 20 bp, Artificial Sequence
  Description of Artificial Sequence: Synthetic oligonucleotide
  Target: COL7A1; (+) strand; PAM type: NRG; PAM sequence: GAG
tccccgatgctgttggcgta

SEQ ID NO: 22105 - DNA, 20 bp, Artificial Sequence
  Description of Artificial Sequence: Synthetic oligonucleotide
  Target: COL7A1; (+) strand; PAM type: NRG; PAM sequence: AGG
ccccgatgctgttggcgtag

SEQ ID NO: 22106 - DNA, 20 bp, Artificial Sequence
  Description of Artificial Sequence: Synthetic oligonucleotide
  Target: COL7A1; (+) strand; PAM type: NRG; PAM sequence: GGG
cccgatgctgttggcgtaga

SEQ ID NO: 22107 - DNA, 20 bp, Artificial Sequence
  Description of Artificial Sequence: Synthetic oligonucleotide
  Target: COL7A1; (+) strand; PAM type: NRG; PAM sequence: CAG
gttggcgtagagggcaatca

SEQ ID NO: 22108 - DNA, 20 bp, Artificial Sequence
  Description of Artificial Sequence: Synthetic oligonucleotide
  Target: COL7A1; (+) strand; PAM type: NRG; PAM sequence: TGG
agagggcaatcacagtcact

SEQ ID NO: 22109 - DNA, 20 bp, Artificial Sequence
  Description of Artificial Sequence: Synthetic oligonucleotide
  Target: COL7A1; (+) strand; PAM type: NRG; PAM sequence: CGG
aatcacagtcacttggtact

SEQ ID NO: 22110 - DNA, 20 bp, Artificial Sequence
  Description of Artificial Sequence: Synthetic oligonucleotide
  Target: COL7A1; (+) strand; PAM type: NRG; PAM sequence: CAG
acagtcacttggtactcggt

SEQ ID NO: 22111 - DNA, 20 bp, Artificial Sequence
  Description of Artificial Sequence: Synthetic oligonucleotide
  Target: COL7A1; (+) strand; PAM type: NRG; PAM sequence: TGG
gtcacttggtactcggtcag

SEQ ID NO: 22112 - DNA, 20 bp, Artificial Sequence
  Description of Artificial Sequence: Synthetic oligonucleotide
  Target: COL7A1; (+) strand; PAM type: NRG; PAM sequence: CGG
cttggtactcggtcagtggc

SEQ ID NO: 22113 - DNA, 20 bp, Artificial Sequence
  Description of Artificial Sequence: Synthetic oligonucleotide
  Target: COL7A1; (+) strand; PAM type: NRG; PAM sequence: GAG
tggtactcggtcagtggccg

SEQ ID NO: 22114 - DNA, 20 bp, Artificial Sequence
  Description of Artificial Sequence: Synthetic oligonucleotide
  Target: COL7A1; (+) strand; PAM type: NRG; PAM sequence: CAG
gtcagtggccggagaccccg

SEQ ID NO: 22115 - DNA, 20 bp, Artificial Sequence
  Description of Artificial Sequence: Synthetic oligonucleotide
  Target: COL7A1; (+) strand; PAM type: NRG; PAM sequence: TGG
gagaccccgcagccgcacac

SEQ ID NO: 22116 - DNA, 20 bp, Artificial Sequence
  Description of Artificial Sequence: Synthetic oligonucleotide
  Target: COL7A1; (+) strand; PAM type: NRG; PAM sequence: CAG
cagccgcacactggtctcac

SEQ ID NO: 22117 - DNA, 20 bp, Artificial Sequence
  Description of Artificial Sequence: Synthetic oligonucleotide
  Target: COL7A1; (+) strand; PAM type: NRG; PAM sequence: TGG
cgcacactggtctcaccagc

SEQ ID NO: 22118 - DNA, 20 bp, Artificial Sequence
  Description of Artificial Sequence: Synthetic oligonucleotide
  Target: COL7A1; (+) strand; PAM type: NRG; PAM sequence: GGG
gcacactggtctcaccagct

SEQ ID NO: 22119 - DNA, 20 bp, Artificial Sequence
  Description of Artificial Sequence: Synthetic oligonucleotide
  Target: COL7A1; (+) strand; PAM type: NRG; PAM sequence: CAG
agctgggacgttcacctgcc

SEQ ID NO: 22120 - DNA, 20 bp, Artificial Sequence
  Description of Artificial Sequence: Synthetic oligonucleotide
  Target: COL7A1; (+) strand; PAM type: NRG; PAM sequence: AGG
gctgggacgttcacctgccc

SEQ ID NO: 22121 - DNA, 20 bp, Artificial Sequence
  Description of Artificial Sequence: Synthetic oligonucleotide
  Target: COL7A1; (+) strand; PAM type: NRG; PAM sequence: GGG
ctgggacgttcacctgccca

SEQ ID NO: 22122 - DNA, 20 bp, Artificial Sequence
  Description of Artificial Sequence: Synthetic oligonucleotide
  Target: COL7A1; (+) strand; PAM type: NRG; PAM sequence: AAG
gacgttcacctgcccagggc

SEQ ID NO: 22123 - DNA, 20 bp, Artificial Sequence
  Description of Artificial Sequence: Synthetic oligonucleotide
  Target: COL7A1; (+) strand; PAM type: NRG; PAM sequence: GAG
cgttcacctgcccagggcaa

SEQ ID NO: 22124 - DNA, 20 bp, Artificial Sequence
  Description of Artificial Sequence: Synthetic oligonucleotide
  Target: COL7A1; (+) strand; PAM type: NRG; PAM sequence: AGG
gttcacctgcccagggcaag

SEQ ID NO: 22125 - DNA, 20 bp, Artificial Sequence
  Description of Artificial Sequence: Synthetic oligonucleotide
  Target: COL7A1; (+) strand; PAM type: NRG; PAM sequence: CAG
agaggtcactttatcttgcc

SEQ ID NO: 22126 - DNA, 20 bp, Artificial Sequence
  Description of Artificial Sequence: Synthetic oligonucleotide
  Target: COL7A1; (+) strand; PAM type: NRG; PAM sequence: AAG
tcactttatcttgcccagcc

SEQ ID NO: 22127 - DNA, 20 bp, Artificial Sequence
  Description of Artificial Sequence: Synthetic oligonucleotide
  Target: COL7A1; (+) strand; PAM type: NRG; PAM sequence: CAG
atcttgcccagccaagtccc

SEQ ID NO: 22128 - DNA, 20 bp, Artificial Sequence
  Description of Artificial Sequence: Synthetic oligonucleotide
  Target: COL7A1; (+) strand; PAM type: NRG; PAM sequence: CGG
cctacctcctgccgctcact

SEQ ID NO: 22129 - DNA, 20 bp, Artificial Sequence
  Description of Artificial Sequence: Synthetic oligonucleotide
  Target: COL7A1; (+) strand; PAM type: NRG; PAM sequence: CAG
acctcctgccgctcactcgg

SEQ ID NO: 22130 - DNA, 20 bp, Artificial Sequence
  Description of Artificial Sequence: Synthetic oligonucleotide
  Target: COL7A1; (+) strand; PAM type: NRG; PAM sequence: TGG
tcctgccgctcactcggcag

SEQ ID NO: 22131 - DNA, 20 bp, Artificial Sequence
  Description of Artificial Sequence: Synthetic oligonucleotide
  Target: COL7A1; (+) strand; PAM type: NRG; PAM sequence: CAG
tcactcggcagtggctgtcc

SEQ ID NO: 22132 - DNA, 20 bp, Artificial Sequence
  Description of Artificial Sequence: Synthetic oligonucleotide
  Target: COL7A1; (+) strand; PAM type: NRG; PAM sequence: CAG
agtggctgtcccagccccgt

SEQ ID NO: 22133 - DNA, 20 bp, Artificial Sequence
  Description of Artificial Sequence: Synthetic oligonucleotide
  Target: COL7A1; (+) strand; PAM type: NRG; PAM sequence: GAG
tggctgtcccagccccgtca

SEQ ID NO: 22134 - DNA, 20 bp, Artificial Sequence
  Description of Artificial Sequence: Synthetic oligonucleotide
  Target: COL7A1; (+) strand; PAM type: NRG; PAM sequence: AGG
ggctgtcccagccccgtcag

SEQ ID NO: 22135 - DNA, 20 bp, Artificial Sequence
  Description of Artificial Sequence: Synthetic oligonucleotide
  Target: COL7A1; (+) strand; PAM type: NRG; PAM sequence: GAG
ctgtcccagccccgtcagag

SEQ ID NO: 22136 - DNA, 20 bp, Artificial Sequence
  Description of Artificial Sequence: Synthetic oligonucleotide
  Target: COL7A1; (+) strand; PAM type: NRG; PAM sequence: TGG
gccccgtcagaggagtgtac

SEQ ID NO: 22137 - DNA, 20 bp, Artificial Sequence
  Description of Artificial Sequence: Synthetic oligonucleotide
  Target: COL7A1; (+) strand; PAM type: NRG; PAM sequence: TAG
gaggagtgtactggaccttg

SEQ ID NO: 22138 - DNA, 20 bp, Artificial Sequence
  Description of Artificial Sequence: Synthetic oligonucleotide
  Target: COL7A1; (+) strand; PAM type: NRG; PAM sequence: CAG
agtgtactggaccttgtagc

SEQ ID NO: 22139 - DNA, 20 bp, Artificial Sequence
  Description of Artificial Sequence: Synthetic oligonucleotide
  Target: COL7A1; (+) strand; PAM type: NRG; PAM sequence: CAG
ctggaccttgtagccagtca

SEQ ID NO: 22140 - DNA, 20 bp, Artificial Sequence
  Description of Artificial Sequence: Synthetic oligonucleotide
  Target: COL7A1; (+) strand; PAM type: NRG; PAM sequence: AGG
tggaccttgtagccagtcac

SEQ ID NO: 22141 - DNA, 20 bp, Artificial Sequence
  Description of Artificial Sequence: Synthetic oligonucleotide
  Target: COL7A1; (+) strand; PAM type: NRG; PAM sequence: GGG
ggaccttgtagccagtcaca

SEQ ID NO: 22142 - DNA, 20 bp, Artificial Sequence
  Description of Artificial Sequence: Synthetic oligonucleotide
  Target: COL7A1; (+) strand; PAM type: NRG; PAM sequence: TGG
gtagccagtcacagggccac

SEQ ID NO: 22143 - DNA, 20 bp, Artificial Sequence
  Description of Artificial Sequence: Synthetic oligonucleotide
  Target: COL7A1; (+) strand; PAM type: NRG; PAM sequence: AAG
ccgctgtccactgtactctc

SEQ ID NO: 22144 - DNA, 20 bp, Artificial Sequence
  Description of Artificial Sequence: Synthetic oligonucleotide
  Target: COL7A1; (+) strand; PAM type: NRG; PAM sequence: AGG
cgctgtccactgtactctca

SEQ ID NO: 22145 - DNA, 20 bp, Artificial Sequence
  Description of Artificial Sequence: Synthetic oligonucleotide
  Target: COL7A1; (+) strand; PAM type: NRG; PAM sequence: TGG
tccactgtactctcaaggat

SEQ ID NO: 22146 - DNA, 20 bp, Artificial Sequence
  Description of Artificial Sequence: Synthetic oligonucleotide
  Target: COL7A1; (+) strand; PAM type: NRG; PAM sequence: TGG
actctcaaggattggctgct

SEQ ID NO: 22147 - DNA, 20 bp, Artificial Sequence
  Description of Artificial Sequence: Synthetic oligonucleotide
  Target: COL7A1; (+) strand; PAM type: NRG; PAM sequence: CAG
caaggattggctgcttggct

SEQ ID NO: 22148 - DNA, 20 bp, Artificial Sequence
  Description of Artificial Sequence: Synthetic oligonucleotide
  Target: COL7A1; (+) strand; PAM type: NRG; PAM sequence: CAG
gattggctgcttggctcaga

SEQ ID NO: 22149 - DNA, 20 bp, Artificial Sequence
  Description of Artificial Sequence: Synthetic oligonucleotide
  Target: COL7A1; (+) strand; PAM type: NRG; PAM sequence: CAG
ctgcttggctcagacagcac

SEQ ID NO: 22150 - DNA, 20 bp, Artificial Sequence
  Description of Artificial Sequence: Synthetic oligonucleotide
  Target: COL7A1; (+) strand; PAM type: NRG; PAM sequence: AGG
tgcttggctcagacagcacc

SEQ ID NO: 22151 - DNA, 20 bp, Artificial Sequence
  Description of Artificial Sequence: Synthetic oligonucleotide
  Target: COL7A1; (+) strand; PAM type: NRG; PAM sequence: TGG
tcagacagcaccaggtctcg

SEQ ID NO: 22152 - DNA, 20 bp, Artificial Sequence
  Description of Artificial Sequence: Synthetic oligonucleotide
  Target: COL7A1; (+) strand; PAM type: NRG; PAM sequence: GAG
agacagcaccaggtctcgtg

SEQ ID NO: 22153 - DNA, 20 bp, Artificial Sequence
  Description of Artificial Sequence: Synthetic oligonucleotide
  Target: COL7A1; (+) strand; PAM type: NRG; PAM sequence: CAG
cagcaccaggtctcgtggag

SEQ ID NO: 22154 - DNA, 20 bp, Artificial Sequence
  Description of Artificial Sequence: Synthetic oligonucleotide
  Target: COL7A1; (+) strand; PAM type: NRG; PAM sequence: GAG
gcaccaggtctcgtggagca

SEQ ID NO: 22155 - DNA, 20 bp, Artificial Sequence
  Description of Artificial Sequence: Synthetic oligonucleotide
  Target: COL7A1; (+) strand; PAM type: NRG; PAM sequence: AGG
caccaggtctcgtggagcag

SEQ ID NO: 22156 - DNA, 20 bp, Artificial Sequence
  Description of Artificial Sequence: Synthetic oligonucleotide
  Target: COL7A1; (+) strand; PAM type: NRG; PAM sequence: GAG
ggtctcgtggagcagaggtc

SEQ ID NO: 22157 - DNA, 20 bp, Artificial Sequence
  Description of Artificial Sequence: Synthetic oligonucleotide
  Target: COL7A1; (+) strand; PAM type: NRG; PAM sequence: TGG
gcagaggtcgagtcatccgc

SEQ ID NO: 22158 - DNA, 20 bp, Artificial Sequence
  Description of Artificial Sequence: Synthetic oligonucleotide
  Target: COL7A1; (+) strand; PAM type: NRG; PAM sequence: GGG
cagaggtcgagtcatccgct

SEQ ID NO: 22159 - DNA, 20 bp, Artificial Sequence
  Description of Artificial Sequence: Synthetic oligonucleotide
  Target: COL7A1; (+) strand; PAM type: NRG; PAM sequence: CGG
cgagtcatccgctgggaatg

SEQ ID NO: 22160 - DNA, 20 bp, Artificial Sequence
  Description of Artificial Sequence: Synthetic oligonucleotide
  Target: COL7A1; (+) strand; PAM type: NRG; PAM sequence: GGG
gagtcatccgctgggaatgc

SEQ ID NO: 22161 - DNA, 20 bp, Artificial Sequence
  Description of Artificial Sequence: Synthetic oligonucleotide
  Target: COL7A1; (+) strand; PAM type: NRG; PAM sequence: CAG
atccgctgggaatgcgggat

SEQ ID NO: 22162 - DNA, 20 bp, Artificial Sequence
  Description of Artificial Sequence: Synthetic oligonucleotide
  Target: COL7A1; (+) strand; PAM type: NRG; PAM sequence: AGG
tccgctgggaatgcgggatc

SEQ ID NO: 22163 - DNA, 20 bp, Artificial Sequence
  Description of Artificial Sequence: Synthetic oligonucleotide
  Target: COL7A1; (+) strand; PAM type: NRG; PAM sequence: GGG
ccgctgggaatgcgggatca

SEQ ID NO: 22164 - DNA, 20 bp, Artificial Sequence
  Description of Artificial Sequence: Synthetic oligonucleotide
  Target: COL7A1; (+) strand; PAM type: NRG; PAM sequence: GGG
cgctgggaatgcgggatcag

SEQ ID NO: 22165 - DNA, 20 bp, Artificial Sequence
  Description of Artificial Sequence: Synthetic oligonucleotide
  Target: COL7A1; (+) strand; PAM type: NRG; PAM sequence: CAG
ggaatgcgggatcaggggat

SEQ ID NO: 22166 - DNA, 20 bp, Artificial Sequence
  Description of Artificial Sequence: Synthetic oligonucleotide
  Target: COL7A1; (+) strand; PAM type: NRG; PAM sequence: AGG
gaatgcgggatcaggggatc

SEQ ID NO: 22167 - DNA, 20 bp, Artificial Sequence
  Description of Artificial Sequence: Synthetic oligonucleotide
  Target: COL7A1; (+) strand; PAM type: NRG; PAM sequence: CAG
tgcgggatcaggggatcagg

SEQ ID NO: 22168 - DNA, 20 bp, Artificial Sequence
  Description of Artificial Sequence: Synthetic oligonucleotide
  Target: COL7A1; (+) strand; PAM type: NRG; PAM sequence: AGG
gcgggatcaggggatcaggc

SEQ ID NO: 22169 - DNA, 20 bp, Artificial Sequence
  Description of Artificial Sequence: Synthetic oligonucleotide
  Target: COL7A1; (+) strand; PAM type: NRG; PAM sequence: GAG
gggatcaggggatcaggcag

SEQ ID NO: 22170 - DNA, 20 bp, Artificial Sequence
  Description of Artificial Sequence: Synthetic oligonucleotide
  Target: COL7A1; (+) strand; PAM type: NRG; PAM sequence: AGG
ggatcaggggatcaggcagg

SEQ ID NO: 22171 - DNA, 20 bp, Artificial Sequence
  Description of Artificial Sequence: Synthetic oligonucleotide
  Target: COL7A1; (+) strand; PAM type: NRG; PAM sequence: TGG
aggggatcaggcaggaggat

SEQ ID NO: 22172 - DNA, 20 bp, Artificial Sequence
  Description of Artificial Sequence: Synthetic oligonucleotide
  Target: COL7A1; (+) strand; PAM type: NRG; PAM sequence: GGG
ggggatcaggcaggaggatt

SEQ ID NO: 22173 - DNA, 20 bp, Artificial Sequence
  Description of Artificial Sequence: Synthetic oligonucleotide
  Target: COL7A1; (+) strand; PAM type: NRG; PAM sequence: GGG
gggatcaggcaggaggattg

SEQ ID NO: 22174 - DNA, 20 bp, Artificial Sequence
  Description of Artificial Sequence: Synthetic oligonucleotide
  Target: COL7A1; (+) strand; PAM type: NRG; PAM sequence: TGG
atcaggcaggaggattgggg

SEQ ID NO: 22175 - DNA, 20 bp, Artificial Sequence
  Description of Artificial Sequence: Synthetic oligonucleotide
  Target: COL7A1; (+) strand; PAM type: NRG; PAM sequence: GGG
tcaggcaggaggattggggt

SEQ ID NO: 22176 - DNA, 20 bp, Artificial Sequence
  Description of Artificial Sequence: Synthetic oligonucleotide
  Target: COL7A1; (+) strand; PAM type: NRG; PAM sequence: CAG
tggggtgggcatgtatgatg

SEQ ID NO: 22177 - DNA, 20 bp, Artificial Sequence
  Description of Artificial Sequence: Synthetic oligonucleotide
  Target: COL7A1; (+) strand; PAM type: NRG; PAM sequence: GAG
gggtgggcatgtatgatgca

SEQ ID NO: 22178 - DNA, 20 bp, Artificial Sequence
  Description of Artificial Sequence: Synthetic oligonucleotide
  Target: COL7A1; (+) strand; PAM type: NRG; PAM sequence: TGG
gggcatgtatgatgcagagt

SEQ ID NO: 22179 - DNA, 20 bp, Artificial Sequence
  Description of Artificial Sequence: Synthetic oligonucleotide
  Target: COL7A1; (+) strand; PAM type: NRG; PAM sequence: GGG
ggcatgtatgatgcagagtt

SEQ ID NO: 22180 - DNA, 20 bp, Artificial Sequence
  Description of Artificial Sequence: Synthetic oligonucleotide
  Target: COL7A1; (+) strand; PAM type: NRG; PAM sequence: GGG
gcatgtatgatgcagagttg

SEQ ID NO: 22181 - DNA, 20 bp, Artificial Sequence
  Description of Artificial Sequence: Synthetic oligonucleotide
  Target: COL7A1; (+) strand; PAM type: NRG; PAM sequence: CGG
gtatgatgcagagttggggt

SEQ ID NO: 22182 - DNA, 20 bp, Artificial Sequence
  Description of Artificial Sequence: Synthetic oligonucleotide
  Target: COL7A1; (+) strand; PAM type: NRG; PAM sequence: GGG
tatgatgcagagttggggtc

SEQ ID NO: 22183 - DNA, 20 bp, Artificial Sequence
  Description of Artificial Sequence: Synthetic oligonucleotide
  Target: COL7A1; (+) strand; PAM type: NRG; PAM sequence: GGG
atgatgcagagttggggtcg

SEQ ID NO: 22184 - DNA, 20 bp, Artificial Sequence
  Description of Artificial Sequence: Synthetic oligonucleotide
  Target: COL7A1; (+) strand; PAM type: NRG; PAM sequence: CAG
tgcagagttggggtcggggt

SEQ ID NO: 22185 - DNA, 20 bp, Artificial Sequence
  Description of Artificial Sequence: Synthetic oligonucleotide
  Target: COL7A1; (+) strand; PAM type: NRG; PAM sequence: AGG
gcagagttggggtcggggtc

SEQ ID NO: 22186 - DNA, 20 bp, Artificial Sequence
  Description of Artificial Sequence: Synthetic oligonucleotide
  Target: COL7A1; (+) strand; PAM type: NRG; PAM sequence: GAG
agagttggggtcggggtcag

SEQ ID NO: 22187 - DNA, 20 bp, Artificial Sequence
  Description of Artificial Sequence: Synthetic oligonucleotide
  Target: COL7A1; (+) strand; PAM type: NRG; PAM sequence: TAG
gggtcggggtcaggagcaca

SEQ ID NO: 22188 - DNA, 20 bp, Artificial Sequence
  Description of Artificial Sequence: Synthetic oligonucleotide
  Target: COL7A1; (+) strand; PAM type: NRG; PAM sequence: AGG
ggtcggggtcaggagcacat

SEQ ID NO: 22189 - DNA, 20 bp, Artificial Sequence
  Description of Artificial Sequence: Synthetic oligonucleotide
  Target: COL7A1; (+) strand; PAM type: NRG; PAM sequence: TGG
ggggtcaggagcacatagga

SEQ ID NO: 22190 - DNA, 20 bp, Artificial Sequence
  Description of Artificial Sequence: Synthetic oligonucleotide
  Target: COL7A1; (+) strand; PAM type: NRG; PAM sequence: CAG
aggagcacataggatggaat

SEQ ID NO: 22191 - DNA, 20 bp, Artificial Sequence
  Description of Artificial Sequence: Synthetic oligonucleotide
  Target: COL7A1; (+) strand; PAM type: NRG; PAM sequence: AAG
aggatggaatcagcactgcc

SEQ ID NO: 22192 - DNA, 20 bp, Artificial Sequence
  Description of Artificial Sequence: Synthetic oligonucleotide
  Target: COL7A1; (+) strand; PAM type: NRG; PAM sequence: TGG
atggaatcagcactgccaag

SEQ ID NO: 22193 - DNA, 20 bp, Artificial Sequence
  Description of Artificial Sequence: Synthetic oligonucleotide
  Target: COL7A1; (+) strand; PAM type: NRG; PAM sequence: GGG
tggaatcagcactgccaagt

SEQ ID NO: 22194 - DNA, 20 bp, Artificial Sequence
  Description of Artificial Sequence: Synthetic oligonucleotide
  Target: COL7A1; (+) strand; PAM type: NRG; PAM sequence: GGG
ggaatcagcactgccaagtg

SEQ ID NO: 22195 - DNA, 20 bp, Artificial Sequence
  Description of Artificial Sequence: Synthetic oligonucleotide
  Target: COL7A1; (+) strand; PAM type: NRG; PAM sequence: TGG
cagcactgccaagtggggat

SEQ ID NO: 22196 - DNA, 20 bp, Artificial Sequence
  Description of Artificial Sequence: Synthetic oligonucleotide
  Target: COL7A1; (+) strand; PAM type: NRG; PAM sequence: GGG
agcactgccaagtggggatt

SEQ ID NO: 22197 - DNA, 20 bp, Artificial Sequence
  Description of Artificial Sequence: Synthetic oligonucleotide
  Target: COL7A1; (+) strand; PAM type: NRG; PAM sequence: GGG
gcactgccaagtggggattg

SEQ ID NO: 22198 - DNA, 20 bp, Artificial Sequence
  Description of Artificial Sequence: Synthetic oligonucleotide
  Target: COL7A1; (+) strand; PAM type: NRG; PAM sequence: CGG
gccaagtggggattggggtc

SEQ ID NO: 22199 - DNA, 20 bp, Artificial Sequence
  Description of Artificial Sequence: Synthetic oligonucleotide
  Target: COL7A1; (+) strand; PAM type: NRG; PAM sequence: GGG
ccaagtggggattggggtcc

SEQ ID NO: 22200 - DNA, 20 bp, Artificial Sequence
  Description of Artificial Sequence: Synthetic oligonucleotide
  Target: COL7A1; (+) strand; PAM type: NRG; PAM sequence: GGG
caagtggggattggggtccg

SEQ ID NO: 22201 - DNA, 20 bp, Artificial Sequence
  Description of Artificial Sequence: Synthetic oligonucleotide
  Target: COL7A1; (+) strand; PAM type: NRG; PAM sequence: TAG
ggggattggggtccggggtc

SEQ ID NO: 22202 - DNA, 20 bp, Artificial Sequence
  Description of Artificial Sequence: Synthetic oligonucleotide
  Target: COL7A1; (+) strand; PAM type: NRG; PAM sequence: AGG
gggattggggtccggggtct

SEQ ID NO: 22203 - DNA, 20 bp, Artificial Sequence
  Description of Artificial Sequence: Synthetic oligonucleotide
  Target: COL7A1; (+) strand; PAM type: NRG; PAM sequence: CAG
ttggggtccggggtctaggt

SEQ ID NO: 22204 - DNA, 20 bp, Artificial Sequence
  Description of Artificial Sequence: Synthetic oligonucleotide
  Target: COL7A1; (+) strand; PAM type: NRG; PAM sequence: AGG
tggggtccggggtctaggtc

SEQ ID NO: 22205 - DNA, 20 bp, Artificial Sequence
  Description of Artificial Sequence: Synthetic oligonucleotide
  Target: COL7A1; (+) strand; PAM type: NRG; PAM sequence: GGG
ggggtccggggtctaggtca

SEQ ID NO: 22206 - DNA, 20 bp, Artificial Sequence
  Description of Artificial Sequence: Synthetic oligonucleotide
  Target: COL7A1; (+) strand; PAM type: NRG; PAM sequence: TGG
ctaggtcagggtacaccgtg

SEQ ID NO: 22207 - DNA, 20 bp, Artificial Sequence
  Description of Artificial Sequence: Synthetic oligonucleotide
  Target: COL7A1; (+) strand; PAM type: NRG; PAM sequence: GGG
taggtcagggtacaccgtgt

SEQ ID NO: 22208 - DNA, 20 bp, Artificial Sequence
  Description of Artificial Sequence: Synthetic oligonucleotide
  Target: COL7A1; (+) strand; PAM type: NRG; PAM sequence: CAG
gtcagggtacaccgtgtggg

SEQ ID NO: 22209 - DNA, 20 bp, Artificial Sequence
  Description of Artificial Sequence: Synthetic oligonucleotide
  Target: COL7A1; (+) strand; PAM type: NRG; PAM sequence: AGG
tcagggtacaccgtgtgggc

SEQ ID NO: 22210 - DNA, 20 bp, Artificial Sequence
  Description of Artificial Sequence: Synthetic oligonucleotide
  Target: COL7A1; (+) strand; PAM type: NRG; PAM sequence: GAG
ccgtgtgggcaggaactcac

SEQ ID NO: 22211 - DNA, 20 bp, Artificial Sequence
  Description of Artificial Sequence: Synthetic oligonucleotide
  Target: COL7A1; (+) strand; PAM type: NRG; PAM sequence: AGG
cgtgtgggcaggaactcacg

SEQ ID NO: 22212 - DNA, 20 bp, Artificial Sequence
  Description of Artificial Sequence: Synthetic oligonucleotide
  Target: COL7A1; (+) strand; PAM type: NRG; PAM sequence: CGG
tgggcaggaactcacgaggt

SEQ ID NO: 22213 - DNA, 20 bp, Artificial Sequence
  Description of Artificial Sequence: Synthetic oligonucleotide
  Target: COL7A1; (+) strand; PAM type: NRG; PAM sequence: GGG
gggcaggaactcacgaggtc

SEQ ID NO: 22214 - DNA, 20 bp, Artificial Sequence
  Description of Artificial Sequence: Synthetic oligonucleotide
  Target: COL7A1; (+) strand; PAM type: NRG; PAM sequence: CAG
gaactcacgaggtcgggtca

SEQ ID NO: 22215 - DNA, 20 bp, Artificial Sequence
  Description of Artificial Sequence: Synthetic oligonucleotide
  Target: COL7A1; (+) strand; PAM type: NRG; PAM sequence: AGG
aactcacgaggtcgggtcac

SEQ ID NO: 22216 - DNA, 20 bp, Artificial Sequence
  Description of Artificial Sequence: Synthetic oligonucleotide
  Target: COL7A1; (+) strand; PAM type: NRG; PAM sequence: CAG
tcgggtcacaggcacgccac

SEQ ID NO: 22217 - DNA, 20 bp, Artificial Sequence
  Description of Artificial Sequence: Synthetic oligonucleotide
  Target: COL7A1; (+) strand; PAM type: NRG; PAM sequence: CAG
ggtcacaggcacgccaccag

SEQ ID NO: 22218 - DNA, 20 bp, Artificial Sequence
  Description of Artificial Sequence: Synthetic oligonucleotide
  Target: COL7A1; (+) strand; PAM type: NRG; PAM sequence: CGG
cagcagtcgtgcacactctc

SEQ ID NO: 22219 - DNA, 20 bp, Artificial Sequence
  Description of Artificial Sequence: Synthetic oligonucleotide
  Target: COL7A1; (+) strand; PAM type: NRG; PAM sequence: GGG
agcagtcgtgcacactctcc

SEQ ID NO: 22220 - DNA, 20 bp, Artificial Sequence
  Description of Artificial Sequence: Synthetic oligonucleotide
  Target: COL7A1; (+) strand; PAM type: NRG; PAM sequence: GAG
gtgcacactctccgggaaac

SEQ ID NO: 22221 - DNA, 20 bp, Artificial Sequence
  Description of Artificial Sequence: Synthetic oligonucleotide
  Target: COL7A1; (+) strand; PAM type: NRG; PAM sequence: AGG
tgcacactctccgggaaacg

SEQ ID NO: 22222 - DNA, 20 bp, Artificial Sequence
  Description of Artificial Sequence: Synthetic oligonucleotide
  Target: COL7A1; (+) strand; PAM type: NRG; PAM sequence: GGG
gcacactctccgggaaacga

SEQ ID NO: 22223 - DNA, 20 bp, Artificial Sequence
  Description of Artificial Sequence: Synthetic oligonucleotide
  Target: COL7A1; (+) strand; PAM type: NRG; PAM sequence: GGG
cacactctccgggaaacgag

SEQ ID NO: 22224 - DNA, 20 bp, Artificial Sequence
  Description of Artificial Sequence: Synthetic oligonucleotide
  Target: COL7A1; (+) strand; PAM type: NRG; PAM sequence: CAG
actctccgggaaacgagggg

SEQ ID NO: 22225 - DNA, 20 bp, Artificial Sequence
  Description of Artificial Sequence: Synthetic oligonucleotide
  Target: COL7A1; (+) strand; PAM type: NRG; PAM sequence: TAG
ctccgggaaacgaggggcag

SEQ ID NO: 22226 - DNA, 20 bp, Artificial Sequence
  Description of Artificial Sequence: Synthetic oligonucleotide
  Target: COL7A1; (+) strand; PAM type: NRG; PAM sequence: AAG
cgaggggcagtagtgtcctc

SEQ ID NO: 22227 - DNA, 20 bp, Artificial Sequence
  Description of Artificial Sequence: Synthetic oligonucleotide
  Target: COL7A1; (+) strand; PAM type: NRG; PAM sequence: AAG
gtagtgtcctcaagatgctg

SEQ ID NO: 22228 - DNA, 20 bp, Artificial Sequence
  Description of Artificial Sequence: Synthetic oligonucleotide
  Target: COL7A1; (+) strand; PAM type: NRG; PAM sequence: AAG
agatgctgaagtcattgacg

SEQ ID NO: 22229 - DNA, 20 bp, Artificial Sequence
  Description of Artificial Sequence: Synthetic oligonucleotide
  Target: COL7A1; (+) strand; PAM type: NRG; PAM sequence: AAG
tgctgaagtcattgacgaag

SEQ ID NO: 22230 - DNA, 20 bp, Artificial Sequence
  Description of Artificial Sequence: Synthetic oligonucleotide
  Target: COL7A1; (+) strand; PAM type: NRG; PAM sequence: AAG
tgaagtcattgacgaagaag

SEQ ID NO: 22231 - DNA, 20 bp, Artificial Sequence
  Description of Artificial Sequence: Synthetic oligonucleotide
  Target: COL7A1; (+) strand; PAM type: NRG; PAM sequence: AAG
agtcattgacgaagaagaag

SEQ ID NO: 22232 - DNA, 20 bp, Artificial Sequence
  Description of Artificial Sequence: Synthetic oligonucleotide
  Target: COL7A1; (+) strand; PAM type: NRG; PAM sequence: TGG
gacgaagaagaagaagtcac

SEQ ID NO: 22233 - DNA, 20 bp, Artificial Sequence
  Description of Artificial Sequence: Synthetic oligonucleotide
  Target: COL7A1; (+) strand; PAM type: NRG; PAM sequence: TGG
gaagaagaagaagtcactgg

SEQ ID NO: 22234 - DNA, 20 bp, Artificial Sequence
  Description of Artificial Sequence: Synthetic oligonucleotide
  Target: COL7A1; (+) strand; PAM type: NRG; PAM sequence: GGG
aagaagaagaagtcactggt

SEQ ID NO: 22235 - DNA, 20 bp, Artificial Sequence
  Description of Artificial Sequence: Synthetic oligonucleotide
  Target: COL7A1; (+) strand; PAM type: NRG; PAM sequence: GAG
agaagtcactggtgggctgt

SEQ ID NO: 22236 - DNA, 20 bp, Artificial Sequence
  Description of Artificial Sequence: Synthetic oligonucleotide
  Target: COL7A1; (+) strand; PAM type: NRG; PAM sequence: AGG
gaagtcactggtgggctgtg

SEQ ID NO: 22237 - DNA, 20 bp, Artificial Sequence
  Description of Artificial Sequence: Synthetic oligonucleotide
  Target: COL7A1; (+) strand; PAM type: NRG; PAM sequence: CAG
ggctgtgaggcaactcgctt

SEQ ID NO: 22238 - DNA, 20 bp, Artificial Sequence
  Description of Artificial Sequence: Synthetic oligonucleotide
  Target: COL7A1; (+) strand; PAM type: NRG; PAM sequence: CAG
ggcaactcgcttcagctcct

SEQ ID NO: 22239 - DNA, 20 bp, Artificial Sequence
  Description of Artificial Sequence: Synthetic oligonucleotide
  Target: COL7A1; (+) strand; PAM type: NRG; PAM sequence: AGG
gcaactcgcttcagctcctc

SEQ ID NO: 22240 - DNA, 20 bp, Artificial Sequence
  Description of Artificial Sequence: Synthetic oligonucleotide
  Target: COL7A1; (+) strand; PAM type: NRG; PAM sequence: GGG
caactcgcttcagctcctca

SEQ ID NO: 22241 - DNA, 20 bp, Artificial Sequence
  Description of Artificial Sequence: Synthetic oligonucleotide
  Target: COL7A1; (+) strand; PAM type: NRG; PAM sequence: CAG
tcgcttcagctcctcagggt

SEQ ID NO: 22242 - DNA, 20 bp, Artificial Sequence
  Description of Artificial Sequence: Synthetic oligonucleotide
  Target: COL7A1; (+) strand; PAM type: NRG; PAM sequence: AAG
gtcagcattcttgatccctg

SEQ ID NO: 22243 - DNA, 20 bp, Artificial Sequence
  Description of Artificial Sequence: Synthetic oligonucleotide
  Target: COL7A1; (+) strand; PAM type: NRG; PAM sequence: CAG
tccctgaagtgacgacccat

SEQ ID NO: 22244 - DNA, 20 bp, Artificial Sequence
  Description of Artificial Sequence: Synthetic oligonucleotide
  Target: COL7A1; (+) strand; PAM type: NRG; PAM sequence: AGG
ccctgaagtgacgacccatc

SEQ ID NO: 22245 - DNA, 20 bp, Artificial Sequence
  Description of Artificial Sequence: Synthetic oligonucleotide
  Target: COL7A1; (+) strand; PAM type: NRG; PAM sequence: CAG
agtgacgacccatcaggact

SEQ ID NO: 22246 - DNA, 20 bp, Artificial Sequence
  Description of Artificial Sequence: Synthetic oligonucleotide
  Target: COL7A1; (+) strand; PAM type: NRG; PAM sequence: CAG
ctctgactgcccccaccccc

SEQ ID NO: 22247 - DNA, 20 bp, Artificial Sequence
  Description of Artificial Sequence: Synthetic oligonucleotide
  Target: COL7A1; (+) strand; PAM type: NRG; PAM sequence: CGG
gctgacctgtcactcctgct

SEQ ID NO: 22248 - DNA, 20 bp, Artificial Sequence
  Description of Artificial Sequence: Synthetic oligonucleotide
  Target: COL7A1; (+) strand; PAM type: NRG; PAM sequence: CAG
tcctgctcggtccttaccca

SEQ ID NO: 22249 - DNA, 20 bp, Artificial Sequence
  Description of Artificial Sequence: Synthetic oligonucleotide
  Target: COL7A1; (+) strand; PAM type: NRG; PAM sequence: TAG
cggtccttacccacagcaaa

SEQ ID NO: 22250 - DNA, 20 bp, Artificial Sequence
  Description of Artificial Sequence: Synthetic oligonucleotide
  Target: COL7A1; (+) strand; PAM type: NRG; PAM sequence: CAG
agcttgaccccctgcccctt

SEQ ID NO: 22251 - DNA, 20 bp, Artificial Sequence
  Description of Artificial Sequence: Synthetic oligonucleotide
  Target: COL7A1; (+) strand; PAM type: NRG; PAM sequence: TGG
ccccctgccccttcagcctt

SEQ ID NO: 22252 - DNA, 20 bp, Artificial Sequence
  Description of Artificial Sequence: Synthetic oligonucleotide
  Target: COL7A1; (+) strand; PAM type: NRG; PAM sequence: GGG
cccctgccccttcagccttt

SEQ ID NO: 22253 - DNA, 20 bp, Artificial Sequence
  Description of Artificial Sequence: Synthetic oligonucleotide
  Target: COL7A1; (+) strand; PAM type: NRG; PAM sequence: CAG
ctgccccttcagcctttggg

SEQ ID NO: 22254 - DNA, 20 bp, Artificial Sequence
  Description of Artificial Sequence: Synthetic oligonucleotide
  Target: COL7A1; (+) strand; PAM type: NRG; PAM sequence: CAG
ctttgggcagctgtgtccac

SEQ ID NO: 22255 - DNA, 20 bp, Artificial Sequence
  Description of Artificial Sequence: Synthetic oligonucleotide
  Target: COL7A1; (+) strand; PAM type: NRG; PAM sequence: AGG
tttgggcagctgtgtccacc

SEQ ID NO: 22256 - DNA, 20 bp, Artificial Sequence
  Description of Artificial Sequence: Synthetic oligonucleotide
  Target: COL7A1; (+) strand; PAM type: NRG; PAM sequence: TGG
cagctgtgtccaccaggtcc

SEQ ID NO: 22257 - DNA, 20 bp, Artificial Sequence
  Description of Artificial Sequence: Synthetic oligonucleotide
  Target: COL7A1; (+) strand; PAM type: NRG; PAM sequence: GGG
agctgtgtccaccaggtcct

SEQ ID NO: 22258 - DNA, 20 bp, Artificial Sequence
  Description of Artificial Sequence: Synthetic oligonucleotide
  Target: COL7A1; (+) strand; PAM type: NRG; PAM sequence: CAG
tgggacttcccgtctgtgat

SEQ ID NO: 22259 - DNA, 20 bp, Artificial Sequence
  Description of Artificial Sequence: Synthetic oligonucleotide
  Target: COL7A1; (+) strand; PAM type: NRG; PAM sequence: AGG
gggacttcccgtctgtgatc

SEQ ID NO: 22260 - DNA, 20 bp, Artificial Sequence
  Description of Artificial Sequence: Synthetic oligonucleotide
  Target: COL7A1; (+) strand; PAM type: NRG; PAM sequence: CAG
tcccgtctgtgatcaggatg

SEQ ID NO: 22261 - DNA, 20 bp, Artificial Sequence
  Description of Artificial Sequence: Synthetic oligonucleotide
  Target: COL7A1; (+) strand; PAM type: NRG; PAM sequence: TGG
ctgtgatcaggatgcagacc

SEQ ID NO: 22262 - DNA, 20 bp, Artificial Sequence
  Description of Artificial Sequence: Synthetic oligonucleotide
  Target: COL7A1; (+) strand; PAM type: NRG; PAM sequence: GGG
tgtgatcaggatgcagacct

SEQ ID NO: 22263 - DNA, 20 bp, Artificial Sequence
  Description of Artificial Sequence: Synthetic oligonucleotide
  Target: COL7A1; (+) strand; PAM type: NRG; PAM sequence: CAG
atcaggatgcagacctggga

SEQ ID NO: 22264 - DNA, 20 bp, Artificial Sequence
  Description of Artificial Sequence: Synthetic oligonucleotide
  Target: COL7A1; (+) strand; PAM type: NRG; PAM sequence: AGG
tcaggatgcagacctgggac

SEQ ID NO: 22265 - DNA, 20 bp, Artificial Sequence
  Description of Artificial Sequence: Synthetic oligonucleotide
  Target: COL7A1; (+) strand; PAM type: NRG; PAM sequence: CAG
atgcagacctgggacaggtg

SEQ ID NO: 22266 - DNA, 20 bp, Artificial Sequence
  Description of Artificial Sequence: Synthetic oligonucleotide
  Target: COL7A1; (+) strand; PAM type: NRG; PAM sequence: AGG
tgcagacctgggacaggtgc

SEQ ID NO: 22267 - DNA, 20 bp, Artificial Sequence
  Description of Artificial Sequence: Synthetic oligonucleotide
  Target: COL7A1; (+) strand; PAM type: NRG; PAM sequence: GGG
gcagacctgggacaggtgca

SEQ ID NO: 22268 - DNA, 20 bp, Artificial Sequence
  Description of Artificial Sequence: Synthetic oligonucleotide
  Target: COL7A1; (+) strand; PAM type: NRG; PAM sequence: GGG
cagacctgggacaggtgcag

SEQ ID NO: 22269 - DNA, 20 bp, Artificial Sequence
  Description of Artificial Sequence: Synthetic oligonucleotide
  Target: COL7A1; (+) strand; PAM type: NRG; PAM sequence: CGG
caggtgcaggggtcaaatca

SEQ ID NO: 22270 - DNA, 20 bp, Artificial Sequence
  Description of Artificial Sequence: Synthetic oligonucleotide
  Target: COL7A1; (+) strand; PAM type: NRG; PAM sequence: TGG
gggtcaaatcacggttcccc

SEQ ID NO: 22271 - DNA, 20 bp, Artificial Sequence
  Description of Artificial Sequence: Synthetic oligonucleotide
  Target: COL7A1; (+) strand; PAM type: NRG; PAM sequence: TGG
gttcccctggacacttcatt

SEQ ID NO: 22272 - DNA, 20 bp, Artificial Sequence
  Description of Artificial Sequence: Synthetic oligonucleotide
  Target: COL7A1; (+) strand; PAM type: NRG; PAM sequence: GGG
ttcccctggacacttcattt

SEQ ID NO: 22273 - DNA, 20 bp, Artificial Sequence
  Description of Artificial Sequence: Synthetic oligonucleotide
  Target: COL7A1; (+) strand; PAM type: NRG; PAM sequence: GGG
tcccctggacacttcatttg

SEQ ID NO: 22274 - DNA, 20 bp, Artificial Sequence
  Description of Artificial Sequence: Synthetic oligonucleotide
  Target: COL7A1; (+) strand; PAM type: NRG; PAM sequence: TGG
cacttcatttggggtcatct

SEQ ID NO: 22275 - DNA, 20 bp, Artificial Sequence
  Description of Artificial Sequence: Synthetic oligonucleotide
  Target: COL7A1; (+) strand; PAM type: NRG; PAM sequence: GGG
acttcatttggggtcatctt

SEQ ID NO: 22276 - DNA, 20 bp, Artificial Sequence
  Description of Artificial Sequence: Synthetic oligonucleotide
  Target: COL7A1; (+) strand; PAM type: NRG; PAM sequence: GAG
ttcatttggggtcatcttgg

SEQ ID NO: 22277 - DNA, 20 bp, Artificial Sequence
  Description of Artificial Sequence: Synthetic oligonucleotide
  Target: COL7A1; (+) strand; PAM type: NRG; PAM sequence: AGG
tcatttggggtcatcttggg

SEQ ID NO: 22278 - DNA, 20 bp, Artificial Sequence
  Description of Artificial Sequence: Synthetic oligonucleotide
  Target: COL7A1; (+) strand; PAM type: NRG; PAM sequence: TGG
tggggtcatcttgggaggca

SEQ ID NO: 22279 - DNA, 20 bp, Artificial Sequence
  Description of Artificial Sequence: Synthetic oligonucleotide
  Target: COL7A1; (+) strand; PAM type: NRG; PAM sequence: TAG
ggtcatcttgggaggcatgg

SEQ ID NO: 22280 - DNA, 20 bp, Artificial Sequence
  Description of Artificial Sequence: Synthetic oligonucleotide
  Target: COL7A1; (+) strand; PAM type: NRG; PAM sequence: AGG
gtcatcttgggaggcatggt

SEQ ID NO: 22281 - DNA, 20 bp, Artificial Sequence
  Description of Artificial Sequence: Synthetic oligonucleotide
  Target: COL7A1; (+) strand; PAM type: NRG; PAM sequence: GGG
tcatcttgggaggcatggta

SEQ ID NO: 22282 - DNA, 20 bp, Artificial Sequence
  Description of Artificial Sequence: Synthetic oligonucleotide
  Target: COL7A1; (+) strand; PAM type: NRG; PAM sequence: GGG
catcttgggaggcatggtag

SEQ ID NO: 22283 - DNA, 20 bp, Artificial Sequence
  Description of Artificial Sequence: Synthetic oligonucleotide
  Target: COL7A1; (+) strand; PAM type: NRG; PAM sequence: TAG
cttgggaggcatggtagggg

SEQ ID NO: 22284 - DNA, 20 bp, Artificial Sequence
  Description of Artificial Sequence: Synthetic oligonucleotide
  Target: COL7A1; (+) strand; PAM type: NRG; PAM sequence: AGG
ttgggaggcatggtaggggt

SEQ ID NO: 22285 - DNA, 20 bp, Artificial Sequence
  Description of Artificial Sequence: Synthetic oligonucleotide
  Target: COL7A1; (+) strand; PAM type: NRG; PAM sequence: GGG
tgggaggcatggtaggggta

SEQ ID NO: 22286 - DNA, 20 bp, Artificial Sequence
  Description of Artificial Sequence: Synthetic oligonucleotide
  Target: COL7A1; (+) strand; PAM type: NRG; PAM sequence: TGG
ggtaggggtagggatcacct

SEQ ID NO: 22287 - DNA, 20 bp, Artificial Sequence
  Description of Artificial Sequence: Synthetic oligonucleotide
  Target: COL7A1; (+) strand; PAM type: NRG; PAM sequence: GGG
gtaggggtagggatcacctt

SEQ ID NO: 22288 - DNA, 20 bp, Artificial Sequence
  Description of Artificial Sequence: Synthetic oligonucleotide
  Target: COL7A1; (+) strand; PAM type: NRG; PAM sequence: GGG
taggggtagggatcaccttg

SEQ ID NO: 22289 - DNA, 20 bp, Artificial Sequence
  Description of Artificial Sequence: Synthetic oligonucleotide
  Target: COL7A1; (+) strand; PAM type: NRG; PAM sequence: CAG
agggatcaccttggggacac

SEQ ID NO: 22290 - DNA, 20 bp, Artificial Sequence
  Description of Artificial Sequence: Synthetic oligonucleotide
  Target: COL7A1; (+) strand; PAM type: NRG; PAM sequence: AGG
gggatcaccttggggacacc

SEQ ID NO: 22291 - DNA, 20 bp, Artificial Sequence
  Description of Artificial Sequence: Synthetic oligonucleotide
  Target: COL7A1; (+) strand; PAM type: NRG; PAM sequence: CGG
tcaccttggggacaccaggt

SEQ ID NO: 22292 - DNA, 20 bp, Artificial Sequence
  Description of Artificial Sequence: Synthetic oligonucleotide
  Target: COL7A1; (+) strand; PAM type: NRG; PAM sequence: GGG
caccttggggacaccaggtc

SEQ ID NO: 22293 - DNA, 20 bp, Artificial Sequence
  Description of Artificial Sequence: Synthetic oligonucleotide
  Target: COL7A1; (+) strand; PAM type: NRG; PAM sequence: CAG
ttggggacaccaggtcgggc

SEQ ID NO: 22294 - DNA, 20 bp, Artificial Sequence
  Description of Artificial Sequence: Synthetic oligonucleotide
  Target: COL7A1; (+) strand; PAM type: NRG; PAM sequence: TGG
ggacaccaggtcgggccagc

SEQ ID NO: 22295 - DNA, 20 bp, Artificial Sequence
  Description of Artificial Sequence: Synthetic oligonucleotide
  Target: COL7A1; (+) strand; PAM type: NRG; PAM sequence: GGG
gacaccaggtcgggccagct

SEQ ID NO: 22296 - DNA, 20 bp, Artificial Sequence
  Description of Artificial Sequence: Synthetic oligonucleotide
  Target: COL7A1; (+) strand; PAM type: NRG; PAM sequence: GGG
acaccaggtcgggccagctg

SEQ ID NO: 22297 - DNA, 20 bp, Artificial Sequence
  Description of Artificial Sequence: Synthetic oligonucleotide
  Target: COL7A1; (+) strand; PAM type: NRG; PAM sequence: CAG
ccaggtcgggccagctgggg

SEQ ID NO: 22298 - DNA, 20 bp, Artificial Sequence
  Description of Artificial Sequence: Synthetic oligonucleotide
  Target: COL7A1; (+) strand; PAM type: NRG; PAM sequence: AGG
caggtcgggccagctggggc

SEQ ID NO: 22299 - DNA, 20 bp, Artificial Sequence
  Description of Artificial Sequence: Synthetic oligonucleotide
  Target: COL7A1; (+) strand; PAM type: NRG; PAM sequence: AAG
gtcgggccagctggggcagg

SEQ ID NO: 22300 - DNA, 20 bp, Artificial Sequence
  Description of Artificial Sequence: Synthetic oligonucleotide
  Target: COL7A1; (+) strand; PAM type: NRG; PAM sequence: TGG
ccagctggggcaggaagaca

SEQ ID NO: 22301 - DNA, 20 bp, Artificial Sequence
  Description of Artificial Sequence: Synthetic oligonucleotide
  Target: COL7A1; (+) strand; PAM type: NRG; PAM sequence: CAG
ctggggcaggaagacatggt

SEQ ID NO: 22302 - DNA, 20 bp, Artificial Sequence
  Description of Artificial Sequence: Synthetic oligonucleotide
  Target: COL7A1; (+) strand; PAM type: NRG; PAM sequence: TGG
ggaagacatggtcagccaca

SEQ ID NO: 22303 - DNA, 20 bp, Artificial Sequence
  Description of Artificial Sequence: Synthetic oligonucleotide
  Target: COL7A1; (+) strand; PAM type: NRG; PAM sequence: GAG
aagacatggtcagccacatg

SEQ ID NO: 22304 - DNA, 20 bp, Artificial Sequence
  Description of Artificial Sequence: Synthetic oligonucleotide
  Target: COL7A1; (+) strand; PAM type: NRG; PAM sequence: CAG
gtcagccacatggagaattg

SEQ ID NO: 22305 - DNA, 20 bp, Artificial Sequence
  Description of Artificial Sequence: Synthetic oligonucleotide
  Target: COL7A1; (+) strand; PAM type: NRG; PAM sequence: GAG
gagaattgcagcccctgtgc

SEQ ID NO: 22306 - DNA, 20 bp, Artificial Sequence
  Description of Artificial Sequence: Synthetic oligonucleotide
  Target: COL7A1; (+) strand; PAM type: NRG; PAM sequence: TAG
tgcgagtgttgccccccttg

SEQ ID NO: 22307 - DNA, 20 bp, Artificial Sequence
  Description of Artificial Sequence: Synthetic oligonucleotide
  Target: COL7A1; (+) strand; PAM type: NRG; PAM sequence: AAG
gtgttgccccccttgtagct

SEQ ID NO: 22308 - DNA, 20 bp, Artificial Sequence
  Description of Artificial Sequence: Synthetic oligonucleotide
  Target: COL7A1; (+) strand; PAM type: NRG; PAM sequence: CGG
cccccttgtagctaagctca

SEQ ID NO: 22309 - DNA, 20 bp, Artificial Sequence
  Description of Artificial Sequence: Synthetic oligonucleotide
  Target: COL7A1; (+) strand; PAM type: NRG; PAM sequence: TGG
cttgtagctaagctcacgga

SEQ ID NO: 22310 - DNA, 20 bp, Artificial Sequence
  Description of Artificial Sequence: Synthetic oligonucleotide
  Target: COL7A1; (+) strand; PAM type: NRG; PAM sequence: CGG
agctaagctcacggatggcg

SEQ ID NO: 22311 - DNA, 20 bp, Artificial Sequence
  Description of Artificial Sequence: Synthetic oligonucleotide
  Target: COL7A1; (+) strand; PAM type: NRG; PAM sequence: CAG
ggcgcggatcacatcacccc

SEQ ID NO: 22312 - DNA, 20 bp, Artificial Sequence
  Description of Artificial Sequence: Synthetic oligonucleotide
  Target: COL7A1; (+) strand; PAM type: NRG; PAM sequence: GAG
cgcggatcacatcaccccca

SEQ ID NO: 22313 - DNA, 20 bp, Artificial Sequence
  Description of Artificial Sequence: Synthetic oligonucleotide
  Target: COL7A1; (+) strand; PAM type: NRG; PAM sequence: AAG
atcacatcacccccagagcc

SEQ ID NO: 22314 - DNA, 20 bp, Artificial Sequence
  Description of Artificial Sequence: Synthetic oligonucleotide
  Target: COL7A1; (+) strand; PAM type: NRG; PAM sequence: CAG
cccccagagccaagtgcatc

SEQ ID NO: 22315 - DNA, 20 bp, Artificial Sequence
  Description of Artificial Sequence: Synthetic oligonucleotide
  Target: COL7A1; (+) strand; PAM type: NRG; PAM sequence: AGG
ccccagagccaagtgcatcc

SEQ ID NO: 22316 - DNA, 20 bp, Artificial Sequence
  Description of Artificial Sequence: Synthetic oligonucleotide
  Target: COL7A1; (+) strand; PAM type: NRG; PAM sequence: TGG
caggccgaactctgtcctgt

SEQ ID NO: 22317 - DNA, 20 bp, Artificial Sequence
  Description of Artificial Sequence: Synthetic oligonucleotide
  Target: COL7A1; (+) strand; PAM type: NRG; PAM sequence: GAG
ggccgaactctgtcctgttg

SEQ ID NO: 22318 - DNA, 20 bp, Artificial Sequence
  Description of Artificial Sequence: Synthetic oligonucleotide
  Target: COL7A1; (+) strand; PAM type: NRG; PAM sequence: AGG
gccgaactctgtcctgttgg

SEQ ID NO: 22319 - DNA, 20 bp, Artificial Sequence
  Description of Artificial Sequence: Synthetic oligonucleotide
  Target: COL7A1; (+) strand; PAM type: NRG; PAM sequence: GGG
ccgaactctgtcctgttgga

SEQ ID NO: 22320 - DNA, 20 bp, Artificial Sequence
  Description of Artificial Sequence: Synthetic oligonucleotide
  Target: COL7A1; (+) strand; PAM type: NRG; PAM sequence: TAG
aactctgtcctgttggaggg

SEQ ID NO: 22321 - DNA, 20 bp, Artificial Sequence
  Description of Artificial Sequence: Synthetic oligonucleotide
  Target: COL7A1; (+) strand; PAM type: NRG; PAM sequence: AGG
actctgtcctgttggagggt

SEQ ID NO: 22322 - DNA, 20 bp, Artificial Sequence
  Description of Artificial Sequence: Synthetic oligonucleotide
  Target: COL7A1; (+) strand; PAM type: NRG; PAM sequence: GGG
ctctgtcctgttggagggta

SEQ ID NO: 22323 - DNA, 20 bp, Artificial Sequence
  Description of Artificial Sequence: Synthetic oligonucleotide
  Target: COL7A1; (+) strand; PAM type: NRG; PAM sequence: GGG
tctgtcctgttggagggtag

SEQ ID NO: 22324 - DNA, 20 bp, Artificial Sequence
  Description of Artificial Sequence: Synthetic oligonucleotide
  Target: COL7A1; (+) strand; PAM type: NRG; PAM sequence: TGG
gtcctgttggagggtagggg

SEQ ID NO: 22325 - DNA, 20 bp, Artificial Sequence
  Description of Artificial Sequence: Synthetic oligonucleotide
  Target: COL7A1; (+) strand; PAM type: NRG; PAM sequence: CAG
ttggagggtaggggtggcaa

SEQ ID NO: 22326 - DNA, 20 bp, Artificial Sequence
  Description of Artificial Sequence: Synthetic oligonucleotide
  Target: COL7A1; (+) strand; PAM type: NRG; PAM sequence: AGG
tggagggtaggggtggcaac

SEQ ID NO: 22327 - DNA, 20 bp, Artificial Sequence
  Description of Artificial Sequence: Synthetic oligonucleotide
  Target: COL7A1; (+) strand; PAM type: NRG; PAM sequence: TAG
gggtaggggtggcaacaggc

SEQ ID NO: 22328 - DNA, 20 bp, Artificial Sequence
  Description of Artificial Sequence: Synthetic oligonucleotide
  Target: COL7A1; (+) strand; PAM type: NRG; PAM sequence: AGG
ggtaggggtggcaacaggct

SEQ ID NO: 22329 - DNA, 20 bp, Artificial Sequence
  Description of Artificial Sequence: Synthetic oligonucleotide
  Target: COL7A1; (+) strand; PAM type: NRG; PAM sequence: CAG
ggtggcaacaggctaggact

SEQ ID NO: 22330 - DNA, 20 bp, Artificial Sequence
  Description of Artificial Sequence: Synthetic oligonucleotide
  Target: COL7A1; (+) strand; PAM type: NRG; PAM sequence: AGG
gtggcaacaggctaggactc

SEQ ID NO: 22331 - DNA, 20 bp, Artificial Sequence
  Description of Artificial Sequence: Synthetic oligonucleotide
  Target: COL7A1; (+) strand; PAM type: NRG; PAM sequence: TGG
ctaggactcaggatctcttc

SEQ ID NO: 22332 - DNA, 20 bp, Artificial Sequence
  Description of Artificial Sequence: Synthetic oligonucleotide
  Target: COL7A1; (+) strand; PAM type: NRG; PAM sequence: TGG
ctcaggatctcttctggccc

SEQ ID NO: 22333 - DNA, 20 bp, Artificial Sequence
  Description of Artificial Sequence: Synthetic oligonucleotide
  Target: COL7A1; (+) strand; PAM type: NRG; PAM sequence: GAG
tctcttctggccctggcctt

SEQ ID NO: 22334 - DNA, 20 bp, Artificial Sequence
  Description of Artificial Sequence: Synthetic oligonucleotide
  Target: COL7A1; (+) strand; PAM type: NRG; PAM sequence: AGG
ctcttctggccctggccttg

SEQ ID NO: 22335 - DNA, 20 bp, Artificial Sequence
  Description of Artificial Sequence: Synthetic oligonucleotide
  Target: COL7A1; (+) strand; PAM type: NRG; PAM sequence: GAG
cttctggccctggccttgag

SEQ ID NO: 22336 - DNA, 20 bp, Artificial Sequence
  Description of Artificial Sequence: Synthetic oligonucleotide
  Target: COL7A1; (+) strand; PAM type: NRG; PAM sequence: AGG
ttctggccctggccttgagg

SEQ ID NO: 22337 - DNA, 20 bp, Artificial Sequence
  Description of Artificial Sequence: Synthetic oligonucleotide
  Target: COL7A1; (+) strand; PAM type: NRG; PAM sequence: TAG
cctggccttgaggaggcctc

SEQ ID NO: 22338 - DNA, 20 bp, Artificial Sequence
  Description of Artificial Sequence: Synthetic oligonucleotide
  Target: COL7A1; (+) strand; PAM type: NRG; PAM sequence: AGG
ctggccttgaggaggcctct

SEQ ID NO: 22339 - DNA, 20 bp, Artificial Sequence
  Description of Artificial Sequence: Synthetic oligonucleotide
  Target: COL7A1; (+) strand; PAM type: NRG; PAM sequence: GGG
tggccttgaggaggcctcta

SEQ ID NO: 22340 - DNA, 20 bp, Artificial Sequence
  Description of Artificial Sequence: Synthetic oligonucleotide
  Target: COL7A1; (+) strand; PAM type: NRG; PAM sequence: GAG
cttgaggaggcctctagggt

SEQ ID NO: 22341 - DNA, 20 bp, Artificial Sequence
  Description of Artificial Sequence: Synthetic oligonucleotide
  Target: COL7A1; (+) strand; PAM type: NRG; PAM sequence: AGG
ttgaggaggcctctagggtg

SEQ ID NO: 22342 - DNA, 20 bp, Artificial Sequence
  Description of Artificial Sequence: Synthetic oligonucleotide
  Target: COL7A1; (+) strand; PAM type: NRG; PAM sequence: GGG
tgaggaggcctctagggtga

SEQ ID NO: 22343 - DNA, 20 bp, Artificial Sequence
  Description of Artificial Sequence: Synthetic oligonucleotide
  Target: COL7A1; (+) strand; PAM type: NRG; PAM sequence: CGG
ggcctctagggtgagggtta

SEQ ID NO: 22344 - DNA, 20 bp, Artificial Sequence
  Description of Artificial Sequence: Synthetic oligonucleotide
  Target: COL7A1; (+) strand; PAM type: NRG; PAM sequence: GGG
gcctctagggtgagggttac

SEQ ID NO: 22345 - DNA, 20 bp, Artificial Sequence
  Description of Artificial Sequence: Synthetic oligonucleotide
  Target: COL7A1; (+) strand; PAM type: NRG; PAM sequence: CAG
agggtgagggttacgggtat

SEQ ID NO: 22346 - DNA, 20 bp, Artificial Sequence
  Description of Artificial Sequence: Synthetic oligonucleotide
  Target: COL7A1; (+) strand; PAM type: NRG; PAM sequence: AGG
gggtgagggttacgggtatc

SEQ ID NO: 22347 - DNA, 20 bp, Artificial Sequence
  Description of Artificial Sequence: Synthetic oligonucleotide
  Target: COL7A1; (+) strand; PAM type: NRG; PAM sequence: GAG
tacgggtatcaggctctctt

SEQ ID NO: 22348 - DNA, 20 bp, Artificial Sequence
  Description of Artificial Sequence: Synthetic oligonucleotide
  Target: COL7A1; (+) strand; PAM type: NRG; PAM sequence: AGG
acgggtatcaggctctcttg

SEQ ID NO: 22349 - DNA, 20 bp, Artificial Sequence
  Description of Artificial Sequence: Synthetic oligonucleotide
  Target: COL7A1; (+) strand; PAM type: NRG; PAM sequence: GGG
cgggtatcaggctctcttga

SEQ ID NO: 22350 - DNA, 20 bp, Artificial Sequence
  Description of Artificial Sequence: Synthetic oligonucleotide
  Target: COL7A1; (+) strand; PAM type: NRG; PAM sequence: GGG
gggtatcaggctctcttgag

SEQ ID NO: 22351 - DNA, 20 bp, Artificial Sequence
  Description of Artificial Sequence: Synthetic oligonucleotide
  Target: COL7A1; (+) strand; PAM type: NRG; PAM sequence: TGG
tctccacacccacttgcctc

SEQ ID NO: 22352 - DNA, 20 bp, Artificial Sequence
  Description of Artificial Sequence: Synthetic oligonucleotide
  Target: COL7A1; (+) strand; PAM type: NRG; PAM sequence: CAG
ccacttgcctctggaacccc

SEQ ID NO: 22353 - DNA, 20 bp, Artificial Sequence
  Description of Artificial Sequence: Synthetic oligonucleotide
  Target: COL7A1; (+) strand; PAM type: NRG; PAM sequence: AGG
cacttgcctctggaaccccc

SEQ ID NO: 22354 - DNA, 20 bp, Artificial Sequence
  Description of Artificial Sequence: Synthetic oligonucleotide
  Target: COL7A1; (+) strand; PAM type: NRG; PAM sequence: CAG
ccccaggttaacaaactccc

SEQ ID NO: 22355 - DNA, 20 bp, Artificial Sequence
  Description of Artificial Sequence: Synthetic oligonucleotide
  Target: COL7A1; (+) strand; PAM type: NRG; PAM sequence: AGG
cccaggttaacaaactcccc

SEQ ID NO: 22356 - DNA, 20 bp, Artificial Sequence
  Description of Artificial Sequence: Synthetic oligonucleotide
  Target: COL7A1; (+) strand; PAM type: NRG; PAM sequence: GGG
ccaggttaacaaactcccca

SEQ ID NO: 22357 - DNA, 20 bp, Artificial Sequence
  Description of Artificial Sequence: Synthetic oligonucleotide
  Target: COL7A1; (+) strand; PAM type: NRG; PAM sequence: GGG
caggttaacaaactccccag

SEQ ID NO: 22358 - DNA, 20 bp, Artificial Sequence
  Description of Artificial Sequence: Synthetic oligonucleotide
  Target: COL7A1; (+) strand; PAM type: NRG; PAM sequence: CAG
gctcctttgtgcaccatctg

SEQ ID NO: 22359 - DNA, 20 bp, Artificial Sequence
  Description of Artificial Sequence: Synthetic oligonucleotide
  Target: COL7A1; (+) strand; PAM type: NRG; PAM sequence: AGG
ctcctttgtgcaccatctgc

SEQ ID NO: 22360 - DNA, 20 bp, Artificial Sequence
  Description of Artificial Sequence: Synthetic oligonucleotide
  Target: COL7A1; (+) strand; PAM type: NRG; PAM sequence: TGG
ctttgtgcaccatctgcagg

SEQ ID NO: 22361 - DNA, 20 bp, Artificial Sequence
  Description of Artificial Sequence: Synthetic oligonucleotide
  Target: COL7A1; (+) strand; PAM type: NRG; PAM sequence: GGG
tttgtgcaccatctgcaggt

SEQ ID NO: 22362 - DNA, 20 bp, Artificial Sequence
  Description of Artificial Sequence: Synthetic oligonucleotide
  Target: COL7A1; (+) strand; PAM type: NRG; PAM sequence: TGG
gcaccatctgcaggtgggcc

SEQ ID NO: 22363 - DNA, 20 bp, Artificial Sequence
  Description of Artificial Sequence: Synthetic oligonucleotide
  Target: COL7A1; (+) strand; PAM type: NRG; PAM sequence: GGG
caccatctgcaggtgggcct

SEQ ID NO: 22364 - DNA, 20 bp, Artificial Sequence
  Description of Artificial Sequence: Synthetic oligonucleotide
  Target: COL7A1; (+) strand; PAM type: NRG; PAM sequence: CAG
catctgcaggtgggcctggg

SEQ ID NO: 22365 - DNA, 20 bp, Artificial Sequence
  Description of Artificial Sequence: Synthetic oligonucleotide
  Target: COL7A1; (+) strand; PAM type: NRG; PAM sequence: AAG
ggtgggcctgggcagacctg

SEQ ID NO: 22366 - DNA, 20 bp, Artificial Sequence
  Description of Artificial Sequence: Synthetic oligonucleotide
  Target: COL7A1; (+) strand; PAM type: NRG; PAM sequence: AGG
gtgggcctgggcagacctga

SEQ ID NO: 22367 - DNA, 20 bp, Artificial Sequence
  Description of Artificial Sequence: Synthetic oligonucleotide
  Target: COL7A1; (+) strand; PAM type: NRG; PAM sequence: GAG
gggcctgggcagacctgaag

SEQ ID NO: 22368 - DNA, 20 bp, Artificial Sequence
  Description of Artificial Sequence: Synthetic oligonucleotide
  Target: COL7A1; (+) strand; PAM type: NRG; PAM sequence: TAG
ggcagacctgaaggagccct

SEQ ID NO: 22369 - DNA, 20 bp, Artificial Sequence
  Description of Artificial Sequence: Synthetic oligonucleotide
  Target: COL7A1; (+) strand; PAM type: NRG; PAM sequence: AGG
gcagacctgaaggagccctt

SEQ ID NO: 22370 - DNA, 20 bp, Artificial Sequence
  Description of Artificial Sequence: Synthetic oligonucleotide
  Target: COL7A1; (+) strand; PAM type: NRG; PAM sequence: GGG
cagacctgaaggagccctta

SEQ ID NO: 22371 - DNA, 20 bp, Artificial Sequence
  Description of Artificial Sequence: Synthetic oligonucleotide
  Target: COL7A1; (+) strand; PAM type: NRG; PAM sequence: GGG
agacctgaaggagcccttag

SEQ ID NO: 22372 - DNA, 20 bp, Artificial Sequence
  Description of Artificial Sequence: Synthetic oligonucleotide
  Target: COL7A1; (+) strand; PAM type: NRG; PAM sequence: CAG
aaggagcccttaggggctca

SEQ ID NO: 22373 - DNA, 20 bp, Artificial Sequence
  Description of Artificial Sequence: Synthetic oligonucleotide
  Target: COL7A1; (+) strand; PAM type: NRG; PAM sequence: TGG
ccttaggggctcacagtctg

SEQ ID NO: 22374 - DNA, 20 bp, Artificial Sequence
  Description of Artificial Sequence: Synthetic oligonucleotide
  Target: COL7A1; (+) strand; PAM type: NRG; PAM sequence: GGG
cttaggggctcacagtctgt

SEQ ID NO: 22375 - DNA, 20 bp, Artificial Sequence
  Description of Artificial Sequence: Synthetic oligonucleotide
  Target: COL7A1; (+) strand; PAM type: NRG; PAM sequence: GGG
ttaggggctcacagtctgtg

SEQ ID NO: 22376 - DNA, 20 bp, Artificial Sequence
  Description of Artificial Sequence: Synthetic oligonucleotide
  Target: COL7A1; (+) strand; PAM type: NRG; PAM sequence: AAG
gctcacagtctgtggggaac

SEQ ID NO: 22377 - DNA, 20 bp, Artificial Sequence
  Description of Artificial Sequence: Synthetic oligonucleotide
  Target: COL7A1; (+) strand; PAM type: NRG; PAM sequence: CAG
gctgcttaattaaataattg

SEQ ID NO: 22378 - DNA, 20 bp, Artificial Sequence
  Description of Artificial Sequence: Synthetic oligonucleotide
  Target: COL7A1; (+) strand; PAM type: NRG; PAM sequence: AGG
ctgcttaattaaataattgc

SEQ ID NO: 22379 - DNA, 20 bp, Artificial Sequence
  Description of Artificial Sequence: Synthetic oligonucleotide
  Target: COL7A1; (+) strand; PAM type: NRG; PAM sequence: GAG
gcttaattaaataattgcag

SEQ ID NO: 22380 - DNA, 20 bp, Artificial Sequence
  Description of Artificial Sequence: Synthetic oligonucleotide
  Target: COL7A1; (+) strand; PAM type: NRG; PAM sequence: AGG
cttaattaaataattgcagg

SEQ ID NO: 22381 - DNA, 20 bp, Artificial Sequence
  Description of Artificial Sequence: Synthetic oligonucleotide
  Target: COL7A1; (+) strand; PAM type: NRG; PAM sequence: GAG
taattaaataattgcaggag

SEQ ID NO: 22382 - DNA, 20 bp, Artificial Sequence
  Description of Artificial Sequence: Synthetic oligonucleotide
  Target: COL7A1; (+) strand; PAM type: NRG; PAM sequence: AGG
aattaaataattgcaggagg

SEQ ID NO: 22383 - DNA, 20 bp, Artificial Sequence
  Description of Artificial Sequence: Synthetic oligonucleotide
  Target: COL7A1; (+) strand; PAM type: NRG; PAM sequence: GGG
attaaataattgcaggagga

SEQ ID NO: 22384 - DNA, 20 bp, Artificial Sequence
  Description of Artificial Sequence: Synthetic oligonucleotide
  Target: COL7A1; (+) strand; PAM type: NRG; PAM sequence: GGG
ttaaataattgcaggaggag

SEQ ID NO: 22385 - DNA, 20 bp, Artificial Sequence
  Description of Artificial Sequence: Synthetic oligonucleotide
  Target: COL7A1; (+) strand; PAM type: NRG; PAM sequence: CAG
taattgcaggaggaggggtc

SEQ ID NO: 22386 - DNA, 20 bp, Artificial Sequence
  Description of Artificial Sequence: Synthetic oligonucleotide
  Target: COL7A1; (+) strand; PAM type: NRG; PAM sequence: TAG
caggaggaggggtccagatg

SEQ ID NO: 22387 - DNA, 20 bp, Artificial Sequence
  Description of Artificial Sequence: Synthetic oligonucleotide
  Target: COL7A1; (+) strand; PAM type: NRG; PAM sequence: AGG
aggaggaggggtccagatgt

SEQ ID NO: 22388 - DNA, 20 bp, Artificial Sequence
  Description of Artificial Sequence: Synthetic oligonucleotide
  Target: COL7A1; (+) strand; PAM type: NRG; PAM sequence: AAG
ggaggggtccagatgtagga

SEQ ID NO: 22389 - DNA, 20 bp, Artificial Sequence
  Description of Artificial Sequence: Synthetic oligonucleotide
  Target: COL7A1; (+) strand; PAM type: NRG; PAM sequence: TGG
ggggtccagatgtaggaaag

SEQ ID NO: 22390 - DNA, 20 bp, Artificial Sequence
  Description of Artificial Sequence: Synthetic oligonucleotide
  Target: COL7A1; (+) strand; PAM type: NRG; PAM sequence: TGG
agatgtaggaaagtggatgc

SEQ ID NO: 22391 - DNA, 20 bp, Artificial Sequence
  Description of Artificial Sequence: Synthetic oligonucleotide
  Target: COL7A1; (+) strand; PAM type: NRG; PAM sequence: CAG
gtaggaaagtggatgctggc

SEQ ID NO: 22392 - DNA, 20 bp, Artificial Sequence
  Description of Artificial Sequence: Synthetic oligonucleotide
  Target: COL7A1; (+) strand; PAM type: NRG; PAM sequence: TGG
gaaagtggatgctggccaga

SEQ ID NO: 22393 - DNA, 20 bp, Artificial Sequence
  Description of Artificial Sequence: Synthetic oligonucleotide
  Target: COL7A1; (+) strand; PAM type: NRG; PAM sequence: GAG
aagtggatgctggccagatg

SEQ ID NO: 22394 - DNA, 20 bp, Artificial Sequence
  Description of Artificial Sequence: Synthetic oligonucleotide
  Target: COL7A1; (+) strand; PAM type: NRG; PAM sequence: TGG
ctggccagatggagcacctc

SEQ ID NO: 22395 - DNA, 20 bp, Artificial Sequence
  Description of Artificial Sequence: Synthetic oligonucleotide
  Target: COL7A1; (+) strand; PAM type: NRG; PAM sequence: CGG
gatggagcacctctggtgaa

SEQ ID NO: 22396 - DNA, 20 bp, Artificial Sequence
  Description of Artificial Sequence: Synthetic oligonucleotide
  Target: COL7A1; (+) strand; PAM type: NRG; PAM sequence: AAG
cacctctggtgaacggctgc

SEQ ID NO: 22397 - DNA, 20 bp, Artificial Sequence
  Description of Artificial Sequence: Synthetic oligonucleotide
  Target: COL7A1; (+) strand; PAM type: NRG; PAM sequence: AGG
acctctggtgaacggctgca

SEQ ID NO: 22398 - DNA, 20 bp, Artificial Sequence
  Description of Artificial Sequence: Synthetic oligonucleotide
  Target: COL7A1; (+) strand; PAM type: NRG; PAM sequence: GGG
cctctggtgaacggctgcaa

SEQ ID NO: 22399 - DNA, 20 bp, Artificial Sequence
  Description of Artificial Sequence: Synthetic oligonucleotide
  Target: COL7A1; (+) strand; PAM type: NRG; PAM sequence: TAG
tggtgaacggctgcaagggt

SEQ ID NO: 22400 - DNA, 20 bp, Artificial Sequence
  Description of Artificial Sequence: Synthetic oligonucleotide
  Target: COL7A1; (+) strand; PAM type: NRG; PAM sequence: GAG
gtgaacggctgcaagggtta

SEQ ID NO: 22401 - DNA, 20 bp, Artificial Sequence
  Description of Artificial Sequence: Synthetic oligonucleotide
  Target: COL7A1; (+) strand; PAM type: NRG; PAM sequence: AGG
tgaacggctgcaagggttag

SEQ ID NO: 22402 - DNA, 20 bp, Artificial Sequence
  Description of Artificial Sequence: Synthetic oligonucleotide
  Target: COL7A1; (+) strand; PAM type: NRG; PAM sequence: GGG
gaacggctgcaagggttaga

SEQ ID NO: 22403 - DNA, 20 bp, Artificial Sequence
  Description of Artificial Sequence: Synthetic oligonucleotide
  Target: COL7A1; (+) strand; PAM type: NRG; PAM sequence: TAG
ggctgcaagggttagagggc

SEQ ID NO: 22404 - DNA, 20 bp, Artificial Sequence
  Description of Artificial Sequence: Synthetic oligonucleotide
  Target: COL7A1; (+) strand; PAM type: NRG; PAM sequence: TGG
agggttagagggctagaacg

SEQ ID NO: 22405 - DNA, 20 bp, Artificial Sequence
  Description of Artificial Sequence: Synthetic oligonucleotide
  Target: COL7A1; (+) strand; PAM type: NRG; PAM sequence: GAG
ggttagagggctagaacgtg

SEQ ID NO: 22406 - DNA, 20 bp, Artificial Sequence
  Description of Artificial Sequence: Synthetic oligonucleotide
  Target: COL7A1; (+) strand; PAM type: NRG; PAM sequence: CAG
ctagaacgtggagaatccaa

SEQ ID NO: 22407 - DNA, 20 bp, Artificial Sequence
  Description of Artificial Sequence: Synthetic oligonucleotide
  Target: COL7A1; (+) strand; PAM type: NRG; PAM sequence: AGG
tagaacgtggagaatccaac

SEQ ID NO: 22408 - DNA, 20 bp, Artificial Sequence
  Description of Artificial Sequence: Synthetic oligonucleotide
  Target: COL7A1; (+) strand; PAM type: NRG; PAM sequence: TGG
cgtggagaatccaacaggcg

SEQ ID NO: 22409 - DNA, 20 bp, Artificial Sequence
  Description of Artificial Sequence: Synthetic oligonucleotide
  Target: COL7A1; (+) strand; PAM type: NRG; PAM sequence: GGG
gtggagaatccaacaggcgt

SEQ ID NO: 22410 - DNA, 20 bp, Artificial Sequence
  Description of Artificial Sequence: Synthetic oligonucleotide
  Target: COL7A1; (+) strand; PAM type: NRG; PAM sequence: GGG
tggagaatccaacaggcgtg

SEQ ID NO: 22411 - DNA, 20 bp, Artificial Sequence
  Description of Artificial Sequence: Synthetic oligonucleotide
  Target: COL7A1; (+) strand; PAM type: NRG; PAM sequence: GGG
ggagaatccaacaggcgtgg

SEQ ID NO: 22412 - DNA, 20 bp, Artificial Sequence
  Description of Artificial Sequence: Synthetic oligonucleotide
  Target: COL7A1; (+) strand; PAM type: NRG; PAM sequence: TGG
caggcgtgggggccccctcc

SEQ ID NO: 22413 - DNA, 20 bp, Artificial Sequence
  Description of Artificial Sequence: Synthetic oligonucleotide
  Target: COL7A1; (+) strand; PAM type: NRG; PAM sequence: GGG
aggcgtgggggccccctcct

SEQ ID NO: 22414 - DNA, 20 bp, Artificial Sequence
  Description of Artificial Sequence: Synthetic oligonucleotide
  Target: COL7A1; (+) strand; PAM type: NRG; PAM sequence: CAG
cctcctgggctccccatctc

SEQ ID NO: 22415 - DNA, 20 bp, Artificial Sequence
  Description of Artificial Sequence: Synthetic oligonucleotide
  Target: COL7A1; (+) strand; PAM type: NRG; PAM sequence: CAG
tgggctccccatctccagat

SEQ ID NO: 22416 - DNA, 20 bp, Artificial Sequence
  Description of Artificial Sequence: Synthetic oligonucleotide
  Target: COL7A1; (+) strand; PAM type: NRG; PAM sequence: CAG
catctccagatcagaaaaca

SEQ ID NO: 22417 - DNA, 20 bp, Artificial Sequence
  Description of Artificial Sequence: Synthetic oligonucleotide
  Target: COL7A1; (+) strand; PAM type: NRG; PAM sequence: CAG
tcttgcaccttcctgtcttg

SEQ ID NO: 22418 - DNA, 20 bp, Artificial Sequence
  Description of Artificial Sequence: Synthetic oligonucleotide
  Target: COL7A1; (+) strand; PAM type: NRG; PAM sequence: TAG
tgcaccttcctgtcttgcag

SEQ ID NO: 22419 - DNA, 20 bp, Artificial Sequence
  Description of Artificial Sequence: Synthetic oligonucleotide
  Target: COL7A1; (+) strand; PAM type: NRG; PAM sequence: TGG
cttcctgtcttgcagtagcc

SEQ ID NO: 22420 - DNA, 20 bp, Artificial Sequence
  Description of Artificial Sequence: Synthetic oligonucleotide
  Target: COL7A1; (+) strand; PAM type: NRG; PAM sequence: GAG
tcctgtcttgcagtagcctg

SEQ ID NO: 22421 - DNA, 20 bp, Artificial Sequence
  Description of Artificial Sequence: Synthetic oligonucleotide
  Target: COL7A1; (+) strand; PAM type: NRG; PAM sequence: AGG
cctgtcttgcagtagcctgg

SEQ ID NO: 22422 - DNA, 20 bp, Artificial Sequence
  Description of Artificial Sequence: Synthetic oligonucleotide
  Target: COL7A1; (+) strand; PAM type: NRG; PAM sequence: CAG
gcagtagcctggaggtgcct

SEQ ID NO: 22423 - DNA, 20 bp, Artificial Sequence
  Description of Artificial Sequence: Synthetic oligonucleotide
  Target: COL7A1; (+) strand; PAM type: NRG; PAM sequence: AGG
cagtagcctggaggtgcctc

SEQ ID NO: 22424 - DNA, 20 bp, Artificial Sequence
  Description of Artificial Sequence: Synthetic oligonucleotide
  Target: COL7A1; (+) strand; PAM type: NRG; PAM sequence: GGG
agtagcctggaggtgcctca

SEQ ID NO: 22425 - DNA, 20 bp, Artificial Sequence
  Description of Artificial Sequence: Synthetic oligonucleotide
  Target: COL7A1; (+) strand; PAM type: NRG; PAM sequence: AAG
tggaggtgcctcagggcacg

SEQ ID NO: 22426 - DNA, 20 bp, Artificial Sequence
  Description of Artificial Sequence: Synthetic oligonucleotide
  Target: COL7A1; (+) strand; PAM type: NRG; PAM sequence: AGG
ggaggtgcctcagggcacga

SEQ ID NO: 22427 - DNA, 20 bp, Artificial Sequence
  Description of Artificial Sequence: Synthetic oligonucleotide
  Target: COL7A1; (+) strand; PAM type: NRG; PAM sequence: TAG
cagggcacgaaggttctacc

SEQ ID NO: 22428 - DNA, 20 bp, Artificial Sequence
  Description of Artificial Sequence: Synthetic oligonucleotide
  Target: COL7A1; (+) strand; PAM type: NRG; PAM sequence: AGG
agggcacgaaggttctacct

SEQ ID NO: 22429 - DNA, 20 bp, Artificial Sequence
  Description of Artificial Sequence: Synthetic oligonucleotide
  Target: COL7A1; (+) strand; PAM type: NRG; PAM sequence: GGG
gggcacgaaggttctaccta

SEQ ID NO: 22430 - DNA, 20 bp, Artificial Sequence
  Description of Artificial Sequence: Synthetic oligonucleotide
  Target: COL7A1; (+) strand; PAM type: NRG; PAM sequence: AAG
aatccttacctctgtctcca

SEQ ID NO: 22431 - DNA, 20 bp, Artificial Sequence
  Description of Artificial Sequence: Synthetic oligonucleotide
  Target: COL7A1; (+) strand; PAM type: NRG; PAM sequence: AGG
atccttacctctgtctccaa

SEQ ID NO: 22432 - DNA, 20 bp, Artificial Sequence
  Description of Artificial Sequence: Synthetic oligonucleotide
  Target: COL7A1; (+) strand; PAM type: NRG; PAM sequence: GAG
ccttacctctgtctccaaag

SEQ ID NO: 22433 - DNA, 20 bp, Artificial Sequence
  Description of Artificial Sequence: Synthetic oligonucleotide
  Target: COL7A1; (+) strand; PAM type: NRG; PAM sequence: AGG
cttacctctgtctccaaagg

SEQ ID NO: 22434 - DNA, 20 bp, Artificial Sequence
  Description of Artificial Sequence: Synthetic oligonucleotide
  Target: COL7A1; (+) strand; PAM type: NRG; PAM sequence: TGG
tctgtctccaaaggaggtcc

SEQ ID NO: 22435 - DNA, 20 bp, Artificial Sequence
  Description of Artificial Sequence: Synthetic oligonucleotide
  Target: COL7A1; (+) strand; PAM type: NRG; PAM sequence: TAG
tctccaaaggaggtcctggc

SEQ ID NO: 22436 - DNA, 20 bp, Artificial Sequence
  Description of Artificial Sequence: Synthetic oligonucleotide
  Target: COL7A1; (+) strand; PAM type: NRG; PAM sequence: AGG
ctccaaaggaggtcctggct

SEQ ID NO: 22437 - DNA, 20 bp, Artificial Sequence
  Description of Artificial Sequence: Synthetic oligonucleotide
  Target: COL7A1; (+) strand; PAM type: NRG; PAM sequence: GGG
tccaaaggaggtcctggcta

SEQ ID NO: 22438 - DNA, 20 bp, Artificial Sequence
  Description of Artificial Sequence: Synthetic oligonucleotide
  Target: COL7A1; (+) strand; PAM type: NRG; PAM sequence: GGG
ccaaaggaggtcctggctag

SEQ ID NO: 22439 - DNA, 20 bp, Artificial Sequence
  Description of Artificial Sequence: Synthetic oligonucleotide
  Target: COL7A1; (+) strand; PAM type: NRG; PAM sequence: GGG
caaaggaggtcctggctagg

SEQ ID NO: 22440 - DNA, 20 bp, Artificial Sequence
  Description of Artificial Sequence: Synthetic oligonucleotide
  Target: COL7A1; (+) strand; PAM type: NRG; PAM sequence: TAG
ggtcctggctagggggtctc

SEQ ID NO: 22441 - DNA, 20 bp, Artificial Sequence
  Description of Artificial Sequence: Synthetic oligonucleotide
  Target: COL7A1; (+) strand; PAM type: NRG; PAM sequence: AGG
gtcctggctagggggtctct

SEQ ID NO: 22442 - DNA, 20 bp, Artificial Sequence
  Description of Artificial Sequence: Synthetic oligonucleotide
  Target: COL7A1; (+) strand; PAM type: NRG; PAM sequence: AAG
ccccaaaacttgtttctgca

SEQ ID NO: 22443 - DNA, 20 bp, Artificial Sequence
  Description of Artificial Sequence: Synthetic oligonucleotide
  Target: COL7A1; (+) strand; PAM type: NRG; PAM sequence: TGG
aacttgtttctgcaaagacc

SEQ ID NO: 22444 - DNA, 20 bp, Artificial Sequence
  Description of Artificial Sequence: Synthetic oligonucleotide
  Target: COL7A1; (+) strand; PAM type: NRG; PAM sequence: TGG
gtttctgcaaagacctggcc

SEQ ID NO: 22445 - DNA, 20 bp, Artificial Sequence
  Description of Artificial Sequence: Synthetic oligonucleotide
  Target: COL7A1; (+) strand; PAM type: NRG; PAM sequence: GGG
tttctgcaaagacctggcct

SEQ ID NO: 22446 - DNA, 20 bp, Artificial Sequence
  Description of Artificial Sequence: Synthetic oligonucleotide
  Target: COL7A1; (+) strand; PAM type: NRG; PAM sequence: GGG
ttctgcaaagacctggcctg

SEQ ID NO: 22447 - DNA, 20 bp, Artificial Sequence
  Description of Artificial Sequence: Synthetic oligonucleotide
  Target: COL7A1; (+) strand; PAM type: NRG; PAM sequence: CAG
aagacctggcctggggtttc

SEQ ID NO: 22448 - DNA, 20 bp, Artificial Sequence
  Description of Artificial Sequence: Synthetic oligonucleotide
  Target: COL7A1; (+) strand; PAM type: NRG; PAM sequence: AGG
agacctggcctggggtttcc

SEQ ID NO: 22449 - DNA, 20 bp, Artificial Sequence
  Description of Artificial Sequence: Synthetic oligonucleotide
  Target: COL7A1; (+) strand; PAM type: NRG; PAM sequence: GGG
gacctggcctggggtttcca

SEQ ID NO: 22450 - DNA, 20 bp, Artificial Sequence
  Description of Artificial Sequence: Synthetic oligonucleotide
  Target: COL7A1; (+) strand; PAM type: NRG; PAM sequence: TGG
tccagggtctcctccctctc

SEQ ID NO: 22451 - DNA, 20 bp, Artificial Sequence
  Description of Artificial Sequence: Synthetic oligonucleotide
  Target: COL7A1; (+) strand; PAM type: NRG; PAM sequence: GGG
ccagggtctcctccctctct

SEQ ID NO: 22452 - DNA, 20 bp, Artificial Sequence
  Description of Artificial Sequence: Synthetic oligonucleotide
  Target: COL7A1; (+) strand; PAM type: NRG; PAM sequence: GGG
cagggtctcctccctctctg

SEQ ID NO: 22453 - DNA, 20 bp, Artificial Sequence
  Description of Artificial Sequence: Synthetic oligonucleotide
  Target: COL7A1; (+) strand; PAM type: NRG; PAM sequence: AAG
ggtctcctccctctctgggg

SEQ ID NO: 22454 - DNA, 20 bp, Artificial Sequence
  Description of Artificial Sequence: Synthetic oligonucleotide
  Target: COL7A1; (+) strand; PAM type: NRG; PAM sequence: AGG
gtctcctccctctctgggga

SEQ ID NO: 22455 - DNA, 20 bp, Artificial Sequence
  Description of Artificial Sequence: Synthetic oligonucleotide
  Target: COL7A1; (+) strand; PAM type: NRG; PAM sequence: GAG
ctcctccctctctggggaag

SEQ ID NO: 22456 - DNA, 20 bp, Artificial Sequence
  Description of Artificial Sequence: Synthetic oligonucleotide
  Target: COL7A1; (+) strand; PAM type: NRG; PAM sequence: TGG
cctctctggggaaggagtct

SEQ ID NO: 22457 - DNA, 20 bp, Artificial Sequence
  Description of Artificial Sequence: Synthetic oligonucleotide
  Target: COL7A1; (+) strand; PAM type: NRG; PAM sequence: TGG
ctctggggaaggagtcttgg

SEQ ID NO: 22458 - DNA, 20 bp, Artificial Sequence
  Description of Artificial Sequence: Synthetic oligonucleotide
  Target: COL7A1; (+) strand; PAM type: NRG; PAM sequence: GGG
tctggggaaggagtcttggt

SEQ ID NO: 22459 - DNA, 20 bp, Artificial Sequence
  Description of Artificial Sequence: Synthetic oligonucleotide
  Target: COL7A1; (+) strand; PAM type: NRG; PAM sequence: GGG
ctggggaaggagtcttggtg

SEQ ID NO: 22460 - DNA, 20 bp, Artificial Sequence
  Description of Artificial Sequence: Synthetic oligonucleotide
  Target: COL7A1; (+) strand; PAM type: NRG; PAM sequence: TGG
gagtcttggtggggatctcg

SEQ ID NO: 22461 - DNA, 20 bp, Artificial Sequence
  Description of Artificial Sequence: Synthetic oligonucleotide
  Target: COL7A1; (+) strand; PAM type: NRG; PAM sequence: CAG
ggtggggatctcgtggtccc

SEQ ID NO: 22462 - DNA, 20 bp, Artificial Sequence
  Description of Artificial Sequence: Synthetic oligonucleotide
  Target: COL7A1; (+) strand; PAM type: NRG; PAM sequence: CAG
atctcgtggtccccagcccc

SEQ ID NO: 22463 - DNA, 20 bp, Artificial Sequence
  Description of Artificial Sequence: Synthetic oligonucleotide
  Target: COL7A1; (+) strand; PAM type: NRG; PAM sequence: AGG
tctcgtggtccccagccccc

SEQ ID NO: 22464 - DNA, 20 bp, Artificial Sequence
  Description of Artificial Sequence: Synthetic oligonucleotide
  Target: COL7A1; (+) strand; PAM type: NRG; PAM sequence: GGG
ctcgtggtccccagccccca

SEQ ID NO: 22465 - DNA, 20 bp, Artificial Sequence
  Description of Artificial Sequence: Synthetic oligonucleotide
  Target: COL7A1; (+) strand; PAM type: NRG; PAM sequence: TGG
cccagggcccctactcaccg

SEQ ID NO: 22466 - DNA, 20 bp, Artificial Sequence
  Description of Artificial Sequence: Synthetic oligonucleotide
  Target: COL7A1; (+) strand; PAM type: NRG; PAM sequence: GGG
ccagggcccctactcaccgt

SEQ ID NO: 22467 - DNA, 20 bp, Artificial Sequence
  Description of Artificial Sequence: Synthetic oligonucleotide
  Target: COL7A1; (+) strand; PAM type: NRG; PAM sequence: TGG
gtcatcgctgtactgcactg

SEQ ID NO: 22468 - DNA, 20 bp, Artificial Sequence
  Description of Artificial Sequence: Synthetic oligonucleotide
  Target: COL7A1; (+) strand; PAM type: NRG; PAM sequence: AAG
cgctgtactgcactgtggca

SEQ ID NO: 22469 - DNA, 20 bp, Artificial Sequence
  Description of Artificial Sequence: Synthetic oligonucleotide
  Target: COL7A1; (+) strand; PAM type: NRG; PAM sequence: TGG
aaagcgcacaccctgtgcac

SEQ ID NO: 22470 - DNA, 20 bp, Artificial Sequence
  Description of Artificial Sequence: Synthetic oligonucleotide
  Target: COL7A1; (+) strand; PAM type: NRG; PAM sequence: CAG
accctgtgcactggctgctc

SEQ ID NO: 22471 - DNA, 20 bp, Artificial Sequence
  Description of Artificial Sequence: Synthetic oligonucleotide
  Target: COL7A1; (+) strand; PAM type: NRG; PAM sequence: GAG
cctgtgcactggctgctcca

SEQ ID NO: 22472 - DNA, 20 bp, Artificial Sequence
  Description of Artificial Sequence: Synthetic oligonucleotide
  Target: COL7A1; (+) strand; PAM type: NRG; PAM sequence: AAG
tgcactggctgctccagaga

SEQ ID NO: 22473 - DNA, 20 bp, Artificial Sequence
  Description of Artificial Sequence: Synthetic oligonucleotide
  Target: COL7A1; (+) strand; PAM type: NRG; PAM sequence: AGG
gcactggctgctccagagaa

SEQ ID NO: 22474 - DNA, 20 bp, Artificial Sequence
  Description of Artificial Sequence: Synthetic oligonucleotide
  Target: COL7A1; (+) strand; PAM type: NRG; PAM sequence: CAG
ctggctgctccagagaaagg

SEQ ID NO: 22475 - DNA, 20 bp, Artificial Sequence
  Description of Artificial Sequence: Synthetic oligonucleotide
  Target: COL7A1; (+) strand; PAM type: NRG; PAM sequence: CAG
gctccagagaaaggcagcac

SEQ ID NO: 22476 - DNA, 20 bp, Artificial Sequence
  Description of Artificial Sequence: Synthetic oligonucleotide
  Target: COL7A1; (+) strand; PAM type: NRG; PAM sequence: GAG
aaaggcagcaccagcccttc

SEQ ID NO: 22477 - DNA, 20 bp, Artificial Sequence
  Description of Artificial Sequence: Synthetic oligonucleotide
  Target: COL7A1; (+) strand; PAM type: NRG; PAM sequence: AAG
gcagcaccagcccttcgaga

SEQ ID NO: 22478 - DNA, 20 bp, Artificial Sequence
  Description of Artificial Sequence: Synthetic oligonucleotide
  Target: COL7A1; (+) strand; PAM type: NRG; PAM sequence: CGG
ccagcccttcgagaaagctg

SEQ ID NO: 22479 - DNA, 20 bp, Artificial Sequence
  Description of Artificial Sequence: Synthetic oligonucleotide
  Target: COL7A1; (+) strand; PAM type: NRG; PAM sequence: CGG
cgagaaagctgcggacctcg

SEQ ID NO: 22480 - DNA, 20 bp, Artificial Sequence
  Description of Artificial Sequence: Synthetic oligonucleotide
  Target: COL7A1; (+) strand; PAM type: NRG; PAM sequence: CGG
ggacctcgcggaaattgctg

SEQ ID NO: 22481 - DNA, 20 bp, Artificial Sequence
  Description of Artificial Sequence: Synthetic oligonucleotide
  Target: COL7A1; (+) strand; PAM type: NRG; PAM sequence: TGG
gcggaaattgctgcggccaa

SEQ ID NO: 22482 - DNA, 20 bp, Artificial Sequence
  Description of Artificial Sequence: Synthetic oligonucleotide
  Target: COL7A1; (+) strand; PAM type: NRG; PAM sequence: GAG
aattgctgcggccaatggat

SEQ ID NO: 22483 - DNA, 20 bp, Artificial Sequence
  Description of Artificial Sequence: Synthetic oligonucleotide
  Target: COL7A1; (+) strand; PAM type: NRG; PAM sequence: AGG
attgctgcggccaatggatg

SEQ ID NO: 22484 - DNA, 20 bp, Artificial Sequence
  Description of Artificial Sequence: Synthetic oligonucleotide
  Target: COL7A1; (+) strand; PAM type: NRG; PAM sequence: GAG
tgctgcggccaatggatgag

SEQ ID NO: 22485 - DNA, 20 bp, Artificial Sequence
  Description of Artificial Sequence: Synthetic oligonucleotide
  Target: COL7A1; (+) strand; PAM type: NRG; PAM sequence: CAG
ccaatggatgaggagccatc

SEQ ID NO: 22486 - DNA, 20 bp, Artificial Sequence
  Description of Artificial Sequence: Synthetic oligonucleotide
  Target: COL7A1; (+) strand; PAM type: NRG; PAM sequence: AAG
tggatgaggagccatccagt

SEQ ID NO: 22487 - DNA, 20 bp, Artificial Sequence
  Description of Artificial Sequence: Synthetic oligonucleotide
  Target: COL7A1; (+) strand; PAM type: NRG; PAM sequence: CAG
atccagtaagaacacaatgt

SEQ ID NO: 22488 - DNA, 20 bp, Artificial Sequence
  Description of Artificial Sequence: Synthetic oligonucleotide
  Target: COL7A1; (+) strand; PAM type: NRG; PAM sequence: CGG
cagtaagaacacaatgtcag

SEQ ID NO: 22489 - DNA, 20 bp, Artificial Sequence
  Description of Artificial Sequence: Synthetic oligonucleotide
  Target: COL7A1; (+) strand; PAM type: NRG; PAM sequence: AAG
aacacaatgtcagcggcgta

SEQ ID NO: 22490 - DNA, 20 bp, Artificial Sequence
  Description of Artificial Sequence: Synthetic oligonucleotide
  Target: COL7A1; (+) strand; PAM type: NRG; PAM sequence: AGG
acacaatgtcagcggcgtaa

SEQ ID NO: 22491 - DNA, 20 bp, Artificial Sequence
  Description of Artificial Sequence: Synthetic oligonucleotide
  Target: COL7A1; (+) strand; PAM type: NRG; PAM sequence: CAG
cagcggcgtaaaggcgcgtg

SEQ ID NO: 22492 - DNA, 20 bp, Artificial Sequence
  Description of Artificial Sequence: Synthetic oligonucleotide
  Target: COL7A1; (+) strand; PAM type: NRG; PAM sequence: AGG
agcggcgtaaaggcgcgtgc

SEQ ID NO: 22493 - DNA, 20 bp, Artificial Sequence
  Description of Artificial Sequence: Synthetic oligonucleotide
  Target: COL7A1; (+) strand; PAM type: NRG; PAM sequence: TGG
taaaggcgcgtgcaggtcac

SEQ ID NO: 22494 - DNA, 20 bp, Artificial Sequence
  Description of Artificial Sequence: Synthetic oligonucleotide
  Target: COL7A1; (+) strand; PAM type: NRG; PAM sequence: GGG
aaaggcgcgtgcaggtcact

SEQ ID NO: 22495 - DNA, 20 bp, Artificial Sequence
  Description of Artificial Sequence: Synthetic oligonucleotide
  Target: COL7A1; (+) strand; PAM type: NRG; PAM sequence: GGG
aaggcgcgtgcaggtcactg

SEQ ID NO: 22496 - DNA, 20 bp, Artificial Sequence
  Description of Artificial Sequence: Synthetic oligonucleotide
  Target: COL7A1; (+) strand; PAM type: NRG; PAM sequence: CGG
gcgcgtgcaggtcactgggg

SEQ ID NO: 22497 - DNA, 20 bp, Artificial Sequence
  Description of Artificial Sequence: Synthetic oligonucleotide
  Target: COL7A1; (+) strand; PAM type: NRG; PAM sequence: GGG
cgcgtgcaggtcactggggc

SEQ ID NO: 22498 - DNA, 20 bp, Artificial Sequence
  Description of Artificial Sequence: Synthetic oligonucleotide
  Target: COL7A1; (+) strand; PAM type: NRG; PAM sequence: CAG
gtgcaggtcactggggcggg

SEQ ID NO: 22499 - DNA, 20 bp, Artificial Sequence
  Description of Artificial Sequence: Synthetic oligonucleotide
  Target: COL7A1; (+) strand; PAM type: NRG; PAM sequence: AGG
tgcaggtcactggggcgggc

SEQ ID NO: 22500 - DNA, 20 bp, Artificial Sequence
  Description of Artificial Sequence: Synthetic oligonucleotide
  Target: COL7A1; (+) strand; PAM type: NRG; PAM sequence: GAG
caggtcactggggcgggcag

SEQ ID NO: 22501 - DNA, 20 bp, Artificial Sequence
  Description of Artificial Sequence: Synthetic oligonucleotide
  Target: COL7A1; (+) strand; PAM type: NRG; PAM sequence: GAG
ggtcactggggcgggcagga

SEQ ID NO: 22502 - DNA, 20 bp, Artificial Sequence
  Description of Artificial Sequence: Synthetic oligonucleotide
  Target: COL7A1; (+) strand; PAM type: NRG; PAM sequence: CAG
ctggggcgggcaggagagat

SEQ ID NO: 22503 - DNA, 20 bp, Artificial Sequence
  Description of Artificial Sequence: Synthetic oligonucleotide
  Target: COL7A1; (+) strand; PAM type: NRG; PAM sequence: AGG
tggggcgggcaggagagatc

SEQ ID NO: 22504 - DNA, 20 bp, Artificial Sequence
  Description of Artificial Sequence: Synthetic oligonucleotide
  Target: COL7A1; (+) strand; PAM type: NRG; PAM sequence: GGG
ggggcgggcaggagagatca

SEQ ID NO: 22505 - DNA, 20 bp, Artificial Sequence
  Description of Artificial Sequence: Synthetic oligonucleotide
  Target: COL7A1; (+) strand; PAM type: NRG; PAM sequence: TGG
ggagagatcagggcctcttc

SEQ ID NO: 22506 - DNA, 20 bp, Artificial Sequence
  Description of Artificial Sequence: Synthetic oligonucleotide
  Target: COL7A1; (+) strand; PAM type: NRG; PAM sequence: GGG
gagagatcagggcctcttct

SEQ ID NO: 22507 - DNA, 20 bp, Artificial Sequence
  Description of Artificial Sequence: Synthetic oligonucleotide
  Target: COL7A1; (+) strand; PAM type: NRG; PAM sequence: GAG
gagatcagggcctcttctgg

SEQ ID NO: 22508 - DNA, 20 bp, Artificial Sequence
  Description of Artificial Sequence: Synthetic oligonucleotide
  Target: COL7A1; (+) strand; PAM type: NRG; PAM sequence: AGG
agatcagggcctcttctggg

SEQ ID NO: 22509 - DNA, 20 bp, Artificial Sequence
  Description of Artificial Sequence: Synthetic oligonucleotide
  Target: COL7A1; (+) strand; PAM type: NRG; PAM sequence: CGG
caaccacccgcctacccgca

SEQ ID NO: 22510 - DNA, 20 bp, Artificial Sequence
  Description of Artificial Sequence: Synthetic oligonucleotide
  Target: COL7A1; (+) strand; PAM type: NRG; PAM sequence: TGG
ccacccgcctacccgcacgg

SEQ ID NO: 22511 - DNA, 20 bp, Artificial Sequence
  Description of Artificial Sequence: Synthetic oligonucleotide
  Target: COL7A1; (+) strand; PAM type: NRG; PAM sequence: TGG
tacccgcacggtggcctcac

SEQ ID NO: 22512 - DNA, 20 bp, Artificial Sequence
  Description of Artificial Sequence: Synthetic oligonucleotide
  Target: COL7A1; (+) strand; PAM type: NRG; PAM sequence: GGG
acccgcacggtggcctcact

SEQ ID NO: 22513 - DNA, 20 bp, Artificial Sequence
  Description of Artificial Sequence: Synthetic oligonucleotide
  Target: COL7A1; (+) strand; PAM type: NRG; PAM sequence: TGG
acggtggcctcactgggact

SEQ ID NO: 22514 - DNA, 20 bp, Artificial Sequence
  Description of Artificial Sequence: Synthetic oligonucleotide
  Target: COL7A1; (+) strand; PAM type: NRG; PAM sequence: GGG
cggtggcctcactgggactt

SEQ ID NO: 22515 - DNA, 20 bp, Artificial Sequence
  Description of Artificial Sequence: Synthetic oligonucleotide
  Target: COL7A1; (+) strand; PAM type: NRG; PAM sequence: TGG
ggcctcactgggacttggga

SEQ ID NO: 22516 - DNA, 20 bp, Artificial Sequence
  Description of Artificial Sequence: Synthetic oligonucleotide
  Target: COL7A1; (+) strand; PAM type: NRG; PAM sequence: TGG
ctcactgggacttgggatgg

SEQ ID NO: 22517 - DNA, 20 bp, Artificial Sequence
  Description of Artificial Sequence: Synthetic oligonucleotide
  Target: COL7A1; (+) strand; PAM type: NRG; PAM sequence: GGG
tcactgggacttgggatggt

SEQ ID NO: 22518 - DNA, 20 bp, Artificial Sequence
  Description of Artificial Sequence: Synthetic oligonucleotide
  Target: COL7A1; (+) strand; PAM type: NRG; PAM sequence: GGG
cactgggacttgggatggtg

SEQ ID NO: 22519 - DNA, 20 bp, Artificial Sequence
  Description of Artificial Sequence: Synthetic oligonucleotide
  Target: COL7A1; (+) strand; PAM type: NRG; PAM sequence: GAG
ctgggacttgggatggtggg

SEQ ID NO: 22520 - DNA, 20 bp, Artificial Sequence
  Description of Artificial Sequence: Synthetic oligonucleotide
  Target: COL7A1; (+) strand; PAM type: NRG; PAM sequence: GAG
gggacttgggatggtgggga

SEQ ID NO: 22521 - DNA, 20 bp, Artificial Sequence
  Description of Artificial Sequence: Synthetic oligonucleotide
  Target: COL7A1; (+) strand; PAM type: NRG; PAM sequence: TAG
acttgggatggtggggagag

SEQ ID NO: 22522 - DNA, 20 bp, Artificial Sequence
  Description of Artificial Sequence: Synthetic oligonucleotide
  Target: COL7A1; (+) strand; PAM type: NRG; PAM sequence: AGG
cttgggatggtggggagagt

SEQ ID NO: 22523 - DNA, 20 bp, Artificial Sequence
  Description of Artificial Sequence: Synthetic oligonucleotide
  Target: COL7A1; (+) strand; PAM type: NRG; PAM sequence: CAG
aggcctcatcttatgcaaac

SEQ ID NO: 22524 - DNA, 20 bp, Artificial Sequence
  Description of Artificial Sequence: Synthetic oligonucleotide
  Target: COL7A1; (+) strand; PAM type: NRG; PAM sequence: AGG
ggcctcatcttatgcaaacc

SEQ ID NO: 22525 - DNA, 20 bp, Artificial Sequence
  Description of Artificial Sequence: Synthetic oligonucleotide
  Target: COL7A1; (+) strand; PAM type: NRG; PAM sequence: GGG
gcctcatcttatgcaaacca

SEQ ID NO: 22526 - DNA, 20 bp, Artificial Sequence
  Description of Artificial Sequence: Synthetic oligonucleotide
  Target: COL7A1; (+) strand; PAM type: NRG; PAM sequence: CGG
tatgcaaaccagggccgaat

SEQ ID NO: 22527 - DNA, 20 bp, Artificial Sequence
  Description of Artificial Sequence: Synthetic oligonucleotide
  Target: COL7A1; (+) strand; PAM type: NRG; PAM sequence: GAG
aaccagggccgaatcggcct

SEQ ID NO: 22528 - DNA, 20 bp, Artificial Sequence
  Description of Artificial Sequence: Synthetic oligonucleotide
  Target: COL7A1; (+) strand; PAM type: NRG; PAM sequence: GAG
ggccgaatcggcctgagcct

SEQ ID NO: 22529 - DNA, 20 bp, Artificial Sequence
  Description of Artificial Sequence: Synthetic oligonucleotide
  Target: COL7A1; (+) strand; PAM type: NRG; PAM sequence: AGG
gccgaatcggcctgagcctg

SEQ ID NO: 22530 - DNA, 20 bp, Artificial Sequence
  Description of Artificial Sequence: Synthetic oligonucleotide
  Target: COL7A1; (+) strand; PAM type: NRG; PAM sequence: GGG
ccgaatcggcctgagcctga

SEQ ID NO: 22531 - DNA, 20 bp, Artificial Sequence
  Description of Artificial Sequence: Synthetic oligonucleotide
  Target: COL7A1; (+) strand; PAM type: NRG; PAM sequence: TGG
cggcctgagcctgagggcct

SEQ ID NO: 22532 - DNA, 20 bp, Artificial Sequence
  Description of Artificial Sequence: Synthetic oligonucleotide
  Target: COL7A1; (+) strand; PAM type: NRG; PAM sequence: GAG
gcctgagcctgagggccttg

SEQ ID NO: 22533 - DNA, 20 bp, Artificial Sequence
  Description of Artificial Sequence: Synthetic oligonucleotide
  Target: COL7A1; (+) strand; PAM type: NRG; PAM sequence: AGG
cctgagcctgagggccttgg

SEQ ID NO: 22534 - DNA, 20 bp, Artificial Sequence
  Description of Artificial Sequence: Synthetic oligonucleotide
  Target: COL7A1; (+) strand; PAM type: NRG; PAM sequence: GGG
ctgagcctgagggccttgga

SEQ ID NO: 22535 - DNA, 20 bp, Artificial Sequence
  Description of Artificial Sequence: Synthetic oligonucleotide
  Target: COL7A1; (+) strand; PAM type: NRG; PAM sequence: GAG
gagcctgagggccttggagg

SEQ ID NO: 22536 - DNA, 20 bp, Artificial Sequence
  Description of Artificial Sequence: Synthetic oligonucleotide
  Target: COL7A1; (+) strand; PAM type: NRG; PAM sequence: GAG
tgagggccttggagggagtt

SEQ ID NO: 22537 - DNA, 20 bp, Artificial Sequence
  Description of Artificial Sequence: Synthetic oligonucleotide
  Target: COL7A1; (+) strand; PAM type: NRG; PAM sequence: CGG
gccttggagggagttgagct

SEQ ID NO: 22538 - DNA, 20 bp, Artificial Sequence
  Description of Artificial Sequence: Synthetic oligonucleotide
  Target: COL7A1; (+) strand; PAM type: NRG; PAM sequence: TGG
ttggagggagttgagctcgg

SEQ ID NO: 22539 - DNA, 20 bp, Artificial Sequence
  Description of Artificial Sequence: Synthetic oligonucleotide
  Target: COL7A1; (+) strand; PAM type: NRG; PAM sequence: GGG
tggagggagttgagctcggt

SEQ ID NO: 22540 - DNA, 20 bp, Artificial Sequence
  Description of Artificial Sequence: Synthetic oligonucleotide
  Target: COL7A1; (+) strand; PAM type: NRG; PAM sequence: CAG
gagttgagctcggtgggtcc

SEQ ID NO: 22541 - DNA, 20 bp, Artificial Sequence
  Description of Artificial Sequence: Synthetic oligonucleotide
  Target: COL7A1; (+) strand; PAM type: NRG; PAM sequence: GAG
gttgagctcggtgggtccca

SEQ ID NO: 22542 - DNA, 20 bp, Artificial Sequence
  Description of Artificial Sequence: Synthetic oligonucleotide
  Target: COL7A1; (+) strand; PAM type: NRG; PAM sequence: CAG
gagctcggtgggtcccagag

SEQ ID NO: 22543 - DNA, 20 bp, Artificial Sequence
  Description of Artificial Sequence: Synthetic oligonucleotide
  Target: COL7A1; (+) strand; PAM type: NRG; PAM sequence: CGG
ggtcccagagcagactcccg

SEQ ID NO: 22544 - DNA, 20 bp, Artificial Sequence
  Description of Artificial Sequence: Synthetic oligonucleotide
  Target: COL7A1; (+) strand; PAM type: NRG; PAM sequence: GAG
tcccagagcagactcccgcg

SEQ ID NO: 22545 - DNA, 20 bp, Artificial Sequence
  Description of Artificial Sequence: Synthetic oligonucleotide
  Target: COL7A1; (+) strand; PAM type: NRG; PAM sequence: AGG
cccagagcagactcccgcgg

SEQ ID NO: 22546 - DNA, 20 bp, Artificial Sequence
  Description of Artificial Sequence: Synthetic oligonucleotide
  Target: COL7A1; (+) strand; PAM type: NRG; PAM sequence: GGG
ccagagcagactcccgcgga

SEQ ID NO: 22547 - DNA, 20 bp, Artificial Sequence
  Description of Artificial Sequence: Synthetic oligonucleotide
  Target: COL7A1; (+) strand; PAM type: NRG; PAM sequence: TGG
agcagactcccgcggagggt

SEQ ID NO: 22548 - DNA, 20 bp, Artificial Sequence
  Description of Artificial Sequence: Synthetic oligonucleotide
  Target: COL7A1; (+) strand; PAM type: NRG; PAM sequence: GGG
gcagactcccgcggagggtt

SEQ ID NO: 22549 - DNA, 20 bp, Artificial Sequence
  Description of Artificial Sequence: Synthetic oligonucleotide
  Target: COL7A1; (+) strand; PAM type: NRG; PAM sequence: GGG
cagactcccgcggagggttg

SEQ ID NO: 22550 - DNA, 20 bp, Artificial Sequence
  Description of Artificial Sequence: Synthetic oligonucleotide
  Target: COL7A1; (+) strand; PAM type: NRG; PAM sequence: GGG
agactcccgcggagggttgg

SEQ ID NO: 22551 - DNA, 20 bp, Artificial Sequence
  Description of Artificial Sequence: Synthetic oligonucleotide
  Target: COL7A1; (+) strand; PAM type: NRG; PAM sequence: CGG
cgcggagggttgggggtgtg

SEQ ID NO: 22552 - DNA, 20 bp, Artificial Sequence
  Description of Artificial Sequence: Synthetic oligonucleotide
  Target: COL7A1; (+) strand; PAM type: NRG; PAM sequence: GGG
gcggagggttgggggtgtgc

SEQ ID NO: 22553 - DNA, 20 bp, Artificial Sequence
  Description of Artificial Sequence: Synthetic oligonucleotide
  Target: COL7A1; (+) strand; PAM type: NRG; PAM sequence: GGG
cggagggttgggggtgtgcg

SEQ ID NO: 22554 - DNA, 20 bp, Artificial Sequence
  Description of Artificial Sequence: Synthetic oligonucleotide
  Target: COL7A1; (+) strand; PAM type: NRG; PAM sequence: GGG
ggagggttgggggtgtgcgg

SEQ ID NO: 22555 - DNA, 20 bp, Artificial Sequence
  Description of Artificial Sequence: Synthetic oligonucleotide
  Target: COL7A1; (+) strand; PAM type: NRG; PAM sequence: GAG
agggttgggggtgtgcgggg

SEQ ID NO: 22556 - DNA, 20 bp, Artificial Sequence
  Description of Artificial Sequence: Synthetic oligonucleotide
  Target: COL7A1; (+) strand; PAM type: NRG; PAM sequence: AGG
gggttgggggtgtgcggggg

SEQ ID NO: 22557 - DNA, 20 bp, Artificial Sequence
  Description of Artificial Sequence: Synthetic oligonucleotide
  Target: COL7A1; (+) strand; PAM type: NRG; PAM sequence: GGG
ggttgggggtgtgcggggga

SEQ ID NO: 22558 - DNA, 20 bp, Artificial Sequence
  Description of Artificial Sequence: Synthetic oligonucleotide
  Target: COL7A1; (+) strand; PAM type: NRG; PAM sequence: GAG
ttgggggtgtgcgggggagg

SEQ ID NO: 22559 - DNA, 20 bp, Artificial Sequence
  Description of Artificial Sequence: Synthetic oligonucleotide
  Target: COL7A1; (+) strand; PAM type: NRG; PAM sequence: GAG
gggggtgtgcgggggaggga

SEQ ID NO: 22560 - DNA, 20 bp, Artificial Sequence
  Description of Artificial Sequence: Synthetic oligonucleotide
  Target: COL7A1; (+) strand; PAM type: NRG; PAM sequence: CAG
tgcgggggagggagagtcgc

SEQ ID NO: 22561 - DNA, 20 bp, Artificial Sequence
  Description of Artificial Sequence: Synthetic oligonucleotide
  Target: COL7A1; (+) strand; PAM type: NRG; PAM sequence: CGG
gggagggagagtcgccagca

SEQ ID NO: 22562 - DNA, 20 bp, Artificial Sequence
  Description of Artificial Sequence: Synthetic oligonucleotide
  Target: COL7A1; (+) strand; PAM type: NRG; PAM sequence: GGG
ggagggagagtcgccagcac

SEQ ID NO: 22563 - DNA, 20 bp, Artificial Sequence
  Description of Artificial Sequence: Synthetic oligonucleotide
  Target: COL7A1; (+) strand; PAM type: NRG; PAM sequence: TGG
gagagtcgccagcacgggtg

SEQ ID NO: 22564 - DNA, 20 bp, Artificial Sequence
  Description of Artificial Sequence: Synthetic oligonucleotide
  Target: COL7A1; (+) strand; PAM type: NRG; PAM sequence: TGG
cgccagcacgggtgtggact

SEQ ID NO: 22565 - DNA, 20 bp, Artificial Sequence
  Description of Artificial Sequence: Synthetic oligonucleotide
  Target: COL7A1; (+) strand; PAM type: NRG; PAM sequence: GGG
gccagcacgggtgtggactt

SEQ ID NO: 22566 - DNA, 20 bp, Artificial Sequence
  Description of Artificial Sequence: Synthetic oligonucleotide
  Target: COL7A1; (+) strand; PAM type: NRG; PAM sequence: GAG
acgggtgtggacttgggact

SEQ ID NO: 22567 - DNA, 20 bp, Artificial Sequence
  Description of Artificial Sequence: Synthetic oligonucleotide
  Target: COL7A1; (+) strand; PAM type: NRG; PAM sequence: AGG
cgggtgtggacttgggactg

SEQ ID NO: 22568 - DNA, 20 bp, Artificial Sequence
  Description of Artificial Sequence: Synthetic oligonucleotide
  Target: COL7A1; (+) strand; PAM type: NRG; PAM sequence: CAG
tgtggacttgggactgaggt

SEQ ID NO: 22569 - DNA, 20 bp, Artificial Sequence
  Description of Artificial Sequence: Synthetic oligonucleotide
  Target: COL7A1; (+) strand; PAM type: NRG; PAM sequence: TAG
ttgggactgaggtcagcctc

SEQ ID NO: 22570 - DNA, 20 bp, Artificial Sequence
  Description of Artificial Sequence: Synthetic oligonucleotide
  Target: COL7A1; (+) strand; PAM type: NRG; PAM sequence: AGG
tgggactgaggtcagcctct

SEQ ID NO: 22571 - DNA, 20 bp, Artificial Sequence
  Description of Artificial Sequence: Synthetic oligonucleotide
  Target: COL7A1; (+) strand; PAM type: NRG; PAM sequence: GGG
gggactgaggtcagcctcta

SEQ ID NO: 22572 - DNA, 20 bp, Artificial Sequence
  Description of Artificial Sequence: Synthetic oligonucleotide
  Target: COL7A1; (+) strand; PAM type: NRG; PAM sequence: GGG
ggactgaggtcagcctctag

SEQ ID NO: 22573 - DNA, 20 bp, Artificial Sequence
  Description of Artificial Sequence: Synthetic oligonucleotide
  Target: COL7A1; (+) strand; PAM type: NRG; PAM sequence: CGG
tgaggtcagcctctaggggc

SEQ ID NO: 22574 - DNA, 20 bp, Artificial Sequence
  Description of Artificial Sequence: Synthetic oligonucleotide
  Target: COL7A1; (+) strand; PAM type: NRG; PAM sequence: TGG
tcagcctctaggggccggcg

SEQ ID NO: 22575 - DNA, 20 bp, Artificial Sequence
  Description of Artificial Sequence: Synthetic oligonucleotide
  Target: COL7A1; (+) strand; PAM type: NRG; PAM sequence: TGG
ctctaggggccggcgtggat

SEQ ID NO: 22576 - DNA, 20 bp, Artificial Sequence
  Description of Artificial Sequence: Synthetic oligonucleotide
  Target: COL7A1; (+) strand; PAM type: NRG; PAM sequence: AAG
gggccggcgtggattggcat

SEQ ID NO: 22577 - DNA, 20 bp, Artificial Sequence
  Description of Artificial Sequence: Synthetic oligonucleotide
  Target: COL7A1; (+) strand; PAM type: NRG; PAM sequence: AGG
ggccggcgtggattggcata

SEQ ID NO: 22578 - DNA, 20 bp, Artificial Sequence
  Description of Artificial Sequence: Synthetic oligonucleotide
  Target: COL7A1; (+) strand; PAM type: NRG; PAM sequence: CAG
cggcgtggattggcataagg

SEQ ID NO: 22579 - DNA, 20 bp, Artificial Sequence
  Description of Artificial Sequence: Synthetic oligonucleotide
  Target: COL7A1; (+) strand; PAM type: NRG; PAM sequence: AGG
ggcgtggattggcataaggc

SEQ ID NO: 22580 - DNA, 20 bp, Artificial Sequence
  Description of Artificial Sequence: Synthetic oligonucleotide
  Target: COL7A1; (+) strand; PAM type: NRG; PAM sequence: GGG
gcgtggattggcataaggca

SEQ ID NO: 22581 - DNA, 20 bp, Artificial Sequence
  Description of Artificial Sequence: Synthetic oligonucleotide
  Target: COL7A1; (+) strand; PAM type: NRG; PAM sequence: GGG
cgtggattggcataaggcag

SEQ ID NO: 22582 - DNA, 20 bp, Artificial Sequence
  Description of Artificial Sequence: Synthetic oligonucleotide
  Target: COL7A1; (+) strand; PAM type: NRG; PAM sequence: CAG
caggggaccccgcacgcatc

SEQ ID NO: 22583 - DNA, 20 bp, Artificial Sequence
  Description of Artificial Sequence: Synthetic oligonucleotide
  Target: COL7A1; (+) strand; PAM type: NRG; PAM sequence: AGG
aggggaccccgcacgcatcc

SEQ ID NO: 22584 - DNA, 20 bp, Artificial Sequence
  Description of Artificial Sequence: Synthetic oligonucleotide
  Target: COL7A1; (+) strand; PAM type: NRG; PAM sequence: GGG
ggggaccccgcacgcatcca

SEQ ID NO: 22585 - DNA, 20 bp, Artificial Sequence
  Description of Artificial Sequence: Synthetic oligonucleotide
  Target: COL7A1; (+) strand; PAM type: NRG; PAM sequence: GAG
ggaccccgcacgcatccagg

SEQ ID NO: 22586 - DNA, 20 bp, Artificial Sequence
  Description of Artificial Sequence: Synthetic oligonucleotide
  Target: COL7A1; (+) strand; PAM type: NRG; PAM sequence: CAG
cccgcacgcatccagggagc

SEQ ID NO: 22587 - DNA, 20 bp, Artificial Sequence
  Description of Artificial Sequence: Synthetic oligonucleotide
  Target: COL7A1; (+) strand; PAM type: NRG; PAM sequence: TGG
gcatccagggagccagaatt

SEQ ID NO: 22588 - DNA, 20 bp, Artificial Sequence
  Description of Artificial Sequence: Synthetic oligonucleotide
  Target: COL7A1; (+) strand; PAM type: NRG; PAM sequence: GGG
catccagggagccagaattt

SEQ ID NO: 22589 - DNA, 20 bp, Artificial Sequence
  Description of Artificial Sequence: Synthetic oligonucleotide
  Target: COL7A1; (+) strand; PAM type: NRG; PAM sequence: TAG
ccagggagccagaatttggg

SEQ ID NO: 22590 - DNA, 20 bp, Artificial Sequence
  Description of Artificial Sequence: Synthetic oligonucleotide
  Target: COL7A1; (+) strand; PAM type: NRG; PAM sequence: AGG
cagggagccagaatttgggt

SEQ ID NO: 22591 - DNA, 20 bp, Artificial Sequence
  Description of Artificial Sequence: Synthetic oligonucleotide
  Target: COL7A1; (+) strand; PAM type: NRG; PAM sequence: CAG
agccagaatttgggtaggaa

SEQ ID NO: 22592 - DNA, 20 bp, Artificial Sequence
  Description of Artificial Sequence: Synthetic oligonucleotide
  Target: COL7A1; (+) strand; PAM type: NRG; PAM sequence: AGG
gccagaatttgggtaggaac

SEQ ID NO: 22593 - DNA, 20 bp, Artificial Sequence
  Description of Artificial Sequence: Synthetic oligonucleotide
  Target: COL7A1; (+) strand; PAM type: NRG; PAM sequence: TAG
gaatttgggtaggaacagga

SEQ ID NO: 22594 - DNA, 20 bp, Artificial Sequence
  Description of Artificial Sequence: Synthetic oligonucleotide
  Target: COL7A1; (+) strand; PAM type: NRG; PAM sequence: AGG
aatttgggtaggaacaggat

SEQ ID NO: 22595 - DNA, 20 bp, Artificial Sequence
  Description of Artificial Sequence: Synthetic oligonucleotide
  Target: COL7A1; (+) strand; PAM type: NRG; PAM sequence: GAG
tttgggtaggaacaggatag

SEQ ID NO: 22596 - DNA, 20 bp, Artificial Sequence
  Description of Artificial Sequence: Synthetic oligonucleotide
  Target: COL7A1; (+) strand; PAM type: NRG; PAM sequence: AGG
ttgggtaggaacaggatagg

SEQ ID NO: 22597 - DNA, 20 bp, Artificial Sequence
  Description of Artificial Sequence: Synthetic oligonucleotide
  Target: COL7A1; (+) strand; PAM type: NRG; PAM sequence: CGG
ggtaggaacaggataggagg

SEQ ID NO: 22598 - DNA, 20 bp, Artificial Sequence
  Description of Artificial Sequence: Synthetic oligonucleotide
  Target: COL7A1; (+) strand; PAM type: NRG; PAM sequence: TAG
gaacaggataggaggcggtt

SEQ ID NO: 22599 - DNA, 20 bp, Artificial Sequence
  Description of Artificial Sequence: Synthetic oligonucleotide
  Target: COL7A1; (+) strand; PAM type: NRG; PAM sequence: AGG
aacaggataggaggcggttt

SEQ ID NO: 22600 - DNA, 20 bp, Artificial Sequence
  Description of Artificial Sequence: Synthetic oligonucleotide
  Target: COL7A1; (+) strand; PAM type: NRG; PAM sequence: GGG
acaggataggaggcggttta

SEQ ID NO: 22601 - DNA, 20 bp, Artificial Sequence
  Description of Artificial Sequence: Synthetic oligonucleotide
  Target: COL7A1; (+) strand; PAM type: NRG; PAM sequence: CAG
aggaggcggtttagggaacc

SEQ ID NO: 22602 - DNA, 20 bp, Artificial Sequence
  Description of Artificial Sequence: Synthetic oligonucleotide
  Target: COL7A1; (+) strand; PAM type: NRG; PAM sequence: CGG
agggaacccagcaccgatcg

SEQ ID NO: 22603 - DNA, 20 bp, Artificial Sequence
  Description of Artificial Sequence: Synthetic oligonucleotide
  Target: COL7A1; (+) strand; PAM type: NRG; PAM sequence: GAG
ggaacccagcaccgatcgcg

SEQ ID NO: 22604 - DNA, 20 bp, Artificial Sequence
  Description of Artificial Sequence: Synthetic oligonucleotide
  Target: COL7A1; (+) strand; PAM type: NRG; PAM sequence: AGG
gaacccagcaccgatcgcgg

SEQ ID NO: 22605 - DNA, 20 bp, Artificial Sequence
  Description of Artificial Sequence: Synthetic oligonucleotide
  Target: COL7A1; (+) strand; PAM type: NRG; PAM sequence: GGG
aacccagcaccgatcgcgga

SEQ ID NO: 22606 - DNA, 20 bp, Artificial Sequence
  Description of Artificial Sequence: Synthetic oligonucleotide
  Target: COL7A1; (+) strand; PAM type: NRG; PAM sequence: CGG
agcaccgatcgcggagggtt

SEQ ID NO: 22607 - DNA, 20 bp, Artificial Sequence
  Description of Artificial Sequence: Synthetic oligonucleotide
  Target: COL7A1; (+) strand; PAM type: NRG; PAM sequence: GGG
gcaccgatcgcggagggttc

SEQ ID NO: 22608 - DNA, 20 bp, Artificial Sequence
  Description of Artificial Sequence: Synthetic oligonucleotide
  Target: COL7A1; (+) strand; PAM type: NRG; PAM sequence: GGG
caccgatcgcggagggttcg

SEQ ID NO: 22609 - DNA, 20 bp, Artificial Sequence
  Description of Artificial Sequence: Synthetic oligonucleotide
  Target: COL7A1; (+) strand; PAM type: NRG; PAM sequence: GAG
ccgatcgcggagggttcggg

SEQ ID NO: 22610 - DNA, 20 bp, Artificial Sequence
  Description of Artificial Sequence: Synthetic oligonucleotide
  Target: COL7A1; (+) strand; PAM type: NRG; PAM sequence: CAG
gcggagggttcggggagtcc

SEQ ID NO: 22611 - DNA, 20 bp, Artificial Sequence
  Description of Artificial Sequence: Synthetic oligonucleotide
  Target: COL7A1; (+) strand; PAM type: NRG; PAM sequence: TAG
ggttcggggagtcccagaat

SEQ ID NO: 22612 - DNA, 20 bp, Artificial Sequence
  Description of Artificial Sequence: Synthetic oligonucleotide
  Target: COL7A1; (+) strand; PAM type: NRG; PAM sequence: AGG
gttcggggagtcccagaatt

SEQ ID NO: 22613 - DNA, 20 bp, Artificial Sequence
  Description of Artificial Sequence: Synthetic oligonucleotide
  Target: COL7A1; (+) strand; PAM type: NRG; PAM sequence: GAG
tcggggagtcccagaattag

SEQ ID NO: 22614 - DNA, 20 bp, Artificial Sequence
  Description of Artificial Sequence: Synthetic oligonucleotide
  Target: COL7A1; (+) strand; PAM type: NRG; PAM sequence: AGG
cggggagtcccagaattagg

SEQ ID NO: 22615 - DNA, 20 bp, Artificial Sequence
  Description of Artificial Sequence: Synthetic oligonucleotide
  Target: COL7A1; (+) strand; PAM type: NRG; PAM sequence: CGG
ccagaattaggaggaatccg

SEQ ID NO: 22616 - DNA, 20 bp, Artificial Sequence
  Description of Artificial Sequence: Synthetic oligonucleotide
  Target: COL7A1; (+) strand; PAM type: NRG; PAM sequence: GGG
cagaattaggaggaatccgc

SEQ ID NO: 22617 - DNA, 20 bp, Artificial Sequence
  Description of Artificial Sequence: Synthetic oligonucleotide
  Target: COL7A1; (+) strand; PAM type: NRG; PAM sequence: GGG
agaattaggaggaatccgcg

SEQ ID NO: 22618 - DNA, 20 bp, Artificial Sequence
  Description of Artificial Sequence: Synthetic oligonucleotide
  Target: COL7A1; (+) strand; PAM type: NRG; PAM sequence: TGG
gaggaatccgcggggcgtcg

SEQ ID NO: 22619 - DNA, 20 bp, Artificial Sequence
  Description of Artificial Sequence: Synthetic oligonucleotide
  Target: COL7A1; (+) strand; PAM type: NRG; PAM sequence: GAG
ggaatccgcggggcgtcgtg

SEQ ID NO: 22620 - DNA, 20 bp, Artificial Sequence
  Description of Artificial Sequence: Synthetic oligonucleotide
  Target: COL7A1; (+) strand; PAM type: NRG; PAM sequence: TGG
tccgcggggcgtcgtggagt

SEQ ID NO: 22621 - DNA, 20 bp, Artificial Sequence
  Description of Artificial Sequence: Synthetic oligonucleotide
  Target: COL7A1; (+) strand; PAM type: NRG; PAM sequence: TGG
cggggcgtcgtggagttggc

SEQ ID NO: 22622 - DNA, 20 bp, Artificial Sequence
  Description of Artificial Sequence: Synthetic oligonucleotide
  Target: COL7A1; (+) strand; PAM type: NRG; PAM sequence: GGG
ggggcgtcgtggagttggct

SEQ ID NO: 22623 - DNA, 20 bp, Artificial Sequence
  Description of Artificial Sequence: Synthetic oligonucleotide
  Target: COL7A1; (+) strand; PAM type: NRG; PAM sequence: TGG
tcgtggagttggctgggttg

SEQ ID NO: 22624 - DNA, 20 bp, Artificial Sequence
  Description of Artificial Sequence: Synthetic oligonucleotide
  Target: COL7A1; (+) strand; PAM type: NRG; PAM sequence: GGG
cgtggagttggctgggttgt

SEQ ID NO: 22625 - DNA, 20 bp, Artificial Sequence
  Description of Artificial Sequence: Synthetic oligonucleotide
  Target: COL7A1; (+) strand; PAM type: NRG; PAM sequence: CGG
ggagttggctgggttgtggg

SEQ ID NO: 22626 - DNA, 20 bp, Artificial Sequence
  Description of Artificial Sequence: Synthetic oligonucleotide
  Target: COL7A1; (+) strand; PAM type: NRG; PAM sequence: GGG
gagttggctgggttgtgggc

SEQ ID NO: 22627 - DNA, 20 bp, Artificial Sequence
  Description of Artificial Sequence: Synthetic oligonucleotide
  Target: COL7A1; (+) strand; PAM type: NRG; PAM sequence: GGG
agttggctgggttgtgggcg

SEQ ID NO: 22628 - DNA, 20 bp, Artificial Sequence
  Description of Artificial Sequence: Synthetic oligonucleotide
  Target: COL7A1; (+) strand; PAM type: NRG; PAM sequence: GGG
gttggctgggttgtgggcgg

SEQ ID NO: 22629 - DNA, 20 bp, Artificial Sequence
  Description of Artificial Sequence: Synthetic oligonucleotide
  Target: COL7A1; (+) strand; PAM type: NRG; PAM sequence: GGG
ttggctgggttgtgggcggg

SEQ ID NO: 22630 - DNA, 20 bp, Artificial Sequence
  Description of Artificial Sequence: Synthetic oligonucleotide
  Target: COL7A1; (+) strand; PAM type: NRG; PAM sequence: TGG
gggttgtgggcggggggtgt

SEQ ID NO: 22631 - DNA, 20 bp, Artificial Sequence
  Description of Artificial Sequence: Synthetic oligonucleotide
  Target: COL7A1; (+) strand; PAM type: NRG; PAM sequence: GGG
ggttgtgggcggggggtgtt

SEQ ID NO: 22632 - DNA, 20 bp, Artificial Sequence
  Description of Artificial Sequence: Synthetic oligonucleotide
  Target: COL7A1; (+) strand; PAM type: NRG; PAM sequence: GGG
gttgtgggcggggggtgttg

SEQ ID NO: 22633 - DNA, 20 bp, Artificial Sequence
  Description of Artificial Sequence: Synthetic oligonucleotide
  Target: COL7A1; (+) strand; PAM type: NRG; PAM sequence: AAG
ggcggggggtgttggggatg

SEQ ID NO: 22634 - DNA, 20 bp, Artificial Sequence
  Description of Artificial Sequence: Synthetic oligonucleotide
  Target: COL7A1; (+) strand; PAM type: NRG; PAM sequence: AGG
gcggggggtgttggggatga

SEQ ID NO: 22635 - DNA, 20 bp, Artificial Sequence
  Description of Artificial Sequence: Synthetic oligonucleotide
  Target: COL7A1; (+) strand; PAM type: NRG; PAM sequence: GAG
gggtgttggggatgaaggcc

SEQ ID NO: 22636 - DNA, 20 bp, Artificial Sequence
  Description of Artificial Sequence: Synthetic oligonucleotide
  Target: COL7A1; (+) strand; PAM type: NRG; PAM sequence: TGG
tgttggggatgaaggccgag

SEQ ID NO: 22637 - DNA, 20 bp, Artificial Sequence
  Description of Artificial Sequence: Synthetic oligonucleotide
  Target: COL7A1; (+) strand; PAM type: NRG; PAM sequence: GAG
ttggggatgaaggccgagtg

SEQ ID NO: 22638 - DNA, 20 bp, Artificial Sequence
  Description of Artificial Sequence: Synthetic oligonucleotide
  Target: COL7A1; (+) strand; PAM type: NRG; PAM sequence: CGG
gggatgaaggccgagtggag

SEQ ID NO: 22639 - DNA, 20 bp, Artificial Sequence
  Description of Artificial Sequence: Synthetic oligonucleotide
  Target: COL7A1; (+) strand; PAM type: NRG; PAM sequence: GAG
gatgaaggccgagtggagcg

SEQ ID NO: 22640 - DNA, 20 bp, Artificial Sequence
  Description of Artificial Sequence: Synthetic oligonucleotide
  Target: COL7A1; (+) strand; PAM type: NRG; PAM sequence: AGG
atgaaggccgagtggagcgg

SEQ ID NO: 22641 - DNA, 20 bp, Artificial Sequence
  Description of Artificial Sequence: Synthetic oligonucleotide
  Target: COL7A1; (+) strand; PAM type: NRG; PAM sequence: GGG
tgaaggccgagtggagcgga

SEQ ID NO: 22642 - DNA, 20 bp, Artificial Sequence
  Description of Artificial Sequence: Synthetic oligonucleotide
  Target: COL7A1; (+) strand; PAM type: NRG; PAM sequence: TGG
aggccgagtggagcggaggg

SEQ ID NO: 22643 - DNA, 20 bp, Artificial Sequence
  Description of Artificial Sequence: Synthetic oligonucleotide
  Target: COL7A1; (+) strand; PAM type: NRG; PAM sequence: CGG
gagtggagcggagggtggca

SEQ ID NO: 22644 - DNA, 20 bp, Artificial Sequence
  Description of Artificial Sequence: Synthetic oligonucleotide
  Target: COL7A1; (+) strand; PAM type: NRG; PAM sequence: CAG
gagcggagggtggcacggtg

SEQ ID NO: 22645 - DNA, 20 bp, Artificial Sequence
  Description of Artificial Sequence: Synthetic oligonucleotide
  Target: COL7A1; (+) strand; PAM type: NRG; PAM sequence: CGG
ggtggcacggtgcagtgccc

SEQ ID NO: 22646 - DNA, 20 bp, Artificial Sequence
  Description of Artificial Sequence: Synthetic oligonucleotide
  Target: COL7A1; (+) strand; PAM type: NRG; PAM sequence: GGG
gtggcacggtgcagtgcccc

SEQ ID NO: 22647 - DNA, 20 bp, Artificial Sequence
  Description of Artificial Sequence: Synthetic oligonucleotide
  Target: COL7A1; (+) strand; PAM type: NRG; PAM sequence: CGG
cacggtgcagtgccccgggc

SEQ ID NO: 22648 - DNA, 20 bp, Artificial Sequence
  Description of Artificial Sequence: Synthetic oligonucleotide
  Target: COL7A1; (+) strand; PAM type: NRG; PAM sequence: GGG
acggtgcagtgccccgggcc

SEQ ID NO: 22649 - DNA, 20 bp, Artificial Sequence
  Description of Artificial Sequence: Synthetic oligonucleotide
  Target: COL7A1; (+) strand; PAM type: NRG; PAM sequence: CGG
ccgggccgggtcctcccttg

SEQ ID NO: 22650 - DNA, 20 bp, Artificial Sequence
  Description of Artificial Sequence: Synthetic oligonucleotide
  Target: COL7A1; (+) strand; PAM type: NRG; PAM sequence: TGG
gcccacctctctccctgtgc

SEQ ID NO: 22651 - DNA, 20 bp, Artificial Sequence
  Description of Artificial Sequence: Synthetic oligonucleotide
  Target: COL7A1; (+) strand; PAM type: NRG; PAM sequence: GGG
cccacctctctccctgtgct

SEQ ID NO: 22652 - DNA, 20 bp, Artificial Sequence
  Description of Artificial Sequence: Synthetic oligonucleotide
  Target: COL7A1; (+) strand; PAM type: NRG; PAM sequence: CGG
ccctgtgctgggctcgcact

SEQ ID NO: 22653 - DNA, 20 bp, Artificial Sequence
  Description of Artificial Sequence: Synthetic oligonucleotide
  Target: COL7A1; (+) strand; PAM type: NRG; PAM sequence: GGG
cctgtgctgggctcgcactc

SEQ ID NO: 22654 - DNA, 20 bp, Artificial Sequence
  Description of Artificial Sequence: Synthetic oligonucleotide
  Target: COL7A1; (+) strand; PAM type: NRG; PAM sequence: GGG
ctgtgctgggctcgcactcg

SEQ ID NO: 22655 - DNA, 20 bp, Artificial Sequence
  Description of Artificial Sequence: Synthetic oligonucleotide
  Target: COL7A1; (+) strand; PAM type: NRG; PAM sequence: CAG
cgcactcggggcgcctctgc

SEQ ID NO: 22656 - DNA, 20 bp, Artificial Sequence
  Description of Artificial Sequence: Synthetic oligonucleotide
  Target: COL7A1; (+) strand; PAM type: NRG; PAM sequence: AGG
gcactcggggcgcctctgcc

SEQ ID NO: 22657 - DNA, 20 bp, Artificial Sequence
  Description of Artificial Sequence: Synthetic oligonucleotide
  Target: COL7A1; (+) strand; PAM type: NRG; PAM sequence: CGG
gggcgcctctgccaggatcc

SEQ ID NO: 22658 - DNA, 20 bp, Artificial Sequence
  Description of Artificial Sequence: Synthetic oligonucleotide
  Target: COL7A1; (+) strand; PAM type: NRG; PAM sequence: CAG
cctctgccaggatcccggcg

SEQ ID NO: 22659 - DNA, 20 bp, Artificial Sequence
  Description of Artificial Sequence: Synthetic oligonucleotide
  Target: COL7A1; (+) strand; PAM type: NRG; PAM sequence: GAG
tctgccaggatcccggcgca

SEQ ID NO: 22660 - DNA, 20 bp, Artificial Sequence
  Description of Artificial Sequence: Synthetic oligonucleotide
  Target: COL7A1; (+) strand; PAM type: NRG; PAM sequence: CGG
caggatcccggcgcagagcg

SEQ ID NO: 22661 - DNA, 20 bp, Artificial Sequence
  Description of Artificial Sequence: Synthetic oligonucleotide
  Target: COL7A1; (+) strand; PAM type: NRG; PAM sequence: CAG
ccggcgcagagcgcggccac

SEQ ID NO: 22662 - DNA, 20 bp, Artificial Sequence
  Description of Artificial Sequence: Synthetic oligonucleotide
  Target: COL7A1; (+) strand; PAM type: NRG; PAM sequence: AAG
gcgcagagcgcggccaccag

SEQ ID NO: 22663 - DNA, 20 bp, Artificial Sequence
  Description of Artificial Sequence: Synthetic oligonucleotide
  Target: COL7A1; (+) strand; PAM type: NRG; PAM sequence: CAG
agcgcggccaccagaagccg

SEQ ID NO: 22664 - DNA, 20 bp, Artificial Sequence
  Description of Artificial Sequence: Synthetic oligonucleotide
  Target: COL7A1; (+) strand; PAM type: NRG; PAM sequence: TAG
cagaagccgcagcgtcatcc

SEQ ID NO: 22665 - DNA, 20 bp, Artificial Sequence
  Description of Artificial Sequence: Synthetic oligonucleotide
  Target: COL7A1; (+) strand; PAM type: NRG; PAM sequence: AGG
agaagccgcagcgtcatcct

SEQ ID NO: 22666 - DNA, 20 bp, Artificial Sequence
  Description of Artificial Sequence: Synthetic oligonucleotide
  Target: COL7A1; (+) strand; PAM type: NRG; PAM sequence: CAG
agccgcagcgtcatcctagg

SEQ ID NO: 22667 - DNA, 20 bp, Artificial Sequence
  Description of Artificial Sequence: Synthetic oligonucleotide
  Target: COL7A1; (+) strand; PAM type: NRG; PAM sequence: AAG
agcgtcatcctaggcagtaa

SEQ ID NO: 22668 - DNA, 20 bp, Artificial Sequence
  Description of Artificial Sequence: Synthetic oligonucleotide
  Target: COL7A1; (+) strand; PAM type: NRG; PAM sequence: CAG
tcctaggcagtaaaagccgt

SEQ ID NO: 22669 - DNA, 20 bp, Artificial Sequence
  Description of Artificial Sequence: Synthetic oligonucleotide
  Target: COL7A1; (+) strand; PAM type: NRG; PAM sequence: TAG
aggcagtaaaagccgtcagc

SEQ ID NO: 22670 - DNA, 20 bp, Artificial Sequence
  Description of Artificial Sequence: Synthetic oligonucleotide
  Target: COL7A1; (+) strand; PAM type: NRG; PAM sequence: AGG
ggcagtaaaagccgtcagct

SEQ ID NO: 22671 - DNA, 20 bp, Artificial Sequence
  Description of Artificial Sequence: Synthetic oligonucleotide
  Target: COL7A1; (+) strand; PAM type: NRG; PAM sequence: TGG
ctctgtcccttgctcccccg

SEQ ID NO: 22672 - DNA, 20 bp, Artificial Sequence
  Description of Artificial Sequence: Synthetic oligonucleotide
  Target: COL7A1; (+) strand; PAM type: NRG; PAM sequence: TGG
cccttgctcccccgtggcct

SEQ ID NO: 22673 - DNA, 20 bp, Artificial Sequence
  Description of Artificial Sequence: Synthetic oligonucleotide
  Target: COL7A1; (+) strand; PAM type: NRG; PAM sequence: CAG
ttgctcccccgtggccttgg

SEQ ID NO: 22674 - DNA, 20 bp, Artificial Sequence
  Description of Artificial Sequence: Synthetic oligonucleotide
  Target: COL7A1; (+) strand; PAM type: NRG; PAM sequence: AGG
tgctcccccgtggccttggc

SEQ ID NO: 22675 - DNA, 20 bp, Artificial Sequence
  Description of Artificial Sequence: Synthetic oligonucleotide
  Target: COL7A1; (+) strand; PAM type: NRG; PAM sequence: GAG
cccgtggccttggcaggtcc

SEQ ID NO: 22676 - DNA, 20 bp, Artificial Sequence
  Description of Artificial Sequence: Synthetic oligonucleotide
  Target: COL7A1; (+) strand; PAM type: NRG; PAM sequence: CAG
ggccttggcaggtccgagcc

SEQ ID NO: 22677 - DNA, 20 bp, Artificial Sequence
  Description of Artificial Sequence: Synthetic oligonucleotide
  Target: COL7A1; (+) strand; PAM type: NRG; PAM sequence: CAG
gtccgagcccagcgcccctc

SEQ ID NO: 22678 - DNA, 20 bp, Artificial Sequence
  Description of Artificial Sequence: Synthetic oligonucleotide
  Target: COL7A1; (+) strand; PAM type: NRG; PAM sequence: GAG
gcccagcgcccctccagccc

SEQ ID NO: 22679 - DNA, 20 bp, Artificial Sequence
  Description of Artificial Sequence: Synthetic oligonucleotide
  Target: COL7A1; (+) strand; PAM type: NRG; PAM sequence: TGG
cgcccctccagcccgagtcc

SEQ ID NO: 22680 - DNA, 20 bp, Artificial Sequence
  Description of Artificial Sequence: Synthetic oligonucleotide
  Target: COL7A1; (+) strand; PAM type: NRG; PAM sequence: CAG
cgctcccgccgccgccgctg

SEQ ID NO: 22681 - DNA, 20 bp, Artificial Sequence
  Description of Artificial Sequence: Synthetic oligonucleotide
  Target: COL7A1; (+) strand; PAM type: NRG; PAM sequence: CGG
ccgccgccgctgcagtctct

SEQ ID NO: 22682 - DNA, 20 bp, Artificial Sequence
  Description of Artificial Sequence: Synthetic oligonucleotide
  Target: COL7A1; (+) strand; PAM type: NRG; PAM sequence: GGG
cgccgccgctgcagtctctc

SEQ ID NO: 22683 - DNA, 20 bp, Artificial Sequence
  Description of Artificial Sequence: Synthetic oligonucleotide
  Target: COL7A1; (+) strand; PAM type: NRG; PAM sequence: CAG
cgccgctgcagtctctcggg

SEQ ID NO: 22684 - DNA, 20 bp, Artificial Sequence
  Description of Artificial Sequence: Synthetic oligonucleotide
  Target: COL7A1; (+) strand; PAM type: NRG; PAM sequence: GAG
ccgctgcagtctctcgggca

SEQ ID NO: 22685 - DNA, 20 bp, Artificial Sequence
  Description of Artificial Sequence: Synthetic oligonucleotide
  Target: COL7A1; (+) strand; PAM type: NRG; PAM sequence: CAG
ctgcagtctctcgggcagag

SEQ ID NO: 22686 - DNA, 20 bp, Artificial Sequence
  Description of Artificial Sequence: Synthetic oligonucleotide
  Target: COL7A1; (+) strand; PAM type: NRG; PAM sequence: GAG
gcagtctctcgggcagagca

SEQ ID NO: 22687 - DNA, 20 bp, Artificial Sequence
  Description of Artificial Sequence: Synthetic oligonucleotide
  Target: COL7A1; (+) strand; PAM type: NRG; PAM sequence: AAG
ctctcgggcagagcagagaa

SEQ ID NO: 22688 - DNA, 20 bp, Artificial Sequence
  Description of Artificial Sequence: Synthetic oligonucleotide
  Target: COL7A1; (+) strand; PAM type: NRG; PAM sequence: CGG
cagagaaaagtccctgatct

SEQ ID NO: 22689 - DNA, 20 bp, Artificial Sequence
  Description of Artificial Sequence: Synthetic oligonucleotide
  Target: COL7A1; (+) strand; PAM type: NRG; PAM sequence: GGG
agagaaaagtccctgatctc

SEQ ID NO: 22690 - DNA, 20 bp, Artificial Sequence
  Description of Artificial Sequence: Synthetic oligonucleotide
  Target: COL7A1; (+) strand; PAM type: NRG; PAM sequence: GGG
gagaaaagtccctgatctcg

SEQ ID NO: 22691 - DNA, 20 bp, Artificial Sequence
  Description of Artificial Sequence: Synthetic oligonucleotide
  Target: COL7A1; (+) strand; PAM type: NRG; PAM sequence: GGG
agaaaagtccctgatctcgg

SEQ ID NO: 22692 - DNA, 20 bp, Artificial Sequence
  Description of Artificial Sequence: Synthetic oligonucleotide
  Target: COL7A1; (+) strand; PAM type: NRG; PAM sequence: GGG
gaaaagtccctgatctcggg

SEQ ID NO: 22693 - DNA, 20 bp, Artificial Sequence
  Description of Artificial Sequence: Synthetic oligonucleotide
  Target: COL7A1; (+) strand; PAM type: NRG; PAM sequence: CGG
aagtccctgatctcgggggg

SEQ ID NO: 22694 - DNA, 20 bp, Artificial Sequence
  Description of Artificial Sequence: Synthetic oligonucleotide
  Target: COL7A1; (+) strand; PAM type: NRG; PAM sequence: GAG
gtccctgatctcggggggcg

SEQ ID NO: 22695 - DNA, 20 bp, Artificial Sequence
  Description of Artificial Sequence: Synthetic oligonucleotide
  Target: COL7A1; (+) strand; PAM type: NRG; PAM sequence: CGG
cctgatctcggggggcggag

SEQ ID NO: 22696 - DNA, 20 bp, Artificial Sequence
  Description of Artificial Sequence: Synthetic oligonucleotide
  Target: COL7A1; (+) strand; PAM type: NRG; PAM sequence: CAG
gatctcggggggcggagcgg

SEQ ID NO: 22697 - DNA, 20 bp, Artificial Sequence
  Description of Artificial Sequence: Synthetic oligonucleotide
  Target: COL7A1; (+) strand; PAM type: NRG; PAM sequence: AGG
atctcggggggcggagcggc

SEQ ID NO: 22698 - DNA, 20 bp, Artificial Sequence
  Description of Artificial Sequence: Synthetic oligonucleotide
  Target: COL7A1; (+) strand; PAM type: NRG; PAM sequence: CGG
tcggggggcggagcggcagg

SEQ ID NO: 22699 - DNA, 20 bp, Artificial Sequence
  Description of Artificial Sequence: Synthetic oligonucleotide
  Target: COL7A1; (+) strand; PAM type: NRG; PAM sequence: GGG
cggggggcggagcggcaggc

SEQ ID NO: 22700 - DNA, 20 bp, Artificial Sequence
  Description of Artificial Sequence: Synthetic oligonucleotide
  Target: COL7A1; (+) strand; PAM type: NRG; PAM sequence: CAG
cggagcggcaggcgggaacc

SEQ ID NO: 22701 - DNA, 20 bp, Artificial Sequence
  Description of Artificial Sequence: Synthetic oligonucleotide
  Target: COL7A1; (+) strand; PAM type: NRG; PAM sequence: AGG
ggagcggcaggcgggaaccc

SEQ ID NO: 22702 - DNA, 20 bp, Artificial Sequence
  Description of Artificial Sequence: Synthetic oligonucleotide
  Target: COL7A1; (+) strand; PAM type: NRG; PAM sequence: GAG
ccgccctcacccatatccct

SEQ ID NO: 22703 - DNA, 20 bp, Artificial Sequence
  Description of Artificial Sequence: Synthetic oligonucleotide
  Target: COL7A1; (+) strand; PAM type: NRG; PAM sequence: GAG
gccctcacccatatccctga

SEQ ID NO: 22704 - DNA, 20 bp, Artificial Sequence
  Description of Artificial Sequence: Synthetic oligonucleotide
  Target: COL7A1; (+) strand; PAM type: NRG; PAM sequence: AGG
ccctcacccatatccctgag

SEQ ID NO: 22705 - DNA, 20 bp, Artificial Sequence
  Description of Artificial Sequence: Synthetic oligonucleotide
  Target: COL7A1; (+) strand; PAM type: NRG; PAM sequence: CAG
cgccccccccacccctcccc

SEQ ID NO: 22706 - DNA, 20 bp, Artificial Sequence
  Description of Artificial Sequence: Synthetic oligonucleotide
  Target: COL7A1; (+) strand; PAM type: NRG; PAM sequence: TGG
ataaaccccccgaccccccg

SEQ ID NO: 22707 - DNA, 20 bp, Artificial Sequence
  Description of Artificial Sequence: Synthetic oligonucleotide
  Target: COL7A1; (+) strand; PAM type: NRG; PAM sequence: TGG
ccccgaccccccgtggcttc

SEQ ID NO: 22708 - DNA, 20 bp, Artificial Sequence
  Description of Artificial Sequence: Synthetic oligonucleotide
  Target: COL7A1; (+) strand; PAM type: NRG; PAM sequence: GGG
cccgaccccccgtggcttct

SEQ ID NO: 22709 - DNA, 20 bp, Artificial Sequence
  Description of Artificial Sequence: Synthetic oligonucleotide
  Target: COL7A1; (+) strand; PAM type: NRG; PAM sequence: CAG
cgtggcttctgggaatttcc

SEQ ID NO: 22710 - DNA, 20 bp, Artificial Sequence
  Description of Artificial Sequence: Synthetic oligonucleotide
  Target: COL7A1; (+) strand; PAM type: NRG; PAM sequence: AAG
ggcttctgggaatttcccag

SEQ ID NO: 22711 - DNA, 20 bp, Artificial Sequence
  Description of Artificial Sequence: Synthetic oligonucleotide
  Target: COL7A1; (+) strand; PAM type: NRG; PAM sequence: AGG
gcttctgggaatttcccaga

SEQ ID NO: 22712 - DNA, 20 bp, Artificial Sequence
  Description of Artificial Sequence: Synthetic oligonucleotide
  Target: COL7A1; (+) strand; PAM type: NRG; PAM sequence: TGG
atttcccagaaggttctgca

SEQ ID NO: 22713 - DNA, 20 bp, Artificial Sequence
  Description of Artificial Sequence: Synthetic oligonucleotide
  Target: COL7A1; (+) strand; PAM type: NRG; PAM sequence: GGG
tttcccagaaggttctgcat

SEQ ID NO: 22714 - DNA, 20 bp, Artificial Sequence
  Description of Artificial Sequence: Synthetic oligonucleotide
  Target: COL7A1; (+) strand; PAM type: NRG; PAM sequence: CAG
cccagaaggttctgcatggg

SEQ ID NO: 22715 - DNA, 20 bp, Artificial Sequence
  Description of Artificial Sequence: Synthetic oligonucleotide
  Target: COL7A1; (+) strand; PAM type: NRG; PAM sequence: GAG
gttctgcatgggcagatgct

SEQ ID NO: 22716 - DNA, 20 bp, Artificial Sequence
  Description of Artificial Sequence: Synthetic oligonucleotide
  Target: COL7A1; (+) strand; PAM type: NRG; PAM sequence: AGG
ttctgcatgggcagatgctg

SEQ ID NO: 22717 - DNA, 20 bp, Artificial Sequence
  Description of Artificial Sequence: Synthetic oligonucleotide
  Target: COL7A1; (+) strand; PAM type: NRG; PAM sequence: GGG
tctgcatgggcagatgctga

SEQ ID NO: 22718 - DNA, 20 bp, Artificial Sequence
  Description of Artificial Sequence: Synthetic oligonucleotide
  Target: COL7A1; (+) strand; PAM type: NRG; PAM sequence: GAG
tgcatgggcagatgctgagg

SEQ ID NO: 22719 - DNA, 20 bp, Artificial Sequence
  Description of Artificial Sequence: Synthetic oligonucleotide
  Target: COL7A1; (+) strand; PAM type: NRG; PAM sequence: AAG
gagtacccctaactccatct

SEQ ID NO: 22720 - DNA, 20 bp, Artificial Sequence
  Description of Artificial Sequence: Synthetic oligonucleotide
  Target: COL7A1; (+) strand; PAM type: NRG; PAM sequence: AGG
agtacccctaactccatcta

SEQ ID NO: 22721 - DNA, 20 bp, Artificial Sequence
  Description of Artificial Sequence: Synthetic oligonucleotide
  Target: COL7A1; (+) strand; PAM type: NRG; PAM sequence: CAG
cctaactccatctaaggtca

SEQ ID NO: 22722 - DNA, 20 bp, Artificial Sequence
  Description of Artificial Sequence: Synthetic oligonucleotide
  Target: COL7A1; (+) strand; PAM type: NRG; PAM sequence: AGG
ctaactccatctaaggtcac

SEQ ID NO: 22723 - DNA, 20 bp, Artificial Sequence
  Description of Artificial Sequence: Synthetic oligonucleotide
  Target: COL7A1; (+) strand; PAM type: NRG; PAM sequence: TGG
ccatctaaggtcacaggtct

SEQ ID NO: 22724 - DNA, 20 bp, Artificial Sequence
  Description of Artificial Sequence: Synthetic oligonucleotide
  Target: COL7A1; (+) strand; PAM type: NRG; PAM sequence: TAG
gtcacaggtcttggctgctt

SEQ ID NO: 22725 - DNA, 20 bp, Artificial Sequence
  Description of Artificial Sequence: Synthetic oligonucleotide
  Target: COL7A1; (+) strand; PAM type: NRG; PAM sequence: AGG
tcacaggtcttggctgcttt

SEQ ID NO: 22726 - DNA, 20 bp, Artificial Sequence
  Description of Artificial Sequence: Synthetic oligonucleotide
  Target: COL7A1; (+) strand; PAM type: NRG; PAM sequence: CAG
tggctgctttaggtcaatca

SEQ ID NO: 22727 - DNA, 20 bp, Artificial Sequence
  Description of Artificial Sequence: Synthetic oligonucleotide
  Target: COL7A1; (+) strand; PAM type: NRG; PAM sequence: CAG
tttaggtcaatcacagtgac

SEQ ID NO: 22728 - DNA, 20 bp, Artificial Sequence
  Description of Artificial Sequence: Synthetic oligonucleotide
  Target: COL7A1; (+) strand; PAM type: NRG; PAM sequence: AGG
ttaggtcaatcacagtgacc

SEQ ID NO: 22729 - DNA, 20 bp, Artificial Sequence
  Description of Artificial Sequence: Synthetic oligonucleotide
  Target: COL7A1; (+) strand; PAM type: NRG; PAM sequence: GAG
tcaatcacagtgaccaggct

SEQ ID NO: 22730 - DNA, 20 bp, Artificial Sequence
  Description of Artificial Sequence: Synthetic oligonucleotide
  Target: COL7A1; (+) strand; PAM type: NRG; PAM sequence: AGG
caatcacagtgaccaggctg

SEQ ID NO: 22731 - DNA, 20 bp, Artificial Sequence
  Description of Artificial Sequence: Synthetic oligonucleotide
  Target: COL7A1; (+) strand; PAM type: NRG; PAM sequence: GAG
atcacagtgaccaggctgag

SEQ ID NO: 22732 - DNA, 20 bp, Artificial Sequence
  Description of Artificial Sequence: Synthetic oligonucleotide
  Target: COL7A1; (+) strand; PAM type: NRG; PAM sequence: TGG
acagtgaccaggctgaggag

SEQ ID NO: 22733 - DNA, 20 bp, Artificial Sequence
  Description of Artificial Sequence: Synthetic oligonucleotide
  Target: COL7A1; (+) strand; PAM type: NRG; PAM sequence: CAG
tgaccaggctgaggagtgga

SEQ ID NO: 22734 - DNA, 20 bp, Artificial Sequence
  Description of Artificial Sequence: Synthetic oligonucleotide
  Target: COL7A1; (+) strand; PAM type: NRG; PAM sequence: AGG
gaccaggctgaggagtggac

SEQ ID NO: 22735 - DNA, 20 bp, Artificial Sequence
  Description of Artificial Sequence: Synthetic oligonucleotide
  Target: COL7A1; (+) strand; PAM type: NRG; PAM sequence: CAG
gaggagtggacaggttcctg

SEQ ID NO: 22736 - DNA, 20 bp, Artificial Sequence
  Description of Artificial Sequence: Synthetic oligonucleotide
  Target: COL7A1; (+) strand; PAM type: NRG; PAM sequence: GAG
ggagtggacaggttcctgca

SEQ ID NO: 22737 - DNA, 20 bp, Artificial Sequence
  Description of Artificial Sequence: Synthetic oligonucleotide
  Target: COL7A1; (+) strand; PAM type: NRG; PAM sequence: AAG
acaggttcctgcagagccac

SEQ ID NO: 22738 - DNA, 20 bp, Artificial Sequence
  Description of Artificial Sequence: Synthetic oligonucleotide
  Target: COL7A1; (+) strand; PAM type: NRG; PAM sequence: AGG
caggttcctgcagagccaca

SEQ ID NO: 22739 - DNA, 20 bp, Artificial Sequence
  Description of Artificial Sequence: Synthetic oligonucleotide
  Target: COL7A1; (+) strand; PAM type: NRG; PAM sequence: CAG
gttcctgcagagccacaagg

SEQ ID NO: 22740 - DNA, 20 bp, Artificial Sequence
  Description of Artificial Sequence: Synthetic oligonucleotide
  Target: COL7A1; (+) strand; PAM type: NRG; PAM sequence: CAG
cctgcagagccacaaggcag

SEQ ID NO: 22741 - DNA, 20 bp, Artificial Sequence
  Description of Artificial Sequence: Synthetic oligonucleotide
  Target: COL7A1; (+) strand; PAM type: NRG; PAM sequence: TGG
gccacaaggcagcagcgccg

SEQ ID NO: 22742 - DNA, 20 bp, Artificial Sequence
  Description of Artificial Sequence: Synthetic oligonucleotide
  Target: COL7A1; (+) strand; PAM type: NRG; PAM sequence: GGG
ccacaaggcagcagcgccgt

SEQ ID NO: 22743 - DNA, 20 bp, Artificial Sequence
  Description of Artificial Sequence: Synthetic oligonucleotide
  Target: COL7A1; (+) strand; PAM type: NRG; PAM sequence: GGG
cacaaggcagcagcgccgtg

SEQ ID NO: 22744 - DNA, 20 bp, Artificial Sequence
  Description of Artificial Sequence: Synthetic oligonucleotide
  Target: COL7A1; (+) strand; PAM type: NRG; PAM sequence: GGG
acaaggcagcagcgccgtgg

SEQ ID NO: 22745 - DNA, 20 bp, Artificial Sequence
  Description of Artificial Sequence: Synthetic oligonucleotide
  Target: COL7A1; (+) strand; PAM type: NRG; PAM sequence: GGG
caaggcagcagcgccgtggg

SEQ ID NO: 22746 - DNA, 20 bp, Artificial Sequence
  Description of Artificial Sequence: Synthetic oligonucleotide
  Target: COL7A1; (+) strand; PAM type: NRG; PAM sequence: TGG
ggcagcagcgccgtgggggg

SEQ ID NO: 22747 - DNA, 20 bp, Artificial Sequence
  Description of Artificial Sequence: Synthetic oligonucleotide
  Target: COL7A1; (+) strand; PAM type: NRG; PAM sequence: GGG
gcagcagcgccgtggggggt

SEQ ID NO: 22748 - DNA, 20 bp, Artificial Sequence
  Description of Artificial Sequence: Synthetic oligonucleotide
  Target: COL7A1; (+) strand; PAM type: NRG; PAM sequence: GGG
cagcagcgccgtggggggtg

SEQ ID NO: 22749 - DNA, 20 bp, Artificial Sequence
  Description of Artificial Sequence: Synthetic oligonucleotide
  Target: COL7A1; (+) strand; PAM type: NRG; PAM sequence: CAG
cgccgtggggggtggggctg

SEQ ID NO: 22750 - DNA, 20 bp, Artificial Sequence
  Description of Artificial Sequence: Synthetic oligonucleotide
  Target: COL7A1; (+) strand; PAM type: NRG; PAM sequence: TGG
gtggggggtggggctgcagt

SEQ ID NO: 22751 - DNA, 20 bp, Artificial Sequence
  Description of Artificial Sequence: Synthetic oligonucleotide
  Target: COL7A1; (+) strand; PAM type: NRG; PAM sequence: GGG
tggggggtggggctgcagtt

SEQ ID NO: 22752 - DNA, 20 bp, Artificial Sequence
  Description of Artificial Sequence: Synthetic oligonucleotide
  Target: COL7A1; (+) strand; PAM type: NRG; PAM sequence: GGG
ggggggtggggctgcagttg

SEQ ID NO: 22753 - DNA, 20 bp, Artificial Sequence
  Description of Artificial Sequence: Synthetic oligonucleotide
  Target: COL7A1; (+) strand; PAM type: NRG; PAM sequence: CAG
gggatgactcacccccaatc

SEQ ID NO: 22754 - DNA, 20 bp, Artificial Sequence
  Description of Artificial Sequence: Synthetic oligonucleotide
  Target: COL7A1; (+) strand; PAM type: NRG; PAM sequence: TGG
atgactcacccccaatccag

SEQ ID NO: 22755 - DNA, 20 bp, Artificial Sequence
  Description of Artificial Sequence: Synthetic oligonucleotide
  Target: COL7A1; (+) strand; PAM type: NRG; PAM sequence: GGG
tgactcacccccaatccagt

SEQ ID NO: 22756 - DNA, 20 bp, Artificial Sequence
  Description of Artificial Sequence: Synthetic oligonucleotide
  Target: COL7A1; (+) strand; PAM type: NRG; PAM sequence: GGG
gactcacccccaatccagtg

SEQ ID NO: 22757 - DNA, 20 bp, Artificial Sequence
  Description of Artificial Sequence: Synthetic oligonucleotide
  Target: COL7A1; (+) strand; PAM type: NRG; PAM sequence: GGG
actcacccccaatccagtgg

SEQ ID NO: 22758 - DNA, 20 bp, Artificial Sequence
  Description of Artificial Sequence: Synthetic oligonucleotide
  Target: COL7A1; (+) strand; PAM type: NRG; PAM sequence: CAG
cccaatccagtgggggtgcc

SEQ ID NO: 22759 - DNA, 20 bp, Artificial Sequence
  Description of Artificial Sequence: Synthetic oligonucleotide
  Target: COL7A1; (+) strand; PAM type: NRG; PAM sequence: AAG
tccagtgggggtgcccagac

SEQ ID NO: 22760 - DNA, 20 bp, Artificial Sequence
  Description of Artificial Sequence: Synthetic oligonucleotide
  Target: COL7A1; (+) strand; PAM type: NRG; PAM sequence: CAG
ggggtgcccagacaagccct

SEQ ID NO: 22761 - DNA, 20 bp, Artificial Sequence
  Description of Artificial Sequence: Synthetic oligonucleotide
  Target: COL7A1; (+) strand; PAM type: NRG; PAM sequence: AGG
gggtgcccagacaagccctc

SEQ ID NO: 22762 - DNA, 20 bp, Artificial Sequence
  Description of Artificial Sequence: Synthetic oligonucleotide
  Target: COL7A1; (+) strand; PAM type: NRG; PAM sequence: TGG
ccagacaagccctcaggcca

SEQ ID NO: 22763 - DNA, 20 bp, Artificial Sequence
  Description of Artificial Sequence: Synthetic oligonucleotide
  Target: COL7A1; (+) strand; PAM type: NRG; PAM sequence: GGG
cagacaagccctcaggccat

SEQ ID NO: 22764 - DNA, 20 bp, Artificial Sequence
  Description of Artificial Sequence: Synthetic oligonucleotide
  Target: COL7A1; (+) strand; PAM type: NRG; PAM sequence: CGG
cctcaggccatgggtcccgc

SEQ ID NO: 22765 - DNA, 20 bp, Artificial Sequence
  Description of Artificial Sequence: Synthetic oligonucleotide
  Target: COL7A1; (+) strand; PAM type: NRG; PAM sequence: CAG
cgccggccactcctgtgatt

SEQ ID NO: 22766 - DNA, 20 bp, Artificial Sequence
  Description of Artificial Sequence: Synthetic oligonucleotide
  Target: COL7A1; (+) strand; PAM type: NRG; PAM sequence: TGG
ctgtgattcagccatctgtc

SEQ ID NO: 22767 - DNA, 20 bp, Artificial Sequence
  Description of Artificial Sequence: Synthetic oligonucleotide
  Target: COL7A1; (+) strand; PAM type: NRG; PAM sequence: TGG
tgattcagccatctgtctgg

SEQ ID NO: 22768 - DNA, 20 bp, Artificial Sequence
  Description of Artificial Sequence: Synthetic oligonucleotide
  Target: COL7A1; (+) strand; PAM type: NRG; PAM sequence: GGG
gattcagccatctgtctggt

SEQ ID NO: 22769 - DNA, 20 bp, Artificial Sequence
  Description of Artificial Sequence: Synthetic oligonucleotide
  Target: COL7A1; (+) strand; PAM type: NRG; PAM sequence: TGG
catctgtctggtgggcctcc

SEQ ID NO: 22770 - DNA, 20 bp, Artificial Sequence
  Description of Artificial Sequence: Synthetic oligonucleotide
  Target: COL7A1; (+) strand; PAM type: NRG; PAM sequence: GGG
atctgtctggtgggcctcct

SEQ ID NO: 22771 - DNA, 20 bp, Artificial Sequence
  Description of Artificial Sequence: Synthetic oligonucleotide
  Target: COL7A1; (+) strand; PAM type: NRG; PAM sequence: CGG
tgggcctcctgggccccacc

SEQ ID NO: 22772 - DNA, 20 bp, Artificial Sequence
  Description of Artificial Sequence: Synthetic oligonucleotide
  Target: COL7A1; (+) strand; PAM type: NRG; PAM sequence: CAG
ccccacccggatctccttga

SEQ ID NO: 22773 - DNA, 20 bp, Artificial Sequence
  Description of Artificial Sequence: Synthetic oligonucleotide
  Target: COL7A1; (+) strand; PAM type: NRG; PAM sequence: AGG
cccacccggatctccttgac

SEQ ID NO: 22774 - DNA, 20 bp, Artificial Sequence
  Description of Artificial Sequence: Synthetic oligonucleotide
  Target: COL7A1; (+) strand; PAM type: NRG; PAM sequence: AAG
cccggatctccttgacaggc

SEQ ID NO: 22775 - DNA, 20 bp, Artificial Sequence
  Description of Artificial Sequence: Synthetic oligonucleotide
  Target: COL7A1; (+) strand; PAM type: NRG; PAM sequence: AAG
ggatctccttgacaggcaag

SEQ ID NO: 22776 - DNA, 20 bp, Artificial Sequence
  Description of Artificial Sequence: Synthetic oligonucleotide
  Target: COL7A1; (+) strand; PAM type: NRG; PAM sequence: TGG
ccttgacaggcaagaagccc

SEQ ID NO: 22777 - DNA, 20 bp, Artificial Sequence
  Description of Artificial Sequence: Synthetic oligonucleotide
  Target: COL7A1; (+) strand; PAM type: NRG; PAM sequence: GAG
ggcaagaagccctggcaaat

SEQ ID NO: 22778 - DNA, 20 bp, Artificial Sequence
  Description of Artificial Sequence: Synthetic oligonucleotide
  Target: COL7A1; (+) strand; PAM type: NRG; PAM sequence: TGG
ccctggcaaatgagtgactc

SEQ ID NO: 22779 - DNA, 20 bp, Artificial Sequence
  Description of Artificial Sequence: Synthetic oligonucleotide
  Target: COL7A1; (+) strand; PAM type: NRG; PAM sequence: GGG
cctggcaaatgagtgactct

SEQ ID NO: 22780 - DNA, 20 bp, Artificial Sequence
  Description of Artificial Sequence: Synthetic oligonucleotide
  Target: COL7A1; (+) strand; PAM type: NRG; PAM sequence: CGG
gcaaatgagtgactctgggc

SEQ ID NO: 22781 - DNA, 20 bp, Artificial Sequence
  Description of Artificial Sequence: Synthetic oligonucleotide
  Target: COL7A1; (+) strand; PAM type: NRG; PAM sequence: TAG
gagtgactctgggccggtct

SEQ ID NO: 22782 - DNA, 20 bp, Artificial Sequence
  Description of Artificial Sequence: Synthetic oligonucleotide
  Target: COL7A1; (+) strand; PAM type: NRG; PAM sequence: AGG
agtgactctgggccggtctt

SEQ ID NO: 22783 - DNA, 20 bp, Artificial Sequence
  Description of Artificial Sequence: Synthetic oligonucleotide
  Target: COL7A1; (+) strand; PAM type: NRG; PAM sequence: GGG
gtgactctgggccggtctta

SEQ ID NO: 22784 - DNA, 20 bp, Artificial Sequence
  Description of Artificial Sequence: Synthetic oligonucleotide
  Target: COL7A1; (+) strand; PAM type: NRG; PAM sequence: AAG
gggccggtcttagggaaacc

SEQ ID NO: 22785 - DNA, 20 bp, Artificial Sequence
  Description of Artificial Sequence: Synthetic oligonucleotide
  Target: COL7A1; (+) strand; PAM type: NRG; PAM sequence: AGG
ggccggtcttagggaaacca

SEQ ID NO: 22786 - DNA, 20 bp, Artificial Sequence
  Description of Artificial Sequence: Synthetic oligonucleotide
  Target: COL7A1; (+) strand; PAM type: NRG; PAM sequence: TGG
tagggaaaccaaggtcccct

SEQ ID NO: 22787 - DNA, 20 bp, Artificial Sequence
  Description of Artificial Sequence: Synthetic oligonucleotide
  Target: COL7A1; (+) strand; PAM type: NRG; PAM sequence: TGG
aaaccaaggtccccttggcc

SEQ ID NO: 22788 - DNA, 20 bp, Artificial Sequence
  Description of Artificial Sequence: Synthetic oligonucleotide
  Target: COL7A1; (+) strand; PAM type: NRG; PAM sequence: AAG
ggtccccttggcctggatcc

SEQ ID NO: 22789 - DNA, 20 bp, Artificial Sequence
  Description of Artificial Sequence: Synthetic oligonucleotide
  Target: COL7A1; (+) strand; PAM type: NRG; PAM sequence: TAG
agtaactcaccccctctttg

SEQ ID NO: 22790 - DNA, 20 bp, Artificial Sequence
  Description of Artificial Sequence: Synthetic oligonucleotide
  Target: COL7A1; (+) strand; PAM type: NRG; PAM sequence: AGG
gtaactcaccccctctttgt

SEQ ID NO: 22791 - DNA, 20 bp, Artificial Sequence
  Description of Artificial Sequence: Synthetic oligonucleotide
  Target: COL7A1; (+) strand; PAM type: NRG; PAM sequence: GGG
taactcaccccctctttgta

SEQ ID NO: 22792 - DNA, 20 bp, Artificial Sequence
  Description of Artificial Sequence: Synthetic oligonucleotide
  Target: COL7A1; (+) strand; PAM type: NRG; PAM sequence: GGG
aactcaccccctctttgtag

SEQ ID NO: 22793 - DNA, 20 bp, Artificial Sequence
  Description of Artificial Sequence: Synthetic oligonucleotide
  Target: COL7A1; (+) strand; PAM type: NRG; PAM sequence: AAG
accccctctttgtaggggat

SEQ ID NO: 22794 - DNA, 20 bp, Artificial Sequence
  Description of Artificial Sequence: Synthetic oligonucleotide
  Target: COL7A1; (+) strand; PAM type: NRG; PAM sequence: CGG
cctctttgtaggggataagc

SEQ ID NO: 22795 - DNA, 20 bp, Artificial Sequence
  Description of Artificial Sequence: Synthetic oligonucleotide
  Target: COL7A1; (+) strand; PAM type: NRG; PAM sequence: AAG
ctttgtaggggataagccgg

SEQ ID NO: 22796 - DNA, 20 bp, Artificial Sequence
  Description of Artificial Sequence: Synthetic oligonucleotide
  Target: COL7A1; (+) strand; PAM type: NRG; PAM sequence: AGG
tttgtaggggataagccgga

SEQ ID NO: 22797 - DNA, 20 bp, Artificial Sequence
  Description of Artificial Sequence: Synthetic oligonucleotide
  Target: COL7A1; (+) strand; PAM type: NRG; PAM sequence: GAG
tgtaggggataagccggaag

SEQ ID NO: 22798 - DNA, 20 bp, Artificial Sequence
  Description of Artificial Sequence: Synthetic oligonucleotide
  Target: COL7A1; (+) strand; PAM type: NRG; PAM sequence: AGG
gtaggggataagccggaagg

SEQ ID NO: 22799 - DNA, 20 bp, Artificial Sequence
  Description of Artificial Sequence: Synthetic oligonucleotide
  Target: COL7A1; (+) strand; PAM type: NRG; PAM sequence: GAG
aggggataagccggaaggag

SEQ ID NO: 22800 - DNA, 20 bp, Artificial Sequence
  Description of Artificial Sequence: Synthetic oligonucleotide
  Target: COL7A1; (+) strand; PAM type: NRG; PAM sequence: GAG
gggataagccggaaggagga

SEQ ID NO: 22801 - DNA, 20 bp, Artificial Sequence
  Description of Artificial Sequence: Synthetic oligonucleotide
  Target: COL7A1; (+) strand; PAM type: NRG; PAM sequence: CAG
tcatgcttatgcatacatcc

SEQ ID NO: 22802 - DNA, 20 bp, Artificial Sequence
  Description of Artificial Sequence: Synthetic oligonucleotide
  Target: COL7A1; (+) strand; PAM type: NRG; PAM sequence: CAG
ccacatcccctaccatgtca

SEQ ID NO: 22803 - DNA, 20 bp, Artificial Sequence
  Description of Artificial Sequence: Synthetic oligonucleotide
  Target: COL7A1; (+) strand; PAM type: NRG; PAM sequence: AGG
cacatcccctaccatgtcac

SEQ ID NO: 22804 - DNA, 20 bp, Artificial Sequence
  Description of Artificial Sequence: Synthetic oligonucleotide
  Target: COL7A1; (+) strand; PAM type: NRG; PAM sequence: CAG
atcccctaccatgtcacagg

SEQ ID NO: 22805 - DNA, 20 bp, Artificial Sequence
  Description of Artificial Sequence: Synthetic oligonucleotide
  Target: COL7A1; (+) strand; PAM type: NRG; PAM sequence: CAG
tgtcacaggcagatgcaatc

SEQ ID NO: 22806 - DNA, 20 bp, Artificial Sequence
  Description of Artificial Sequence: Synthetic oligonucleotide
  Target: COL7A1; (+) strand; PAM type: NRG; PAM sequence: CAG
atgcaatccagctgtgcctg

SEQ ID NO: 22807 - DNA, 20 bp, Artificial Sequence
  Description of Artificial Sequence: Synthetic oligonucleotide
  Target: COL7A1; (+) strand; PAM type: NRG; PAM sequence: AGG
tgcaatccagctgtgcctgc

SEQ ID NO: 22808 - DNA, 20 bp, Artificial Sequence
  Description of Artificial Sequence: Synthetic oligonucleotide
  Target: COL7A1; (+) strand; PAM type: NRG; PAM sequence: GGG
gcaatccagctgtgcctgca

SEQ ID NO: 22809 - DNA, 20 bp, Artificial Sequence
  Description of Artificial Sequence: Synthetic oligonucleotide
  Target: COL7A1; (+) strand; PAM type: NRG; PAM sequence: GAG
aatccagctgtgcctgcagg

SEQ ID NO: 22810 - DNA, 20 bp, Artificial Sequence
  Description of Artificial Sequence: Synthetic oligonucleotide
  Target: COL7A1; (+) strand; PAM type: NRG; PAM sequence: AGG
atccagctgtgcctgcaggg

SEQ ID NO: 22811 - DNA, 20 bp, Artificial Sequence
  Description of Artificial Sequence: Synthetic oligonucleotide
  Target: COL7A1; (+) strand; PAM type: NRG; PAM sequence: GGG
tccagctgtgcctgcaggga

SEQ ID NO: 22812 - DNA, 20 bp, Artificial Sequence
  Description of Artificial Sequence: Synthetic oligonucleotide
  Target: COL7A1; (+) strand; PAM type: NRG; PAM sequence: GGG
ccagctgtgcctgcagggag

SEQ ID NO: 22813 - DNA, 20 bp, Artificial Sequence
  Description of Artificial Sequence: Synthetic oligonucleotide
  Target: COL7A1; (+) strand; PAM type: NRG; PAM sequence: GGG
cagctgtgcctgcagggagg

SEQ ID NO: 22814 - DNA, 20 bp, Artificial Sequence
  Description of Artificial Sequence: Synthetic oligonucleotide
  Target: COL7A1; (+) strand; PAM type: NRG; PAM sequence: TGG
gggagggggccgcccatctg

SEQ ID NO: 22815 - DNA, 20 bp, Artificial Sequence
  Description of Artificial Sequence: Synthetic oligonucleotide
  Target: COL7A1; (+) strand; PAM type: NRG; PAM sequence: GAG
gagggggccgcccatctgtg

SEQ ID NO: 22816 - DNA, 20 bp, Artificial Sequence
  Description of Artificial Sequence: Synthetic oligonucleotide
  Target: COL7A1; (+) strand; PAM type: NRG; PAM sequence: AGG
agggggccgcccatctgtgg

SEQ ID NO: 22817 - DNA, 20 bp, Artificial Sequence
  Description of Artificial Sequence: Synthetic oligonucleotide
  Target: COL7A1; (+) strand; PAM type: NRG; PAM sequence: GGG
gggggccgcccatctgtgga

SEQ ID NO: 22818 - DNA, 20 bp, Artificial Sequence
  Description of Artificial Sequence: Synthetic oligonucleotide
  Target: COL7A1; (+) strand; PAM type: NRG; PAM sequence: CGG
ggccgcccatctgtggaggg

SEQ ID NO: 22819 - DNA, 20 bp, Artificial Sequence
  Description of Artificial Sequence: Synthetic oligonucleotide
  Target: COL7A1; (+) strand; PAM type: NRG; PAM sequence: GGG
gccgcccatctgtggagggc

SEQ ID NO: 22820 - DNA, 20 bp, Artificial Sequence
  Description of Artificial Sequence: Synthetic oligonucleotide
  Target: COL7A1; (+) strand; PAM type: NRG; PAM sequence: CAG
gtggagggcgggaccaccca

SEQ ID NO: 22821 - DNA, 20 bp, Artificial Sequence
  Description of Artificial Sequence: Synthetic oligonucleotide
  Target: COL7A1; (+) strand; PAM type: NRG; PAM sequence: CAG
ggcgggaccacccacagtga

SEQ ID NO: 22822 - DNA, 20 bp, Artificial Sequence
  Description of Artificial Sequence: Synthetic oligonucleotide
  Target: COL7A1; (+) strand; PAM type: NRG; PAM sequence: CAG
cacagtgacagctcatctct

SEQ ID NO: 22823 - DNA, 20 bp, Artificial Sequence
  Description of Artificial Sequence: Synthetic oligonucleotide
  Target: COL7A1; (+) strand; PAM type: NRG; PAM sequence: AGG
acagtgacagctcatctctc

SEQ ID NO: 22824 - DNA, 20 bp, Artificial Sequence
  Description of Artificial Sequence: Synthetic oligonucleotide
  Target: COL7A1; (+) strand; PAM type: NRG; PAM sequence: GAG
cagctcatctctcaggaatc

SEQ ID NO: 22825 - DNA, 20 bp, Artificial Sequence
  Description of Artificial Sequence: Synthetic oligonucleotide
  Target: COL7A1; (+) strand; PAM type: NRG; PAM sequence: CAG
gaatcgagccctccatgccc

SEQ ID NO: 22826 - DNA, 20 bp, Artificial Sequence
  Description of Artificial Sequence: Synthetic oligonucleotide
  Target: COL7A1; (+) strand; PAM type: NRG; PAM sequence: AGG
aatcgagccctccatgcccc

SEQ ID NO: 22827 - DNA, 20 bp, Artificial Sequence
  Description of Artificial Sequence: Synthetic oligonucleotide
  Target: COL7A1; (+) strand; PAM type: NRG; PAM sequence: CAG
gagccctccatgccccaggc

SEQ ID NO: 22828 - DNA, 20 bp, Artificial Sequence
  Description of Artificial Sequence: Synthetic oligonucleotide
  Target: COL7A1; (+) strand; PAM type: NRG; PAM sequence: AGG
agccctccatgccccaggcc

SEQ ID NO: 22829 - DNA, 20 bp, Artificial Sequence
  Description of Artificial Sequence: Synthetic oligonucleotide
  Target: COL7A1; (+) strand; PAM type: NRG; PAM sequence: CAG
tacctacatgtcctcaccca

SEQ ID NO: 22830 - DNA, 20 bp, Artificial Sequence
  Description of Artificial Sequence: Synthetic oligonucleotide
  Target: COL7A1; (+) strand; PAM type: NRG; PAM sequence: AGG
acctacatgtcctcacccac

SEQ ID NO: 22831 - DNA, 20 bp, Artificial Sequence
  Description of Artificial Sequence: Synthetic oligonucleotide
  Target: COL7A1; (+) strand; PAM type: NRG; PAM sequence: TAG
ccttccatctacttttcttg

SEQ ID NO: 22832 - DNA, 20 bp, Artificial Sequence
  Description of Artificial Sequence: Synthetic oligonucleotide
  Target: COL7A1; (+) strand; PAM type: NRG; PAM sequence: AGG
cttccatctacttttcttgt

SEQ ID NO: 22833 - DNA, 20 bp, Artificial Sequence
  Description of Artificial Sequence: Synthetic oligonucleotide
  Target: COL7A1; (+) strand; PAM type: NRG; PAM sequence: CAG
ctgccacccatctcccctac

SEQ ID NO: 22834 - DNA, 20 bp, Artificial Sequence
  Description of Artificial Sequence: Synthetic oligonucleotide
  Target: COL7A1; (+) strand; PAM type: NRG; PAM sequence: AGG
tgccacccatctcccctacc

SEQ ID NO: 22835 - DNA, 20 bp, Artificial Sequence
  Description of Artificial Sequence: Synthetic oligonucleotide
  Target: COL7A1; (+) strand; PAM type: NRG; PAM sequence: GAG
cccatctcccctaccaggcc

SEQ ID NO: 22836 - DNA, 20 bp, Artificial Sequence
  Description of Artificial Sequence: Synthetic oligonucleotide
  Target: COL7A1; (+) strand; PAM type: NRG; PAM sequence: AGG
ccatctcccctaccaggccg

SEQ ID NO: 22837 - DNA, 20 bp, Artificial Sequence
  Description of Artificial Sequence: Synthetic oligonucleotide
  Target: COL7A1; (+) strand; PAM type: NRG; PAM sequence: TGG
ctaccaggccgaggtcccct

SEQ ID NO: 22838 - DNA, 20 bp, Artificial Sequence
  Description of Artificial Sequence: Synthetic oligonucleotide
  Target: COL7A1; (+) strand; PAM type: NRG; PAM sequence: GGG
taccaggccgaggtcccctt

SEQ ID NO: 22839 - DNA, 20 bp, Artificial Sequence
  Description of Artificial Sequence: Synthetic oligonucleotide
  Target: COL7A1; (+) strand; PAM type: NRG; PAM sequence: TGG
tcctttcctcactgccctca

SEQ ID NO: 22840 - DNA, 20 bp, Artificial Sequence
  Description of Artificial Sequence: Synthetic oligonucleotide
  Target: COL7A1; (+) strand; PAM type: NRG; PAM sequence: TAG
cactgccctcatggtacctg

SEQ ID NO: 22841 - DNA, 20 bp, Artificial Sequence
  Description of Artificial Sequence: Synthetic oligonucleotide
  Target: COL7A1; (+) strand; PAM type: NRG; PAM sequence: CAG
ctcatggtacctgtagcttc

SEQ ID NO: 22842 - DNA, 20 bp, Artificial Sequence
  Description of Artificial Sequence: Synthetic oligonucleotide
  Target: COL7A1; (+) strand; PAM type: NRG; PAM sequence: CAG
cttactcctgtccccttacc

SEQ ID NO: 22843 - DNA, 20 bp, Artificial Sequence
  Description of Artificial Sequence: Synthetic oligonucleotide
  Target: COL7A1; (+) strand; PAM type: NRG; PAM sequence: AGG
ttactcctgtccccttaccc

SEQ ID NO: 22844 - DNA, 20 bp, Artificial Sequence
  Description of Artificial Sequence: Synthetic oligonucleotide
  Target: COL7A1; (+) strand; PAM type: NRG; PAM sequence: CAG
gctgacttcacaccctcccc

SEQ ID NO: 22845 - DNA, 20 bp, Artificial Sequence
  Description of Artificial Sequence: Synthetic oligonucleotide
  Target: COL7A1; (+) strand; PAM type: NRG; PAM sequence: GAG
cctcccccagcttcgcttct

SEQ ID NO: 22846 - DNA, 20 bp, Artificial Sequence
  Description of Artificial Sequence: Synthetic oligonucleotide
  Target: COL7A1; (+) strand; PAM type: NRG; PAM sequence: AGG
ctcccccagcttcgcttctg

SEQ ID NO: 22847 - DNA, 20 bp, Artificial Sequence
  Description of Artificial Sequence: Synthetic oligonucleotide
  Target: COL7A1; (+) strand; PAM type: NRG; PAM sequence: TGG
cagcttcgcttctgaggctg

SEQ ID NO: 22848 - DNA, 20 bp, Artificial Sequence
  Description of Artificial Sequence: Synthetic oligonucleotide
  Target: COL7A1; (+) strand; PAM type: NRG; PAM sequence: CAG
ttcgcttctgaggctgtgga

SEQ ID NO: 22849 - DNA, 20 bp, Artificial Sequence
  Description of Artificial Sequence: Synthetic oligonucleotide
  Target: COL7A1; (+) strand; PAM type: NRG; PAM sequence: CAG
tcctccaacacacaccacgc

SEQ ID NO: 22850 - DNA, 20 bp, Artificial Sequence
  Description of Artificial Sequence: Synthetic oligonucleotide
  Target: COL7A1; (+) strand; PAM type: NRG; PAM sequence: AGG
cctccaacacacaccacgcc

SEQ ID NO: 22851 - DNA, 20 bp, Artificial Sequence
  Description of Artificial Sequence: Synthetic oligonucleotide
  Target: COL7A1; (+) strand; PAM type: NRG; PAM sequence: GGG
ctccaacacacaccacgcca

SEQ ID NO: 22852 - DNA, 20 bp, Artificial Sequence
  Description of Artificial Sequence: Synthetic oligonucleotide
  Target: COL7A1; (+) strand; PAM type: NRG; PAM sequence: AAG
cacgccagggccactgtccg

SEQ ID NO: 22853 - DNA, 20 bp, Artificial Sequence
  Description of Artificial Sequence: Synthetic oligonucleotide
  Target: COL7A1; (+) strand; PAM type: NRG; PAM sequence: AGG
acgccagggccactgtccga

SEQ ID NO: 22854 - DNA, 20 bp, Artificial Sequence
  Description of Artificial Sequence: Synthetic oligonucleotide
  Target: COL7A1; (+) strand; PAM type: NRG; PAM sequence: GAG
gccagggccactgtccgaag

SEQ ID NO: 22855 - DNA, 20 bp, Artificial Sequence
  Description of Artificial Sequence: Synthetic oligonucleotide
  Target: COL7A1; (+) strand; PAM type: NRG; PAM sequence: AGG
ccagggccactgtccgaagg

SEQ ID NO: 22856 - DNA, 20 bp, Artificial Sequence
  Description of Artificial Sequence: Synthetic oligonucleotide
  Target: COL7A1; (+) strand; PAM type: NRG; PAM sequence: TGG
gggccactgtccgaaggagg

SEQ ID NO: 22857 - DNA, 20 bp, Artificial Sequence
  Description of Artificial Sequence: Synthetic oligonucleotide
  Target: COL7A1; (+) strand; PAM type: NRG; PAM sequence: GGG
ggccactgtccgaaggaggt

SEQ ID NO: 22858 - DNA, 20 bp, Artificial Sequence
  Description of Artificial Sequence: Synthetic oligonucleotide
  Target: COL7A1; (+) strand; PAM type: NRG; PAM sequence: GGG
gccactgtccgaaggaggtg

SEQ ID NO: 22859 - DNA, 20 bp, Artificial Sequence
  Description of Artificial Sequence: Synthetic oligonucleotide
  Target: COL7A1; (+) strand; PAM type: NRG; PAM sequence: TAG
gtatatgcatatctctccat

SEQ ID NO: 22860 - DNA, 20 bp, Artificial Sequence
  Description of Artificial Sequence: Synthetic oligonucleotide
  Target: COL7A1; (+) strand; PAM type: NRG; PAM sequence: TGG
atgcatatctctccattaga

SEQ ID NO: 22861 - DNA, 20 bp, Artificial Sequence
  Description of Artificial Sequence: Synthetic oligonucleotide
  Target: COL7A1; (+) strand; PAM type: NRG; PAM sequence: GGG
tgcatatctctccattagat

SEQ ID NO: 22862 - DNA, 20 bp, Artificial Sequence
  Description of Artificial Sequence: Synthetic oligonucleotide
  Target: COL7A1; (+) strand; PAM type: NRG; PAM sequence: AAG
tccattagatgggtgacact

SEQ ID NO: 22863 - DNA, 20 bp, Artificial Sequence
  Description of Artificial Sequence: Synthetic oligonucleotide
  Target: COL7A1; (+) strand; PAM type: NRG; PAM sequence: AGG
ccattagatgggtgacacta

SEQ ID NO: 22864 - DNA, 20 bp, Artificial Sequence
  Description of Artificial Sequence: Synthetic oligonucleotide
  Target: COL7A1; (+) strand; PAM type: NRG; PAM sequence: CAG
ttagatgggtgacactaagg

SEQ ID NO: 22865 - DNA, 20 bp, Artificial Sequence
  Description of Artificial Sequence: Synthetic oligonucleotide
  Target: COL7A1; (+) strand; PAM type: NRG; PAM sequence: GAG
agatgggtgacactaaggca

SEQ ID NO: 22866 - DNA, 20 bp, Artificial Sequence
  Description of Artificial Sequence: Synthetic oligonucleotide
  Target: COL7A1; (+) strand; PAM type: NRG; PAM sequence: GAG
atgggtgacactaaggcaga

SEQ ID NO: 22867 - DNA, 20 bp, Artificial Sequence
  Description of Artificial Sequence: Synthetic oligonucleotide
  Target: COL7A1; (+) strand; PAM type: NRG; PAM sequence: AGG
tgggtgacactaaggcagag

SEQ ID NO: 22868 - DNA, 20 bp, Artificial Sequence
  Description of Artificial Sequence: Synthetic oligonucleotide
  Target: COL7A1; (+) strand; PAM type: NRG; PAM sequence: AAG
taaggcagagaggcactgct

SEQ ID NO: 22869 - DNA, 20 bp, Artificial Sequence
  Description of Artificial Sequence: Synthetic oligonucleotide
  Target: COL7A1; (+) strand; PAM type: NRG; PAM sequence: AAG
ggcagagaggcactgctaag

SEQ ID NO: 22870 - DNA, 20 bp, Artificial Sequence
  Description of Artificial Sequence: Synthetic oligonucleotide
  Target: COL7A1; (+) strand; PAM type: NRG; PAM sequence: AGG
gcagagaggcactgctaaga

SEQ ID NO: 22871 - DNA, 20 bp, Artificial Sequence
  Description of Artificial Sequence: Synthetic oligonucleotide
  Target: COL7A1; (+) strand; PAM type: NRG; PAM sequence: GGG
cagagaggcactgctaagaa

SEQ ID NO: 22872 - DNA, 20 bp, Artificial Sequence
  Description of Artificial Sequence: Synthetic oligonucleotide
  Target: COL7A1; (+) strand; PAM type: NRG; PAM sequence: CAG
agaggcactgctaagaaggg

SEQ ID NO: 22873 - DNA, 20 bp, Artificial Sequence
  Description of Artificial Sequence: Synthetic oligonucleotide
  Target: COL7A1; (+) strand; PAM type: NRG; PAM sequence: AGG
gaggcactgctaagaagggc

SEQ ID NO: 22874 - DNA, 20 bp, Artificial Sequence
  Description of Artificial Sequence: Synthetic oligonucleotide
  Target: COL7A1; (+) strand; PAM type: NRG; PAM sequence: TGG
aagaagggcaggcccccatc

SEQ ID NO: 22875 - DNA, 20 bp, Artificial Sequence
  Description of Artificial Sequence: Synthetic oligonucleotide
  Target: COL7A1; (+) strand; PAM type: NRG; PAM sequence: GGG
agaagggcaggcccccatct

SEQ ID NO: 22876 - DNA, 20 bp, Artificial Sequence
  Description of Artificial Sequence: Synthetic oligonucleotide
  Target: COL7A1; (+) strand; PAM type: NRG; PAM sequence: TGG
ctgctaatcctgaataactc

SEQ ID NO: 22877 - DNA, 20 bp, Artificial Sequence
  Description of Artificial Sequence: Synthetic oligonucleotide
  Target: COL7A1; (+) strand; PAM type: NRG; PAM sequence: GGG
tgctaatcctgaataactct

SEQ ID NO: 22878 - DNA, 20 bp, Artificial Sequence
  Description of Artificial Sequence: Synthetic oligonucleotide
  Target: COL7A1; (+) strand; PAM type: NRG; PAM sequence: CAG
taatcctgaataactctggg

SEQ ID NO: 22879 - DNA, 20 bp, Artificial Sequence
  Description of Artificial Sequence: Synthetic oligonucleotide
  Target: COL7A1; (+) strand; PAM type: NRG; PAM sequence: CAG
ctgaataactctgggcagcc

SEQ ID NO: 22880 - DNA, 20 bp, Artificial Sequence
  Description of Artificial Sequence: Synthetic oligonucleotide
  Target: COL7A1; (+) strand; PAM type: NRG; PAM sequence: AAG
ataactctgggcagcccaga

SEQ ID NO: 22881 - DNA, 20 bp, Artificial Sequence
  Description of Artificial Sequence: Synthetic oligonucleotide
  Target: COL7A1; (+) strand; PAM type: NRG; PAM sequence: AAG
aaagcacatctatactcacc

SEQ ID NO: 22882 - DNA, 20 bp, Artificial Sequence
  Description of Artificial Sequence: Synthetic oligonucleotide
  Target: COL7A1; (+) strand; PAM type: NRG; PAM sequence: AGG
aagcacatctatactcacca

SEQ ID NO: 22883 - DNA, 20 bp, Artificial Sequence
  Description of Artificial Sequence: Synthetic oligonucleotide
  Target: COL7A1; (+) strand; PAM type: NRG; PAM sequence: TGG
tctatactcaccaaggctgc

SEQ ID NO: 22884 - DNA, 20 bp, Artificial Sequence
  Description of Artificial Sequence: Synthetic oligonucleotide
  Target: COL7A1; (+) strand; PAM type: NRG; PAM sequence: GGG
ctatactcaccaaggctgct

SEQ ID NO: 22885 - DNA, 20 bp, Artificial Sequence
  Description of Artificial Sequence: Synthetic oligonucleotide
  Target: COL7A1; (+) strand; PAM type: NRG; PAM sequence: CGG
tgggccccttctaatatgcc

SEQ ID NO: 22886 - DNA, 20 bp, Artificial Sequence
  Description of Artificial Sequence: Synthetic oligonucleotide
  Target: COL7A1; (+) strand; PAM type: NRG; PAM sequence: CAG
ttctaatatgcccggcccca

SEQ ID NO: 22887 - DNA, 20 bp, Artificial Sequence
  Description of Artificial Sequence: Synthetic oligonucleotide
  Target: COL7A1; (+) strand; PAM type: NRG; PAM sequence: TGG
cccggccccacagcctcccc

SEQ ID NO: 22888 - DNA, 20 bp, Artificial Sequence
  Description of Artificial Sequence: Synthetic oligonucleotide
  Target: COL7A1; (+) strand; PAM type: NRG; PAM sequence: GGG
ccggccccacagcctcccct

SEQ ID NO: 22889 - DNA, 20 bp, Artificial Sequence
  Description of Artificial Sequence: Synthetic oligonucleotide
  Target: COL7A1; (+) strand; PAM type: NRG; PAM sequence: CAG
acagcctcccctgggatcca

SEQ ID NO: 22890 - DNA, 20 bp, Artificial Sequence
  Description of Artificial Sequence: Synthetic oligonucleotide
  Target: COL7A1; (+) strand; PAM type: NRG; PAM sequence: AGG
cagcctcccctgggatccac

SEQ ID NO: 22891 - DNA, 20 bp, Artificial Sequence
  Description of Artificial Sequence: Synthetic oligonucleotide
  Target: COL7A1; (+) strand; PAM type: NRG; PAM sequence: GGG
agcctcccctgggatccaca

SEQ ID NO: 22892 - DNA, 20 bp, Artificial Sequence
  Description of Artificial Sequence: Synthetic oligonucleotide
  Target: COL7A1; (+) strand; PAM type: NRG; PAM sequence: GAG
cctcccctgggatccacagg

SEQ ID NO: 22893 - DNA, 20 bp, Artificial Sequence
  Description of Artificial Sequence: Synthetic oligonucleotide
  Target: COL7A1; (+) strand; PAM type: NRG; PAM sequence: TGG
ctgggatccacagggagata

SEQ ID NO: 22894 - DNA, 20 bp, Artificial Sequence
  Description of Artificial Sequence: Synthetic oligonucleotide
  Target: COL7A1; (+) strand; PAM type: NRG; PAM sequence: GGG
tgggatccacagggagatat

SEQ ID NO: 22895 - DNA, 20 bp, Artificial Sequence
  Description of Artificial Sequence: Synthetic oligonucleotide
  Target: COL7A1; (+) strand; PAM type: NRG; PAM sequence: GGG
gggatccacagggagatatg

SEQ ID NO: 22896 - DNA, 20 bp, Artificial Sequence
  Description of Artificial Sequence: Synthetic oligonucleotide
  Target: COL7A1; (+) strand; PAM type: NRG; PAM sequence: CAG
tccacagggagatatgggga

SEQ ID NO: 22897 - DNA, 20 bp, Artificial Sequence
  Description of Artificial Sequence: Synthetic oligonucleotide
  Target: COL7A1; (+) strand; PAM type: NRG; PAM sequence: TGG
gggagatatggggacagcac

SEQ ID NO: 22898 - DNA, 20 bp, Artificial Sequence
  Description of Artificial Sequence: Synthetic oligonucleotide
  Target: COL7A1; (+) strand; PAM type: NRG; PAM sequence: TGG
gatatggggacagcactggc

SEQ ID NO: 22899 - DNA, 20 bp, Artificial Sequence
  Description of Artificial Sequence: Synthetic oligonucleotide
  Target: COL7A1; (+) strand; PAM type: NRG; PAM sequence: CAG
gcactggctggactcctcca

SEQ ID NO: 22900 - DNA, 20 bp, Artificial Sequence
  Description of Artificial Sequence: Synthetic oligonucleotide
  Target: COL7A1; (+) strand; PAM type: NRG; PAM sequence: GAG
gctggactcctccacagccc

SEQ ID NO: 22901 - DNA, 20 bp, Artificial Sequence
  Description of Artificial Sequence: Synthetic oligonucleotide
  Target: COL7A1; (+) strand; PAM type: NRG; PAM sequence: AGG
ctggactcctccacagcccg

SEQ ID NO: 22902 - DNA, 20 bp, Artificial Sequence
  Description of Artificial Sequence: Synthetic oligonucleotide
  Target: COL7A1; (+) strand; PAM type: NRG; PAM sequence: TGG
cctccacagcccgaggactc

SEQ ID NO: 22903 - DNA, 20 bp, Artificial Sequence
  Description of Artificial Sequence: Synthetic oligonucleotide
  Target: COL7A1; (+) strand; PAM type: NRG; PAM sequence: TGG
acagcccgaggactctggtg

SEQ ID NO: 22904 - DNA, 20 bp, Artificial Sequence
  Description of Artificial Sequence: Synthetic oligonucleotide
  Target: COL7A1; (+) strand; PAM type: NRG; PAM sequence: CAG
cccgaggactctggtgtggc

SEQ ID NO: 22905 - DNA, 20 bp, Artificial Sequence
  Description of Artificial Sequence: Synthetic oligonucleotide
  Target: COL7A1; (+) strand; PAM type: NRG; PAM sequence: GAG
cgaggactctggtgtggcca

SEQ ID NO: 22906 - DNA, 20 bp, Artificial Sequence
  Description of Artificial Sequence: Synthetic oligonucleotide
  Target: COL7A1; (+) strand; PAM type: NRG; PAM sequence: TGG
gactctggtgtggccagagc

SEQ ID NO: 22907 - DNA, 20 bp, Artificial Sequence
  Description of Artificial Sequence: Synthetic oligonucleotide
  Target: COL7A1; (+) strand; PAM type: NRG; PAM sequence: GAG
ctctggtgtggccagagctg

SEQ ID NO: 22908 - DNA, 20 bp, Artificial Sequence
  Description of Artificial Sequence: Synthetic oligonucleotide
  Target: COL7A1; (+) strand; PAM type: NRG; PAM sequence: AGG
tctggtgtggccagagctgg

SEQ ID NO: 22909 - DNA, 20 bp, Artificial Sequence
  Description of Artificial Sequence: Synthetic oligonucleotide
  Target: COL7A1; (+) strand; PAM type: NRG; PAM sequence: CAG
ggtgtggccagagctggagg

SEQ ID NO: 22910 - DNA, 20 bp, Artificial Sequence
  Description of Artificial Sequence: Synthetic oligonucleotide
  Target: COL7A1; (+) strand; PAM type: NRG; PAM sequence: AAG
ggccagagctggaggcagtg

SEQ ID NO: 22911 - DNA, 20 bp, Artificial Sequence
  Description of Artificial Sequence: Synthetic oligonucleotide
  Target: COL7A1; (+) strand; PAM type: NRG; PAM sequence: AAG
tgcctgctttcctattgccc

SEQ ID NO: 22912 - DNA, 20 bp, Artificial Sequence
  Description of Artificial Sequence: Synthetic oligonucleotide
  Target: COL7A1; (+) strand; PAM type: NRG; PAM sequence: AGG
gcctgctttcctattgccca

SEQ ID NO: 22913 - DNA, 20 bp, Artificial Sequence
  Description of Artificial Sequence: Synthetic oligonucleotide
  Target: COL7A1; (+) strand; PAM type: NRG; PAM sequence: AAG
tgctttcctattgcccaagg

SEQ ID NO: 22914 - DNA, 20 bp, Artificial Sequence
  Description of Artificial Sequence: Synthetic oligonucleotide
  Target: COL7A1; (+) strand; PAM type: NRG; PAM sequence: AGG
gctttcctattgcccaagga

SEQ ID NO: 22915 - DNA, 20 bp, Artificial Sequence
  Description of Artificial Sequence: Synthetic oligonucleotide
  Target: COL7A1; (+) strand; PAM type: NRG; PAM sequence: TGG
tcctattgcccaaggaaggc

SEQ ID NO: 22916 - DNA, 20 bp, Artificial Sequence
  Description of Artificial Sequence: Synthetic oligonucleotide
  Target: COL7A1; (+) strand; PAM type: NRG; PAM sequence: GGG
cctattgcccaaggaaggct

SEQ ID NO: 22917 - DNA, 20 bp, Artificial Sequence
  Description of Artificial Sequence: Synthetic oligonucleotide
  Target: COL7A1; (+) strand; PAM type: NRG; PAM sequence: GGG
ctattgcccaaggaaggctg

SEQ ID NO: 22918 - DNA, 20 bp, Artificial Sequence
  Description of Artificial Sequence: Synthetic oligonucleotide
  Target: COL7A1; (+) strand; PAM type: NRG; PAM sequence: TGG
actgaccccccaaactatcc

SEQ ID NO: 22919 - DNA, 20 bp, Artificial Sequence
  Description of Artificial Sequence: Synthetic oligonucleotide
  Target: COL7A1; (+) strand; PAM type: NRG; PAM sequence: GGG
ctgaccccccaaactatcct

SEQ ID NO: 22920 - DNA, 20 bp, Artificial Sequence
  Description of Artificial Sequence: Synthetic oligonucleotide
  Target: COL7A1; (+) strand; PAM type: NRG; PAM sequence: GGG
tgaccccccaaactatcctg

SEQ ID NO: 22921 - DNA, 20 bp, Artificial Sequence
  Description of Artificial Sequence: Synthetic oligonucleotide
  Target: COL7A1; (+) strand; PAM type: NRG; PAM sequence: TAG
ccccaaactatcctggggca

SEQ ID NO: 22922 - DNA, 20 bp, Artificial Sequence
  Description of Artificial Sequence: Synthetic oligonucleotide
  Target: COL7A1; (+) strand; PAM type: NRG; PAM sequence: AAG
tagtgctatgaccttattcc

SEQ ID NO: 22923 - DNA, 20 bp, Artificial Sequence
  Description of Artificial Sequence: Synthetic oligonucleotide
  Target: COL7A1; (+) strand; PAM type: NRG; PAM sequence: AGG
agtgctatgaccttattcca

SEQ ID NO: 22924 - DNA, 20 bp, Artificial Sequence
  Description of Artificial Sequence: Synthetic oligonucleotide
  Target: COL7A1; (+) strand; PAM type: NRG; PAM sequence: CAG
ctatgaccttattccaaggt

SEQ ID NO: 22925 - DNA, 20 bp, Artificial Sequence
  Description of Artificial Sequence: Synthetic oligonucleotide
  Target: COL7A1; (+) strand; PAM type: NRG; PAM sequence: AGG
tatgaccttattccaaggtc

SEQ ID NO: 22926 - DNA, 20 bp, Artificial Sequence
  Description of Artificial Sequence: Synthetic oligonucleotide
  Target: COL7A1; (+) strand; PAM type: NRG; PAM sequence: GGG
atgaccttattccaaggtca

SEQ ID NO: 22927 - DNA, 20 bp, Artificial Sequence
  Description of Artificial Sequence: Synthetic oligonucleotide
  Target: COL7A1; (+) strand; PAM type: NRG; PAM sequence: CAG
ttccaaggtcagggtctcct

SEQ ID NO: 22928 - DNA, 20 bp, Artificial Sequence
  Description of Artificial Sequence: Synthetic oligonucleotide
  Target: COL7A1; (+) strand; PAM type: NRG; PAM sequence: CAG
gggtctcctcagccatgtcc

SEQ ID NO: 22929 - DNA, 20 bp, Artificial Sequence
  Description of Artificial Sequence: Synthetic oligonucleotide
  Target: COL7A1; (+) strand; PAM type: NRG; PAM sequence: AGG
ggtctcctcagccatgtccc

SEQ ID NO: 22930 - DNA, 20 bp, Artificial Sequence
  Description of Artificial Sequence: Synthetic oligonucleotide
  Target: COL7A1; (+) strand; PAM type: NRG; PAM sequence: AAG
ccaggaccccccatccctgc

SEQ ID NO: 22931 - DNA, 20 bp, Artificial Sequence
  Description of Artificial Sequence: Synthetic oligonucleotide
  Target: COL7A1; (+) strand; PAM type: NRG; PAM sequence: AGG
caggaccccccatccctgca

SEQ ID NO: 22932 - DNA, 20 bp, Artificial Sequence
  Description of Artificial Sequence: Synthetic oligonucleotide
  Target: COL7A1; (+) strand; PAM type: NRG; PAM sequence: CAG
catccctgcaaggtgtgctc

SEQ ID NO: 22933 - DNA, 20 bp, Artificial Sequence
  Description of Artificial Sequence: Synthetic oligonucleotide
  Target: COL7A1; (+) strand; PAM type: NRG; PAM sequence: AGG
atccctgcaaggtgtgctcc

SEQ ID NO: 22934 - DNA, 20 bp, Artificial Sequence
  Description of Artificial Sequence: Synthetic oligonucleotide
  Target: COL7A1; (+) strand; PAM type: NRG; PAM sequence: TGG
cctgcaaggtgtgctccagg

SEQ ID NO: 22935 - DNA, 20 bp, Artificial Sequence
  Description of Artificial Sequence: Synthetic oligonucleotide
  Target: COL7A1; (+) strand; PAM type: NRG; PAM sequence: GGG
ctgcaaggtgtgctccaggt

SEQ ID NO: 22936 - DNA, 20 bp, Artificial Sequence
  Description of Artificial Sequence: Synthetic oligonucleotide
  Target: COL7A1; (+) strand; PAM type: NRG; PAM sequence: GGG
tgcaaggtgtgctccaggtg

SEQ ID NO: 22937 - DNA, 20 bp, Artificial Sequence
  Description of Artificial Sequence: Synthetic oligonucleotide
  Target: COL7A1; (+) strand; PAM type: NRG; PAM sequence: GGG
gcaaggtgtgctccaggtgg

SEQ ID NO: 22938 - DNA, 20 bp, Artificial Sequence
  Description of Artificial Sequence: Synthetic oligonucleotide
  Target: COL7A1; (+) strand; PAM type: NRG; PAM sequence: GGG
caaggtgtgctccaggtggg

SEQ ID NO: 22939 - DNA, 20 bp, Artificial Sequence
  Description of Artificial Sequence: Synthetic oligonucleotide
  Target: COL7A1; (+) strand; PAM type: NRG; PAM sequence: CAG
gtgctccaggtggggggctg

SEQ ID NO: 22940 - DNA, 20 bp, Artificial Sequence
  Description of Artificial Sequence: Synthetic oligonucleotide
  Target: COL7A1; (+) strand; PAM type: NRG; PAM sequence: GAG
gctccaggtggggggctgca

SEQ ID NO: 22941 - DNA, 20 bp, Artificial Sequence
  Description of Artificial Sequence: Synthetic oligonucleotide
  Target: COL7A1; (+) strand; PAM type: NRG; PAM sequence: CAG
ggtggggggctgcagagaac

SEQ ID NO: 22942 - DNA, 20 bp, Artificial Sequence
  Description of Artificial Sequence: Synthetic oligonucleotide
  Target: COL7A1; (+) strand; PAM type: NRG; PAM sequence: AGG
gtggggggctgcagagaacc

SEQ ID NO: 22943 - DNA, 20 bp, Artificial Sequence
  Description of Artificial Sequence: Synthetic oligonucleotide
  Target: COL7A1; (+) strand; PAM type: NRG; PAM sequence: CAG
gaaccaggtatgttatcaca

SEQ ID NO: 22944 - DNA, 20 bp, Artificial Sequence
  Description of Artificial Sequence: Synthetic oligonucleotide
  Target: COL7A1; (+) strand; PAM type: NRG; PAM sequence: AGG
aaccaggtatgttatcacac

SEQ ID NO: 22945 - DNA, 20 bp, Artificial Sequence
  Description of Artificial Sequence: Synthetic oligonucleotide
  Target: COL7A1; (+) strand; PAM type: NRG; PAM sequence: CAG
caggtatgttatcacacagg

SEQ ID NO: 22946 - DNA, 20 bp, Artificial Sequence
  Description of Artificial Sequence: Synthetic oligonucleotide
  Target: COL7A1; (+) strand; PAM type: NRG; PAM sequence: AAG
acaggcagccccttccccct

SEQ ID NO: 22947 - DNA, 20 bp, Artificial Sequence
  Description of Artificial Sequence: Synthetic oligonucleotide
  Target: COL7A1; (+) strand; PAM type: NRG; PAM sequence: CAG
gactgtcacctcctcccgtg

SEQ ID NO: 22948 - DNA, 20 bp, Artificial Sequence
  Description of Artificial Sequence: Synthetic oligonucleotide
  Target: COL7A1; (+) strand; PAM type: NRG; PAM sequence: CAG
gtcacctcctcccgtgcagc

SEQ ID NO: 22949 - DNA, 20 bp, Artificial Sequence
  Description of Artificial Sequence: Synthetic oligonucleotide
  Target: COL7A1; (+) strand; PAM type: NRG; PAM sequence: AGG
tcacctcctcccgtgcagcc

SEQ ID NO: 22950 - DNA, 20 bp, Artificial Sequence
  Description of Artificial Sequence: Synthetic oligonucleotide
  Target: COL7A1; (+) strand; PAM type: NRG; PAM sequence: GGG
cacctcctcccgtgcagcca

SEQ ID NO: 22951 - DNA, 20 bp, Artificial Sequence
  Description of Artificial Sequence: Synthetic oligonucleotide
  Target: COL7A1; (+) strand; PAM type: NRG; PAM sequence: CGG
ctcctcccgtgcagccaggg

SEQ ID NO: 22952 - DNA, 20 bp, Artificial Sequence
  Description of Artificial Sequence: Synthetic oligonucleotide
  Target: COL7A1; (+) strand; PAM type: NRG; PAM sequence: GGG
tcctcccgtgcagccagggc

SEQ ID NO: 22953 - DNA, 20 bp, Artificial Sequence
  Description of Artificial Sequence: Synthetic oligonucleotide
  Target: COL7A1; (+) strand; PAM type: NRG; PAM sequence: AAG
cccgtgcagccagggcgggc

SEQ ID NO: 22954 - DNA, 20 bp, Artificial Sequence
  Description of Artificial Sequence: Synthetic oligonucleotide
  Target: COL7A1; (+) strand; PAM type: NRG; PAM sequence: GAG
cgtgcagccagggcgggcaa

SEQ ID NO: 22955 - DNA, 20 bp, Artificial Sequence
  Description of Artificial Sequence: Synthetic oligonucleotide
  Target: COL7A1; (+) strand; PAM type: NRG; PAM sequence: CAG
gcagccagggcgggcaagag

SEQ ID NO: 22956 - DNA, 20 bp, Artificial Sequence
  Description of Artificial Sequence: Synthetic oligonucleotide
  Target: COL7A1; (+) strand; PAM type: NRG; PAM sequence: AGG
cagccagggcgggcaagagc

SEQ ID NO: 22957 - DNA, 20 bp, Artificial Sequence
  Description of Artificial Sequence: Synthetic oligonucleotide
  Target: COL7A1; (+) strand; PAM type: NRG; PAM sequence: CAG
cagggcgggcaagagcaggc

SEQ ID NO: 22958 - DNA, 20 bp, Artificial Sequence
  Description of Artificial Sequence: Synthetic oligonucleotide
  Target: COL7A1; (+) strand; PAM type: NRG; PAM sequence: TGG
ggcgggcaagagcaggccag

SEQ ID NO: 22959 - DNA, 20 bp, Artificial Sequence
  Description of Artificial Sequence: Synthetic oligonucleotide
  Target: COL7A1; (+) strand; PAM type: NRG; PAM sequence: TGG
gcaagagcaggccagtggca

SEQ ID NO: 22960 - DNA, 20 bp, Artificial Sequence
  Description of Artificial Sequence: Synthetic oligonucleotide
  Target: COL7A1; (+) strand; PAM type: NRG; PAM sequence: CAG
gagcaggccagtggcatgga

SEQ ID NO: 22961 - DNA, 20 bp, Artificial Sequence
  Description of Artificial Sequence: Synthetic oligonucleotide
  Target: COL7A1; (+) strand; PAM type: NRG; PAM sequence: CGG
ggccagtggcatggacagta

SEQ ID NO: 22962 - DNA, 20 bp, Artificial Sequence
  Description of Artificial Sequence: Synthetic oligonucleotide
  Target: COL7A1; (+) strand; PAM type: NRG; PAM sequence: CAG
gtggcatggacagtacggta

SEQ ID NO: 22963 - DNA, 20 bp, Artificial Sequence
  Description of Artificial Sequence: Synthetic oligonucleotide
  Target: COL7A1; (+) strand; PAM type: NRG; PAM sequence: TGG
tacagacatatgtgcacacg

SEQ ID NO: 22964 - DNA, 20 bp, Artificial Sequence
  Description of Artificial Sequence: Synthetic oligonucleotide
  Target: COL7A1; (+) strand; PAM type: NRG; PAM sequence: GGG
acagacatatgtgcacacgt

SEQ ID NO: 22965 - DNA, 20 bp, Artificial Sequence
  Description of Artificial Sequence: Synthetic oligonucleotide
  Target: COL7A1; (+) strand; PAM type: NRG; PAM sequence: CAG
acatatgtgcacacgtgggc

SEQ ID NO: 22966 - DNA, 20 bp, Artificial Sequence
  Description of Artificial Sequence: Synthetic oligonucleotide
  Target: COL7A1; (+) strand; PAM type: NRG; PAM sequence: TAG
gtgcacacgtgggccagtct

SEQ ID NO: 22967 - DNA, 20 bp, Artificial Sequence
  Description of Artificial Sequence: Synthetic oligonucleotide
  Target: COL7A1; (+) strand; PAM type: NRG; PAM sequence: AGG
tgcacacgtgggccagtctt

SEQ ID NO: 22968 - DNA, 20 bp, Artificial Sequence
  Description of Artificial Sequence: Synthetic oligonucleotide
  Target: COL7A1; (+) strand; PAM type: NRG; PAM sequence: GGG
gcacacgtgggccagtctta

SEQ ID NO: 22969 - DNA, 20 bp, Artificial Sequence
  Description of Artificial Sequence: Synthetic oligonucleotide
  Target: COL7A1; (+) strand; PAM type: NRG; PAM sequence: GGG
cacacgtgggccagtcttag

SEQ ID NO: 22970 - DNA, 20 bp, Artificial Sequence
  Description of Artificial Sequence: Synthetic oligonucleotide
  Target: COL7A1; (+) strand; PAM type: NRG; PAM sequence: GAG
cacgtgggccagtcttaggg

SEQ ID NO: 22971 - DNA, 20 bp, Artificial Sequence
  Description of Artificial Sequence: Synthetic oligonucleotide
  Target: COL7A1; (+) strand; PAM type: NRG; PAM sequence: CAG
tgggccagtcttaggggaga

SEQ ID NO: 22972 - DNA, 20 bp, Artificial Sequence
  Description of Artificial Sequence: Synthetic oligonucleotide
  Target: COL7A1; (+) strand; PAM type: NRG; PAM sequence: AGG
gggccagtcttaggggagac

SEQ ID NO: 22973 - DNA, 20 bp, Artificial Sequence
  Description of Artificial Sequence: Synthetic oligonucleotide
  Target: COL7A1; (+) strand; PAM type: NRG; PAM sequence: GAG
gccagtcttaggggagacag

SEQ ID NO: 22974 - DNA, 20 bp, Artificial Sequence
  Description of Artificial Sequence: Synthetic oligonucleotide
  Target: COL7A1; (+) strand; PAM type: NRG; PAM sequence: AGG
ccagtcttaggggagacagg

SEQ ID NO: 22975 - DNA, 20 bp, Artificial Sequence
  Description of Artificial Sequence: Synthetic oligonucleotide
  Target: COL7A1; (+) strand; PAM type: NRG; PAM sequence: CAG
cttaggggagacaggaggcc

SEQ ID NO: 22976 - DNA, 20 bp, Artificial Sequence
  Description of Artificial Sequence: Synthetic oligonucleotide
  Target: COL7A1; (+) strand; PAM type: NRG; PAM sequence: TGG
ggggagacaggaggcccagc

SEQ ID NO: 22977 - DNA, 20 bp, Artificial Sequence
  Description of Artificial Sequence: Synthetic oligonucleotide
  Target: COL7A1; (+) strand; PAM type: NRG; PAM sequence: GGG
gggagacaggaggcccagct

SEQ ID NO: 22978 - DNA, 20 bp, Artificial Sequence
  Description of Artificial Sequence: Synthetic oligonucleotide
  Target: COL7A1; (+) strand; PAM type: NRG; PAM sequence: GAG
gagacaggaggcccagctgg

SEQ ID NO: 22979 - DNA, 20 bp, Artificial Sequence
  Description of Artificial Sequence: Synthetic oligonucleotide
  Target: COL7A1; (+) strand; PAM type: NRG; PAM sequence: AGG
agacaggaggcccagctggg

SEQ ID NO: 22980 - DNA, 20 bp, Artificial Sequence
  Description of Artificial Sequence: Synthetic oligonucleotide
  Target: COL7A1; (+) strand; PAM type: NRG; PAM sequence: GGG
gacaggaggcccagctggga

SEQ ID NO: 22981 - DNA, 20 bp, Artificial Sequence
  Description of Artificial Sequence: Synthetic oligonucleotide
  Target: COL7A1; (+) strand; PAM type: NRG; PAM sequence: TGG
aggaggcccagctgggaggg

SEQ ID NO: 22982 - DNA, 20 bp, Artificial Sequence
  Description of Artificial Sequence: Synthetic oligonucleotide
  Target: COL7A1; (+) strand; PAM type: NRG; PAM sequence: GGG
ggaggcccagctgggagggt

SEQ ID NO: 22983 - DNA, 20 bp, Artificial Sequence
  Description of Artificial Sequence: Synthetic oligonucleotide
  Target: COL7A1; (+) strand; PAM type: NRG; PAM sequence: CAG
cagctgggagggtgggtgct

SEQ ID NO: 22984 - DNA, 20 bp, Artificial Sequence
  Description of Artificial Sequence: Synthetic oligonucleotide
  Target: COL7A1; (+) strand; PAM type: NRG; PAM sequence: AGG
agctgggagggtgggtgctc

SEQ ID NO: 22985 - DNA, 20 bp, Artificial Sequence
  Description of Artificial Sequence: Synthetic oligonucleotide
  Target: COL7A1; (+) strand; PAM type: NRG; PAM sequence: CAG
ggtgctcaggcaaacctcat

SEQ ID NO: 22986 - DNA, 20 bp, Artificial Sequence
  Description of Artificial Sequence: Synthetic oligonucleotide
  Target: COL7A1; (+) strand; PAM type: NRG; PAM sequence: GAG
aggcaaacctcatcagaatt

SEQ ID NO: 22987 - DNA, 20 bp, Artificial Sequence
  Description of Artificial Sequence: Synthetic oligonucleotide
  Target: COL7A1; (+) strand; PAM type: NRG; PAM sequence: AGG
ggcaaacctcatcagaattg

SEQ ID NO: 22988 - DNA, 20 bp, Artificial Sequence
  Description of Artificial Sequence: Synthetic oligonucleotide
  Target: COL7A1; (+) strand; PAM type: NRG; PAM sequence: AAG
cagaattgaggtgcctccaa

SEQ ID NO: 22989 - DNA, 20 bp, Artificial Sequence
  Description of Artificial Sequence: Synthetic oligonucleotide
  Target: COL7A1; (+) strand; PAM type: NRG; PAM sequence: AAG
attgaggtgcctccaaaaga

SEQ ID NO: 22990 - DNA, 20 bp, Artificial Sequence
  Description of Artificial Sequence: Synthetic oligonucleotide
  Target: COL7A1; (+) strand; PAM type: NRG; PAM sequence: AGG
ttgaggtgcctccaaaagaa

SEQ ID NO: 22991 - DNA, 20 bp, Artificial Sequence
  Description of Artificial Sequence: Synthetic oligonucleotide
  Target: COL7A1; (+) strand; PAM type: NRG; PAM sequence: CAG
ggtgcctccaaaagaaagga

SEQ ID NO: 22992 - DNA, 20 bp, Artificial Sequence
  Description of Artificial Sequence: Synthetic oligonucleotide
  Target: COL7A1; (+) strand; PAM type: NRG; PAM sequence: AGG
gtgcctccaaaagaaaggac

SEQ ID NO: 22993 - DNA, 20 bp, Artificial Sequence
  Description of Artificial Sequence: Synthetic oligonucleotide
  Target: COL7A1; (+) strand; PAM type: NRG; PAM sequence: GAG
aagaaaggacaggctgctgt

SEQ ID NO: 22994 - DNA, 20 bp, Artificial Sequence
  Description of Artificial Sequence: Synthetic oligonucleotide
  Target: COL7A1; (+) strand; PAM type: NRG; PAM sequence: GAG
gaaaggacaggctgctgtga

SEQ ID NO: 22995 - DNA, 20 bp, Artificial Sequence
  Description of Artificial Sequence: Synthetic oligonucleotide
  Target: COL7A1; (+) strand; PAM type: NRG; PAM sequence: AGG
aaaggacaggctgctgtgag

SEQ ID NO: 22996 - DNA, 20 bp, Artificial Sequence
  Description of Artificial Sequence: Synthetic oligonucleotide
  Target: COL7A1; (+) strand; PAM type: NRG; PAM sequence: GGG
aaggacaggctgctgtgaga

SEQ ID NO: 22997 - DNA, 20 bp, Artificial Sequence
  Description of Artificial Sequence: Synthetic oligonucleotide
  Target: COL7A1; (+) strand; PAM type: NRG; PAM sequence: AAG
tgctgtgagagggtctctca

SEQ ID NO: 22998 - DNA, 20 bp, Artificial Sequence
  Description of Artificial Sequence: Synthetic oligonucleotide
  Target: COL7A1; (+) strand; PAM type: NRG; PAM sequence: AGG
gctgtgagagggtctctcaa

SEQ ID NO: 22999 - DNA, 20 bp, Artificial Sequence
  Description of Artificial Sequence: Synthetic oligonucleotide
  Target: COL7A1; (+) strand; PAM type: NRG; PAM sequence: GGG
ctgtgagagggtctctcaaa

SEQ ID NO: 23000 - DNA, 20 bp, Artificial Sequence
  Description of Artificial Sequence: Synthetic oligonucleotide
  Target: COL7A1; (+) strand; PAM type: NRG; PAM sequence: TGG
gagggtctctcaaagggtgc

SEQ ID NO: 23001 - DNA, 20 bp, Artificial Sequence
  Description of Artificial Sequence: Synthetic oligonucleotide
  Target: COL7A1; (+) strand; PAM type: NRG; PAM sequence: GGG
agggtctctcaaagggtgct

SEQ ID NO: 23002 - DNA, 20 bp, Artificial Sequence
  Description of Artificial Sequence: Synthetic oligonucleotide
  Target: COL7A1; (+) strand; PAM type: NRG; PAM sequence: GAG
ggtctctcaaagggtgctgg

SEQ ID NO: 23003 - DNA, 20 bp, Artificial Sequence
  Description of Artificial Sequence: Synthetic oligonucleotide
  Target: COL7A1; (+) strand; PAM type: NRG; PAM sequence: GAG
tctctcaaagggtgctggga

SEQ ID NO: 23004 - DNA, 20 bp, Artificial Sequence
  Description of Artificial Sequence: Synthetic oligonucleotide
  Target: COL7A1; (+) strand; PAM type: NRG; PAM sequence: AGG
ctctcaaagggtgctgggag

SEQ ID NO: 23005 - DNA, 20 bp, Artificial Sequence
  Description of Artificial Sequence: Synthetic oligonucleotide
  Target: COL7A1; (+) strand; PAM type: NRG; PAM sequence: GAG
gggtgctgggagaggctgtt

SEQ ID NO: 23006 - DNA, 20 bp, Artificial Sequence
  Description of Artificial Sequence: Synthetic oligonucleotide
  Target: COL7A1; (+) strand; PAM type: NRG; PAM sequence: AAG
tgctgggagaggctgttgag

SEQ ID NO: 23007 - DNA, 20 bp, Artificial Sequence
  Description of Artificial Sequence: Synthetic oligonucleotide
  Target: COL7A1; (+) strand; PAM type: NRG; PAM sequence: AGG
gctgggagaggctgttgaga

SEQ ID NO: 23008 - DNA, 20 bp, Artificial Sequence
  Description of Artificial Sequence: Synthetic oligonucleotide
  Target: COL7A1; (+) strand; PAM type: NRG; PAM sequence: TAG
gggagaggctgttgagaagg

SEQ ID NO: 23009 - DNA, 20 bp, Artificial Sequence
  Description of Artificial Sequence: Synthetic oligonucleotide
  Target: COL7A1; (+) strand; PAM type: NRG; PAM sequence: AGG
ggagaggctgttgagaaggt

SEQ ID NO: 23010 - DNA, 20 bp, Artificial Sequence
  Description of Artificial Sequence: Synthetic oligonucleotide
  Target: COL7A1; (+) strand; PAM type: NRG; PAM sequence: GAG
agaggctgttgagaaggtag

SEQ ID NO: 23011 - DNA, 20 bp, Artificial Sequence
  Description of Artificial Sequence: Synthetic oligonucleotide
  Target: COL7A1; (+) strand; PAM type: NRG; PAM sequence: AAG
gctgttgagaaggtaggagt

SEQ ID NO: 23012 - DNA, 20 bp, Artificial Sequence
  Description of Artificial Sequence: Synthetic oligonucleotide
  Target: COL7A1; (+) strand; PAM type: NRG; PAM sequence: AGG
ctgttgagaaggtaggagta

SEQ ID NO: 23013 - DNA, 20 bp, Artificial Sequence
  Description of Artificial Sequence: Synthetic oligonucleotide
  Target: COL7A1; (+) strand; PAM type: NRG; PAM sequence: TGG
tgagaaggtaggagtaaggt

SEQ ID NO: 23014 - DNA, 20 bp, Artificial Sequence
  Description of Artificial Sequence: Synthetic oligonucleotide
  Target: COL7A1; (+) strand; PAM type: NRG; PAM sequence: TGG
ggttggaatgactccacgtc

SEQ ID NO: 23015 - DNA, 20 bp, Artificial Sequence
  Description of Artificial Sequence: Synthetic oligonucleotide
  Target: COL7A1; (+) strand; PAM type: NRG; PAM sequence: GAG
ttggaatgactccacgtctg

SEQ ID NO: 23016 - DNA, 20 bp, Artificial Sequence
  Description of Artificial Sequence: Synthetic oligonucleotide
  Target: COL7A1; (+) strand; PAM type: NRG; PAM sequence: GAG
tccacgtctggagcttctat

SEQ ID NO: 23017 - DNA, 20 bp, Artificial Sequence
  Description of Artificial Sequence: Synthetic oligonucleotide
  Target: COL7A1; (+) strand; PAM type: NRG; PAM sequence: GAG
ggagcttctatgagactcac

SEQ ID NO: 23018 - DNA, 20 bp, Artificial Sequence
  Description of Artificial Sequence: Synthetic oligonucleotide
  Target: COL7A1; (+) strand; PAM type: NRG; PAM sequence: CAG
gcttctatgagactcacgag

SEQ ID NO: 23019 - DNA, 20 bp, Artificial Sequence
  Description of Artificial Sequence: Synthetic oligonucleotide
  Target: COL7A1; (+) strand; PAM type: NRG; PAM sequence: AGG
cttctatgagactcacgagc

SEQ ID NO: 23020 - DNA, 20 bp, Artificial Sequence
  Description of Artificial Sequence: Synthetic oligonucleotide
  Target: COL7A1; (+) strand; PAM type: NRG; PAM sequence: GAG
tctatgagactcacgagcag

SEQ ID NO: 23021 - DNA, 20 bp, Artificial Sequence
  Description of Artificial Sequence: Synthetic oligonucleotide
  Target: COL7A1; (+) strand; PAM type: NRG; PAM sequence: TGG
gagactcacgagcaggagtg

SEQ ID NO: 23022 - DNA, 20 bp, Artificial Sequence
  Description of Artificial Sequence: Synthetic oligonucleotide
  Target: COL7A1; (+) strand; PAM type: NRG; PAM sequence: AAG
agcaggagtgtggccctctg

SEQ ID NO: 23023 - DNA, 20 bp, Artificial Sequence
  Description of Artificial Sequence: Synthetic oligonucleotide
  Target: COL7A1; (+) strand; PAM type: NRG; PAM sequence: CAG
agtgtggccctctgaagccc

SEQ ID NO: 23024 - DNA, 20 bp, Artificial Sequence
  Description of Artificial Sequence: Synthetic oligonucleotide
  Target: COL7A1; (+) strand; PAM type: NRG; PAM sequence: TGG
gccctctgaagccccagctc

SEQ ID NO: 23025 - DNA, 20 bp, Artificial Sequence
  Description of Artificial Sequence: Synthetic oligonucleotide
  Target: COL7A1; (+) strand; PAM type: NRG; PAM sequence: TGG
aagccccagctctggcctcc

SEQ ID NO: 23026 - DNA, 20 bp, Artificial Sequence
  Description of Artificial Sequence: Synthetic oligonucleotide
  Target: COL7A1; (+) strand; PAM type: NRG; PAM sequence: GGG
agccccagctctggcctcct

SEQ ID NO: 23027 - DNA, 20 bp, Artificial Sequence
  Description of Artificial Sequence: Synthetic oligonucleotide
  Target: COL7A1; (+) strand; PAM type: NRG; PAM sequence: GAG
ccccagctctggcctcctgg

SEQ ID NO: 23028 - DNA, 20 bp, Artificial Sequence
  Description of Artificial Sequence: Synthetic oligonucleotide
  Target: COL7A1; (+) strand; PAM type: NRG; PAM sequence: AGG
cccagctctggcctcctggg

SEQ ID NO: 23029 - DNA, 20 bp, Artificial Sequence
  Description of Artificial Sequence: Synthetic oligonucleotide
  Target: COL7A1; (+) strand; PAM type: NRG; PAM sequence: CAG
ctggcctcctgggaggaaca

SEQ ID NO: 23030 - DNA, 20 bp, Artificial Sequence
  Description of Artificial Sequence: Synthetic oligonucleotide
  Target: COL7A1; (+) strand; PAM type: NRG; PAM sequence: TAG
ctcctgggaggaacacagcc

SEQ ID NO: 23031 - DNA, 20 bp, Artificial Sequence
  Description of Artificial Sequence: Synthetic oligonucleotide
  Target: COL7A1; (+) strand; PAM type: NRG; PAM sequence: AGG
tcctgggaggaacacagcct

SEQ ID NO: 23032 - DNA, 20 bp, Artificial Sequence
  Description of Artificial Sequence: Synthetic oligonucleotide
  Target: COL7A1; (+) strand; PAM type: NRG; PAM sequence: GGG
cctgggaggaacacagccta

SEQ ID NO: 23033 - DNA, 20 bp, Artificial Sequence
  Description of Artificial Sequence: Synthetic oligonucleotide
  Target: COL7A1; (+) strand; PAM type: NRG; PAM sequence: CAG
gaggaacacagcctagggca

SEQ ID NO: 23034 - DNA, 20 bp, Artificial Sequence
  Description of Artificial Sequence: Synthetic oligonucleotide
  Target: COL7A1; (+) strand; PAM type: NRG; PAM sequence: GAG
cacagcctagggcacagccc

SEQ ID NO: 23035 - DNA, 20 bp, Artificial Sequence
  Description of Artificial Sequence: Synthetic oligonucleotide
  Target: COL7A1; (+) strand; PAM type: NRG; PAM sequence: AGG
acagcctagggcacagcccg

SEQ ID NO: 23036 - DNA, 20 bp, Artificial Sequence
  Description of Artificial Sequence: Synthetic oligonucleotide
  Target: COL7A1; (+) strand; PAM type: NRG; PAM sequence: CAG
cctagggcacagcccgaggc

SEQ ID NO: 23037 - DNA, 20 bp, Artificial Sequence
  Description of Artificial Sequence: Synthetic oligonucleotide
  Target: COL7A1; (+) strand; PAM type: NRG; PAM sequence: CAG
gtgcctacctgcaaccccat

SEQ ID NO: 23038 - DNA, 20 bp, Artificial Sequence
  Description of Artificial Sequence: Synthetic oligonucleotide
  Target: COL7A1; (+) strand; PAM type: NRG; PAM sequence: AGG
tgcctacctgcaaccccatc

SEQ ID NO: 23039 - DNA, 20 bp, Artificial Sequence
  Description of Artificial Sequence: Synthetic oligonucleotide
  Target: COL7A1; (+) strand; PAM type: NRG; PAM sequence: GGG
gcctacctgcaaccccatca

SEQ ID NO: 23040 - DNA, 20 bp, Artificial Sequence
  Description of Artificial Sequence: Synthetic oligonucleotide
  Target: COL7A1; (+) strand; PAM type: NRG; PAM sequence: CGG
tacctgcaaccccatcaggg

SEQ ID NO: 23041 - DNA, 20 bp, Artificial Sequence
  Description of Artificial Sequence: Synthetic oligonucleotide
  Target: COL7A1; (+) strand; PAM type: NRG; PAM sequence: TGG
ctgcaaccccatcagggcgg

SEQ ID NO: 23042 - DNA, 20 bp, Artificial Sequence
  Description of Artificial Sequence: Synthetic oligonucleotide
  Target: COL7A1; (+) strand; PAM type: NRG; PAM sequence: GAG
gcaaccccatcagggcggtg

SEQ ID NO: 23043 - DNA, 20 bp, Artificial Sequence
  Description of Artificial Sequence: Synthetic oligonucleotide
  Target: COL7A1; (+) strand; PAM type: NRG; PAM sequence: CAG
catcagggcggtggagcccc

SEQ ID NO: 23044 - DNA, 20 bp, Artificial Sequence
  Description of Artificial Sequence: Synthetic oligonucleotide
  Target: COL7A1; (+) strand; PAM type: NRG; PAM sequence: GAG
tcagggcggtggagccccca

SEQ ID NO: 23045 - DNA, 20 bp, Artificial Sequence
  Description of Artificial Sequence: Synthetic oligonucleotide
  Target: COL7A1; (+) strand; PAM type: NRG; PAM sequence: AAG
agcacatccttctccctccc

SEQ ID NO: 23046 - DNA, 20 bp, Artificial Sequence
  Description of Artificial Sequence: Synthetic oligonucleotide
  Target: COL7A1; (+) strand; PAM type: NRG; PAM sequence: TGG
tccctgaacatttccttccc

SEQ ID NO: 23047 - DNA, 20 bp, Artificial Sequence
  Description of Artificial Sequence: Synthetic oligonucleotide
  Target: COL7A1; (+) strand; PAM type: NRG; PAM sequence: CAG
aacatttccttccctggcct

SEQ ID NO: 23048 - DNA, 20 bp, Artificial Sequence
  Description of Artificial Sequence: Synthetic oligonucleotide
  Target: COL7A1; (+) strand; PAM type: NRG; PAM sequence: CAG
tcaccccatctgtttccaac

SEQ ID NO: 23049 - DNA, 20 bp, Artificial Sequence
  Description of Artificial Sequence: Synthetic oligonucleotide
  Target: COL7A1; (+) strand; PAM type: NRG; PAM sequence: AGG
caccccatctgtttccaacc

SEQ ID NO: 23050 - DNA, 20 bp, Artificial Sequence
  Description of Artificial Sequence: Synthetic oligonucleotide
  Target: COL7A1; (+) strand; PAM type: NRG; PAM sequence: GGG
accccatctgtttccaacca

SEQ ID NO: 23051 - DNA, 20 bp, Artificial Sequence
  Description of Artificial Sequence: Synthetic oligonucleotide
  Target: COL7A1; (+) strand; PAM type: NRG; PAM sequence: CAG
tccaaccagggcctctttat

SEQ ID NO: 23052 - DNA, 20 bp, Artificial Sequence
  Description of Artificial Sequence: Synthetic oligonucleotide
  Target: COL7A1; (+) strand; PAM type: NRG; PAM sequence: AGG
ccaaccagggcctctttatc

SEQ ID NO: 23053 - DNA, 20 bp, Artificial Sequence
  Description of Artificial Sequence: Synthetic oligonucleotide
  Target: COL7A1; (+) strand; PAM type: NRG; PAM sequence: CAG
agggcctctttatcaggtcc

SEQ ID NO: 23054 - DNA, 20 bp, Artificial Sequence
  Description of Artificial Sequence: Synthetic oligonucleotide
  Target: COL7A1; (+) strand; PAM type: NRG; PAM sequence: TGG
ccacacatcccactgtaccc

SEQ ID NO: 23055 - DNA, 20 bp, Artificial Sequence
  Description of Artificial Sequence: Synthetic oligonucleotide
  Target: COL7A1; (+) strand; PAM type: NRG; PAM sequence: TGG
gacaccaccaaactcctcac

SEQ ID NO: 23056 - DNA, 20 bp, Artificial Sequence
  Description of Artificial Sequence: Synthetic oligonucleotide
  Target: COL7A1; (+) strand; PAM type: NRG; PAM sequence: TGG
ccaaactcctcactggacta

SEQ ID NO: 23057 - DNA, 20 bp, Artificial Sequence
  Description of Artificial Sequence: Synthetic oligonucleotide
  Target: COL7A1; (+) strand; PAM type: NRG; PAM sequence: AAG
aactcctcactggactatgg

SEQ ID NO: 23058 - DNA, 20 bp, Artificial Sequence
  Description of Artificial Sequence: Synthetic oligonucleotide
  Target: COL7A1; (+) strand; PAM type: NRG; PAM sequence: CAG
actcgtgcctccgcgtctcc

SEQ ID NO: 23059 - DNA, 20 bp, Artificial Sequence
  Description of Artificial Sequence: Synthetic oligonucleotide
  Target: COL7A1; (+) strand; PAM type: NRG; PAM sequence: TGG
tccgcgtctcccagccctgc

SEQ ID NO: 23060 - DNA, 20 bp, Artificial Sequence
  Description of Artificial Sequence: Synthetic oligonucleotide
  Target: COL7A1; (+) strand; PAM type: NRG; PAM sequence: GGG
ccgcgtctcccagccctgct

SEQ ID NO: 23061 - DNA, 20 bp, Artificial Sequence
  Description of Artificial Sequence: Synthetic oligonucleotide
  Target: COL7A1; (+) strand; PAM type: NRG; PAM sequence: TAG
tcccagccctgctgggaatg

SEQ ID NO: 23062 - DNA, 20 bp, Artificial Sequence
  Description of Artificial Sequence: Synthetic oligonucleotide
  Target: COL7A1; (+) strand; PAM type: NRG; PAM sequence: CAG
agtcctctttgtgtccccta

SEQ ID NO: 23063 - DNA, 20 bp, Artificial Sequence
  Description of Artificial Sequence: Synthetic oligonucleotide
  Target: COL7A1; (+) strand; PAM type: NRG; PAM sequence: TGG
ctctttgtgtcccctacagc

SEQ ID NO: 23064 - DNA, 20 bp, Artificial Sequence
  Description of Artificial Sequence: Synthetic oligonucleotide
  Target: COL7A1; (+) strand; PAM type: NRG; PAM sequence: CAG
gtgtcccctacagctggctc

SEQ ID NO: 23065 - DNA, 20 bp, Artificial Sequence
  Description of Artificial Sequence: Synthetic oligonucleotide
  Target: COL7A1; (+) strand; PAM type: NRG; PAM sequence: TGG
acagctggctccagttcgtg

SEQ ID NO: 23066 - DNA, 20 bp, Artificial Sequence
  Description of Artificial Sequence: Synthetic oligonucleotide
  Target: COL7A1; (+) strand; PAM type: NRG; PAM sequence: CAG
ccatgacctctgttctgcca

SEQ ID NO: 23067 - DNA, 20 bp, Artificial Sequence
  Description of Artificial Sequence: Synthetic oligonucleotide
  Target: COL7A1; (+) strand; PAM type: NRG; PAM sequence: CAG
acctctgttctgccacagca

SEQ ID NO: 23068 - DNA, 20 bp, Artificial Sequence
  Description of Artificial Sequence: Synthetic oligonucleotide
  Target: COL7A1; (+) strand; PAM type: NRG; PAM sequence: AAG
ctgccacagcacagctcacc

SEQ ID NO: 23069 - DNA, 20 bp, Artificial Sequence
  Description of Artificial Sequence: Synthetic oligonucleotide
  Target: COL7A1; (+) strand; PAM type: NRG; PAM sequence: CAG
acagctcaccaagactgata

SEQ ID NO: 23070 - DNA, 20 bp, Artificial Sequence
  Description of Artificial Sequence: Synthetic oligonucleotide
  Target: COL7A1; (+) strand; PAM type: NRG; PAM sequence: TGG
ccaagactgatacagaaata

SEQ ID NO: 23071 - DNA, 20 bp, Artificial Sequence
  Description of Artificial Sequence: Synthetic oligonucleotide
  Target: COL7A1; (+) strand; PAM type: NRG; PAM sequence: GAG
ctgatacagaaatatggcct

SEQ ID NO: 23072 - DNA, 20 bp, Artificial Sequence
  Description of Artificial Sequence: Synthetic oligonucleotide
  Target: COL7A1; (+) strand; PAM type: NRG; PAM sequence: GAG
gatacagaaatatggcctga

SEQ ID NO: 23073 - DNA, 20 bp, Artificial Sequence
  Description of Artificial Sequence: Synthetic oligonucleotide
  Target: COL7A1; (+) strand; PAM type: NRG; PAM sequence: AAG
gctgaatctcaactctgacc

SEQ ID NO: 23074 - DNA, 20 bp, Artificial Sequence
  Description of Artificial Sequence: Synthetic oligonucleotide
  Target: COL7A1; (+) strand; PAM type: NRG; PAM sequence: CAG
gaccaagtcacttctcttca

SEQ ID NO: 23075 - DNA, 20 bp, Artificial Sequence
  Description of Artificial Sequence: Synthetic oligonucleotide
  Target: COL7A1; (+) strand; PAM type: NRG; PAM sequence: CAG
taacctccaacacacctccc

SEQ ID NO: 23076 - DNA, 20 bp, Artificial Sequence
  Description of Artificial Sequence: Synthetic oligonucleotide
  Target: COL7A1; (+) strand; PAM type: NRG; PAM sequence: TGG
tccaacacacctccccagca

SEQ ID NO: 23077 - DNA, 20 bp, Artificial Sequence
  Description of Artificial Sequence: Synthetic oligonucleotide
  Target: COL7A1; (+) strand; PAM type: NRG; PAM sequence: CAG
acacctccccagcatggctc

SEQ ID NO: 23078 - DNA, 20 bp, Artificial Sequence
  Description of Artificial Sequence: Synthetic oligonucleotide
  Target: COL7A1; (+) strand; PAM type: NRG; PAM sequence: AGG
cacctccccagcatggctcc

SEQ ID NO: 23079 - DNA, 20 bp, Artificial Sequence
  Description of Artificial Sequence: Synthetic oligonucleotide
  Target: COL7A1; (+) strand; PAM type: NRG; PAM sequence: GGG
acctccccagcatggctcca

SEQ ID NO: 23080 - DNA, 20 bp, Artificial Sequence
  Description of Artificial Sequence: Synthetic oligonucleotide
  Target: COL7A1; (+) strand; PAM type: NRG; PAM sequence: AAG
cccagcatggctccagggta

SEQ ID NO: 23081 - DNA, 20 bp, Artificial Sequence
  Description of Artificial Sequence: Synthetic oligonucleotide
  Target: COL7A1; (+) strand; PAM type: NRG; PAM sequence: CAG
catggctccagggtaaagac

SEQ ID NO: 23082 - DNA, 20 bp, Artificial Sequence
  Description of Artificial Sequence: Synthetic oligonucleotide
  Target: COL7A1; (+) strand; PAM type: NRG; PAM sequence: GAG
tggctccagggtaaagacca

SEQ ID NO: 23083 - DNA, 20 bp, Artificial Sequence
  Description of Artificial Sequence: Synthetic oligonucleotide
  Target: COL7A1; (+) strand; PAM type: NRG; PAM sequence: TGG
agggtaaagaccagagtccc

SEQ ID NO: 23084 - DNA, 20 bp, Artificial Sequence
  Description of Artificial Sequence: Synthetic oligonucleotide
  Target: COL7A1; (+) strand; PAM type: NRG; PAM sequence: TGG
aaagaccagagtccctggct

SEQ ID NO: 23085 - DNA, 20 bp, Artificial Sequence
  Description of Artificial Sequence: Synthetic oligonucleotide
  Target: COL7A1; (+) strand; PAM type: NRG; PAM sequence: AAG
gagtccctggcttggtacgc

SEQ ID NO: 23086 - DNA, 20 bp, Artificial Sequence
  Description of Artificial Sequence: Synthetic oligonucleotide
  Target: COL7A1; (+) strand; PAM type: NRG; PAM sequence: AGG
agtccctggcttggtacgca

SEQ ID NO: 23087 - DNA, 20 bp, Artificial Sequence
  Description of Artificial Sequence: Synthetic oligonucleotide
  Target: COL7A1; (+) strand; PAM type: NRG; PAM sequence: TAG
gcttggtacgcaaggtccct

SEQ ID NO: 23088 - DNA, 20 bp, Artificial Sequence
  Description of Artificial Sequence: Synthetic oligonucleotide
  Target: COL7A1; (+) strand; PAM type: NRG; PAM sequence: CAG
tacgcaaggtcccttagaac

SEQ ID NO: 23089 - DNA, 20 bp, Artificial Sequence
  Description of Artificial Sequence: Synthetic oligonucleotide
  Target: COL7A1; (+) strand; PAM type: NRG; PAM sequence: CAG
ccttagaaccagaccactcc

SEQ ID NO: 23090 - DNA, 20 bp, Artificial Sequence
  Description of Artificial Sequence: Synthetic oligonucleotide
  Target: COL7A1; (+) strand; PAM type: NRG; PAM sequence: AAG
cagaccactcccagcaactc

SEQ ID NO: 23091 - DNA, 20 bp, Artificial Sequence
  Description of Artificial Sequence: Synthetic oligonucleotide
  Target: COL7A1; (+) strand; PAM type: NRG; PAM sequence: CAG
gcaactcaagctctcgtgtc

SEQ ID NO: 23092 - DNA, 20 bp, Artificial Sequence
  Description of Artificial Sequence: Synthetic oligonucleotide
  Target: COL7A1; (+) strand; PAM type: NRG; PAM sequence: TAG
tctcgtgtccagcacacctg

SEQ ID NO: 23093 - DNA, 20 bp, Artificial Sequence
  Description of Artificial Sequence: Synthetic oligonucleotide
  Target: COL7A1; (+) strand; PAM type: NRG; PAM sequence: AAG
ccagcacacctgtagcctct

SEQ ID NO: 23094 - DNA, 20 bp, Artificial Sequence
  Description of Artificial Sequence: Synthetic oligonucleotide
  Target: COL7A1; (+) strand; PAM type: NRG; PAM sequence: AGG
cagcacacctgtagcctcta

SEQ ID NO: 23095 - DNA, 20 bp, Artificial Sequence
  Description of Artificial Sequence: Synthetic oligonucleotide
  Target: COL7A1; (+) strand; PAM type: NRG; PAM sequence: GGG
agcacacctgtagcctctaa

SEQ ID NO: 23096 - DNA, 20 bp, Artificial Sequence
  Description of Artificial Sequence: Synthetic oligonucleotide
  Target: COL7A1; (+) strand; PAM type: NRG; PAM sequence: CAG
cacctgtagcctctaagggc

SEQ ID NO: 23097 - DNA, 20 bp, Artificial Sequence
  Description of Artificial Sequence: Synthetic oligonucleotide
  Target: COL7A1; (+) strand; PAM type: NRG; PAM sequence: AGG
acctgtagcctctaagggcc

SEQ ID NO: 23098 - DNA, 20 bp, Artificial Sequence
  Description of Artificial Sequence: Synthetic oligonucleotide
  Target: COL7A1; (+) strand; PAM type: NRG; PAM sequence: TGG
gtagcctctaagggccaggc

SEQ ID NO: 23099 - DNA, 20 bp, Artificial Sequence
  Description of Artificial Sequence: Synthetic oligonucleotide
  Target: COL7A1; (+) strand; PAM type: NRG; PAM sequence: GGG
tagcctctaagggccaggct

SEQ ID NO: 23100 - DNA, 20 bp, Artificial Sequence
  Description of Artificial Sequence: Synthetic oligonucleotide
  Target: COL7A1; (+) strand; PAM type: NRG; PAM sequence: TAG
tctaagggccaggctgggct

SEQ ID NO: 23101 - DNA, 20 bp, Artificial Sequence
  Description of Artificial Sequence: Synthetic oligonucleotide
  Target: COL7A1; (+) strand; PAM type: NRG; PAM sequence: AAG
ccaggctgggcttagaaatg

SEQ ID NO: 23102 - DNA, 20 bp, Artificial Sequence
  Description of Artificial Sequence: Synthetic oligonucleotide
  Target: COL7A1; (+) strand; PAM type: NRG; PAM sequence: CAG
agaaatgaagccccatcctc

SEQ ID NO: 23103 - DNA, 20 bp, Artificial Sequence
  Description of Artificial Sequence: Synthetic oligonucleotide
  Target: COL7A1; (+) strand; PAM type: NRG; PAM sequence: AGG
gaaatgaagccccatcctcc

SEQ ID NO: 23104 - DNA, 20 bp, Artificial Sequence
  Description of Artificial Sequence: Synthetic oligonucleotide
  Target: COL7A1; (+) strand; PAM type: NRG; PAM sequence: GAG
aatgaagccccatcctccag

SEQ ID NO: 23105 - DNA, 20 bp, Artificial Sequence
  Description of Artificial Sequence: Synthetic oligonucleotide
  Target: COL7A1; (+) strand; PAM type: NRG; PAM sequence: CAG
caggagctcaaacttgacaa

SEQ ID NO: 23106 - DNA, 20 bp, Artificial Sequence
  Description of Artificial Sequence: Synthetic oligonucleotide
  Target: COL7A1; (+) strand; PAM type: NRG; PAM sequence: TGG
ctcaaacttgacaacagact

SEQ ID NO: 23107 - DNA, 20 bp, Artificial Sequence
  Description of Artificial Sequence: Synthetic oligonucleotide
  Target: COL7A1; (+) strand; PAM type: NRG; PAM sequence: TGG
ttggcacttgttcccctgcc

SEQ ID NO: 23108 - DNA, 20 bp, Artificial Sequence
  Description of Artificial Sequence: Synthetic oligonucleotide
  Target: COL7A1; (+) strand; PAM type: NRG; PAM sequence: GGG
tggcacttgttcccctgcct

SEQ ID NO: 23109 - DNA, 20 bp, Artificial Sequence
  Description of Artificial Sequence: Synthetic oligonucleotide
  Target: COL7A1; (+) strand; PAM type: NRG; PAM sequence: GAG
cctgggtgttgcacctccat

SEQ ID NO: 23110 - DNA, 20 bp, Artificial Sequence
  Description of Artificial Sequence: Synthetic oligonucleotide
  Target: COL7A1; (+) strand; PAM type: NRG; PAM sequence: CAG
gttgcacctccatgagcacc

SEQ ID NO: 23111 - DNA, 20 bp, Artificial Sequence
  Description of Artificial Sequence: Synthetic oligonucleotide
  Target: COL7A1; (+) strand; PAM type: NRG; PAM sequence: AGG
ttgcacctccatgagcaccc

SEQ ID NO: 23112 - DNA, 20 bp, Artificial Sequence
  Description of Artificial Sequence: Synthetic oligonucleotide
  Target: COL7A1; (+) strand; PAM type: NRG; PAM sequence: GGG
tgcacctccatgagcaccca

SEQ ID NO: 23113 - DNA, 20 bp, Artificial Sequence
  Description of Artificial Sequence: Synthetic oligonucleotide
  Target: COL7A1; (+) strand; PAM type: NRG; PAM sequence: TGG
cctccatgagcacccagggt

SEQ ID NO: 23114 - DNA, 20 bp, Artificial Sequence
  Description of Artificial Sequence: Synthetic oligonucleotide
  Target: COL7A1; (+) strand; PAM type: NRG; PAM sequence: GGG
ctccatgagcacccagggtt

SEQ ID NO: 23115 - DNA, 20 bp, Artificial Sequence
  Description of Artificial Sequence: Synthetic oligonucleotide
  Target: COL7A1; (+) strand; PAM type: NRG; PAM sequence: CAG
gcacccagggttgggcctgt

SEQ ID NO: 23116 - DNA, 20 bp, Artificial Sequence
  Description of Artificial Sequence: Synthetic oligonucleotide
  Target: COL7A1; (+) strand; PAM type: NRG; PAM sequence: AGG
cacccagggttgggcctgtc

SEQ ID NO: 23117 - DNA, 20 bp, Artificial Sequence
  Description of Artificial Sequence: Synthetic oligonucleotide
  Target: COL7A1; (+) strand; PAM type: NRG; PAM sequence: GGG
acccagggttgggcctgtca

SEQ ID NO: 23118 - DNA, 20 bp, Artificial Sequence
  Description of Artificial Sequence: Synthetic oligonucleotide
  Target: COL7A1; (+) strand; PAM type: NRG; PAM sequence: CAG
tgtcagggttctgcgctgcc

SEQ ID NO: 23119 - DNA, 20 bp, Artificial Sequence
  Description of Artificial Sequence: Synthetic oligonucleotide
  Target: COL7A1; (+) strand; PAM type: NRG; PAM sequence: CAG
gctgcccagcatcttctctc

SEQ ID NO: 23120 - DNA, 20 bp, Artificial Sequence
  Description of Artificial Sequence: Synthetic oligonucleotide
  Target: COL7A1; (+) strand; PAM type: NRG; PAM sequence: AAG
cttctctccagccgttcaca

SEQ ID NO: 23121 - DNA, 20 bp, Artificial Sequence
  Description of Artificial Sequence: Synthetic oligonucleotide
  Target: COL7A1; (+) strand; PAM type: NRG; PAM sequence: TAG
ctctccagccgttcacaaag

SEQ ID NO: 23122 - DNA, 20 bp, Artificial Sequence
  Description of Artificial Sequence: Synthetic oligonucleotide
  Target: COL7A1; (+) strand; PAM type: NRG; PAM sequence: CAG
gaatgatctgcgcaatgccc

SEQ ID NO: 23123 - DNA, 20 bp, Artificial Sequence
  Description of Artificial Sequence: Synthetic oligonucleotide
  Target: COL7A1; (+) strand; PAM type: NRG; PAM sequence: CGG
tctgcgcaatgccccagtcc

SEQ ID NO: 23124 - DNA, 20 bp, Artificial Sequence
  Description of Artificial Sequence: Synthetic oligonucleotide
  Target: COL7A1; (+) strand; PAM type: NRG; PAM sequence: GGG
ctgcgcaatgccccagtccc

SEQ ID NO: 23125 - DNA, 20 bp, Artificial Sequence
  Description of Artificial Sequence: Synthetic oligonucleotide
  Target: COL7A1; (+) strand; PAM type: NRG; PAM sequence: TAG
aatgccccagtcccgggccg

SEQ ID NO: 23126 - DNA, 20 bp, Artificial Sequence
  Description of Artificial Sequence: Synthetic oligonucleotide
  Target: COL7A1; (+) strand; PAM type: NRG; PAM sequence: AAG
gccccagtcccgggccgtag

SEQ ID NO: 23127 - DNA, 20 bp, Artificial Sequence
  Description of Artificial Sequence: Synthetic oligonucleotide
  Target: COL7A1; (+) strand; PAM type: NRG; PAM sequence: AGG
ccccagtcccgggccgtaga

SEQ ID NO: 23128 - DNA, 20 bp, Artificial Sequence
  Description of Artificial Sequence: Synthetic oligonucleotide
  Target: COL7A1; (+) strand; PAM type: NRG; PAM sequence: TGG
cttaacaaatgtctccgaat

SEQ ID NO: 23129 - DNA, 20 bp, Artificial Sequence
  Description of Artificial Sequence: Synthetic oligonucleotide
  Target: COL7A1; (+) strand; PAM type: NRG; PAM sequence: TGG
gtctccgaattggcaacgta

SEQ ID NO: 23130 - DNA, 20 bp, Artificial Sequence
  Description of Artificial Sequence: Synthetic oligonucleotide
  Target: COL7A1; (+) strand; PAM type: NRG; PAM sequence: TGG
tggcaacgtatggcaaccaa

SEQ ID NO: 23131 - DNA, 20 bp, Artificial Sequence
  Description of Artificial Sequence: Synthetic oligonucleotide
  Target: COL7A1; (+) strand; PAM type: NRG; PAM sequence: GAG
aacgtatggcaaccaatggt

SEQ ID NO: 23132 - DNA, 20 bp, Artificial Sequence
  Description of Artificial Sequence: Synthetic oligonucleotide
  Target: COL7A1; (+) strand; PAM type: NRG; PAM sequence: AGG
acgtatggcaaccaatggtg

SEQ ID NO: 23133 - DNA, 20 bp, Artificial Sequence
  Description of Artificial Sequence: Synthetic oligonucleotide
  Target: COL7A1; (+) strand; PAM type: NRG; PAM sequence: GGG
cgtatggcaaccaatggtga

SEQ ID NO: 23134 - DNA, 20 bp, Artificial Sequence
  Description of Artificial Sequence: Synthetic oligonucleotide
  Target: COL7A1; (+) strand; PAM type: NRG; PAM sequence: AAG
tggcaaccaatggtgaggga

SEQ ID NO: 23135 - DNA, 20 bp, Artificial Sequence
  Description of Artificial Sequence: Synthetic oligonucleotide
  Target: COL7A1; (+) strand; PAM type: NRG; PAM sequence: AGG
ggcaaccaatggtgagggaa

SEQ ID NO: 23136 - DNA, 20 bp, Artificial Sequence
  Description of Artificial Sequence: Synthetic oligonucleotide
  Target: COL7A1; (+) strand; PAM type: NRG; PAM sequence: CAG
aaccaatggtgagggaaagg

SEQ ID NO: 23137 - DNA, 20 bp, Artificial Sequence
  Description of Artificial Sequence: Synthetic oligonucleotide
  Target: COL7A1; (+) strand; PAM type: NRG; PAM sequence: TGG
caatggtgagggaaaggcag

SEQ ID NO: 23138 - DNA, 20 bp, Artificial Sequence
  Description of Artificial Sequence: Synthetic oligonucleotide
  Target: COL7A1; (+) strand; PAM type: NRG; PAM sequence: GGG
aatggtgagggaaaggcagt

SEQ ID NO: 23139 - DNA, 20 bp, Artificial Sequence
  Description of Artificial Sequence: Synthetic oligonucleotide
  Target: COL7A1; (+) strand; PAM type: NRG; PAM sequence: GGG
atggtgagggaaaggcagtg

SEQ ID NO: 23140 - DNA, 20 bp, Artificial Sequence
  Description of Artificial Sequence: Synthetic oligonucleotide
  Target: COL7A1; (+) strand; PAM type: NRG; PAM sequence: CAG
gtgagggaaaggcagtgggg

SEQ ID NO: 23141 - DNA, 20 bp, Artificial Sequence
  Description of Artificial Sequence: Synthetic oligonucleotide
  Target: COL7A1; (+) strand; PAM type: NRG; PAM sequence: AGG
tgagggaaaggcagtggggc

SEQ ID NO: 23142 - DNA, 20 bp, Artificial Sequence
  Description of Artificial Sequence: Synthetic oligonucleotide
  Target: COL7A1; (+) strand; PAM type: NRG; PAM sequence: GGG
gagggaaaggcagtggggca

SEQ ID NO: 23143 - DNA, 20 bp, Artificial Sequence
  Description of Artificial Sequence: Synthetic oligonucleotide
  Target: COL7A1; (+) strand; PAM type: NRG; PAM sequence: TAG
aaggcagtggggcagggtga

SEQ ID NO: 23144 - DNA, 20 bp, Artificial Sequence
  Description of Artificial Sequence: Synthetic oligonucleotide
  Target: COL7A1; (+) strand; PAM type: NRG; PAM sequence: AAG
gggcagggtgatagtgatac

SEQ ID NO: 23145 - DNA, 20 bp, Artificial Sequence
  Description of Artificial Sequence: Synthetic oligonucleotide
  Target: COL7A1; (+) strand; PAM type: NRG; PAM sequence: AGG
ggcagggtgatagtgataca

SEQ ID NO: 23146 - DNA, 20 bp, Artificial Sequence
  Description of Artificial Sequence: Synthetic oligonucleotide
  Target: COL7A1; (+) strand; PAM type: NRG; PAM sequence: GGG
gcagggtgatagtgatacaa

SEQ ID NO: 23147 - DNA, 20 bp, Artificial Sequence
  Description of Artificial Sequence: Synthetic oligonucleotide
  Target: COL7A1; (+) strand; PAM type: NRG; PAM sequence: TGG
atagtgatacaagggttcct

SEQ ID NO: 23148 - DNA, 20 bp, Artificial Sequence
  Description of Artificial Sequence: Synthetic oligonucleotide
  Target: COL7A1; (+) strand; PAM type: NRG; PAM sequence: GGG
tagtgatacaagggttcctt

SEQ ID NO: 23149 - DNA, 20 bp, Artificial Sequence
  Description of Artificial Sequence: Synthetic oligonucleotide
  Target: COL7A1; (+) strand; PAM type: NRG; PAM sequence: AAG
gggttccttgggctacttcc

SEQ ID NO: 23150 - DNA, 20 bp, Artificial Sequence
  Description of Artificial Sequence: Synthetic oligonucleotide
  Target: COL7A1; (+) strand; PAM type: NRG; PAM sequence: TGG
ctacttccaagctacgatgc

SEQ ID NO: 23151 - DNA, 20 bp, Artificial Sequence
  Description of Artificial Sequence: Synthetic oligonucleotide
  Target: COL7A1; (+) strand; PAM type: NRG; PAM sequence: GGG
tacttccaagctacgatgct

SEQ ID NO: 23152 - DNA, 20 bp, Artificial Sequence
  Description of Artificial Sequence: Synthetic oligonucleotide
  Target: COL7A1; (+) strand; PAM type: NRG; PAM sequence: GGG
acttccaagctacgatgctg

SEQ ID NO: 23153 - DNA, 20 bp, Artificial Sequence
  Description of Artificial Sequence: Synthetic oligonucleotide
  Target: COL7A1; (+) strand; PAM type: NRG; PAM sequence: GGG
cttccaagctacgatgctgg

SEQ ID NO: 23154 - DNA, 20 bp, Artificial Sequence
  Description of Artificial Sequence: Synthetic oligonucleotide
  Target: COL7A1; (+) strand; PAM type: NRG; PAM sequence: GGG
ttccaagctacgatgctggg

SEQ ID NO: 23155 - DNA, 20 bp, Artificial Sequence
  Description of Artificial Sequence: Synthetic oligonucleotide
  Target: COL7A1; (+) strand; PAM type: NRG; PAM sequence: CAG
atgctggggggacttctgaa

SEQ ID NO: 23156 - DNA, 20 bp, Artificial Sequence
  Description of Artificial Sequence: Synthetic oligonucleotide
  Target: COL7A1; (+) strand; PAM type: NRG; PAM sequence: AAG
tctgaacagccatcttctaa

SEQ ID NO: 23157 - DNA, 20 bp, Artificial Sequence
  Description of Artificial Sequence: Synthetic oligonucleotide
  Target: COL7A1; (+) strand; PAM type: NRG; PAM sequence: CAG
tcttctaaaagaccttgtcc

SEQ ID NO: 23158 - DNA, 20 bp, Artificial Sequence
  Description of Artificial Sequence: Synthetic oligonucleotide
  Target: COL7A1; (+) strand; PAM type: NRG; PAM sequence: CAG
agcaccctgcttgtgactgc

SEQ ID NO: 23159 - DNA, 20 bp, Artificial Sequence
  Description of Artificial Sequence: Synthetic oligonucleotide
  Target: COL7A1; (+) strand; PAM type: NRG; PAM sequence: AGG
gcaccctgcttgtgactgcc

SEQ ID NO: 23160 - DNA, 20 bp, Artificial Sequence
  Description of Artificial Sequence: Synthetic oligonucleotide
  Target: COL7A1; (+) strand; PAM type: NRG; PAM sequence: CAG
ccctgcttgtgactgccagg

SEQ ID NO: 23161 - DNA, 20 bp, Artificial Sequence
  Description of Artificial Sequence: Synthetic oligonucleotide
  Target: COL7A1; (+) strand; PAM type: NRG; PAM sequence: AAG
gccaggcagcgacttcctca

SEQ ID NO: 23162 - DNA, 20 bp, Artificial Sequence
  Description of Artificial Sequence: Synthetic oligonucleotide
  Target: COL7A1; (+) strand; PAM type: NRG; PAM sequence: AGG
ccaggcagcgacttcctcaa

SEQ ID NO: 23163 - DNA, 20 bp, Artificial Sequence
  Description of Artificial Sequence: Synthetic oligonucleotide
  Target: COL7A1; (+) strand; PAM type: NRG; PAM sequence: TGG
cgacttcctcaaaggaaaat

SEQ ID NO: 23164 - DNA, 20 bp, Artificial Sequence
  Description of Artificial Sequence: Synthetic oligonucleotide
  Target: COL7A1; (+) strand; PAM type: NRG; PAM sequence: GGG
gacttcctcaaaggaaaatt

SEQ ID NO: 23165 - DNA, 20 bp, Artificial Sequence
  Description of Artificial Sequence: Synthetic oligonucleotide
  Target: COL7A1; (+) strand; PAM type: NRG; PAM sequence: TGG
cctcgctttcaacttccccc

SEQ ID NO: 23166 - DNA, 20 bp, Artificial Sequence
  Description of Artificial Sequence: Synthetic oligonucleotide
  Target: COL7A1; (+) strand; PAM type: NRG; PAM sequence: GGG
ctcgctttcaacttccccct

SEQ ID NO: 23167 - DNA, 20 bp, Artificial Sequence
  Description of Artificial Sequence: Synthetic oligonucleotide
  Target: COL7A1; (+) strand; PAM type: NRG; PAM sequence: CAG
tcaacttccccctgggatcc

SEQ ID NO: 23168 - DNA, 20 bp, Artificial Sequence
  Description of Artificial Sequence: Synthetic oligonucleotide
  Target: COL7A1; (+) strand; PAM type: NRG; PAM sequence: GAG
aacttccccctgggatccca

SEQ ID NO: 23169 - DNA, 20 bp, Artificial Sequence
  Description of Artificial Sequence: Synthetic oligonucleotide
  Target: COL7A1; (+) strand; PAM type: NRG; PAM sequence: TGG
gatcccagagaacctgactg

SEQ ID NO: 23170 - DNA, 20 bp, Artificial Sequence
  Description of Artificial Sequence: Synthetic oligonucleotide
  Target: COL7A1; (+) strand; PAM type: NRG; PAM sequence: AAG
cccagagaacctgactgtgg

SEQ ID NO: 23171 - DNA, 20 bp, Artificial Sequence
  Description of Artificial Sequence: Synthetic oligonucleotide
  Target: COL7A1; (+) strand; PAM type: NRG; PAM sequence: TGG
gaacctgactgtggaagcac

SEQ ID NO: 23172 - DNA, 20 bp, Artificial Sequence
  Description of Artificial Sequence: Synthetic oligonucleotide
  Target: COL7A1; (+) strand; PAM type: NRG; PAM sequence: GGG
aacctgactgtggaagcact

SEQ ID NO: 23173 - DNA, 20 bp, Artificial Sequence
  Description of Artificial Sequence: Synthetic oligonucleotide
  Target: COL7A1; (+) strand; PAM type: NRG; PAM sequence: GGG
acctgactgtggaagcactg

SEQ ID NO: 23174 - DNA, 20 bp, Artificial Sequence
  Description of Artificial Sequence: Synthetic oligonucleotide
  Target: COL7A1; (+) strand; PAM type: NRG; PAM sequence: GGG
cctgactgtggaagcactgg

SEQ ID NO: 23175 - DNA, 20 bp, Artificial Sequence
  Description of Artificial Sequence: Synthetic oligonucleotide
  Target: COL7A1; (+) strand; PAM type: NRG; PAM sequence: GGG
ctgactgtggaagcactggg

SEQ ID NO: 23176 - DNA, 20 bp, Artificial Sequence
  Description of Artificial Sequence: Synthetic oligonucleotide
  Target: COL7A1; (+) strand; PAM type: NRG; PAM sequence: CAG
tgtggaagcactggggggtg

SEQ ID NO: 23177 - DNA, 20 bp, Artificial Sequence
  Description of Artificial Sequence: Synthetic oligonucleotide
  Target: COL7A1; (+) strand; PAM type: NRG; PAM sequence: AGG
gtggaagcactggggggtgc

SEQ ID NO: 23178 - DNA, 20 bp, Artificial Sequence
  Description of Artificial Sequence: Synthetic oligonucleotide
  Target: COL7A1; (+) strand; PAM type: NRG; PAM sequence: GAG
ggaagcactggggggtgcag

SEQ ID NO: 23179 - DNA, 20 bp, Artificial Sequence
  Description of Artificial Sequence: Synthetic oligonucleotide
  Target: COL7A1; (+) strand; PAM type: NRG; PAM sequence: AGG
gaagcactggggggtgcagg

SEQ ID NO: 23180 - DNA, 20 bp, Artificial Sequence
  Description of Artificial Sequence: Synthetic oligonucleotide
  Target: COL7A1; (+) strand; PAM type: NRG; PAM sequence: GAG
agcactggggggtgcaggag

SEQ ID NO: 23181 - DNA, 20 bp, Artificial Sequence
  Description of Artificial Sequence: Synthetic oligonucleotide
  Target: COL7A1; (+) strand; PAM type: NRG; PAM sequence: CAG
actggggggtgcaggaggag

SEQ ID NO: 23182 - DNA, 20 bp, Artificial Sequence
  Description of Artificial Sequence: Synthetic oligonucleotide
  Target: COL7A1; (+) strand; PAM type: NRG; PAM sequence: TGG
gcctacctgcgcacccacca

SEQ ID NO: 23183 - DNA, 20 bp, Artificial Sequence
  Description of Artificial Sequence: Synthetic oligonucleotide
  Target: COL7A1; (+) strand; PAM type: NRG; PAM sequence: GGG
cctacctgcgcacccaccat

SEQ ID NO: 23184 - DNA, 20 bp, Artificial Sequence
  Description of Artificial Sequence: Synthetic oligonucleotide
  Target: COL7A1; (+) strand; PAM type: NRG; PAM sequence: GGG
ctacctgcgcacccaccatg

SEQ ID NO: 23185 - DNA, 20 bp, Artificial Sequence
  Description of Artificial Sequence: Synthetic oligonucleotide
  Target: COL7A1; (+) strand; PAM type: NRG; PAM sequence: CAG
tgcgcacccaccatggggac

SEQ ID NO: 23186 - DNA, 20 bp, Artificial Sequence
  Description of Artificial Sequence: Synthetic oligonucleotide
  Target: COL7A1; (+) strand; PAM type: NRG; PAM sequence: GAG
cgcacccaccatggggacca

SEQ ID NO: 23187 - DNA, 20 bp, Artificial Sequence
  Description of Artificial Sequence: Synthetic oligonucleotide
  Target: COL7A1; (+) strand; PAM type: NRG; PAM sequence: AAG
accatggggaccagagccaa

SEQ ID NO: 23188 - DNA, 20 bp, Artificial Sequence
  Description of Artificial Sequence: Synthetic oligonucleotide
  Target: COL7A1; (+) strand; PAM type: NRG; PAM sequence: GAG
catggggaccagagccaaaa

SEQ ID NO: 23189 - DNA, 20 bp, Artificial Sequence
  Description of Artificial Sequence: Synthetic oligonucleotide
  Target: COL7A1; (+) strand; PAM type: NRG; PAM sequence: CAG
accagagccaaaagagataa

SEQ ID NO: 23190 - DNA, 20 bp, Artificial Sequence
  Description of Artificial Sequence: Synthetic oligonucleotide
  Target: COL7A1; (+) strand; PAM type: NRG; PAM sequence: GAG
cagagccaaaagagataaca

SEQ ID NO: 23191 - DNA, 20 bp, Artificial Sequence
  Description of Artificial Sequence: Synthetic oligonucleotide
  Target: COL7A1; (+) strand; PAM type: NRG; PAM sequence: AGG
agagccaaaagagataacag

SEQ ID NO: 23192 - DNA, 20 bp, Artificial Sequence
  Description of Artificial Sequence: Synthetic oligonucleotide
  Target: COL7A1; (+) strand; PAM type: NRG; PAM sequence: GGG
gagccaaaagagataacaga

SEQ ID NO: 23193 - DNA, 20 bp, Artificial Sequence
  Description of Artificial Sequence: Synthetic oligonucleotide
  Target: COL7A1; (+) strand; PAM type: NRG; PAM sequence: TAG
aaaagagataacagagggac

SEQ ID NO: 23194 - DNA, 20 bp, Artificial Sequence
  Description of Artificial Sequence: Synthetic oligonucleotide
  Target: COL7A1; (+) strand; PAM type: NRG; PAM sequence: AGG
aaagagataacagagggact

SEQ ID NO: 23195 - DNA, 20 bp, Artificial Sequence
  Description of Artificial Sequence: Synthetic oligonucleotide
  Target: COL7A1; (+) strand; PAM type: NRG; PAM sequence: TAG
gagataacagagggactagg

SEQ ID NO: 23196 - DNA, 20 bp, Artificial Sequence
  Description of Artificial Sequence: Synthetic oligonucleotide
  Target: COL7A1; (+) strand; PAM type: NRG; PAM sequence: AAG
aacagagggactaggtagct

SEQ ID NO: 23197 - DNA, 20 bp, Artificial Sequence
  Description of Artificial Sequence: Synthetic oligonucleotide
  Target: COL7A1; (+) strand; PAM type: NRG; PAM sequence: GAG
cagagggactaggtagctaa

SEQ ID NO: 23198 - DNA, 20 bp, Artificial Sequence
  Description of Artificial Sequence: Synthetic oligonucleotide
  Target: COL7A1; (+) strand; PAM type: NRG; PAM sequence: CAG
taggtagctaagagctgtac

SEQ ID NO: 23199 - DNA, 20 bp, Artificial Sequence
  Description of Artificial Sequence: Synthetic oligonucleotide
  Target: COL7A1; (+) strand; PAM type: NRG; PAM sequence: AGG
aggtagctaagagctgtacc

SEQ ID NO: 23200 - DNA, 20 bp, Artificial Sequence
  Description of Artificial Sequence: Synthetic oligonucleotide
  Target: COL7A1; (+) strand; PAM type: NRG; PAM sequence: TGG
ctaagagctgtaccaggtcc

SEQ ID NO: 23201 - DNA, 20 bp, Artificial Sequence
  Description of Artificial Sequence: Synthetic oligonucleotide
  Target: COL7A1; (+) strand; PAM type: NRG; PAM sequence: CAG
gtaccaggtcctggctgcct

SEQ ID NO: 23202 - DNA, 20 bp, Artificial Sequence
  Description of Artificial Sequence: Synthetic oligonucleotide
  Target: COL7A1; (+) strand; PAM type: NRG; PAM sequence: AGG
taccaggtcctggctgcctc

SEQ ID NO: 23203 - DNA, 20 bp, Artificial Sequence
  Description of Artificial Sequence: Synthetic oligonucleotide
  Target: COL7A1; (+) strand; PAM type: NRG; PAM sequence: TGG
tcctggctgcctcaggaaaa

SEQ ID NO: 23204 - DNA, 20 bp, Artificial Sequence
  Description of Artificial Sequence: Synthetic oligonucleotide
  Target: COL7A1; (+) strand; PAM type: NRG; PAM sequence: GGG
cctggctgcctcaggaaaat

SEQ ID NO: 23205 - DNA, 20 bp, Artificial Sequence
  Description of Artificial Sequence: Synthetic oligonucleotide
  Target: COL7A1; (+) strand; PAM type: NRG; PAM sequence: GGG
ctggctgcctcaggaaaatg

SEQ ID NO: 23206 - DNA, 20 bp, Artificial Sequence
  Description of Artificial Sequence: Synthetic oligonucleotide
  Target: COL7A1; (+) strand; PAM type: NRG; PAM sequence: GAG
ggctgcctcaggaaaatggg

SEQ ID NO: 23207 - DNA, 20 bp, Artificial Sequence
  Description of Artificial Sequence: Synthetic oligonucleotide
  Target: COL7A1; (+) strand; PAM type: NRG; PAM sequence: AGG
gctgcctcaggaaaatgggg

SEQ ID NO: 23208 - DNA, 20 bp, Artificial Sequence
  Description of Artificial Sequence: Synthetic oligonucleotide
  Target: COL7A1; (+) strand; PAM type: NRG; PAM sequence: GGG
ctgcctcaggaaaatgggga

SEQ ID NO: 23209 - DNA, 20 bp, Artificial Sequence
  Description of Artificial Sequence: Synthetic oligonucleotide
  Target: COL7A1; (+) strand; PAM type: NRG; PAM sequence: GGG
tgcctcaggaaaatggggag

SEQ ID NO: 23210 - DNA, 20 bp, Artificial Sequence
  Description of Artificial Sequence: Synthetic oligonucleotide
  Target: COL7A1; (+) strand; PAM type: NRG; PAM sequence: CAG
gaaaatggggaggggattgt

SEQ ID NO: 23211 - DNA, 20 bp, Artificial Sequence
  Description of Artificial Sequence: Synthetic oligonucleotide
  Target: COL7A1; (+) strand; PAM type: NRG; PAM sequence: AGG
aaaatggggaggggattgtc

SEQ ID NO: 23212 - DNA, 20 bp, Artificial Sequence
  Description of Artificial Sequence: Synthetic oligonucleotide
  Target: COL7A1; (+) strand; PAM type: NRG; PAM sequence: CAG
tggggaggggattgtcaggc

SEQ ID NO: 23213 - DNA, 20 bp, Artificial Sequence
  Description of Artificial Sequence: Synthetic oligonucleotide
  Target: COL7A1; (+) strand; PAM type: NRG; PAM sequence: CAG
ggaggggattgtcaggccag

SEQ ID NO: 23214 - DNA, 20 bp, Artificial Sequence
  Description of Artificial Sequence: Synthetic oligonucleotide
  Target: COL7A1; (+) strand; PAM type: NRG; PAM sequence: TGG
gattgtcaggccagcagctc

SEQ ID NO: 23215 - DNA, 20 bp, Artificial Sequence
  Description of Artificial Sequence: Synthetic oligonucleotide
  Target: COL7A1; (+) strand; PAM type: NRG; PAM sequence: TGG
ccagcagctctggacttgcc

SEQ ID NO: 23216 - DNA, 20 bp, Artificial Sequence
  Description of Artificial Sequence: Synthetic oligonucleotide
  Target: COL7A1; (+) strand; PAM type: NRG; PAM sequence: GGG
cagcagctctggacttgcct

SEQ ID NO: 23217 - DNA, 20 bp, Artificial Sequence
  Description of Artificial Sequence: Synthetic oligonucleotide
  Target: COL7A1; (+) strand; PAM type: NRG; PAM sequence: TAG
ggacttgcctgggacaaatg

SEQ ID NO: 23218 - DNA, 20 bp, Artificial Sequence
  Description of Artificial Sequence: Synthetic oligonucleotide
  Target: COL7A1; (+) strand; PAM type: NRG; PAM sequence: TAG
cttgcctgggacaaatgtag

SEQ ID NO: 23219 - DNA, 20 bp, Artificial Sequence
  Description of Artificial Sequence: Synthetic oligonucleotide
  Target: COL7A1; (+) strand; PAM type: NRG; PAM sequence: GAG
tgcctgggacaaatgtagta

SEQ ID NO: 23220 - DNA, 20 bp, Artificial Sequence
  Description of Artificial Sequence: Synthetic oligonucleotide
  Target: COL7A1; (+) strand; PAM type: NRG; PAM sequence: AGG
gcctgggacaaatgtagtag

SEQ ID NO: 23221 - DNA, 20 bp, Artificial Sequence
  Description of Artificial Sequence: Synthetic oligonucleotide
  Target: COL7A1; (+) strand; PAM type: NRG; PAM sequence: GGG
cctgggacaaatgtagtaga

SEQ ID NO: 23222 - DNA, 20 bp, Artificial Sequence
  Description of Artificial Sequence: Synthetic oligonucleotide
  Target: COL7A1; (+) strand; PAM type: NRG; PAM sequence: GAG
tgggacaaatgtagtagagg

SEQ ID NO: 23223 - DNA, 20 bp, Artificial Sequence
  Description of Artificial Sequence: Synthetic oligonucleotide
  Target: COL7A1; (+) strand; PAM type: NRG; PAM sequence: AGG
gggacaaatgtagtagaggg

SEQ ID NO: 23224 - DNA, 20 bp, Artificial Sequence
  Description of Artificial Sequence: Synthetic oligonucleotide
  Target: COL7A1; (+) strand; PAM type: NRG; PAM sequence: GGG
ggacaaatgtagtagaggga

SEQ ID NO: 23225 - DNA, 20 bp, Artificial Sequence
  Description of Artificial Sequence: Synthetic oligonucleotide
  Target: COL7A1; (+) strand; PAM type: NRG; PAM sequence: GGG
gacaaatgtagtagagggag

SEQ ID NO: 23226 - DNA, 20 bp, Artificial Sequence
  Description of Artificial Sequence: Synthetic oligonucleotide
  Target: COL7A1; (+) strand; PAM type: NRG; PAM sequence: GGG
acaaatgtagtagagggagg

SEQ ID NO: 23227 - DNA, 20 bp, Artificial Sequence
  Description of Artificial Sequence: Synthetic oligonucleotide
  Target: COL7A1; (+) strand; PAM type: NRG; PAM sequence: CGG
tgtagtagagggagggggct

SEQ ID NO: 23228 - DNA, 20 bp, Artificial Sequence
  Description of Artificial Sequence: Synthetic oligonucleotide
  Target: COL7A1; (+) strand; PAM type: NRG; PAM sequence: GGG
gtagtagagggagggggctc

SEQ ID NO: 23229 - DNA, 20 bp, Artificial Sequence
  Description of Artificial Sequence: Synthetic oligonucleotide
  Target: COL7A1; (+) strand; PAM type: NRG; PAM sequence: GAG
gagggggctcgggccccact

SEQ ID NO: 23230 - DNA, 20 bp, Artificial Sequence
  Description of Artificial Sequence: Synthetic oligonucleotide
  Target: COL7A1; (+) strand; PAM type: NRG; PAM sequence: CAG
ggctcgggccccactgagct

SEQ ID NO: 23231 - DNA, 20 bp, Artificial Sequence
  Description of Artificial Sequence: Synthetic oligonucleotide
  Target: COL7A1; (+) strand; PAM type: NRG; PAM sequence: AGG
gctcgggccccactgagctc

SEQ ID NO: 23232 - DNA, 20 bp, Artificial Sequence
  Description of Artificial Sequence: Synthetic oligonucleotide
  Target: COL7A1; (+) strand; PAM type: NRG; PAM sequence: GGG
ctcgggccccactgagctca

SEQ ID NO: 23233 - DNA, 20 bp, Artificial Sequence
  Description of Artificial Sequence: Synthetic oligonucleotide
  Target: COL7A1; (+) strand; PAM type: NRG; PAM sequence: TGG
actgagctcagggctattct

SEQ ID NO: 23234 - DNA, 20 bp, Artificial Sequence
  Description of Artificial Sequence: Synthetic oligonucleotide
  Target: COL7A1; (+) strand; PAM type: NRG; PAM sequence: GAG
tgagctcagggctattcttg

SEQ ID NO: 23235 - DNA, 20 bp, Artificial Sequence
  Description of Artificial Sequence: Synthetic oligonucleotide
  Target: COL7A1; (+) strand; PAM type: NRG; PAM sequence: GAG
cagggctattcttggagcct

SEQ ID NO: 23236 - DNA, 20 bp, Artificial Sequence
  Description of Artificial Sequence: Synthetic oligonucleotide
  Target: COL7A1; (+) strand; PAM type: NRG; PAM sequence: CAG
gctattcttggagcctgagt

SEQ ID NO: 23237 - DNA, 20 bp, Artificial Sequence
  Description of Artificial Sequence: Synthetic oligonucleotide
  Target: COL7A1; (+) strand; PAM type: NRG; PAM sequence: CGG
attcttggagcctgagtcag

SEQ ID NO: 23238 - DNA, 20 bp, Artificial Sequence
  Description of Artificial Sequence: Synthetic oligonucleotide
  Target: COL7A1; (+) strand; PAM type: NRG; PAM sequence: GAG
tcttggagcctgagtcagcg

SEQ ID NO: 23239 - DNA, 20 bp, Artificial Sequence
  Description of Artificial Sequence: Synthetic oligonucleotide
  Target: COL7A1; (+) strand; PAM type: NRG; PAM sequence: AGG
cttggagcctgagtcagcgg

SEQ ID NO: 23240 - DNA, 20 bp, Artificial Sequence
  Description of Artificial Sequence: Synthetic oligonucleotide
  Target: COL7A1; (+) strand; PAM type: NRG; PAM sequence: AAG
agcctgagtcagcggaggca

SEQ ID NO: 23241 - DNA, 20 bp, Artificial Sequence
  Description of Artificial Sequence: Synthetic oligonucleotide
  Target: COL7A1; (+) strand; PAM type: NRG; PAM sequence: AGG
gcctgagtcagcggaggcaa

SEQ ID NO: 23242 - DNA, 20 bp, Artificial Sequence
  Description of Artificial Sequence: Synthetic oligonucleotide
  Target: COL7A1; (+) strand; PAM type: NRG; PAM sequence: CAG
ggattcctgccctgcttgtc

SEQ ID NO: 23243 - DNA, 20 bp, Artificial Sequence
  Description of Artificial Sequence: Synthetic oligonucleotide
  Target: COL7A1; (+) strand; PAM type: NRG; PAM sequence: AGG
gattcctgccctgcttgtcc

SEQ ID NO: 23244 - DNA, 20 bp, Artificial Sequence
  Description of Artificial Sequence: Synthetic oligonucleotide
  Target: COL7A1; (+) strand; PAM type: NRG; PAM sequence: CAG
tcctgccctgcttgtccagg

SEQ ID NO: 23245 - DNA, 20 bp, Artificial Sequence
  Description of Artificial Sequence: Synthetic oligonucleotide
  Target: COL7A1; (+) strand; PAM type: NRG; PAM sequence: CAG
tgccctgcttgtccaggcag

SEQ ID NO: 23246 - DNA, 20 bp, Artificial Sequence
  Description of Artificial Sequence: Synthetic oligonucleotide
  Target: COL7A1; (+) strand; PAM type: NRG; PAM sequence: TAG
ctgcttgtccaggcagcagt

SEQ ID NO: 23247 - DNA, 20 bp, Artificial Sequence
  Description of Artificial Sequence: Synthetic oligonucleotide
  Target: COL7A1; (+) strand; PAM type: NRG; PAM sequence: GAG
gcagcagttagaaaccaaat

SEQ ID NO: 23248 - DNA, 20 bp, Artificial Sequence
  Description of Artificial Sequence: Synthetic oligonucleotide
  Target: COL7A1; (+) strand; PAM type: NRG; PAM sequence: CAG
caaatgagaacactatgccc

SEQ ID NO: 23249 - DNA, 20 bp, Artificial Sequence
  Description of Artificial Sequence: Synthetic oligonucleotide
  Target: COL7A1; (+) strand; PAM type: NRG; PAM sequence: AGG
aaatgagaacactatgcccc

SEQ ID NO: 23250 - DNA, 20 bp, Artificial Sequence
  Description of Artificial Sequence: Synthetic oligonucleotide
  Target: COL7A1; (+) strand; PAM type: NRG; PAM sequence: CAG
gccccaggctatcctcctcc

SEQ ID NO: 23251 - DNA, 20 bp, Artificial Sequence
  Description of Artificial Sequence: Synthetic oligonucleotide
  Target: COL7A1; (+) strand; PAM type: NRG; PAM sequence: CAG
gctatcctcctcccagaatg

SEQ ID NO: 23252 - DNA, 20 bp, Artificial Sequence
  Description of Artificial Sequence: Synthetic oligonucleotide
  Target: COL7A1; (+) strand; PAM type: NRG; PAM sequence: GAG
tatcctcctcccagaatgca

SEQ ID NO: 23253 - DNA, 20 bp, Artificial Sequence
  Description of Artificial Sequence: Synthetic oligonucleotide
  Target: COL7A1; (+) strand; PAM type: NRG; PAM sequence: AAG
aatgcagagtaaacacacac

SEQ ID NO: 23254 - DNA, 20 bp, Artificial Sequence
  Description of Artificial Sequence: Synthetic oligonucleotide
  Target: COL7A1; (+) strand; PAM type: NRG; PAM sequence: GAG
tgcagagtaaacacacacaa

SEQ ID NO: 23255 - DNA, 20 bp, Artificial Sequence
  Description of Artificial Sequence: Synthetic oligonucleotide
  Target: COL7A1; (+) strand; PAM type: NRG; PAM sequence: AGG
gcagagtaaacacacacaag

SEQ ID NO: 23256 - DNA, 20 bp, Artificial Sequence
  Description of Artificial Sequence: Synthetic oligonucleotide
  Target: COL7A1; (+) strand; PAM type: NRG; PAM sequence: TGG
acacacacaagaggcatcct

SEQ ID NO: 23257 - DNA, 20 bp, Artificial Sequence
  Description of Artificial Sequence: Synthetic oligonucleotide
  Target: COL7A1; (+) strand; PAM type: NRG; PAM sequence: GAG
acacacaagaggcatccttg

SEQ ID NO: 23258 - DNA, 20 bp, Artificial Sequence
  Description of Artificial Sequence: Synthetic oligonucleotide
  Target: COL7A1; (+) strand; PAM type: NRG; PAM sequence: TGG
gcatccttggagacacccct

SEQ ID NO: 23259 - DNA, 20 bp, Artificial Sequence
  Description of Artificial Sequence: Synthetic oligonucleotide
  Target: COL7A1; (+) strand; PAM type: NRG; PAM sequence: TGG
agacaccccttggccccttc

SEQ ID NO: 23260 - DNA, 20 bp, Artificial Sequence
  Description of Artificial Sequence: Synthetic oligonucleotide
  Target: COL7A1; (+) strand; PAM type: NRG; PAM sequence: CAG
cttggccccttctggtccac

SEQ ID NO: 23261 - DNA, 20 bp, Artificial Sequence
  Description of Artificial Sequence: Synthetic oligonucleotide
  Target: COL7A1; (+) strand; PAM type: NRG; PAM sequence: AGG
ttggccccttctggtccacc

SEQ ID NO: 23262 - DNA, 20 bp, Artificial Sequence
  Description of Artificial Sequence: Synthetic oligonucleotide
  Target: COL7A1; (+) strand; PAM type: NRG; PAM sequence: GGG
tggccccttctggtccacca

SEQ ID NO: 23263 - DNA, 20 bp, Artificial Sequence
  Description of Artificial Sequence: Synthetic oligonucleotide
  Target: COL7A1; (+) strand; PAM type: NRG; PAM sequence: CAG
tctggtccaccagggaccac

SEQ ID NO: 23264 - DNA, 20 bp, Artificial Sequence
  Description of Artificial Sequence: Synthetic oligonucleotide
  Target: COL7A1; (+) strand; PAM type: NRG; PAM sequence: AGG
ctggtccaccagggaccacc

SEQ ID NO: 23265 - DNA, 20 bp, Artificial Sequence
  Description of Artificial Sequence: Synthetic oligonucleotide
  Target: COL7A1; (+) strand; PAM type: NRG; PAM sequence: GGG
tggtccaccagggaccacca

SEQ ID NO: 23266 - DNA, 20 bp, Artificial Sequence
  Description of Artificial Sequence: Synthetic oligonucleotide
  Target: COL7A1; (+) strand; PAM type: NRG; PAM sequence: GGG
ggtccaccagggaccaccag

SEQ ID NO: 23267 - DNA, 20 bp, Artificial Sequence
  Description of Artificial Sequence: Synthetic oligonucleotide
  Target: COL7A1; (+) strand; PAM type: NRG; PAM sequence: GGG
gtccaccagggaccaccagg

SEQ ID NO: 23268 - DNA, 20 bp, Artificial Sequence
  Description of Artificial Sequence: Synthetic oligonucleotide
  Target: COL7A1; (+) strand; PAM type: NRG; PAM sequence: TGG
gggaccaccagggggtgact

SEQ ID NO: 23269 - DNA, 20 bp, Artificial Sequence
  Description of Artificial Sequence: Synthetic oligonucleotide
  Target: COL7A1; (+) strand; PAM type: NRG; PAM sequence: AAG
accagggggtgacttggcac

SEQ ID NO: 23270 - DNA, 20 bp, Artificial Sequence
  Description of Artificial Sequence: Synthetic oligonucleotide
  Target: COL7A1; (+) strand; PAM type: NRG; PAM sequence: AGG
ccagggggtgacttggcaca

SEQ ID NO: 23271 - DNA, 20 bp, Artificial Sequence
  Description of Artificial Sequence: Synthetic oligonucleotide
  Target: COL7A1; (+) strand; PAM type: NRG; PAM sequence: CAG
gtgacttggcacaaggtcca

SEQ ID NO: 23272 - DNA, 20 bp, Artificial Sequence
  Description of Artificial Sequence: Synthetic oligonucleotide
  Target: COL7A1; (+) strand; PAM type: NRG; PAM sequence: GAG
cttggcacaaggtccacagt

SEQ ID NO: 23273 - DNA, 20 bp, Artificial Sequence
  Description of Artificial Sequence: Synthetic oligonucleotide
  Target: COL7A1; (+) strand; PAM type: NRG; PAM sequence: AGG
ttggcacaaggtccacagtg

SEQ ID NO: 23274 - DNA, 20 bp, Artificial Sequence
  Description of Artificial Sequence: Synthetic oligonucleotide
  Target: COL7A1; (+) strand; PAM type: NRG; PAM sequence: GGG
tggcacaaggtccacagtga

SEQ ID NO: 23275 - DNA, 20 bp, Artificial Sequence
  Description of Artificial Sequence: Synthetic oligonucleotide
  Target: COL7A1; (+) strand; PAM type: NRG; PAM sequence: GGG
ggcacaaggtccacagtgag

SEQ ID NO: 23276 - DNA, 20 bp, Artificial Sequence
  Description of Artificial Sequence: Synthetic oligonucleotide
  Target: COL7A1; (+) strand; PAM type: NRG; PAM sequence: GAG
cagtgaggggtttcccacct

SEQ ID NO: 23277 - DNA, 20 bp, Artificial Sequence
  Description of Artificial Sequence: Synthetic oligonucleotide
  Target: COL7A1; (+) strand; PAM type: NRG; PAM sequence: CAG
gggtttcccacctgagcctg

SEQ ID NO: 23278 - DNA, 20 bp, Artificial Sequence
  Description of Artificial Sequence: Synthetic oligonucleotide
  Target: COL7A1; (+) strand; PAM type: NRG; PAM sequence: AGG
ggtttcccacctgagcctgc

SEQ ID NO: 23279 - DNA, 20 bp, Artificial Sequence
  Description of Artificial Sequence: Synthetic oligonucleotide
  Target: COL7A1; (+) strand; PAM type: NRG; PAM sequence: GGG
gtttcccacctgagcctgca

SEQ ID NO: 23280 - DNA, 20 bp, Artificial Sequence
  Description of Artificial Sequence: Synthetic oligonucleotide
  Target: COL7A1; (+) strand; PAM type: NRG; PAM sequence: CAG
acctgagcctgcagggattc

SEQ ID NO: 23281 - DNA, 20 bp, Artificial Sequence
  Description of Artificial Sequence: Synthetic oligonucleotide
  Target: COL7A1; (+) strand; PAM type: NRG; PAM sequence: AGG
cctgagcctgcagggattcc

SEQ ID NO: 23282 - DNA, 20 bp, Artificial Sequence
  Description of Artificial Sequence: Synthetic oligonucleotide
  Target: COL7A1; (+) strand; PAM type: NRG; PAM sequence: TGG
agcctgcagggattccaggc

SEQ ID NO: 23283 - DNA, 20 bp, Artificial Sequence
  Description of Artificial Sequence: Synthetic oligonucleotide
  Target: COL7A1; (+) strand; PAM type: NRG; PAM sequence: GGG
gcctgcagggattccaggct

SEQ ID NO: 23284 - DNA, 20 bp, Artificial Sequence
  Description of Artificial Sequence: Synthetic oligonucleotide
  Target: COL7A1; (+) strand; PAM type: NRG; PAM sequence: CAG
attccaggctgggactccta

SEQ ID NO: 23285 - DNA, 20 bp, Artificial Sequence
  Description of Artificial Sequence: Synthetic oligonucleotide
  Target: COL7A1; (+) strand; PAM type: NRG; PAM sequence: AGG
ttccaggctgggactcctac

SEQ ID NO: 23286 - DNA, 20 bp, Artificial Sequence
  Description of Artificial Sequence: Synthetic oligonucleotide
  Target: COL7A1; (+) strand; PAM type: NRG; PAM sequence: GGG
tccaggctgggactcctaca

SEQ ID NO: 23287 - DNA, 20 bp, Artificial Sequence
  Description of Artificial Sequence: Synthetic oligonucleotide
  Target: COL7A1; (+) strand; PAM type: NRG; PAM sequence: GGG
ccaggctgggactcctacag

SEQ ID NO: 23288 - DNA, 20 bp, Artificial Sequence
  Description of Artificial Sequence: Synthetic oligonucleotide
  Target: COL7A1; (+) strand; PAM type: NRG; PAM sequence: AAG
ctgggactcctacaggggca

SEQ ID NO: 23289 - DNA, 20 bp, Artificial Sequence
  Description of Artificial Sequence: Synthetic oligonucleotide
  Target: COL7A1; (+) strand; PAM type: NRG; PAM sequence: AGG
tgggactcctacaggggcaa

SEQ ID NO: 23290 - DNA, 20 bp, Artificial Sequence
  Description of Artificial Sequence: Synthetic oligonucleotide
  Target: COL7A1; (+) strand; PAM type: NRG; PAM sequence: TGG
actcctacaggggcaaaggc

SEQ ID NO: 23291 - DNA, 20 bp, Artificial Sequence
  Description of Artificial Sequence: Synthetic oligonucleotide
  Target: COL7A1; (+) strand; PAM type: NRG; PAM sequence: GGG
ctcctacaggggcaaaggct

SEQ ID NO: 23292 - DNA, 20 bp, Artificial Sequence
  Description of Artificial Sequence: Synthetic oligonucleotide
  Target: COL7A1; (+) strand; PAM type: NRG; PAM sequence: TGG
ggctgggtttacacttccta

SEQ ID NO: 23293 - DNA, 20 bp, Artificial Sequence
  Description of Artificial Sequence: Synthetic oligonucleotide
  Target: COL7A1; (+) strand; PAM type: NRG; PAM sequence: CAG
acacttcctatggactccca

SEQ ID NO: 23294 - DNA, 20 bp, Artificial Sequence
  Description of Artificial Sequence: Synthetic oligonucleotide
  Target: COL7A1; (+) strand; PAM type: NRG; PAM sequence: TGG
ggactcccacagcccaatct

SEQ ID NO: 23295 - DNA, 20 bp, Artificial Sequence
  Description of Artificial Sequence: Synthetic oligonucleotide
  Target: COL7A1; (+) strand; PAM type: NRG; PAM sequence: GGG
gactcccacagcccaatctt

SEQ ID NO: 23296 - DNA, 20 bp, Artificial Sequence
  Description of Artificial Sequence: Synthetic oligonucleotide
  Target: COL7A1; (+) strand; PAM type: NRG; PAM sequence: CAG
ccacagcccaatcttgggac

SEQ ID NO: 23297 - DNA, 20 bp, Artificial Sequence
  Description of Artificial Sequence: Synthetic oligonucleotide
  Target: COL7A1; (+) strand; PAM type: NRG; PAM sequence: TGG
agcccaatcttgggaccagc

SEQ ID NO: 23298 - DNA, 20 bp, Artificial Sequence
  Description of Artificial Sequence: Synthetic oligonucleotide
  Target: COL7A1; (+) strand; PAM type: NRG; PAM sequence: GAG
aatcttgggaccagctggct

SEQ ID NO: 23299 - DNA, 20 bp, Artificial Sequence
  Description of Artificial Sequence: Synthetic oligonucleotide
  Target: COL7A1; (+) strand; PAM type: NRG; PAM sequence: AGG
atcttgggaccagctggctg

SEQ ID NO: 23300 - DNA, 20 bp, Artificial Sequence
  Description of Artificial Sequence: Synthetic oligonucleotide
  Target: COL7A1; (+) strand; PAM type: NRG; PAM sequence: AAG
gctggctgaggaactcccct

SEQ ID NO: 23301 - DNA, 20 bp, Artificial Sequence
  Description of Artificial Sequence: Synthetic oligonucleotide
  Target: COL7A1; (+) strand; PAM type: NRG; PAM sequence: TGG
ggctgaggaactcccctaag

SEQ ID NO: 23302 - DNA, 20 bp, Artificial Sequence
  Description of Artificial Sequence: Synthetic oligonucleotide
  Target: COL7A1; (+) strand; PAM type: NRG; PAM sequence: GAG
aggaactcccctaagtggct

SEQ ID NO: 23303 - DNA, 20 bp, Artificial Sequence
  Description of Artificial Sequence: Synthetic oligonucleotide
  Target: COL7A1; (+) strand; PAM type: NRG; PAM sequence: TGG
aactcccctaagtggctgag

SEQ ID NO: 23304 - DNA, 20 bp, Artificial Sequence
  Description of Artificial Sequence: Synthetic oligonucleotide
  Target: COL7A1; (+) strand; PAM type: NRG; PAM sequence: TGG
agtggctgagtggaaacatc

SEQ ID NO: 23305 - DNA, 20 bp, Artificial Sequence
  Description of Artificial Sequence: Synthetic oligonucleotide
  Target: COL7A1; (+) strand; PAM type: NRG; PAM sequence: GGG
gtggctgagtggaaacatct

SEQ ID NO: 23306 - DNA, 20 bp, Artificial Sequence
  Description of Artificial Sequence: Synthetic oligonucleotide
  Target: COL7A1; (+) strand; PAM type: NRG; PAM sequence: CAG
tgagtggaaacatctgggct

SEQ ID NO: 23307 - DNA, 20 bp, Artificial Sequence
  Description of Artificial Sequence: Synthetic oligonucleotide
  Target: COL7A1; (+) strand; PAM type: NRG; PAM sequence: TAG
catctgggctcagctccctg

SEQ ID NO: 23308 - DNA, 20 bp, Artificial Sequence
  Description of Artificial Sequence: Synthetic oligonucleotide
  Target: COL7A1; (+) strand; PAM type: NRG; PAM sequence: AGG
atctgggctcagctccctgt

SEQ ID NO: 23309 - DNA, 20 bp, Artificial Sequence
  Description of Artificial Sequence: Synthetic oligonucleotide
  Target: COL7A1; (+) strand; PAM type: NRG; PAM sequence: AAG
tcagctccctgtaggcatca

SEQ ID NO: 23310 - DNA, 20 bp, Artificial Sequence
  Description of Artificial Sequence: Synthetic oligonucleotide
  Target: COL7A1; (+) strand; PAM type: NRG; PAM sequence: CGG
ctgtaggcatcaaagacttc

SEQ ID NO: 23311 - DNA, 20 bp, Artificial Sequence
  Description of Artificial Sequence: Synthetic oligonucleotide
  Target: COL7A1; (+) strand; PAM type: NRG; PAM sequence: CAG
gcatcaaagacttccggcct

SEQ ID NO: 23312 - DNA, 20 bp, Artificial Sequence
  Description of Artificial Sequence: Synthetic oligonucleotide
  Target: COL7A1; (+) strand; PAM type: NRG; PAM sequence: TGG
gcaacccccacgcttgcccc

SEQ ID NO: 23313 - DNA, 20 bp, Artificial Sequence
  Description of Artificial Sequence: Synthetic oligonucleotide
  Target: COL7A1; (+) strand; PAM type: NRG; PAM sequence: GAG
ccccacgcttgcccctggct

SEQ ID NO: 23314 - DNA, 20 bp, Artificial Sequence
  Description of Artificial Sequence: Synthetic oligonucleotide
  Target: COL7A1; (+) strand; PAM type: NRG; PAM sequence: AGG
cccacgcttgcccctggctg

SEQ ID NO: 23315 - DNA, 20 bp, Artificial Sequence
  Description of Artificial Sequence: Synthetic oligonucleotide
  Target: COL7A1; (+) strand; PAM type: NRG; PAM sequence: CAG
gcccctggctgaggacacat

SEQ ID NO: 23316 - DNA, 20 bp, Artificial Sequence
  Description of Artificial Sequence: Synthetic oligonucleotide
  Target: COL7A1; (+) strand; PAM type: NRG; PAM sequence: TGG
gctgaggacacatcagcctg

SEQ ID NO: 23317 - DNA, 20 bp, Artificial Sequence
  Description of Artificial Sequence: Synthetic oligonucleotide
  Target: COL7A1; (+) strand; PAM type: NRG; PAM sequence: GGG
ctgaggacacatcagcctgt

SEQ ID NO: 23318 - DNA, 20 bp, Artificial Sequence
  Description of Artificial Sequence: Synthetic oligonucleotide
  Target: COL7A1; (+) strand; PAM type: NRG; PAM sequence: AAG
aggacacatcagcctgtggg

SEQ ID NO: 23319 - DNA, 20 bp, Artificial Sequence
  Description of Artificial Sequence: Synthetic oligonucleotide
  Target: COL7A1; (+) strand; PAM type: NRG; PAM sequence: AGG
ggacacatcagcctgtggga

SEQ ID NO: 23320 - DNA, 20 bp, Artificial Sequence
  Description of Artificial Sequence: Synthetic oligonucleotide
  Target: COL7A1; (+) strand; PAM type: NRG; PAM sequence: CAG
cacatcagcctgtgggaagg

SEQ ID NO: 23321 - DNA, 20 bp, Artificial Sequence
  Description of Artificial Sequence: Synthetic oligonucleotide
  Target: COL7A1; (+) strand; PAM type: NRG; PAM sequence: AGG
acatcagcctgtgggaaggc

SEQ ID NO: 23322 - DNA, 20 bp, Artificial Sequence
  Description of Artificial Sequence: Synthetic oligonucleotide
  Target: COL7A1; (+) strand; PAM type: NRG; PAM sequence: GAG
atcagcctgtgggaaggcag

SEQ ID NO: 23323 - DNA, 20 bp, Artificial Sequence
  Description of Artificial Sequence: Synthetic oligonucleotide
  Target: COL7A1; (+) strand; PAM type: NRG; PAM sequence: AGG
tcagcctgtgggaaggcagg

SEQ ID NO: 23324 - DNA, 20 bp, Artificial Sequence
  Description of Artificial Sequence: Synthetic oligonucleotide
  Target: COL7A1; (+) strand; PAM type: NRG; PAM sequence: CAG
tgtgggaaggcaggaggatc

SEQ ID NO: 23325 - DNA, 20 bp, Artificial Sequence
  Description of Artificial Sequence: Synthetic oligonucleotide
  Target: COL7A1; (+) strand; PAM type: NRG; PAM sequence: AGG
gtgggaaggcaggaggatcc

SEQ ID NO: 23326 - DNA, 20 bp, Artificial Sequence
  Description of Artificial Sequence: Synthetic oligonucleotide
  Target: COL7A1; (+) strand; PAM type: NRG; PAM sequence: GAG
gggaaggcaggaggatccag

SEQ ID NO: 23327 - DNA, 20 bp, Artificial Sequence
  Description of Artificial Sequence: Synthetic oligonucleotide
  Target: COL7A1; (+) strand; PAM type: NRG; PAM sequence: CAG
gcaggaggatccaggagcca

SEQ ID NO: 23328 - DNA, 20 bp, Artificial Sequence
  Description of Artificial Sequence: Synthetic oligonucleotide
  Target: COL7A1; (+) strand; PAM type: NRG; PAM sequence: TAG
ggatccaggagccacagaac

SEQ ID NO: 23329 - DNA, 20 bp, Artificial Sequence
  Description of Artificial Sequence: Synthetic oligonucleotide
  Target: COL7A1; (+) strand; PAM type: NRG; PAM sequence: GAG
atccaggagccacagaacta

SEQ ID NO: 23330 - DNA, 20 bp, Artificial Sequence
  Description of Artificial Sequence: Synthetic oligonucleotide
  Target: COL7A1; (+) strand; PAM type: NRG; PAM sequence: AGG
tccaggagccacagaactag

SEQ ID NO: 23331 - DNA, 20 bp, Artificial Sequence
  Description of Artificial Sequence: Synthetic oligonucleotide
  Target: COL7A1; (+) strand; PAM type: NRG; PAM sequence: GGG
ccaggagccacagaactaga

SEQ ID NO: 23332 - DNA, 20 bp, Artificial Sequence
  Description of Artificial Sequence: Synthetic oligonucleotide
  Target: COL7A1; (+) strand; PAM type: NRG; PAM sequence: AAG
ggagccacagaactagaggg

SEQ ID NO: 23333 - DNA, 20 bp, Artificial Sequence
  Description of Artificial Sequence: Synthetic oligonucleotide
  Target: COL7A1; (+) strand; PAM type: NRG; PAM sequence: TGG
gctccccatctactgcccca

SEQ ID NO: 23334 - DNA, 20 bp, Artificial Sequence
  Description of Artificial Sequence: Synthetic oligonucleotide
  Target: COL7A1; (+) strand; PAM type: NRG; PAM sequence: AAG
ggactccatgccaatgccaa

SEQ ID NO: 23335 - DNA, 20 bp, Artificial Sequence
  Description of Artificial Sequence: Synthetic oligonucleotide
  Target: COL7A1; (+) strand; PAM type: NRG; PAM sequence: GAG
actccatgccaatgccaaaa

SEQ ID NO: 23336 - DNA, 20 bp, Artificial Sequence
  Description of Artificial Sequence: Synthetic oligonucleotide
  Target: COL7A1; (+) strand; PAM type: NRG; PAM sequence: AGG
ctccatgccaatgccaaaag

SEQ ID NO: 23337 - DNA, 20 bp, Artificial Sequence
  Description of Artificial Sequence: Synthetic oligonucleotide
  Target: COL7A1; (+) strand; PAM type: NRG; PAM sequence: GGG
tccatgccaatgccaaaaga

SEQ ID NO: 23338 - DNA, 20 bp, Artificial Sequence
  Description of Artificial Sequence: Synthetic oligonucleotide
  Target: COL7A1; (+) strand; PAM type: NRG; PAM sequence: CAG
aagagggatgacacacttct

SEQ ID NO: 23339 - DNA, 20 bp, Artificial Sequence
  Description of Artificial Sequence: Synthetic oligonucleotide
  Target: COL7A1; (+) strand; PAM type: NRG; PAM sequence: CAG
agggatgacacacttctcag

SEQ ID NO: 23340 - DNA, 20 bp, Artificial Sequence
  Description of Artificial Sequence: Synthetic oligonucleotide
  Target: COL7A1; (+) strand; PAM type: NRG; PAM sequence: GAG
ggatgacacacttctcagca

SEQ ID NO: 23341 - DNA, 20 bp, Artificial Sequence
  Description of Artificial Sequence: Synthetic oligonucleotide
  Target: COL7A1; (+) strand; PAM type: NRG; PAM sequence: AGG
gatgacacacttctcagcag

SEQ ID NO: 23342 - DNA, 20 bp, Artificial Sequence
  Description of Artificial Sequence: Synthetic oligonucleotide
  Target: COL7A1; (+) strand; PAM type: NRG; PAM sequence: TGG
ttctcagcagaggattttat

SEQ ID NO: 23343 - DNA, 20 bp, Artificial Sequence
  Description of Artificial Sequence: Synthetic oligonucleotide
  Target: COL7A1; (+) strand; PAM type: NRG; PAM sequence: TGG
tcagcagaggattttattgg

SEQ ID NO: 23344 - DNA, 20 bp, Artificial Sequence
  Description of Artificial Sequence: Synthetic oligonucleotide
  Target: COL7A1; (+) strand; PAM type: NRG; PAM sequence: TGG
attttattggtggtcacctg

SEQ ID NO: 23345 - DNA, 20 bp, Artificial Sequence
  Description of Artificial Sequence: Synthetic oligonucleotide
  Target: COL7A1; (+) strand; PAM type: NRG; PAM sequence: CAG
attggtggtcacctgtggca

SEQ ID NO: 23346 - DNA, 20 bp, Artificial Sequence
  Description of Artificial Sequence: Synthetic oligonucleotide
  Target: COL7A1; (+) strand; PAM type: NRG; PAM sequence: AGG
ttggtggtcacctgtggcac

SEQ ID NO: 23347 - DNA, 20 bp, Artificial Sequence
  Description of Artificial Sequence: Synthetic oligonucleotide
  Target: COL7A1; (+) strand; PAM type: NRG; PAM sequence: TAG
tggtcacctgtggcacaggt

SEQ ID NO: 23348 - DNA, 20 bp, Artificial Sequence
  Description of Artificial Sequence: Synthetic oligonucleotide
  Target: COL7A1; (+) strand; PAM type: NRG; PAM sequence: GAG
gtcacctgtggcacaggtta

SEQ ID NO: 23349 - DNA, 20 bp, Artificial Sequence
  Description of Artificial Sequence: Synthetic oligonucleotide
  Target: COL7A1; (+) strand; PAM type: NRG; PAM sequence: AGG
tcacctgtggcacaggttag

SEQ ID NO: 23350 - DNA, 20 bp, Artificial Sequence
  Description of Artificial Sequence: Synthetic oligonucleotide
  Target: COL7A1; (+) strand; PAM type: NRG; PAM sequence: GAG
acctgtggcacaggttagag

SEQ ID NO: 23351 - DNA, 20 bp, Artificial Sequence
  Description of Artificial Sequence: Synthetic oligonucleotide
  Target: COL7A1; (+) strand; PAM type: NRG; PAM sequence: AAG
ggcacaggttagaggagccg

SEQ ID NO: 23352 - DNA, 20 bp, Artificial Sequence
  Description of Artificial Sequence: Synthetic oligonucleotide
  Target: COL7A1; (+) strand; PAM type: NRG; PAM sequence: TGG
gagccgaagtgctgtgtttg

SEQ ID NO: 23353 - DNA, 20 bp, Artificial Sequence
  Description of Artificial Sequence: Synthetic oligonucleotide
  Target: COL7A1; (+) strand; PAM type: NRG; PAM sequence: TGG
ccgaagtgctgtgtttgtgg

SEQ ID NO: 23354 - DNA, 20 bp, Artificial Sequence
  Description of Artificial Sequence: Synthetic oligonucleotide
  Target: COL7A1; (+) strand; PAM type: NRG; PAM sequence: GGG
cgaagtgctgtgtttgtggt

SEQ ID NO: 23355 - DNA, 20 bp, Artificial Sequence
  Description of Artificial Sequence: Synthetic oligonucleotide
  Target: COL7A1; (+) strand; PAM type: NRG; PAM sequence: GGG
gaagtgctgtgtttgtggtg

SEQ ID NO: 23356 - DNA, 20 bp, Artificial Sequence
  Description of Artificial Sequence: Synthetic oligonucleotide
  Target: COL7A1; (+) strand; PAM type: NRG; PAM sequence: GGG
aagtgctgtgtttgtggtgg

SEQ ID NO: 23357 - DNA, 20 bp, Artificial Sequence
  Description of Artificial Sequence: Synthetic oligonucleotide
  Target: COL7A1; (+) strand; PAM type: NRG; PAM sequence: GGG
agtgctgtgtttgtggtggg

SEQ ID NO: 23358 - DNA, 20 bp, Artificial Sequence
  Description of Artificial Sequence: Synthetic oligonucleotide
  Target: COL7A1; (+) strand; PAM type: NRG; PAM sequence: GGG
gtgctgtgtttgtggtgggg

SEQ ID NO: 23359 - DNA, 20 bp, Artificial Sequence
  Description of Artificial Sequence: Synthetic oligonucleotide
  Target: COL7A1; (+) strand; PAM type: NRG; PAM sequence: GGG
tgctgtgtttgtggtggggg

SEQ ID NO: 23360 - DNA, 20 bp, Artificial Sequence
  Description of Artificial Sequence: Synthetic oligonucleotide
  Target: COL7A1; (+) strand; PAM type: NRG; PAM sequence: GGG
gctgtgtttgtggtgggggg

SEQ ID NO: 23361 - DNA, 20 bp, Artificial Sequence
  Description of Artificial Sequence: Synthetic oligonucleotide
  Target: COL7A1; (+) strand; PAM type: NRG; PAM sequence: CGG
gggggggggaccacaaaccc

SEQ ID NO: 23362 - DNA, 20 bp, Artificial Sequence
  Description of Artificial Sequence: Synthetic oligonucleotide
  Target: COL7A1; (+) strand; PAM type: NRG; PAM sequence: TAG
gccctgccctcttgcttaca

SEQ ID NO: 23363 - DNA, 20 bp, Artificial Sequence
  Description of Artificial Sequence: Synthetic oligonucleotide
  Target: COL7A1; (+) strand; PAM type: NRG; PAM sequence: AGG
ccctgccctcttgcttacat

SEQ ID NO: 23364 - DNA, 20 bp, Artificial Sequence
  Description of Artificial Sequence: Synthetic oligonucleotide
  Target: COL7A1; (+) strand; PAM type: NRG; PAM sequence: TAG
gcttacataggcttcccgcc

SEQ ID NO: 23365 - DNA, 20 bp, Artificial Sequence
  Description of Artificial Sequence: Synthetic oligonucleotide
  Target: COL7A1; (+) strand; PAM type: NRG; PAM sequence: AAG
tacataggcttcccgcctag

SEQ ID NO: 23366 - DNA, 20 bp, Artificial Sequence
  Description of Artificial Sequence: Synthetic oligonucleotide
  Target: COL7A1; (+) strand; PAM type: NRG; PAM sequence: CAG
aggcttcccgcctagaagcg

SEQ ID NO: 23367 - DNA, 20 bp, Artificial Sequence
  Description of Artificial Sequence: Synthetic oligonucleotide
  Target: COL7A1; (+) strand; PAM type: NRG; PAM sequence: CAG
ttcccgcctagaagcgcagc

SEQ ID NO: 23368 - DNA, 20 bp, Artificial Sequence
  Description of Artificial Sequence: Synthetic oligonucleotide
  Target: COL7A1; (+) strand; PAM type: NRG; PAM sequence: CGG
gcagccagaacatgccgcta

SEQ ID NO: 23369 - DNA, 20 bp, Artificial Sequence
  Description of Artificial Sequence: Synthetic oligonucleotide
  Target: COL7A1; (+) strand; PAM type: NRG; PAM sequence: CGG
agaacatgccgctacggatc

SEQ ID NO: 23370 - DNA, 20 bp, Artificial Sequence
  Description of Artificial Sequence: Synthetic oligonucleotide
  Target: COL7A1; (+) strand; PAM type: NRG; PAM sequence: TAG
tgccgctacggatccggttg

SEQ ID NO: 23371 - DNA, 20 bp, Artificial Sequence
  Description of Artificial Sequence: Synthetic oligonucleotide
  Target: COL7A1; (+) strand; PAM type: NRG; PAM sequence: TGG
ctacggatccggttgtagtc

SEQ ID NO: 23372 - DNA, 20 bp, Artificial Sequence
  Description of Artificial Sequence: Synthetic oligonucleotide
  Target: COL7A1; (+) strand; PAM type: NRG; PAM sequence: GGG
tacggatccggttgtagtct

SEQ ID NO: 23373 - DNA, 20 bp, Artificial Sequence
  Description of Artificial Sequence: Synthetic oligonucleotide
  Target: COL7A1; (+) strand; PAM type: NRG; PAM sequence: GAG
cggatccggttgtagtctgg

SEQ ID NO: 23374 - DNA, 20 bp, Artificial Sequence
  Description of Artificial Sequence: Synthetic oligonucleotide
  Target: COL7A1; (+) strand; PAM type: NRG; PAM sequence: TGG
gtagtctgggagctgctcaa

SEQ ID NO: 23375 - DNA, 20 bp, Artificial Sequence
  Description of Artificial Sequence: Synthetic oligonucleotide
  Target: COL7A1; (+) strand; PAM type: NRG; PAM sequence: GGG
tagtctgggagctgctcaat

SEQ ID NO: 23376 - DNA, 20 bp, Artificial Sequence
  Description of Artificial Sequence: Synthetic oligonucleotide
  Target: COL7A1; (+) strand; PAM type: NRG; PAM sequence: GGG
agtctgggagctgctcaatg

SEQ ID NO: 23377 - DNA, 20 bp, Artificial Sequence
  Description of Artificial Sequence: Synthetic oligonucleotide
  Target: COL7A1; (+) strand; PAM type: NRG; PAM sequence: TGG
gagctgctcaatggggcctg

SEQ ID NO: 23378 - DNA, 20 bp, Artificial Sequence
  Description of Artificial Sequence: Synthetic oligonucleotide
  Target: COL7A1; (+) strand; PAM type: NRG; PAM sequence: GGG
agctgctcaatggggcctgt

SEQ ID NO: 23379 - DNA, 20 bp, Artificial Sequence
  Description of Artificial Sequence: Synthetic oligonucleotide
  Target: COL7A1; (+) strand; PAM type: NRG; PAM sequence: GGG
gctgctcaatggggcctgtg

SEQ ID NO: 23380 - DNA, 20 bp, Artificial Sequence
  Description of Artificial Sequence: Synthetic oligonucleotide
  Target: COL7A1; (+) strand; PAM type: NRG; PAM sequence: TAG
ctcaatggggcctgtgggga

SEQ ID NO: 23381 - DNA, 20 bp, Artificial Sequence
  Description of Artificial Sequence: Synthetic oligonucleotide
  Target: COL7A1; (+) strand; PAM type: NRG; PAM sequence: AGG
tcaatggggcctgtggggat

SEQ ID NO: 23382 - DNA, 20 bp, Artificial Sequence
  Description of Artificial Sequence: Synthetic oligonucleotide
  Target: COL7A1; (+) strand; PAM type: NRG; PAM sequence: GGG
caatggggcctgtggggata

SEQ ID NO: 23383 - DNA, 20 bp, Artificial Sequence
  Description of Artificial Sequence: Synthetic oligonucleotide
  Target: COL7A1; (+) strand; PAM type: NRG; PAM sequence: TGG
tggggcctgtggggataggg

SEQ ID NO: 23384 - DNA, 20 bp, Artificial Sequence
  Description of Artificial Sequence: Synthetic oligonucleotide
  Target: COL7A1; (+) strand; PAM type: NRG; PAM sequence: GAG
gggcctgtggggatagggtg

SEQ ID NO: 23385 - DNA, 20 bp, Artificial Sequence
  Description of Artificial Sequence: Synthetic oligonucleotide
  Target: COL7A1; (+) strand; PAM type: NRG; PAM sequence: CAG
gtggggatagggtggagcgt

SEQ ID NO: 23386 - DNA, 20 bp, Artificial Sequence
  Description of Artificial Sequence: Synthetic oligonucleotide
  Target: COL7A1; (+) strand; PAM type: NRG; PAM sequence: AGG
tggggatagggtggagcgtc

SEQ ID NO: 23387 - DNA, 20 bp, Artificial Sequence
  Description of Artificial Sequence: Synthetic oligonucleotide
  Target: COL7A1; (+) strand; PAM type: NRG; PAM sequence: GGG
ggggatagggtggagcgtca

SEQ ID NO: 23388 - DNA, 20 bp, Artificial Sequence
  Description of Artificial Sequence: Synthetic oligonucleotide
  Target: COL7A1; (+) strand; PAM type: NRG; PAM sequence: TGG
gatagggtggagcgtcaggg

SEQ ID NO: 23389 - DNA, 20 bp, Artificial Sequence
  Description of Artificial Sequence: Synthetic oligonucleotide
  Target: COL7A1; (+) strand; PAM type: NRG; PAM sequence: GGG
atagggtggagcgtcagggt

SEQ ID NO: 23390 - DNA, 20 bp, Artificial Sequence
  Description of Artificial Sequence: Synthetic oligonucleotide
  Target: COL7A1; (+) strand; PAM type: NRG; PAM sequence: GGG
tagggtggagcgtcagggtg

SEQ ID NO: 23391 - DNA, 20 bp, Artificial Sequence
  Description of Artificial Sequence: Synthetic oligonucleotide
  Target: COL7A1; (+) strand; PAM type: NRG; PAM sequence: TGG
gagcgtcagggtggggtacc

SEQ ID NO: 23392 - DNA, 20 bp, Artificial Sequence
  Description of Artificial Sequence: Synthetic oligonucleotide
  Target: COL7A1; (+) strand; PAM type: NRG; PAM sequence: CAG
ggtggggtacctggcctgca

SEQ ID NO: 23393 - DNA, 20 bp, Artificial Sequence
  Description of Artificial Sequence: Synthetic oligonucleotide
  Target: COL7A1; (+) strand; PAM type: NRG; PAM sequence: AGG
gtggggtacctggcctgcac

SEQ ID NO: 23394 - DNA, 20 bp, Artificial Sequence
  Description of Artificial Sequence: Synthetic oligonucleotide
  Target: COL7A1; (+) strand; PAM type: NRG; PAM sequence: GGG
tggggtacctggcctgcaca

SEQ ID NO: 23395 - DNA, 20 bp, Artificial Sequence
  Description of Artificial Sequence: Synthetic oligonucleotide
  Target: COL7A1; (+) strand; PAM type: NRG; PAM sequence: TGG
ctggcctgcacagggacacc

SEQ ID NO: 23396 - DNA, 20 bp, Artificial Sequence
  Description of Artificial Sequence: Synthetic oligonucleotide
  Target: COL7A1; (+) strand; PAM type: NRG; PAM sequence: CAG
acctggccctgtgccgcacc

SEQ ID NO: 23397 - DNA, 20 bp, Artificial Sequence
  Description of Artificial Sequence: Synthetic oligonucleotide
  Target: COL7A1; (+) strand; PAM type: NRG; PAM sequence: CGG
gccctgtgccgcacccagct

SEQ ID NO: 23398 - DNA, 20 bp, Artificial Sequence
  Description of Artificial Sequence: Synthetic oligonucleotide
  Target: COL7A1; (+) strand; PAM type: NRG; PAM sequence: GAG
cctgtgccgcacccagctcg

SEQ ID NO: 23399 - DNA, 20 bp, Artificial Sequence
  Description of Artificial Sequence: Synthetic oligonucleotide
  Target: COL7A1; (+) strand; PAM type: NRG; PAM sequence: CAG
cccagctcggagatgctgcc

SEQ ID NO: 23400 - DNA, 20 bp, Artificial Sequence
  Description of Artificial Sequence: Synthetic oligonucleotide
  Target: COL7A1; (+) strand; PAM type: NRG; PAM sequence: GAG
cagctcggagatgctgccca

SEQ ID NO: 23401 - DNA, 20 bp, Artificial Sequence
  Description of Artificial Sequence: Synthetic oligonucleotide
  Target: COL7A1; (+) strand; PAM type: NRG; PAM sequence: CAG
ctcggagatgctgcccagag

SEQ ID NO: 23402 - DNA, 20 bp, Artificial Sequence
  Description of Artificial Sequence: Synthetic oligonucleotide
  Target: COL7A1; (+) strand; PAM type: NRG; PAM sequence: AAG
gatgctgcccagagcagcac

SEQ ID NO: 23403 - DNA, 20 bp, Artificial Sequence
  Description of Artificial Sequence: Synthetic oligonucleotide
  Target: COL7A1; (+) strand; PAM type: NRG; PAM sequence: CAG
ctgcccagagcagcacaaga

SEQ ID NO: 23404 - DNA, 20 bp, Artificial Sequence
  Description of Artificial Sequence: Synthetic oligonucleotide
  Target: COL7A1; (+) strand; PAM type: NRG; PAM sequence: AGG
tgcccagagcagcacaagac

SEQ ID NO: 23405 - DNA, 20 bp, Artificial Sequence
  Description of Artificial Sequence: Synthetic oligonucleotide
  Target: COL7A1; (+) strand; PAM type: NRG; PAM sequence: GAG
agcagcacaagacaggcttt

SEQ ID NO: 23406 - DNA, 20 bp, Artificial Sequence
  Description of Artificial Sequence: Synthetic oligonucleotide
  Target: COL7A1; (+) strand; PAM type: NRG; PAM sequence: TGG
agcacaagacaggctttgag

SEQ ID NO: 23407 - DNA, 20 bp, Artificial Sequence
  Description of Artificial Sequence: Synthetic oligonucleotide
  Target: COL7A1; (+) strand; PAM type: NRG; PAM sequence: AAG
caagacaggctttgagtgga

SEQ ID NO: 23408 - DNA, 20 bp, Artificial Sequence
  Description of Artificial Sequence: Synthetic oligonucleotide
  Target: COL7A1; (+) strand; PAM type: NRG; PAM sequence: GAG
agacaggctttgagtggaaa

SEQ ID NO: 23409 - DNA, 20 bp, Artificial Sequence
  Description of Artificial Sequence: Synthetic oligonucleotide
  Target: COL7A1; (+) strand; PAM type: NRG; PAM sequence: GAG
acaggctttgagtggaaaga

SEQ ID NO: 23410 - DNA, 20 bp, Artificial Sequence
  Description of Artificial Sequence: Synthetic oligonucleotide
  Target: COL7A1; (+) strand; PAM type: NRG; PAM sequence: AGG
caggctttgagtggaaagag

SEQ ID NO: 23411 - DNA, 20 bp, Artificial Sequence
  Description of Artificial Sequence: Synthetic oligonucleotide
  Target: COL7A1; (+) strand; PAM type: NRG; PAM sequence: GAG
ggctttgagtggaaagagag

SEQ ID NO: 23412 - DNA, 20 bp, Artificial Sequence
  Description of Artificial Sequence: Synthetic oligonucleotide
  Target: COL7A1; (+) strand; PAM type: NRG; PAM sequence: GAG
ctttgagtggaaagagagga

SEQ ID NO: 23413 - DNA, 20 bp, Artificial Sequence
  Description of Artificial Sequence: Synthetic oligonucleotide
  Target: COL7A1; (+) strand; PAM type: NRG; PAM sequence: CAG
gagaggagagaacattcccc

SEQ ID NO: 23414 - DNA, 20 bp, Artificial Sequence
  Description of Artificial Sequence: Synthetic oligonucleotide
  Target: COL7A1; (+) strand; PAM type: NRG; PAM sequence: AGG
agaggagagaacattccccc

SEQ ID NO: 23415 - DNA, 20 bp, Artificial Sequence
  Description of Artificial Sequence: Synthetic oligonucleotide
  Target: COL7A1; (+) strand; PAM type: NRG; PAM sequence: GGG
gaggagagaacattccccca

SEQ ID NO: 23416 - DNA, 20 bp, Artificial Sequence
  Description of Artificial Sequence: Synthetic oligonucleotide
  Target: COL7A1; (+) strand; PAM type: NRG; PAM sequence: GGG
aggagagaacattcccccag

SEQ ID NO: 23417 - DNA, 20 bp, Artificial Sequence
  Description of Artificial Sequence: Synthetic oligonucleotide
  Target: COL7A1; (+) strand; PAM type: NRG; PAM sequence: GAG
aacattcccccaggggtgct

SEQ ID NO: 23418 - DNA, 20 bp, Artificial Sequence
  Description of Artificial Sequence: Synthetic oligonucleotide
  Target: COL7A1; (+) strand; PAM type: NRG; PAM sequence: TGG
gagcctgtcccttcatgttc

SEQ ID NO: 23419 - DNA, 20 bp, Artificial Sequence
  Description of Artificial Sequence: Synthetic oligonucleotide
  Target: COL7A1; (+) strand; PAM type: NRG; PAM sequence: AAG
ccttcatgttctggcccttg

SEQ ID NO: 23420 - DNA, 20 bp, Artificial Sequence
  Description of Artificial Sequence: Synthetic oligonucleotide
  Target: COL7A1; (+) strand; PAM type: NRG; PAM sequence: TGG
ccttgaagccccaccccaca

SEQ ID NO: 23421 - DNA, 20 bp, Artificial Sequence
  Description of Artificial Sequence: Synthetic oligonucleotide
  Target: COL7A1; (+) strand; PAM type: NRG; PAM sequence: GAG
ttgaagccccaccccacatg

SEQ ID NO: 23422 - DNA, 20 bp, Artificial Sequence
  Description of Artificial Sequence: Synthetic oligonucleotide
  Target: COL7A1; (+) strand; PAM type: NRG; PAM sequence: AGG
tgaagccccaccccacatgg

SEQ ID NO: 23423 - DNA, 20 bp, Artificial Sequence
  Description of Artificial Sequence: Synthetic oligonucleotide
  Target: COL7A1; (+) strand; PAM type: NRG; PAM sequence: CGG
tggaggtgcccgttacctga

SEQ ID NO: 23424 - DNA, 20 bp, Artificial Sequence
  Description of Artificial Sequence: Synthetic oligonucleotide
  Target: COL7A1; (+) strand; PAM type: NRG; PAM sequence: GGG
ggaggtgcccgttacctgac

SEQ ID NO: 23425 - DNA, 20 bp, Artificial Sequence
  Description of Artificial Sequence: Synthetic oligonucleotide
  Target: COL7A1; (+) strand; PAM type: NRG; PAM sequence: CAG
tgcccgttacctgacgggtg

SEQ ID NO: 23426 - DNA, 20 bp, Artificial Sequence
  Description of Artificial Sequence: Synthetic oligonucleotide
  Target: COL7A1; (+) strand; PAM type: NRG; PAM sequence: AGG
gcccgttacctgacgggtgc

SEQ ID NO: 23427 - DNA, 20 bp, Artificial Sequence
  Description of Artificial Sequence: Synthetic oligonucleotide
  Target: COL7A1; (+) strand; PAM type: NRG; PAM sequence: GGG
cccgttacctgacgggtgca

SEQ ID NO: 23428 - DNA, 20 bp, Artificial Sequence
  Description of Artificial Sequence: Synthetic oligonucleotide
  Target: COL7A1; (+) strand; PAM type: NRG; PAM sequence: AAG
acgggtgcagggtattgatg

SEQ ID NO: 23429 - DNA, 20 bp, Artificial Sequence
  Description of Artificial Sequence: Synthetic oligonucleotide
  Target: COL7A1; (+) strand; PAM type: NRG; PAM sequence: AGG
cgggtgcagggtattgatga

SEQ ID NO: 23430 - DNA, 20 bp, Artificial Sequence
  Description of Artificial Sequence: Synthetic oligonucleotide
  Target: COL7A1; (+) strand; PAM type: NRG; PAM sequence: TGG
gggtattgatgaaggcacct

SEQ ID NO: 23431 - DNA, 20 bp, Artificial Sequence
  Description of Artificial Sequence: Synthetic oligonucleotide
  Target: COL7A1; (+) strand; PAM type: NRG; PAM sequence: CAG
tattgatgaaggcaccttgg

SEQ ID NO: 23432 - DNA, 20 bp, Artificial Sequence
  Description of Artificial Sequence: Synthetic oligonucleotide
  Target: COL7A1; (+) strand; PAM type: NRG; PAM sequence: AGG
attgatgaaggcaccttggc

SEQ ID NO: 23433 - DNA, 20 bp, Artificial Sequence
  Description of Artificial Sequence: Synthetic oligonucleotide
  Target: COL7A1; (+) strand; PAM type: NRG; PAM sequence: CAG
gatgaaggcaccttggcagg

SEQ ID NO: 23434 - DNA, 20 bp, Artificial Sequence
  Description of Artificial Sequence: Synthetic oligonucleotide
  Target: COL7A1; (+) strand; PAM type: NRG; PAM sequence: AAG
aggcaccttggcaggcagtc

SEQ ID NO: 23435 - DNA, 20 bp, Artificial Sequence
  Description of Artificial Sequence: Synthetic oligonucleotide
  Target: COL7A1; (+) strand; PAM type: NRG; PAM sequence: AGG
ggcaccttggcaggcagtca

SEQ ID NO: 23436 - DNA, 20 bp, Artificial Sequence
  Description of Artificial Sequence: Synthetic oligonucleotide
  Target: COL7A1; (+) strand; PAM type: NRG; PAM sequence: TGG
gcaggcagtcaaggaactgc

SEQ ID NO: 23437 - DNA, 20 bp, Artificial Sequence
  Description of Artificial Sequence: Synthetic oligonucleotide
  Target: COL7A1; (+) strand; PAM type: NRG; PAM sequence: GGG
caggcagtcaaggaactgct

SEQ ID NO: 23438 - DNA, 20 bp, Artificial Sequence
  Description of Artificial Sequence: Synthetic oligonucleotide
  Target: COL7A1; (+) strand; PAM type: NRG; PAM sequence: CAG
cagtcaaggaactgctggga

SEQ ID NO: 23439 - DNA, 20 bp, Artificial Sequence
  Description of Artificial Sequence: Synthetic oligonucleotide
  Target: COL7A1; (+) strand; PAM type: NRG; PAM sequence: AGG
agtcaaggaactgctgggac

SEQ ID NO: 23440 - DNA, 20 bp, Artificial Sequence
  Description of Artificial Sequence: Synthetic oligonucleotide
  Target: COL7A1; (+) strand; PAM type: NRG; PAM sequence: GAG
actgctgggacaggttttct

SEQ ID NO: 23441 - DNA, 20 bp, Artificial Sequence
  Description of Artificial Sequence: Synthetic oligonucleotide
  Target: COL7A1; (+) strand; PAM type: NRG; PAM sequence: AAG
ctgggacaggttttctgagc

SEQ ID NO: 23442 - DNA, 20 bp, Artificial Sequence
  Description of Artificial Sequence: Synthetic oligonucleotide
  Target: COL7A1; (+) strand; PAM type: NRG; PAM sequence: TGG
ttttctgagcaagaactccc

SEQ ID NO: 23443 - DNA, 20 bp, Artificial Sequence
  Description of Artificial Sequence: Synthetic oligonucleotide
  Target: COL7A1; (+) strand; PAM type: NRG; PAM sequence: CAG
tctgagcaagaactccctgg

SEQ ID NO: 23444 - DNA, 20 bp, Artificial Sequence
  Description of Artificial Sequence: Synthetic oligonucleotide
  Target: COL7A1; (+) strand; PAM type: NRG; PAM sequence: CAG
agcaagaactccctggcagc

SEQ ID NO: 23445 - DNA, 20 bp, Artificial Sequence
  Description of Artificial Sequence: Synthetic oligonucleotide
  Target: COL7A1; (+) strand; PAM type: NRG; PAM sequence: AGG
gcaagaactccctggcagcc

SEQ ID NO: 23446 - DNA, 20 bp, Artificial Sequence
  Description of Artificial Sequence: Synthetic oligonucleotide
  Target: COL7A1; (+) strand; PAM type: NRG; PAM sequence: GGG
caagaactccctggcagcca

SEQ ID NO: 23447 - DNA, 20 bp, Artificial Sequence
  Description of Artificial Sequence: Synthetic oligonucleotide
  Target: COL7A1; (+) strand; PAM type: NRG; PAM sequence: GGG
aagaactccctggcagccag

SEQ ID NO: 23448 - DNA, 20 bp, Artificial Sequence
  Description of Artificial Sequence: Synthetic oligonucleotide
  Target: COL7A1; (+) strand; PAM type: NRG; PAM sequence: TGG
ctccctggcagccaggggac

SEQ ID NO: 23449 - DNA, 20 bp, Artificial Sequence
  Description of Artificial Sequence: Synthetic oligonucleotide
  Target: COL7A1; (+) strand; PAM type: NRG; PAM sequence: GGG
tccctggcagccaggggact

SEQ ID NO: 23450 - DNA, 20 bp, Artificial Sequence
  Description of Artificial Sequence: Synthetic oligonucleotide
  Target: COL7A1; (+) strand; PAM type: NRG; PAM sequence: GGG
ccctggcagccaggggactg

SEQ ID NO: 23451 - DNA, 20 bp, Artificial Sequence
  Description of Artificial Sequence: Synthetic oligonucleotide
  Target: COL7A1; (+) strand; PAM type: NRG; PAM sequence: GAG
ctggcagccaggggactggg

SEQ ID NO: 23452 - DNA, 20 bp, Artificial Sequence
  Description of Artificial Sequence: Synthetic oligonucleotide
  Target: COL7A1; (+) strand; PAM type: NRG; PAM sequence: GAG
ggcagccaggggactgggga

SEQ ID NO: 23453 - DNA, 20 bp, Artificial Sequence
  Description of Artificial Sequence: Synthetic oligonucleotide
  Target: COL7A1; (+) strand; PAM type: NRG; PAM sequence: TGG
ggggactggggagagctgct

SEQ ID NO: 23454 - DNA, 20 bp, Artificial Sequence
  Description of Artificial Sequence: Synthetic oligonucleotide
  Target: COL7A1; (+) strand; PAM type: NRG; PAM sequence: GGG
gggactggggagagctgctt

SEQ ID NO: 23455 - DNA, 20 bp, Artificial Sequence
  Description of Artificial Sequence: Synthetic oligonucleotide
  Target: COL7A1; (+) strand; PAM type: NRG; PAM sequence: GGG
ggactggggagagctgcttg

SEQ ID NO: 23456 - DNA, 20 bp, Artificial Sequence
  Description of Artificial Sequence: Synthetic oligonucleotide
  Target: COL7A1; (+) strand; PAM type: NRG; PAM sequence: TGG
gagctgcttggggccttaac

SEQ ID NO: 23457 - DNA, 20 bp, Artificial Sequence
  Description of Artificial Sequence: Synthetic oligonucleotide
  Target: COL7A1; (+) strand; PAM type: NRG; PAM sequence: AAG
gccttaactggctgctctgt

SEQ ID NO: 23458 - DNA, 20 bp, Artificial Sequence
  Description of Artificial Sequence: Synthetic oligonucleotide
  Target: COL7A1; (+) strand; PAM type: NRG; PAM sequence: GAG
aactggctgctctgtaagct

SEQ ID NO: 23459 - DNA, 20 bp, Artificial Sequence
  Description of Artificial Sequence: Synthetic oligonucleotide
  Target: COL7A1; (+) strand; PAM type: NRG; PAM sequence: CAG
tggctgctctgtaagctgag

SEQ ID NO: 23460 - DNA, 20 bp, Artificial Sequence
  Description of Artificial Sequence: Synthetic oligonucleotide
  Target: COL7A1; (+) strand; PAM type: NRG; PAM sequence: CAG
ctgctctgtaagctgagcag

SEQ ID NO: 23461 - DNA, 20 bp, Artificial Sequence
  Description of Artificial Sequence: Synthetic oligonucleotide
  Target: COL7A1; (+) strand; PAM type: NRG; PAM sequence: CGG
ctgtaagctgagcagcagtg

SEQ ID NO: 23462 - DNA, 20 bp, Artificial Sequence
  Description of Artificial Sequence: Synthetic oligonucleotide
  Target: COL7A1; (+) strand; PAM type: NRG; PAM sequence: GGG
tgtaagctgagcagcagtgc

SEQ ID NO: 23463 - DNA, 20 bp, Artificial Sequence
  Description of Artificial Sequence: Synthetic oligonucleotide
  Target: COL7A1; (+) strand; PAM type: NRG; PAM sequence: GAG
taagctgagcagcagtgcgg

SEQ ID NO: 23464 - DNA, 20 bp, Artificial Sequence
  Description of Artificial Sequence: Synthetic oligonucleotide
  Target: COL7A1; (+) strand; PAM type: NRG; PAM sequence: CAG
gctgagcagcagtgcgggag

SEQ ID NO: 23465 - DNA, 20 bp, Artificial Sequence
  Description of Artificial Sequence: Synthetic oligonucleotide
  Target: COL7A1; (+) strand; PAM type: NRG; PAM sequence: GAG
tgagcagcagtgcgggagca

SEQ ID NO: 23466 - DNA, 20 bp, Artificial Sequence
  Description of Artificial Sequence: Synthetic oligonucleotide
  Target: COL7A1; (+) strand; PAM type: NRG; PAM sequence: AGG
gagcagcagtgcgggagcag

SEQ ID NO: 23467 - DNA, 20 bp, Artificial Sequence
  Description of Artificial Sequence: Synthetic oligonucleotide
  Target: COL7A1; (+) strand; PAM type: NRG; PAM sequence: TGG
cagcagtgcgggagcagagg

SEQ ID NO: 23468 - DNA, 20 bp, Artificial Sequence
  Description of Artificial Sequence: Synthetic oligonucleotide
  Target: COL7A1; (+) strand; PAM type: NRG; PAM sequence: AAG
cagtgcgggagcagaggtgg

SEQ ID NO: 23469 - DNA, 20 bp, Artificial Sequence
  Description of Artificial Sequence: Synthetic oligonucleotide
  Target: COL7A1; (+) strand; PAM type: NRG; PAM sequence: AGG
agtgcgggagcagaggtgga

SEQ ID NO: 23470 - DNA, 20 bp, Artificial Sequence
  Description of Artificial Sequence: Synthetic oligonucleotide
  Target: COL7A1; (+) strand; PAM type: NRG; PAM sequence: GGG
gtgcgggagcagaggtggaa

SEQ ID NO: 23471 - DNA, 20 bp, Artificial Sequence
  Description of Artificial Sequence: Synthetic oligonucleotide
  Target: COL7A1; (+) strand; PAM type: NRG; PAM sequence: GGG
tgcgggagcagaggtggaag

SEQ ID NO: 23472 - DNA, 20 bp, Artificial Sequence
  Description of Artificial Sequence: Synthetic oligonucleotide
  Target: COL7A1; (+) strand; PAM type: NRG; PAM sequence: GAG
cgggagcagaggtggaaggg

SEQ ID NO: 23473 - DNA, 20 bp, Artificial Sequence
  Description of Artificial Sequence: Synthetic oligonucleotide
  Target: COL7A1; (+) strand; PAM type: NRG; PAM sequence: AGG
gggagcagaggtggaagggg

SEQ ID NO: 23474 - DNA, 20 bp, Artificial Sequence
  Description of Artificial Sequence: Synthetic oligonucleotide
  Target: COL7A1; (+) strand; PAM type: NRG; PAM sequence: AAG
cagaggtggaaggggaggcc

SEQ ID NO: 23475 - DNA, 20 bp, Artificial Sequence
  Description of Artificial Sequence: Synthetic oligonucleotide
  Target: COL7A1; (+) strand; PAM type: NRG; PAM sequence: GAG
gaggtggaaggggaggccaa

SEQ ID NO: 23476 - DNA, 20 bp, Artificial Sequence
  Description of Artificial Sequence: Synthetic oligonucleotide
  Target: COL7A1; (+) strand; PAM type: NRG; PAM sequence: CGG
ggaaggggaggccaagagaa

SEQ ID NO: 23477 - DNA, 20 bp, Artificial Sequence
  Description of Artificial Sequence: Synthetic oligonucleotide
  Target: COL7A1; (+) strand; PAM type: NRG; PAM sequence: GAG
ggaggccaagagaacggcct

SEQ ID NO: 23478 - DNA, 20 bp, Artificial Sequence
  Description of Artificial Sequence: Synthetic oligonucleotide
  Target: COL7A1; (+) strand; PAM type: NRG; PAM sequence: AGG
gaggccaagagaacggcctg

SEQ ID NO: 23479 - DNA, 20 bp, Artificial Sequence
  Description of Artificial Sequence: Synthetic oligonucleotide
  Target: COL7A1; (+) strand; PAM type: NRG; PAM sequence: AAG
acggcctgaggaaataaaca

SEQ ID NO: 23480 - DNA, 20 bp, Artificial Sequence
  Description of Artificial Sequence: Synthetic oligonucleotide
  Target: COL7A1; (+) strand; PAM type: NRG; PAM sequence: GAG
ggcctgaggaaataaacaaa

SEQ ID NO: 23481 - DNA, 20 bp, Artificial Sequence
  Description of Artificial Sequence: Synthetic oligonucleotide
  Target: COL7A1; (+) strand; PAM type: NRG; PAM sequence: CAG
ctgaggaaataaacaaagag

SEQ ID NO: 23482 - DNA, 20 bp, Artificial Sequence
  Description of Artificial Sequence: Synthetic oligonucleotide
  Target: COL7A1; (+) strand; PAM type: NRG; PAM sequence: TAG
taaacaaagagcagaccccc

SEQ ID NO: 23483 - DNA, 20 bp, Artificial Sequence
  Description of Artificial Sequence: Synthetic oligonucleotide
  Target: COL7A1; (+) strand; PAM type: NRG; PAM sequence: AGG
aaacaaagagcagaccccct

SEQ ID NO: 23484 - DNA, 20 bp, Artificial Sequence
  Description of Artificial Sequence: Synthetic oligonucleotide
  Target: COL7A1; (+) strand; PAM type: NRG; PAM sequence: CAG
cctaggccacttaccatatc

SEQ ID NO: 23485 - DNA, 20 bp, Artificial Sequence
  Description of Artificial Sequence: Synthetic oligonucleotide
  Target: COL7A1; (+) strand; PAM type: NRG; PAM sequence: TGG
ttaccatatccagccactgc

SEQ ID NO: 23486 - DNA, 20 bp, Artificial Sequence
  Description of Artificial Sequence: Synthetic oligonucleotide
  Target: COL7A1; (+) strand; PAM type: NRG; PAM sequence: GGG
taccatatccagccactgct

SEQ ID NO: 23487 - DNA, 20 bp, Artificial Sequence
  Description of Artificial Sequence: Synthetic oligonucleotide
  Target: COL7A1; (+) strand; PAM type: NRG; PAM sequence: TGG
atccagccactgctgggcac

SEQ ID NO: 23488 - DNA, 20 bp, Artificial Sequence
  Description of Artificial Sequence: Synthetic oligonucleotide
  Target: COL7A1; (+) strand; PAM type: NRG; PAM sequence: TAG
ccactgctgggcactggtca

SEQ ID NO: 23489 - DNA, 20 bp, Artificial Sequence
  Description of Artificial Sequence: Synthetic oligonucleotide
  Target: COL7A1; (+) strand; PAM type: NRG; PAM sequence: TGG
gcactggtcatagatgtact

SEQ ID NO: 23490 - DNA, 20 bp, Artificial Sequence
  Description of Artificial Sequence: Synthetic oligonucleotide
  Target: COL7A1; (+) strand; PAM type: NRG; PAM sequence: GAG
actggtcatagatgtacttg

SEQ ID NO: 23491 - DNA, 20 bp, Artificial Sequence
  Description of Artificial Sequence: Synthetic oligonucleotide
  Target: COL7A1; (+) strand; PAM type: NRG; PAM sequence: CAG
ggtcatagatgtacttggag

SEQ ID NO: 23492 - DNA, 20 bp, Artificial Sequence
  Description of Artificial Sequence: Synthetic oligonucleotide
  Target: COL7A1; (+) strand; PAM type: NRG; PAM sequence: TGG
gcagatctcacgtaccacac

SEQ ID NO: 23493 - DNA, 20 bp, Artificial Sequence
  Description of Artificial Sequence: Synthetic oligonucleotide
  Target: COL7A1; (+) strand; PAM type: NRG; PAM sequence: CAG
acactggcatccacctcctg

SEQ ID NO: 23494 - DNA, 20 bp, Artificial Sequence
  Description of Artificial Sequence: Synthetic oligonucleotide
  Target: COL7A1; (+) strand; PAM type: NRG; PAM sequence: AGG
cactggcatccacctcctgc

SEQ ID NO: 23495 - DNA, 20 bp, Artificial Sequence
  Description of Artificial Sequence: Synthetic oligonucleotide
  Target: COL7A1; (+) strand; PAM type: NRG; PAM sequence: GGG
actggcatccacctcctgca

SEQ ID NO: 23496 - DNA, 20 bp, Artificial Sequence
  Description of Artificial Sequence: Synthetic oligonucleotide
  Target: COL7A1; (+) strand; PAM type: NRG; PAM sequence: GAG
gcatccacctcctgcagggt

SEQ ID NO: 23497 - DNA, 20 bp, Artificial Sequence
  Description of Artificial Sequence: Synthetic oligonucleotide
  Target: COL7A1; (+) strand; PAM type: NRG; PAM sequence: AGG
catccacctcctgcagggtg

SEQ ID NO: 23498 - DNA, 20 bp, Artificial Sequence
  Description of Artificial Sequence: Synthetic oligonucleotide
  Target: COL7A1; (+) strand; PAM type: NRG; PAM sequence: CAG
ccacctcctgcagggtgagg

SEQ ID NO: 23499 - DNA, 20 bp, Artificial Sequence
  Description of Artificial Sequence: Synthetic oligonucleotide
  Target: COL7A1; (+) strand; PAM type: NRG; PAM sequence: GAG
acctcctgcagggtgaggca

SEQ ID NO: 23500 - DNA, 20 bp, Artificial Sequence
  Description of Artificial Sequence: Synthetic oligonucleotide
  Target: COL7A1; (+) strand; PAM type: NRG; PAM sequence: AGG
cctcctgcagggtgaggcag

SEQ ID NO: 23501 - DNA, 20 bp, Artificial Sequence
  Description of Artificial Sequence: Synthetic oligonucleotide
  Target: COL7A1; (+) strand; PAM type: NRG; PAM sequence: GGG
ctcctgcagggtgaggcaga

SEQ ID NO: 23502 - DNA, 20 bp, Artificial Sequence
  Description of Artificial Sequence: Synthetic oligonucleotide
  Target: COL7A1; (+) strand; PAM type: NRG; PAM sequence: TGG
gggtgaggcagagggcatac

SEQ ID NO: 23503 - DNA, 20 bp, Artificial Sequence
  Description of Artificial Sequence: Synthetic oligonucleotide
  Target: COL7A1; (+) strand; PAM type: NRG; PAM sequence: CGG
gcagagggcatactggctaa

SEQ ID NO: 23504 - DNA, 20 bp, Artificial Sequence
  Description of Artificial Sequence: Synthetic oligonucleotide
  Target: COL7A1; (+) strand; PAM type: NRG; PAM sequence: GGG
cagagggcatactggctaac

SEQ ID NO: 23505 - DNA, 20 bp, Artificial Sequence
  Description of Artificial Sequence: Synthetic oligonucleotide
  Target: COL7A1; (+) strand; PAM type: NRG; PAM sequence: TGG
catactggctaacgggcacc

SEQ ID NO: 23506 - DNA, 20 bp, Artificial Sequence
  Description of Artificial Sequence: Synthetic oligonucleotide
  Target: COL7A1; (+) strand; PAM type: NRG; PAM sequence: CAG
cgggcacctggccaccacct

SEQ ID NO: 23507 - DNA, 20 bp, Artificial Sequence
  Description of Artificial Sequence: Synthetic oligonucleotide
  Target: COL7A1; (+) strand; PAM type: NRG; PAM sequence: CAG
cacctggccaccacctcagc

SEQ ID NO: 23508 - DNA, 20 bp, Artificial Sequence
  Description of Artificial Sequence: Synthetic oligonucleotide
  Target: COL7A1; (+) strand; PAM type: NRG; PAM sequence: CAG
tggccaccacctcagccagt

SEQ ID NO: 23509 - DNA, 20 bp, Artificial Sequence
  Description of Artificial Sequence: Synthetic oligonucleotide
  Target: COL7A1; (+) strand; PAM type: NRG; PAM sequence: TAG
gccagtcagcatcatccaac

SEQ ID NO: 23510 - DNA, 20 bp, Artificial Sequence
  Description of Artificial Sequence: Synthetic oligonucleotide
  Target: COL7A1; (+) strand; PAM type: NRG; PAM sequence: CAG
agtcagcatcatccaactag

SEQ ID NO: 23511 - DNA, 20 bp, Artificial Sequence
  Description of Artificial Sequence: Synthetic oligonucleotide
  Target: COL7A1; (+) strand; PAM type: NRG; PAM sequence: GAG
tcagcatcatccaactagca

SEQ ID NO: 23512 - DNA, 20 bp, Artificial Sequence
  Description of Artificial Sequence: Synthetic oligonucleotide
  Target: COL7A1; (+) strand; PAM type: NRG; PAM sequence: CAG
caactagcagagatctccca

SEQ ID NO: 23513 - DNA, 20 bp, Artificial Sequence
  Description of Artificial Sequence: Synthetic oligonucleotide
  Target: COL7A1; (+) strand; PAM type: NRG; PAM sequence: AGG
aactagcagagatctcccac

SEQ ID NO: 23514 - DNA, 20 bp, Artificial Sequence
  Description of Artificial Sequence: Synthetic oligonucleotide
  Target: COL7A1; (+) strand; PAM type: NRG; PAM sequence: CAG
tagcagagatctcccacagg

SEQ ID NO: 23515 - DNA, 20 bp, Artificial Sequence
  Description of Artificial Sequence: Synthetic oligonucleotide
  Target: COL7A1; (+) strand; PAM type: NRG; PAM sequence: CAG
gatctcccacaggcagcatg

SEQ ID NO: 23516 - DNA, 20 bp, Artificial Sequence
  Description of Artificial Sequence: Synthetic oligonucleotide
  Target: COL7A1; (+) strand; PAM type: NRG; PAM sequence: CAG
aggcagcatgcagctgtccc

SEQ ID NO: 23517 - DNA, 20 bp, Artificial Sequence
  Description of Artificial Sequence: Synthetic oligonucleotide
  Target: COL7A1; (+) strand; PAM type: NRG; PAM sequence: AAG
tgcagctgtccccagcccaa

SEQ ID NO: 23518 - DNA, 20 bp, Artificial Sequence
  Description of Artificial Sequence: Synthetic oligonucleotide
  Target: COL7A1; (+) strand; PAM type: NRG; PAM sequence: GAG
cagctgtccccagcccaaaa

SEQ ID NO: 23519 - DNA, 20 bp, Artificial Sequence
  Description of Artificial Sequence: Synthetic oligonucleotide
  Target: COL7A1; (+) strand; PAM type: NRG; PAM sequence: AGG
agctgtccccagcccaaaag

SEQ ID NO: 23520 - DNA, 20 bp, Artificial Sequence
  Description of Artificial Sequence: Synthetic oligonucleotide
  Target: COL7A1; (+) strand; PAM type: NRG; PAM sequence: AAG
gtccccagcccaaaagagga

SEQ ID NO: 23521 - DNA, 20 bp, Artificial Sequence
  Description of Artificial Sequence: Synthetic oligonucleotide
  Target: COL7A1; (+) strand; PAM type: NRG; PAM sequence: AGG
tccccagcccaaaagaggaa

SEQ ID NO: 23522 - DNA, 20 bp, Artificial Sequence
  Description of Artificial Sequence: Synthetic oligonucleotide
  Target: COL7A1; (+) strand; PAM type: NRG; PAM sequence: CAG
ccagcccaaaagaggaaagg

SEQ ID NO: 23523 - DNA, 20 bp, Artificial Sequence
  Description of Artificial Sequence: Synthetic oligonucleotide
  Target: COL7A1; (+) strand; PAM type: NRG; PAM sequence: AAG
gcccaaaagaggaaaggcag

SEQ ID NO: 23524 - DNA, 20 bp, Artificial Sequence
  Description of Artificial Sequence: Synthetic oligonucleotide
  Target: COL7A1; (+) strand; PAM type: NRG; PAM sequence: AGG
cccaaaagaggaaaggcaga

SEQ ID NO: 23525 - DNA, 20 bp, Artificial Sequence
  Description of Artificial Sequence: Synthetic oligonucleotide
  Target: COL7A1; (+) strand; PAM type: NRG; PAM sequence: GGG
ccaaaagaggaaaggcagaa

SEQ ID NO: 23526 - DNA, 20 bp, Artificial Sequence
  Description of Artificial Sequence: Synthetic oligonucleotide
  Target: COL7A1; (+) strand; PAM type: NRG; PAM sequence: TAG
ggcagaagggatccctgcta

SEQ ID NO: 23527 - DNA, 20 bp, Artificial Sequence
  Description of Artificial Sequence: Synthetic oligonucleotide
  Target: COL7A1; (+) strand; PAM type: NRG; PAM sequence: TGG
atccctgctatagacctcca

SEQ ID NO: 23528 - DNA, 20 bp, Artificial Sequence
  Description of Artificial Sequence: Synthetic oligonucleotide
  Target: COL7A1; (+) strand; PAM type: NRG; PAM sequence: GGG
tccctgctatagacctccat

SEQ ID NO: 23529 - DNA, 20 bp, Artificial Sequence
  Description of Artificial Sequence: Synthetic oligonucleotide
  Target: COL7A1; (+) strand; PAM type: NRG; PAM sequence: CAG
atgggccccgcccatctcca

SEQ ID NO: 23530 - DNA, 20 bp, Artificial Sequence
  Description of Artificial Sequence: Synthetic oligonucleotide
  Target: COL7A1; (+) strand; PAM type: NRG; PAM sequence: CAG
ccgcccatctccacagccat

SEQ ID NO: 23531 - DNA, 20 bp, Artificial Sequence
  Description of Artificial Sequence: Synthetic oligonucleotide
  Target: COL7A1; (+) strand; PAM type: NRG; PAM sequence: CAG
ctcccactatgctacccctg

SEQ ID NO: 23532 - DNA, 20 bp, Artificial Sequence
  Description of Artificial Sequence: Synthetic oligonucleotide
  Target: COL7A1; (+) strand; PAM type: NRG; PAM sequence: AGG
tcccactatgctacccctgc

SEQ ID NO: 23533 - DNA, 20 bp, Artificial Sequence
  Description of Artificial Sequence: Synthetic oligonucleotide
  Target: COL7A1; (+) strand; PAM type: NRG; PAM sequence: CAG
tatgctacccctgcaggtga

SEQ ID NO: 23534 - DNA, 20 bp, Artificial Sequence
  Description of Artificial Sequence: Synthetic oligonucleotide
  Target: COL7A1; (+) strand; PAM type: NRG; PAM sequence: TAG
ccctgcaggtgacagctgcc

SEQ ID NO: 23535 - DNA, 20 bp, Artificial Sequence
  Description of Artificial Sequence: Synthetic oligonucleotide
  Target: COL7A1; (+) strand; PAM type: NRG; PAM sequence: AGG
cctgcaggtgacagctgcct

SEQ ID NO: 23536 - DNA, 20 bp, Artificial Sequence
  Description of Artificial Sequence: Synthetic oligonucleotide
  Target: COL7A1; (+) strand; PAM type: NRG; PAM sequence: CAG
gtgacagctgcctaggacac

SEQ ID NO: 23537 - DNA, 20 bp, Artificial Sequence
  Description of Artificial Sequence: Synthetic oligonucleotide
  Target: COL7A1; (+) strand; PAM type: NRG; PAM sequence: AGG
tgacagctgcctaggacacc

SEQ ID NO: 23538 - DNA, 20 bp, Artificial Sequence
  Description of Artificial Sequence: Synthetic oligonucleotide
  Target: COL7A1; (+) strand; PAM type: NRG; PAM sequence: GGG
gacagctgcctaggacacca

SEQ ID NO: 23539 - DNA, 20 bp, Artificial Sequence
  Description of Artificial Sequence: Synthetic oligonucleotide
  Target: COL7A1; (+) strand; PAM type: NRG; PAM sequence: TAG
taggacaccagggatgccta

SEQ ID NO: 23540 - DNA, 20 bp, Artificial Sequence
  Description of Artificial Sequence: Synthetic oligonucleotide
  Target: COL7A1; (+) strand; PAM type: NRG; PAM sequence: AGG
aggacaccagggatgcctat

SEQ ID NO: 23541 - DNA, 20 bp, Artificial Sequence
  Description of Artificial Sequence: Synthetic oligonucleotide
  Target: COL7A1; (+) strand; PAM type: NRG; PAM sequence: GAG
gacaccagggatgcctatag

SEQ ID NO: 23542 - DNA, 20 bp, Artificial Sequence
  Description of Artificial Sequence: Synthetic oligonucleotide
  Target: COL7A1; (+) strand; PAM type: NRG; PAM sequence: CAG
accagggatgcctataggag

SEQ ID NO: 23543 - DNA, 20 bp, Artificial Sequence
  Description of Artificial Sequence: Synthetic oligonucleotide
  Target: COL7A1; (+) strand; PAM type: NRG; PAM sequence: AGG
ccagggatgcctataggagc

SEQ ID NO: 23544 - DNA, 20 bp, Artificial Sequence
  Description of Artificial Sequence: Synthetic oligonucleotide
  Target: COL7A1; (+) strand; PAM type: NRG; PAM sequence: CAG
aggagcaggctgcgctatgc

SEQ ID NO: 23545 - DNA, 20 bp, Artificial Sequence
  Description of Artificial Sequence: Synthetic oligonucleotide
  Target: COL7A1; (+) strand; PAM type: NRG; PAM sequence: AGG
ggagcaggctgcgctatgcc

SEQ ID NO: 23546 - DNA, 20 bp, Artificial Sequence
  Description of Artificial Sequence: Synthetic oligonucleotide
  Target: COL7A1; (+) strand; PAM type: NRG; PAM sequence: CAG
ggccccaaccctacacctcc

SEQ ID NO: 23547 - DNA, 20 bp, Artificial Sequence
  Description of Artificial Sequence: Synthetic oligonucleotide
  Target: COL7A1; (+) strand; PAM type: NRG; PAM sequence: AGG
gccccaaccctacacctccc

SEQ ID NO: 23548 - DNA, 20 bp, Artificial Sequence
  Description of Artificial Sequence: Synthetic oligonucleotide
  Target: COL7A1; (+) strand; PAM type: NRG; PAM sequence: CAG
tacacctcccaggtgtctgc

SEQ ID NO: 23549 - DNA, 20 bp, Artificial Sequence
  Description of Artificial Sequence: Synthetic oligonucleotide
  Target: COL7A1; (+) strand; PAM type: NRG; PAM sequence: AGG
acacctcccaggtgtctgcc

SEQ ID NO: 23550 - DNA, 20 bp, Artificial Sequence
  Description of Artificial Sequence: Synthetic oligonucleotide
  Target: COL7A1; (+) strand; PAM type: NRG; PAM sequence: AAG
tcccaggtgtctgccaggcc

SEQ ID NO: 23551 - DNA, 20 bp, Artificial Sequence
  Description of Artificial Sequence: Synthetic oligonucleotide
  Target: COL7A1; (+) strand; PAM type: NRG; PAM sequence: CAG
tgtctgccaggccaagactc

SEQ ID NO: 23552 - DNA, 20 bp, Artificial Sequence
  Description of Artificial Sequence: Synthetic oligonucleotide
  Target: COL7A1; (+) strand; PAM type: NRG; PAM sequence: CAG
caagactccagaacctctcc

SEQ ID NO: 23553 - DNA, 20 bp, Artificial Sequence
  Description of Artificial Sequence: Synthetic oligonucleotide
  Target: COL7A1; (+) strand; PAM type: NRG; PAM sequence: AGG
aagactccagaacctctccc

SEQ ID NO: 23554 - DNA, 20 bp, Artificial Sequence
  Description of Artificial Sequence: Synthetic oligonucleotide
  Target: COL7A1; (+) strand; PAM type: NRG; PAM sequence: GGG
agactccagaacctctccca

SEQ ID NO: 23555 - DNA, 20 bp, Artificial Sequence
  Description of Artificial Sequence: Synthetic oligonucleotide
  Target: COL7A1; (+) strand; PAM type: NRG; PAM sequence: GGG
gactccagaacctctcccag

SEQ ID NO: 23556 - DNA, 20 bp, Artificial Sequence
  Description of Artificial Sequence: Synthetic oligonucleotide
  Target: COL7A1; (+) strand; PAM type: NRG; PAM sequence: CGG
gggtccatgttaccgcaatc

SEQ ID NO: 23557 - DNA, 20 bp, Artificial Sequence
  Description of Artificial Sequence: Synthetic oligonucleotide
  Target: COL7A1; (+) strand; PAM type: NRG; PAM sequence: CAG
cgcaatccggctttcccatt

SEQ ID NO: 23558 - DNA, 20 bp, Artificial Sequence
  Description of Artificial Sequence: Synthetic oligonucleotide
  Target: COL7A1; (+) strand; PAM type: NRG; PAM sequence: CAG
atccggctttcccattcagc

SEQ ID NO: 23559 - DNA, 20 bp, Artificial Sequence
  Description of Artificial Sequence: Synthetic oligonucleotide
  Target: COL7A1; (+) strand; PAM type: NRG; PAM sequence: AGG
tccggctttcccattcagcc

SEQ ID NO: 23560 - DNA, 20 bp, Artificial Sequence
  Description of Artificial Sequence: Synthetic oligonucleotide
  Target: COL7A1; (+) strand; PAM type: NRG; PAM sequence: GGG
ccggctttcccattcagcca

SEQ ID NO: 23561 - DNA, 20 bp, Artificial Sequence
  Description of Artificial Sequence: Synthetic oligonucleotide
  Target: COL7A1; (+) strand; PAM type: NRG; PAM sequence: GGG
cggctttcccattcagccag

SEQ ID NO: 23562 - DNA, 20 bp, Artificial Sequence
  Description of Artificial Sequence: Synthetic oligonucleotide
  Target: COL7A1; (+) strand; PAM type: NRG; PAM sequence: GGG
ggctttcccattcagccagg

SEQ ID NO: 23563 - DNA, 20 bp, Artificial Sequence
  Description of Artificial Sequence: Synthetic oligonucleotide
  Target: COL7A1; (+) strand; PAM type: NRG; PAM sequence: CGG
cccattcagccagggggatg

SEQ ID NO: 23564 - DNA, 20 bp, Artificial Sequence
  Description of Artificial Sequence: Synthetic oligonucleotide
  Target: COL7A1; (+) strand; PAM type: NRG; PAM sequence: CGG
attcagccagggggatgcgg

SEQ ID NO: 23565 - DNA, 20 bp, Artificial Sequence
  Description of Artificial Sequence: Synthetic oligonucleotide
  Target: COL7A1; (+) strand; PAM type: NRG; PAM sequence: TAG
ccagggggatgcggcggcca

SEQ ID NO: 23566 - DNA, 20 bp, Artificial Sequence
  Description of Artificial Sequence: Synthetic oligonucleotide
  Target: COL7A1; (+) strand; PAM type: NRG; PAM sequence: AGG
cagggggatgcggcggccat

SEQ ID NO: 23567 - DNA, 20 bp, Artificial Sequence
  Description of Artificial Sequence: Synthetic oligonucleotide
  Target: COL7A1; (+) strand; PAM type: NRG; PAM sequence: CAG
gggatgcggcggccataggt

SEQ ID NO: 23568 - DNA, 20 bp, Artificial Sequence
  Description of Artificial Sequence: Synthetic oligonucleotide
  Target: COL7A1; (+) strand; PAM type: NRG; PAM sequence: AGG
ggatgcggcggccataggtc

SEQ ID NO: 23569 - DNA, 20 bp, Artificial Sequence
  Description of Artificial Sequence: Synthetic oligonucleotide
  Target: COL7A1; (+) strand; PAM type: NRG; PAM sequence: GAG
atgcggcggccataggtcag

SEQ ID NO: 23570 - DNA, 20 bp, Artificial Sequence
  Description of Artificial Sequence: Synthetic oligonucleotide
  Target: COL7A1; (+) strand; PAM type: NRG; PAM sequence: AGG
tgcggcggccataggtcagg

SEQ ID NO: 23571 - DNA, 20 bp, Artificial Sequence
  Description of Artificial Sequence: Synthetic oligonucleotide
  Target: COL7A1; (+) strand; PAM type: NRG; PAM sequence: CAG
gcgtccgatgtcctcacaca

SEQ ID NO: 23572 - DNA, 20 bp, Artificial Sequence
  Description of Artificial Sequence: Synthetic oligonucleotide
  Target: COL7A1; (+) strand; PAM type: NRG; PAM sequence: AGG
cgtccgatgtcctcacacac

SEQ ID NO: 23573 - DNA, 20 bp, Artificial Sequence
  Description of Artificial Sequence: Synthetic oligonucleotide
  Target: COL7A1; (+) strand; PAM type: NRG; PAM sequence: GAG
tccgatgtcctcacacacag

SEQ ID NO: 23574 - DNA, 20 bp, Artificial Sequence
  Description of Artificial Sequence: Synthetic oligonucleotide
  Target: COL7A1; (+) strand; PAM type: NRG; PAM sequence: TAG
gatgtcctcacacacaggag

SEQ ID NO: 23575 - DNA, 20 bp, Artificial Sequence
  Description of Artificial Sequence: Synthetic oligonucleotide
  Target: COL7A1; (+) strand; PAM type: NRG; PAM sequence: AAG
cacacaggagtagtgccttt

SEQ ID NO: 23576 - DNA, 20 bp, Artificial Sequence
  Description of Artificial Sequence: Synthetic oligonucleotide
  Target: COL7A1; (+) strand; PAM type: NRG; PAM sequence: AGG
acacaggagtagtgccttta

SEQ ID NO: 23577 - DNA, 20 bp, Artificial Sequence
  Description of Artificial Sequence: Synthetic oligonucleotide
  Target: COL7A1; (+) strand; PAM type: NRG; PAM sequence: GGG
cacaggagtagtgcctttaa

SEQ ID NO: 23578 - DNA, 20 bp, Artificial Sequence
  Description of Artificial Sequence: Synthetic oligonucleotide
  Target: COL7A1; (+) strand; PAM type: NRG; PAM sequence: GAG
ggagtagtgcctttaagggt

SEQ ID NO: 23579 - DNA, 20 bp, Artificial Sequence
  Description of Artificial Sequence: Synthetic oligonucleotide
  Target: COL7A1; (+) strand; PAM type: NRG; PAM sequence: GAG
agtagtgcctttaagggtga

SEQ ID NO: 23580 - DNA, 20 bp, Artificial Sequence
  Description of Artificial Sequence: Synthetic oligonucleotide
  Target: COL7A1; (+) strand; PAM type: NRG; PAM sequence: AAG
agtgcctttaagggtgagag

SEQ ID NO: 23581 - DNA, 20 bp, Artificial Sequence
  Description of Artificial Sequence: Synthetic oligonucleotide
  Target: COL7A1; (+) strand; PAM type: NRG; PAM sequence: AGG
gtgcctttaagggtgagaga

SEQ ID NO: 23582 - DNA, 20 bp, Artificial Sequence
  Description of Artificial Sequence: Synthetic oligonucleotide
  Target: COL7A1; (+) strand; PAM type: NRG; PAM sequence: CAG
tttaagggtgagagaaggct

SEQ ID NO: 23583 - DNA, 20 bp, Artificial Sequence
  Description of Artificial Sequence: Synthetic oligonucleotide
  Target: COL7A1; (+) strand; PAM type: NRG; PAM sequence: GAG
taagggtgagagaaggctca

SEQ ID NO: 23584 - DNA, 20 bp, Artificial Sequence
  Description of Artificial Sequence: Synthetic oligonucleotide
  Target: COL7A1; (+) strand; PAM type: NRG; PAM sequence: AGG
aagggtgagagaaggctcag

SEQ ID NO: 23585 - DNA, 20 bp, Artificial Sequence
  Description of Artificial Sequence: Synthetic oligonucleotide
  Target: COL7A1; (+) strand; PAM type: NRG; PAM sequence: CAG
agaaggctcagaggtccacc

SEQ ID NO: 23586 - DNA, 20 bp, Artificial Sequence
  Description of Artificial Sequence: Synthetic oligonucleotide
  Target: COL7A1; (+) strand; PAM type: NRG; PAM sequence: TGG
aggtccacccagcccaatcc

SEQ ID NO: 23587 - DNA, 20 bp, Artificial Sequence
  Description of Artificial Sequence: Synthetic oligonucleotide
  Target: COL7A1; (+) strand; PAM type: NRG; PAM sequence: CAG
ccagcccaatcctggaccca

SEQ ID NO: 23588 - DNA, 20 bp, Artificial Sequence
  Description of Artificial Sequence: Synthetic oligonucleotide
  Target: COL7A1; (+) strand; PAM type: NRG; PAM sequence: AGG
cagcccaatcctggacccac

SEQ ID NO: 23589 - DNA, 20 bp, Artificial Sequence
  Description of Artificial Sequence: Synthetic oligonucleotide
  Target: COL7A1; (+) strand; PAM type: NRG; PAM sequence: CAG
acaggtacacaaacaatctc

SEQ ID NO: 23590 - DNA, 20 bp, Artificial Sequence
  Description of Artificial Sequence: Synthetic oligonucleotide
  Target: COL7A1; (+) strand; PAM type: NRG; PAM sequence: CAG
acacaaacaatctccagcct

SEQ ID NO: 23591 - DNA, 20 bp, Artificial Sequence
  Description of Artificial Sequence: Synthetic oligonucleotide
  Target: COL7A1; (+) strand; PAM type: NRG; PAM sequence: AGG
cacaaacaatctccagcctc

SEQ ID NO: 23592 - DNA, 20 bp, Artificial Sequence
  Description of Artificial Sequence: Synthetic oligonucleotide
  Target: COL7A1; (+) strand; PAM type: NRG; PAM sequence: AAG
atctccagcctcaggttgac

SEQ ID NO: 23593 - DNA, 20 bp, Artificial Sequence
  Description of Artificial Sequence: Synthetic oligonucleotide
  Target: COL7A1; (+) strand; PAM type: NRG; PAM sequence: AGG
tctccagcctcaggttgaca

SEQ ID NO: 23594 - DNA, 20 bp, Artificial Sequence
  Description of Artificial Sequence: Synthetic oligonucleotide
  Target: COL7A1; (+) strand; PAM type: NRG; PAM sequence: CAG
tccctgacctcatgctgact

SEQ ID NO: 23595 - DNA, 20 bp, Artificial Sequence
  Description of Artificial Sequence: Synthetic oligonucleotide
  Target: COL7A1; (-) strand; PAM type: YTN; PAM sequence: CTG
cccaggccagctgtcctcta

SEQ ID NO: 23596 - DNA, 20 bp, Artificial Sequence
  Description of Artificial Sequence: Synthetic oligonucleotide
  Target: COL7A1; (-) strand; PAM type: YTN; PAM sequence: CTG
gccccctgcccaggccagct

SEQ ID NO: 23597 - DNA, 20 bp, Artificial Sequence
  Description of Artificial Sequence: Synthetic oligonucleotide
  Target: COL7A1; (-) strand; PAM type: YTN; PAM sequence: TTC
ccagagatagccctggcccc

SEQ ID NO: 23598 - DNA, 20 bp, Artificial Sequence
  Description of Artificial Sequence: Synthetic oligonucleotide
  Target: COL7A1; (-) strand; PAM type: YTN; PAM sequence: CTT
cccagagatagccctggccc

SEQ ID NO: 23599 - DNA, 20 bp, Artificial Sequence
  Description of Artificial Sequence: Synthetic oligonucleotide
  Target: COL7A1; (-) strand; PAM type: YTN; PAM sequence: CTG
ggtgtgaggatgccttccca

SEQ ID NO: 23600 - DNA, 20 bp, Artificial Sequence
  Description of Artificial Sequence: Synthetic oligonucleotide
  Target: COL7A1; (-) strand; PAM type: YTN; PAM sequence: CTG
tctgggtgtgaggatgcctt

SEQ ID NO: 23601 - DNA, 20 bp, Artificial Sequence
  Description of Artificial Sequence: Synthetic oligonucleotide
  Target: COL7A1; (-) strand; PAM type: YTN; PAM sequence: CTC
atcctgtctgggtgtgagga

SEQ ID NO: 23602 - DNA, 20 bp, Artificial Sequence
  Description of Artificial Sequence: Synthetic oligonucleotide
  Target: COL7A1; (-) strand; PAM type: YTN; PAM sequence: CTG
ggaaccaggctcatcctgtc

SEQ ID NO: 23603 - DNA, 20 bp, Artificial Sequence
  Description of Artificial Sequence: Synthetic oligonucleotide
  Target: COL7A1; (-) strand; PAM type: YTN; PAM sequence: TTC
ctgggaaccaggctcatcct

SEQ ID NO: 23604 - DNA, 20 bp, Artificial Sequence
  Description of Artificial Sequence: Synthetic oligonucleotide
  Target: COL7A1; (-) strand; PAM type: YTN; PAM sequence: TTT
cctgggaaccaggctcatcc

SEQ ID NO: 23605 - DNA, 20 bp, Artificial Sequence
  Description of Artificial Sequence: Synthetic oligonucleotide
  Target: COL7A1; (-) strand; PAM type: YTN; PAM sequence: TTG
catttcctgggaaccaggct

SEQ ID NO: 23606 - DNA, 20 bp, Artificial Sequence
  Description of Artificial Sequence: Synthetic oligonucleotide
  Target: COL7A1; (-) strand; PAM type: YTN; PAM sequence: CTG
ttgcatttcctgggaaccag

SEQ ID NO: 23607 - DNA, 20 bp, Artificial Sequence
  Description of Artificial Sequence: Synthetic oligonucleotide
  Target: COL7A1; (-) strand; PAM type: YTN; PAM sequence: CTG
gggaagagaggaaggtgcag

SEQ ID NO: 23608 - DNA, 20 bp, Artificial Sequence
  Description of Artificial Sequence: Synthetic oligonucleotide
  Target: COL7A1; (-) strand; PAM type: YTN; PAM sequence: TTC
tggggaagagaggaaggtgc

SEQ ID NO: 23609 - DNA, 20 bp, Artificial Sequence
  Description of Artificial Sequence: Synthetic oligonucleotide
  Target: COL7A1; (-) strand; PAM type: YTN; PAM sequence: TTT
ctggggaagagaggaaggtg

SEQ ID NO: 23610 - DNA, 20 bp, Artificial Sequence
  Description of Artificial Sequence: Synthetic oligonucleotide
  Target: COL7A1; (-) strand; PAM type: YTN; PAM sequence: CTT
tctggggaagagaggaaggt

SEQ ID NO: 23611 - DNA, 20 bp, Artificial Sequence
  Description of Artificial Sequence: Synthetic oligonucleotide
  Target: COL7A1; (-) strand; PAM type: YTN; PAM sequence: CTG
ggtcagccacgggtagactt

SEQ ID NO: 23612 - DNA, 20 bp, Artificial Sequence
  Description of Artificial Sequence: Synthetic oligonucleotide
  Target: COL7A1; (-) strand; PAM type: YTN; PAM sequence: TTG
aaggagggtgcctgggtcag

SEQ ID NO: 23613 - DNA, 20 bp, Artificial Sequence
  Description of Artificial Sequence: Synthetic oligonucleotide
  Target: COL7A1; (-) strand; PAM type: YTN; PAM sequence: CTT
gaaggagggtgcctgggtca

SEQ ID NO: 23614 - DNA, 20 bp, Artificial Sequence
  Description of Artificial Sequence: Synthetic oligonucleotide
  Target: COL7A1; (-) strand; PAM type: YTN; PAM sequence: CTG
gacatagggccttgaaggag

SEQ ID NO: 23615 - DNA, 20 bp, Artificial Sequence
  Description of Artificial Sequence: Synthetic oligonucleotide
  Target: COL7A1; (-) strand; PAM type: YTN; PAM sequence: TTC
cagctggacatagggccttg

SEQ ID NO: 23616 - DNA, 20 bp, Artificial Sequence
  Description of Artificial Sequence: Synthetic oligonucleotide
  Target: COL7A1; (-) strand; PAM type: YTN; PAM sequence: CTT
ccagctggacatagggcctt

SEQ ID NO: 23617 - DNA, 20 bp, Artificial Sequence
  Description of Artificial Sequence: Synthetic oligonucleotide
  Target: COL7A1; (-) strand; PAM type: YTN; PAM sequence: CTG
tggccttccagctggacata

SEQ ID NO: 23618 - DNA, 20 bp, Artificial Sequence
  Description of Artificial Sequence: Synthetic oligonucleotide
  Target: COL7A1; (-) strand; PAM type: YTN; PAM sequence: TTG
acctgtggccttccagctgg

SEQ ID NO: 23619 - DNA, 20 bp, Artificial Sequence
  Description of Artificial Sequence: Synthetic oligonucleotide
  Target: COL7A1; (-) strand; PAM type: YTN; PAM sequence: CTG
atgttgacctgtggccttcc

SEQ ID NO: 23620 - DNA, 20 bp, Artificial Sequence
  Description of Artificial Sequence: Synthetic oligonucleotide
  Target: COL7A1; (-) strand; PAM type: YTN; PAM sequence: CTC
ctgatgttgacctgtggcct

SEQ ID NO: 23621 - DNA, 20 bp, Artificial Sequence
  Description of Artificial Sequence: Synthetic oligonucleotide
  Target: COL7A1; (-) strand; PAM type: YTN; PAM sequence: TTG
gggaggaaccccaggcatct

SEQ ID NO: 23622 - DNA, 20 bp, Artificial Sequence
  Description of Artificial Sequence: Synthetic oligonucleotide
  Target: COL7A1; (-) strand; PAM type: YTN; PAM sequence: CTT
ggggaggaaccccaggcatc

SEQ ID NO: 23623 - DNA, 20 bp, Artificial Sequence
  Description of Artificial Sequence: Synthetic oligonucleotide
  Target: COL7A1; (-) strand; PAM type: YTN; PAM sequence: CTC
agagcagatgtggacggtgg

SEQ ID NO: 23624 - DNA, 20 bp, Artificial Sequence
  Description of Artificial Sequence: Synthetic oligonucleotide
  Target: COL7A1; (-) strand; PAM type: YTN; PAM sequence: CTG
acaaacagggccatgggagg

SEQ ID NO: 23625 - DNA, 20 bp, Artificial Sequence
  Description of Artificial Sequence: Synthetic oligonucleotide
  Target: COL7A1; (-) strand; PAM type: YTN; PAM sequence: TTC
ccacctgacaaacagggcca

SEQ ID NO: 23626 - DNA, 20 bp, Artificial Sequence
  Description of Artificial Sequence: Synthetic oligonucleotide
  Target: COL7A1; (-) strand; PAM type: YTN; PAM sequence: TTT
cccacctgacaaacagggcc

SEQ ID NO: 23627 - DNA, 20 bp, Artificial Sequence
  Description of Artificial Sequence: Synthetic oligonucleotide
  Target: COL7A1; (-) strand; PAM type: YTN; PAM sequence: CTC
agtttcccacctgacaaaca

SEQ ID NO: 23628 - DNA, 20 bp, Artificial Sequence
  Description of Artificial Sequence: Synthetic oligonucleotide
  Target: COL7A1; (-) strand; PAM type: YTN; PAM sequence: CTG
accctcagtttcccacctga

SEQ ID NO: 23629 - DNA, 20 bp, Artificial Sequence
  Description of Artificial Sequence: Synthetic oligonucleotide
  Target: COL7A1; (-) strand; PAM type: YTN; PAM sequence: TTC
ctgaccctcagtttcccacc

SEQ ID NO: 23630 - DNA, 20 bp, Artificial Sequence
  Description of Artificial Sequence: Synthetic oligonucleotide
  Target: COL7A1; (-) strand; PAM type: YTN; PAM sequence: CTT
cctgaccctcagtttcccac

SEQ ID NO: 23631 - DNA, 20 bp, Artificial Sequence
  Description of Artificial Sequence: Synthetic oligonucleotide
  Target: COL7A1; (-) strand; PAM type: YTN; PAM sequence: CTC
ttcctgaccctcagtttccc

SEQ ID NO: 23632 - DNA, 20 bp, Artificial Sequence
  Description of Artificial Sequence: Synthetic oligonucleotide
  Target: COL7A1; (-) strand; PAM type: YTN; PAM sequence: CTC
cctcttcctgaccctcagtt

SEQ ID NO: 23633 - DNA, 20 bp, Artificial Sequence
  Description of Artificial Sequence: Synthetic oligonucleotide
  Target: COL7A1; (-) strand; PAM type: YTN; PAM sequence: TTC
tccctcttcctgaccctcag

SEQ ID NO: 23634 - DNA, 20 bp, Artificial Sequence
  Description of Artificial Sequence: Synthetic oligonucleotide
  Target: COL7A1; (-) strand; PAM type: YTN; PAM sequence: CTT
ctccctcttcctgaccctca

SEQ ID NO: 23635 - DNA, 20 bp, Artificial Sequence
  Description of Artificial Sequence: Synthetic oligonucleotide
  Target: COL7A1; (-) strand; PAM type: YTN; PAM sequence: TTG
gacccttctccctcttcctg

SEQ ID NO: 23636 - DNA, 20 bp, Artificial Sequence
  Description of Artificial Sequence: Synthetic oligonucleotide
  Target: COL7A1; (-) strand; PAM type: YTN; PAM sequence: CTT
ggacccttctccctcttcct

SEQ ID NO: 23637 - DNA, 20 bp, Artificial Sequence
  Description of Artificial Sequence: Synthetic oligonucleotide
  Target: COL7A1; (-) strand; PAM type: YTN; PAM sequence: TTG
tgatcttggacccttctccc

SEQ ID NO: 23638 - DNA, 20 bp, Artificial Sequence
  Description of Artificial Sequence: Synthetic oligonucleotide
  Target: COL7A1; (-) strand; PAM type: YTN; PAM sequence: TTT
gtgatcttggacccttctcc

SEQ ID NO: 23639 - DNA, 20 bp, Artificial Sequence
  Description of Artificial Sequence: Synthetic oligonucleotide
  Target: COL7A1; (-) strand; PAM type: YTN; PAM sequence: CTT
tgtgatcttggacccttctc

SEQ ID NO: 23640 - DNA, 20 bp, Artificial Sequence
  Description of Artificial Sequence: Synthetic oligonucleotide
  Target: COL7A1; (-) strand; PAM type: YTN; PAM sequence: CTC
gctttgtgatcttggaccct

SEQ ID NO: 23641 - DNA, 20 bp, Artificial Sequence
  Description of Artificial Sequence: Synthetic oligonucleotide
  Target: COL7A1; (-) strand; PAM type: YTN; PAM sequence: CTG
tggactcgctttgtgatctt

SEQ ID NO: 23642 - DNA, 20 bp, Artificial Sequence
  Description of Artificial Sequence: Synthetic oligonucleotide
  Target: COL7A1; (-) strand; PAM type: YTN; PAM sequence: CTG
cactgtggactcgctttgtg

SEQ ID NO: 23643 - DNA, 20 bp, Artificial Sequence
  Description of Artificial Sequence: Synthetic oligonucleotide
  Target: COL7A1; (-) strand; PAM type: YTN; PAM sequence: CTG
agtccatgctgcactgtgga

SEQ ID NO: 23644 - DNA, 20 bp, Artificial Sequence
  Description of Artificial Sequence: Synthetic oligonucleotide
  Target: COL7A1; (-) strand; PAM type: YTN; PAM sequence: TTG
agctgagtccatgctgcact

SEQ ID NO: 23645 - DNA, 20 bp, Artificial Sequence
  Description of Artificial Sequence: Synthetic oligonucleotide
  Target: COL7A1; (-) strand; PAM type: YTN; PAM sequence: CTG
ggagttgagctgagtccatg

SEQ ID NO: 23646 - DNA, 20 bp, Artificial Sequence
  Description of Artificial Sequence: Synthetic oligonucleotide
  Target: COL7A1; (-) strand; PAM type: YTN; PAM sequence: CTG
gaaggctgggagttgagctg

SEQ ID NO: 23647 - DNA, 20 bp, Artificial Sequence
  Description of Artificial Sequence: Synthetic oligonucleotide
  Target: COL7A1; (-) strand; PAM type: YTN; PAM sequence: CTG
tagtgtggcaggcaaggtct

SEQ ID NO: 23648 - DNA, 20 bp, Artificial Sequence
  Description of Artificial Sequence: Synthetic oligonucleotide
  Target: COL7A1; (-) strand; PAM type: YTN; PAM sequence: TTC
cactgtagtgtggcaggcaa

SEQ ID NO: 23649 - DNA, 20 bp, Artificial Sequence
  Description of Artificial Sequence: Synthetic oligonucleotide
  Target: COL7A1; (-) strand; PAM type: YTN; PAM sequence: CTG
tgcgattccactgtagtgtg

SEQ ID NO: 23650 - DNA, 20 bp, Artificial Sequence
  Description of Artificial Sequence: Synthetic oligonucleotide
  Target: COL7A1; (-) strand; PAM type: YTN; PAM sequence: CTC
catggagaggacacagggga

SEQ ID NO: 23651 - DNA, 20 bp, Artificial Sequence
  Description of Artificial Sequence: Synthetic oligonucleotide
  Target: COL7A1; (-) strand; PAM type: YTN; PAM sequence: CTG
ggacagcatctccatggaga

SEQ ID NO: 23652 - DNA, 20 bp, Artificial Sequence
  Description of Artificial Sequence: Synthetic oligonucleotide
  Target: COL7A1; (-) strand; PAM type: YTN; PAM sequence: CTG
agagagcagacgctgggaca

SEQ ID NO: 23653 - DNA, 20 bp, Artificial Sequence
  Description of Artificial Sequence: Synthetic oligonucleotide
  Target: COL7A1; (-) strand; PAM type: YTN; PAM sequence: CTG
atgctgagagagcagacgct

SEQ ID NO: 23654 - DNA, 20 bp, Artificial Sequence
  Description of Artificial Sequence: Synthetic oligonucleotide
  Target: COL7A1; (-) strand; PAM type: YTN; PAM sequence: CTA
ccgggcatccgctgatgctg

SEQ ID NO: 23655 - DNA, 20 bp, Artificial Sequence
  Description of Artificial Sequence: Synthetic oligonucleotide
  Target: COL7A1; (-) strand; PAM type: YTN; PAM sequence: TTC
taccgggcatccgctgatgc

SEQ ID NO: 23656 - DNA, 20 bp, Artificial Sequence
  Description of Artificial Sequence: Synthetic oligonucleotide
  Target: COL7A1; (-) strand; PAM type: YTN; PAM sequence: CTG
aggaggaaaaagccatgagg

SEQ ID NO: 23657 - DNA, 20 bp, Artificial Sequence
  Description of Artificial Sequence: Synthetic oligonucleotide
  Target: COL7A1; (-) strand; PAM type: YTN; PAM sequence: TTC
ggatatactgaggaggaaaa

SEQ ID NO: 23658 - DNA, 20 bp, Artificial Sequence
  Description of Artificial Sequence: Synthetic oligonucleotide
  Target: COL7A1; (-) strand; PAM type: YTN; PAM sequence: TTT
cggatatactgaggaggaaa

SEQ ID NO: 23659 - DNA, 20 bp, Artificial Sequence
  Description of Artificial Sequence: Synthetic oligonucleotide
  Target: COL7A1; (-) strand; PAM type: YTN; PAM sequence: CTT
tcggatatactgaggaggaa

SEQ ID NO: 23660 - DNA, 20 bp, Artificial Sequence
  Description of Artificial Sequence: Synthetic oligonucleotide
  Target: COL7A1; (-) strand; PAM type: YTN; PAM sequence: CTC
actttcggatatactgagga

SEQ ID NO: 23661 - DNA, 20 bp, Artificial Sequence
  Description of Artificial Sequence: Synthetic oligonucleotide
  Target: COL7A1; (-) strand; PAM type: YTN; PAM sequence: CTG
gctcactttcggatatactg

SEQ ID NO: 23662 - DNA, 20 bp, Artificial Sequence
  Description of Artificial Sequence: Synthetic oligonucleotide
  Target: COL7A1; (-) strand; PAM type: YTN; PAM sequence: CTG
ggacagaacagctggctcac

SEQ ID NO: 23663 - DNA, 20 bp, Artificial Sequence
  Description of Artificial Sequence: Synthetic oligonucleotide
  Target: COL7A1; (-) strand; PAM type: YTN; PAM sequence: TTC
ccacgcctgggacagaacag

SEQ ID NO: 23664 - DNA, 20 bp, Artificial Sequence
  Description of Artificial Sequence: Synthetic oligonucleotide
  Target: COL7A1; (-) strand; PAM type: YTN; PAM sequence: CTT
cccacgcctgggacagaaca

SEQ ID NO: 23665 - DNA, 20 bp, Artificial Sequence
  Description of Artificial Sequence: Synthetic oligonucleotide
  Target: COL7A1; (-) strand; PAM type: YTN; PAM sequence: TTC
acacgtgtgtacagacatcc

SEQ ID NO: 23666 - DNA, 20 bp, Artificial Sequence
  Description of Artificial Sequence: Synthetic oligonucleotide
  Target: COL7A1; (-) strand; PAM type: YTN; PAM sequence: CTG
agcagaacatgttcacacgt

SEQ ID NO: 23667 - DNA, 20 bp, Artificial Sequence
  Description of Artificial Sequence: Synthetic oligonucleotide
  Target: COL7A1; (-) strand; PAM type: YTN; PAM sequence: TTC
atggtgggcagaggctgagc

SEQ ID NO: 23668 - DNA, 20 bp, Artificial Sequence
  Description of Artificial Sequence: Synthetic oligonucleotide
  Target: COL7A1; (-) strand; PAM type: YTN; PAM sequence: CTG
ggagccaaccagggtcaggc

SEQ ID NO: 23669 - DNA, 20 bp, Artificial Sequence
  Description of Artificial Sequence: Synthetic oligonucleotide
  Target: COL7A1; (-) strand; PAM type: YTN; PAM sequence: CTG
ggaggaagtccagtggtcag

SEQ ID NO: 23670 - DNA, 20 bp, Artificial Sequence
  Description of Artificial Sequence: Synthetic oligonucleotide
  Target: COL7A1; (-) strand; PAM type: YTN; PAM sequence: CTG
ggacactgggaggaagtcca

SEQ ID NO: 23671 - DNA, 20 bp, Artificial Sequence
  Description of Artificial Sequence: Synthetic oligonucleotide
  Target: COL7A1; (-) strand; PAM type: YTN; PAM sequence: CTA
ggctgggacactgggaggaa

SEQ ID NO: 23672 - DNA, 20 bp, Artificial Sequence
  Description of Artificial Sequence: Synthetic oligonucleotide
  Target: COL7A1; (-) strand; PAM type: YTN; PAM sequence: TTC
taggctgggacactgggagg

SEQ ID NO: 23673 - DNA, 20 bp, Artificial Sequence
  Description of Artificial Sequence: Synthetic oligonucleotide
  Target: COL7A1; (-) strand; PAM type: YTN; PAM sequence: CTT
ctaggctgggacactgggag

SEQ ID NO: 23674 - DNA, 20 bp, Artificial Sequence
  Description of Artificial Sequence: Synthetic oligonucleotide
  Target: COL7A1; (-) strand; PAM type: YTN; PAM sequence: CTG
gccaccacatggcttctagg

SEQ ID NO: 23675 - DNA, 20 bp, Artificial Sequence
  Description of Artificial Sequence: Synthetic oligonucleotide
  Target: COL7A1; (-) strand; PAM type: YTN; PAM sequence: TTG
agaactggccaccacatggc

SEQ ID NO: 23676 - DNA, 20 bp, Artificial Sequence
  Description of Artificial Sequence: Synthetic oligonucleotide
  Target: COL7A1; (-) strand; PAM type: YTN; PAM sequence: TTT
gagaactggccaccacatgg

SEQ ID NO: 23677 - DNA, 20 bp, Artificial Sequence
  Description of Artificial Sequence: Synthetic oligonucleotide
  Target: COL7A1; (-) strand; PAM type: YTN; PAM sequence: CTT
tgagaactggccaccacatg

SEQ ID NO: 23678 - DNA, 20 bp, Artificial Sequence
  Description of Artificial Sequence: Synthetic oligonucleotide
  Target: COL7A1; (-) strand; PAM type: YTN; PAM sequence: TTG
agctttgagaactggccacc

SEQ ID NO: 23679 - DNA, 20 bp, Artificial Sequence
  Description of Artificial Sequence: Synthetic oligonucleotide
  Target: COL7A1; (-) strand; PAM type: YTN; PAM sequence: TTT
gagctttgagaactggccac

SEQ ID NO: 23680 - DNA, 20 bp, Artificial Sequence
  Description of Artificial Sequence: Synthetic oligonucleotide
  Target: COL7A1; (-) strand; PAM type: YTN; PAM sequence: CTG
ggaagagtttgagctttgag

SEQ ID NO: 23681 - DNA, 20 bp, Artificial Sequence
  Description of Artificial Sequence: Synthetic oligonucleotide
  Target: COL7A1; (-) strand; PAM type: YTN; PAM sequence: CTG
gccagtagatacagggactg

SEQ ID NO: 23682 - DNA, 20 bp, Artificial Sequence
  Description of Artificial Sequence: Synthetic oligonucleotide
  Target: COL7A1; (-) strand; PAM type: YTN; PAM sequence: CTG
tcaggactggccagtagata

SEQ ID NO: 23683 - DNA, 20 bp, Artificial Sequence
  Description of Artificial Sequence: Synthetic oligonucleotide
  Target: COL7A1; (-) strand; PAM type: YTN; PAM sequence: TTC
tgtcaggactggccagtaga

SEQ ID NO: 23684 - DNA, 20 bp, Artificial Sequence
  Description of Artificial Sequence: Synthetic oligonucleotide
  Target: COL7A1; (-) strand; PAM type: YTN; PAM sequence: TTG
gcagttctgtcaggactggc

SEQ ID NO: 23685 - DNA, 20 bp, Artificial Sequence
  Description of Artificial Sequence: Synthetic oligonucleotide
  Target: COL7A1; (-) strand; PAM type: YTN; PAM sequence: TTT
ggcagttctgtcaggactgg

SEQ ID NO: 23686 - DNA, 20 bp, Artificial Sequence
  Description of Artificial Sequence: Synthetic oligonucleotide
  Target: COL7A1; (-) strand; PAM type: YTN; PAM sequence: CTG
tgtgtgtgtgtgtgtgtgtg

SEQ ID NO: 23687 - DNA, 20 bp, Artificial Sequence
  Description of Artificial Sequence: Synthetic oligonucleotide
  Target: COL7A1; (-) strand; PAM type: YTN; PAM sequence: CTG
ggtaacaggagcgagactgt

SEQ ID NO: 23688 - DNA, 20 bp, Artificial Sequence
  Description of Artificial Sequence: Synthetic oligonucleotide
  Target: COL7A1; (-) strand; PAM type: YTN; PAM sequence: CTC
caggctgggtaacaggagcg

SEQ ID NO: 23689 - DNA, 20 bp, Artificial Sequence
  Description of Artificial Sequence: Synthetic oligonucleotide
  Target: COL7A1; (-) strand; PAM type: YTN; PAM sequence: CTA
tgtgctccaggctgggtaac

SEQ ID NO: 23690 - DNA, 20 bp, Artificial Sequence
  Description of Artificial Sequence: Synthetic oligonucleotide
  Target: COL7A1; (-) strand; PAM type: YTN; PAM sequence: TTG
cactatgtgctccaggctgg

SEQ ID NO: 23691 - DNA, 20 bp, Artificial Sequence
  Description of Artificial Sequence: Synthetic oligonucleotide
  Target: COL7A1; (-) strand; PAM type: YTN; PAM sequence: CTG
cagtgagccatgattgcact

SEQ ID NO: 23692 - DNA, 20 bp, Artificial Sequence
  Description of Artificial Sequence: Synthetic oligonucleotide
  Target: COL7A1; (-) strand; PAM type: YTN; PAM sequence: TTC
aaggctgcagtgagccatga

SEQ ID NO: 23693 - DNA, 20 bp, Artificial Sequence
  Description of Artificial Sequence: Synthetic oligonucleotide
  Target: COL7A1; (-) strand; PAM type: YTN; PAM sequence: TTG
aggccaggagttcaaggctg

SEQ ID NO: 23694 - DNA, 20 bp, Artificial Sequence
  Description of Artificial Sequence: Synthetic oligonucleotide
  Target: COL7A1; (-) strand; PAM type: YTN; PAM sequence: CTT
gaggccaggagttcaaggct

SEQ ID NO: 23695 - DNA, 20 bp, Artificial Sequence
  Description of Artificial Sequence: Synthetic oligonucleotide
  Target: COL7A1; (-) strand; PAM type: YTN; PAM sequence: TTG
aggcgggaggatcgcttgag

SEQ ID NO: 23696 - DNA, 20 bp, Artificial Sequence
  Description of Artificial Sequence: Synthetic oligonucleotide
  Target: COL7A1; (-) strand; PAM type: YTN; PAM sequence: TTG
ggaggttgaggcgggaggat

SEQ ID NO: 23697 - DNA, 20 bp, Artificial Sequence
  Description of Artificial Sequence: Synthetic oligonucleotide
  Target: COL7A1; (-) strand; PAM type: YTN; PAM sequence: TTT
gggaggttgaggcgggagga

SEQ ID NO: 23698 - DNA, 20 bp, Artificial Sequence
  Description of Artificial Sequence: Synthetic oligonucleotide
  Target: COL7A1; (-) strand; PAM type: YTN; PAM sequence: CTT
tgggaggttgaggcgggagg

SEQ ID NO: 23699 - DNA, 20 bp, Artificial Sequence
  Description of Artificial Sequence: Synthetic oligonucleotide
  Target: COL7A1; (-) strand; PAM type: YTN; PAM sequence: CTA
taaacccagggctttgggag

SEQ ID NO: 23700 - DNA, 20 bp, Artificial Sequence
  Description of Artificial Sequence: Synthetic oligonucleotide
  Target: COL7A1; (-) strand; PAM type: YTN; PAM sequence: CTA
atggctataaacccagggct

SEQ ID NO: 23701 - DNA, 20 bp, Artificial Sequence
  Description of Artificial Sequence: Synthetic oligonucleotide
  Target: COL7A1; (-) strand; PAM type: YTN; PAM sequence: TTG
tgggccagatgtggtggcta

SEQ ID NO: 23702 - DNA, 20 bp, Artificial Sequence
  Description of Artificial Sequence: Synthetic oligonucleotide
  Target: COL7A1; (-) strand; PAM type: YTN; PAM sequence: TTT
gtgggccagatgtggtggct

SEQ ID NO: 23703 - DNA, 20 bp, Artificial Sequence
  Description of Artificial Sequence: Synthetic oligonucleotide
  Target: COL7A1; (-) strand; PAM type: YTN; PAM sequence: CTG
caaagggtggtttgtgggcc

SEQ ID NO: 23704 - DNA, 20 bp, Artificial Sequence
  Description of Artificial Sequence: Synthetic oligonucleotide
  Target: COL7A1; (-) strand; PAM type: YTN; PAM sequence: TTA
tgctgcaaagggtggtttgt

SEQ ID NO: 23705 - DNA, 20 bp, Artificial Sequence
  Description of Artificial Sequence: Synthetic oligonucleotide
  Target: COL7A1; (-) strand; PAM type: YTN; PAM sequence: TTT
atgctgcaaagggtggtttg

SEQ ID NO: 23706 - DNA, 20 bp, Artificial Sequence
  Description of Artificial Sequence: Synthetic oligonucleotide
  Target: COL7A1; (-) strand; PAM type: YTN; PAM sequence: CTT
tatgctgcaaagggtggttt

SEQ ID NO: 23707 - DNA, 20 bp, Artificial Sequence
  Description of Artificial Sequence: Synthetic oligonucleotide
  Target: COL7A1; (-) strand; PAM type: YTN; PAM sequence: CTG
ggtctttatgctgcaaaggg

SEQ ID NO: 23708 - DNA, 20 bp, Artificial Sequence
  Description of Artificial Sequence: Synthetic oligonucleotide
  Target: COL7A1; (-) strand; PAM type: YTN; PAM sequence: CTG
aaacccctgggtctttatgc

SEQ ID NO: 23709 - DNA, 20 bp, Artificial Sequence
  Description of Artificial Sequence: Synthetic oligonucleotide
  Target: COL7A1; (-) strand; PAM type: YTN; PAM sequence: CTG
tgtggcatgcactgaaaccc

SEQ ID NO: 23710 - DNA, 20 bp, Artificial Sequence
  Description of Artificial Sequence: Synthetic oligonucleotide
  Target: COL7A1; (-) strand; PAM type: YTN; PAM sequence: CTG
tgtgcatcagtgtgtgggcc

SEQ ID NO: 23711 - DNA, 20 bp, Artificial Sequence
  Description of Artificial Sequence: Synthetic oligonucleotide
  Target: COL7A1; (-) strand; PAM type: YTN; PAM sequence: CTC
tgtgtgcatcagtgtgtggg

SEQ ID NO: 23712 - DNA, 20 bp, Artificial Sequence
  Description of Artificial Sequence: Synthetic oligonucleotide
  Target: COL7A1; (-) strand; PAM type: YTN; PAM sequence: CTG
tgccagtgtctctgtgtgca

SEQ ID NO: 23713 - DNA, 20 bp, Artificial Sequence
  Description of Artificial Sequence: Synthetic oligonucleotide
  Target: COL7A1; (-) strand; PAM type: YTN; PAM sequence: CTG
tgtgtgcatgtgcagctgtg

SEQ ID NO: 23714 - DNA, 20 bp, Artificial Sequence
  Description of Artificial Sequence: Synthetic oligonucleotide
  Target: COL7A1; (-) strand; PAM type: YTN; PAM sequence: TTG
tgagtgtgtgtgcgtctgtg

SEQ ID NO: 23715 - DNA, 20 bp, Artificial Sequence
  Description of Artificial Sequence: Synthetic oligonucleotide
  Target: COL7A1; (-) strand; PAM type: YTN; PAM sequence: CTT
gtgagtgtgtgtgcgtctgt

SEQ ID NO: 23716 - DNA, 20 bp, Artificial Sequence
  Description of Artificial Sequence: Synthetic oligonucleotide
  Target: COL7A1; (-) strand; PAM type: YTN; PAM sequence: CTG
gggtgcaggacttgtgagtg

SEQ ID NO: 23717 - DNA, 20 bp, Artificial Sequence
  Description of Artificial Sequence: Synthetic oligonucleotide
  Target: COL7A1; (-) strand; PAM type: YTN; PAM sequence: CTG
cacatgctggggtgcaggac

SEQ ID NO: 23718 - DNA, 20 bp, Artificial Sequence
  Description of Artificial Sequence: Synthetic oligonucleotide
  Target: COL7A1; (-) strand; PAM type: YTN; PAM sequence: CTC
tgcacatgctggggtgcagg

SEQ ID NO: 23719 - DNA, 20 bp, Artificial Sequence
  Description of Artificial Sequence: Synthetic oligonucleotide
  Target: COL7A1; (-) strand; PAM type: YTN; PAM sequence: CTG
tctctgcacatgctggggtg

SEQ ID NO: 23720 - DNA, 20 bp, Artificial Sequence
  Description of Artificial Sequence: Synthetic oligonucleotide
  Target: COL7A1; (-) strand; PAM type: YTN; PAM sequence: CTG
cctgtctctgcacatgctgg

SEQ ID NO: 23721 - DNA, 20 bp, Artificial Sequence
  Description of Artificial Sequence: Synthetic oligonucleotide
  Target: COL7A1; (-) strand; PAM type: YTN; PAM sequence: CTG
cagcctgcctgtctctgcac

SEQ ID NO: 23722 - DNA, 20 bp, Artificial Sequence
  Description of Artificial Sequence: Synthetic oligonucleotide
  Target: COL7A1; (-) strand; PAM type: YTN; PAM sequence: CTG
ggggtggagagatatatgtg

SEQ ID NO: 23723 - DNA, 20 bp, Artificial Sequence
  Description of Artificial Sequence: Synthetic oligonucleotide
  Target: COL7A1; (-) strand; PAM type: YTN; PAM sequence: CTC
ccagtggacagcagggctgg

SEQ ID NO: 23724 - DNA, 20 bp, Artificial Sequence
  Description of Artificial Sequence: Synthetic oligonucleotide
  Target: COL7A1; (-) strand; PAM type: YTN; PAM sequence: CTG
aacctcccagtggacagcag

SEQ ID NO: 23725 - DNA, 20 bp, Artificial Sequence
  Description of Artificial Sequence: Synthetic oligonucleotide
  Target: COL7A1; (-) strand; PAM type: YTN; PAM sequence: CTC
ctgaacctcccagtggacag

SEQ ID NO: 23726 - DNA, 20 bp, Artificial Sequence
  Description of Artificial Sequence: Synthetic oligonucleotide
  Target: COL7A1; (-) strand; PAM type: YTN; PAM sequence: CTG
gaaactcctgaacctcccag

SEQ ID NO: 23727 - DNA, 20 bp, Artificial Sequence
  Description of Artificial Sequence: Synthetic oligonucleotide
  Target: COL7A1; (-) strand; PAM type: YTN; PAM sequence: TTC
ctggaaactcctgaacctcc

SEQ ID NO: 23728 - DNA, 20 bp, Artificial Sequence
  Description of Artificial Sequence: Synthetic oligonucleotide
  Target: COL7A1; (-) strand; PAM type: YTN; PAM sequence: CTG
gaattcctggaaactcctga

SEQ ID NO: 23729 - DNA, 20 bp, Artificial Sequence
  Description of Artificial Sequence: Synthetic oligonucleotide
  Target: COL7A1; (-) strand; PAM type: YTN; PAM sequence: CTG
gaaatggccagaggaagctg

SEQ ID NO: 23730 - DNA, 20 bp, Artificial Sequence
  Description of Artificial Sequence: Synthetic oligonucleotide
  Target: COL7A1; (-) strand; PAM type: YTN; PAM sequence: TTG
ctggaaatggccagaggaag

SEQ ID NO: 23731 - DNA, 20 bp, Artificial Sequence
  Description of Artificial Sequence: Synthetic oligonucleotide
  Target: COL7A1; (-) strand; PAM type: YTN; PAM sequence: TTT
gctggaaatggccagaggaa

SEQ ID NO: 23732 - DNA, 20 bp, Artificial Sequence
  Description of Artificial Sequence: Synthetic oligonucleotide
  Target: COL7A1; (-) strand; PAM type: YTN; PAM sequence: CTT
tgctggaaatggccagagga

SEQ ID NO: 23733 - DNA, 20 bp, Artificial Sequence
  Description of Artificial Sequence: Synthetic oligonucleotide
  Target: COL7A1; (-) strand; PAM type: YTN; PAM sequence: CTG
ggcccagggagacacagggg

SEQ ID NO: 23734 - DNA, 20 bp, Artificial Sequence
  Description of Artificial Sequence: Synthetic oligonucleotide
  Target: COL7A1; (-) strand; PAM type: YTN; PAM sequence: TTG
tgagccctgggcccagggag

SEQ ID NO: 23735 - DNA, 20 bp, Artificial Sequence
  Description of Artificial Sequence: Synthetic oligonucleotide
  Target: COL7A1; (-) strand; PAM type: YTN; PAM sequence: CTT
gtgagccctgggcccaggga

SEQ ID NO: 23736 - DNA, 20 bp, Artificial Sequence
  Description of Artificial Sequence: Synthetic oligonucleotide
  Target: COL7A1; (-) strand; PAM type: YTN; PAM sequence: CTC
cttgtgagccctgggcccag

SEQ ID NO: 23737 - DNA, 20 bp, Artificial Sequence
  Description of Artificial Sequence: Synthetic oligonucleotide
  Target: COL7A1; (-) strand; PAM type: YTN; PAM sequence: TTC
acactccttgtgagccctgg

SEQ ID NO: 23738 - DNA, 20 bp, Artificial Sequence
  Description of Artificial Sequence: Synthetic oligonucleotide
  Target: COL7A1; (-) strand; PAM type: YTN; PAM sequence: CTT
cacactccttgtgagccctg

SEQ ID NO: 23739 - DNA, 20 bp, Artificial Sequence
  Description of Artificial Sequence: Synthetic oligonucleotide
  Target: COL7A1; (-) strand; PAM type: YTN; PAM sequence: CTG
aagtcagaacttcacactcc

SEQ ID NO: 23740 - DNA, 20 bp, Artificial Sequence
  Description of Artificial Sequence: Synthetic oligonucleotide
  Target: COL7A1; (-) strand; PAM type: YTN; PAM sequence: CTA
taacctgaagtcagaacttc

SEQ ID NO: 23741 - DNA, 20 bp, Artificial Sequence
  Description of Artificial Sequence: Synthetic oligonucleotide
  Target: COL7A1; (-) strand; PAM type: YTN; PAM sequence: TTC
tataacctgaagtcagaact

SEQ ID NO: 23742 - DNA, 20 bp, Artificial Sequence
  Description of Artificial Sequence: Synthetic oligonucleotide
  Target: COL7A1; (-) strand; PAM type: YTN; PAM sequence: TTG
gtgacatggttctataacct

SEQ ID NO: 23743 - DNA, 20 bp, Artificial Sequence
  Description of Artificial Sequence: Synthetic oligonucleotide
  Target: COL7A1; (-) strand; PAM type: YTN; PAM sequence: CTT
ggtgacatggttctataacc

SEQ ID NO: 23744 - DNA, 20 bp, Artificial Sequence
  Description of Artificial Sequence: Synthetic oligonucleotide
  Target: COL7A1; (-) strand; PAM type: YTN; PAM sequence: CTG
cttggtgacatggttctata

SEQ ID NO: 23745 - DNA, 20 bp, Artificial Sequence
  Description of Artificial Sequence: Synthetic oligonucleotide
  Target: COL7A1; (-) strand; PAM type: YTN; PAM sequence: TTC
ccaggctgcttggtgacatg

SEQ ID NO: 23746 - DNA, 20 bp, Artificial Sequence
  Description of Artificial Sequence: Synthetic oligonucleotide
  Target: COL7A1; (-) strand; PAM type: YTN; PAM sequence: CTG
gaaggaggaagtgcagatca

SEQ ID NO: 23747 - DNA, 20 bp, Artificial Sequence
  Description of Artificial Sequence: Synthetic oligonucleotide
  Target: COL7A1; (-) strand; PAM type: YTN; PAM sequence: CTG
tggcaggctggaaggaggaa

SEQ ID NO: 23748 - DNA, 20 bp, Artificial Sequence
  Description of Artificial Sequence: Synthetic oligonucleotide
  Target: COL7A1; (-) strand; PAM type: YTN; PAM sequence: CTG
tacgccctgtggcaggctgg

SEQ ID NO: 23749 - DNA, 20 bp, Artificial Sequence
  Description of Artificial Sequence: Synthetic oligonucleotide
  Target: COL7A1; (-) strand; PAM type: YTN; PAM sequence: CTA
ctgtacgccctgtggcaggc

SEQ ID NO: 23750 - DNA, 20 bp, Artificial Sequence
  Description of Artificial Sequence: Synthetic oligonucleotide
  Target: COL7A1; (-) strand; PAM type: YTN; PAM sequence: CTA
agcacctactgtacgccctg

SEQ ID NO: 23751 - DNA, 20 bp, Artificial Sequence
  Description of Artificial Sequence: Synthetic oligonucleotide
  Target: COL7A1; (-) strand; PAM type: YTN; PAM sequence: CTG
aatccctaagcacctactgt

SEQ ID NO: 23752 - DNA, 20 bp, Artificial Sequence
  Description of Artificial Sequence: Synthetic oligonucleotide
  Target: COL7A1; (-) strand; PAM type: YTN; PAM sequence: CTG
gtcctgaatccctaagcacc

SEQ ID NO: 23753 - DNA, 20 bp, Artificial Sequence
  Description of Artificial Sequence: Synthetic oligonucleotide
  Target: COL7A1; (-) strand; PAM type: YTN; PAM sequence: TTG
ctggtcctgaatccctaagc

SEQ ID NO: 23754 - DNA, 20 bp, Artificial Sequence
  Description of Artificial Sequence: Synthetic oligonucleotide
  Target: COL7A1; (-) strand; PAM type: YTN; PAM sequence: CTT
gctggtcctgaatccctaag

SEQ ID NO: 23755 - DNA, 20 bp, Artificial Sequence
  Description of Artificial Sequence: Synthetic oligonucleotide
  Target: COL7A1; (-) strand; PAM type: YTN; PAM sequence: CTG
tgtgcccttgctggtcctga

SEQ ID NO: 23756 - DNA, 20 bp, Artificial Sequence
  Description of Artificial Sequence: Synthetic oligonucleotide
  Target: COL7A1; (-) strand; PAM type: YTN; PAM sequence: TTC
tgtgtgcccttgctggtcct

SEQ ID NO: 23757 - DNA, 20 bp, Artificial Sequence
  Description of Artificial Sequence: Synthetic oligonucleotide
  Target: COL7A1; (-) strand; PAM type: YTN; PAM sequence: TTT
ctgtgtgcccttgctggtcc

SEQ ID NO: 23758 - DNA, 20 bp, Artificial Sequence
  Description of Artificial Sequence: Synthetic oligonucleotide
  Target: COL7A1; (-) strand; PAM type: YTN; PAM sequence: CTT
tctgtgtgcccttgctggtc

SEQ ID NO: 23759 - DNA, 20 bp, Artificial Sequence
  Description of Artificial Sequence: Synthetic oligonucleotide
  Target: COL7A1; (-) strand; PAM type: YTN; PAM sequence: CTG
aaccctttctgtgtgccctt

SEQ ID NO: 23760 - DNA, 20 bp, Artificial Sequence
  Description of Artificial Sequence: Synthetic oligonucleotide
  Target: COL7A1; (-) strand; PAM type: YTN; PAM sequence: CTC
tgaaccctttctgtgtgccc

SEQ ID NO: 23761 - DNA, 20 bp, Artificial Sequence
  Description of Artificial Sequence: Synthetic oligonucleotide
  Target: COL7A1; (-) strand; PAM type: YTN; PAM sequence: CTC
tctgaaccctttctgtgtgc

SEQ ID NO: 23762 - DNA, 20 bp, Artificial Sequence
  Description of Artificial Sequence: Synthetic oligonucleotide
  Target: COL7A1; (-) strand; PAM type: YTN; PAM sequence: TTG
gtcatgaacctctctgaacc

SEQ ID NO: 23763 - DNA, 20 bp, Artificial Sequence
  Description of Artificial Sequence: Synthetic oligonucleotide
  Target: COL7A1; (-) strand; PAM type: YTN; PAM sequence: TTT
ggtcatgaacctctctgaac

SEQ ID NO: 23764 - DNA, 20 bp, Artificial Sequence
  Description of Artificial Sequence: Synthetic oligonucleotide
  Target: COL7A1; (-) strand; PAM type: YTN; PAM sequence: CTC
agtttggtcatgaacctctc

SEQ ID NO: 23765 - DNA, 20 bp, Artificial Sequence
  Description of Artificial Sequence: Synthetic oligonucleotide
  Target: COL7A1; (-) strand; PAM type: YTN; PAM sequence: CTG
tgtactcagtttggtcatga

SEQ ID NO: 23766 - DNA, 20 bp, Artificial Sequence
  Description of Artificial Sequence: Synthetic oligonucleotide
  Target: COL7A1; (-) strand; PAM type: YTN; PAM sequence: CTG
ctgtgtactcagtttggtca

SEQ ID NO: 23767 - DNA, 20 bp, Artificial Sequence
  Description of Artificial Sequence: Synthetic oligonucleotide
  Target: COL7A1; (-) strand; PAM type: YTN; PAM sequence: CTG
aacacctgctgtgtactcag

SEQ ID NO: 23768 - DNA, 20 bp, Artificial Sequence
  Description of Artificial Sequence: Synthetic oligonucleotide
  Target: COL7A1; (-) strand; PAM type: YTN; PAM sequence: CTC
tgaacacctgctgtgtactc

SEQ ID NO: 23769 - DNA, 20 bp, Artificial Sequence
  Description of Artificial Sequence: Synthetic oligonucleotide
  Target: COL7A1; (-) strand; PAM type: YTN; PAM sequence: TTC
tctgaacacctgctgtgtac

SEQ ID NO: 23770 - DNA, 20 bp, Artificial Sequence
  Description of Artificial Sequence: Synthetic oligonucleotide
  Target: COL7A1; (-) strand; PAM type: YTN; PAM sequence: CTT
ctctgaacacctgctgtgta

SEQ ID NO: 23771 - DNA, 20 bp, Artificial Sequence
  Description of Artificial Sequence: Synthetic oligonucleotide
  Target: COL7A1; (-) strand; PAM type: YTN; PAM sequence: CTG
agcttctctgaacacctgct

SEQ ID NO: 23772 - DNA, 20 bp, Artificial Sequence
  Description of Artificial Sequence: Synthetic oligonucleotide
  Target: COL7A1; (-) strand; PAM type: YTN; PAM sequence: CTG
tgccagtcctgagcttctct

SEQ ID NO: 23773 - DNA, 20 bp, Artificial Sequence
  Description of Artificial Sequence: Synthetic oligonucleotide
  Target: COL7A1; (-) strand; PAM type: YTN; PAM sequence: CTG
tgtgccctgtgccagtcctg

SEQ ID NO: 23774 - DNA, 20 bp, Artificial Sequence
  Description of Artificial Sequence: Synthetic oligonucleotide
  Target: COL7A1; (-) strand; PAM type: YTN; PAM sequence: CTG
ctgtgtgccctgtgccagtc

SEQ ID NO: 23775 - DNA, 20 bp, Artificial Sequence
  Description of Artificial Sequence: Synthetic oligonucleotide
  Target: COL7A1; (-) strand; PAM type: YTN; PAM sequence: CTA
gggtgtctgctgtgtgccct

SEQ ID NO: 23776 - DNA, 20 bp, Artificial Sequence
  Description of Artificial Sequence: Synthetic oligonucleotide
  Target: COL7A1; (-) strand; PAM type: YTN; PAM sequence: TTC
tagggtgtctgctgtgtgcc

SEQ ID NO: 23777 - DNA, 20 bp, Artificial Sequence
  Description of Artificial Sequence: Synthetic oligonucleotide
  Target: COL7A1; (-) strand; PAM type: YTN; PAM sequence: CTT
ctagggtgtctgctgtgtgc

SEQ ID NO: 23778 - DNA, 20 bp, Artificial Sequence
  Description of Artificial Sequence: Synthetic oligonucleotide
  Target: COL7A1; (-) strand; PAM type: YTN; PAM sequence: TTA
aaccagcacttctagggtgt

SEQ ID NO: 23779 - DNA, 20 bp, Artificial Sequence
  Description of Artificial Sequence: Synthetic oligonucleotide
  Target: COL7A1; (-) strand; PAM type: YTN; PAM sequence: CTT
aaaccagcacttctagggtg

SEQ ID NO: 23780 - DNA, 20 bp, Artificial Sequence
  Description of Artificial Sequence: Synthetic oligonucleotide
  Target: COL7A1; (-) strand; PAM type: YTN; PAM sequence: TTA
gcccttaaaccagcacttct

SEQ ID NO: 23781 - DNA, 20 bp, Artificial Sequence
  Description of Artificial Sequence: Synthetic oligonucleotide
  Target: COL7A1; (-) strand; PAM type: YTN; PAM sequence: TTT
agcccttaaaccagcacttc

SEQ ID NO: 23782 - DNA, 20 bp, Artificial Sequence
  Description of Artificial Sequence: Synthetic oligonucleotide
  Target: COL7A1; (-) strand; PAM type: YTN; PAM sequence: CTT
tagcccttaaaccagcactt

SEQ ID NO: 23783 - DNA, 20 bp, Artificial Sequence
  Description of Artificial Sequence: Synthetic oligonucleotide
  Target: COL7A1; (-) strand; PAM type: YTN; PAM sequence: TTC
acatgatgtggctttagccc

SEQ ID NO: 23784 - DNA, 20 bp, Artificial Sequence
  Description of Artificial Sequence: Synthetic oligonucleotide
  Target: COL7A1; (-) strand; PAM type: YTN; PAM sequence: TTT
cacatgatgtggctttagcc

SEQ ID NO: 23785 - DNA, 20 bp, Artificial Sequence
  Description of Artificial Sequence: Synthetic oligonucleotide
  Target: COL7A1; (-) strand; PAM type: YTN; PAM sequence: TTA
ggatgggtttcacatgatgt

SEQ ID NO: 23786 - DNA, 20 bp, Artificial Sequence
  Description of Artificial Sequence: Synthetic oligonucleotide
  Target: COL7A1; (-) strand; PAM type: YTN; PAM sequence: TTT
aggatgggtttcacatgatg

SEQ ID NO: 23787 - DNA, 20 bp, Artificial Sequence
  Description of Artificial Sequence: Synthetic oligonucleotide
  Target: COL7A1; (-) strand; PAM type: YTN; PAM sequence: CTC
atttaggatgggtttcacat

SEQ ID NO: 23788 - DNA, 20 bp, Artificial Sequence
  Description of Artificial Sequence: Synthetic oligonucleotide
  Target: COL7A1; (-) strand; PAM type: YTN; PAM sequence: CTA
gaggctcatttaggatgggt

SEQ ID NO: 23789 - DNA, 20 bp, Artificial Sequence
  Description of Artificial Sequence: Synthetic oligonucleotide
  Target: COL7A1; (-) strand; PAM type: YTN; PAM sequence: TTG
gggaagtctagaggctcatt

SEQ ID NO: 23790 - DNA, 20 bp, Artificial Sequence
  Description of Artificial Sequence: Synthetic oligonucleotide
  Target: COL7A1; (-) strand; PAM type: YTN; PAM sequence: TTT
ggggaagtctagaggctcat

SEQ ID NO: 23791 - DNA, 20 bp, Artificial Sequence
  Description of Artificial Sequence: Synthetic oligonucleotide
  Target: COL7A1; (-) strand; PAM type: YTN; PAM sequence: TTG
gggtcacaccagtttgggga

SEQ ID NO: 23792 - DNA, 20 bp, Artificial Sequence
  Description of Artificial Sequence: Synthetic oligonucleotide
  Target: COL7A1; (-) strand; PAM type: YTN; PAM sequence: CTT
ggggtcacaccagtttgggg

SEQ ID NO: 23793 - DNA, 20 bp, Artificial Sequence
  Description of Artificial Sequence: Synthetic oligonucleotide
  Target: COL7A1; (-) strand; PAM type: YTN; PAM sequence: CTC
ttggggtcacaccagtttgg

SEQ ID NO: 23794 - DNA, 20 bp, Artificial Sequence
  Description of Artificial Sequence: Synthetic oligonucleotide
  Target: COL7A1; (-) strand; PAM type: YTN; PAM sequence: TTC
ctcttggggtcacaccagtt

SEQ ID NO: 23795 - DNA, 20 bp, Artificial Sequence
  Description of Artificial Sequence: Synthetic oligonucleotide
  Target: COL7A1; (-) strand; PAM type: YTN; PAM sequence: TTT
cctcttggggtcacaccagt

SEQ ID NO: 23796 - DNA, 20 bp, Artificial Sequence
  Description of Artificial Sequence: Synthetic oligonucleotide
  Target: COL7A1; (-) strand; PAM type: YTN; PAM sequence: TTG
tccaggtttcctcttggggt

SEQ ID NO: 23797 - DNA, 20 bp, Artificial Sequence
  Description of Artificial Sequence: Synthetic oligonucleotide
  Target: COL7A1; (-) strand; PAM type: YTN; PAM sequence: TTT
gtccaggtttcctcttgggg

SEQ ID NO: 23798 - DNA, 20 bp, Artificial Sequence
  Description of Artificial Sequence: Synthetic oligonucleotide
  Target: COL7A1; (-) strand; PAM type: YTN; PAM sequence: CTC
caagggatcatgtttgtcca

SEQ ID NO: 23799 - DNA, 20 bp, Artificial Sequence
  Description of Artificial Sequence: Synthetic oligonucleotide
  Target: COL7A1; (-) strand; PAM type: YTN; PAM sequence: CTG
gcctccaagggatcatgttt

SEQ ID NO: 23800 - DNA, 20 bp, Artificial Sequence
  Description of Artificial Sequence: Synthetic oligonucleotide
  Target: COL7A1; (-) strand; PAM type: YTN; PAM sequence: TTG
ctggcctccaagggatcatg

SEQ ID NO: 23801 - DNA, 20 bp, Artificial Sequence
  Description of Artificial Sequence: Synthetic oligonucleotide
  Target: COL7A1; (-) strand; PAM type: YTN; PAM sequence: TTT
gctggcctccaagggatcat

SEQ ID NO: 23802 - DNA, 20 bp, Artificial Sequence
  Description of Artificial Sequence: Synthetic oligonucleotide
  Target: COL7A1; (-) strand; PAM type: YTN; PAM sequence: CTT
tgctggcctccaagggatca

SEQ ID NO: 23803 - DNA, 20 bp, Artificial Sequence
  Description of Artificial Sequence: Synthetic oligonucleotide
  Target: COL7A1; (-) strand; PAM type: YTN; PAM sequence: CTC
tttgctggcctccaagggat

SEQ ID NO: 23804 - DNA, 20 bp, Artificial Sequence
  Description of Artificial Sequence: Synthetic oligonucleotide
  Target: COL7A1; (-) strand; PAM type: YTN; PAM sequence: CTG
ctctttgctggcctccaagg

SEQ ID NO: 23805 - DNA, 20 bp, Artificial Sequence
  Description of Artificial Sequence: Synthetic oligonucleotide
  Target: COL7A1; (-) strand; PAM type: YTN; PAM sequence: CTC
tgctctttgctggcctccaa

SEQ ID NO: 23806 - DNA, 20 bp, Artificial Sequence
  Description of Artificial Sequence: Synthetic oligonucleotide
  Target: COL7A1; (-) strand; PAM type: YTN; PAM sequence: CTG
ctctgctctttgctggcctc

SEQ ID NO: 23807 - DNA, 20 bp, Artificial Sequence
  Description of Artificial Sequence: Synthetic oligonucleotide
  Target: COL7A1; (-) strand; PAM type: YTN; PAM sequence: CTC
ctgctctgctctttgctggc

SEQ ID NO: 23808 - DNA, 20 bp, Artificial Sequence
  Description of Artificial Sequence: Synthetic oligonucleotide
  Target: COL7A1; (-) strand; PAM type: YTN; PAM sequence: CTG
cccaggccctcctgctctgc

SEQ ID NO: 23809 - DNA, 20 bp, Artificial Sequence
  Description of Artificial Sequence: Synthetic oligonucleotide
  Target: COL7A1; (-) strand; PAM type: YTN; PAM sequence: CTG
gcgctgcccaggccctcctg

SEQ ID NO: 23810 - DNA, 20 bp, Artificial Sequence
  Description of Artificial Sequence: Synthetic oligonucleotide
  Target: COL7A1; (-) strand; PAM type: YTN; PAM sequence: CTC
cagcccagggggagggaccg

SEQ ID NO: 23811 - DNA, 20 bp, Artificial Sequence
  Description of Artificial Sequence: Synthetic oligonucleotide
  Target: COL7A1; (-) strand; PAM type: YTN; PAM sequence: TTC
ctccagcccagggggaggga

SEQ ID NO: 23812 - DNA, 20 bp, Artificial Sequence
  Description of Artificial Sequence: Synthetic oligonucleotide
  Target: COL7A1; (-) strand; PAM type: YTN; PAM sequence: CTT
cctccagcccagggggaggg

SEQ ID NO: 23813 - DNA, 20 bp, Artificial Sequence
  Description of Artificial Sequence: Synthetic oligonucleotide
  Target: COL7A1; (-) strand; PAM type: YTN; PAM sequence: CTA
taaatagtgtcttcctccag

SEQ ID NO: 23814 - DNA, 20 bp, Artificial Sequence
  Description of Artificial Sequence: Synthetic oligonucleotide
  Target: COL7A1; (-) strand; PAM type: YTN; PAM sequence: CTG
ggccaagggggaactataaa

SEQ ID NO: 23815 - DNA, 20 bp, Artificial Sequence
  Description of Artificial Sequence: Synthetic oligonucleotide
  Target: COL7A1; (-) strand; PAM type: YTN; PAM sequence: CTG
caagggagagggggctgggc

SEQ ID NO: 23816 - DNA, 20 bp, Artificial Sequence
  Description of Artificial Sequence: Synthetic oligonucleotide
  Target: COL7A1; (-) strand; PAM type: YTN; PAM sequence: CTG
tcgccctgcaagggagaggg

SEQ ID NO: 23817 - DNA, 20 bp, Artificial Sequence
  Description of Artificial Sequence: Synthetic oligonucleotide
  Target: COL7A1; (-) strand; PAM type: YTN; PAM sequence: CTG
tcagtggcccgaaggagggg

SEQ ID NO: 23818 - DNA, 20 bp, Artificial Sequence
  Description of Artificial Sequence: Synthetic oligonucleotide
  Target: COL7A1; (-) strand; PAM type: YTN; PAM sequence: TTC
atctgtcagtggcccgaagg

SEQ ID NO: 23819 - DNA, 20 bp, Artificial Sequence
  Description of Artificial Sequence: Synthetic oligonucleotide
  Target: COL7A1; (-) strand; PAM type: YTN; PAM sequence: CTG
agggccattcatctgtcagt

SEQ ID NO: 23820 - DNA, 20 bp, Artificial Sequence
  Description of Artificial Sequence: Synthetic oligonucleotide
  Target: COL7A1; (-) strand; PAM type: YTN; PAM sequence: CTC
tgagggccattcatctgtca

SEQ ID NO: 23821 - DNA, 20 bp, Artificial Sequence
  Description of Artificial Sequence: Synthetic oligonucleotide
  Target: COL7A1; (-) strand; PAM type: YTN; PAM sequence: TTA
ggggtgctctgagggccatt

SEQ ID NO: 23822 - DNA, 20 bp, Artificial Sequence
  Description of Artificial Sequence: Synthetic oligonucleotide
  Target: COL7A1; (-) strand; PAM type: YTN; PAM sequence: TTT
aggggtgctctgagggccat

SEQ ID NO: 23823 - DNA, 20 bp, Artificial Sequence
  Description of Artificial Sequence: Synthetic oligonucleotide
  Target: COL7A1; (-) strand; PAM type: YTN; PAM sequence: CTG
gtttaggggtgctctgaggg

SEQ ID NO: 23824 - DNA, 20 bp, Artificial Sequence
  Description of Artificial Sequence: Synthetic oligonucleotide
  Target: COL7A1; (-) strand; PAM type: YTN; PAM sequence: CTC
ctggtttaggggtgctctga

SEQ ID NO: 23825 - DNA, 20 bp, Artificial Sequence
  Description of Artificial Sequence: Synthetic oligonucleotide
  Target: COL7A1; (-) strand; PAM type: YTN; PAM sequence: CTC
tcctggtttaggggtgctct

SEQ ID NO: 23826 - DNA, 20 bp, Artificial Sequence
  Description of Artificial Sequence: Synthetic oligonucleotide
  Target: COL7A1; (-) strand; PAM type: YTN; PAM sequence: TTG
gggggtctctcctggtttag

SEQ ID NO: 23827 - DNA, 20 bp, Artificial Sequence
  Description of Artificial Sequence: Synthetic oligonucleotide
  Target: COL7A1; (-) strand; PAM type: YTN; PAM sequence: CTG
gaggggtgcgagagtgttgg

SEQ ID NO: 23828 - DNA, 20 bp, Artificial Sequence
  Description of Artificial Sequence: Synthetic oligonucleotide
  Target: COL7A1; (-) strand; PAM type: YTN; PAM sequence: CTG
gatgaagtcagggtggtgct

SEQ ID NO: 23829 - DNA, 20 bp, Artificial Sequence
  Description of Artificial Sequence: Synthetic oligonucleotide
  Target: COL7A1; (-) strand; PAM type: YTN; PAM sequence: TTA
gggaaagacctggatgaagt

SEQ ID NO: 23830 - DNA, 20 bp, Artificial Sequence
  Description of Artificial Sequence: Synthetic oligonucleotide
  Target: COL7A1; (-) strand; PAM type: YTN; PAM sequence: CTG
gggccggggagcagcaggcg

SEQ ID NO: 23831 - DNA, 20 bp, Artificial Sequence
  Description of Artificial Sequence: Synthetic oligonucleotide
  Target: COL7A1; (-) strand; PAM type: YTN; PAM sequence: CTG
accgacctggggccggggag

SEQ ID NO: 23832 - DNA, 20 bp, Artificial Sequence
  Description of Artificial Sequence: Synthetic oligonucleotide
  Target: COL7A1; (-) strand; PAM type: YTN; PAM sequence: CTC
cctgaccgacctggggccgg

SEQ ID NO: 23833 - DNA, 20 bp, Artificial Sequence
  Description of Artificial Sequence: Synthetic oligonucleotide
  Target: COL7A1; (-) strand; PAM type: YTN; PAM sequence: TTA
ggaggcagctccctgaccga

SEQ ID NO: 23834 - DNA, 20 bp, Artificial Sequence
  Description of Artificial Sequence: Synthetic oligonucleotide
  Target: COL7A1; (-) strand; PAM type: YTN; PAM sequence: CTC
gttaggaggcagctccctga

SEQ ID NO: 23835 - DNA, 20 bp, Artificial Sequence
  Description of Artificial Sequence: Synthetic oligonucleotide
  Target: COL7A1; (-) strand; PAM type: YTN; PAM sequence: TTG
caggatggacagaggctcgt

SEQ ID NO: 23836 - DNA, 20 bp, Artificial Sequence
  Description of Artificial Sequence: Synthetic oligonucleotide
  Target: COL7A1; (-) strand; PAM type: YTN; PAM sequence: TTG
gttgcaggatggacagaggc

SEQ ID NO: 23837 - DNA, 20 bp, Artificial Sequence
  Description of Artificial Sequence: Synthetic oligonucleotide
  Target: COL7A1; (-) strand; PAM type: YTN; PAM sequence: TTT
ggttgcaggatggacagagg

SEQ ID NO: 23838 - DNA, 20 bp, Artificial Sequence
  Description of Artificial Sequence: Synthetic oligonucleotide
  Target: COL7A1; (-) strand; PAM type: YTN; PAM sequence: CTG
gccagtttggttgcaggatg

SEQ ID NO: 23839 - DNA, 20 bp, Artificial Sequence
  Description of Artificial Sequence: Synthetic oligonucleotide
  Target: COL7A1; (-) strand; PAM type: YTN; PAM sequence: CTG
cagggggcagtggccctggc

SEQ ID NO: 23840 - DNA, 20 bp, Artificial Sequence
  Description of Artificial Sequence: Synthetic oligonucleotide
  Target: COL7A1; (-) strand; PAM type: YTN; PAM sequence: CTG
gagctgcagggggcagtggc

SEQ ID NO: 23841 - DNA, 20 bp, Artificial Sequence
  Description of Artificial Sequence: Synthetic oligonucleotide
  Target: COL7A1; (-) strand; PAM type: YTN; PAM sequence: CTC
tggagctgcagggggcagtg

SEQ ID NO: 23842 - DNA, 20 bp, Artificial Sequence
  Description of Artificial Sequence: Synthetic oligonucleotide
  Target: COL7A1; (-) strand; PAM type: YTN; PAM sequence: TTA
ccccactctggagctgcagg

SEQ ID NO: 23843 - DNA, 20 bp, Artificial Sequence
  Description of Artificial Sequence: Synthetic oligonucleotide
  Target: COL7A1; (-) strand; PAM type: YTN; PAM sequence: CTA
ggcggggttaccccactctg

SEQ ID NO: 23844 - DNA, 20 bp, Artificial Sequence
  Description of Artificial Sequence: Synthetic oligonucleotide
  Target: COL7A1; (-) strand; PAM type: YTN; PAM sequence: TTC
agagtgctaggcggggttac

SEQ ID NO: 23845 - DNA, 20 bp, Artificial Sequence
  Description of Artificial Sequence: Synthetic oligonucleotide
  Target: COL7A1; (-) strand; PAM type: YTN; PAM sequence: CTT
cagagtgctaggcggggtta

SEQ ID NO: 23846 - DNA, 20 bp, Artificial Sequence
  Description of Artificial Sequence: Synthetic oligonucleotide
  Target: COL7A1; (-) strand; PAM type: YTN; PAM sequence: CTC
ttcagagtgctaggcggggt

SEQ ID NO: 23847 - DNA, 20 bp, Artificial Sequence
  Description of Artificial Sequence: Synthetic oligonucleotide
  Target: COL7A1; (-) strand; PAM type: YTN; PAM sequence: CTC
tcttcagagtgctaggcggg

SEQ ID NO: 23848 - DNA, 20 bp, Artificial Sequence
  Description of Artificial Sequence: Synthetic oligonucleotide
  Target: COL7A1; (-) strand; PAM type: YTN; PAM sequence: CTC
tctcttcagagtgctaggcg

SEQ ID NO: 23849 - DNA, 20 bp, Artificial Sequence
  Description of Artificial Sequence: Synthetic oligonucleotide
  Target: COL7A1; (-) strand; PAM type: YTN; PAM sequence: TTC
tctctcttcagagtgctagg

SEQ ID NO: 23850 - DNA, 20 bp, Artificial Sequence
  Description of Artificial Sequence: Synthetic oligonucleotide
  Target: COL7A1; (-) strand; PAM type: YTN; PAM sequence: CTT
ctctctcttcagagtgctag

SEQ ID NO: 23851 - DNA, 20 bp, Artificial Sequence
  Description of Artificial Sequence: Synthetic oligonucleotide
  Target: COL7A1; (-) strand; PAM type: YTN; PAM sequence: CTG
caggagccgcaggagtcgct

SEQ ID NO: 23852 - DNA, 20 bp, Artificial Sequence
  Description of Artificial Sequence: Synthetic oligonucleotide
  Target: COL7A1; (-) strand; PAM type: YTN; PAM sequence: CTG
gggaggcggggctgcaggag

SEQ ID NO: 23853 - DNA, 20 bp, Artificial Sequence
  Description of Artificial Sequence: Synthetic oligonucleotide
  Target: COL7A1; (-) strand; PAM type: YTN; PAM sequence: CTA
cagtgggctggggaggcggg

SEQ ID NO: 23854 - DNA, 20 bp, Artificial Sequence
  Description of Artificial Sequence: Synthetic oligonucleotide
  Target: COL7A1; (-) strand; PAM type: YTN; PAM sequence: CTG
tgggggcgggcctacagtgg

SEQ ID NO: 23855 - DNA, 20 bp, Artificial Sequence
  Description of Artificial Sequence: Synthetic oligonucleotide
  Target: COL7A1; (-) strand; PAM type: YTN; PAM sequence: TTG
taagcagccctgtgggggcg

SEQ ID NO: 23856 - DNA, 20 bp, Artificial Sequence
  Description of Artificial Sequence: Synthetic oligonucleotide
  Target: COL7A1; (-) strand; PAM type: YTN; PAM sequence: CTC
acagttgtaagcagccctgt

SEQ ID NO: 23857 - DNA, 20 bp, Artificial Sequence
  Description of Artificial Sequence: Synthetic oligonucleotide
  Target: COL7A1; (-) strand; PAM type: YTN; PAM sequence: CTG
ccctcacagttgtaagcagc

SEQ ID NO: 23858 - DNA, 20 bp, Artificial Sequence
  Description of Artificial Sequence: Synthetic oligonucleotide
  Target: COL7A1; (-) strand; PAM type: YTN; PAM sequence: CTG
gcgctgccctcacagttgta

SEQ ID NO: 23859 - DNA, 20 bp, Artificial Sequence
  Description of Artificial Sequence: Synthetic oligonucleotide
  Target: COL7A1; (-) strand; PAM type: YTN; PAM sequence: CTG
gagtgggggcactggcgctg

SEQ ID NO: 23860 - DNA, 20 bp, Artificial Sequence
  Description of Artificial Sequence: Synthetic oligonucleotide
  Target: COL7A1; (-) strand; PAM type: YTN; PAM sequence: CTG
actggagtgggggcactggc

SEQ ID NO: 23861 - DNA, 20 bp, Artificial Sequence
  Description of Artificial Sequence: Synthetic oligonucleotide
  Target: COL7A1; (-) strand; PAM type: YTN; PAM sequence: CTG
gccacagcgtggccggctga

SEQ ID NO: 23862 - DNA, 20 bp, Artificial Sequence
  Description of Artificial Sequence: Synthetic oligonucleotide
  Target: COL7A1; (-) strand; PAM type: YTN; PAM sequence: CTG
tactggccacagcgtggccg

SEQ ID NO: 23863 - DNA, 20 bp, Artificial Sequence
  Description of Artificial Sequence: Synthetic oligonucleotide
  Target: COL7A1; (-) strand; PAM type: YTN; PAM sequence: CTG
gcgggagagggagactgtac

SEQ ID NO: 23864 - DNA, 20 bp, Artificial Sequence
  Description of Artificial Sequence: Synthetic oligonucleotide
  Target: COL7A1; (-) strand; PAM type: YTN; PAM sequence: CTC
tggcgggagagggagactgt

SEQ ID NO: 23865 - DNA, 20 bp, Artificial Sequence
  Description of Artificial Sequence: Synthetic oligonucleotide
  Target: COL7A1; (-) strand; PAM type: YTN; PAM sequence: CTG
ggtggcatgggcagctctgg

SEQ ID NO: 23866 - DNA, 20 bp, Artificial Sequence
  Description of Artificial Sequence: Synthetic oligonucleotide
  Target: COL7A1; (-) strand; PAM type: YTN; PAM sequence: CTA
ggtggacatgaaggcagacg

SEQ ID NO: 23867 - DNA, 20 bp, Artificial Sequence
  Description of Artificial Sequence: Synthetic oligonucleotide
  Target: COL7A1; (-) strand; PAM type: YTN; PAM sequence: CTC
taggtggacatgaaggcaga

SEQ ID NO: 23868 - DNA, 20 bp, Artificial Sequence
  Description of Artificial Sequence: Synthetic oligonucleotide
  Target: COL7A1; (-) strand; PAM type: YTN; PAM sequence: CTG
tgcagacaactctaggtgga

SEQ ID NO: 23869 - DNA, 20 bp, Artificial Sequence
  Description of Artificial Sequence: Synthetic oligonucleotide
  Target: COL7A1; (-) strand; PAM type: YTN; PAM sequence: CTG
ggctgtgcagacaactctag

SEQ ID NO: 23870 - DNA, 20 bp, Artificial Sequence
  Description of Artificial Sequence: Synthetic oligonucleotide
  Target: COL7A1; (-) strand; PAM type: YTN; PAM sequence: CTC
tgggctgtgcagacaactct

SEQ ID NO: 23871 - DNA, 20 bp, Artificial Sequence
  Description of Artificial Sequence: Synthetic oligonucleotide
  Target: COL7A1; (-) strand; PAM type: YTN; PAM sequence: TTG
cccgcagagggggcaggcac

SEQ ID NO: 23872 - DNA, 20 bp, Artificial Sequence
  Description of Artificial Sequence: Synthetic oligonucleotide
  Target: COL7A1; (-) strand; PAM type: YTN; PAM sequence: CTT
gcccgcagagggggcaggca

SEQ ID NO: 23873 - DNA, 20 bp, Artificial Sequence
  Description of Artificial Sequence: Synthetic oligonucleotide
  Target: COL7A1; (-) strand; PAM type: YTN; PAM sequence: TTC
caggcagtgtggacgggctt

SEQ ID NO: 23874 - DNA, 20 bp, Artificial Sequence
  Description of Artificial Sequence: Synthetic oligonucleotide
  Target: COL7A1; (-) strand; PAM type: YTN; PAM sequence: TTT
ccaggcagtgtggacgggct

SEQ ID NO: 23875 - DNA, 20 bp, Artificial Sequence
  Description of Artificial Sequence: Synthetic oligonucleotide
  Target: COL7A1; (-) strand; PAM type: YTN; PAM sequence: CTT
tccaggcagtgtggacgggc

SEQ ID NO: 23876 - DNA, 20 bp, Artificial Sequence
  Description of Artificial Sequence: Synthetic oligonucleotide
  Target: COL7A1; (-) strand; PAM type: YTN; PAM sequence: CTG
actttccaggcagtgtggac

SEQ ID NO: 23877 - DNA, 20 bp, Artificial Sequence
  Description of Artificial Sequence: Synthetic oligonucleotide
  Target: COL7A1; (-) strand; PAM type: YTN; PAM sequence: CTG
ggccagagacagaactgact

SEQ ID NO: 23878 - DNA, 20 bp, Artificial Sequence
  Description of Artificial Sequence: Synthetic oligonucleotide
  Target: COL7A1; (-) strand; PAM type: YTN; PAM sequence: TTG
ctgggccagagacagaactg

SEQ ID NO: 23879 - DNA, 20 bp, Artificial Sequence
  Description of Artificial Sequence: Synthetic oligonucleotide
  Target: COL7A1; (-) strand; PAM type: YTN; PAM sequence: CTC
cattgctgggccagagacag

SEQ ID NO: 23880 - DNA, 20 bp, Artificial Sequence
  Description of Artificial Sequence: Synthetic oligonucleotide
  Target: COL7A1; (-) strand; PAM type: YTN; PAM sequence: TTC
acagcccaactccattgctg

SEQ ID NO: 23881 - DNA, 20 bp, Artificial Sequence
  Description of Artificial Sequence: Synthetic oligonucleotide
  Target: COL7A1; (-) strand; PAM type: YTN; PAM sequence: TTT
cacagcccaactccattgct

SEQ ID NO: 23882 - DNA, 20 bp, Artificial Sequence
  Description of Artificial Sequence: Synthetic oligonucleotide
  Target: COL7A1; (-) strand; PAM type: YTN; PAM sequence: CTG
atttcacagcccaactccat

SEQ ID NO: 23883 - DNA, 20 bp, Artificial Sequence
  Description of Artificial Sequence: Synthetic oligonucleotide
  Target: COL7A1; (-) strand; PAM type: YTN; PAM sequence: TTG
cctgatttcacagcccaact

SEQ ID NO: 23884 - DNA, 20 bp, Artificial Sequence
  Description of Artificial Sequence: Synthetic oligonucleotide
  Target: COL7A1; (-) strand; PAM type: YTN; PAM sequence: TTT
gcctgatttcacagcccaac

SEQ ID NO: 23885 - DNA, 20 bp, Artificial Sequence
  Description of Artificial Sequence: Synthetic oligonucleotide
  Target: COL7A1; (-) strand; PAM type: YTN; PAM sequence: TTT
tgcctgatttcacagcccaa

SEQ ID NO: 23886 - DNA, 20 bp, Artificial Sequence
  Description of Artificial Sequence: Synthetic oligonucleotide
  Target: COL7A1; (-) strand; PAM type: YTN; PAM sequence: CTA
ggttttgcctgatttcacag

SEQ ID NO: 23887 - DNA, 20 bp, Artificial Sequence
  Description of Artificial Sequence: Synthetic oligonucleotide
  Target: COL7A1; (-) strand; PAM type: YTN; PAM sequence: TTG
gaaggactaggttttgcctg

SEQ ID NO: 23888 - DNA, 20 bp, Artificial Sequence
  Description of Artificial Sequence: Synthetic oligonucleotide
  Target: COL7A1; (-) strand; PAM type: YTN; PAM sequence: TTT
ggaaggactaggttttgcct

SEQ ID NO: 23889 - DNA, 20 bp, Artificial Sequence
  Description of Artificial Sequence: Synthetic oligonucleotide
  Target: COL7A1; (-) strand; PAM type: YTN; PAM sequence: TTG
gtttggaaggactaggtttt

SEQ ID NO: 23890 - DNA, 20 bp, Artificial Sequence
  Description of Artificial Sequence: Synthetic oligonucleotide
  Target: COL7A1; (-) strand; PAM type: YTN; PAM sequence: CTT
ggtttggaaggactaggttt

SEQ ID NO: 23891 - DNA, 20 bp, Artificial Sequence
  Description of Artificial Sequence: Synthetic oligonucleotide
  Target: COL7A1; (-) strand; PAM type: YTN; PAM sequence: CTG
gtcccttggtttggaaggac

SEQ ID NO: 23892 - DNA, 20 bp, Artificial Sequence
  Description of Artificial Sequence: Synthetic oligonucleotide
  Target: COL7A1; (-) strand; PAM type: YTN; PAM sequence: CTG
acctggtcccttggtttgga

SEQ ID NO: 23893 - DNA, 20 bp, Artificial Sequence
  Description of Artificial Sequence: Synthetic oligonucleotide
  Target: COL7A1; (-) strand; PAM type: YTN; PAM sequence: TTA
actgacctggtcccttggtt

SEQ ID NO: 23894 - DNA, 20 bp, Artificial Sequence
  Description of Artificial Sequence: Synthetic oligonucleotide
  Target: COL7A1; (-) strand; PAM type: YTN; PAM sequence: CTC
cccggttaactgacctggtc

SEQ ID NO: 23895 - DNA, 20 bp, Artificial Sequence
  Description of Artificial Sequence: Synthetic oligonucleotide
  Target: COL7A1; (-) strand; PAM type: YTN; PAM sequence: CTA
gctccccggttaactgacct

SEQ ID NO: 23896 - DNA, 20 bp, Artificial Sequence
  Description of Artificial Sequence: Synthetic oligonucleotide
  Target: COL7A1; (-) strand; PAM type: YTN; PAM sequence: CTC
cctagctccccggttaactg

SEQ ID NO: 23897 - DNA, 20 bp, Artificial Sequence
  Description of Artificial Sequence: Synthetic oligonucleotide
  Target: COL7A1; (-) strand; PAM type: YTN; PAM sequence: TTC
ctccctagctccccggttaa

SEQ ID NO: 23898 - DNA, 20 bp, Artificial Sequence
  Description of Artificial Sequence: Synthetic oligonucleotide
  Target: COL7A1; (-) strand; PAM type: YTN; PAM sequence: CTT
cctccctagctccccggtta

SEQ ID NO: 23899 - DNA, 20 bp, Artificial Sequence
  Description of Artificial Sequence: Synthetic oligonucleotide
  Target: COL7A1; (-) strand; PAM type: YTN; PAM sequence: CTG
ccttcctccctagctccccg

SEQ ID NO: 23900 - DNA, 20 bp, Artificial Sequence
  Description of Artificial Sequence: Synthetic oligonucleotide
  Target: COL7A1; (-) strand; PAM type: YTN; PAM sequence: CTC
tgccttcctccctagctccc

SEQ ID NO: 23901 - DNA, 20 bp, Artificial Sequence
  Description of Artificial Sequence: Synthetic oligonucleotide
  Target: COL7A1; (-) strand; PAM type: YTN; PAM sequence: TTC
tctgccttcctccctagctc

SEQ ID NO: 23902 - DNA, 20 bp, Artificial Sequence
  Description of Artificial Sequence: Synthetic oligonucleotide
  Target: COL7A1; (-) strand; PAM type: YTN; PAM sequence: CTT
ctctgccttcctccctagct

SEQ ID NO: 23903 - DNA, 20 bp, Artificial Sequence
  Description of Artificial Sequence: Synthetic oligonucleotide
  Target: COL7A1; (-) strand; PAM type: YTN; PAM sequence: CTG
gcttctctgccttcctccct

SEQ ID NO: 23904 - DNA, 20 bp, Artificial Sequence
  Description of Artificial Sequence: Synthetic oligonucleotide
  Target: COL7A1; (-) strand; PAM type: YTN; PAM sequence: CTG
aaggatgggatgtgcgagaa

SEQ ID NO: 23905 - DNA, 20 bp, Artificial Sequence
  Description of Artificial Sequence: Synthetic oligonucleotide
  Target: COL7A1; (-) strand; PAM type: YTN; PAM sequence: CTC
aataaacacaaagcgactga

SEQ ID NO: 23906 - DNA, 20 bp, Artificial Sequence
  Description of Artificial Sequence: Synthetic oligonucleotide
  Target: COL7A1; (-) strand; PAM type: YTN; PAM sequence: CTG
cagcaggaggtgctcaataa

SEQ ID NO: 23907 - DNA, 20 bp, Artificial Sequence
  Description of Artificial Sequence: Synthetic oligonucleotide
  Target: COL7A1; (-) strand; PAM type: YTN; PAM sequence: TTG
tgtatgtagcagacatggag

SEQ ID NO: 23908 - DNA, 20 bp, Artificial Sequence
  Description of Artificial Sequence: Synthetic oligonucleotide
  Target: COL7A1; (-) strand; PAM type: YTN; PAM sequence: CTG
tgagcattgtgtatgtagca

SEQ ID NO: 23909 - DNA, 20 bp, Artificial Sequence
  Description of Artificial Sequence: Synthetic oligonucleotide
  Target: COL7A1; (-) strand; PAM type: YTN; PAM sequence: CTG
aaggatgggaccagcaagcc

SEQ ID NO: 23910 - DNA, 20 bp, Artificial Sequence
  Description of Artificial Sequence: Synthetic oligonucleotide
  Target: COL7A1; (-) strand; PAM type: YTN; PAM sequence: CTC
aataaacacaaagcgactga

SEQ ID NO: 23911 - DNA, 20 bp, Artificial Sequence
  Description of Artificial Sequence: Synthetic oligonucleotide
  Target: COL7A1; (-) strand; PAM type: YTN; PAM sequence: CTG
cagcaggaggtgctcaataa

SEQ ID NO: 23912 - DNA, 20 bp, Artificial Sequence
  Description of Artificial Sequence: Synthetic oligonucleotide
  Target: COL7A1; (-) strand; PAM type: YTN; PAM sequence: TTG
tgtatatagcagacatggag

SEQ ID NO: 23913 - DNA, 20 bp, Artificial Sequence
  Description of Artificial Sequence: Synthetic oligonucleotide
  Target: COL7A1; (-) strand; PAM type: YTN; PAM sequence: CTG
tgagcattgtgtatatagca

SEQ ID NO: 23914 - DNA, 20 bp, Artificial Sequence
  Description of Artificial Sequence: Synthetic oligonucleotide
  Target: COL7A1; (-) strand; PAM type: YTN; PAM sequence: CTG
taaagcaaagcgacaccagc

SEQ ID NO: 23915 - DNA, 20 bp, Artificial Sequence
  Description of Artificial Sequence: Synthetic oligonucleotide
  Target: COL7A1; (-) strand; PAM type: YTN; PAM sequence: TTA
tctgtaaagcaaagcgacac

SEQ ID NO: 23916 - DNA, 20 bp, Artificial Sequence
  Description of Artificial Sequence: Synthetic oligonucleotide
  Target: COL7A1; (-) strand; PAM type: YTN; PAM sequence: CTT
atctgtaaagcaaagcgaca

SEQ ID NO: 23917 - DNA, 20 bp, Artificial Sequence
  Description of Artificial Sequence: Synthetic oligonucleotide
  Target: COL7A1; (-) strand; PAM type: YTN; PAM sequence: TTC
cttatctgtaaagcaaagcg

SEQ ID NO: 23918 - DNA, 20 bp, Artificial Sequence
  Description of Artificial Sequence: Synthetic oligonucleotide
  Target: COL7A1; (-) strand; PAM type: YTN; PAM sequence: TTT
ccttatctgtaaagcaaagc

SEQ ID NO: 23919 - DNA, 20 bp, Artificial Sequence
  Description of Artificial Sequence: Synthetic oligonucleotide
  Target: COL7A1; (-) strand; PAM type: YTN; PAM sequence: CTC
ggtttccttatctgtaaagc

SEQ ID NO: 23920 - DNA, 20 bp, Artificial Sequence
  Description of Artificial Sequence: Synthetic oligonucleotide
  Target: COL7A1; (-) strand; PAM type: YTN; PAM sequence: TTC
cgagcctcggtttccttatc

SEQ ID NO: 23921 - DNA, 20 bp, Artificial Sequence
  Description of Artificial Sequence: Synthetic oligonucleotide
  Target: COL7A1; (-) strand; PAM type: YTN; PAM sequence: TTT
ccgagcctcggtttccttat

SEQ ID NO: 23922 - DNA, 20 bp, Artificial Sequence
  Description of Artificial Sequence: Synthetic oligonucleotide
  Target: COL7A1; (-) strand; PAM type: YTN; PAM sequence: CTT
tccgagcctcggtttcctta

SEQ ID NO: 23923 - DNA, 20 bp, Artificial Sequence
  Description of Artificial Sequence: Synthetic oligonucleotide
  Target: COL7A1; (-) strand; PAM type: YTN; PAM sequence: TTC
acctttccgagcctcggttt

SEQ ID NO: 23924 - DNA, 20 bp, Artificial Sequence
  Description of Artificial Sequence: Synthetic oligonucleotide
  Target: COL7A1; (-) strand; PAM type: YTN; PAM sequence: CTG
ggcaaaggtgttcacctttc

SEQ ID NO: 23925 - DNA, 20 bp, Artificial Sequence
  Description of Artificial Sequence: Synthetic oligonucleotide
  Target: COL7A1; (-) strand; PAM type: YTN; PAM sequence: CTG
tcctgggcaaaggtgttcac

SEQ ID NO: 23926 - DNA, 20 bp, Artificial Sequence
  Description of Artificial Sequence: Synthetic oligonucleotide
  Target: COL7A1; (-) strand; PAM type: YTN; PAM sequence: TTC
acgcacggactgtcctgggc

SEQ ID NO: 23927 - DNA, 20 bp, Artificial Sequence
  Description of Artificial Sequence: Synthetic oligonucleotide
  Target: COL7A1; (-) strand; PAM type: YTN; PAM sequence: CTT
cacgcacggactgtcctggg

SEQ ID NO: 23928 - DNA, 20 bp, Artificial Sequence
  Description of Artificial Sequence: Synthetic oligonucleotide
  Target: COL7A1; (-) strand; PAM type: YTN; PAM sequence: CTG
tcccacttcacgcacggact

SEQ ID NO: 23929 - DNA, 20 bp, Artificial Sequence
  Description of Artificial Sequence: Synthetic oligonucleotide
  Target: COL7A1; (-) strand; PAM type: YTN; PAM sequence: CTC
tgtcccacttcacgcacgga

SEQ ID NO: 23930 - DNA, 20 bp, Artificial Sequence
  Description of Artificial Sequence: Synthetic oligonucleotide
  Target: COL7A1; (-) strand; PAM type: YTN; PAM sequence: CTC
caaccaaactctgtcccact

SEQ ID NO: 23931 - DNA, 20 bp, Artificial Sequence
  Description of Artificial Sequence: Synthetic oligonucleotide
  Target: COL7A1; (-) strand; PAM type: YTN; PAM sequence: CTG
ccggagctccaaccaaactc

SEQ ID NO: 23932 - DNA, 20 bp, Artificial Sequence
  Description of Artificial Sequence: Synthetic oligonucleotide
  Target: COL7A1; (-) strand; PAM type: YTN; PAM sequence: CTC
aggctgccggagctccaacc

SEQ ID NO: 23933 - DNA, 20 bp, Artificial Sequence
  Description of Artificial Sequence: Synthetic oligonucleotide
  Target: COL7A1; (-) strand; PAM type: YTN; PAM sequence: CTC
acaggagacagggctcaggc

SEQ ID NO: 23934 - DNA, 20 bp, Artificial Sequence
  Description of Artificial Sequence: Synthetic oligonucleotide
  Target: COL7A1; (-) strand; PAM type: YTN; PAM sequence: CTC
gacccagggacatgcagggc

SEQ ID NO: 23935 - DNA, 20 bp, Artificial Sequence
  Description of Artificial Sequence: Synthetic oligonucleotide
  Target: COL7A1; (-) strand; PAM type: YTN; PAM sequence: CTG
catccccagcctcgacccag

SEQ ID NO: 23936 - DNA, 20 bp, Artificial Sequence
  Description of Artificial Sequence: Synthetic oligonucleotide
  Target: COL7A1; (-) strand; PAM type: YTN; PAM sequence: CTC
cccacgtacccctgcatccc

SEQ ID NO: 23937 - DNA, 20 bp, Artificial Sequence
  Description of Artificial Sequence: Synthetic oligonucleotide
  Target: COL7A1; (-) strand; PAM type: YTN; PAM sequence: CTG
tcctccccacgtacccctgc

SEQ ID NO: 23938 - DNA, 20 bp, Artificial Sequence
  Description of Artificial Sequence: Synthetic oligonucleotide
  Target: COL7A1; (-) strand; PAM type: YTN; PAM sequence: CTG
gccaggccctgtcctcccca

SEQ ID NO: 23939 - DNA, 20 bp, Artificial Sequence
  Description of Artificial Sequence: Synthetic oligonucleotide
  Target: COL7A1; (-) strand; PAM type: YTN; PAM sequence: CTC
ctggccaggccctgtcctcc

SEQ ID NO: 23940 - DNA, 20 bp, Artificial Sequence
  Description of Artificial Sequence: Synthetic oligonucleotide
  Target: COL7A1; (-) strand; PAM type: YTN; PAM sequence: CTG
catgaagcaagaacaactcc

SEQ ID NO: 23941 - DNA, 20 bp, Artificial Sequence
  Description of Artificial Sequence: Synthetic oligonucleotide
  Target: COL7A1; (-) strand; PAM type: YTN; PAM sequence: TTG
tcccccaaacctgcatgaag

SEQ ID NO: 23942 - DNA, 20 bp, Artificial Sequence
  Description of Artificial Sequence: Synthetic oligonucleotide
  Target: COL7A1; (-) strand; PAM type: YTN; PAM sequence: CTT
gtcccccaaacctgcatgaa

SEQ ID NO: 23943 - DNA, 20 bp, Artificial Sequence
  Description of Artificial Sequence: Synthetic oligonucleotide
  Target: COL7A1; (-) strand; PAM type: YTN; PAM sequence: CTG
agaggagtgggtgcttgtcc

SEQ ID NO: 23944 - DNA, 20 bp, Artificial Sequence
  Description of Artificial Sequence: Synthetic oligonucleotide
  Target: COL7A1; (-) strand; PAM type: YTN; PAM sequence: CTG
tgagtgtgtgtgagcagggt

SEQ ID NO: 23945 - DNA, 20 bp, Artificial Sequence
  Description of Artificial Sequence: Synthetic oligonucleotide
  Target: COL7A1; (-) strand; PAM type: YTN; PAM sequence: CTG
acagctgtgagtgtgtgtga

SEQ ID NO: 23946 - DNA, 20 bp, Artificial Sequence
  Description of Artificial Sequence: Synthetic oligonucleotide
  Target: COL7A1; (-) strand; PAM type: YTN; PAM sequence: CTC
tgacagctgtgagtgtgtgt

SEQ ID NO: 23947 - DNA, 20 bp, Artificial Sequence
  Description of Artificial Sequence: Synthetic oligonucleotide
  Target: COL7A1; (-) strand; PAM type: YTN; PAM sequence: CTG
agtctctgacagctgtgagt

SEQ ID NO: 23948 - DNA, 20 bp, Artificial Sequence
  Description of Artificial Sequence: Synthetic oligonucleotide
  Target: COL7A1; (-) strand; PAM type: YTN; PAM sequence: TTA
tgggcgcatatgtgcgtgtg

SEQ ID NO: 23949 - DNA, 20 bp, Artificial Sequence
  Description of Artificial Sequence: Synthetic oligonucleotide
  Target: COL7A1; (-) strand; PAM type: YTN; PAM sequence: CTT
atgggcgcatatgtgcgtgt

SEQ ID NO: 23950 - DNA, 20 bp, Artificial Sequence
  Description of Artificial Sequence: Synthetic oligonucleotide
  Target: COL7A1; (-) strand; PAM type: YTN; PAM sequence: TTG
tcttatgggcgcatatgtgc

SEQ ID NO: 23951 - DNA, 20 bp, Artificial Sequence
  Description of Artificial Sequence: Synthetic oligonucleotide
  Target: COL7A1; (-) strand; PAM type: YTN; PAM sequence: CTT
gtcttatgggcgcatatgtg

SEQ ID NO: 23952 - DNA, 20 bp, Artificial Sequence
  Description of Artificial Sequence: Synthetic oligonucleotide
  Target: COL7A1; (-) strand; PAM type: YTN; PAM sequence: CTG
tgaccatggcagccttgtct

SEQ ID NO: 23953 - DNA, 20 bp, Artificial Sequence
  Description of Artificial Sequence: Synthetic oligonucleotide
  Target: COL7A1; (-) strand; PAM type: YTN; PAM sequence: CTC
caggcacaaaggcccgaaca

SEQ ID NO: 23954 - DNA, 20 bp, Artificial Sequence
  Description of Artificial Sequence: Synthetic oligonucleotide
  Target: COL7A1; (-) strand; PAM type: YTN; PAM sequence: CTG
tgaggggtgtctccaggcac

SEQ ID NO: 23955 - DNA, 20 bp, Artificial Sequence
  Description of Artificial Sequence: Synthetic oligonucleotide
  Target: COL7A1; (-) strand; PAM type: YTN; PAM sequence: CTG
ccccagatggacggggctgt

SEQ ID NO: 23956 - DNA, 20 bp, Artificial Sequence
  Description of Artificial Sequence: Synthetic oligonucleotide
  Target: COL7A1; (-) strand; PAM type: YTN; PAM sequence: CTG
tgccccatgaggcagcacct

SEQ ID NO: 23957 - DNA, 20 bp, Artificial Sequence
  Description of Artificial Sequence: Synthetic oligonucleotide
  Target: COL7A1; (-) strand; PAM type: YTN; PAM sequence: CTC
tgtgccccatgaggcagcac

SEQ ID NO: 23958 - DNA, 20 bp, Artificial Sequence
  Description of Artificial Sequence: Synthetic oligonucleotide
  Target: COL7A1; (-) strand; PAM type: YTN; PAM sequence: TTG
ctctgtgccccatgaggcag

SEQ ID NO: 23959 - DNA, 20 bp, Artificial Sequence
  Description of Artificial Sequence: Synthetic oligonucleotide
  Target: COL7A1; (-) strand; PAM type: YTN; PAM sequence: CTT
gctctgtgccccatgaggca

SEQ ID NO: 23960 - DNA, 20 bp, Artificial Sequence
  Description of Artificial Sequence: Synthetic oligonucleotide
  Target: COL7A1; (-) strand; PAM type: YTN; PAM sequence: TTG
cttgctctgtgccccatgag

SEQ ID NO: 23961 - DNA, 20 bp, Artificial Sequence
  Description of Artificial Sequence: Synthetic oligonucleotide
  Target: COL7A1; (-) strand; PAM type: YTN; PAM sequence: CTT
gcttgctctgtgccccatga

SEQ ID NO: 23962 - DNA, 20 bp, Artificial Sequence
  Description of Artificial Sequence: Synthetic oligonucleotide
  Target: COL7A1; (-) strand; PAM type: YTN; PAM sequence: CTG
agggtcacttgcttgctctg

SEQ ID NO: 23963 - DNA, 20 bp, Artificial Sequence
  Description of Artificial Sequence: Synthetic oligonucleotide
  Target: COL7A1; (-) strand; PAM type: YTN; PAM sequence: CTG
gctgagggtcacttgcttgc

SEQ ID NO: 23964 - DNA, 20 bp, Artificial Sequence
  Description of Artificial Sequence: Synthetic oligonucleotide
  Target: COL7A1; (-) strand; PAM type: YTN; PAM sequence: CTG
tcatcccataggccaccaca

SEQ ID NO: 23965 - DNA, 20 bp, Artificial Sequence
  Description of Artificial Sequence: Synthetic oligonucleotide
  Target: COL7A1; (-) strand; PAM type: YTN; PAM sequence: CTG
aggcccacaggtctgtcatc

SEQ ID NO: 23966 - DNA, 20 bp, Artificial Sequence
  Description of Artificial Sequence: Synthetic oligonucleotide
  Target: COL7A1; (-) strand; PAM type: YTN; PAM sequence: CTC
tgaggcccacaggtctgtca

SEQ ID NO: 23967 - DNA, 20 bp, Artificial Sequence
  Description of Artificial Sequence: Synthetic oligonucleotide
  Target: COL7A1; (-) strand; PAM type: YTN; PAM sequence: CTC
cgaccagtccctctgaggcc

SEQ ID NO: 23968 - DNA, 20 bp, Artificial Sequence
  Description of Artificial Sequence: Synthetic oligonucleotide
  Target: COL7A1; (-) strand; PAM type: YTN; PAM sequence: CTG
cctccgaccagtccctctga

SEQ ID NO: 23969 - DNA, 20 bp, Artificial Sequence
  Description of Artificial Sequence: Synthetic oligonucleotide
  Target: COL7A1; (-) strand; PAM type: YTN; PAM sequence: CTC
aacactgcctccgaccagtc

SEQ ID NO: 23970 - DNA, 20 bp, Artificial Sequence
  Description of Artificial Sequence: Synthetic oligonucleotide
  Target: COL7A1; (-) strand; PAM type: YTN; PAM sequence: CTC
aacacgagagctcaacactg

SEQ ID NO: 23971 - DNA, 20 bp, Artificial Sequence
  Description of Artificial Sequence: Synthetic oligonucleotide
  Target: COL7A1; (-) strand; PAM type: YTN; PAM sequence: TTC
aggagcctcaacacgagagc

SEQ ID NO: 23972 - DNA, 20 bp, Artificial Sequence
  Description of Artificial Sequence: Synthetic oligonucleotide
  Target: COL7A1; (-) strand; PAM type: YTN; PAM sequence: TTT
caggagcctcaacacgagag

SEQ ID NO: 23973 - DNA, 20 bp, Artificial Sequence
  Description of Artificial Sequence: Synthetic oligonucleotide
  Target: COL7A1; (-) strand; PAM type: YTN; PAM sequence: CTT
tcaggagcctcaacacgaga

SEQ ID NO: 23974 - DNA, 20 bp, Artificial Sequence
  Description of Artificial Sequence: Synthetic oligonucleotide
  Target: COL7A1; (-) strand; PAM type: YTN; PAM sequence: TTA
ctttcaggagcctcaacacg

SEQ ID NO: 23975 - DNA, 20 bp, Artificial Sequence
  Description of Artificial Sequence: Synthetic oligonucleotide
  Target: COL7A1; (-) strand; PAM type: YTN; PAM sequence: CTG
gacaccgccacatgcagtca

SEQ ID NO: 23976 - DNA, 20 bp, Artificial Sequence
  Description of Artificial Sequence: Synthetic oligonucleotide
  Target: COL7A1; (-) strand; PAM type: YTN; PAM sequence: CTG
ggtgccccatagtcacagaa

SEQ ID NO: 23977 - DNA, 20 bp, Artificial Sequence
  Description of Artificial Sequence: Synthetic oligonucleotide
  Target: COL7A1; (-) strand; PAM type: YTN; PAM sequence: CTA
tgtctgggtgccccatagtc

SEQ ID NO: 23978 - DNA, 20 bp, Artificial Sequence
  Description of Artificial Sequence: Synthetic oligonucleotide
  Target: COL7A1; (-) strand; PAM type: YTN; PAM sequence: TTG
ctatgtctgggtgccccata

SEQ ID NO: 23979 - DNA, 20 bp, Artificial Sequence
  Description of Artificial Sequence: Synthetic oligonucleotide
  Target: COL7A1; (-) strand; PAM type: YTN; PAM sequence: CTT
gctatgtctgggtgccccat

SEQ ID NO: 23980 - DNA, 20 bp, Artificial Sequence
  Description of Artificial Sequence: Synthetic oligonucleotide
  Target: COL7A1; (-) strand; PAM type: YTN; PAM sequence: CTG
tggcgagtcttgctatgtct

SEQ ID NO: 23981 - DNA, 20 bp, Artificial Sequence
  Description of Artificial Sequence: Synthetic oligonucleotide
  Target: COL7A1; (-) strand; PAM type: YTN; PAM sequence: CTG
ctgtggcgagtcttgctatg

SEQ ID NO: 23982 - DNA, 20 bp, Artificial Sequence
  Description of Artificial Sequence: Synthetic oligonucleotide
  Target: COL7A1; (-) strand; PAM type: YTN; PAM sequence: CTG
ccacgtaaggtcactgctgt

SEQ ID NO: 23983 - DNA, 20 bp, Artificial Sequence
  Description of Artificial Sequence: Synthetic oligonucleotide
  Target: COL7A1; (-) strand; PAM type: YTN; PAM sequence: TTG
gatgctgccacgtaaggtca

SEQ ID NO: 23984 - DNA, 20 bp, Artificial Sequence
  Description of Artificial Sequence: Synthetic oligonucleotide
  Target: COL7A1; (-) strand; PAM type: YTN; PAM sequence: CTT
ggatgctgccacgtaaggtc

SEQ ID NO: 23985 - DNA, 20 bp, Artificial Sequence
  Description of Artificial Sequence: Synthetic oligonucleotide
  Target: COL7A1; (-) strand; PAM type: YTN; PAM sequence: CTA
atatatgtccggacagcttg

SEQ ID NO: 23986 - DNA, 20 bp, Artificial Sequence
  Description of Artificial Sequence: Synthetic oligonucleotide
  Target: COL7A1; (-) strand; PAM type: YTN; PAM sequence: CTG
tgtgccccacagacctaata

SEQ ID NO: 23987 - DNA, 20 bp, Artificial Sequence
  Description of Artificial Sequence: Synthetic oligonucleotide
  Target: COL7A1; (-) strand; PAM type: YTN; PAM sequence: TTG
ccatgcctgtgtgccccaca

SEQ ID NO: 23988 - DNA, 20 bp, Artificial Sequence
  Description of Artificial Sequence: Synthetic oligonucleotide
  Target: COL7A1; (-) strand; PAM type: YTN; PAM sequence: CTT
gccatgcctgtgtgccccac

SEQ ID NO: 23989 - DNA, 20 bp, Artificial Sequence
  Description of Artificial Sequence: Synthetic oligonucleotide
  Target: COL7A1; (-) strand; PAM type: YTN; PAM sequence: CTG
ccacatggagtcttgccatg

SEQ ID NO: 23990 - DNA, 20 bp, Artificial Sequence
  Description of Artificial Sequence: Synthetic oligonucleotide
  Target: COL7A1; (-) strand; PAM type: YTN; PAM sequence: TTG
ggtcactgccacatggagtc

SEQ ID NO: 23991 - DNA, 20 bp, Artificial Sequence
  Description of Artificial Sequence: Synthetic oligonucleotide
  Target: COL7A1; (-) strand; PAM type: YTN; PAM sequence: CTA
agttgggtcactgccacatg

SEQ ID NO: 23992 - DNA, 20 bp, Artificial Sequence
  Description of Artificial Sequence: Synthetic oligonucleotide
  Target: COL7A1; (-) strand; PAM type: YTN; PAM sequence: TTG
ctaagttgggtcactgccac

SEQ ID NO: 23993 - DNA, 20 bp, Artificial Sequence
  Description of Artificial Sequence: Synthetic oligonucleotide
  Target: COL7A1; (-) strand; PAM type: YTN; PAM sequence: TTG
gacattgctaagttgggtca

SEQ ID NO: 23994 - DNA, 20 bp, Artificial Sequence
  Description of Artificial Sequence: Synthetic oligonucleotide
  Target: COL7A1; (-) strand; PAM type: YTN; PAM sequence: CTG
gacattggacattgctaagt

SEQ ID NO: 23995 - DNA, 20 bp, Artificial Sequence
  Description of Artificial Sequence: Synthetic oligonucleotide
  Target: COL7A1; (-) strand; PAM type: YTN; PAM sequence: CTG
gacagcctggacattggaca

SEQ ID NO: 23996 - DNA, 20 bp, Artificial Sequence
  Description of Artificial Sequence: Synthetic oligonucleotide
  Target: COL7A1; (-) strand; PAM type: YTN; PAM sequence: CTG
agtgccccacagagtcacag

SEQ ID NO: 23997 - DNA, 20 bp, Artificial Sequence
  Description of Artificial Sequence: Synthetic oligonucleotide
  Target: COL7A1; (-) strand; PAM type: YTN; PAM sequence: CTG
tcatgcaggtcatatcagat

SEQ ID NO: 23998 - DNA, 20 bp, Artificial Sequence
  Description of Artificial Sequence: Synthetic oligonucleotide
  Target: COL7A1; (-) strand; PAM type: YTN; PAM sequence: CTG
ccacatggagccactgtcat

SEQ ID NO: 23999 - DNA, 20 bp, Artificial Sequence
  Description of Artificial Sequence: Synthetic oligonucleotide
  Target: COL7A1; (-) strand; PAM type: YTN; PAM sequence: CTG
gacactgccacatggagcca

SEQ ID NO: 24000 - DNA, 20 bp, Artificial Sequence
  Description of Artificial Sequence: Synthetic oligonucleotide
  Target: COL7A1; (-) strand; PAM type: YTN; PAM sequence: CTG
ggcatacagtgtctggacac

SEQ ID NO: 24001 - DNA, 20 bp, Artificial Sequence
  Description of Artificial Sequence: Synthetic oligonucleotide
  Target: COL7A1; (-) strand; PAM type: YTN; PAM sequence: CTG
ccacatctgggcatacagtg

SEQ ID NO: 24002 - DNA, 20 bp, Artificial Sequence
  Description of Artificial Sequence: Synthetic oligonucleotide
  Target: COL7A1; (-) strand; PAM type: YTN; PAM sequence: CTG
gacgctgccacatctgggca

SEQ ID NO: 24003 - DNA, 20 bp, Artificial Sequence
  Description of Artificial Sequence: Synthetic oligonucleotide
  Target: COL7A1; (-) strand; PAM type: YTN; PAM sequence: CTG
ggcatacagtgtctggacgc

SEQ ID NO: 24004 - DNA, 20 bp, Artificial Sequence
  Description of Artificial Sequence: Synthetic oligonucleotide
  Target: COL7A1; (-) strand; PAM type: YTN; PAM sequence: CTG
ccacatctgggcatacagtg

SEQ ID NO: 24005 - DNA, 20 bp, Artificial Sequence
  Description of Artificial Sequence: Synthetic oligonucleotide
  Target: COL7A1; (-) strand; PAM type: YTN; PAM sequence: CTG
gacggatgctgccacatctg

SEQ ID NO: 24006 - DNA, 20 bp, Artificial Sequence
  Description of Artificial Sequence: Synthetic oligonucleotide
  Target: COL7A1; (-) strand; PAM type: YTN; PAM sequence: CTG
gagggcagccacacagctgg

SEQ ID NO: 24007 - DNA, 20 bp, Artificial Sequence
  Description of Artificial Sequence: Synthetic oligonucleotide
  Target: COL7A1; (-) strand; PAM type: YTN; PAM sequence: CTG
gatgggaagacctggagggc

SEQ ID NO: 24008 - DNA, 20 bp, Artificial Sequence
  Description of Artificial Sequence: Synthetic oligonucleotide
  Target: COL7A1; (-) strand; PAM type: YTN; PAM sequence: CTG
agagagggggtcacagtgat

SEQ ID NO: 24009 - DNA, 20 bp, Artificial Sequence
  Description of Artificial Sequence: Synthetic oligonucleotide
  Target: COL7A1; (-) strand; PAM type: YTN; PAM sequence: CTG
agcctgagagagggggtcac

SEQ ID NO: 24010 - DNA, 20 bp, Artificial Sequence
  Description of Artificial Sequence: Synthetic oligonucleotide
  Target: COL7A1; (-) strand; PAM type: YTN; PAM sequence: CTG
ctgagcctgagagagggggt

SEQ ID NO: 24011 - DNA, 20 bp, Artificial Sequence
  Description of Artificial Sequence: Synthetic oligonucleotide
  Target: COL7A1; (-) strand; PAM type: YTN; PAM sequence: CTG
gcccgtgtcggccactgctg

SEQ ID NO: 24012 - DNA, 20 bp, Artificial Sequence
  Description of Artificial Sequence: Synthetic oligonucleotide
  Target: COL7A1; (-) strand; PAM type: YTN; PAM sequence: CTG
ccagggagcaggccaccacc

SEQ ID NO: 24013 - DNA, 20 bp, Artificial Sequence
  Description of Artificial Sequence: Synthetic oligonucleotide
  Target: COL7A1; (-) strand; PAM type: YTN; PAM sequence: CTG
gagcaagcccgggccagggc

SEQ ID NO: 24014 - DNA, 20 bp, Artificial Sequence
  Description of Artificial Sequence: Synthetic oligonucleotide
  Target: COL7A1; (-) strand; PAM type: YTN; PAM sequence: TTA
ctggagcaagcccgggccag

SEQ ID NO: 24015 - DNA, 20 bp, Artificial Sequence
  Description of Artificial Sequence: Synthetic oligonucleotide
  Target: COL7A1; (-) strand; PAM type: YTN; PAM sequence: CTT
actggagcaagcccgggcca

SEQ ID NO: 24016 - DNA, 20 bp, Artificial Sequence
  Description of Artificial Sequence: Synthetic oligonucleotide
  Target: COL7A1; (-) strand; PAM type: YTN; PAM sequence: TTG
cagatcttactggagcaagc

SEQ ID NO: 24017 - DNA, 20 bp, Artificial Sequence
  Description of Artificial Sequence: Synthetic oligonucleotide
  Target: COL7A1; (-) strand; PAM type: YTN; PAM sequence: CTT
gcagatcttactggagcaag

SEQ ID NO: 24018 - DNA, 20 bp, Artificial Sequence
  Description of Artificial Sequence: Synthetic oligonucleotide
  Target: COL7A1; (-) strand; PAM type: YTN; PAM sequence: CTC
ttgcagatcttactggagca

SEQ ID NO: 24019 - DNA, 20 bp, Artificial Sequence
  Description of Artificial Sequence: Synthetic oligonucleotide
  Target: COL7A1; (-) strand; PAM type: YTN; PAM sequence: CTG
gatgtccccatcggcctctt

SEQ ID NO: 24020 - DNA, 20 bp, Artificial Sequence
  Description of Artificial Sequence: Synthetic oligonucleotide
  Target: COL7A1; (-) strand; PAM type: YTN; PAM sequence: CTA
tcgctggatgtccccatcgg

SEQ ID NO: 24021 - DNA, 20 bp, Artificial Sequence
  Description of Artificial Sequence: Synthetic oligonucleotide
  Target: COL7A1; (-) strand; PAM type: YTN; PAM sequence: TTG
tcctatcgctggatgtcccc

SEQ ID NO: 24022 - DNA, 20 bp, Artificial Sequence
  Description of Artificial Sequence: Synthetic oligonucleotide
  Target: COL7A1; (-) strand; PAM type: YTN; PAM sequence: CTC
gcgcattgtcctatcgctgg

SEQ ID NO: 24023 - DNA, 20 bp, Artificial Sequence
  Description of Artificial Sequence: Synthetic oligonucleotide
  Target: COL7A1; (-) strand; PAM type: YTN; PAM sequence: CTG
gctcgcgcattgtcctatcg

SEQ ID NO: 24024 - DNA, 20 bp, Artificial Sequence
  Description of Artificial Sequence: Synthetic oligonucleotide
  Target: COL7A1; (-) strand; PAM type: YTN; PAM sequence: CTG
cagccccacccgccaccctg

SEQ ID NO: 24025 - DNA, 20 bp, Artificial Sequence
  Description of Artificial Sequence: Synthetic oligonucleotide
  Target: COL7A1; (-) strand; PAM type: YTN; PAM sequence: CTG
cccagagccactgcagcccc

SEQ ID NO: 24026 - DNA, 20 bp, Artificial Sequence
  Description of Artificial Sequence: Synthetic oligonucleotide
  Target: COL7A1; (-) strand; PAM type: YTN; PAM sequence: CTC
ccacatggccgtgggctgcc

SEQ ID NO: 24027 - DNA, 20 bp, Artificial Sequence
  Description of Artificial Sequence: Synthetic oligonucleotide
  Target: COL7A1; (-) strand; PAM type: YTN; PAM sequence: CTG
ctcccacatggccgtgggct

SEQ ID NO: 24028 - DNA, 20 bp, Artificial Sequence
  Description of Artificial Sequence: Synthetic oligonucleotide
  Target: COL7A1; (-) strand; PAM type: YTN; PAM sequence: CTC
agctgctcccacatggccgt

SEQ ID NO: 24029 - DNA, 20 bp, Artificial Sequence
  Description of Artificial Sequence: Synthetic oligonucleotide
  Target: COL7A1; (-) strand; PAM type: YTN; PAM sequence: CTC
agagagcccctcagctgctc

SEQ ID NO: 24030 - DNA, 20 bp, Artificial Sequence
  Description of Artificial Sequence: Synthetic oligonucleotide
  Target: COL7A1; (-) strand; PAM type: YTN; PAM sequence: CTG
cggcctcagagagcccctca

SEQ ID NO: 24031 - DNA, 20 bp, Artificial Sequence
  Description of Artificial Sequence: Synthetic oligonucleotide
  Target: COL7A1; (-) strand; PAM type: YTN; PAM sequence: CTC
cccgacctgcggcctcagag

SEQ ID NO: 24032 - DNA, 20 bp, Artificial Sequence
  Description of Artificial Sequence: Synthetic oligonucleotide
  Target: COL7A1; (-) strand; PAM type: YTN; PAM sequence: CTC
cccagaccactccccgacct

SEQ ID NO: 24033 - DNA, 20 bp, Artificial Sequence
  Description of Artificial Sequence: Synthetic oligonucleotide
  Target: COL7A1; (-) strand; PAM type: YTN; PAM sequence: TTC
tccccagaccactccccgac

SEQ ID NO: 24034 - DNA, 20 bp, Artificial Sequence
  Description of Artificial Sequence: Synthetic oligonucleotide
  Target: COL7A1; (-) strand; PAM type: YTN; PAM sequence: CTC
agaattctccccagaccact

SEQ ID NO: 24035 - DNA, 20 bp, Artificial Sequence
  Description of Artificial Sequence: Synthetic oligonucleotide
  Target: COL7A1; (-) strand; PAM type: YTN; PAM sequence: CTC
cgccctcagaattctcccca

SEQ ID NO: 24036 - DNA, 20 bp, Artificial Sequence
  Description of Artificial Sequence: Synthetic oligonucleotide
  Target: COL7A1; (-) strand; PAM type: YTN; PAM sequence: TTC
cagctccgccctcagaattc

SEQ ID NO: 24037 - DNA, 20 bp, Artificial Sequence
  Description of Artificial Sequence: Synthetic oligonucleotide
  Target: COL7A1; (-) strand; PAM type: YTN; PAM sequence: CTT
ccagctccgccctcagaatt

SEQ ID NO: 24038 - DNA, 20 bp, Artificial Sequence
  Description of Artificial Sequence: Synthetic oligonucleotide
  Target: COL7A1; (-) strand; PAM type: YTN; PAM sequence: CTA
tcccaaccttccagctccgc

SEQ ID NO: 24039 - DNA, 20 bp, Artificial Sequence
  Description of Artificial Sequence: Synthetic oligonucleotide
  Target: COL7A1; (-) strand; PAM type: YTN; PAM sequence: TTG
tcccagtgacccctatccca

SEQ ID NO: 24040 - DNA, 20 bp, Artificial Sequence
  Description of Artificial Sequence: Synthetic oligonucleotide
  Target: COL7A1; (-) strand; PAM type: YTN; PAM sequence: CTG
gttgtcccagtgacccctat

SEQ ID NO: 24041 - DNA, 20 bp, Artificial Sequence
  Description of Artificial Sequence: Synthetic oligonucleotide
  Target: COL7A1; (-) strand; PAM type: YTN; PAM sequence: TTG
ggcagagtcctggttgtccc

SEQ ID NO: 24042 - DNA, 20 bp, Artificial Sequence
  Description of Artificial Sequence: Synthetic oligonucleotide
  Target: COL7A1; (-) strand; PAM type: YTN; PAM sequence: CTG
atgttgggcagagtcctggt

SEQ ID NO: 24043 - DNA, 20 bp, Artificial Sequence
  Description of Artificial Sequence: Synthetic oligonucleotide
  Target: COL7A1; (-) strand; PAM type: YTN; PAM sequence: CTG
atggtcctgatgttgggcag

SEQ ID NO: 24044 - DNA, 20 bp, Artificial Sequence
  Description of Artificial Sequence: Synthetic oligonucleotide
  Target: COL7A1; (-) strand; PAM type: YTN; PAM sequence: TTG
ctgatggtcctgatgttggg

SEQ ID NO: 24045 - DNA, 20 bp, Artificial Sequence
  Description of Artificial Sequence: Synthetic oligonucleotide
  Target: COL7A1; (-) strand; PAM type: YTN; PAM sequence: CTG
ttgctgatggtcctgatgtt

SEQ ID NO: 24046 - DNA, 20 bp, Artificial Sequence
  Description of Artificial Sequence: Synthetic oligonucleotide
  Target: COL7A1; (-) strand; PAM type: YTN; PAM sequence: CTG
ctgttgctgatggtcctgat

SEQ ID NO: 24047 - DNA, 20 bp, Artificial Sequence
  Description of Artificial Sequence: Synthetic oligonucleotide
  Target: COL7A1; (-) strand; PAM type: YTN; PAM sequence: CTC
tgctgttgctgatggtcctg

SEQ ID NO: 24048 - DNA, 20 bp, Artificial Sequence
  Description of Artificial Sequence: Synthetic oligonucleotide
  Target: COL7A1; (-) strand; PAM type: YTN; PAM sequence: CTC
acgatgaccaggtgtgctct

SEQ ID NO: 24049 - DNA, 20 bp, Artificial Sequence
  Description of Artificial Sequence: Synthetic oligonucleotide
  Target: COL7A1; (-) strand; PAM type: YTN; PAM sequence: CTG
acctcacgatgaccaggtgt

SEQ ID NO: 24050 - DNA, 20 bp, Artificial Sequence
  Description of Artificial Sequence: Synthetic oligonucleotide
  Target: COL7A1; (-) strand; PAM type: YTN; PAM sequence: TTG
cagcctgacctcacgatgac

SEQ ID NO: 24051 - DNA, 20 bp, Artificial Sequence
  Description of Artificial Sequence: Synthetic oligonucleotide
  Target: COL7A1; (-) strand; PAM type: YTN; PAM sequence: CTT
gcagcctgacctcacgatga

SEQ ID NO: 24052 - DNA, 20 bp, Artificial Sequence
  Description of Artificial Sequence: Synthetic oligonucleotide
  Target: COL7A1; (-) strand; PAM type: YTN; PAM sequence: CTC
cttgcagcctgacctcacga

SEQ ID NO: 24053 - DNA, 20 bp, Artificial Sequence
  Description of Artificial Sequence: Synthetic oligonucleotide
  Target: COL7A1; (-) strand; PAM type: YTN; PAM sequence: TTC
tccttgcagcctgacctcac

SEQ ID NO: 24054 - DNA, 20 bp, Artificial Sequence
  Description of Artificial Sequence: Synthetic oligonucleotide
  Target: COL7A1; (-) strand; PAM type: YTN; PAM sequence: TTT
ctccttgcagcctgacctca

SEQ ID NO: 24055 - DNA, 20 bp, Artificial Sequence
  Description of Artificial Sequence: Synthetic oligonucleotide
  Target: COL7A1; (-) strand; PAM type: YTN; PAM sequence: TTT
tctccttgcagcctgacctc

SEQ ID NO: 24056 - DNA, 20 bp, Artificial Sequence
  Description of Artificial Sequence: Synthetic oligonucleotide
  Target: COL7A1; (-) strand; PAM type: YTN; PAM sequence: CTG
agcccattttctccttgcag

SEQ ID NO: 24057 - DNA, 20 bp, Artificial Sequence
  Description of Artificial Sequence: Synthetic oligonucleotide
  Target: COL7A1; (-) strand; PAM type: YTN; PAM sequence: CTG
ccctgagcccattttctcct

SEQ ID NO: 24058 - DNA, 20 bp, Artificial Sequence
  Description of Artificial Sequence: Synthetic oligonucleotide
  Target: COL7A1; (-) strand; PAM type: YTN; PAM sequence: TTG
accagagcccctgccctgag

SEQ ID NO: 24059 - DNA, 20 bp, Artificial Sequence
  Description of Artificial Sequence: Synthetic oligonucleotide
  Target: COL7A1; (-) strand; PAM type: YTN; PAM sequence: CTG
tccatggaccccagttgacc

SEQ ID NO: 24060 - DNA, 20 bp, Artificial Sequence
  Description of Artificial Sequence: Synthetic oligonucleotide
  Target: COL7A1; (-) strand; PAM type: YTN; PAM sequence: CTC
tgtccatggaccccagttga

SEQ ID NO: 24061 - DNA, 20 bp, Artificial Sequence
  Description of Artificial Sequence: Synthetic oligonucleotide
  Target: COL7A1; (-) strand; PAM type: YTN; PAM sequence: CTG
tctctgtccatggaccccag

SEQ ID NO: 24062 - DNA, 20 bp, Artificial Sequence
  Description of Artificial Sequence: Synthetic oligonucleotide
  Target: COL7A1; (-) strand; PAM type: YTN; PAM sequence: TTG
ccatctgtctctgtccatgg

SEQ ID NO: 24063 - DNA, 20 bp, Artificial Sequence
  Description of Artificial Sequence: Synthetic oligonucleotide
  Target: COL7A1; (-) strand; PAM type: YTN; PAM sequence: CTT
gccatctgtctctgtccatg

SEQ ID NO: 24064 - DNA, 20 bp, Artificial Sequence
  Description of Artificial Sequence: Synthetic oligonucleotide
  Target: COL7A1; (-) strand; PAM type: YTN; PAM sequence: CTG
cccttgccatctgtctctgt

SEQ ID NO: 24065 - DNA, 20 bp, Artificial Sequence
  Description of Artificial Sequence: Synthetic oligonucleotide
  Target: COL7A1; (-) strand; PAM type: YTN; PAM sequence: CTC
tgcccttgccatctgtctct

SEQ ID NO: 24066 - DNA, 20 bp, Artificial Sequence
  Description of Artificial Sequence: Synthetic oligonucleotide
  Target: COL7A1; (-) strand; PAM type: YTN; PAM sequence: CTG
tcactctgcccttgccatct

SEQ ID NO: 24067 - DNA, 20 bp, Artificial Sequence
  Description of Artificial Sequence: Synthetic oligonucleotide
  Target: COL7A1; (-) strand; PAM type: YTN; PAM sequence: CTC
tgtcactctgcccttgccat

SEQ ID NO: 24068 - DNA, 20 bp, Artificial Sequence
  Description of Artificial Sequence: Synthetic oligonucleotide
  Target: COL7A1; (-) strand; PAM type: YTN; PAM sequence: CTC
catcccccgctctgtcactc

SEQ ID NO: 24069 - DNA, 20 bp, Artificial Sequence
  Description of Artificial Sequence: Synthetic oligonucleotide
  Target: COL7A1; (-) strand; PAM type: YTN; PAM sequence: CTC
tccatcccccgctctgtcac

SEQ ID NO: 24070 - DNA, 20 bp, Artificial Sequence
  Description of Artificial Sequence: Synthetic oligonucleotide
  Target: COL7A1; (-) strand; PAM type: YTN; PAM sequence: CTC
tctccatcccccgctctgtc

SEQ ID NO: 24071 - DNA, 20 bp, Artificial Sequence
  Description of Artificial Sequence: Synthetic oligonucleotide
  Target: COL7A1; (-) strand; PAM type: YTN; PAM sequence: CTC
tctctccatcccccgctctg

SEQ ID NO: 24072 - DNA, 20 bp, Artificial Sequence
  Description of Artificial Sequence: Synthetic oligonucleotide
  Target: COL7A1; (-) strand; PAM type: YTN; PAM sequence: TTC
ctctctctccatcccccgct

SEQ ID NO: 24073 - DNA, 20 bp, Artificial Sequence
  Description of Artificial Sequence: Synthetic oligonucleotide
  Target: COL7A1; (-) strand; PAM type: YTN; PAM sequence: CTT
cctctctctccatcccccgc

SEQ ID NO: 24074 - DNA, 20 bp, Artificial Sequence
  Description of Artificial Sequence: Synthetic oligonucleotide
  Target: COL7A1; (-) strand; PAM type: YTN; PAM sequence: CTC
ggtgtcttcctctctctcca

SEQ ID NO: 24075 - DNA, 20 bp, Artificial Sequence
  Description of Artificial Sequence: Synthetic oligonucleotide
  Target: COL7A1; (-) strand; PAM type: YTN; PAM sequence: TTC
tcggtgtcttcctctctctc

SEQ ID NO: 24076 - DNA, 20 bp, Artificial Sequence
  Description of Artificial Sequence: Synthetic oligonucleotide
  Target: COL7A1; (-) strand; PAM type: YTN; PAM sequence: TTT
ctcggtgtcttcctctctct

SEQ ID NO: 24077 - DNA, 20 bp, Artificial Sequence
  Description of Artificial Sequence: Synthetic oligonucleotide
  Target: COL7A1; (-) strand; PAM type: YTN; PAM sequence: CTT
tctcggtgtcttcctctctc

SEQ ID NO: 24078 - DNA, 20 bp, Artificial Sequence
  Description of Artificial Sequence: Synthetic oligonucleotide
  Target: COL7A1; (-) strand; PAM type: YTN; PAM sequence: CTA
acccctttctcggtgtcttc

SEQ ID NO: 24079 - DNA, 20 bp, Artificial Sequence
  Description of Artificial Sequence: Synthetic oligonucleotide
  Target: COL7A1; (-) strand; PAM type: YTN; PAM sequence: CTC
taacccctttctcggtgtct

SEQ ID NO: 24080 - DNA, 20 bp, Artificial Sequence
  Description of Artificial Sequence: Synthetic oligonucleotide
  Target: COL7A1; (-) strand; PAM type: YTN; PAM sequence: CTC
tctaacccctttctcggtgt

SEQ ID NO: 24081 - DNA, 20 bp, Artificial Sequence
  Description of Artificial Sequence: Synthetic oligonucleotide
  Target: COL7A1; (-) strand; PAM type: YTN; PAM sequence: CTG
gcctctctaacccctttctc

SEQ ID NO: 24082 - DNA, 20 bp, Artificial Sequence
  Description of Artificial Sequence: Synthetic oligonucleotide
  Target: COL7A1; (-) strand; PAM type: YTN; PAM sequence: CTG
gcctggcctctctaacccct

SEQ ID NO: 24083 - DNA, 20 bp, Artificial Sequence
  Description of Artificial Sequence: Synthetic oligonucleotide
  Target: COL7A1; (-) strand; PAM type: YTN; PAM sequence: CTG
gcctggcctggcctctctaa

SEQ ID NO: 24084 - DNA, 20 bp, Artificial Sequence
  Description of Artificial Sequence: Synthetic oligonucleotide
  Target: COL7A1; (-) strand; PAM type: YTN; PAM sequence: CTC
tggcctggcctggcctctct

SEQ ID NO: 24085 - DNA, 20 bp, Artificial Sequence
  Description of Artificial Sequence: Synthetic oligonucleotide
  Target: COL7A1; (-) strand; PAM type: YTN; PAM sequence: CTG
tctctggcctggcctggcct

SEQ ID NO: 24086 - DNA, 20 bp, Artificial Sequence
  Description of Artificial Sequence: Synthetic oligonucleotide
  Target: COL7A1; (-) strand; PAM type: YTN; PAM sequence: CTC
tgtctctggcctggcctggc

SEQ ID NO: 24087 - DNA, 20 bp, Artificial Sequence
  Description of Artificial Sequence: Synthetic oligonucleotide
  Target: COL7A1; (-) strand; PAM type: YTN; PAM sequence: TTC
tctgtctctggcctggcctg

SEQ ID NO: 24088 - DNA, 20 bp, Artificial Sequence
  Description of Artificial Sequence: Synthetic oligonucleotide
  Target: COL7A1; (-) strand; PAM type: YTN; PAM sequence: CTT
ctctgtctctggcctggcct

SEQ ID NO: 24089 - DNA, 20 bp, Artificial Sequence
  Description of Artificial Sequence: Synthetic oligonucleotide
  Target: COL7A1; (-) strand; PAM type: YTN; PAM sequence: CTC
cccttctctgtctctggcct

SEQ ID NO: 24090 - DNA, 20 bp, Artificial Sequence
  Description of Artificial Sequence: Synthetic oligonucleotide
  Target: COL7A1; (-) strand; PAM type: YTN; PAM sequence: TTG
tctccccttctctgtctctg

SEQ ID NO: 24091 - DNA, 20 bp, Artificial Sequence
  Description of Artificial Sequence: Synthetic oligonucleotide
  Target: COL7A1; (-) strand; PAM type: YTN; PAM sequence: CTT
gtctccccttctctgtctct

SEQ ID NO: 24092 - DNA, 20 bp, Artificial Sequence
  Description of Artificial Sequence: Synthetic oligonucleotide
  Target: COL7A1; (-) strand; PAM type: YTN; PAM sequence: CTC
ttgtctccccttctctgtct

SEQ ID NO: 24093 - DNA, 20 bp, Artificial Sequence
  Description of Artificial Sequence: Synthetic oligonucleotide
  Target: COL7A1; (-) strand; PAM type: YTN; PAM sequence: CTC
ctcttgtctccccttctctg

SEQ ID NO: 24094 - DNA, 20 bp, Artificial Sequence
  Description of Artificial Sequence: Synthetic oligonucleotide
  Target: COL7A1; (-) strand; PAM type: YTN; PAM sequence: CTC
tcctcttgtctccccttctc

SEQ ID NO: 24095 - DNA, 20 bp, Artificial Sequence
  Description of Artificial Sequence: Synthetic oligonucleotide
  Target: COL7A1; (-) strand; PAM type: YTN; PAM sequence: CTG
gctctcctcttgtctcccct

SEQ ID NO: 24096 - DNA, 20 bp, Artificial Sequence
  Description of Artificial Sequence: Synthetic oligonucleotide
  Target: COL7A1; (-) strand; PAM type: YTN; PAM sequence: TTC
tggctctcctcttgtctccc

SEQ ID NO: 24097 - DNA, 20 bp, Artificial Sequence
  Description of Artificial Sequence: Synthetic oligonucleotide
  Target: COL7A1; (-) strand; PAM type: YTN; PAM sequence: CTC
attctggctctcctcttgtc

SEQ ID NO: 24098 - DNA, 20 bp, Artificial Sequence
  Description of Artificial Sequence: Synthetic oligonucleotide
  Target: COL7A1; (-) strand; PAM type: YTN; PAM sequence: TTG
tctcattctggctctcctct

SEQ ID NO: 24099 - DNA, 20 bp, Artificial Sequence
  Description of Artificial Sequence: Synthetic oligonucleotide
  Target: COL7A1; (-) strand; PAM type: YTN; PAM sequence: TTT
gtctcattctggctctcctc

SEQ ID NO: 24100 - DNA, 20 bp, Artificial Sequence
  Description of Artificial Sequence: Synthetic oligonucleotide
  Target: COL7A1; (-) strand; PAM type: YTN; PAM sequence: CTT
tgtctcattctggctctcct

SEQ ID NO: 24101 - DNA, 20 bp, Artificial Sequence
  Description of Artificial Sequence: Synthetic oligonucleotide
  Target: COL7A1; (-) strand; PAM type: YTN; PAM sequence: CTC
tttgtctcattctggctctc

SEQ ID NO: 24102 - DNA, 20 bp, Artificial Sequence
  Description of Artificial Sequence: Synthetic oligonucleotide
  Target: COL7A1; (-) strand; PAM type: YTN; PAM sequence: CTG
cctctttgtctcattctggc

SEQ ID NO: 24103 - DNA, 20 bp, Artificial Sequence
  Description of Artificial Sequence: Synthetic oligonucleotide
  Target: COL7A1; (-) strand; PAM type: YTN; PAM sequence: TTC
tgcctctttgtctcattctg

SEQ ID NO: 24104 - DNA, 20 bp, Artificial Sequence
  Description of Artificial Sequence: Synthetic oligonucleotide
  Target: COL7A1; (-) strand; PAM type: YTN; PAM sequence: TTT
ctgcctctttgtctcattct

SEQ ID NO: 24105 - DNA, 20 bp, Artificial Sequence
  Description of Artificial Sequence: Synthetic oligonucleotide
  Target: COL7A1; (-) strand; PAM type: YTN; PAM sequence: CTT
tctgcctctttgtctcattc

SEQ ID NO: 24106 - DNA, 20 bp, Artificial Sequence
  Description of Artificial Sequence: Synthetic oligonucleotide
  Target: COL7A1; (-) strand; PAM type: YTN; PAM sequence: TTG
ctttctgcctctttgtctca

SEQ ID NO: 24107 - DNA, 20 bp, Artificial Sequence
  Description of Artificial Sequence: Synthetic oligonucleotide
  Target: COL7A1; (-) strand; PAM type: YTN; PAM sequence: CTT
gctttctgcctctttgtctc

SEQ ID NO: 24108 - DNA, 20 bp, Artificial Sequence
  Description of Artificial Sequence: Synthetic oligonucleotide
  Target: COL7A1; (-) strand; PAM type: YTN; PAM sequence: CTG
tcttgctttctgcctctttg

SEQ ID NO: 24109 - DNA, 20 bp, Artificial Sequence
  Description of Artificial Sequence: Synthetic oligonucleotide
  Target: COL7A1; (-) strand; PAM type: YTN; PAM sequence: TTC
tgtcttgctttctgcctctt

SEQ ID NO: 24110 - DNA, 20 bp, Artificial Sequence
  Description of Artificial Sequence: Synthetic oligonucleotide
  Target: COL7A1; (-) strand; PAM type: YTN; PAM sequence: TTT
ctgtcttgctttctgcctct

SEQ ID NO: 24111 - DNA, 20 bp, Artificial Sequence
  Description of Artificial Sequence: Synthetic oligonucleotide
  Target: COL7A1; (-) strand; PAM type: YTN; PAM sequence: TTT
tctgtcttgctttctgcctc

SEQ ID NO: 24112 - DNA, 20 bp, Artificial Sequence
  Description of Artificial Sequence: Synthetic oligonucleotide
  Target: COL7A1; (-) strand; PAM type: YTN; PAM sequence: TTT
ttctgtcttgctttctgcct

SEQ ID NO: 24113 - DNA, 20 bp, Artificial Sequence
  Description of Artificial Sequence: Synthetic oligonucleotide
  Target: COL7A1; (-) strand; PAM type: YTN; PAM sequence: TTT
tttctgtcttgctttctgcc

SEQ ID NO: 24114 - DNA, 20 bp, Artificial Sequence
  Description of Artificial Sequence: Synthetic oligonucleotide
  Target: COL7A1; (-) strand; PAM type: YTN; PAM sequence: TTT
ttttctgtcttgctttctgc

SEQ ID NO: 24115 - DNA, 20 bp, Artificial Sequence
  Description of Artificial Sequence: Synthetic oligonucleotide
  Target: COL7A1; (-) strand; PAM type: YTN; PAM sequence: CTT
tttttctgtcttgctttctg

SEQ ID NO: 24116 - DNA, 20 bp, Artificial Sequence
  Description of Artificial Sequence: Synthetic oligonucleotide
  Target: COL7A1; (-) strand; PAM type: YTN; PAM sequence: TTC
tttttttctgtcttgctttc

SEQ ID NO: 24117 - DNA, 20 bp, Artificial Sequence
  Description of Artificial Sequence: Synthetic oligonucleotide
  Target: COL7A1; (-) strand; PAM type: YTN; PAM sequence: TTT
ctttttttctgtcttgcttt

SEQ ID NO: 24118 - DNA, 20 bp, Artificial Sequence
  Description of Artificial Sequence: Synthetic oligonucleotide
  Target: COL7A1; (-) strand; PAM type: YTN; PAM sequence: TTG
tttctttttttctgtcttgc

SEQ ID NO: 24119 - DNA, 20 bp, Artificial Sequence
  Description of Artificial Sequence: Synthetic oligonucleotide
  Target: COL7A1; (-) strand; PAM type: YTN; PAM sequence: TTT
gtttctttttttctgtcttg

SEQ ID NO: 24120 - DNA, 20 bp, Artificial Sequence
  Description of Artificial Sequence: Synthetic oligonucleotide
  Target: COL7A1; (-) strand; PAM type: YTN; PAM sequence: CTT
tgtttctttttttctgtctt

SEQ ID NO: 24121 - DNA, 20 bp, Artificial Sequence
  Description of Artificial Sequence: Synthetic oligonucleotide
  Target: COL7A1; (-) strand; PAM type: YTN; PAM sequence: TTC
tttgtttctttttttctgtc

SEQ ID NO: 24122 - DNA, 20 bp, Artificial Sequence
  Description of Artificial Sequence: Synthetic oligonucleotide
  Target: COL7A1; (-) strand; PAM type: YTN; PAM sequence: TTT
ctttgtttctttttttctgt

SEQ ID NO: 24123 - DNA, 20 bp, Artificial Sequence
  Description of Artificial Sequence: Synthetic oligonucleotide
  Target: COL7A1; (-) strand; PAM type: YTN; PAM sequence: CTG
gatttctttgtttctttttt

SEQ ID NO: 24124 - DNA, 20 bp, Artificial Sequence
  Description of Artificial Sequence: Synthetic oligonucleotide
  Target: COL7A1; (-) strand; PAM type: YTN; PAM sequence: CTC
tggatttctttgtttctttt

SEQ ID NO: 24125 - DNA, 20 bp, Artificial Sequence
  Description of Artificial Sequence: Synthetic oligonucleotide
  Target: COL7A1; (-) strand; PAM type: YTN; PAM sequence: CTG
tctctggatttctttgtttc

SEQ ID NO: 24126 - DNA, 20 bp, Artificial Sequence
  Description of Artificial Sequence: Synthetic oligonucleotide
  Target: COL7A1; (-) strand; PAM type: YTN; PAM sequence: CTC
tgtctctggatttctttgtt

SEQ ID NO: 24127 - DNA, 20 bp, Artificial Sequence
  Description of Artificial Sequence: Synthetic oligonucleotide
  Target: COL7A1; (-) strand; PAM type: YTN; PAM sequence: CTG
tccctctgtctctggatttc

SEQ ID NO: 24128 - DNA, 20 bp, Artificial Sequence
  Description of Artificial Sequence: Synthetic oligonucleotide
  Target: COL7A1; (-) strand; PAM type: YTN; PAM sequence: TTG
ctgtccctctgtctctggat

SEQ ID NO: 24129 - DNA, 20 bp, Artificial Sequence
  Description of Artificial Sequence: Synthetic oligonucleotide
  Target: COL7A1; (-) strand; PAM type: YTN; PAM sequence: CTT
gctgtccctctgtctctgga

SEQ ID NO: 24130 - DNA, 20 bp, Artificial Sequence
  Description of Artificial Sequence: Synthetic oligonucleotide
  Target: COL7A1; (-) strand; PAM type: YTN; PAM sequence: CTC
ttgctgtccctctgtctctg

SEQ ID NO: 24131 - DNA, 20 bp, Artificial Sequence
  Description of Artificial Sequence: Synthetic oligonucleotide
  Target: COL7A1; (-) strand; PAM type: YTN; PAM sequence: CTC
tcttgctgtccctctgtctc

SEQ ID NO: 24132 - DNA, 20 bp, Artificial Sequence
  Description of Artificial Sequence: Synthetic oligonucleotide
  Target: COL7A1; (-) strand; PAM type: YTN; PAM sequence: CTC
cctctcttgctgtccctctg

SEQ ID NO: 24133 - DNA, 20 bp, Artificial Sequence
  Description of Artificial Sequence: Synthetic oligonucleotide
  Target: COL7A1; (-) strand; PAM type: YTN; PAM sequence: TTC
atctccctctcttgctgtcc

SEQ ID NO: 24134 - DNA, 20 bp, Artificial Sequence
  Description of Artificial Sequence: Synthetic oligonucleotide
  Target: COL7A1; (-) strand; PAM type: YTN; PAM sequence: CTT
catctccctctcttgctgtc

SEQ ID NO: 24135 - DNA, 20 bp, Artificial Sequence
  Description of Artificial Sequence: Synthetic oligonucleotide
  Target: COL7A1; (-) strand; PAM type: YTN; PAM sequence: CTC
cttcatctccctctcttgct

SEQ ID NO: 24136 - DNA, 20 bp, Artificial Sequence
  Description of Artificial Sequence: Synthetic oligonucleotide
  Target: COL7A1; (-) strand; PAM type: YTN; PAM sequence: CTC
catctccttcatctccctct

SEQ ID NO: 24137 - DNA, 20 bp, Artificial Sequence
  Description of Artificial Sequence: Synthetic oligonucleotide
  Target: COL7A1; (-) strand; PAM type: YTN; PAM sequence: CTG
cctccatctccttcatctcc

SEQ ID NO: 24138 - DNA, 20 bp, Artificial Sequence
  Description of Artificial Sequence: Synthetic oligonucleotide
  Target: COL7A1; (-) strand; PAM type: YTN; PAM sequence: CTC
tgcctccatctccttcatct

SEQ ID NO: 24139 - DNA, 20 bp, Artificial Sequence
  Description of Artificial Sequence: Synthetic oligonucleotide
  Target: COL7A1; (-) strand; PAM type: YTN; PAM sequence: TTG
ctctgcctccatctccttca

SEQ ID NO: 24140 - DNA, 20 bp, Artificial Sequence
  Description of Artificial Sequence: Synthetic oligonucleotide
  Target: COL7A1; (-) strand; PAM type: YTN; PAM sequence: TTT
gctctgcctccatctccttc

SEQ ID NO: 24141 - DNA, 20 bp, Artificial Sequence
  Description of Artificial Sequence: Synthetic oligonucleotide
  Target: COL7A1; (-) strand; PAM type: YTN; PAM sequence: TTT
tgctctgcctccatctcctt

SEQ ID NO: 24142 - DNA, 20 bp, Artificial Sequence
  Description of Artificial Sequence: Synthetic oligonucleotide
  Target: COL7A1; (-) strand; PAM type: YTN; PAM sequence: CTC
cattttgctctgcctccatc

SEQ ID NO: 24143 - DNA, 20 bp, Artificial Sequence
  Description of Artificial Sequence: Synthetic oligonucleotide
  Target: COL7A1; (-) strand; PAM type: YTN; PAM sequence: CTA
gtctccattttgctctgcct

SEQ ID NO: 24144 - DNA, 20 bp, Artificial Sequence
  Description of Artificial Sequence: Synthetic oligonucleotide
  Target: COL7A1; (-) strand; PAM type: YTN; PAM sequence: TTC
tagtctccattttgctctgc

SEQ ID NO: 24145 - DNA, 20 bp, Artificial Sequence
  Description of Artificial Sequence: Synthetic oligonucleotide
  Target: COL7A1; (-) strand; PAM type: YTN; PAM sequence: CTT
ctagtctccattttgctctg

SEQ ID NO: 24146 - DNA, 20 bp, Artificial Sequence
  Description of Artificial Sequence: Synthetic oligonucleotide
  Target: COL7A1; (-) strand; PAM type: YTN; PAM sequence: TTC
ttctagtctccattttgctc

SEQ ID NO: 24147 - DNA, 20 bp, Artificial Sequence
  Description of Artificial Sequence: Synthetic oligonucleotide
  Target: COL7A1; (-) strand; PAM type: YTN; PAM sequence: TTT
cttctagtctccattttgct

SEQ ID NO: 24148 - DNA, 20 bp, Artificial Sequence
  Description of Artificial Sequence: Synthetic oligonucleotide
  Target: COL7A1; (-) strand; PAM type: YTN; PAM sequence: TTT
tcttctagtctccattttgc

SEQ ID NO: 24149 - DNA, 20 bp, Artificial Sequence
  Description of Artificial Sequence: Synthetic oligonucleotide
  Target: COL7A1; (-) strand; PAM type: YTN; PAM sequence: TTT
ttcttctagtctccattttg

SEQ ID NO: 24150 - DNA, 20 bp, Artificial Sequence
  Description of Artificial Sequence: Synthetic oligonucleotide
  Target: COL7A1; (-) strand; PAM type: YTN; PAM sequence: CTT
tttcttctagtctccatttt

SEQ ID NO: 24151 - DNA, 20 bp, Artificial Sequence
  Description of Artificial Sequence: Synthetic oligonucleotide
  Target: COL7A1; (-) strand; PAM type: YTN; PAM sequence: CTG
tctttttcttctagtctcca

SEQ ID NO: 24152 - DNA, 20 bp, Artificial Sequence
  Description of Artificial Sequence: Synthetic oligonucleotide
  Target: COL7A1; (-) strand; PAM type: YTN; PAM sequence: CTG
tctgtctttttcttctagtc

SEQ ID NO: 24153 - DNA, 20 bp, Artificial Sequence
  Description of Artificial Sequence: Synthetic oligonucleotide
  Target: COL7A1; (-) strand; PAM type: YTN; PAM sequence: TTC
tgtctgtctttttcttctag

SEQ ID NO: 24154 - DNA, 20 bp, Artificial Sequence
  Description of Artificial Sequence: Synthetic oligonucleotide
  Target: COL7A1; (-) strand; PAM type: YTN; PAM sequence: TTT
ctgtctgtctttttcttcta

SEQ ID NO: 24155 - DNA, 20 bp, Artificial Sequence
  Description of Artificial Sequence: Synthetic oligonucleotide
  Target: COL7A1; (-) strand; PAM type: YTN; PAM sequence: CTG
ggatggtttctgtctgtctt

SEQ ID NO: 24156 - DNA, 20 bp, Artificial Sequence
  Description of Artificial Sequence: Synthetic oligonucleotide
  Target: COL7A1; (-) strand; PAM type: YTN; PAM sequence: CTC
tgggatggtttctgtctgtc

SEQ ID NO: 24157 - DNA, 20 bp, Artificial Sequence
  Description of Artificial Sequence: Synthetic oligonucleotide
  Target: COL7A1; (-) strand; PAM type: YTN; PAM sequence: CTG
tctctgggatggtttctgtc

SEQ ID NO: 24158 - DNA, 20 bp, Artificial Sequence
  Description of Artificial Sequence: Synthetic oligonucleotide
  Target: COL7A1; (-) strand; PAM type: YTN; PAM sequence: CTG
tctgtctctgggatggtttc

SEQ ID NO: 24159 - DNA, 20 bp, Artificial Sequence
  Description of Artificial Sequence: Synthetic oligonucleotide
  Target: COL7A1; (-) strand; PAM type: YTN; PAM sequence: TTC
catcatgctgtctgtctctg

SEQ ID NO: 24160 - DNA, 20 bp, Artificial Sequence
  Description of Artificial Sequence: Synthetic oligonucleotide
  Target: COL7A1; (-) strand; PAM type: YTN; PAM sequence: TTT
ccatcatgctgtctgtctct

SEQ ID NO: 24161 - DNA, 20 bp, Artificial Sequence
  Description of Artificial Sequence: Synthetic oligonucleotide
  Target: COL7A1; (-) strand; PAM type: YTN; PAM sequence: CTT
tccatcatgctgtctgtctc

SEQ ID NO: 24162 - DNA, 20 bp, Artificial Sequence
  Description of Artificial Sequence: Synthetic oligonucleotide
  Target: COL7A1; (-) strand; PAM type: YTN; PAM sequence: TTC
tttccatcatgctgtctgtc

SEQ ID NO: 24163 - DNA, 20 bp, Artificial Sequence
  Description of Artificial Sequence: Synthetic oligonucleotide
  Target: COL7A1; (-) strand; PAM type: YTN; PAM sequence: TTT
ctttccatcatgctgtctgt

SEQ ID NO: 24164 - DNA, 20 bp, Artificial Sequence
  Description of Artificial Sequence: Synthetic oligonucleotide
  Target: COL7A1; (-) strand; PAM type: YTN; PAM sequence: CTT
tctttccatcatgctgtctg

SEQ ID NO: 24165 - DNA, 20 bp, Artificial Sequence
  Description of Artificial Sequence: Synthetic oligonucleotide
  Target: COL7A1; (-) strand; PAM type: YTN; PAM sequence: CTG
aatctttctttccatcatgc

SEQ ID NO: 24166 - DNA, 20 bp, Artificial Sequence
  Description of Artificial Sequence: Synthetic oligonucleotide
  Target: COL7A1; (-) strand; PAM type: YTN; PAM sequence: CTG
tctgaatctttctttccatc

SEQ ID NO: 24167 - DNA, 20 bp, Artificial Sequence
  Description of Artificial Sequence: Synthetic oligonucleotide
  Target: COL7A1; (-) strand; PAM type: YTN; PAM sequence: TTC
tgtctgaatctttctttcca

SEQ ID NO: 24168 - DNA, 20 bp, Artificial Sequence
  Description of Artificial Sequence: Synthetic oligonucleotide
  Target: COL7A1; (-) strand; PAM type: YTN; PAM sequence: TTT
ctgtctgaatctttctttcc

SEQ ID NO: 24169 - DNA, 20 bp, Artificial Sequence
  Description of Artificial Sequence: Synthetic oligonucleotide
  Target: COL7A1; (-) strand; PAM type: YTN; PAM sequence: CTG
tgtttctgtctgaatctttc

SEQ ID NO: 24170 - DNA, 20 bp, Artificial Sequence
  Description of Artificial Sequence: Synthetic oligonucleotide
  Target: COL7A1; (-) strand; PAM type: YTN; PAM sequence: CTC
tgtgtttctgtctgaatctt

SEQ ID NO: 24171 - DNA, 20 bp, Artificial Sequence
  Description of Artificial Sequence: Synthetic oligonucleotide
  Target: COL7A1; (-) strand; PAM type: YTN; PAM sequence: CTG
tggactctgtgtttctgtct

SEQ ID NO: 24172 - DNA, 20 bp, Artificial Sequence
  Description of Artificial Sequence: Synthetic oligonucleotide
  Target: COL7A1; (-) strand; PAM type: YTN; PAM sequence: CTC
ctgtggactctgtgtttctg

SEQ ID NO: 24173 - DNA, 20 bp, Artificial Sequence
  Description of Artificial Sequence: Synthetic oligonucleotide
  Target: COL7A1; (-) strand; PAM type: YTN; PAM sequence: CTG
ccctcctgtggactctgtgt

SEQ ID NO: 24174 - DNA, 20 bp, Artificial Sequence
  Description of Artificial Sequence: Synthetic oligonucleotide
  Target: COL7A1; (-) strand; PAM type: YTN; PAM sequence: CTG
agaaccgcctgccctcctgt

SEQ ID NO: 24175 - DNA, 20 bp, Artificial Sequence
  Description of Artificial Sequence: Synthetic oligonucleotide
  Target: COL7A1; (-) strand; PAM type: YTN; PAM sequence: CTG
ctgagaaccgcctgccctcc

SEQ ID NO: 24176 - DNA, 20 bp, Artificial Sequence
  Description of Artificial Sequence: Synthetic oligonucleotide
  Target: COL7A1; (-) strand; PAM type: YTN; PAM sequence: CTC
ctgctgagaaccgcctgccc

SEQ ID NO: 24177 - DNA, 20 bp, Artificial Sequence
  Description of Artificial Sequence: Synthetic oligonucleotide
  Target: COL7A1; (-) strand; PAM type: YTN; PAM sequence: CTC
tcctgctgagaaccgcctgc

SEQ ID NO: 24178 - DNA, 20 bp, Artificial Sequence
  Description of Artificial Sequence: Synthetic oligonucleotide
  Target: COL7A1; (-) strand; PAM type: YTN; PAM sequence: CTG
caagctctcctgctgagaac

SEQ ID NO: 24179 - DNA, 20 bp, Artificial Sequence
  Description of Artificial Sequence: Synthetic oligonucleotide
  Target: COL7A1; (-) strand; PAM type: YTN; PAM sequence: CTG
gatcagctgcaagctctcct

SEQ ID NO: 24180 - DNA, 20 bp, Artificial Sequence
  Description of Artificial Sequence: Synthetic oligonucleotide
  Target: COL7A1; (-) strand; PAM type: YTN; PAM sequence: TTC
ctggatcagctgcaagctct

SEQ ID NO: 24181 - DNA, 20 bp, Artificial Sequence
  Description of Artificial Sequence: Synthetic oligonucleotide
  Target: COL7A1; (-) strand; PAM type: YTN; PAM sequence: TTT
cctggatcagctgcaagctc

SEQ ID NO: 24182 - DNA, 20 bp, Artificial Sequence
  Description of Artificial Sequence: Synthetic oligonucleotide
  Target: COL7A1; (-) strand; PAM type: YTN; PAM sequence: CTG
tttcctggatcagctgcaag

SEQ ID NO: 24183 - DNA, 20 bp, Artificial Sequence
  Description of Artificial Sequence: Synthetic oligonucleotide
  Target: COL7A1; (-) strand; PAM type: YTN; PAM sequence: TTC
tgtttcctggatcagctgca

SEQ ID NO: 24184 - DNA, 20 bp, Artificial Sequence
  Description of Artificial Sequence: Synthetic oligonucleotide
  Target: COL7A1; (-) strand; PAM type: YTN; PAM sequence: CTT
ctgtttcctggatcagctgc

SEQ ID NO: 24185 - DNA, 20 bp, Artificial Sequence
  Description of Artificial Sequence: Synthetic oligonucleotide
  Target: COL7A1; (-) strand; PAM type: YTN; PAM sequence: CTG
cccttctgtttcctggatca

SEQ ID NO: 24186 - DNA, 20 bp, Artificial Sequence
  Description of Artificial Sequence: Synthetic oligonucleotide
  Target: COL7A1; (-) strand; PAM type: YTN; PAM sequence: TTC
ctgcccttctgtttcctgga

SEQ ID NO: 24187 - DNA, 20 bp, Artificial Sequence
  Description of Artificial Sequence: Synthetic oligonucleotide
  Target: COL7A1; (-) strand; PAM type: YTN; PAM sequence: CTG
agatccgattcctgcccttc

SEQ ID NO: 24188 - DNA, 20 bp, Artificial Sequence
  Description of Artificial Sequence: Synthetic oligonucleotide
  Target: COL7A1; (-) strand; PAM type: YTN; PAM sequence: CTC
tgagatccgattcctgccct

SEQ ID NO: 24189 - DNA, 20 bp, Artificial Sequence
  Description of Artificial Sequence: Synthetic oligonucleotide
  Target: COL7A1; (-) strand; PAM type: YTN; PAM sequence: CTG
cctctgagatccgattcctg

SEQ ID NO: 24190 - DNA, 20 bp, Artificial Sequence
  Description of Artificial Sequence: Synthetic oligonucleotide
  Target: COL7A1; (-) strand; PAM type: YTN; PAM sequence: TTC
tgcctctgagatccgattcc

SEQ ID NO: 24191 - DNA, 20 bp, Artificial Sequence
  Description of Artificial Sequence: Synthetic oligonucleotide
  Target: COL7A1; (-) strand; PAM type: YTN; PAM sequence: TTT
ctgcctctgagatccgattc

SEQ ID NO: 24192 - DNA, 20 bp, Artificial Sequence
  Description of Artificial Sequence: Synthetic oligonucleotide
  Target: COL7A1; (-) strand; PAM type: YTN; PAM sequence: TTT
tctgcctctgagatccgatt

SEQ ID NO: 24193 - DNA, 20 bp, Artificial Sequence
  Description of Artificial Sequence: Synthetic oligonucleotide
  Target: COL7A1; (-) strand; PAM type: YTN; PAM sequence: CTT
ttctgcctctgagatccgat

SEQ ID NO: 24194 - DNA, 20 bp, Artificial Sequence
  Description of Artificial Sequence: Synthetic oligonucleotide
  Target: COL7A1; (-) strand; PAM type: YTN; PAM sequence: CTG
cttttctgcctctgagatcc

SEQ ID NO: 24195 - DNA, 20 bp, Artificial Sequence
  Description of Artificial Sequence: Synthetic oligonucleotide
  Target: COL7A1; (-) strand; PAM type: YTN; PAM sequence: CTG
gctgcttttctgcctctgag

SEQ ID NO: 24196 - DNA, 20 bp, Artificial Sequence
  Description of Artificial Sequence: Synthetic oligonucleotide
  Target: COL7A1; (-) strand; PAM type: YTN; PAM sequence: CTC
tggctgcttttctgcctctg

SEQ ID NO: 24197 - DNA, 20 bp, Artificial Sequence
  Description of Artificial Sequence: Synthetic oligonucleotide
  Target: COL7A1; (-) strand; PAM type: YTN; PAM sequence: CTG
ggatctctggctgcttttct

SEQ ID NO: 24198 - DNA, 20 bp, Artificial Sequence
  Description of Artificial Sequence: Synthetic oligonucleotide
  Target: COL7A1; (-) strand; PAM type: YTN; PAM sequence: CTC
tgggatctctggctgctttt

SEQ ID NO: 24199 - DNA, 20 bp, Artificial Sequence
  Description of Artificial Sequence: Synthetic oligonucleotide
  Target: COL7A1; (-) strand; PAM type: YTN; PAM sequence: TTG
gacccaggggactctgggat

SEQ ID NO: 24200 - DNA, 20 bp, Artificial Sequence
  Description of Artificial Sequence: Synthetic oligonucleotide
  Target: COL7A1; (-) strand; PAM type: YTN; PAM sequence: CTT
ggacccaggggactctggga

SEQ ID NO: 24201 - DNA, 20 bp, Artificial Sequence
  Description of Artificial Sequence: Synthetic oligonucleotide
  Target: COL7A1; (-) strand; PAM type: YTN; PAM sequence: TTA
tggagggcttggacccaggg

SEQ ID NO: 24202 - DNA, 20 bp, Artificial Sequence
  Description of Artificial Sequence: Synthetic oligonucleotide
  Target: COL7A1; (-) strand; PAM type: YTN; PAM sequence: TTT
atggagggcttggacccagg

SEQ ID NO: 24203 - DNA, 20 bp, Artificial Sequence
  Description of Artificial Sequence: Synthetic oligonucleotide
  Target: COL7A1; (-) strand; PAM type: YTN; PAM sequence: CTT
tatggagggcttggacccag

SEQ ID NO: 24204 - DNA, 20 bp, Artificial Sequence
  Description of Artificial Sequence: Synthetic oligonucleotide
  Target: COL7A1; (-) strand; PAM type: YTN; PAM sequence: TTG
gctttatggagggcttggac

SEQ ID NO: 24205 - DNA, 20 bp, Artificial Sequence
  Description of Artificial Sequence: Synthetic oligonucleotide
  Target: COL7A1; (-) strand; PAM type: YTN; PAM sequence: TTT
ggctttatggagggcttgga

SEQ ID NO: 24206 - DNA, 20 bp, Artificial Sequence
  Description of Artificial Sequence: Synthetic oligonucleotide
  Target: COL7A1; (-) strand; PAM type: YTN; PAM sequence: TTG
agtggatgtggggtttggct

SEQ ID NO: 24207 - DNA, 20 bp, Artificial Sequence
  Description of Artificial Sequence: Synthetic oligonucleotide
  Target: COL7A1; (-) strand; PAM type: YTN; PAM sequence: TTG
gaggttgagtggatgtgggg

SEQ ID NO: 24208 - DNA, 20 bp, Artificial Sequence
  Description of Artificial Sequence: Synthetic oligonucleotide
  Target: COL7A1; (-) strand; PAM type: YTN; PAM sequence: CTT
ggaggttgagtggatgtggg

SEQ ID NO: 24209 - DNA, 20 bp, Artificial Sequence
  Description of Artificial Sequence: Synthetic oligonucleotide
  Target: COL7A1; (-) strand; PAM type: YTN; PAM sequence: TTG
ggtcgggatgggaagggtct

SEQ ID NO: 24210 - DNA, 20 bp, Artificial Sequence
  Description of Artificial Sequence: Synthetic oligonucleotide
  Target: COL7A1; (-) strand; PAM type: YTN; PAM sequence: CTG
ggttgggtcgggatgggaag

SEQ ID NO: 24211 - DNA, 20 bp, Artificial Sequence
  Description of Artificial Sequence: Synthetic oligonucleotide
  Target: COL7A1; (-) strand; PAM type: YTN; PAM sequence: CTG
gtggcggtaggactgggttg

SEQ ID NO: 24212 - DNA, 20 bp, Artificial Sequence
  Description of Artificial Sequence: Synthetic oligonucleotide
  Target: COL7A1; (-) strand; PAM type: YTN; PAM sequence: TTA
ccccagaagcagctggtggc

SEQ ID NO: 24213 - DNA, 20 bp, Artificial Sequence
  Description of Artificial Sequence: Synthetic oligonucleotide
  Target: COL7A1; (-) strand; PAM type: YTN; PAM sequence: CTT
accccagaagcagctggtgg

SEQ ID NO: 24214 - DNA, 20 bp, Artificial Sequence
  Description of Artificial Sequence: Synthetic oligonucleotide
  Target: COL7A1; (-) strand; PAM type: YTN; PAM sequence: CTG
ccttaccccagaagcagctg

SEQ ID NO: 24215 - DNA, 20 bp, Artificial Sequence
  Description of Artificial Sequence: Synthetic oligonucleotide
  Target: COL7A1; (-) strand; PAM type: YTN; PAM sequence: CTG
gccccagccccaggcagcca

SEQ ID NO: 24216 - DNA, 20 bp, Artificial Sequence
  Description of Artificial Sequence: Synthetic oligonucleotide
  Target: COL7A1; (-) strand; PAM type: YTN; PAM sequence: CTG
aagcggggtagagggtcaga

SEQ ID NO: 24217 - DNA, 20 bp, Artificial Sequence
  Description of Artificial Sequence: Synthetic oligonucleotide
  Target: COL7A1; (-) strand; PAM type: YTN; PAM sequence: CTG
agggagataaatgggccctg

SEQ ID NO: 24218 - DNA, 20 bp, Artificial Sequence
  Description of Artificial Sequence: Synthetic oligonucleotide
  Target: COL7A1; (-) strand; PAM type: YTN; PAM sequence: CTC
ccaccccagggggctgaggg

SEQ ID NO: 24219 - DNA, 20 bp, Artificial Sequence
  Description of Artificial Sequence: Synthetic oligonucleotide
  Target: COL7A1; (-) strand; PAM type: YTN; PAM sequence: CTC
atgccaggaagcatgtacca

SEQ ID NO: 24220 - DNA, 20 bp, Artificial Sequence
  Description of Artificial Sequence: Synthetic oligonucleotide
  Target: COL7A1; (-) strand; PAM type: YTN; PAM sequence: CTG
cctcatgccaggaagcatgt

SEQ ID NO: 24221 - DNA, 20 bp, Artificial Sequence
  Description of Artificial Sequence: Synthetic oligonucleotide
  Target: COL7A1; (-) strand; PAM type: YTN; PAM sequence: CTA
aggacacccccgggagggat

SEQ ID NO: 24222 - DNA, 20 bp, Artificial Sequence
  Description of Artificial Sequence: Synthetic oligonucleotide
  Target: COL7A1; (-) strand; PAM type: YTN; PAM sequence: TTG
tccccggaaaagagtagata

SEQ ID NO: 24223 - DNA, 20 bp, Artificial Sequence
  Description of Artificial Sequence: Synthetic oligonucleotide
  Target: COL7A1; (-) strand; PAM type: YTN; PAM sequence: CTT
gtccccggaaaagagtagat

SEQ ID NO: 24224 - DNA, 20 bp, Artificial Sequence
  Description of Artificial Sequence: Synthetic oligonucleotide
  Target: COL7A1; (-) strand; PAM type: YTN; PAM sequence: CTC
agtccccaacttgtccccgg

SEQ ID NO: 24225 - DNA, 20 bp, Artificial Sequence
  Description of Artificial Sequence: Synthetic oligonucleotide
  Target: COL7A1; (-) strand; PAM type: YTN; PAM sequence: TTC
tcagtccccaacttgtcccc

SEQ ID NO: 24226 - DNA, 20 bp, Artificial Sequence
  Description of Artificial Sequence: Synthetic oligonucleotide
  Target: COL7A1; (-) strand; PAM type: YTN; PAM sequence: TTG
tgattctcagtccccaactt

SEQ ID NO: 24227 - DNA, 20 bp, Artificial Sequence
  Description of Artificial Sequence: Synthetic oligonucleotide
  Target: COL7A1; (-) strand; PAM type: YTN; PAM sequence: CTT
gtgattctcagtccccaact

SEQ ID NO: 24228 - DNA, 20 bp, Artificial Sequence
  Description of Artificial Sequence: Synthetic oligonucleotide
  Target: COL7A1; (-) strand; PAM type: YTN; PAM sequence: CTG
tcttgtgattctcagtcccc

SEQ ID NO: 24229 - DNA, 20 bp, Artificial Sequence
  Description of Artificial Sequence: Synthetic oligonucleotide
  Target: COL7A1; (-) strand; PAM type: YTN; PAM sequence: CTG
gtcactgtcttgtgattctc

SEQ ID NO: 24230 - DNA, 20 bp, Artificial Sequence
  Description of Artificial Sequence: Synthetic oligonucleotide
  Target: COL7A1; (-) strand; PAM type: YTN; PAM sequence: CTG
cccagtcctggtcactgtct

SEQ ID NO: 24231 - DNA, 20 bp, Artificial Sequence
  Description of Artificial Sequence: Synthetic oligonucleotide
  Target: COL7A1; (-) strand; PAM type: YTN; PAM sequence: CTC
tgcccagtcctggtcactgt

SEQ ID NO: 24232 - DNA, 20 bp, Artificial Sequence
  Description of Artificial Sequence: Synthetic oligonucleotide
  Target: COL7A1; (-) strand; PAM type: YTN; PAM sequence: CTG
catgggtacagagtccctct

SEQ ID NO: 24233 - DNA, 20 bp, Artificial Sequence
  Description of Artificial Sequence: Synthetic oligonucleotide
  Target: COL7A1; (-) strand; PAM type: YTN; PAM sequence: TTC
tgcatgggtacagagtccct

SEQ ID NO: 24234 - DNA, 20 bp, Artificial Sequence
  Description of Artificial Sequence: Synthetic oligonucleotide
  Target: COL7A1; (-) strand; PAM type: YTN; PAM sequence: TTA
ttctgcatgggtacagagtc

SEQ ID NO: 24235 - DNA, 20 bp, Artificial Sequence
  Description of Artificial Sequence: Synthetic oligonucleotide
  Target: COL7A1; (-) strand; PAM type: YTN; PAM sequence: TTG
gtattattctgcatgggtac

SEQ ID NO: 24236 - DNA, 20 bp, Artificial Sequence
  Description of Artificial Sequence: Synthetic oligonucleotide
  Target: COL7A1; (-) strand; PAM type: YTN; PAM sequence: TTG
gggggttggtattattctgc

SEQ ID NO: 24237 - DNA, 20 bp, Artificial Sequence
  Description of Artificial Sequence: Synthetic oligonucleotide
  Target: COL7A1; (-) strand; PAM type: YTN; PAM sequence: CTT
ggggggttggtattattctg

SEQ ID NO: 24238 - DNA, 20 bp, Artificial Sequence
  Description of Artificial Sequence: Synthetic oligonucleotide
  Target: COL7A1; (-) strand; PAM type: YTN; PAM sequence: TTC
cttggggggttggtattatt

SEQ ID NO: 24239 - DNA, 20 bp, Artificial Sequence
  Description of Artificial Sequence: Synthetic oligonucleotide
  Target: COL7A1; (-) strand; PAM type: YTN; PAM sequence: TTT
ccttggggggttggtattat

SEQ ID NO: 24240 - DNA, 20 bp, Artificial Sequence
  Description of Artificial Sequence: Synthetic oligonucleotide
  Target: COL7A1; (-) strand; PAM type: YTN; PAM sequence: TTT
tccttggggggttggtatta

SEQ ID NO: 24241 - DNA, 20 bp, Artificial Sequence
  Description of Artificial Sequence: Synthetic oligonucleotide
  Target: COL7A1; (-) strand; PAM type: YTN; PAM sequence: TTC
aagggggaaggttttccttg

SEQ ID NO: 24242 - DNA, 20 bp, Artificial Sequence
  Description of Artificial Sequence: Synthetic oligonucleotide
  Target: COL7A1; (-) strand; PAM type: YTN; PAM sequence: TTT
caagggggaaggttttcctt

SEQ ID NO: 24243 - DNA, 20 bp, Artificial Sequence
  Description of Artificial Sequence: Synthetic oligonucleotide
  Target: COL7A1; (-) strand; PAM type: YTN; PAM sequence: TTG
ggaagatggggggtttcaag

SEQ ID NO: 24244 - DNA, 20 bp, Artificial Sequence
  Description of Artificial Sequence: Synthetic oligonucleotide
  Target: COL7A1; (-) strand; PAM type: YTN; PAM sequence: TTT
gggaagatggggggtttcaa

SEQ ID NO: 24245 - DNA, 20 bp, Artificial Sequence
  Description of Artificial Sequence: Synthetic oligonucleotide
  Target: COL7A1; (-) strand; PAM type: YTN; PAM sequence: CTG
tttgggaagatggggggttt

SEQ ID NO: 24246 - DNA, 20 bp, Artificial Sequence
  Description of Artificial Sequence: Synthetic oligonucleotide
  Target: COL7A1; (-) strand; PAM type: YTN; PAM sequence: TTG
tgactgtttgggaagatggg

SEQ ID NO: 24247 - DNA, 20 bp, Artificial Sequence
  Description of Artificial Sequence: Synthetic oligonucleotide
  Target: COL7A1; (-) strand; PAM type: YTN; PAM sequence: CTG
ttgtgactgtttgggaagat

SEQ ID NO: 24248 - DNA, 20 bp, Artificial Sequence
  Description of Artificial Sequence: Synthetic oligonucleotide
  Target: COL7A1; (-) strand; PAM type: YTN; PAM sequence: CTC
ctgttgtgactgtttgggaa

SEQ ID NO: 24249 - DNA, 20 bp, Artificial Sequence
  Description of Artificial Sequence: Synthetic oligonucleotide
  Target: COL7A1; (-) strand; PAM type: YTN; PAM sequence: TTA
aaaggctcctgttgtgactg

SEQ ID NO: 24250 - DNA, 20 bp, Artificial Sequence
  Description of Artificial Sequence: Synthetic oligonucleotide
  Target: COL7A1; (-) strand; PAM type: YTN; PAM sequence: TTT
aaaaggctcctgttgtgact

SEQ ID NO: 24251 - DNA, 20 bp, Artificial Sequence
  Description of Artificial Sequence: Synthetic oligonucleotide
  Target: COL7A1; (-) strand; PAM type: YTN; PAM sequence: TTT
taaaaggctcctgttgtgac

SEQ ID NO: 24252 - DNA, 20 bp, Artificial Sequence
  Description of Artificial Sequence: Synthetic oligonucleotide
  Target: COL7A1; (-) strand; PAM type: YTN; PAM sequence: CTG
ttttaaaaggctcctgttgt

SEQ ID NO: 24253 - DNA, 20 bp, Artificial Sequence
  Description of Artificial Sequence: Synthetic oligonucleotide
  Target: COL7A1; (-) strand; PAM type: YTN; PAM sequence: CTG
ctgttttaaaaggctcctgt

SEQ ID NO: 24254 - DNA, 20 bp, Artificial Sequence
  Description of Artificial Sequence: Synthetic oligonucleotide
  Target: COL7A1; (-) strand; PAM type: YTN; PAM sequence: TTA
aagctgctgttttaaaaggc

SEQ ID NO: 24255 - DNA, 20 bp, Artificial Sequence
  Description of Artificial Sequence: Synthetic oligonucleotide
  Target: COL7A1; (-) strand; PAM type: YTN; PAM sequence: CTG
gggggcattaaagctgctgt

SEQ ID NO: 24256 - DNA, 20 bp, Artificial Sequence
  Description of Artificial Sequence: Synthetic oligonucleotide
  Target: COL7A1; (-) strand; PAM type: YTN; PAM sequence: TTC
tggggggcattaaagctgct

SEQ ID NO: 24257 - DNA, 20 bp, Artificial Sequence
  Description of Artificial Sequence: Synthetic oligonucleotide
  Target: COL7A1; (-) strand; PAM type: YTN; PAM sequence: CTG
attctggggggcattaaagc

SEQ ID NO: 24258 - DNA, 20 bp, Artificial Sequence
  Description of Artificial Sequence: Synthetic oligonucleotide
  Target: COL7A1; (-) strand; PAM type: YTN; PAM sequence: CTG
tgatgacatggtgctgattc

SEQ ID NO: 24259 - DNA, 20 bp, Artificial Sequence
  Description of Artificial Sequence: Synthetic oligonucleotide
  Target: COL7A1; (-) strand; PAM type: YTN; PAM sequence: TTG
acccaagcctgtgatgacat

SEQ ID NO: 24260 - DNA, 20 bp, Artificial Sequence
  Description of Artificial Sequence: Synthetic oligonucleotide
  Target: COL7A1; (-) strand; PAM type: YTN; PAM sequence: CTT
gacccaagcctgtgatgaca

SEQ ID NO: 24261 - DNA, 20 bp, Artificial Sequence
  Description of Artificial Sequence: Synthetic oligonucleotide
  Target: COL7A1; (-) strand; PAM type: YTN; PAM sequence: CTG
acccgccccttgacccaagc

SEQ ID NO: 24262 - DNA, 20 bp, Artificial Sequence
  Description of Artificial Sequence: Synthetic oligonucleotide
  Target: COL7A1; (-) strand; PAM type: YTN; PAM sequence: CTG
gcgtctgacccgccccttga

SEQ ID NO: 24263 - DNA, 20 bp, Artificial Sequence
  Description of Artificial Sequence: Synthetic oligonucleotide
  Target: COL7A1; (-) strand; PAM type: YTN; PAM sequence: CTG
tgggcagtgagcggatgtga

SEQ ID NO: 24264 - DNA, 20 bp, Artificial Sequence
  Description of Artificial Sequence: Synthetic oligonucleotide
  Target: COL7A1; (-) strand; PAM type: YTN; PAM sequence: CTG
tgggggggtggctgtgggca

SEQ ID NO: 24265 - DNA, 20 bp, Artificial Sequence
  Description of Artificial Sequence: Synthetic oligonucleotide
  Target: COL7A1; (-) strand; PAM type: YTN; PAM sequence: CTC
actgtgggggggtggctgtg

SEQ ID NO: 24266 - DNA, 20 bp, Artificial Sequence
  Description of Artificial Sequence: Synthetic oligonucleotide
  Target: COL7A1; (-) strand; PAM type: YTN; PAM sequence: CTG
gcagatgactcactgtgggg

SEQ ID NO: 24267 - DNA, 20 bp, Artificial Sequence
  Description of Artificial Sequence: Synthetic oligonucleotide
  Target: COL7A1; (-) strand; PAM type: YTN; PAM sequence: CTG
ccaccctggcagatgactca

SEQ ID NO: 24268 - DNA, 20 bp, Artificial Sequence
  Description of Artificial Sequence: Synthetic oligonucleotide
  Target: COL7A1; (-) strand; PAM type: YTN; PAM sequence: CTC
ctgccaccctggcagatgac

SEQ ID NO: 24269 - DNA, 20 bp, Artificial Sequence
  Description of Artificial Sequence: Synthetic oligonucleotide
  Target: COL7A1; (-) strand; PAM type: YTN; PAM sequence: TTG
tggctcctgccaccctggca

SEQ ID NO: 24270 - DNA, 20 bp, Artificial Sequence
  Description of Artificial Sequence: Synthetic oligonucleotide
  Target: COL7A1; (-) strand; PAM type: YTN; PAM sequence: CTG
tggacaaacccccattgtgg

SEQ ID NO: 24271 - DNA, 20 bp, Artificial Sequence
  Description of Artificial Sequence: Synthetic oligonucleotide
  Target: COL7A1; (-) strand; PAM type: YTN; PAM sequence: TTC
ccccctgtggacaaaccccc

SEQ ID NO: 24272 - DNA, 20 bp, Artificial Sequence
  Description of Artificial Sequence: Synthetic oligonucleotide
  Target: COL7A1; (-) strand; PAM type: YTN; PAM sequence: CTT
cccccctgtggacaaacccc

SEQ ID NO: 24273 - DNA, 20 bp, Artificial Sequence
  Description of Artificial Sequence: Synthetic oligonucleotide
  Target: COL7A1; (-) strand; PAM type: YTN; PAM sequence: CTA
gccttcccccctgtggacaa

SEQ ID NO: 24274 - DNA, 20 bp, Artificial Sequence
  Description of Artificial Sequence: Synthetic oligonucleotide
  Target: COL7A1; (-) strand; PAM type: YTN; PAM sequence: TTG
gtcccgtgggtctagccttc

SEQ ID NO: 24275 - DNA, 20 bp, Artificial Sequence
  Description of Artificial Sequence: Synthetic oligonucleotide
  Target: COL7A1; (-) strand; PAM type: YTN; PAM sequence: CTT
ggtcccgtgggtctagcctt

SEQ ID NO: 24276 - DNA, 20 bp, Artificial Sequence
  Description of Artificial Sequence: Synthetic oligonucleotide
  Target: COL7A1; (-) strand; PAM type: YTN; PAM sequence: TTC
agtgacttggtcccgtgggt

SEQ ID NO: 24277 - DNA, 20 bp, Artificial Sequence
  Description of Artificial Sequence: Synthetic oligonucleotide
  Target: COL7A1; (-) strand; PAM type: YTN; PAM sequence: TTT
cagtgacttggtcccgtggg

SEQ ID NO: 24278 - DNA, 20 bp, Artificial Sequence
  Description of Artificial Sequence: Synthetic oligonucleotide
  Target: COL7A1; (-) strand; PAM type: YTN; PAM sequence: TTA
tttcagtgacttggtcccgt

SEQ ID NO: 24279 - DNA, 20 bp, Artificial Sequence
  Description of Artificial Sequence: Synthetic oligonucleotide
  Target: COL7A1; (-) strand; PAM type: YTN; PAM sequence: TTG
tgtgcacgtgagcgtgcgtg

SEQ ID NO: 24280 - DNA, 20 bp, Artificial Sequence
  Description of Artificial Sequence: Synthetic oligonucleotide
  Target: COL7A1; (-) strand; PAM type: YTN; PAM sequence: CTT
gtgtgcacgtgagcgtgcgt

SEQ ID NO: 24281 - DNA, 20 bp, Artificial Sequence
  Description of Artificial Sequence: Synthetic oligonucleotide
  Target: COL7A1; (-) strand; PAM type: YTN; PAM sequence: CTA
gaggcttgtgtgcacgtgag

SEQ ID NO: 24282 - DNA, 20 bp, Artificial Sequence
  Description of Artificial Sequence: Synthetic oligonucleotide
  Target: COL7A1; (-) strand; PAM type: YTN; PAM sequence: TTG
gtgctagaggcttgtgtgca

SEQ ID NO: 24283 - DNA, 20 bp, Artificial Sequence
  Description of Artificial Sequence: Synthetic oligonucleotide
  Target: COL7A1; (-) strand; PAM type: YTN; PAM sequence: CTT
ggtgctagaggcttgtgtgc

SEQ ID NO: 24284 - DNA, 20 bp, Artificial Sequence
  Description of Artificial Sequence: Synthetic oligonucleotide
  Target: COL7A1; (-) strand; PAM type: YTN; PAM sequence: CTC
cccttggtgctagaggcttg

SEQ ID NO: 24285 - DNA, 20 bp, Artificial Sequence
  Description of Artificial Sequence: Synthetic oligonucleotide
  Target: COL7A1; (-) strand; PAM type: YTN; PAM sequence: CTG
tccctccccttggtgctaga

SEQ ID NO: 24286 - DNA, 20 bp, Artificial Sequence
  Description of Artificial Sequence: Synthetic oligonucleotide
  Target: COL7A1; (-) strand; PAM type: YTN; PAM sequence: CTC
agcagaaccccactgtccct

SEQ ID NO: 24287 - DNA, 20 bp, Artificial Sequence
  Description of Artificial Sequence: Synthetic oligonucleotide
  Target: COL7A1; (-) strand; PAM type: YTN; PAM sequence: CTG
gaggagtcggggtctcagca

SEQ ID NO: 24288 - DNA, 20 bp, Artificial Sequence
  Description of Artificial Sequence: Synthetic oligonucleotide
  Target: COL7A1; (-) strand; PAM type: YTN; PAM sequence: TTC
agcatcccctggaggagtcg

SEQ ID NO: 24289 - DNA, 20 bp, Artificial Sequence
  Description of Artificial Sequence: Synthetic oligonucleotide
  Target: COL7A1; (-) strand; PAM type: YTN; PAM sequence: CTG
agattcagcatcccctggag

SEQ ID NO: 24290 - DNA, 20 bp, Artificial Sequence
  Description of Artificial Sequence: Synthetic oligonucleotide
  Target: COL7A1; (-) strand; PAM type: YTN; PAM sequence: CTG
aggcccagataatgagctga

SEQ ID NO: 24291 - DNA, 20 bp, Artificial Sequence
  Description of Artificial Sequence: Synthetic oligonucleotide
  Target: COL7A1; (-) strand; PAM type: YTN; PAM sequence: CTG
cccaggactgaggcccagat

SEQ ID NO: 24292 - DNA, 20 bp, Artificial Sequence
  Description of Artificial Sequence: Synthetic oligonucleotide
  Target: COL7A1; (-) strand; PAM type: YTN; PAM sequence: CTC
accaggtactgcccaggact

SEQ ID NO: 24293 - DNA, 20 bp, Artificial Sequence
  Description of Artificial Sequence: Synthetic oligonucleotide
  Target: COL7A1; (-) strand; PAM type: YTN; PAM sequence: CTG
tcctcaccaggtactgccca

SEQ ID NO: 24294 - DNA, 20 bp, Artificial Sequence
  Description of Artificial Sequence: Synthetic oligonucleotide
  Target: COL7A1; (-) strand; PAM type: YTN; PAM sequence: TTC
caacctgtcctcaccaggta

SEQ ID NO: 24295 - DNA, 20 bp, Artificial Sequence
  Description of Artificial Sequence: Synthetic oligonucleotide
  Target: COL7A1; (-) strand; PAM type: YTN; PAM sequence: TTT
ccaacctgtcctcaccaggt

SEQ ID NO: 24296 - DNA, 20 bp, Artificial Sequence
  Description of Artificial Sequence: Synthetic oligonucleotide
  Target: COL7A1; (-) strand; PAM type: YTN; PAM sequence: CTG
acgaccgtttccaacctgtc

SEQ ID NO: 24297 - DNA, 20 bp, Artificial Sequence
  Description of Artificial Sequence: Synthetic oligonucleotide
  Target: COL7A1; (-) strand; PAM type: YTN; PAM sequence: CTC
cggggaaggtcagatggctg

SEQ ID NO: 24298 - DNA, 20 bp, Artificial Sequence
  Description of Artificial Sequence: Synthetic oligonucleotide
  Target: COL7A1; (-) strand; PAM type: YTN; PAM sequence: CTG
agcgtctccggggaaggtca

SEQ ID NO: 24299 - DNA, 20 bp, Artificial Sequence
  Description of Artificial Sequence: Synthetic oligonucleotide
  Target: COL7A1; (-) strand; PAM type: YTN; PAM sequence: CTG
cctgagcgtctccggggaag

SEQ ID NO: 24300 - DNA, 20 bp, Artificial Sequence
  Description of Artificial Sequence: Synthetic oligonucleotide
  Target: COL7A1; (-) strand; PAM type: YTN; PAM sequence: CTC
tgcctgagcgtctccgggga

SEQ ID NO: 24301 - DNA, 20 bp, Artificial Sequence
  Description of Artificial Sequence: Synthetic oligonucleotide
  Target: COL7A1; (-) strand; PAM type: YTN; PAM sequence: TTG
gcggtgcctctgcctgagcg

SEQ ID NO: 24302 - DNA, 20 bp, Artificial Sequence
  Description of Artificial Sequence: Synthetic oligonucleotide
  Target: COL7A1; (-) strand; PAM type: YTN; PAM sequence: CTT
ggcggtgcctctgcctgagc

SEQ ID NO: 24303 - DNA, 20 bp, Artificial Sequence
  Description of Artificial Sequence: Synthetic oligonucleotide
  Target: COL7A1; (-) strand; PAM type: YTN; PAM sequence: CTC
cccttggcggtgcctctgcc

SEQ ID NO: 24304 - DNA, 20 bp, Artificial Sequence
  Description of Artificial Sequence: Synthetic oligonucleotide
  Target: COL7A1; (-) strand; PAM type: YTN; PAM sequence: CTC
cctccccttggcggtgcctc

SEQ ID NO: 24305 - DNA, 20 bp, Artificial Sequence
  Description of Artificial Sequence: Synthetic oligonucleotide
  Target: COL7A1; (-) strand; PAM type: YTN; PAM sequence: CTC
cgctccctccccttggcggt

SEQ ID NO: 24306 - DNA, 20 bp, Artificial Sequence
  Description of Artificial Sequence: Synthetic oligonucleotide
  Target: COL7A1; (-) strand; PAM type: YTN; PAM sequence: TTG
tagcctccgctccctcccct

SEQ ID NO: 24307 - DNA, 20 bp, Artificial Sequence
  Description of Artificial Sequence: Synthetic oligonucleotide
  Target: COL7A1; (-) strand; PAM type: YTN; PAM sequence: CTG
ttgtagcctccgctccctcc

SEQ ID NO: 24308 - DNA, 20 bp, Artificial Sequence
  Description of Artificial Sequence: Synthetic oligonucleotide
  Target: COL7A1; (-) strand; PAM type: YTN; PAM sequence: TTC
ctgttgtagcctccgctccc

SEQ ID NO: 24309 - DNA, 20 bp, Artificial Sequence
  Description of Artificial Sequence: Synthetic oligonucleotide
  Target: COL7A1; (-) strand; PAM type: YTN; PAM sequence: CTT
cctgttgtagcctccgctcc

SEQ ID NO: 24310 - DNA, 20 bp, Artificial Sequence
  Description of Artificial Sequence: Synthetic oligonucleotide
  Target: COL7A1; (-) strand; PAM type: YTN; PAM sequence: CTG
aggtcagagcccccacttcc

SEQ ID NO: 24311 - DNA, 20 bp, Artificial Sequence
  Description of Artificial Sequence: Synthetic oligonucleotide
  Target: COL7A1; (-) strand; PAM type: YTN; PAM sequence: CTC
tgaggtcagagcccccactt

SEQ ID NO: 24312 - DNA, 20 bp, Artificial Sequence
  Description of Artificial Sequence: Synthetic oligonucleotide
  Target: COL7A1; (-) strand; PAM type: YTN; PAM sequence: CTA
agtatggacccctctgaggt

SEQ ID NO: 24313 - DNA, 20 bp, Artificial Sequence
  Description of Artificial Sequence: Synthetic oligonucleotide
  Target: COL7A1; (-) strand; PAM type: YTN; PAM sequence: TTA
aagacctaagtatggacccc

SEQ ID NO: 24314 - DNA, 20 bp, Artificial Sequence
  Description of Artificial Sequence: Synthetic oligonucleotide
  Target: COL7A1; (-) strand; PAM type: YTN; PAM sequence: TTT
aaagacctaagtatggaccc

SEQ ID NO: 24315 - DNA, 20 bp, Artificial Sequence
  Description of Artificial Sequence: Synthetic oligonucleotide
  Target: COL7A1; (-) strand; PAM type: YTN; PAM sequence: CTT
taaagacctaagtatggacc

SEQ ID NO: 24316 - DNA, 20 bp, Artificial Sequence
  Description of Artificial Sequence: Synthetic oligonucleotide
  Target: COL7A1; (-) strand; PAM type: YTN; PAM sequence: CTC
ctttaaagacctaagtatgg

SEQ ID NO: 24317 - DNA, 20 bp, Artificial Sequence
  Description of Artificial Sequence: Synthetic oligonucleotide
  Target: COL7A1; (-) strand; PAM type: YTN; PAM sequence: TTC
cctcctttaaagacctaagt

SEQ ID NO: 24318 - DNA, 20 bp, Artificial Sequence
  Description of Artificial Sequence: Synthetic oligonucleotide
  Target: COL7A1; (-) strand; PAM type: YTN; PAM sequence: TTC
catgttccctcctttaaaga

SEQ ID NO: 24319 - DNA, 20 bp, Artificial Sequence
  Description of Artificial Sequence: Synthetic oligonucleotide
  Target: COL7A1; (-) strand; PAM type: YTN; PAM sequence: CTT
ccatgttccctcctttaaag

SEQ ID NO: 24320 - DNA, 20 bp, Artificial Sequence
  Description of Artificial Sequence: Synthetic oligonucleotide
  Target: COL7A1; (-) strand; PAM type: YTN; PAM sequence: CTG
aatatagagccccagccgtg

SEQ ID NO: 24321 - DNA, 20 bp, Artificial Sequence
  Description of Artificial Sequence: Synthetic oligonucleotide
  Target: COL7A1; (-) strand; PAM type: YTN; PAM sequence: CTG
gggcagacgcccagaccaaa

SEQ ID NO: 24322 - DNA, 20 bp, Artificial Sequence
  Description of Artificial Sequence: Synthetic oligonucleotide
  Target: COL7A1; (-) strand; PAM type: YTN; PAM sequence: CTC
gcagtaggggacctggggca

SEQ ID NO: 24323 - DNA, 20 bp, Artificial Sequence
  Description of Artificial Sequence: Synthetic oligonucleotide
  Target: COL7A1; (-) strand; PAM type: YTN; PAM sequence: CTC
cctcgcagtaggggacctgg

SEQ ID NO: 24324 - DNA, 20 bp, Artificial Sequence
  Description of Artificial Sequence: Synthetic oligonucleotide
  Target: COL7A1; (-) strand; PAM type: YTN; PAM sequence: CTG
gaggagacgctccctcgcag

SEQ ID NO: 24325 - DNA, 20 bp, Artificial Sequence
  Description of Artificial Sequence: Synthetic oligonucleotide
  Target: COL7A1; (-) strand; PAM type: YTN; PAM sequence: TTC
caggtcagggtcctggagga

SEQ ID NO: 24326 - DNA, 20 bp, Artificial Sequence
  Description of Artificial Sequence: Synthetic oligonucleotide
  Target: COL7A1; (-) strand; PAM type: YTN; PAM sequence: TTG
ggccagggttccaggtcagg

SEQ ID NO: 24327 - DNA, 20 bp, Artificial Sequence
  Description of Artificial Sequence: Synthetic oligonucleotide
  Target: COL7A1; (-) strand; PAM type: YTN; PAM sequence: CTT
gggccagggttccaggtcag

SEQ ID NO: 24328 - DNA, 20 bp, Artificial Sequence
  Description of Artificial Sequence: Synthetic oligonucleotide
  Target: COL7A1; (-) strand; PAM type: YTN; PAM sequence: CTG
ggggaggagtccttgggcca

SEQ ID NO: 24329 - DNA, 20 bp, Artificial Sequence
  Description of Artificial Sequence: Synthetic oligonucleotide
  Target: COL7A1; (-) strand; PAM type: YTN; PAM sequence: TTC
tgggggaggagtccttgggc

SEQ ID NO: 24330 - DNA, 20 bp, Artificial Sequence
  Description of Artificial Sequence: Synthetic oligonucleotide
  Target: COL7A1; (-) strand; PAM type: YTN; PAM sequence: CTG
gatcgggttctgggggagga

SEQ ID NO: 24331 - DNA, 20 bp, Artificial Sequence
  Description of Artificial Sequence: Synthetic oligonucleotide
  Target: COL7A1; (-) strand; PAM type: YTN; PAM sequence: CTG
cctggatcgggttctggggg

SEQ ID NO: 24332 - DNA, 20 bp, Artificial Sequence
  Description of Artificial Sequence: Synthetic oligonucleotide
  Target: COL7A1; (-) strand; PAM type: YTN; PAM sequence: CTG
agcctgcctggatcgggttc

SEQ ID NO: 24333 - DNA, 20 bp, Artificial Sequence
  Description of Artificial Sequence: Synthetic oligonucleotide
  Target: COL7A1; (-) strand; PAM type: YTN; PAM sequence: CTG
ggcactgagcctgcctggat

SEQ ID NO: 24334 - DNA, 20 bp, Artificial Sequence
  Description of Artificial Sequence: Synthetic oligonucleotide
  Target: COL7A1; (-) strand; PAM type: YTN; PAM sequence: CTG
agcccccaccgtggggaact

SEQ ID NO: 24335 - DNA, 20 bp, Artificial Sequence
  Description of Artificial Sequence: Synthetic oligonucleotide
  Target: COL7A1; (-) strand; PAM type: YTN; PAM sequence: CTG
cccaccccgggtggtccaga

SEQ ID NO: 24336 - DNA, 20 bp, Artificial Sequence
  Description of Artificial Sequence: Synthetic oligonucleotide
  Target: COL7A1; (-) strand; PAM type: YTN; PAM sequence: CTG
cgagcgccgctgcccacccc

SEQ ID NO: 24337 - DNA, 20 bp, Artificial Sequence
  Description of Artificial Sequence: Synthetic oligonucleotide
  Target: COL7A1; (-) strand; PAM type: YTN; PAM sequence: TTG
ggacccgtgaggcctgcgag

SEQ ID NO: 24338 - DNA, 20 bp, Artificial Sequence
  Description of Artificial Sequence: Synthetic oligonucleotide
  Target: COL7A1; (-) strand; PAM type: YTN; PAM sequence: TTT
gggacccgtgaggcctgcga

SEQ ID NO: 24339 - DNA, 20 bp, Artificial Sequence
  Description of Artificial Sequence: Synthetic oligonucleotide
  Target: COL7A1; (-) strand; PAM type: YTN; PAM sequence: TTT
tgggacccgtgaggcctgcg

SEQ ID NO: 24340 - DNA, 20 bp, Artificial Sequence
  Description of Artificial Sequence: Synthetic oligonucleotide
  Target: COL7A1; (-) strand; PAM type: YTN; PAM sequence: CTG
tggagggaatgccaaccgtt

SEQ ID NO: 24341 - DNA, 20 bp, Artificial Sequence
  Description of Artificial Sequence: Synthetic oligonucleotide
  Target: COL7A1; (-) strand; PAM type: YTN; PAM sequence: CTA
tggtggctgtggagggaatg

SEQ ID NO: 24342 - DNA, 20 bp, Artificial Sequence
  Description of Artificial Sequence: Synthetic oligonucleotide
  Target: COL7A1; (-) strand; PAM type: YTN; PAM sequence: TTG
tctatggtggctgtggaggg

SEQ ID NO: 24343 - DNA, 20 bp, Artificial Sequence
  Description of Artificial Sequence: Synthetic oligonucleotide
  Target: COL7A1; (-) strand; PAM type: YTN; PAM sequence: TTT
gtctatggtggctgtggagg

SEQ ID NO: 24344 - DNA, 20 bp, Artificial Sequence
  Description of Artificial Sequence: Synthetic oligonucleotide
  Target: COL7A1; (-) strand; PAM type: YTN; PAM sequence: TTT
tgtctatggtggctgtggag

SEQ ID NO: 24345 - DNA, 20 bp, Artificial Sequence
  Description of Artificial Sequence: Synthetic oligonucleotide
  Target: COL7A1; (-) strand; PAM type: YTN; PAM sequence: CTT
ttgtctatggtggctgtgga

SEQ ID NO: 24346 - DNA, 20 bp, Artificial Sequence
  Description of Artificial Sequence: Synthetic oligonucleotide
  Target: COL7A1; (-) strand; PAM type: YTN; PAM sequence: CTG
tcacccttttgtctatggtg

SEQ ID NO: 24347 - DNA, 20 bp, Artificial Sequence
  Description of Artificial Sequence: Synthetic oligonucleotide
  Target: COL7A1; (-) strand; PAM type: YTN; PAM sequence: CTG
tgacaggcagcacagaggcc

SEQ ID NO: 24348 - DNA, 20 bp, Artificial Sequence
  Description of Artificial Sequence: Synthetic oligonucleotide
  Target: COL7A1; (-) strand; PAM type: YTN; PAM sequence: CTG
gtaccatcgggctgtgacag

SEQ ID NO: 24349 - DNA, 20 bp, Artificial Sequence
  Description of Artificial Sequence: Synthetic oligonucleotide
  Target: COL7A1; (-) strand; PAM type: YTN; PAM sequence: CTG
cgctggtaccatcgggctgt

SEQ ID NO: 24350 - DNA, 20 bp, Artificial Sequence
  Description of Artificial Sequence: Synthetic oligonucleotide
  Target: COL7A1; (-) strand; PAM type: YTN; PAM sequence: CTA
caccctgcgctggtaccatc

SEQ ID NO: 24351 - DNA, 20 bp, Artificial Sequence
  Description of Artificial Sequence: Synthetic oligonucleotide
  Target: COL7A1; (-) strand; PAM type: YTN; PAM sequence: CTG
cctacaccctgcgctggtac

SEQ ID NO: 24352 - DNA, 20 bp, Artificial Sequence
  Description of Artificial Sequence: Synthetic oligonucleotide
  Target: COL7A1; (-) strand; PAM type: YTN; PAM sequence: CTG
cactgcctacaccctgcgct

SEQ ID NO: 24353 - DNA, 20 bp, Artificial Sequence
  Description of Artificial Sequence: Synthetic oligonucleotide
  Target: COL7A1; (-) strand; PAM type: YTN; PAM sequence: CTC
ctgcactgcctacaccctgc

SEQ ID NO: 24354 - DNA, 20 bp, Artificial Sequence
  Description of Artificial Sequence: Synthetic oligonucleotide
  Target: COL7A1; (-) strand; PAM type: YTN; PAM sequence: CTG
gatgagggctcctgcactgc

SEQ ID NO: 24355 - DNA, 20 bp, Artificial Sequence
  Description of Artificial Sequence: Synthetic oligonucleotide
  Target: COL7A1; (-) strand; PAM type: YTN; PAM sequence: CTG
ccactggatgagggctcctg

SEQ ID NO: 24356 - DNA, 20 bp, Artificial Sequence
  Description of Artificial Sequence: Synthetic oligonucleotide
  Target: COL7A1; (-) strand; PAM type: YTN; PAM sequence: TTC
cctgccactggatgagggct

SEQ ID NO: 24357 - DNA, 20 bp, Artificial Sequence
  Description of Artificial Sequence: Synthetic oligonucleotide
  Target: COL7A1; (-) strand; PAM type: YTN; PAM sequence: CTG
ttccctgccactggatgagg

SEQ ID NO: 24358 - DNA, 20 bp, Artificial Sequence
  Description of Artificial Sequence: Synthetic oligonucleotide
  Target: COL7A1; (-) strand; PAM type: YTN; PAM sequence: TTG
gcccagacccctgttccctg

SEQ ID NO: 24359 - DNA, 20 bp, Artificial Sequence
  Description of Artificial Sequence: Synthetic oligonucleotide
  Target: COL7A1; (-) strand; PAM type: YTN; PAM sequence: TTG
accccattggcccagacccc

SEQ ID NO: 24360 - DNA, 20 bp, Artificial Sequence
  Description of Artificial Sequence: Synthetic oligonucleotide
  Target: COL7A1; (-) strand; PAM type: YTN; PAM sequence: CTT
gaccccattggcccagaccc

SEQ ID NO: 24361 - DNA, 20 bp, Artificial Sequence
  Description of Artificial Sequence: Synthetic oligonucleotide
  Target: COL7A1; (-) strand; PAM type: YTN; PAM sequence: CTG
acttgaccccattggcccag

SEQ ID NO: 24362 - DNA, 20 bp, Artificial Sequence
  Description of Artificial Sequence: Synthetic oligonucleotide
  Target: COL7A1; (-) strand; PAM type: YTN; PAM sequence: CTG
ctgacttgaccccattggcc

SEQ ID NO: 24363 - DNA, 20 bp, Artificial Sequence
  Description of Artificial Sequence: Synthetic oligonucleotide
  Target: COL7A1; (-) strand; PAM type: YTN; PAM sequence: TTC
ccacaaaccctgctgacttg

SEQ ID NO: 24364 - DNA, 20 bp, Artificial Sequence
  Description of Artificial Sequence: Synthetic oligonucleotide
  Target: COL7A1; (-) strand; PAM type: YTN; PAM sequence: CTG
attcccacaaaccctgctga

SEQ ID NO: 24365 - DNA, 20 bp, Artificial Sequence
  Description of Artificial Sequence: Synthetic oligonucleotide
  Target: COL7A1; (-) strand; PAM type: YTN; PAM sequence: CTC
tgattcccacaaaccctgct

SEQ ID NO: 24366 - DNA, 20 bp, Artificial Sequence
  Description of Artificial Sequence: Synthetic oligonucleotide
  Target: COL7A1; (-) strand; PAM type: YTN; PAM sequence: CTC
tctgattcccacaaaccctg

SEQ ID NO: 24367 - DNA, 20 bp, Artificial Sequence
  Description of Artificial Sequence: Synthetic oligonucleotide
  Target: COL7A1; (-) strand; PAM type: YTN; PAM sequence: TTC
aaccctctctgattcccaca

SEQ ID NO: 24368 - DNA, 20 bp, Artificial Sequence
  Description of Artificial Sequence: Synthetic oligonucleotide
  Target: COL7A1; (-) strand; PAM type: YTN; PAM sequence: TTT
caaccctctctgattcccac

SEQ ID NO: 24369 - DNA, 20 bp, Artificial Sequence
  Description of Artificial Sequence: Synthetic oligonucleotide
  Target: COL7A1; (-) strand; PAM type: YTN; PAM sequence: CTT
tcaaccctctctgattccca

SEQ ID NO: 24370 - DNA, 20 bp, Artificial Sequence
  Description of Artificial Sequence: Synthetic oligonucleotide
  Target: COL7A1; (-) strand; PAM type: YTN; PAM sequence: CTG
acctttcaaccctctctgat

SEQ ID NO: 24371 - DNA, 20 bp, Artificial Sequence
  Description of Artificial Sequence: Synthetic oligonucleotide
  Target: COL7A1; (-) strand; PAM type: YTN; PAM sequence: CTC
cccctgacctttcaaccctc

SEQ ID NO: 24372 - DNA, 20 bp, Artificial Sequence
  Description of Artificial Sequence: Synthetic oligonucleotide
  Target: COL7A1; (-) strand; PAM type: YTN; PAM sequence: CTG
acctccccctgacctttcaa

SEQ ID NO: 24373 - DNA, 20 bp, Artificial Sequence
  Description of Artificial Sequence: Synthetic oligonucleotide
  Target: COL7A1; (-) strand; PAM type: YTN; PAM sequence: CTG
ctgacctccccctgaccttt

SEQ ID NO: 24374 - DNA, 20 bp, Artificial Sequence
  Description of Artificial Sequence: Synthetic oligonucleotide
  Target: COL7A1; (-) strand; PAM type: YTN; PAM sequence: CTG
agccctgctgacctccccct

SEQ ID NO: 24375 - DNA, 20 bp, Artificial Sequence
  Description of Artificial Sequence: Synthetic oligonucleotide
  Target: COL7A1; (-) strand; PAM type: YTN; PAM sequence: CTG
gggaggggcaggcagggctg

SEQ ID NO: 24376 - DNA, 20 bp, Artificial Sequence
  Description of Artificial Sequence: Synthetic oligonucleotide
  Target: COL7A1; (-) strand; PAM type: YTN; PAM sequence: CTG
ccagcggggtctggggaggg

SEQ ID NO: 24377 - DNA, 20 bp, Artificial Sequence
  Description of Artificial Sequence: Synthetic oligonucleotide
  Target: COL7A1; (-) strand; PAM type: YTN; PAM sequence: TTG
ggatagtgatggtgagaatg

SEQ ID NO: 24378 - DNA, 20 bp, Artificial Sequence
  Description of Artificial Sequence: Synthetic oligonucleotide
  Target: COL7A1; (-) strand; PAM type: YTN; PAM sequence: CTT
gggatagtgatggtgagaat

SEQ ID NO: 24379 - DNA, 20 bp, Artificial Sequence
  Description of Artificial Sequence: Synthetic oligonucleotide
  Target: COL7A1; (-) strand; PAM type: YTN; PAM sequence: CTC
cttgggatagtgatggtgag

SEQ ID NO: 24380 - DNA, 20 bp, Artificial Sequence
  Description of Artificial Sequence: Synthetic oligonucleotide
  Target: COL7A1; (-) strand; PAM type: YTN; PAM sequence: CTG
aagctccttgggatagtgat

SEQ ID NO: 24381 - DNA, 20 bp, Artificial Sequence
  Description of Artificial Sequence: Synthetic oligonucleotide
  Target: COL7A1; (-) strand; PAM type: YTN; PAM sequence: CTG
tggaggagtaccaggaccct

SEQ ID NO: 24382 - DNA, 20 bp, Artificial Sequence
  Description of Artificial Sequence: Synthetic oligonucleotide
  Target: COL7A1; (-) strand; PAM type: YTN; PAM sequence: TTC
tgtggaggagtaccaggacc

SEQ ID NO: 24383 - DNA, 20 bp, Artificial Sequence
  Description of Artificial Sequence: Synthetic oligonucleotide
  Target: COL7A1; (-) strand; PAM type: YTN; PAM sequence: CTC
cgagtattctgtggaggagt

SEQ ID NO: 24384 - DNA, 20 bp, Artificial Sequence
  Description of Artificial Sequence: Synthetic oligonucleotide
  Target: COL7A1; (-) strand; PAM type: YTN; PAM sequence: CTG
aatactccgagtattctgtg

SEQ ID NO: 24385 - DNA, 20 bp, Artificial Sequence
  Description of Artificial Sequence: Synthetic oligonucleotide
  Target: COL7A1; (-) strand; PAM type: YTN; PAM sequence: CTC
tgaatactccgagtattctg

SEQ ID NO: 24386 - DNA, 20 bp, Artificial Sequence
  Description of Artificial Sequence: Synthetic oligonucleotide
  Target: COL7A1; (-) strand; PAM type: YTN; PAM sequence: CTG
aggatgatgagtactctgaa

SEQ ID NO: 24387 - DNA, 20 bp, Artificial Sequence
  Description of Artificial Sequence: Synthetic oligonucleotide
  Target: COL7A1; (-) strand; PAM type: YTN; PAM sequence: CTG
cagagcgggtaccccctgag

SEQ ID NO: 24388 - DNA, 20 bp, Artificial Sequence
  Description of Artificial Sequence: Synthetic oligonucleotide
  Target: COL7A1; (-) strand; PAM type: YTN; PAM sequence: CTA
cctgcagagcgggtaccccc

SEQ ID NO: 24389 - DNA, 20 bp, Artificial Sequence
  Description of Artificial Sequence: Synthetic oligonucleotide
  Target: COL7A1; (-) strand; PAM type: YTN; PAM sequence: CTG
ccctacctgcagagcgggta

SEQ ID NO: 24390 - DNA, 20 bp, Artificial Sequence
  Description of Artificial Sequence: Synthetic oligonucleotide
  Target: COL7A1; (-) strand; PAM type: YTN; PAM sequence: CTC
ccagcacaccctgccctacc

SEQ ID NO: 24391 - DNA, 20 bp, Artificial Sequence
  Description of Artificial Sequence: Synthetic oligonucleotide
  Target: COL7A1; (-) strand; PAM type: YTN; PAM sequence: CTG
ctcccagcacaccctgccct

SEQ ID NO: 24392 - DNA, 20 bp, Artificial Sequence
  Description of Artificial Sequence: Synthetic oligonucleotide
  Target: COL7A1; (-) strand; PAM type: YTN; PAM sequence: TTG
ccccggggccagcagccact

SEQ ID NO: 24393 - DNA, 20 bp, Artificial Sequence
  Description of Artificial Sequence: Synthetic oligonucleotide
  Target: COL7A1; (-) strand; PAM type: YTN; PAM sequence: CTT
gccccggggccagcagccac

SEQ ID NO: 24394 - DNA, 20 bp, Artificial Sequence
  Description of Artificial Sequence: Synthetic oligonucleotide
  Target: COL7A1; (-) strand; PAM type: YTN; PAM sequence: CTG
cccaccttgccccggggcca

SEQ ID NO: 24395 - DNA, 20 bp, Artificial Sequence
  Description of Artificial Sequence: Synthetic oligonucleotide
  Target: COL7A1; (-) strand; PAM type: YTN; PAM sequence: CTG
tgtgcacacagtggaaatca

SEQ ID NO: 24396 - DNA, 20 bp, Artificial Sequence
  Description of Artificial Sequence: Synthetic oligonucleotide
  Target: COL7A1; (-) strand; PAM type: YTN; PAM sequence: CTG
catgcagggcacacgcatgg

SEQ ID NO: 24397 - DNA, 20 bp, Artificial Sequence
  Description of Artificial Sequence: Synthetic oligonucleotide
  Target: COL7A1; (-) strand; PAM type: YTN; PAM sequence: CTA
tgggtggggccgagacacgc

SEQ ID NO: 24398 - DNA, 20 bp, Artificial Sequence
  Description of Artificial Sequence: Synthetic oligonucleotide
  Target: COL7A1; (-) strand; PAM type: YTN; PAM sequence: CTG
aacccgtggggcagctatgg

SEQ ID NO: 24399 - DNA, 20 bp, Artificial Sequence
  Description of Artificial Sequence: Synthetic oligonucleotide
  Target: COL7A1; (-) strand; PAM type: YTN; PAM sequence: CTC
atgcagaggaggaaggtgag

SEQ ID NO: 24400 - DNA, 20 bp, Artificial Sequence
  Description of Artificial Sequence: Synthetic oligonucleotide
  Target: COL7A1; (-) strand; PAM type: YTN; PAM sequence: CTC
tcatgcagaggaggaaggtg

SEQ ID NO: 24401 - DNA, 20 bp, Artificial Sequence
  Description of Artificial Sequence: Synthetic oligonucleotide
  Target: COL7A1; (-) strand; PAM type: YTN; PAM sequence: CTC
cgcgtctctcatgcagagga

SEQ ID NO: 24402 - DNA, 20 bp, Artificial Sequence
  Description of Artificial Sequence: Synthetic oligonucleotide
  Target: COL7A1; (-) strand; PAM type: YTN; PAM sequence: CTG
tgctccgcgtctctcatgca

SEQ ID NO: 24403 - DNA, 20 bp, Artificial Sequence
  Description of Artificial Sequence: Synthetic oligonucleotide
  Target: COL7A1; (-) strand; PAM type: YTN; PAM sequence: CTG
tgcctgtgctccgcgtctct

SEQ ID NO: 24404 - DNA, 20 bp, Artificial Sequence
  Description of Artificial Sequence: Synthetic oligonucleotide
  Target: COL7A1; (-) strand; PAM type: YTN; PAM sequence: CTC
catgctgtgcctgtgctccg

SEQ ID NO: 24405 - DNA, 20 bp, Artificial Sequence
  Description of Artificial Sequence: Synthetic oligonucleotide
  Target: COL7A1; (-) strand; PAM type: YTN; PAM sequence: CTC
ccagctccatgctgtgcctg

SEQ ID NO: 24406 - DNA, 20 bp, Artificial Sequence
  Description of Artificial Sequence: Synthetic oligonucleotide
  Target: COL7A1; (-) strand; PAM type: YTN; PAM sequence: CTG
ccggctcccagctccatgct

SEQ ID NO: 24407 - DNA, 20 bp, Artificial Sequence
  Description of Artificial Sequence: Synthetic oligonucleotide
  Target: COL7A1; (-) strand; PAM type: YTN; PAM sequence: CTG
cagacactgccggctcccag

SEQ ID NO: 24408 - DNA, 20 bp, Artificial Sequence
  Description of Artificial Sequence: Synthetic oligonucleotide
  Target: COL7A1; (-) strand; PAM type: YTN; PAM sequence: TTA
tgctgcagacactgccggct

SEQ ID NO: 24409 - DNA, 20 bp, Artificial Sequence
  Description of Artificial Sequence: Synthetic oligonucleotide
  Target: COL7A1; (-) strand; PAM type: YTN; PAM sequence: CTA
gttatgctgcagacactgcc

SEQ ID NO: 24410 - DNA, 20 bp, Artificial Sequence
  Description of Artificial Sequence: Synthetic oligonucleotide
  Target: COL7A1; (-) strand; PAM type: YTN; PAM sequence: CTC
cctagttatgctgcagacac

SEQ ID NO: 24411 - DNA, 20 bp, Artificial Sequence
  Description of Artificial Sequence: Synthetic oligonucleotide
  Target: COL7A1; (-) strand; PAM type: YTN; PAM sequence: CTC
caggacccctccctagttat

SEQ ID NO: 24412 - DNA, 20 bp, Artificial Sequence
  Description of Artificial Sequence: Synthetic oligonucleotide
  Target: COL7A1; (-) strand; PAM type: YTN; PAM sequence: TTG
gctccaggacccctccctag

SEQ ID NO: 24413 - DNA, 20 bp, Artificial Sequence
  Description of Artificial Sequence: Synthetic oligonucleotide
  Target: COL7A1; (-) strand; PAM type: YTN; PAM sequence: CTT
ggctccaggacccctcccta

SEQ ID NO: 24414 - DNA, 20 bp, Artificial Sequence
  Description of Artificial Sequence: Synthetic oligonucleotide
  Target: COL7A1; (-) strand; PAM type: YTN; PAM sequence: CTC
ttggctccaggacccctccc

SEQ ID NO: 24415 - DNA, 20 bp, Artificial Sequence
  Description of Artificial Sequence: Synthetic oligonucleotide
  Target: COL7A1; (-) strand; PAM type: YTN; PAM sequence: CTG
ctcttggctccaggacccct

SEQ ID NO: 24416 - DNA, 20 bp, Artificial Sequence
  Description of Artificial Sequence: Synthetic oligonucleotide
  Target: COL7A1; (-) strand; PAM type: YTN; PAM sequence: CTG
aggcccctgctcttggctcc

SEQ ID NO: 24417 - DNA, 20 bp, Artificial Sequence
  Description of Artificial Sequence: Synthetic oligonucleotide
  Target: COL7A1; (-) strand; PAM type: YTN; PAM sequence: TTC
agggccctgaggcccctgct

SEQ ID NO: 24418 - DNA, 20 bp, Artificial Sequence
  Description of Artificial Sequence: Synthetic oligonucleotide
  Target: COL7A1; (-) strand; PAM type: YTN; PAM sequence: CTT
cagggccctgaggcccctgc

SEQ ID NO: 24419 - DNA, 20 bp, Artificial Sequence
  Description of Artificial Sequence: Synthetic oligonucleotide
  Target: COL7A1; (-) strand; PAM type: YTN; PAM sequence: CTG
cccatggtgacttcagggcc

SEQ ID NO: 24420 - DNA, 20 bp, Artificial Sequence
  Description of Artificial Sequence: Synthetic oligonucleotide
  Target: COL7A1; (-) strand; PAM type: YTN; PAM sequence: CTG
ggatggctgcccatggtgac

SEQ ID NO: 24421 - DNA, 20 bp, Artificial Sequence
  Description of Artificial Sequence: Synthetic oligonucleotide
  Target: COL7A1; (-) strand; PAM type: YTN; PAM sequence: TTG
gctgggatggctgcccatgg

SEQ ID NO: 24422 - DNA, 20 bp, Artificial Sequence
  Description of Artificial Sequence: Synthetic oligonucleotide
  Target: COL7A1; (-) strand; PAM type: YTN; PAM sequence: CTC
aggggggttggctgggatgg

SEQ ID NO: 24423 - DNA, 20 bp, Artificial Sequence
  Description of Artificial Sequence: Synthetic oligonucleotide
  Target: COL7A1; (-) strand; PAM type: YTN; PAM sequence: CTC
tcaggggggttggctgggat

SEQ ID NO: 24424 - DNA, 20 bp, Artificial Sequence
  Description of Artificial Sequence: Synthetic oligonucleotide
  Target: COL7A1; (-) strand; PAM type: YTN; PAM sequence: CTG
gggtcctctcaggggggttg

SEQ ID NO: 24425 - DNA, 20 bp, Artificial Sequence
  Description of Artificial Sequence: Synthetic oligonucleotide
  Target: COL7A1; (-) strand; PAM type: YTN; PAM sequence: CTA
tcaactggggtcctctcagg

SEQ ID NO: 24426 - DNA, 20 bp, Artificial Sequence
  Description of Artificial Sequence: Synthetic oligonucleotide
  Target: COL7A1; (-) strand; PAM type: YTN; PAM sequence: CTG
cctatcaactggggtcctct

SEQ ID NO: 24427 - DNA, 20 bp, Artificial Sequence
  Description of Artificial Sequence: Synthetic oligonucleotide
  Target: COL7A1; (-) strand; PAM type: YTN; PAM sequence: CTG
ccctgcctatcaactggggt

SEQ ID NO: 24428 - DNA, 20 bp, Artificial Sequence
  Description of Artificial Sequence: Synthetic oligonucleotide
  Target: COL7A1; (-) strand; PAM type: YTN; PAM sequence: TTC
accccaggccctgccctgcc

SEQ ID NO: 24429 - DNA, 20 bp, Artificial Sequence
  Description of Artificial Sequence: Synthetic oligonucleotide
  Target: COL7A1; (-) strand; PAM type: YTN; PAM sequence: CTT
caccccaggccctgccctgc

SEQ ID NO: 24430 - DNA, 20 bp, Artificial Sequence
  Description of Artificial Sequence: Synthetic oligonucleotide
  Target: COL7A1; (-) strand; PAM type: YTN; PAM sequence: TTC
ttcaccccaggccctgccct

SEQ ID NO: 24431 - DNA, 20 bp, Artificial Sequence
  Description of Artificial Sequence: Synthetic oligonucleotide
  Target: COL7A1; (-) strand; PAM type: YTN; PAM sequence: TTT
cttcaccccaggccctgccc

SEQ ID NO: 24432 - DNA, 20 bp, Artificial Sequence
  Description of Artificial Sequence: Synthetic oligonucleotide
  Target: COL7A1; (-) strand; PAM type: YTN; PAM sequence: CTT
tcttcaccccaggccctgcc

SEQ ID NO: 24433 - DNA, 20 bp, Artificial Sequence
  Description of Artificial Sequence: Synthetic oligonucleotide
  Target: COL7A1; (-) strand; PAM type: YTN; PAM sequence: CTC
ccagaactttcttcacccca

SEQ ID NO: 24434 - DNA, 20 bp, Artificial Sequence
  Description of Artificial Sequence: Synthetic oligonucleotide
  Target: COL7A1; (-) strand; PAM type: YTN; PAM sequence: CTA
ctcccagaactttcttcacc

SEQ ID NO: 24435 - DNA, 20 bp, Artificial Sequence
  Description of Artificial Sequence: Synthetic oligonucleotide
  Target: COL7A1; (-) strand; PAM type: YTN; PAM sequence: TTC
tactcccagaactttcttca

SEQ ID NO: 24436 - DNA, 20 bp, Artificial Sequence
  Description of Artificial Sequence: Synthetic oligonucleotide
  Target: COL7A1; (-) strand; PAM type: YTN; PAM sequence: TTT
ctactcccagaactttcttc

SEQ ID NO: 24437 - DNA, 20 bp, Artificial Sequence
  Description of Artificial Sequence: Synthetic oligonucleotide
  Target: COL7A1; (-) strand; PAM type: YTN; PAM sequence: TTT
tctactcccagaactttctt

SEQ ID NO: 24438 - DNA, 20 bp, Artificial Sequence
  Description of Artificial Sequence: Synthetic oligonucleotide
  Target: COL7A1; (-) strand; PAM type: YTN; PAM sequence: CTG
gatcacgtgagtagttttct

SEQ ID NO: 24439 - DNA, 20 bp, Artificial Sequence
  Description of Artificial Sequence: Synthetic oligonucleotide
  Target: COL7A1; (-) strand; PAM type: YTN; PAM sequence: TTC
atcgcatctggatcacgtga

SEQ ID NO: 24440 - DNA, 20 bp, Artificial Sequence
  Description of Artificial Sequence: Synthetic oligonucleotide
  Target: COL7A1; (-) strand; PAM type: YTN; PAM sequence: CTG
ccagggccagttcatcgcat

SEQ ID NO: 24441 - DNA, 20 bp, Artificial Sequence
  Description of Artificial Sequence: Synthetic oligonucleotide
  Target: COL7A1; (-) strand; PAM type: YTN; PAM sequence: CTA
gcctgccagggccagttcat

SEQ ID NO: 24442 - DNA, 20 bp, Artificial Sequence
  Description of Artificial Sequence: Synthetic oligonucleotide
  Target: COL7A1; (-) strand; PAM type: YTN; PAM sequence: CTC
tagcctgccagggccagttc

SEQ ID NO: 24443 - DNA, 20 bp, Artificial Sequence
  Description of Artificial Sequence: Synthetic oligonucleotide
  Target: COL7A1; (-) strand; PAM type: YTN; PAM sequence: CTG
ccccctctagcctgccaggg

SEQ ID NO: 24444 - DNA, 20 bp, Artificial Sequence
  Description of Artificial Sequence: Synthetic oligonucleotide
  Target: COL7A1; (-) strand; PAM type: YTN; PAM sequence: CTC
tgccccctctagcctgccag

SEQ ID NO: 24445 - DNA, 20 bp, Artificial Sequence
  Description of Artificial Sequence: Synthetic oligonucleotide
  Target: COL7A1; (-) strand; PAM type: YTN; PAM sequence: CTC
tctgccccctctagcctgcc

SEQ ID NO: 24446 - DNA, 20 bp, Artificial Sequence
  Description of Artificial Sequence: Synthetic oligonucleotide
  Target: COL7A1; (-) strand; PAM type: YTN; PAM sequence: CTA
tccctctctgccccctctag

SEQ ID NO: 24447 - DNA, 20 bp, Artificial Sequence
  Description of Artificial Sequence: Synthetic oligonucleotide
  Target: COL7A1; (-) strand; PAM type: YTN; PAM sequence: CTC
tatccctctctgccccctct

SEQ ID NO: 24448 - DNA, 20 bp, Artificial Sequence
  Description of Artificial Sequence: Synthetic oligonucleotide
  Target: COL7A1; (-) strand; PAM type: YTN; PAM sequence: CTC
tctatccctctctgccccct

SEQ ID NO: 24449 - DNA, 20 bp, Artificial Sequence
  Description of Artificial Sequence: Synthetic oligonucleotide
  Target: COL7A1; (-) strand; PAM type: YTN; PAM sequence: TTG
tctctctatccctctctgcc

SEQ ID NO: 24450 - DNA, 20 bp, Artificial Sequence
  Description of Artificial Sequence: Synthetic oligonucleotide
  Target: COL7A1; (-) strand; PAM type: YTN; PAM sequence: CTG
tcattgtctctctatccctc

SEQ ID NO: 24451 - DNA, 20 bp, Artificial Sequence
  Description of Artificial Sequence: Synthetic oligonucleotide
  Target: COL7A1; (-) strand; PAM type: YTN; PAM sequence: CTC
tgtcattgtctctctatccc

SEQ ID NO: 24452 - DNA, 20 bp, Artificial Sequence
  Description of Artificial Sequence: Synthetic oligonucleotide
  Target: COL7A1; (-) strand; PAM type: YTN; PAM sequence: CTC
tctgtcattgtctctctatc

SEQ ID NO: 24453 - DNA, 20 bp, Artificial Sequence
  Description of Artificial Sequence: Synthetic oligonucleotide
  Target: COL7A1; (-) strand; PAM type: YTN; PAM sequence: TTC
tctctgtcattgtctctcta

SEQ ID NO: 24454 - DNA, 20 bp, Artificial Sequence
  Description of Artificial Sequence: Synthetic oligonucleotide
  Target: COL7A1; (-) strand; PAM type: YTN; PAM sequence: CTT
ctctctgtcattgtctctct

SEQ ID NO: 24455 - DNA, 20 bp, Artificial Sequence
  Description of Artificial Sequence: Synthetic oligonucleotide
  Target: COL7A1; (-) strand; PAM type: YTN; PAM sequence: TTC
ccatccttctctctgtcatt

SEQ ID NO: 24456 - DNA, 20 bp, Artificial Sequence
  Description of Artificial Sequence: Synthetic oligonucleotide
  Target: COL7A1; (-) strand; PAM type: YTN; PAM sequence: CTT
cccatccttctctctgtcat

SEQ ID NO: 24457 - DNA, 20 bp, Artificial Sequence
  Description of Artificial Sequence: Synthetic oligonucleotide
  Target: COL7A1; (-) strand; PAM type: YTN; PAM sequence: CTC
catcttcccatccttctctc

SEQ ID NO: 24458 - DNA, 20 bp, Artificial Sequence
  Description of Artificial Sequence: Synthetic oligonucleotide
  Target: COL7A1; (-) strand; PAM type: YTN; PAM sequence: CTC
tccatcttcccatccttctc

SEQ ID NO: 24459 - DNA, 20 bp, Artificial Sequence
  Description of Artificial Sequence: Synthetic oligonucleotide
  Target: COL7A1; (-) strand; PAM type: YTN; PAM sequence: CTG
tctctccatcttcccatcct

SEQ ID NO: 24460 - DNA, 20 bp, Artificial Sequence
  Description of Artificial Sequence: Synthetic oligonucleotide
  Target: COL7A1; (-) strand; PAM type: YTN; PAM sequence: CTG
tctgtctctccatcttccca

SEQ ID NO: 24461 - DNA, 20 bp, Artificial Sequence
  Description of Artificial Sequence: Synthetic oligonucleotide
  Target: COL7A1; (-) strand; PAM type: YTN; PAM sequence: CTC
tgtctgtctctccatcttcc

SEQ ID NO: 24462 - DNA, 20 bp, Artificial Sequence
  Description of Artificial Sequence: Synthetic oligonucleotide
  Target: COL7A1; (-) strand; PAM type: YTN; PAM sequence: CTG
tgtgtctctgtctgtctctc

SEQ ID NO: 24463 - DNA, 20 bp, Artificial Sequence
  Description of Artificial Sequence: Synthetic oligonucleotide
  Target: COL7A1; (-) strand; PAM type: YTN; PAM sequence: CTG
cctgtgtgtctctgtctgtc

SEQ ID NO: 24464 - DNA, 20 bp, Artificial Sequence
  Description of Artificial Sequence: Synthetic oligonucleotide
  Target: COL7A1; (-) strand; PAM type: YTN; PAM sequence: CTC
tgcctgtgtgtctctgtctg

SEQ ID NO: 24465 - DNA, 20 bp, Artificial Sequence
  Description of Artificial Sequence: Synthetic oligonucleotide
  Target: COL7A1; (-) strand; PAM type: YTN; PAM sequence: CTA
cccctctgcctgtgtgtctc

SEQ ID NO: 24466 - DNA, 20 bp, Artificial Sequence
  Description of Artificial Sequence: Synthetic oligonucleotide
  Target: COL7A1; (-) strand; PAM type: YTN; PAM sequence: CTC
tacccctctgcctgtgtgtc

SEQ ID NO: 24467 - DNA, 20 bp, Artificial Sequence
  Description of Artificial Sequence: Synthetic oligonucleotide
  Target: COL7A1; (-) strand; PAM type: YTN; PAM sequence: TTG
tgtatctctacccctctgcc

SEQ ID NO: 24468 - DNA, 20 bp, Artificial Sequence
  Description of Artificial Sequence: Synthetic oligonucleotide
  Target: COL7A1; (-) strand; PAM type: YTN; PAM sequence: TTT
gtgtatctctacccctctgc

SEQ ID NO: 24469 - DNA, 20 bp, Artificial Sequence
  Description of Artificial Sequence: Synthetic oligonucleotide
  Target: COL7A1; (-) strand; PAM type: YTN; PAM sequence: CTT
tgtgtatctctacccctctg

SEQ ID NO: 24470 - DNA, 20 bp, Artificial Sequence
  Description of Artificial Sequence: Synthetic oligonucleotide
  Target: COL7A1; (-) strand; PAM type: YTN; PAM sequence: CTC
tttgtgtatctctacccctc

SEQ ID NO: 24471 - DNA, 20 bp, Artificial Sequence
  Description of Artificial Sequence: Synthetic oligonucleotide
  Target: COL7A1; (-) strand; PAM type: YTN; PAM sequence: CTA
tctctttgtgtatctctacc

SEQ ID NO: 24472 - DNA, 20 bp, Artificial Sequence
  Description of Artificial Sequence: Synthetic oligonucleotide
  Target: COL7A1; (-) strand; PAM type: YTN; PAM sequence: CTG
ctatctctttgtgtatctct

SEQ ID NO: 24473 - DNA, 20 bp, Artificial Sequence
  Description of Artificial Sequence: Synthetic oligonucleotide
  Target: COL7A1; (-) strand; PAM type: YTN; PAM sequence: CTC
ctgctatctctttgtgtatc

SEQ ID NO: 24474 - DNA, 20 bp, Artificial Sequence
  Description of Artificial Sequence: Synthetic oligonucleotide
  Target: COL7A1; (-) strand; PAM type: YTN; PAM sequence: CTC
tcctgctatctctttgtgta

SEQ ID NO: 24475 - DNA, 20 bp, Artificial Sequence
  Description of Artificial Sequence: Synthetic oligonucleotide
  Target: COL7A1; (-) strand; PAM type: YTN; PAM sequence: TTA
ccctctcctgctatctcttt

SEQ ID NO: 24476 - DNA, 20 bp, Artificial Sequence
  Description of Artificial Sequence: Synthetic oligonucleotide
  Target: COL7A1; (-) strand; PAM type: YTN; PAM sequence: CTG
ttaccctctcctgctatctc

SEQ ID NO: 24477 - DNA, 20 bp, Artificial Sequence
  Description of Artificial Sequence: Synthetic oligonucleotide
  Target: COL7A1; (-) strand; PAM type: YTN; PAM sequence: CTC
ctgttaccctctcctgctat

SEQ ID NO: 24478 - DNA, 20 bp, Artificial Sequence
  Description of Artificial Sequence: Synthetic oligonucleotide
  Target: COL7A1; (-) strand; PAM type: YTN; PAM sequence: CTC
tcctgttaccctctcctgct

SEQ ID NO: 24479 - DNA, 20 bp, Artificial Sequence
  Description of Artificial Sequence: Synthetic oligonucleotide
  Target: COL7A1; (-) strand; PAM type: YTN; PAM sequence: CTC
tctcctgttaccctctcctg

SEQ ID NO: 24480 - DNA, 20 bp, Artificial Sequence
  Description of Artificial Sequence: Synthetic oligonucleotide
  Target: COL7A1; (-) strand; PAM type: YTN; PAM sequence: CTC
tctctcctgttaccctctcc

SEQ ID NO: 24481 - DNA, 20 bp, Artificial Sequence
  Description of Artificial Sequence: Synthetic oligonucleotide
  Target: COL7A1; (-) strand; PAM type: YTN; PAM sequence: TTC
ctctctctcctgttaccctc

SEQ ID NO: 24482 - DNA, 20 bp, Artificial Sequence
  Description of Artificial Sequence: Synthetic oligonucleotide
  Target: COL7A1; (-) strand; PAM type: YTN; PAM sequence: CTT
cctctctctcctgttaccct

SEQ ID NO: 24483 - DNA, 20 bp, Artificial Sequence
  Description of Artificial Sequence: Synthetic oligonucleotide
  Target: COL7A1; (-) strand; PAM type: YTN; PAM sequence: CTC
ttcctctctctcctgttacc

SEQ ID NO: 24484 - DNA, 20 bp, Artificial Sequence
  Description of Artificial Sequence: Synthetic oligonucleotide
  Target: COL7A1; (-) strand; PAM type: YTN; PAM sequence: CTC
tcttcctctctctcctgtta

SEQ ID NO: 24485 - DNA, 20 bp, Artificial Sequence
  Description of Artificial Sequence: Synthetic oligonucleotide
  Target: COL7A1; (-) strand; PAM type: YTN; PAM sequence: CTC
tctcttcctctctctcctgt

SEQ ID NO: 24486 - DNA, 20 bp, Artificial Sequence
  Description of Artificial Sequence: Synthetic oligonucleotide
  Target: COL7A1; (-) strand; PAM type: YTN; PAM sequence: CTC
ccaccctctctcttcctctc

SEQ ID NO: 24487 - DNA, 20 bp, Artificial Sequence
  Description of Artificial Sequence: Synthetic oligonucleotide
  Target: COL7A1; (-) strand; PAM type: YTN; PAM sequence: CTA
cctcccaccctctctcttcc

SEQ ID NO: 24488 - DNA, 20 bp, Artificial Sequence
  Description of Artificial Sequence: Synthetic oligonucleotide
  Target: COL7A1; (-) strand; PAM type: YTN; PAM sequence: CTA
tctacctcccaccctctctc

SEQ ID NO: 24489 - DNA, 20 bp, Artificial Sequence
  Description of Artificial Sequence: Synthetic oligonucleotide
  Target: COL7A1; (-) strand; PAM type: YTN; PAM sequence: CTC
tatctacctcccaccctctc

SEQ ID NO: 24490 - DNA, 20 bp, Artificial Sequence
  Description of Artificial Sequence: Synthetic oligonucleotide
  Target: COL7A1; (-) strand; PAM type: YTN; PAM sequence: CTC
tctatctacctcccaccctc

SEQ ID NO: 24491 - DNA, 20 bp, Artificial Sequence
  Description of Artificial Sequence: Synthetic oligonucleotide
  Target: COL7A1; (-) strand; PAM type: YTN; PAM sequence: TTC
catctctctatctacctccc

SEQ ID NO: 24492 - DNA, 20 bp, Artificial Sequence
  Description of Artificial Sequence: Synthetic oligonucleotide
  Target: COL7A1; (-) strand; PAM type: YTN; PAM sequence: TTT
ccatctctctatctacctcc

SEQ ID NO: 24493 - DNA, 20 bp, Artificial Sequence
  Description of Artificial Sequence: Synthetic oligonucleotide
  Target: COL7A1; (-) strand; PAM type: YTN; PAM sequence: TTT
tccatctctctatctacctc

SEQ ID NO: 24494 - DNA, 20 bp, Artificial Sequence
  Description of Artificial Sequence: Synthetic oligonucleotide
  Target: COL7A1; (-) strand; PAM type: YTN; PAM sequence: TTT
ttccatctctctatctacct

SEQ ID NO: 24495 - DNA, 20 bp, Artificial Sequence
  Description of Artificial Sequence: Synthetic oligonucleotide
  Target: COL7A1; (-) strand; PAM type: YTN; PAM sequence: CTT
tttccatctctctatctacc

SEQ ID NO: 24496 - DNA, 20 bp, Artificial Sequence
  Description of Artificial Sequence: Synthetic oligonucleotide
  Target: COL7A1; (-) strand; PAM type: YTN; PAM sequence: CTC
tttttccatctctctatcta

SEQ ID NO: 24497 - DNA, 20 bp, Artificial Sequence
  Description of Artificial Sequence: Synthetic oligonucleotide
  Target: COL7A1; (-) strand; PAM type: YTN; PAM sequence: TTC
tctttttccatctctctatc

SEQ ID NO: 24498 - DNA, 20 bp, Artificial Sequence
  Description of Artificial Sequence: Synthetic oligonucleotide
  Target: COL7A1; (-) strand; PAM type: YTN; PAM sequence: CTT
ctctttttccatctctctat

SEQ ID NO: 24499 - DNA, 20 bp, Artificial Sequence
  Description of Artificial Sequence: Synthetic oligonucleotide
  Target: COL7A1; (-) strand; PAM type: YTN; PAM sequence: TTC
ttctctttttccatctctct

SEQ ID NO: 24500 - DNA, 20 bp, Artificial Sequence
  Description of Artificial Sequence: Synthetic oligonucleotide
  Target: COL7A1; (-) strand; PAM type: YTN; PAM sequence: CTT
cttctctttttccatctctc

SEQ ID NO: 24501 - DNA, 20 bp, Artificial Sequence
  Description of Artificial Sequence: Synthetic oligonucleotide
  Target: COL7A1; (-) strand; PAM type: YTN; PAM sequence: CTG
ccttcttctctttttccatc

SEQ ID NO: 24502 - DNA, 20 bp, Artificial Sequence
  Description of Artificial Sequence: Synthetic oligonucleotide
  Target: COL7A1; (-) strand; PAM type: YTN; PAM sequence: CTC
tgccttcttctctttttcca

SEQ ID NO: 24503 - DNA, 20 bp, Artificial Sequence
  Description of Artificial Sequence: Synthetic oligonucleotide
  Target: COL7A1; (-) strand; PAM type: YTN; PAM sequence: CTC
ctctgccttcttctcttttt

SEQ ID NO: 24504 - DNA, 20 bp, Artificial Sequence
  Description of Artificial Sequence: Synthetic oligonucleotide
  Target: COL7A1; (-) strand; PAM type: YTN; PAM sequence: CTC
tcctctgccttcttctcttt

SEQ ID NO: 24505 - DNA, 20 bp, Artificial Sequence
  Description of Artificial Sequence: Synthetic oligonucleotide
  Target: COL7A1; (-) strand; PAM type: YTN; PAM sequence: TTC
cctctcctctgccttcttct

SEQ ID NO: 24506 - DNA, 20 bp, Artificial Sequence
  Description of Artificial Sequence: Synthetic oligonucleotide
  Target: COL7A1; (-) strand; PAM type: YTN; PAM sequence: CTT
ccctctcctctgccttcttc

SEQ ID NO: 24507 - DNA, 20 bp, Artificial Sequence
  Description of Artificial Sequence: Synthetic oligonucleotide
  Target: COL7A1; (-) strand; PAM type: YTN; PAM sequence: TTC
ccaacttccctctcctctgc

SEQ ID NO: 24508 - DNA, 20 bp, Artificial Sequence
  Description of Artificial Sequence: Synthetic oligonucleotide
  Target: COL7A1; (-) strand; PAM type: YTN; PAM sequence: CTG
ttcccaacttccctctcctc

SEQ ID NO: 24509 - DNA, 20 bp, Artificial Sequence
  Description of Artificial Sequence: Synthetic oligonucleotide
  Target: COL7A1; (-) strand; PAM type: YTN; PAM sequence: TTG
gcctgttcccaacttccctc

SEQ ID NO: 24510 - DNA, 20 bp, Artificial Sequence
  Description of Artificial Sequence: Synthetic oligonucleotide
  Target: COL7A1; (-) strand; PAM type: YTN; PAM sequence: TTG
ttggcctgttcccaacttcc

SEQ ID NO: 24511 - DNA, 20 bp, Artificial Sequence
  Description of Artificial Sequence: Synthetic oligonucleotide
  Target: COL7A1; (-) strand; PAM type: YTN; PAM sequence: TTT
gttggcctgttcccaacttc

SEQ ID NO: 24512 - DNA, 20 bp, Artificial Sequence
  Description of Artificial Sequence: Synthetic oligonucleotide
  Target: COL7A1; (-) strand; PAM type: YTN; PAM sequence: TTT
tgttggcctgttcccaactt

SEQ ID NO: 24513 - DNA, 20 bp, Artificial Sequence
  Description of Artificial Sequence: Synthetic oligonucleotide
  Target: COL7A1; (-) strand; PAM type: YTN; PAM sequence: CTT
ttgttggcctgttcccaact

SEQ ID NO: 24514 - DNA, 20 bp, Artificial Sequence
  Description of Artificial Sequence: Synthetic oligonucleotide
  Target: COL7A1; (-) strand; PAM type: YTN; PAM sequence: TTG
ccttttgttggcctgttccc

SEQ ID NO: 24515 - DNA, 20 bp, Artificial Sequence
  Description of Artificial Sequence: Synthetic oligonucleotide
  Target: COL7A1; (-) strand; PAM type: YTN; PAM sequence: CTT
gccttttgttggcctgttcc

SEQ ID NO: 24516 - DNA, 20 bp, Artificial Sequence
  Description of Artificial Sequence: Synthetic oligonucleotide
  Target: COL7A1; (-) strand; PAM type: YTN; PAM sequence: CTC
ttgccttttgttggcctgtt

SEQ ID NO: 24517 - DNA, 20 bp, Artificial Sequence
  Description of Artificial Sequence: Synthetic oligonucleotide
  Target: COL7A1; (-) strand; PAM type: YTN; PAM sequence: CTG
tctcttgccttttgttggcc

SEQ ID NO: 24518 - DNA, 20 bp, Artificial Sequence
  Description of Artificial Sequence: Synthetic oligonucleotide
  Target: COL7A1; (-) strand; PAM type: YTN; PAM sequence: TTC
tgtctcttgccttttgttgg

SEQ ID NO: 24519 - DNA, 20 bp, Artificial Sequence
  Description of Artificial Sequence: Synthetic oligonucleotide
  Target: COL7A1; (-) strand; PAM type: YTN; PAM sequence: CTT
ctgtctcttgccttttgttg

SEQ ID NO: 24520 - DNA, 20 bp, Artificial Sequence
  Description of Artificial Sequence: Synthetic oligonucleotide
  Target: COL7A1; (-) strand; PAM type: YTN; PAM sequence: CTG
cttctgtctcttgccttttg

SEQ ID NO: 24521 - DNA, 20 bp, Artificial Sequence
  Description of Artificial Sequence: Synthetic oligonucleotide
  Target: COL7A1; (-) strand; PAM type: YTN; PAM sequence: CTG
gcctgcttctgtctcttgcc

SEQ ID NO: 24522 - DNA, 20 bp, Artificial Sequence
  Description of Artificial Sequence: Synthetic oligonucleotide
  Target: COL7A1; (-) strand; PAM type: YTN; PAM sequence: CTG
tgtctggcctgcttctgtct

SEQ ID NO: 24523 - DNA, 20 bp, Artificial Sequence
  Description of Artificial Sequence: Synthetic oligonucleotide
  Target: COL7A1; (-) strand; PAM type: YTN; PAM sequence: TTC
tgtgtctggcctgcttctgt

SEQ ID NO: 24524 - DNA, 20 bp, Artificial Sequence
  Description of Artificial Sequence: Synthetic oligonucleotide
  Target: COL7A1; (-) strand; PAM type: YTN; PAM sequence: TTT
ctgtgtctggcctgcttctg

SEQ ID NO: 24525 - DNA, 20 bp, Artificial Sequence
  Description of Artificial Sequence: Synthetic oligonucleotide
  Target: COL7A1; (-) strand; PAM type: YTN; PAM sequence: CTG
tttctgtgtctggcctgctt

SEQ ID NO: 24526 - DNA, 20 bp, Artificial Sequence
  Description of Artificial Sequence: Synthetic oligonucleotide
  Target: COL7A1; (-) strand; PAM type: YTN; PAM sequence: CTG
cctgtttctgtgtctggcct

SEQ ID NO: 24527 - DNA, 20 bp, Artificial Sequence
  Description of Artificial Sequence: Synthetic oligonucleotide
  Target: COL7A1; (-) strand; PAM type: YTN; PAM sequence: CTG
caccacctgcctgtttctgt

SEQ ID NO: 24528 - DNA, 20 bp, Artificial Sequence
  Description of Artificial Sequence: Synthetic oligonucleotide
  Target: COL7A1; (-) strand; PAM type: YTN; PAM sequence: CTG
tctgcaccacctgcctgttt

SEQ ID NO: 24529 - DNA, 20 bp, Artificial Sequence
  Description of Artificial Sequence: Synthetic oligonucleotide
  Target: COL7A1; (-) strand; PAM type: YTN; PAM sequence: CTC
tgtctgcaccacctgcctgt

SEQ ID NO: 24530 - DNA, 20 bp, Artificial Sequence
  Description of Artificial Sequence: Synthetic oligonucleotide
  Target: COL7A1; (-) strand; PAM type: YTN; PAM sequence: TTC
ccgtctctgtctgcaccacc

SEQ ID NO: 24531 - DNA, 20 bp, Artificial Sequence
  Description of Artificial Sequence: Synthetic oligonucleotide
  Target: COL7A1; (-) strand; PAM type: YTN; PAM sequence: CTT
cccgtctctgtctgcaccac

SEQ ID NO: 24532 - DNA, 20 bp, Artificial Sequence
  Description of Artificial Sequence: Synthetic oligonucleotide
  Target: COL7A1; (-) strand; PAM type: YTN; PAM sequence: CTC
ttcccgtctctgtctgcacc

SEQ ID NO: 24533 - DNA, 20 bp, Artificial Sequence
  Description of Artificial Sequence: Synthetic oligonucleotide
  Target: COL7A1; (-) strand; PAM type: YTN; PAM sequence: CTG
tctcttcccgtctctgtctg

SEQ ID NO: 24534 - DNA, 20 bp, Artificial Sequence
  Description of Artificial Sequence: Synthetic oligonucleotide
  Target: COL7A1; (-) strand; PAM type: YTN; PAM sequence: CTG
gacccggtgggaggggcatc

SEQ ID NO: 24535 - DNA, 20 bp, Artificial Sequence
  Description of Artificial Sequence: Synthetic oligonucleotide
  Target: COL7A1; (-) strand; PAM type: YTN; PAM sequence: CTG
acctggacccggtgggaggg

SEQ ID NO: 24536 - DNA, 20 bp, Artificial Sequence
  Description of Artificial Sequence: Synthetic oligonucleotide
  Target: COL7A1; (-) strand; PAM type: YTN; PAM sequence: TTG
ggcctgacctggacccggtg

SEQ ID NO: 24537 - DNA, 20 bp, Artificial Sequence
  Description of Artificial Sequence: Synthetic oligonucleotide
  Target: COL7A1; (-) strand; PAM type: YTN; PAM sequence: CTT
gggcctgacctggacccggt

SEQ ID NO: 24538 - DNA, 20 bp, Artificial Sequence
  Description of Artificial Sequence: Synthetic oligonucleotide
  Target: COL7A1; (-) strand; PAM type: YTN; PAM sequence: CTG
gtccccttgggcctgacctg

SEQ ID NO: 24539 - DNA, 20 bp, Artificial Sequence
  Description of Artificial Sequence: Synthetic oligonucleotide
  Target: COL7A1; (-) strand; PAM type: YTN; PAM sequence: CTG
tgtggggagtgggatgatgg

SEQ ID NO: 24540 - DNA, 20 bp, Artificial Sequence
  Description of Artificial Sequence: Synthetic oligonucleotide
  Target: COL7A1; (-) strand; PAM type: YTN; PAM sequence: TTG
gctgtgtggggagtgggatg

SEQ ID NO: 24541 - DNA, 20 bp, Artificial Sequence
  Description of Artificial Sequence: Synthetic oligonucleotide
  Target: COL7A1; (-) strand; PAM type: YTN; PAM sequence: CTT
ggctgtgtggggagtgggat

SEQ ID NO: 24542 - DNA, 20 bp, Artificial Sequence
  Description of Artificial Sequence: Synthetic oligonucleotide
  Target: COL7A1; (-) strand; PAM type: YTN; PAM sequence: CTC
agatgtccagcttggctgtg

SEQ ID NO: 24543 - DNA, 20 bp, Artificial Sequence
  Description of Artificial Sequence: Synthetic oligonucleotide
  Target: COL7A1; (-) strand; PAM type: YTN; PAM sequence: CTC
tcagatgtccagcttggctg

SEQ ID NO: 24544 - DNA, 20 bp, Artificial Sequence
  Description of Artificial Sequence: Synthetic oligonucleotide
  Target: COL7A1; (-) strand; PAM type: YTN; PAM sequence: TTG
ccatgcagtgctctcagatg

SEQ ID NO: 24545 - DNA, 20 bp, Artificial Sequence
  Description of Artificial Sequence: Synthetic oligonucleotide
  Target: COL7A1; (-) strand; PAM type: YTN; PAM sequence: CTG
acacatgacatgtgtcccca

SEQ ID NO: 24546 - DNA, 20 bp, Artificial Sequence
  Description of Artificial Sequence: Synthetic oligonucleotide
  Target: COL7A1; (-) strand; PAM type: YTN; PAM sequence: CTG
caggactgacacatgacatg

SEQ ID NO: 24547 - DNA, 20 bp, Artificial Sequence
  Description of Artificial Sequence: Synthetic oligonucleotide
  Target: COL7A1; (-) strand; PAM type: YTN; PAM sequence: TTA
cagggcaagcagtcaagaag

SEQ ID NO: 24548 - DNA, 20 bp, Artificial Sequence
  Description of Artificial Sequence: Synthetic oligonucleotide
  Target: COL7A1; (-) strand; PAM type: YTN; PAM sequence: CTT
acagggcaagcagtcaagaa

SEQ ID NO: 24549 - DNA, 20 bp, Artificial Sequence
  Description of Artificial Sequence: Synthetic oligonucleotide
  Target: COL7A1; (-) strand; PAM type: YTN; PAM sequence: CTA
gaacttacagggcaagcagt

SEQ ID NO: 24550 - DNA, 20 bp, Artificial Sequence
  Description of Artificial Sequence: Synthetic oligonucleotide
  Target: COL7A1; (-) strand; PAM type: YTN; PAM sequence: CTA
ggcaagggcaggcaggcccc

SEQ ID NO: 24551 - DNA, 20 bp, Artificial Sequence
  Description of Artificial Sequence: Synthetic oligonucleotide
  Target: COL7A1; (-) strand; PAM type: YTN; PAM sequence: CTC
caccccagcaccctaggcaa

SEQ ID NO: 24552 - DNA, 20 bp, Artificial Sequence
  Description of Artificial Sequence: Synthetic oligonucleotide
  Target: COL7A1; (-) strand; PAM type: YTN; PAM sequence: CTC
ccactccaccccagcaccct

SEQ ID NO: 24553 - DNA, 20 bp, Artificial Sequence
  Description of Artificial Sequence: Synthetic oligonucleotide
  Target: COL7A1; (-) strand; PAM type: YTN; PAM sequence: CTG
tggtgagtggtgcccagccc

SEQ ID NO: 24554 - DNA, 20 bp, Artificial Sequence
  Description of Artificial Sequence: Synthetic oligonucleotide
  Target: COL7A1; (-) strand; PAM type: YTN; PAM sequence: TTG
tgcgccaagagatgagtcag

SEQ ID NO: 24555 - DNA, 20 bp, Artificial Sequence
  Description of Artificial Sequence: Synthetic oligonucleotide
  Target: COL7A1; (-) strand; PAM type: YTN; PAM sequence: TTT
gtgcgccaagagatgagtca

SEQ ID NO: 24556 - DNA, 20 bp, Artificial Sequence
  Description of Artificial Sequence: Synthetic oligonucleotide
  Target: COL7A1; (-) strand; PAM type: YTN; PAM sequence: CTT
tgtgcgccaagagatgagtc

SEQ ID NO: 24557 - DNA, 20 bp, Artificial Sequence
  Description of Artificial Sequence: Synthetic oligonucleotide
  Target: COL7A1; (-) strand; PAM type: YTN; PAM sequence: CTC
ccaggaggatgacatccggg

SEQ ID NO: 24558 - DNA, 20 bp, Artificial Sequence
  Description of Artificial Sequence: Synthetic oligonucleotide
  Target: COL7A1; (-) strand; PAM type: YTN; PAM sequence: CTG
ctcccaggaggatgacatcc

SEQ ID NO: 24559 - DNA, 20 bp, Artificial Sequence
  Description of Artificial Sequence: Synthetic oligonucleotide
  Target: COL7A1; (-) strand; PAM type: YTN; PAM sequence: TTC
tgctcccaggaggatgacat
